United States Patent Application Publication US 2018/0305689 A1 - sequence listing, part 32

SEQ ID NO: 423806 - RNA, 19 nt, Artificial Sequence
  Description of Artificial Sequence: Synthetic oligonucleotide
  Antisense Strand to SEQ ID NO: 423805
aaaggucaacuaaucagga

SEQ ID NO: 423807 - RNA, 19 nt, Artificial Sequence
  Description of Artificial Sequence: Synthetic oligonucleotide
  Sense Strand Starting at position 1339 of SEQ ID NO: 316335
ccaugaucagcuugcauuu

SEQ ID NO: 423808 - RNA, 19 nt, Artificial Sequence
  Description of Artificial Sequence: Synthetic oligonucleotide
  Antisense Strand to SEQ ID NO: 423807
aaaugcaagcugaucaugg

SEQ ID NO: 423809 - RNA, 19 nt, Artificial Sequence
  Description of Artificial Sequence: Synthetic oligonucleotide
  Sense Strand Starting at position 1339 of SEQ ID NO: 316525
guuguuauucugcuugucu

SEQ ID NO: 423810 - RNA, 19 nt, Artificial Sequence
  Description of Artificial Sequence: Synthetic oligonucleotide
  Antisense Strand to SEQ ID NO: 423809
agacaagcagaauaacaac

SEQ ID NO: 423811 - RNA, 19 nt, Artificial Sequence
  Description of Artificial Sequence: Synthetic oligonucleotide
  Sense Strand Starting at position 1339 of SEQ ID NO: 316609
uccagauagcagggauaau

SEQ ID NO: 423812 - RNA, 19 nt, Artificial Sequence
  Description of Artificial Sequence: Synthetic oligonucleotide
  Antisense Strand to SEQ ID NO: 423811
auuaucccugcuaucugga

SEQ ID NO: 423813 - RNA, 19 nt, Artificial Sequence
  Description of Artificial Sequence: Synthetic oligonucleotide
  Sense Strand Starting at position 1339 of SEQ ID NO: 316651
gacuguuaucgucacauga

SEQ ID NO: 423814 - RNA, 19 nt, Artificial Sequence
  Description of Artificial Sequence: Synthetic oligonucleotide
  Antisense Strand to SEQ ID NO: 423813
ucaugugacgauaacaguc

SEQ ID NO: 423815 - RNA, 19 nt, Artificial Sequence
  Description of Artificial Sequence: Synthetic oligonucleotide
  Sense Strand Starting at position 1339 of SEQ ID NO: 317380
auaagaagcuagucuccaa

SEQ ID NO: 423816 - RNA, 19 nt, Artificial Sequence
  Description of Artificial Sequence: Synthetic oligonucleotide
  Antisense Strand to SEQ ID NO: 423815
uuggagacuagcuucuuau

SEQ ID NO: 423817 - RNA, 19 nt, Artificial Sequence
  Description of Artificial Sequence: Synthetic oligonucleotide
  Sense Strand Starting at position 1339 of SEQ ID NO: 317509
gaguaugcacuguacaaug

SEQ ID NO: 423818 - RNA, 19 nt, Artificial Sequence
  Description of Artificial Sequence: Synthetic oligonucleotide
  Antisense Strand to SEQ ID NO: 423817
cauuguacagugcauacuc

SEQ ID NO: 423819 - RNA, 19 nt, Artificial Sequence
  Description of Artificial Sequence: Synthetic oligonucleotide
  Sense Strand Starting at position 1339 of SEQ ID NO: 317570
acaucuguugaugaucgau

SEQ ID NO: 423820 - RNA, 19 nt, Artificial Sequence
  Description of Artificial Sequence: Synthetic oligonucleotide
  Antisense Strand to SEQ ID NO: 423819
aucgaucaucaacagaugu

SEQ ID NO: 423821 - RNA, 19 nt, Artificial Sequence
  Description of Artificial Sequence: Synthetic oligonucleotide
  Sense Strand Starting at position 1339 of SEQ ID NO: 317945
acaugaaacccuuggaugu

SEQ ID NO: 423822 - RNA, 19 nt, Artificial Sequence
  Description of Artificial Sequence: Synthetic oligonucleotide
  Antisense Strand to SEQ ID NO: 423821
acauccaaggguuucaugu

SEQ ID NO: 423823 - RNA, 19 nt, Artificial Sequence
  Description of Artificial Sequence: Synthetic oligonucleotide
  Sense Strand Starting at position 1339 of SEQ ID NO: 317977
ggaaucagcuucuugaauu

SEQ ID NO: 423824 - RNA, 19 nt, Artificial Sequence
  Description of Artificial Sequence: Synthetic oligonucleotide
  Antisense Strand to SEQ ID NO: 423823
aauucaagaagcugauucc

SEQ ID NO: 423825 - RNA, 19 nt, Artificial Sequence
  Description of Artificial Sequence: Synthetic oligonucleotide
  Sense Strand Starting at position 1339 of SEQ ID NO: 318057
cucaauauuuacgcaaugu

SEQ ID NO: 423826 - RNA, 19 nt, Artificial Sequence
  Description of Artificial Sequence: Synthetic oligonucleotide
  Antisense Strand to SEQ ID NO: 423825
acauugcguaaauauugag

SEQ ID NO: 423827 - RNA, 19 nt, Artificial Sequence
  Description of Artificial Sequence: Synthetic oligonucleotide
  Sense Strand Starting at position 1339 of SEQ ID NO: 318256
gaucacaggcaucauaguu

SEQ ID NO: 423828 - RNA, 19 nt, Artificial Sequence
  Description of Artificial Sequence: Synthetic oligonucleotide
  Antisense Strand to SEQ ID NO: 423827
aacuaugaugccugugauc

SEQ ID NO: 423829 - RNA, 19 nt, Artificial Sequence
  Description of Artificial Sequence: Synthetic oligonucleotide
  Sense Strand Starting at position 1339 of SEQ ID NO: 318280
agaacacguuucuucuaga

SEQ ID NO: 423830 - RNA, 19 nt, Artificial Sequence
  Description of Artificial Sequence: Synthetic oligonucleotide
  Antisense Strand to SEQ ID NO: 423829
ucuagaagaaacguguucu

SEQ ID NO: 423831 - RNA, 19 nt, Artificial Sequence
  Description of Artificial Sequence: Synthetic oligonucleotide
  Sense Strand Starting at position 1339 of SEQ ID NO: 318281
gaacacguuucuucuagaa

SEQ ID NO: 423832 - RNA, 19 nt, Artificial Sequence
  Description of Artificial Sequence: Synthetic oligonucleotide
  Antisense Strand to SEQ ID NO: 423831
uucuagaagaaacguguuc

SEQ ID NO: 423833 - RNA, 19 nt, Artificial Sequence
  Description of Artificial Sequence: Synthetic oligonucleotide
  Sense Strand Starting at position 1339 of SEQ ID NO: 318294
cuagaaggcucucccagaa

SEQ ID NO: 423834 - RNA, 19 nt, Artificial Sequence
  Description of Artificial Sequence: Synthetic oligonucleotide
  Antisense Strand to SEQ ID NO: 423833
uucugggagagccuucuag

SEQ ID NO: 423835 - RNA, 19 nt, Artificial Sequence
  Description of Artificial Sequence: Synthetic oligonucleotide
  Sense Strand Starting at position 1339 of SEQ ID NO: 318324
uguguugcgauuugaagau

SEQ ID NO: 423836 - RNA, 19 nt, Artificial Sequence
  Description of Artificial Sequence: Synthetic oligonucleotide
  Antisense Strand to SEQ ID NO: 423835
aucuucaaaucgcaacaca

SEQ ID NO: 423837 - RNA, 19 nt, Artificial Sequence
  Description of Artificial Sequence: Synthetic oligonucleotide
  Sense Strand Starting at position 1339 of SEQ ID NO: 318442
ucuguagaagagugauuau

SEQ ID NO: 423838 - RNA, 19 nt, Artificial Sequence
  Description of Artificial Sequence: Synthetic oligonucleotide
  Antisense Strand to SEQ ID NO: 423837
auaaucacucuucuacaga

SEQ ID NO: 423839 - RNA, 19 nt, Artificial Sequence
  Description of Artificial Sequence: Synthetic oligonucleotide
  Sense Strand Starting at position 1339 of SEQ ID NO: 318445
guagaagagugauuauccu

SEQ ID NO: 423840 - RNA, 19 nt, Artificial Sequence
  Description of Artificial Sequence: Synthetic oligonucleotide
  Antisense Strand to SEQ ID NO: 423839
aggauaaucacucuucuac

SEQ ID NO: 423841 - RNA, 19 nt, Artificial Sequence
  Description of Artificial Sequence: Synthetic oligonucleotide
  Sense Strand Starting at position 1339 of SEQ ID NO: 318449
aagagugauuauccuugaa

SEQ ID NO: 423842 - RNA, 19 nt, Artificial Sequence
  Description of Artificial Sequence: Synthetic oligonucleotide
  Antisense Strand to SEQ ID NO: 423841
uucaaggauaaucacucuu

SEQ ID NO: 423843 - RNA, 19 nt, Artificial Sequence
  Description of Artificial Sequence: Synthetic oligonucleotide
  Sense Strand Starting at position 1339 of SEQ ID NO: 318451
gagugauuauccuugaaga

SEQ ID NO: 423844 - RNA, 19 nt, Artificial Sequence
  Description of Artificial Sequence: Synthetic oligonucleotide
  Antisense Strand to SEQ ID NO: 423843
ucuucaaggauaaucacuc

SEQ ID NO: 423845 - RNA, 19 nt, Artificial Sequence
  Description of Artificial Sequence: Synthetic oligonucleotide
  Sense Strand Starting at position 1339 of SEQ ID NO: 318452
agugauuauccuugaagag

SEQ ID NO: 423846 - RNA, 19 nt, Artificial Sequence
  Description of Artificial Sequence: Synthetic oligonucleotide
  Antisense Strand to SEQ ID NO: 423845
cucuucaaggauaaucacu

SEQ ID NO: 423847 - RNA, 19 nt, Artificial Sequence
  Description of Artificial Sequence: Synthetic oligonucleotide
  Sense Strand Starting at position 1339 of SEQ ID NO: 318453
gugauuauccuugaagagu

SEQ ID NO: 423848 - RNA, 19 nt, Artificial Sequence
  Description of Artificial Sequence: Synthetic oligonucleotide
  Antisense Strand to SEQ ID NO: 423847
acucuucaaggauaaucac

SEQ ID NO: 423849 - RNA, 19 nt, Artificial Sequence
  Description of Artificial Sequence: Synthetic oligonucleotide
  Sense Strand Starting at position 1339 of SEQ ID NO: 318493
gauuuaucaccgugucauc

SEQ ID NO: 423850 - RNA, 19 nt, Artificial Sequence
  Description of Artificial Sequence: Synthetic oligonucleotide
  Antisense Strand to SEQ ID NO: 423849
gaugacacggugauaaauc

SEQ ID NO: 423851 - RNA, 19 nt, Artificial Sequence
  Description of Artificial Sequence: Synthetic oligonucleotide
  Sense Strand Starting at position 1339 of SEQ ID NO: 318565
agccauguccuauagacau

SEQ ID NO: 423852 - RNA, 19 nt, Artificial Sequence
  Description of Artificial Sequence: Synthetic oligonucleotide
  Antisense Strand to SEQ ID NO: 423851
augucuauaggacauggcu

SEQ ID NO: 423853 - RNA, 19 nt, Artificial Sequence
  Description of Artificial Sequence: Synthetic oligonucleotide
  Sense Strand Starting at position 1339 of SEQ ID NO: 318572
uccuauagacauggacuau

SEQ ID NO: 423854 - RNA, 19 nt, Artificial Sequence
  Description of Artificial Sequence: Synthetic oligonucleotide
  Antisense Strand to SEQ ID NO: 423853
auaguccaugucuauagga

SEQ ID NO: 423855 - RNA, 19 nt, Artificial Sequence
  Description of Artificial Sequence: Synthetic oligonucleotide
  Sense Strand Starting at position 1339 of SEQ ID NO: 319055
agguuucugacagaagguu

SEQ ID NO: 423856 - RNA, 19 nt, Artificial Sequence
  Description of Artificial Sequence: Synthetic oligonucleotide
  Antisense Strand to SEQ ID NO: 423855
aaccuucugucagaaaccu

SEQ ID NO: 423857 - RNA, 19 nt, Artificial Sequence
  Description of Artificial Sequence: Synthetic oligonucleotide
  Sense Strand Starting at position 1339 of SEQ ID NO: 319064
acagaagguuccuugggau

SEQ ID NO: 423858 - RNA, 19 nt, Artificial Sequence
  Description of Artificial Sequence: Synthetic oligonucleotide
  Antisense Strand to SEQ ID NO: 423857
aucccaaggaaccuucugu

SEQ ID NO: 423859 - RNA, 19 nt, Artificial Sequence
  Description of Artificial Sequence: Synthetic oligonucleotide
  Sense Strand Starting at position 1339 of SEQ ID NO: 319171
ggauccuuccaagguaaau

SEQ ID NO: 423860 - RNA, 19 nt, Artificial Sequence
  Description of Artificial Sequence: Synthetic oligonucleotide
  Antisense Strand to SEQ ID NO: 423859
auuuaccuuggaaggaucc

SEQ ID NO: 423861 - RNA, 19 nt, Artificial Sequence
  Description of Artificial Sequence: Synthetic oligonucleotide
  Sense Strand Starting at position 1340 of SEQ ID NO: 315496
gguaccuugccucacugau

SEQ ID NO: 423862 - RNA, 19 nt, Artificial Sequence
  Description of Artificial Sequence: Synthetic oligonucleotide
  Antisense Strand to SEQ ID NO: 423861
aucagugaggcaagguacc

SEQ ID NO: 423863 - RNA, 19 nt, Artificial Sequence
  Description of Artificial Sequence: Synthetic oligonucleotide
  Sense Strand Starting at position 1340 of SEQ ID NO: 315502
uugccucacugaugagaag

SEQ ID NO: 423864 - RNA, 19 nt, Artificial Sequence
  Description of Artificial Sequence: Synthetic oligonucleotide
  Antisense Strand to SEQ ID NO: 423863
cuucucaucagugaggcaa

SEQ ID NO: 423865 - RNA, 19 nt, Artificial Sequence
  Description of Artificial Sequence: Synthetic oligonucleotide
  Sense Strand Starting at position 1340 of SEQ ID NO: 316489
cgccgucuggacgcuuaaa

SEQ ID NO: 423866 - RNA, 19 nt, Artificial Sequence
  Description of Artificial Sequence: Synthetic oligonucleotide
  Antisense Strand to SEQ ID NO: 423865
uuuaagcguccagacggcg

SEQ ID NO: 423867 - RNA, 19 nt, Artificial Sequence
  Description of Artificial Sequence: Synthetic oligonucleotide
  Sense Strand Starting at position 1340 of SEQ ID NO: 316686
uccuuucugccgggaaguu

SEQ ID NO: 423868 - RNA, 19 nt, Artificial Sequence
  Description of Artificial Sequence: Synthetic oligonucleotide
  Antisense Strand to SEQ ID NO: 423867
aacuucccggcagaaagga

SEQ ID NO: 423869 - RNA, 19 nt, Artificial Sequence
  Description of Artificial Sequence: Synthetic oligonucleotide
  Sense Strand Starting at position 1340 of SEQ ID NO: 316697
gggaaguucguccgggagu

SEQ ID NO: 423870 - RNA, 19 nt, Artificial Sequence
  Description of Artificial Sequence: Synthetic oligonucleotide
  Antisense Strand to SEQ ID NO: 423869
acucccggacgaacuuccc

SEQ ID NO: 423871 - RNA, 19 nt, Artificial Sequence
  Description of Artificial Sequence: Synthetic oligonucleotide
  Sense Strand Starting at position 1340 of SEQ ID NO: 316699
gaaguucguccgggaguca

SEQ ID NO: 423872 - RNA, 19 nt, Artificial Sequence
  Description of Artificial Sequence: Synthetic oligonucleotide
  Antisense Strand to SEQ ID NO: 423871
ugacucccggacgaacuuc

SEQ ID NO: 423873 - RNA, 19 nt, Artificial Sequence
  Description of Artificial Sequence: Synthetic oligonucleotide
  Sense Strand Starting at position 1340 of SEQ ID NO: 316700
aaguucguccgggagucaa

SEQ ID NO: 423874 - RNA, 19 nt, Artificial Sequence
  Description of Artificial Sequence: Synthetic oligonucleotide
  Antisense Strand to SEQ ID NO: 423873
uugacucccggacgaacuu

SEQ ID NO: 423875 - RNA, 19 nt, Artificial Sequence
  Description of Artificial Sequence: Synthetic oligonucleotide
  Sense Strand Starting at position 1340 of SEQ ID NO: 316760
auaggaagcugccgugaaa

SEQ ID NO: 423876 - RNA, 19 nt, Artificial Sequence
  Description of Artificial Sequence: Synthetic oligonucleotide
  Antisense Strand to SEQ ID NO: 423875
uuucacggcagcuuccuau

SEQ ID NO: 423877 - RNA, 19 nt, Artificial Sequence
  Description of Artificial Sequence: Synthetic oligonucleotide
  Sense Strand Starting at position 1340 of SEQ ID NO: 316763
ggaagcugccgugaaauca

SEQ ID NO: 423878 - RNA, 19 nt, Artificial Sequence
  Description of Artificial Sequence: Synthetic oligonucleotide
  Antisense Strand to SEQ ID NO: 423877
ugauuucacggcagcuucc

SEQ ID NO: 423879 - RNA, 19 nt, Artificial Sequence
  Description of Artificial Sequence: Synthetic oligonucleotide
  Sense Strand Starting at position 1340 of SEQ ID NO: 317267
gcggaaugcugcucuggca

SEQ ID NO: 423880 - RNA, 19 nt, Artificial Sequence
  Description of Artificial Sequence: Synthetic oligonucleotide
  Antisense Strand to SEQ ID NO: 423879
ugccagagcagcauuccgc

SEQ ID NO: 423881 - RNA, 19 nt, Artificial Sequence
  Description of Artificial Sequence: Synthetic oligonucleotide
  Sense Strand Starting at position 1340 of SEQ ID NO: 317532
acauaugugcgcuuguguu

SEQ ID NO: 423882 - RNA, 19 nt, Artificial Sequence
  Description of Artificial Sequence: Synthetic oligonucleotide
  Antisense Strand to SEQ ID NO: 423881
aacacaagcgcacauaugu

SEQ ID NO: 423883 - RNA, 19 nt, Artificial Sequence
  Description of Artificial Sequence: Synthetic oligonucleotide
  Sense Strand Starting at position 1340 of SEQ ID NO: 317534
auaugugcgcuuguguuua

SEQ ID NO: 423884 - RNA, 19 nt, Artificial Sequence
  Description of Artificial Sequence: Synthetic oligonucleotide
  Antisense Strand to SEQ ID NO: 423883
uaaacacaagcgcacauau

SEQ ID NO: 423885 - RNA, 19 nt, Artificial Sequence
  Description of Artificial Sequence: Synthetic oligonucleotide
  Sense Strand Starting at position 1340 of SEQ ID NO: 317538
gugcgcuuguguuuacaua

SEQ ID NO: 423886 - RNA, 19 nt, Artificial Sequence
  Description of Artificial Sequence: Synthetic oligonucleotide
  Antisense Strand to SEQ ID NO: 423885
uauguaaacacaagcgcac

SEQ ID NO: 423887 - RNA, 19 nt, Artificial Sequence
  Description of Artificial Sequence: Synthetic oligonucleotide
  Sense Strand Starting at position 1340 of SEQ ID NO: 317576
agcaguaucuccuggguau

SEQ ID NO: 423888 - RNA, 19 nt, Artificial Sequence
  Description of Artificial Sequence: Synthetic oligonucleotide
  Antisense Strand to SEQ ID NO: 423887
auacccaggagauacugcu

SEQ ID NO: 423889 - RNA, 19 nt, Artificial Sequence
  Description of Artificial Sequence: Synthetic oligonucleotide
  Sense Strand Starting at position 1340 of SEQ ID NO: 317577
gcaguaucuccuggguaug

SEQ ID NO: 423890 - RNA, 19 nt, Artificial Sequence
  Description of Artificial Sequence: Synthetic oligonucleotide
  Antisense Strand to SEQ ID NO: 423889
cauacccaggagauacugc

SEQ ID NO: 423891 - RNA, 19 nt, Artificial Sequence
  Description of Artificial Sequence: Synthetic oligonucleotide
  Sense Strand Starting at position 1340 of SEQ ID NO: 317579
aguaucuccuggguauguu

SEQ ID NO: 423892 - RNA, 19 nt, Artificial Sequence
  Description of Artificial Sequence: Synthetic oligonucleotide
  Antisense Strand to SEQ ID NO: 423891
aacauacccaggagauacu

SEQ ID NO: 423893 - RNA, 19 nt, Artificial Sequence
  Description of Artificial Sequence: Synthetic oligonucleotide
  Sense Strand Starting at position 1340 of SEQ ID NO: 317587
cuggguauguuguccuacu

SEQ ID NO: 423894 - RNA, 19 nt, Artificial Sequence
  Description of Artificial Sequence: Synthetic oligonucleotide
  Antisense Strand to SEQ ID NO: 423893
aguaggacaacauacccag

SEQ ID NO: 423895 - RNA, 19 nt, Artificial Sequence
  Description of Artificial Sequence: Synthetic oligonucleotide
  Sense Strand Starting at position 1340 of SEQ ID NO: 317644
cuugguucuaggugccaga

SEQ ID NO: 423896 - RNA, 19 nt, Artificial Sequence
  Description of Artificial Sequence: Synthetic oligonucleotide
  Antisense Strand to SEQ ID NO: 423895
ucuggcaccuagaaccaag

SEQ ID NO: 423897 - RNA, 19 nt, Artificial Sequence
  Description of Artificial Sequence: Synthetic oligonucleotide
  Sense Strand Starting at position 1340 of SEQ ID NO: 317689
uuaggcaggugcugugaaa

SEQ ID NO: 423898 - RNA, 19 nt, Artificial Sequence
  Description of Artificial Sequence: Synthetic oligonucleotide
  Antisense Strand to SEQ ID NO: 423897
uuucacagcaccugccuaa

SEQ ID NO: 423899 - RNA, 19 nt, Artificial Sequence
  Description of Artificial Sequence: Synthetic oligonucleotide
  Sense Strand Starting at position 1340 of SEQ ID NO: 317714
gauggucuguccuguaaga

SEQ ID NO: 423900 - RNA, 19 nt, Artificial Sequence
  Description of Artificial Sequence: Synthetic oligonucleotide
  Antisense Strand to SEQ ID NO: 423899
ucuuacaggacagaccauc

SEQ ID NO: 423901 - RNA, 19 nt, Artificial Sequence
  Description of Artificial Sequence: Synthetic oligonucleotide
  Sense Strand Starting at position 1340 of SEQ ID NO: 317716
uggucuguccuguaagauu

SEQ ID NO: 423902 - RNA, 19 nt, Artificial Sequence
  Description of Artificial Sequence: Synthetic oligonucleotide
  Antisense Strand to SEQ ID NO: 423901
aaucuuacaggacagacca

SEQ ID NO: 423903 - RNA, 19 nt, Artificial Sequence
  Description of Artificial Sequence: Synthetic oligonucleotide
  Sense Strand Starting at position 1340 of SEQ ID NO: 317950
acaugcuucugaccagcua

SEQ ID NO: 423904 - RNA, 19 nt, Artificial Sequence
  Description of Artificial Sequence: Synthetic oligonucleotide
  Antisense Strand to SEQ ID NO: 423903
uagcuggucagaagcaugu

SEQ ID NO: 423905 - RNA, 19 nt, Artificial Sequence
  Description of Artificial Sequence: Synthetic oligonucleotide
  Sense Strand Starting at position 1340 of SEQ ID NO: 318073
gugcccauugguuggauaa

SEQ ID NO: 423906 - RNA, 19 nt, Artificial Sequence
  Description of Artificial Sequence: Synthetic oligonucleotide
  Antisense Strand to SEQ ID NO: 423905
uuauccaaccaaugggcac

SEQ ID NO: 423907 - RNA, 19 nt, Artificial Sequence
  Description of Artificial Sequence: Synthetic oligonucleotide
  Sense Strand Starting at position 1340 of SEQ ID NO: 318101
ggcucagagcgggacaaau

SEQ ID NO: 423908 - RNA, 19 nt, Artificial Sequence
  Description of Artificial Sequence: Synthetic oligonucleotide
  Antisense Strand to SEQ ID NO: 423907
auuugucccgcucugagcc

SEQ ID NO: 423909 - RNA, 19 nt, Artificial Sequence
  Description of Artificial Sequence: Synthetic oligonucleotide
  Sense Strand Starting at position 1340 of SEQ ID NO: 318203
gagagcugcaugggacauu

SEQ ID NO: 423910 - RNA, 19 nt, Artificial Sequence
  Description of Artificial Sequence: Synthetic oligonucleotide
  Antisense Strand to SEQ ID NO: 423909
aaugucccaugcagcucuc

SEQ ID NO: 423911 - RNA, 19 nt, Artificial Sequence
  Description of Artificial Sequence: Synthetic oligonucleotide
  Sense Strand Starting at position 1340 of SEQ ID NO: 318266
gcgugacugagguagugau

SEQ ID NO: 423912 - RNA, 19 nt, Artificial Sequence
  Description of Artificial Sequence: Synthetic oligonucleotide
  Antisense Strand to SEQ ID NO: 423911
aucacuaccucagucacgc

SEQ ID NO: 423913 - RNA, 19 nt, Artificial Sequence
  Description of Artificial Sequence: Synthetic oligonucleotide
  Sense Strand Starting at position 1340 of SEQ ID NO: 318276
gguagugaugcuggcccua

SEQ ID NO: 423914 - RNA, 19 nt, Artificial Sequence
  Description of Artificial Sequence: Synthetic oligonucleotide
  Antisense Strand to SEQ ID NO: 423913
uagggccagcaucacuacc

SEQ ID NO: 423915 - RNA, 19 nt, Artificial Sequence
  Description of Artificial Sequence: Synthetic oligonucleotide
  Sense Strand Starting at position 1340 of SEQ ID NO: 318521
aggagugguuugaagagcu

SEQ ID NO: 423916 - RNA, 19 nt, Artificial Sequence
  Description of Artificial Sequence: Synthetic oligonucleotide
  Antisense Strand to SEQ ID NO: 423915
agcucuucaaaccacuccu

SEQ ID NO: 423917 - RNA, 19 nt, Artificial Sequence
  Description of Artificial Sequence: Synthetic oligonucleotide
  Sense Strand Starting at position 1340 of SEQ ID NO: 318565
agagcugaggcuugaacuu

SEQ ID NO: 423918 - RNA, 19 nt, Artificial Sequence
  Description of Artificial Sequence: Synthetic oligonucleotide
  Antisense Strand to SEQ ID NO: 423917
aaguucaagccucagcucu

SEQ ID NO: 423919 - RNA, 19 nt, Artificial Sequence
  Description of Artificial Sequence: Synthetic oligonucleotide
  Sense Strand Starting at position 1340 of SEQ ID NO: 318701
gagucaagauuccuaucga

SEQ ID NO: 423920 - RNA, 19 nt, Artificial Sequence
  Description of Artificial Sequence: Synthetic oligonucleotide
  Antisense Strand to SEQ ID NO: 423919
ucgauaggaaucuugacuc

SEQ ID NO: 423921 - RNA, 19 nt, Artificial Sequence
  Description of Artificial Sequence: Synthetic oligonucleotide
  Sense Strand Starting at position 1340 of SEQ ID NO: 318702
agucaagauuccuaucgau

SEQ ID NO: 423922 - RNA, 19 nt, Artificial Sequence
  Description of Artificial Sequence: Synthetic oligonucleotide
  Antisense Strand to SEQ ID NO: 423921
aucgauaggaaucuugacu

SEQ ID NO: 423923 - RNA, 19 nt, Artificial Sequence
  Description of Artificial Sequence: Synthetic oligonucleotide
  Sense Strand Starting at position 1340 of SEQ ID NO: 318709
auuccuaucgaucaggagu

SEQ ID NO: 423924 - RNA, 19 nt, Artificial Sequence
  Description of Artificial Sequence: Synthetic oligonucleotide
  Antisense Strand to SEQ ID NO: 423923
acuccugaucgauaggaau

SEQ ID NO: 423925 - RNA, 19 nt, Artificial Sequence
  Description of Artificial Sequence: Synthetic oligonucleotide
  Sense Strand Starting at position 1340 of SEQ ID NO: 318867
ggaguugacuccugggcca

SEQ ID NO: 423926 - RNA, 19 nt, Artificial Sequence
  Description of Artificial Sequence: Synthetic oligonucleotide
  Antisense Strand to SEQ ID NO: 423925
uggcccaggagucaacucc

SEQ ID NO: 423927 - RNA, 19 nt, Artificial Sequence
  Description of Artificial Sequence: Synthetic oligonucleotide
  Sense Strand Starting at position 1340 of SEQ ID NO: 318869
aguugacuccugggccaga

SEQ ID NO: 423928 - RNA, 19 nt, Artificial Sequence
  Description of Artificial Sequence: Synthetic oligonucleotide
  Antisense Strand to SEQ ID NO: 423927
ucuggcccaggagucaacu

SEQ ID NO: 423929 - RNA, 19 nt, Artificial Sequence
  Description of Artificial Sequence: Synthetic oligonucleotide
  Sense Strand Starting at position 1340 of SEQ ID NO: 318870
guugacuccugggccagaa

SEQ ID NO: 423930 - RNA, 19 nt, Artificial Sequence
  Description of Artificial Sequence: Synthetic oligonucleotide
  Antisense Strand to SEQ ID NO: 423929
uucuggcccaggagucaac

SEQ ID NO: 423931 - RNA, 19 nt, Artificial Sequence
  Description of Artificial Sequence: Synthetic oligonucleotide
  Sense Strand Starting at position 1340 of SEQ ID NO: 318939
ggcagagcuuagugauccu

SEQ ID NO: 423932 - RNA, 19 nt, Artificial Sequence
  Description of Artificial Sequence: Synthetic oligonucleotide
  Antisense Strand to SEQ ID NO: 423931
aggaucacuaagcucugcc

SEQ ID NO: 423933 - RNA, 19 nt, Artificial Sequence
  Description of Artificial Sequence: Synthetic oligonucleotide
  Sense Strand Starting at position 1340 of SEQ ID NO: 318968
gggauuggguccugacaag

SEQ ID NO: 423934 - RNA, 19 nt, Artificial Sequence
  Description of Artificial Sequence: Synthetic oligonucleotide
  Antisense Strand to SEQ ID NO: 423933
cuugucaggacccaauccc

SEQ ID NO: 423935 - RNA, 19 nt, Artificial Sequence
  Description of Artificial Sequence: Synthetic oligonucleotide
  Sense Strand Starting at position 1340 of SEQ ID NO: 319014
gaagacagcucauggguuu

SEQ ID NO: 423936 - RNA, 19 nt, Artificial Sequence
  Description of Artificial Sequence: Synthetic oligonucleotide
  Antisense Strand to SEQ ID NO: 423935
aaacccaugagcugucuuc

SEQ ID NO: 423937 - RNA, 19 nt, Artificial Sequence
  Description of Artificial Sequence: Synthetic oligonucleotide
  Sense Strand Starting at position 1340 of SEQ ID NO: 319046
cuaaguaucuacccucagu

SEQ ID NO: 423938 - RNA, 19 nt, Artificial Sequence
  Description of Artificial Sequence: Synthetic oligonucleotide
  Antisense Strand to SEQ ID NO: 423937
acugaggguagauacuuag

SEQ ID NO: 423939 - RNA, 19 nt, Artificial Sequence
  Description of Artificial Sequence: Synthetic oligonucleotide
  Sense Strand Starting at position 1341 of SEQ ID NO: 315237
uggauagaauguucuacau

SEQ ID NO: 423940 - RNA, 19 nt, Artificial Sequence
  Description of Artificial Sequence: Synthetic oligonucleotide
  Antisense Strand to SEQ ID NO: 423939
auguagaacauucuaucca

SEQ ID NO: 423941 - RNA, 19 nt, Artificial Sequence
  Description of Artificial Sequence: Synthetic oligonucleotide
  Sense Strand Starting at position 1341 of SEQ ID NO: 315642
gagucucaugggcagcaua

SEQ ID NO: 423942 - RNA, 19 nt, Artificial Sequence
  Description of Artificial Sequence: Synthetic oligonucleotide
  Antisense Strand to SEQ ID NO: 423941
uaugcugcccaugagacuc

SEQ ID NO: 423943 - RNA, 19 nt, Artificial Sequence
  Description of Artificial Sequence: Synthetic oligonucleotide
  Sense Strand Starting at position 1341 of SEQ ID NO: 316235
gucuauuauuuguuccacu

SEQ ID NO: 423944 - RNA, 19 nt, Artificial Sequence
  Description of Artificial Sequence: Synthetic oligonucleotide
  Antisense Strand to SEQ ID NO: 423943
aguggaacaaauaauagac

SEQ ID NO: 423945 - RNA, 19 nt, Artificial Sequence
  Description of Artificial Sequence: Synthetic oligonucleotide
  Sense Strand Starting at position 1341 of SEQ ID NO: 316262
ggauguuguuaauuggacu

SEQ ID NO: 423946 - RNA, 19 nt, Artificial Sequence
  Description of Artificial Sequence: Synthetic oligonucleotide
  Antisense Strand to SEQ ID NO: 423945
aguccaauuaacaacaucc

SEQ ID NO: 423947 - RNA, 19 nt, Artificial Sequence
  Description of Artificial Sequence: Synthetic oligonucleotide
  Sense Strand Starting at position 1341 of SEQ ID NO: 316801
augaauucccuuuggcaaa

SEQ ID NO: 423948 - RNA, 19 nt, Artificial Sequence
  Description of Artificial Sequence: Synthetic oligonucleotide
  Antisense Strand to SEQ ID NO: 423947
uuugccaaagggaauucau

SEQ ID NO: 423949 - RNA, 19 nt, Artificial Sequence
  Description of Artificial Sequence: Synthetic oligonucleotide
  Sense Strand Starting at position 1341 of SEQ ID NO: 316914
ucuaauuuguggcuaacuu

SEQ ID NO: 423950 - RNA, 19 nt, Artificial Sequence
  Description of Artificial Sequence: Synthetic oligonucleotide
  Antisense Strand to SEQ ID NO: 423949
aaguuagccacaaauuaga

SEQ ID NO: 423951 - RNA, 19 nt, Artificial Sequence
  Description of Artificial Sequence: Synthetic oligonucleotide
  Sense Strand Starting at position 1341 of SEQ ID NO: 316921
uguggcuaacuuugggaaa

SEQ ID NO: 423952 - RNA, 19 nt, Artificial Sequence
  Description of Artificial Sequence: Synthetic oligonucleotide
  Antisense Strand to SEQ ID NO: 423951
uuucccaaaguuagccaca

SEQ ID NO: 423953 - RNA, 19 nt, Artificial Sequence
  Description of Artificial Sequence: Synthetic oligonucleotide
  Sense Strand Starting at position 1341 of SEQ ID NO: 316993
agaaguuauacaggugaau

SEQ ID NO: 423954 - RNA, 19 nt, Artificial Sequence
  Description of Artificial Sequence: Synthetic oligonucleotide
  Antisense Strand to SEQ ID NO: 423953
auucaccuguauaacuucu

SEQ ID NO: 423955 - RNA, 19 nt, Artificial Sequence
  Description of Artificial Sequence: Synthetic oligonucleotide
  Sense Strand Starting at position 1341 of SEQ ID NO: 317354
aacuuuggguaggaaauuu

SEQ ID NO: 423956 - RNA, 19 nt, Artificial Sequence
  Description of Artificial Sequence: Synthetic oligonucleotide
  Antisense Strand to SEQ ID NO: 423955
aaauuuccuacccaaaguu

SEQ ID NO: 423957 - RNA, 19 nt, Artificial Sequence
  Description of Artificial Sequence: Synthetic oligonucleotide
  Sense Strand Starting at position 1341 of SEQ ID NO: 317452
acuacauuaugguuaagua

SEQ ID NO: 423958 - RNA, 19 nt, Artificial Sequence
  Description of Artificial Sequence: Synthetic oligonucleotide
  Antisense Strand to SEQ ID NO: 423957
uacuuaaccauaauguagu

SEQ ID NO: 423959 - RNA, 19 nt, Artificial Sequence
  Description of Artificial Sequence: Synthetic oligonucleotide
  Sense Strand Starting at position 1341 of SEQ ID NO: 317453
cuacauuaugguuaaguaa

SEQ ID NO: 423960 - RNA, 19 nt, Artificial Sequence
  Description of Artificial Sequence: Synthetic oligonucleotide
  Antisense Strand to SEQ ID NO: 423959
uuacuuaaccauaauguag

SEQ ID NO: 423961 - RNA, 19 nt, Artificial Sequence
  Description of Artificial Sequence: Synthetic oligonucleotide
  Sense Strand Starting at position 1341 of SEQ ID NO: 317547
ugaagaugauauucuuugu

SEQ ID NO: 423962 - RNA, 19 nt, Artificial Sequence
  Description of Artificial Sequence: Synthetic oligonucleotide
  Antisense Strand to SEQ ID NO: 423961
acaaagaauaucaucuuca

SEQ ID NO: 423963 - RNA, 19 nt, Artificial Sequence
  Description of Artificial Sequence: Synthetic oligonucleotide
  Sense Strand Starting at position 1341 of SEQ ID NO: 317598
ucaagaaugugggcugaca

SEQ ID NO: 423964 - RNA, 19 nt, Artificial Sequence
  Description of Artificial Sequence: Synthetic oligonucleotide
  Antisense Strand to SEQ ID NO: 423963
ugucagcccacauucuuga

SEQ ID NO: 423965 - RNA, 19 nt, Artificial Sequence
  Description of Artificial Sequence: Synthetic oligonucleotide
  Sense Strand Starting at position 1341 of SEQ ID NO: 317600
aagaaugugggcugacauu

SEQ ID NO: 423966 - RNA, 19 nt, Artificial Sequence
  Description of Artificial Sequence: Synthetic oligonucleotide
  Antisense Strand to SEQ ID NO: 423965
aaugucagcccacauucuu

SEQ ID NO: 423967 - RNA, 19 nt, Artificial Sequence
  Description of Artificial Sequence: Synthetic oligonucleotide
  Sense Strand Starting at position 1341 of SEQ ID NO: 317769
auugaugaacuuugaguaa

SEQ ID NO: 423968 - RNA, 19 nt, Artificial Sequence
  Description of Artificial Sequence: Synthetic oligonucleotide
  Antisense Strand to SEQ ID NO: 423967
uuacucaaaguucaucaau

SEQ ID NO: 423969 - RNA, 19 nt, Artificial Sequence
  Description of Artificial Sequence: Synthetic oligonucleotide
  Sense Strand Starting at position 1341 of SEQ ID NO: 317829
gguugaaggccuuaauuac

SEQ ID NO: 423970 - RNA, 19 nt, Artificial Sequence
  Description of Artificial Sequence: Synthetic oligonucleotide
  Antisense Strand to SEQ ID NO: 423969
guaauuaaggccuucaacc

SEQ ID NO: 423971 - RNA, 19 nt, Artificial Sequence
  Description of Artificial Sequence: Synthetic oligonucleotide
  Sense Strand Starting at position 1341 of SEQ ID NO: 317857
gacaucccuugaguaagaa

SEQ ID NO: 423972 - RNA, 19 nt, Artificial Sequence
  Description of Artificial Sequence: Synthetic oligonucleotide
  Antisense Strand to SEQ ID NO: 423971
uucuuacucaagggauguc

SEQ ID NO: 423973 - RNA, 19 nt, Artificial Sequence
  Description of Artificial Sequence: Synthetic oligonucleotide
  Sense Strand Starting at position 1341 of SEQ ID NO: 317882
uuaccagaagacugacuuu

SEQ ID NO: 423974 - RNA, 19 nt, Artificial Sequence
  Description of Artificial Sequence: Synthetic oligonucleotide
  Antisense Strand to SEQ ID NO: 423973
aaagucagucuucugguaa

SEQ ID NO: 423975 - RNA, 19 nt, Artificial Sequence
  Description of Artificial Sequence: Synthetic oligonucleotide
  Sense Strand Starting at position 1341 of SEQ ID NO: 317975
uccacaauugcaugagaug

SEQ ID NO: 423976 - RNA, 19 nt, Artificial Sequence
  Description of Artificial Sequence: Synthetic oligonucleotide
  Antisense Strand to SEQ ID NO: 423975
caucucaugcaauugugga

SEQ ID NO: 423977 - RNA, 19 nt, Artificial Sequence
  Description of Artificial Sequence: Synthetic oligonucleotide
  Sense Strand Starting at position 1341 of SEQ ID NO: 317976
ccacaauugcaugagaugu

SEQ ID NO: 423978 - RNA, 19 nt, Artificial Sequence
  Description of Artificial Sequence: Synthetic oligonucleotide
  Antisense Strand to SEQ ID NO: 423977
acaucucaugcaauugugg

SEQ ID NO: 423979 - RNA, 19 nt, Artificial Sequence
  Description of Artificial Sequence: Synthetic oligonucleotide
  Sense Strand Starting at position 1341 of SEQ ID NO: 317987
ugagauguauccuuaaauc

SEQ ID NO: 423980 - RNA, 19 nt, Artificial Sequence
  Description of Artificial Sequence: Synthetic oligonucleotide
  Antisense Strand to SEQ ID NO: 423979
gauuuaaggauacaucuca

SEQ ID NO: 423981 - RNA, 19 nt, Artificial Sequence
  Description of Artificial Sequence: Synthetic oligonucleotide
  Sense Strand Starting at position 1341 of SEQ ID NO: 318142
auuggucucugauuagauu

SEQ ID NO: 423982 - RNA, 19 nt, Artificial Sequence
  Description of Artificial Sequence: Synthetic oligonucleotide
  Antisense Strand to SEQ ID NO: 423981
aaucuaaucagagaccaau

SEQ ID NO: 423983 - RNA, 19 nt, Artificial Sequence
  Description of Artificial Sequence: Synthetic oligonucleotide
  Sense Strand Starting at position 1341 of SEQ ID NO: 318223
uggcaauagagguaagcaa

SEQ ID NO: 423984 - RNA, 19 nt, Artificial Sequence
  Description of Artificial Sequence: Synthetic oligonucleotide
  Antisense Strand to SEQ ID NO: 423983
uugcuuaccucuauugcca

SEQ ID NO: 423985 - RNA, 19 nt, Artificial Sequence
  Description of Artificial Sequence: Synthetic oligonucleotide
  Sense Strand Starting at position 1341 of SEQ ID NO: 318248
accaauggaugcuccuaau

SEQ ID NO: 423986 - RNA, 19 nt, Artificial Sequence
  Description of Artificial Sequence: Synthetic oligonucleotide
  Antisense Strand to SEQ ID NO: 423985
auuaggagcauccauuggu

SEQ ID NO: 423987 - RNA, 19 nt, Artificial Sequence
  Description of Artificial Sequence: Synthetic oligonucleotide
  Sense Strand Starting at position 1341 of SEQ ID NO: 318293
ggcaaccaugcauauagua

SEQ ID NO: 423988 - RNA, 19 nt, Artificial Sequence
  Description of Artificial Sequence: Synthetic oligonucleotide
  Antisense Strand to SEQ ID NO: 423987
uacuauaugcaugguugcc

SEQ ID NO: 423989 - RNA, 19 nt, Artificial Sequence
  Description of Artificial Sequence: Synthetic oligonucleotide
  Sense Strand Starting at position 1341 of SEQ ID NO: 318345
augagauuggaugguucuu

SEQ ID NO: 423990 - RNA, 19 nt, Artificial Sequence
  Description of Artificial Sequence: Synthetic oligonucleotide
  Antisense Strand to SEQ ID NO: 423989
aagaaccauccaaucucau

SEQ ID NO: 423991 - RNA, 19 nt, Artificial Sequence
  Description of Artificial Sequence: Synthetic oligonucleotide
  Sense Strand Starting at position 1341 of SEQ ID NO: 318440
cuccaucagugaucugaaa

SEQ ID NO: 423992 - RNA, 19 nt, Artificial Sequence
  Description of Artificial Sequence: Synthetic oligonucleotide
  Antisense Strand to SEQ ID NO: 423991
uuucagaucacugauggag

SEQ ID NO: 423993 - RNA, 19 nt, Artificial Sequence
  Description of Artificial Sequence: Synthetic oligonucleotide
  Sense Strand Starting at position 1341 of SEQ ID NO: 318481
ggacccuuauaucuuguau

SEQ ID NO: 423994 - RNA, 19 nt, Artificial Sequence
  Description of Artificial Sequence: Synthetic oligonucleotide
  Antisense Strand to SEQ ID NO: 423993
auacaagauauaagggucc

SEQ ID NO: 423995 - RNA, 19 nt, Artificial Sequence
  Description of Artificial Sequence: Synthetic oligonucleotide
  Sense Strand Starting at position 1341 of SEQ ID NO: 318515
uggcaaugggaguaucacu

SEQ ID NO: 423996 - RNA, 19 nt, Artificial Sequence
  Description of Artificial Sequence: Synthetic oligonucleotide
  Antisense Strand to SEQ ID NO: 423995
agugauacucccauugcca

SEQ ID NO: 423997 - RNA, 19 nt, Artificial Sequence
  Description of Artificial Sequence: Synthetic oligonucleotide
  Sense Strand Starting at position 1341 of SEQ ID NO: 318520
augggaguaucacuacuca

SEQ ID NO: 423998 - RNA, 19 nt, Artificial Sequence
  Description of Artificial Sequence: Synthetic oligonucleotide
  Antisense Strand to SEQ ID NO: 423997
ugaguagugauacucccau

SEQ ID NO: 423999 - RNA, 19 nt, Artificial Sequence
  Description of Artificial Sequence: Synthetic oligonucleotide
  Sense Strand Starting at position 1341 of SEQ ID NO: 318722
ggagcugugauggaucagu

SEQ ID NO: 424000 - RNA, 19 nt, Artificial Sequence
  Description of Artificial Sequence: Synthetic oligonucleotide
  Antisense Strand to SEQ ID NO: 423999
acugauccaucacagcucc

SEQ ID NO: 424001 - RNA, 19 nt, Artificial Sequence
  Description of Artificial Sequence: Synthetic oligonucleotide
  Sense Strand Starting at position 1341 of SEQ ID NO: 318727
ugugauggaucaguugauu

SEQ ID NO: 424002 - RNA, 19 nt, Artificial Sequence
  Description of Artificial Sequence: Synthetic oligonucleotide
  Antisense Strand to SEQ ID NO: 424001
aaucaacugauccaucaca

SEQ ID NO: 424003 - RNA, 19 nt, Artificial Sequence
  Description of Artificial Sequence: Synthetic oligonucleotide
  Sense Strand Starting at position 1341 of SEQ ID NO: 318733
ggaucaguugauugauccu

SEQ ID NO: 424004 - RNA, 19 nt, Artificial Sequence
  Description of Artificial Sequence: Synthetic oligonucleotide
  Antisense Strand to SEQ ID NO: 424003
aggaucaaucaacugaucc

SEQ ID NO: 424005 - RNA, 19 nt, Artificial Sequence
  Description of Artificial Sequence: Synthetic oligonucleotide
  Sense Strand Starting at position 1341 of SEQ ID NO: 318797
acaguaugucugcaauaca

SEQ ID NO: 424006 - RNA, 19 nt, Artificial Sequence
  Description of Artificial Sequence: Synthetic oligonucleotide
  Antisense Strand to SEQ ID NO: 424005
uguauugcagacauacugu

SEQ ID NO: 424007 - RNA, 19 nt, Artificial Sequence
  Description of Artificial Sequence: Synthetic oligonucleotide
  Sense Strand Starting at position 1341 of SEQ ID NO: 318997
gaaggugccaguuaugacu

SEQ ID NO: 424008 - RNA, 19 nt, Artificial Sequence
  Description of Artificial Sequence: Synthetic oligonucleotide
  Antisense Strand to SEQ ID NO: 424007
agucauaacuggcaccuuc

SEQ ID NO: 424009 - RNA, 19 nt, Artificial Sequence
  Description of Artificial Sequence: Synthetic oligonucleotide
  Sense Strand Starting at position 1341 of SEQ ID NO: 319003
gccaguuaugacuacauga

SEQ ID NO: 424010 - RNA, 19 nt, Artificial Sequence
  Description of Artificial Sequence: Synthetic oligonucleotide
  Antisense Strand to SEQ ID NO: 424009
ucauguagucauaacuggc

SEQ ID NO: 424011 - RNA, 19 nt, Artificial Sequence
  Description of Artificial Sequence: Synthetic oligonucleotide
  Sense Strand Starting at position 1341 of SEQ ID NO: 319042
uuuaauugucaugaguagu

SEQ ID NO: 424012 - RNA, 19 nt, Artificial Sequence
  Description of Artificial Sequence: Synthetic oligonucleotide
  Antisense Strand to SEQ ID NO: 424011
acuacucaugacaauuaaa

SEQ ID NO: 424013 - RNA, 19 nt, Artificial Sequence
  Description of Artificial Sequence: Synthetic oligonucleotide
  Sense Strand Starting at position 1341 of SEQ ID NO: 319045
aauugucaugaguaguucu

SEQ ID NO: 424014 - RNA, 19 nt, Artificial Sequence
  Description of Artificial Sequence: Synthetic oligonucleotide
  Antisense Strand to SEQ ID NO: 424013
agaacuacucaugacaauu

SEQ ID NO: 424015 - RNA, 19 nt, Artificial Sequence
  Description of Artificial Sequence: Synthetic oligonucleotide
  Sense Strand Starting at position 1341 of SEQ ID NO: 319080
aauauaugugaguauaagc

SEQ ID NO: 424016 - RNA, 19 nt, Artificial Sequence
  Description of Artificial Sequence: Synthetic oligonucleotide
  Antisense Strand to SEQ ID NO: 424015
gcuuauacucacauauauu

SEQ ID NO: 424017 - RNA, 19 nt, Artificial Sequence
  Description of Artificial Sequence: Synthetic oligonucleotide
  Sense Strand Starting at position 1341 of SEQ ID NO: 319085
augugaguauaagccaaau

SEQ ID NO: 424018 - RNA, 19 nt, Artificial Sequence
  Description of Artificial Sequence: Synthetic oligonucleotide
  Antisense Strand to SEQ ID NO: 424017
auuuggcuuauacucacau

SEQ ID NO: 424019 - RNA, 19 nt, Artificial Sequence
  Description of Artificial Sequence: Synthetic oligonucleotide
  Sense Strand Starting at position 1342 of SEQ ID NO: 315550
ugcugcuuugagugucauu

SEQ ID NO: 424020 - RNA, 19 nt, Artificial Sequence
  Description of Artificial Sequence: Synthetic oligonucleotide
  Antisense Strand to SEQ ID NO: 424019
aaugacacucaaagcagca

SEQ ID NO: 424021 - RNA, 19 nt, Artificial Sequence
  Description of Artificial Sequence: Synthetic oligonucleotide
  Sense Strand Starting at position 1342 of SEQ ID NO: 315555
cuuugagugucauugugua

SEQ ID NO: 424022 - RNA, 19 nt, Artificial Sequence
  Description of Artificial Sequence: Synthetic oligonucleotide
  Antisense Strand to SEQ ID NO: 424021
uacacaaugacacucaaag

SEQ ID NO: 424023 - RNA, 19 nt, Artificial Sequence
  Description of Artificial Sequence: Synthetic oligonucleotide
  Sense Strand Starting at position 1342 of SEQ ID NO: 315559
gagugucauuguguaguga

SEQ ID NO: 424024 - RNA, 19 nt, Artificial Sequence
  Description of Artificial Sequence: Synthetic oligonucleotide
  Antisense Strand to SEQ ID NO: 424023
ucacuacacaaugacacuc

SEQ ID NO: 424025 - RNA, 19 nt, Artificial Sequence
  Description of Artificial Sequence: Synthetic oligonucleotide
  Sense Strand Starting at position 1342 of SEQ ID NO: 315560
agugucauuguguagugaa

SEQ ID NO: 424026 - RNA, 19 nt, Artificial Sequence
  Description of Artificial Sequence: Synthetic oligonucleotide
  Antisense Strand to SEQ ID NO: 424025
uucacuacacaaugacacu

SEQ ID NO: 424027 - RNA, 19 nt, Artificial Sequence
  Description of Artificial Sequence: Synthetic oligonucleotide
  Sense Strand Starting at position 1342 of SEQ ID NO: 315561
gugucauuguguagugaag

SEQ ID NO: 424028 - RNA, 19 nt, Artificial Sequence
  Description of Artificial Sequence: Synthetic oligonucleotide
  Antisense Strand to SEQ ID NO: 424027
cuucacuacacaaugacac

SEQ ID NO: 424029 - RNA, 19 nt, Artificial Sequence
  Description of Artificial Sequence: Synthetic oligonucleotide
  Sense Strand Starting at position 1342 of SEQ ID NO: 315588
ugcauacagugguuuggaa

SEQ ID NO: 424030 - RNA, 19 nt, Artificial Sequence
  Description of Artificial Sequence: Synthetic oligonucleotide
  Antisense Strand to SEQ ID NO: 424029
uuccaaaccacuguaugca

SEQ ID NO: 424031 - RNA, 19 nt, Artificial Sequence
  Description of Artificial Sequence: Synthetic oligonucleotide
  Sense Strand Starting at position 1342 of SEQ ID NO: 315590
cauacagugguuuggaaga

SEQ ID NO: 424032 - RNA, 19 nt, Artificial Sequence
  Description of Artificial Sequence: Synthetic oligonucleotide
  Antisense Strand to SEQ ID NO: 424031
ucuuccaaaccacuguaug

SEQ ID NO: 424033 - RNA, 19 nt, Artificial Sequence
  Description of Artificial Sequence: Synthetic oligonucleotide
  Sense Strand Starting at position 1342 of SEQ ID NO: 315687
acaccuugguggcuuaaga

SEQ ID NO: 424034 - RNA, 19 nt, Artificial Sequence
  Description of Artificial Sequence: Synthetic oligonucleotide
  Antisense Strand to SEQ ID NO: 424033
ucuuaagccaccaaggugu

SEQ ID NO: 424035 - RNA, 19 nt, Artificial Sequence
  Description of Artificial Sequence: Synthetic oligonucleotide
  Sense Strand Starting at position 1342 of SEQ ID NO: 316409
gcugaugccucaccuugau

SEQ ID NO: 424036 - RNA, 19 nt, Artificial Sequence
  Description of Artificial Sequence: Synthetic oligonucleotide
  Antisense Strand to SEQ ID NO: 424035
aucaaggugaggcaucagc

SEQ ID NO: 424037 - RNA, 19 nt, Artificial Sequence
  Description of Artificial Sequence: Synthetic oligonucleotide
  Sense Strand Starting at position 1342 of SEQ ID NO: 316412
gaugccucaccuugaugua

SEQ ID NO: 424038 - RNA, 19 nt, Artificial Sequence
  Description of Artificial Sequence: Synthetic oligonucleotide
  Antisense Strand to SEQ ID NO: 424037
uacaucaaggugaggcauc

SEQ ID NO: 424039 - RNA, 19 nt, Artificial Sequence
  Description of Artificial Sequence: Synthetic oligonucleotide
  Sense Strand Starting at position 1342 of SEQ ID NO: 316413
augccucaccuugauguaa

SEQ ID NO: 424040 - RNA, 19 nt, Artificial Sequence
  Description of Artificial Sequence: Synthetic oligonucleotide
  Antisense Strand to SEQ ID NO: 424039
uuacaucaaggugaggcau

SEQ ID NO: 424041 - RNA, 19 nt, Artificial Sequence
  Description of Artificial Sequence: Synthetic oligonucleotide
  Sense Strand Starting at position 1342 of SEQ ID NO: 316428
guaagaugccagggucuga

SEQ ID NO: 424042 - RNA, 19 nt, Artificial Sequence
  Description of Artificial Sequence: Synthetic oligonucleotide
  Antisense Strand to SEQ ID NO: 424041
ucagacccuggcaucuuac

SEQ ID NO: 424043 - RNA, 19 nt, Artificial Sequence
  Description of Artificial Sequence: Synthetic oligonucleotide
  Sense Strand Starting at position 1342 of SEQ ID NO: 316433
augccagggucugagaagu

SEQ ID NO: 424044 - RNA, 19 nt, Artificial Sequence
  Description of Artificial Sequence: Synthetic oligonucleotide
  Antisense Strand to SEQ ID NO: 424043
acuucucagacccuggcau

SEQ ID NO: 424045 - RNA, 19 nt, Artificial Sequence
  Description of Artificial Sequence: Synthetic oligonucleotide
  Sense Strand Starting at position 1342 of SEQ ID NO: 316441
gucugagaaguugagugaa

SEQ ID NO: 424046 - RNA, 19 nt, Artificial Sequence
  Description of Artificial Sequence: Synthetic oligonucleotide
  Antisense Strand to SEQ ID NO: 424045
uucacucaacuucucagac

SEQ ID NO: 424047 - RNA, 19 nt, Artificial Sequence
  Description of Artificial Sequence: Synthetic oligonucleotide
  Sense Strand Starting at position 1342 of SEQ ID NO: 316443
cugagaaguugagugaaac

SEQ ID NO: 424048 - RNA, 19 nt, Artificial Sequence
  Description of Artificial Sequence: Synthetic oligonucleotide
  Antisense Strand to SEQ ID NO: 424047
guuucacucaacuucucag

SEQ ID NO: 424049 - RNA, 19 nt, Artificial Sequence
  Description of Artificial Sequence: Synthetic oligonucleotide
  Sense Strand Starting at position 1342 of SEQ ID NO: 316486
gagggagccugugauaaca

SEQ ID NO: 424050 - RNA, 19 nt, Artificial Sequence
  Description of Artificial Sequence: Synthetic oligonucleotide
  Antisense Strand to SEQ ID NO: 424049
uguuaucacaggcucccuc

SEQ ID NO: 424051 - RNA, 19 nt, Artificial Sequence
  Description of Artificial Sequence: Synthetic oligonucleotide
  Sense Strand Starting at position 1342 of SEQ ID NO: 316836
gucgguucccucgaacaga

SEQ ID NO: 424052 - RNA, 19 nt, Artificial Sequence
  Description of Artificial Sequence: Synthetic oligonucleotide
  Antisense Strand to SEQ ID NO: 424051
ucuguucgagggaaccgac

SEQ ID NO: 424053 - RNA, 19 nt, Artificial Sequence
  Description of Artificial Sequence: Synthetic oligonucleotide
  Sense Strand Starting at position 1342 of SEQ ID NO: 316839
gguucccucgaacagaaua

SEQ ID NO: 424054 - RNA, 19 nt, Artificial Sequence
  Description of Artificial Sequence: Synthetic oligonucleotide
  Antisense Strand to SEQ ID NO: 424053
uauucuguucgagggaacc

SEQ ID NO: 424055 - RNA, 19 nt, Artificial Sequence
  Description of Artificial Sequence: Synthetic oligonucleotide
  Sense Strand Starting at position 1342 of SEQ ID NO: 316930
ggcugucucuuugugggaa

SEQ ID NO: 424056 - RNA, 19 nt, Artificial Sequence
  Description of Artificial Sequence: Synthetic oligonucleotide
  Antisense Strand to SEQ ID NO: 424055
uucccacaaagagacagcc

SEQ ID NO: 424057 - RNA, 19 nt, Artificial Sequence
  Description of Artificial Sequence: Synthetic oligonucleotide
  Sense Strand Starting at position 1342 of SEQ ID NO: 316934
gucucuuugugggaaaccu

SEQ ID NO: 424058 - RNA, 19 nt, Artificial Sequence
  Description of Artificial Sequence: Synthetic oligonucleotide
  Antisense Strand to SEQ ID NO: 424057
agguuucccacaaagagac

SEQ ID NO: 424059 - RNA, 19 nt, Artificial Sequence
  Description of Artificial Sequence: Synthetic oligonucleotide
  Sense Strand Starting at position 1342 of SEQ ID NO: 317096
ggcguggcauccguuaaga

SEQ ID NO: 424060 - RNA, 19 nt, Artificial Sequence
  Description of Artificial Sequence: Synthetic oligonucleotide
  Antisense Strand to SEQ ID NO: 424059
ucuuaacggaugccacgcc

SEQ ID NO: 424061 - RNA, 19 nt, Artificial Sequence
  Description of Artificial Sequence: Synthetic oligonucleotide
  Sense Strand Starting at position 1342 of SEQ ID NO: 317097
gcguggcauccguuaagag

SEQ ID NO: 424062 - RNA, 19 nt, Artificial Sequence
  Description of Artificial Sequence: Synthetic oligonucleotide
  Antisense Strand to SEQ ID NO: 424061
cucuuaacggaugccacgc

SEQ ID NO: 424063 - RNA, 19 nt, Artificial Sequence
  Description of Artificial Sequence: Synthetic oligonucleotide
  Sense Strand Starting at position 1342 of SEQ ID NO: 317098
cguggcauccguuaagagu

SEQ ID NO: 424064 - RNA, 19 nt, Artificial Sequence
  Description of Artificial Sequence: Synthetic oligonucleotide
  Antisense Strand to SEQ ID NO: 424063
acucuuaacggaugccacg

SEQ ID NO: 424065 - RNA, 19 nt, Artificial Sequence
  Description of Artificial Sequence: Synthetic oligonucleotide
  Sense Strand Starting at position 1342 of SEQ ID NO: 317104
auccguuaagagugucaug

SEQ ID NO: 424066 - RNA, 19 nt, Artificial Sequence
  Description of Artificial Sequence: Synthetic oligonucleotide
  Antisense Strand to SEQ ID NO: 424065
caugacacucuuaacggau

SEQ ID NO: 424067 - RNA, 19 nt, Artificial Sequence
  Description of Artificial Sequence: Synthetic oligonucleotide
  Sense Strand Starting at position 1342 of SEQ ID NO: 317393
gcugauguuguuggagaaa

SEQ ID NO: 424068 - RNA, 19 nt, Artificial Sequence
  Description of Artificial Sequence: Synthetic oligonucleotide
  Antisense Strand to SEQ ID NO: 424067
uuucuccaacaacaucagc

SEQ ID NO: 424069 - RNA, 19 nt, Artificial Sequence
  Description of Artificial Sequence: Synthetic oligonucleotide
  Sense Strand Starting at position 1342 of SEQ ID NO: 317432
ugggaagaaaguugguaau

SEQ ID NO: 424070 - RNA, 19 nt, Artificial Sequence
  Description of Artificial Sequence: Synthetic oligonucleotide
  Antisense Strand to SEQ ID NO: 424069
auuaccaacuuucuuccca

SEQ ID NO: 424071 - RNA, 19 nt, Artificial Sequence
  Description of Artificial Sequence: Synthetic oligonucleotide
  Sense Strand Starting at position 1342 of SEQ ID NO: 317459
ggcgcuguaaucccuguaa

SEQ ID NO: 424072 - RNA, 19 nt, Artificial Sequence
  Description of Artificial Sequence: Synthetic oligonucleotide
  Antisense Strand to SEQ ID NO: 424071
uuacagggauuacagcgcc

SEQ ID NO: 424073 - RNA, 19 nt, Artificial Sequence
  Description of Artificial Sequence: Synthetic oligonucleotide
  Sense Strand Starting at position 1342 of SEQ ID NO: 317461
cgcuguaaucccuguaauc

SEQ ID NO: 424074 - RNA, 19 nt, Artificial Sequence
  Description of Artificial Sequence: Synthetic oligonucleotide
  Antisense Strand to SEQ ID NO: 424073
gauuacagggauuacagcg

SEQ ID NO: 424075 - RNA, 19 nt, Artificial Sequence
  Description of Artificial Sequence: Synthetic oligonucleotide
  Sense Strand Starting at position 1342 of SEQ ID NO: 317749
gaaagaaaguugcuggguu

SEQ ID NO: 424076 - RNA, 19 nt, Artificial Sequence
  Description of Artificial Sequence: Synthetic oligonucleotide
  Antisense Strand to SEQ ID NO: 424075
aacccagcaacuuucuuuc

SEQ ID NO: 424077 - RNA, 19 nt, Artificial Sequence
  Description of Artificial Sequence: Synthetic oligonucleotide
  Sense Strand Starting at position 1342 of SEQ ID NO: 317750
aaagaaaguugcuggguuu

SEQ ID NO: 424078 - RNA, 19 nt, Artificial Sequence
  Description of Artificial Sequence: Synthetic oligonucleotide
  Antisense Strand to SEQ ID NO: 424077
aaacccagcaacuuucuuu

SEQ ID NO: 424079 - RNA, 19 nt, Artificial Sequence
  Description of Artificial Sequence: Synthetic oligonucleotide
  Sense Strand Starting at position 1342 of SEQ ID NO: 318236
auaagauaacgcuguuuaa

SEQ ID NO: 424080 - RNA, 19 nt, Artificial Sequence
  Description of Artificial Sequence: Synthetic oligonucleotide
  Antisense Strand to SEQ ID NO: 424079
uuaaacagcguuaucuuau

SEQ ID NO: 424081 - RNA, 19 nt, Artificial Sequence
  Description of Artificial Sequence: Synthetic oligonucleotide
  Sense Strand Starting at position 1342 of SEQ ID NO: 318239
agauaacgcuguuuaagag

SEQ ID NO: 424082 - RNA, 19 nt, Artificial Sequence
  Description of Artificial Sequence: Synthetic oligonucleotide
  Antisense Strand to SEQ ID NO: 424081
cucuuaaacagcguuaucu

SEQ ID NO: 424083 - RNA, 19 nt, Artificial Sequence
  Description of Artificial Sequence: Synthetic oligonucleotide
  Sense Strand Starting at position 1342 of SEQ ID NO: 318325
agacaaauucuuugacugu

SEQ ID NO: 424084 - RNA, 19 nt, Artificial Sequence
  Description of Artificial Sequence: Synthetic oligonucleotide
  Antisense Strand to SEQ ID NO: 424083
acagucaaagaauuugucu

SEQ ID NO: 424085 - RNA, 19 nt, Artificial Sequence
  Description of Artificial Sequence: Synthetic oligonucleotide
  Sense Strand Starting at position 1342 of SEQ ID NO: 318355
cagguuucuuaagcaugau

SEQ ID NO: 424086 - RNA, 19 nt, Artificial Sequence
  Description of Artificial Sequence: Synthetic oligonucleotide
  Antisense Strand to SEQ ID NO: 424085
aucaugcuuaagaaaccug

SEQ ID NO: 424087 - RNA, 19 nt, Artificial Sequence
  Description of Artificial Sequence: Synthetic oligonucleotide
  Sense Strand Starting at position 1342 of SEQ ID NO: 318455
caaguuaugcuauagauga

SEQ ID NO: 424088 - RNA, 19 nt, Artificial Sequence
  Description of Artificial Sequence: Synthetic oligonucleotide
  Antisense Strand to SEQ ID NO: 424087
ucaucuauagcauaacuug

SEQ ID NO: 424089 - RNA, 19 nt, Artificial Sequence
  Description of Artificial Sequence: Synthetic oligonucleotide
  Sense Strand Starting at position 1342 of SEQ ID NO: 318508
uuggaagucugcuuauaaa

SEQ ID NO: 424090 - RNA, 19 nt, Artificial Sequence
  Description of Artificial Sequence: Synthetic oligonucleotide
  Antisense Strand to SEQ ID NO: 424089
uuuauaagcagacuuccaa

SEQ ID NO: 424091 - RNA, 19 nt, Artificial Sequence
  Description of Artificial Sequence: Synthetic oligonucleotide
  Sense Strand Starting at position 1342 of SEQ ID NO: 318532
cgcucugucuuuguucgau

SEQ ID NO: 424092 - RNA, 19 nt, Artificial Sequence
  Description of Artificial Sequence: Synthetic oligonucleotide
  Antisense Strand to SEQ ID NO: 424091
aucgaacaaagacagagcg

SEQ ID NO: 424093 - RNA, 19 nt, Artificial Sequence
  Description of Artificial Sequence: Synthetic oligonucleotide
  Sense Strand Starting at position 1342 of SEQ ID NO: 318580
gccagugcguaccugaaau

SEQ ID NO: 424094 - RNA, 19 nt, Artificial Sequence
  Description of Artificial Sequence: Synthetic oligonucleotide
  Antisense Strand to SEQ ID NO: 424093
auuucagguacgcacuggc

SEQ ID NO: 424095 - RNA, 19 nt, Artificial Sequence
  Description of Artificial Sequence: Synthetic oligonucleotide
  Sense Strand Starting at position 1342 of SEQ ID NO: 318582
cagugcguaccugaaauaa

SEQ ID NO: 424096 - RNA, 19 nt, Artificial Sequence
  Description of Artificial Sequence: Synthetic oligonucleotide
  Antisense Strand to SEQ ID NO: 424095
uuauuucagguacgcacug

SEQ ID NO: 424097 - RNA, 19 nt, Artificial Sequence
  Description of Artificial Sequence: Synthetic oligonucleotide
  Sense Strand Starting at position 1342 of SEQ ID NO: 318993
agagaugagguuuguuguu

SEQ ID NO: 424098 - RNA, 19 nt, Artificial Sequence
  Description of Artificial Sequence: Synthetic oligonucleotide
  Antisense Strand to SEQ ID NO: 424097
aacaacaaaccucaucucu

SEQ ID NO: 424099 - RNA, 19 nt, Artificial Sequence
  Description of Artificial Sequence: Synthetic oligonucleotide
  Sense Strand Starting at position 1343 of SEQ ID NO: 315243
acaguacacugucaaguaa

SEQ ID NO: 424100 - RNA, 19 nt, Artificial Sequence
  Description of Artificial Sequence: Synthetic oligonucleotide
  Antisense Strand to SEQ ID NO: 424099
uuacuugacaguguacugu

SEQ ID NO: 424101 - RNA, 19 nt, Artificial Sequence
  Description of Artificial Sequence: Synthetic oligonucleotide
  Sense Strand Starting at position 1343 of SEQ ID NO: 315342
guauuaauguaucaaguuc

SEQ ID NO: 424102 - RNA, 19 nt, Artificial Sequence
  Description of Artificial Sequence: Synthetic oligonucleotide
  Antisense Strand to SEQ ID NO: 424101
gaacuugauacauuaauac

SEQ ID NO: 424103 - RNA, 19 nt, Artificial Sequence
  Description of Artificial Sequence: Synthetic oligonucleotide
  Sense Strand Starting at position 1343 of SEQ ID NO: 315349
uguaucaaguucuaaguca

SEQ ID NO: 424104 - RNA, 19 nt, Artificial Sequence
  Description of Artificial Sequence: Synthetic oligonucleotide
  Antisense Strand to SEQ ID NO: 424103
ugacuuagaacuugauaca

SEQ ID NO: 424105 - RNA, 19 nt, Artificial Sequence
  Description of Artificial Sequence: Synthetic oligonucleotide
  Sense Strand Starting at position 1343 of SEQ ID NO: 315357
guucuaagucaacaaauug

SEQ ID NO: 424106 - RNA, 19 nt, Artificial Sequence
  Description of Artificial Sequence: Synthetic oligonucleotide
  Antisense Strand to SEQ ID NO: 424105
caauuuguugacuuagaac

SEQ ID NO: 424107 - RNA, 19 nt, Artificial Sequence
  Description of Artificial Sequence: Synthetic oligonucleotide
  Sense Strand Starting at position 1343 of SEQ ID NO: 315458
gacuuccauugacagugau

SEQ ID NO: 424108 - RNA, 19 nt, Artificial Sequence
  Description of Artificial Sequence: Synthetic oligonucleotide
  Antisense Strand to SEQ ID NO: 424107
aucacugucaauggaaguc

SEQ ID NO: 424109 - RNA, 19 nt, Artificial Sequence
  Description of Artificial Sequence: Synthetic oligonucleotide
  Sense Strand Starting at position 1343 of SEQ ID NO: 315602
agccaaauacaguaugauc

SEQ ID NO: 424110 - RNA, 19 nt, Artificial Sequence
  Description of Artificial Sequence: Synthetic oligonucleotide
  Antisense Strand to SEQ ID NO: 424109
gaucauacuguauuuggcu

SEQ ID NO: 424111 - RNA, 19 nt, Artificial Sequence
  Description of Artificial Sequence: Synthetic oligonucleotide
  Sense Strand Starting at position 1343 of SEQ ID NO: 315625
aagaguguugcuggucgca

SEQ ID NO: 424112 - RNA, 19 nt, Artificial Sequence
  Description of Artificial Sequence: Synthetic oligonucleotide
  Antisense Strand to SEQ ID NO: 424111
ugcgaccagcaacacucuu

SEQ ID NO: 424113 - RNA, 19 nt, Artificial Sequence
  Description of Artificial Sequence: Synthetic oligonucleotide
  Sense Strand Starting at position 1343 of SEQ ID NO: 315627
gaguguugcuggucgcacu

SEQ ID NO: 424114 - RNA, 19 nt, Artificial Sequence
  Description of Artificial Sequence: Synthetic oligonucleotide
  Antisense Strand to SEQ ID NO: 424113
agugcgaccagcaacacuc

SEQ ID NO: 424115 - RNA, 19 nt, Artificial Sequence
  Description of Artificial Sequence: Synthetic oligonucleotide
  Sense Strand Starting at position 1343 of SEQ ID NO: 315786
aguagucagucucuaaaug

SEQ ID NO: 424116 - RNA, 19 nt, Artificial Sequence
  Description of Artificial Sequence: Synthetic oligonucleotide
  Antisense Strand to SEQ ID NO: 424115
cauuuagagacugacuacu

SEQ ID NO: 424117 - RNA, 19 nt, Artificial Sequence
  Description of Artificial Sequence: Synthetic oligonucleotide
  Sense Strand Starting at position 1343 of SEQ ID NO: 315803
ugcugagaccucugagaag

SEQ ID NO: 424118 - RNA, 19 nt, Artificial Sequence
  Description of Artificial Sequence: Synthetic oligonucleotide
  Antisense Strand to SEQ ID NO: 424117
cuucucagaggucucagca

SEQ ID NO: 424119 - RNA, 19 nt, Artificial Sequence
  Description of Artificial Sequence: Synthetic oligonucleotide
  Sense Strand Starting at position 1343 of SEQ ID NO: 315822
gcaggaacuuucuggaacu

SEQ ID NO: 424120 - RNA, 19 nt, Artificial Sequence
  Description of Artificial Sequence: Synthetic oligonucleotide
  Antisense Strand to SEQ ID NO: 424119
aguuccagaaaguuccugc

SEQ ID NO: 424121 - RNA, 19 nt, Artificial Sequence
  Description of Artificial Sequence: Synthetic oligonucleotide
  Sense Strand Starting at position 1343 of SEQ ID NO: 315990
ugcacuacugcguaaucca

SEQ ID NO: 424122 - RNA, 19 nt, Artificial Sequence
  Description of Artificial Sequence: Synthetic oligonucleotide
  Antisense Strand to SEQ ID NO: 424121
uggauuacgcaguagugca

SEQ ID NO: 424123 - RNA, 19 nt, Artificial Sequence
  Description of Artificial Sequence: Synthetic oligonucleotide
  Sense Strand Starting at position 1343 of SEQ ID NO: 316052
uuuagaugcuuggaaauag

SEQ ID NO: 424124 - RNA, 19 nt, Artificial Sequence
  Description of Artificial Sequence: Synthetic oligonucleotide
  Antisense Strand to SEQ ID NO: 424123
cuauuuccaagcaucuaaa

SEQ ID NO: 424125 - RNA, 19 nt, Artificial Sequence
  Description of Artificial Sequence: Synthetic oligonucleotide
  Sense Strand Starting at position 1343 of SEQ ID NO: 316086
cuagcauucuggguggcua

SEQ ID NO: 424126 - RNA, 19 nt, Artificial Sequence
  Description of Artificial Sequence: Synthetic oligonucleotide
  Antisense Strand to SEQ ID NO: 424125
uagccacccagaaugcuag

SEQ ID NO: 424127 - RNA, 19 nt, Artificial Sequence
  Description of Artificial Sequence: Synthetic oligonucleotide
  Sense Strand Starting at position 1343 of SEQ ID NO: 316094
cuggguggcuagguugaaa

SEQ ID NO: 424128 - RNA, 19 nt, Artificial Sequence
  Description of Artificial Sequence: Synthetic oligonucleotide
  Antisense Strand to SEQ ID NO: 424127
uuucaaccuagccacccag

SEQ ID NO: 424129 - RNA, 19 nt, Artificial Sequence
  Description of Artificial Sequence: Synthetic oligonucleotide
  Sense Strand Starting at position 1343 of SEQ ID NO: 316097
gguggcuagguugaaagua

SEQ ID NO: 424130 - RNA, 19 nt, Artificial Sequence
  Description of Artificial Sequence: Synthetic oligonucleotide
  Antisense Strand to SEQ ID NO: 424129
uacuuucaaccuagccacc

SEQ ID NO: 424131 - RNA, 19 nt, Artificial Sequence
  Description of Artificial Sequence: Synthetic oligonucleotide
  Sense Strand Starting at position 1343 of SEQ ID NO: 316123
caguucucagaagggugau

SEQ ID NO: 424132 - RNA, 19 nt, Artificial Sequence
  Description of Artificial Sequence: Synthetic oligonucleotide
  Antisense Strand to SEQ ID NO: 424131
aucacccuucugagaacug

SEQ ID NO: 424133 - RNA, 19 nt, Artificial Sequence
  Description of Artificial Sequence: Synthetic oligonucleotide
  Sense Strand Starting at position 1343 of SEQ ID NO: 316159
augcucuguucuuaccgau

SEQ ID NO: 424134 - RNA, 19 nt, Artificial Sequence
  Description of Artificial Sequence: Synthetic oligonucleotide
  Antisense Strand to SEQ ID NO: 424133
aucgguaagaacagagcau

SEQ ID NO: 424135 - RNA, 19 nt, Artificial Sequence
  Description of Artificial Sequence: Synthetic oligonucleotide
  Sense Strand Starting at position 1343 of SEQ ID NO: 316397
acuuacaucucguaaauag

SEQ ID NO: 424136 - RNA, 19 nt, Artificial Sequence
  Description of Artificial Sequence: Synthetic oligonucleotide
  Antisense Strand to SEQ ID NO: 424135
cuauuuacgagauguaagu

SEQ ID NO: 424137 - RNA, 19 nt, Artificial Sequence
  Description of Artificial Sequence: Synthetic oligonucleotide
  Sense Strand Starting at position 1343 of SEQ ID NO: 317795
uguuccagucgucugugua

SEQ ID NO: 424138 - RNA, 19 nt, Artificial Sequence
  Description of Artificial Sequence: Synthetic oligonucleotide
  Antisense Strand to SEQ ID NO: 424137
uacacagacgacuggaaca

SEQ ID NO: 424139 - RNA, 19 nt, Artificial Sequence
  Description of Artificial Sequence: Synthetic oligonucleotide
  Sense Strand Starting at position 1343 of SEQ ID NO: 317796
guuccagucgucuguguau

SEQ ID NO: 424140 - RNA, 19 nt, Artificial Sequence
  Description of Artificial Sequence: Synthetic oligonucleotide
  Antisense Strand to SEQ ID NO: 424139
auacacagacgacuggaac

SEQ ID NO: 424141 - RNA, 19 nt, Artificial Sequence
  Description of Artificial Sequence: Synthetic oligonucleotide
  Sense Strand Starting at position 1343 of SEQ ID NO: 317798
uccagucgucuguguauuu

SEQ ID NO: 424142 - RNA, 19 nt, Artificial Sequence
  Description of Artificial Sequence: Synthetic oligonucleotide
  Antisense Strand to SEQ ID NO: 424141
aaauacacagacgacugga

SEQ ID NO: 424143 - RNA, 19 nt, Artificial Sequence
  Description of Artificial Sequence: Synthetic oligonucleotide
  Sense Strand Starting at position 1343 of SEQ ID NO: 317803
ucgucuguguauuugagau

SEQ ID NO: 424144 - RNA, 19 nt, Artificial Sequence
  Description of Artificial Sequence: Synthetic oligonucleotide
  Antisense Strand to SEQ ID NO: 424143
aucucaaauacacagacga

SEQ ID NO: 424145 - RNA, 19 nt, Artificial Sequence
  Description of Artificial Sequence: Synthetic oligonucleotide
  Sense Strand Starting at position 1343 of SEQ ID NO: 317805
gucuguguauuugagauga

SEQ ID NO: 424146 - RNA, 19 nt, Artificial Sequence
  Description of Artificial Sequence: Synthetic oligonucleotide
  Antisense Strand to SEQ ID NO: 424145
ucaucucaaauacacagac

SEQ ID NO: 424147 - RNA, 19 nt, Artificial Sequence
  Description of Artificial Sequence: Synthetic oligonucleotide
  Sense Strand Starting at position 1343 of SEQ ID NO: 317818
agaugaaacugcccugaga

SEQ ID NO: 424148 - RNA, 19 nt, Artificial Sequence
  Description of Artificial Sequence: Synthetic oligonucleotide
  Antisense Strand to SEQ ID NO: 424147
ucucagggcaguuucaucu

SEQ ID NO: 424149 - RNA, 19 nt, Artificial Sequence
  Description of Artificial Sequence: Synthetic oligonucleotide
  Sense Strand Starting at position 1343 of SEQ ID NO: 317820
augaaacugcccugagaug

SEQ ID NO: 424150 - RNA, 19 nt, Artificial Sequence
  Description of Artificial Sequence: Synthetic oligonucleotide
  Antisense Strand to SEQ ID NO: 424149
caucucagggcaguuucau

SEQ ID NO: 424151 - RNA, 19 nt, Artificial Sequence
  Description of Artificial Sequence: Synthetic oligonucleotide
  Sense Strand Starting at position 1344 of SEQ ID NO: 315280
acccuuguccaguauggaa

SEQ ID NO: 424152 - RNA, 19 nt, Artificial Sequence
  Description of Artificial Sequence: Synthetic oligonucleotide
  Antisense Strand to SEQ ID NO: 424151
uuccauacuggacaagggu

SEQ ID NO: 424153 - RNA, 19 nt, Artificial Sequence
  Description of Artificial Sequence: Synthetic oligonucleotide
  Sense Strand Starting at position 1344 of SEQ ID NO: 315294
uggaauucccgucaauugu

SEQ ID NO: 424154 - RNA, 19 nt, Artificial Sequence
  Description of Artificial Sequence: Synthetic oligonucleotide
  Antisense Strand to SEQ ID NO: 424153
acaauugacgggaauucca

SEQ ID NO: 424155 - RNA, 19 nt, Artificial Sequence
  Description of Artificial Sequence: Synthetic oligonucleotide
  Sense Strand Starting at position 1344 of SEQ ID NO: 315374
agauaacuccaugguaucu

SEQ ID NO: 424156 - RNA, 19 nt, Artificial Sequence
  Description of Artificial Sequence: Synthetic oligonucleotide
  Antisense Strand to SEQ ID NO: 424155
agauaccauggaguuaucu

SEQ ID NO: 424157 - RNA, 19 nt, Artificial Sequence
  Description of Artificial Sequence: Synthetic oligonucleotide
  Sense Strand Starting at position 1344 of SEQ ID NO: 315452
uccucagucuccucagaua

SEQ ID NO: 424158 - RNA, 19 nt, Artificial Sequence
  Description of Artificial Sequence: Synthetic oligonucleotide
  Antisense Strand to SEQ ID NO: 424157
uaucugaggagacugagga

SEQ ID NO: 424159 - RNA, 19 nt, Artificial Sequence
  Description of Artificial Sequence: Synthetic oligonucleotide
  Sense Strand Starting at position 1344 of SEQ ID NO: 315510
cugagcaaucucuagcaca

SEQ ID NO: 424160 - RNA, 19 nt, Artificial Sequence
  Description of Artificial Sequence: Synthetic oligonucleotide
  Antisense Strand to SEQ ID NO: 424159
ugugcuagagauugcucag

SEQ ID NO: 424161 - RNA, 19 nt, Artificial Sequence
  Description of Artificial Sequence: Synthetic oligonucleotide
  Sense Strand Starting at position 1344 of SEQ ID NO: 315782
acaucuaauguccagucua

SEQ ID NO: 424162 - RNA, 19 nt, Artificial Sequence
  Description of Artificial Sequence: Synthetic oligonucleotide
  Antisense Strand to SEQ ID NO: 424161
uagacuggacauuagaugu

SEQ ID NO: 424163 - RNA, 19 nt, Artificial Sequence
  Description of Artificial Sequence: Synthetic oligonucleotide
  Sense Strand Starting at position 1344 of SEQ ID NO: 315789
auguccagucuacgaagaa

SEQ ID NO: 424164 - RNA, 19 nt, Artificial Sequence
  Description of Artificial Sequence: Synthetic oligonucleotide
  Antisense Strand to SEQ ID NO: 424163
uucuucguagacuggacau

SEQ ID NO: 424165 - RNA, 19 nt, Artificial Sequence
  Description of Artificial Sequence: Synthetic oligonucleotide
  Sense Strand Starting at position 1344 of SEQ ID NO: 315909
cacugaugcgaccaucaua

SEQ ID NO: 424166 - RNA, 19 nt, Artificial Sequence
  Description of Artificial Sequence: Synthetic oligonucleotide
  Antisense Strand to SEQ ID NO: 424165
uaugauggucgcaucagug

SEQ ID NO: 424167 - RNA, 19 nt, Artificial Sequence
  Description of Artificial Sequence: Synthetic oligonucleotide
  Sense Strand Starting at position 1344 of SEQ ID NO: 315981
agggaacuucucugggcau

SEQ ID NO: 424168 - RNA, 19 nt, Artificial Sequence
  Description of Artificial Sequence: Synthetic oligonucleotide
  Antisense Strand to SEQ ID NO: 424167
augcccagagaaguucccu

SEQ ID NO: 424169 - RNA, 19 nt, Artificial Sequence
  Description of Artificial Sequence: Synthetic oligonucleotide
  Sense Strand Starting at position 1344 of SEQ ID NO: 315985
aacuucucugggcauagua

SEQ ID NO: 424170 - RNA, 19 nt, Artificial Sequence
  Description of Artificial Sequence: Synthetic oligonucleotide
  Antisense Strand to SEQ ID NO: 424169
uacuaugcccagagaaguu

SEQ ID NO: 424171 - RNA, 19 nt, Artificial Sequence
  Description of Artificial Sequence: Synthetic oligonucleotide
  Sense Strand Starting at position 1344 of SEQ ID NO: 316019
guguucuaaagguagcaca

SEQ ID NO: 424172 - RNA, 19 nt, Artificial Sequence
  Description of Artificial Sequence: Synthetic oligonucleotide
  Antisense Strand to SEQ ID NO: 424171
ugugcuaccuuuagaacac

SEQ ID NO: 424173 - RNA, 19 nt, Artificial Sequence
  Description of Artificial Sequence: Synthetic oligonucleotide
  Sense Strand Starting at position 1344 of SEQ ID NO: 316051
guaggcucccaauaguuau

SEQ ID NO: 424174 - RNA, 19 nt, Artificial Sequence
  Description of Artificial Sequence: Synthetic oligonucleotide
  Antisense Strand to SEQ ID NO: 424173
auaacuauugggagccuac

SEQ ID NO: 424175 - RNA, 19 nt, Artificial Sequence
  Description of Artificial Sequence: Synthetic oligonucleotide
  Sense Strand Starting at position 1344 of SEQ ID NO: 316161
ucagaauugcuuuaaccug

SEQ ID NO: 424176 - RNA, 19 nt, Artificial Sequence
  Description of Artificial Sequence: Synthetic oligonucleotide
  Antisense Strand to SEQ ID NO: 424175
cagguuaaagcaauucuga

SEQ ID NO: 424177 - RNA, 19 nt, Artificial Sequence
  Description of Artificial Sequence: Synthetic oligonucleotide
  Sense Strand Starting at position 1344 of SEQ ID NO: 316201
uggguuaacuuucucccau

SEQ ID NO: 424178 - RNA, 19 nt, Artificial Sequence
  Description of Artificial Sequence: Synthetic oligonucleotide
  Antisense Strand to SEQ ID NO: 424177
augggagaaaguuaaccca

SEQ ID NO: 424179 - RNA, 19 nt, Artificial Sequence
  Description of Artificial Sequence: Synthetic oligonucleotide
  Sense Strand Starting at position 1344 of SEQ ID NO: 316202
ggguuaacuuucucccauu

SEQ ID NO: 424180 - RNA, 19 nt, Artificial Sequence
  Description of Artificial Sequence: Synthetic oligonucleotide
  Antisense Strand to SEQ ID NO: 424179
aaugggagaaaguuaaccc

SEQ ID NO: 424181 - RNA, 19 nt, Artificial Sequence
  Description of Artificial Sequence: Synthetic oligonucleotide
  Sense Strand Starting at position 1344 of SEQ ID NO: 316516
gggacaacgcucugguaag

SEQ ID NO: 424182 - RNA, 19 nt, Artificial Sequence
  Description of Artificial Sequence: Synthetic oligonucleotide
  Antisense Strand to SEQ ID NO: 424181
cuuaccagagcguuguccc

SEQ ID NO: 424183 - RNA, 19 nt, Artificial Sequence
  Description of Artificial Sequence: Synthetic oligonucleotide
  Sense Strand Starting at position 1344 of SEQ ID NO: 316572
gcguucggucacagagagu

SEQ ID NO: 424184 - RNA, 19 nt, Artificial Sequence
  Description of Artificial Sequence: Synthetic oligonucleotide
  Antisense Strand to SEQ ID NO: 424183
acucucugugaccgaacgc

SEQ ID NO: 424185 - RNA, 19 nt, Artificial Sequence
  Description of Artificial Sequence: Synthetic oligonucleotide
  Sense Strand Starting at position 1344 of SEQ ID NO: 316604
agagauauuccugggugga

SEQ ID NO: 424186 - RNA, 19 nt, Artificial Sequence
  Description of Artificial Sequence: Synthetic oligonucleotide
  Antisense Strand to SEQ ID NO: 424185
uccacccaggaauaucucu

SEQ ID NO: 424187 - RNA, 19 nt, Artificial Sequence
  Description of Artificial Sequence: Synthetic oligonucleotide
  Sense Strand Starting at position 1344 of SEQ ID NO: 316605
gagauauuccuggguggag

SEQ ID NO: 424188 - RNA, 19 nt, Artificial Sequence
  Description of Artificial Sequence: Synthetic oligonucleotide
  Antisense Strand to SEQ ID NO: 424187
cuccacccaggaauaucuc

SEQ ID NO: 424189 - RNA, 19 nt, Artificial Sequence
  Description of Artificial Sequence: Synthetic oligonucleotide
  Sense Strand Starting at position 1344 of SEQ ID NO: 318115
gccuaagugcuguuuccau

SEQ ID NO: 424190 - RNA, 19 nt, Artificial Sequence
  Description of Artificial Sequence: Synthetic oligonucleotide
  Antisense Strand to SEQ ID NO: 424189
auggaaacagcacuuaggc

SEQ ID NO: 424191 - RNA, 19 nt, Artificial Sequence
  Description of Artificial Sequence: Synthetic oligonucleotide
  Sense Strand Starting at position 1344 of SEQ ID NO: 318181
cucuguguucuauauuaaa

SEQ ID NO: 424192 - RNA, 19 nt, Artificial Sequence
  Description of Artificial Sequence: Synthetic oligonucleotide
  Antisense Strand to SEQ ID NO: 424191
uuuaauauagaacacagag

SEQ ID NO: 424193 - RNA, 19 nt, Artificial Sequence
  Description of Artificial Sequence: Synthetic oligonucleotide
  Sense Strand Starting at position 1344 of SEQ ID NO: 318408
gucaguggucccgugaugu

SEQ ID NO: 424194 - RNA, 19 nt, Artificial Sequence
  Description of Artificial Sequence: Synthetic oligonucleotide
  Antisense Strand to SEQ ID NO: 424193
acaucacgggaccacugac

SEQ ID NO: 424195 - RNA, 19 nt, Artificial Sequence
  Description of Artificial Sequence: Synthetic oligonucleotide
  Sense Strand Starting at position 1344 of SEQ ID NO: 318461
gucccacaacgugaguuaa

SEQ ID NO: 424196 - RNA, 19 nt, Artificial Sequence
  Description of Artificial Sequence: Synthetic oligonucleotide
  Antisense Strand to SEQ ID NO: 424195
uuaacucacguugugggac

SEQ ID NO: 424197 - RNA, 19 nt, Artificial Sequence
  Description of Artificial Sequence: Synthetic oligonucleotide
  Sense Strand Starting at position 1344 of SEQ ID NO: 318500
cgugaccugccguuaucuu

SEQ ID NO: 424198 - RNA, 19 nt, Artificial Sequence
  Description of Artificial Sequence: Synthetic oligonucleotide
  Antisense Strand to SEQ ID NO: 424197
aagauaacggcaggucacg

SEQ ID NO: 424199 - RNA, 19 nt, Artificial Sequence
  Description of Artificial Sequence: Synthetic oligonucleotide
  Sense Strand Starting at position 1344 of SEQ ID NO: 318629
gggacauauguguguauua

SEQ ID NO: 424200 - RNA, 19 nt, Artificial Sequence
  Description of Artificial Sequence: Synthetic oligonucleotide
  Antisense Strand to SEQ ID NO: 424199
uaauacacacauauguccc

SEQ ID NO: 424201 - RNA, 19 nt, Artificial Sequence
  Description of Artificial Sequence: Synthetic oligonucleotide
  Sense Strand Starting at position 1344 of SEQ ID NO: 318631
gacauauguguguauuaca

SEQ ID NO: 424202 - RNA, 19 nt, Artificial Sequence
  Description of Artificial Sequence: Synthetic oligonucleotide
  Antisense Strand to SEQ ID NO: 424201
uguaauacacacauauguc

SEQ ID NO: 424203 - RNA, 19 nt, Artificial Sequence
  Description of Artificial Sequence: Synthetic oligonucleotide
  Sense Strand Starting at position 1344 of SEQ ID NO: 318639
uguguauuacaggguaaca

SEQ ID NO: 424204 - RNA, 19 nt, Artificial Sequence
  Description of Artificial Sequence: Synthetic oligonucleotide
  Antisense Strand to SEQ ID NO: 424203
uguuacccuguaauacaca

SEQ ID NO: 424205 - RNA, 19 nt, Artificial Sequence
  Description of Artificial Sequence: Synthetic oligonucleotide
  Sense Strand Starting at position 1344 of SEQ ID NO: 318841
ggagcuuaccaugauguag

SEQ ID NO: 424206 - RNA, 19 nt, Artificial Sequence
  Description of Artificial Sequence: Synthetic oligonucleotide
  Antisense Strand to SEQ ID NO: 424205
cuacaucaugguaagcucc

SEQ ID NO: 424207 - RNA, 19 nt, Artificial Sequence
  Description of Artificial Sequence: Synthetic oligonucleotide
  Sense Strand Starting at position 1344 of SEQ ID NO: 318909
ggcacugaggcauggauau

SEQ ID NO: 424208 - RNA, 19 nt, Artificial Sequence
  Description of Artificial Sequence: Synthetic oligonucleotide
  Antisense Strand to SEQ ID NO: 424207
auauccaugccucagugcc

SEQ ID NO: 424209 - RNA, 19 nt, Artificial Sequence
  Description of Artificial Sequence: Synthetic oligonucleotide
  Sense Strand Starting at position 1344 of SEQ ID NO: 318920
auggauauaucuguaaccu

SEQ ID NO: 424210 - RNA, 19 nt, Artificial Sequence
  Description of Artificial Sequence: Synthetic oligonucleotide
  Antisense Strand to SEQ ID NO: 424209
agguuacagauauauccau

SEQ ID NO: 424211 - RNA, 19 nt, Artificial Sequence
  Description of Artificial Sequence: Synthetic oligonucleotide
  Sense Strand Starting at position 1344 of SEQ ID NO: 318921
uggauauaucuguaaccuc

SEQ ID NO: 424212 - RNA, 19 nt, Artificial Sequence
  Description of Artificial Sequence: Synthetic oligonucleotide
  Antisense Strand to SEQ ID NO: 424211
gagguuacagauauaucca

SEQ ID NO: 424213 - RNA, 19 nt, Artificial Sequence
  Description of Artificial Sequence: Synthetic oligonucleotide
  Sense Strand Starting at position 1344 of SEQ ID NO: 318930
cuguaaccucaagguuaga

SEQ ID NO: 424214 - RNA, 19 nt, Artificial Sequence
  Description of Artificial Sequence: Synthetic oligonucleotide
  Antisense Strand to SEQ ID NO: 424213
ucuaaccuugagguuacag

SEQ ID NO: 424215 - RNA, 19 nt, Artificial Sequence
  Description of Artificial Sequence: Synthetic oligonucleotide
  Sense Strand Starting at position 1344 of SEQ ID NO: 318987
uuagcuauccagcagcaga

SEQ ID NO: 424216 - RNA, 19 nt, Artificial Sequence
  Description of Artificial Sequence: Synthetic oligonucleotide
  Antisense Strand to SEQ ID NO: 424215
ucugcugcuggauagcuaa

SEQ ID NO: 424217 - RNA, 19 nt, Artificial Sequence
  Description of Artificial Sequence: Synthetic oligonucleotide
  Sense Strand Starting at position 1344 of SEQ ID NO: 319009
ccaccauggucauuaguua

SEQ ID NO: 424218 - RNA, 19 nt, Artificial Sequence
  Description of Artificial Sequence: Synthetic oligonucleotide
  Antisense Strand to SEQ ID NO: 424217
uaacuaaugaccauggugg

SEQ ID NO: 424219 - RNA, 19 nt, Artificial Sequence
  Description of Artificial Sequence: Synthetic oligonucleotide
  Sense Strand Starting at position 1344 of SEQ ID NO: 319057
uggcauguuaugugggaaa

SEQ ID NO: 424220 - RNA, 19 nt, Artificial Sequence
  Description of Artificial Sequence: Synthetic oligonucleotide
  Antisense Strand to SEQ ID NO: 424219
uuucccacauaacaugcca

SEQ ID NO: 424221 - RNA, 19 nt, Artificial Sequence
  Description of Artificial Sequence: Synthetic oligonucleotide
  Sense Strand Starting at position 1344 of SEQ ID NO: 319059
gcauguuaugugggaaaca

SEQ ID NO: 424222 - RNA, 19 nt, Artificial Sequence
  Description of Artificial Sequence: Synthetic oligonucleotide
  Antisense Strand to SEQ ID NO: 424221
uguuucccacauaacaugc

SEQ ID NO: 424223 - RNA, 19 nt, Artificial Sequence
  Description of Artificial Sequence: Synthetic oligonucleotide
  Sense Strand Starting at position 1344 of SEQ ID NO: 319168
auguaagaucuaugccaag

SEQ ID NO: 424224 - RNA, 19 nt, Artificial Sequence
  Description of Artificial Sequence: Synthetic oligonucleotide
  Antisense Strand to SEQ ID NO: 424223
cuuggcauagaucuuacau

SEQ ID NO: 424225 - RNA, 19 nt, Artificial Sequence
  Description of Artificial Sequence: Synthetic oligonucleotide
  Sense Strand Starting at position 1344 of SEQ ID NO: 319174
gaucuaugccaaggaagug

SEQ ID NO: 424226 - RNA, 19 nt, Artificial Sequence
  Description of Artificial Sequence: Synthetic oligonucleotide
  Antisense Strand to SEQ ID NO: 424225
cacuuccuuggcauagauc

SEQ ID NO: 424227 - RNA, 19 nt, Artificial Sequence
  Description of Artificial Sequence: Synthetic oligonucleotide
  Sense Strand Starting at position 1344 of SEQ ID NO: 319179
augccaaggaagugguaua

SEQ ID NO: 424228 - RNA, 19 nt, Artificial Sequence
  Description of Artificial Sequence: Synthetic oligonucleotide
  Antisense Strand to SEQ ID NO: 424227
uauaccacuuccuuggcau

SEQ ID NO: 424229 - RNA, 19 nt, Artificial Sequence
  Description of Artificial Sequence: Synthetic oligonucleotide
  Sense Strand Starting at position 1344 of SEQ ID NO: 319195
auaguuaguggagguugaa

SEQ ID NO: 424230 - RNA, 19 nt, Artificial Sequence
  Description of Artificial Sequence: Synthetic oligonucleotide
  Antisense Strand to SEQ ID NO: 424229
uucaaccuccacuaacuau

SEQ ID NO: 424231 - RNA, 19 nt, Artificial Sequence
  Description of Artificial Sequence: Synthetic oligonucleotide
  Sense Strand Starting at position 1345 of SEQ ID NO: 317431
ucaucaaucccagguauug

SEQ ID NO: 424232 - RNA, 19 nt, Artificial Sequence
  Description of Artificial Sequence: Synthetic oligonucleotide
  Antisense Strand to SEQ ID NO: 424231
caauaccugggauugauga

SEQ ID NO: 424233 - RNA, 19 nt, Artificial Sequence
  Description of Artificial Sequence: Synthetic oligonucleotide
  Sense Strand Starting at position 1345 of SEQ ID NO: 317447
uuguaaagcgcuugacauc

SEQ ID NO: 424234 - RNA, 19 nt, Artificial Sequence
  Description of Artificial Sequence: Synthetic oligonucleotide
  Antisense Strand to SEQ ID NO: 424233
gaugucaagcgcuuuacaa

SEQ ID NO: 424235 - RNA, 19 nt, Artificial Sequence
  Description of Artificial Sequence: Synthetic oligonucleotide
  Sense Strand Starting at position 1345 of SEQ ID NO: 317523
ucccucuucucacggaaau

SEQ ID NO: 424236 - RNA, 19 nt, Artificial Sequence
  Description of Artificial Sequence: Synthetic oligonucleotide
  Antisense Strand to SEQ ID NO: 424235
auuuccgugagaagaggga

SEQ ID NO: 424237 - RNA, 19 nt, Artificial Sequence
  Description of Artificial Sequence: Synthetic oligonucleotide
  Sense Strand Starting at position 1345 of SEQ ID NO: 317524
cccucuucucacggaaauu

SEQ ID NO: 424238 - RNA, 19 nt, Artificial Sequence
  Description of Artificial Sequence: Synthetic oligonucleotide
  Antisense Strand to SEQ ID NO: 424237
aauuuccgugagaagaggg

SEQ ID NO: 424239 - RNA, 19 nt, Artificial Sequence
  Description of Artificial Sequence: Synthetic oligonucleotide
  Sense Strand Starting at position 1345 of SEQ ID NO: 317612
uucucacagucauaugcau

SEQ ID NO: 424240 - RNA, 19 nt, Artificial Sequence
  Description of Artificial Sequence: Synthetic oligonucleotide
  Antisense Strand to SEQ ID NO: 424239
augcauaugacugugagaa

SEQ ID NO: 424241 - RNA, 19 nt, Artificial Sequence
  Description of Artificial Sequence: Synthetic oligonucleotide
  Sense Strand Starting at position 1345 of SEQ ID NO: 317906
uuaagaucuugggagcaca

SEQ ID NO: 424242 - RNA, 19 nt, Artificial Sequence
  Description of Artificial Sequence: Synthetic oligonucleotide
  Antisense Strand to SEQ ID NO: 424241
ugugcucccaagaucuuaa

SEQ ID NO: 424243 - RNA, 19 nt, Artificial Sequence
  Description of Artificial Sequence: Synthetic oligonucleotide
  Sense Strand Starting at position 1345 of SEQ ID NO: 317954
guaauuucucaguguaacc

SEQ ID NO: 424244 - RNA, 19 nt, Artificial Sequence
  Description of Artificial Sequence: Synthetic oligonucleotide
  Antisense Strand to SEQ ID NO: 424243
gguuacacugagaaauuac

SEQ ID NO: 424245 - RNA, 19 nt, Artificial Sequence
  Description of Artificial Sequence: Synthetic oligonucleotide
  Sense Strand Starting at position 1345 of SEQ ID NO: 318074
gaugaaagcgcuuaaguuc

SEQ ID NO: 424246 - RNA, 19 nt, Artificial Sequence
  Description of Artificial Sequence: Synthetic oligonucleotide
  Antisense Strand to SEQ ID NO: 424245
gaacuuaagcgcuuucauc

SEQ ID NO: 424247 - RNA, 19 nt, Artificial Sequence
  Description of Artificial Sequence: Synthetic oligonucleotide
  Sense Strand Starting at position 1345 of SEQ ID NO: 318082
cgcuuaaguucccagguua

SEQ ID NO: 424248 - RNA, 19 nt, Artificial Sequence
  Description of Artificial Sequence: Synthetic oligonucleotide
  Antisense Strand to SEQ ID NO: 424247
uaaccugggaacuuaagcg

SEQ ID NO: 424249 - RNA, 19 nt, Artificial Sequence
  Description of Artificial Sequence: Synthetic oligonucleotide
  Sense Strand Starting at position 1345 of SEQ ID NO: 318093
ccagguuauugagguuuga

SEQ ID NO: 424250 - RNA, 19 nt, Artificial Sequence
  Description of Artificial Sequence: Synthetic oligonucleotide
  Antisense Strand to SEQ ID NO: 424249
ucaaaccucaauaaccugg

SEQ ID NO: 424251 - RNA, 19 nt, Artificial Sequence
  Description of Artificial Sequence: Synthetic oligonucleotide
  Sense Strand Starting at position 1345 of SEQ ID NO: 318123
gcaaauuugaaacguuguu

SEQ ID NO: 424252 - RNA, 19 nt, Artificial Sequence
  Description of Artificial Sequence: Synthetic oligonucleotide
  Antisense Strand to SEQ ID NO: 424251
aacaacguuucaaauuugc

SEQ ID NO: 424253 - RNA, 19 nt, Artificial Sequence
  Description of Artificial Sequence: Synthetic oligonucleotide
  Sense Strand Starting at position 1345 of SEQ ID NO: 318317
gcccaaagcucccuagaga

SEQ ID NO: 424254 - RNA, 19 nt, Artificial Sequence
  Description of Artificial Sequence: Synthetic oligonucleotide
  Antisense Strand to SEQ ID NO: 424253
ucucuagggagcuuugggc

SEQ ID NO: 424255 - RNA, 19 nt, Artificial Sequence
  Description of Artificial Sequence: Synthetic oligonucleotide
  Sense Strand Starting at position 1345 of SEQ ID NO: 318318
cccaaagcucccuagagau

SEQ ID NO: 424256 - RNA, 19 nt, Artificial Sequence
  Description of Artificial Sequence: Synthetic oligonucleotide
  Antisense Strand to SEQ ID NO: 424255
aucucuagggagcuuuggg

SEQ ID NO: 424257 - RNA, 19 nt, Artificial Sequence
  Description of Artificial Sequence: Synthetic oligonucleotide
  Sense Strand Starting at position 1345 of SEQ ID NO: 318422
aucagucacccuugucaca

SEQ ID NO: 424258 - RNA, 19 nt, Artificial Sequence
  Description of Artificial Sequence: Synthetic oligonucleotide
  Antisense Strand to SEQ ID NO: 424257
ugugacaagggugacugau

SEQ ID NO: 424259 - RNA, 19 nt, Artificial Sequence
  Description of Artificial Sequence: Synthetic oligonucleotide
  Sense Strand Starting at position 1345 of SEQ ID NO: 318427
ucacccuugucacaguuau

SEQ ID NO: 424260 - RNA, 19 nt, Artificial Sequence
  Description of Artificial Sequence: Synthetic oligonucleotide
  Antisense Strand to SEQ ID NO: 424259
auaacugugacaaggguga

SEQ ID NO: 424261 - RNA, 19 nt, Artificial Sequence
  Description of Artificial Sequence: Synthetic oligonucleotide
  Sense Strand Starting at position 1345 of SEQ ID NO: 318544
ucagaugagugagcagaaa

SEQ ID NO: 424262 - RNA, 19 nt, Artificial Sequence
  Description of Artificial Sequence: Synthetic oligonucleotide
  Antisense Strand to SEQ ID NO: 424261
uuucugcucacucaucuga

SEQ ID NO: 424263 - RNA, 19 nt, Artificial Sequence
  Description of Artificial Sequence: Synthetic oligonucleotide
  Sense Strand Starting at position 1345 of SEQ ID NO: 318667
ugucuuugccuagcgcaaa

SEQ ID NO: 424264 - RNA, 19 nt, Artificial Sequence
  Description of Artificial Sequence: Synthetic oligonucleotide
  Antisense Strand to SEQ ID NO: 424263
uuugcgcuaggcaaagaca

SEQ ID NO: 424265 - RNA, 19 nt, Artificial Sequence
  Description of Artificial Sequence: Synthetic oligonucleotide
  Sense Strand Starting at position 1345 of SEQ ID NO: 318898
cuccgcagcucuguuuaaa

SEQ ID NO: 424266 - RNA, 19 nt, Artificial Sequence
  Description of Artificial Sequence: Synthetic oligonucleotide
  Antisense Strand to SEQ ID NO: 424265
uuuaaacagagcugcggag

SEQ ID NO: 424267 - RNA, 19 nt, Artificial Sequence
  Description of Artificial Sequence: Synthetic oligonucleotide
  Sense Strand Starting at position 1345 of SEQ ID NO: 318942
agcugaagcgucugcauau

SEQ ID NO: 424268 - RNA, 19 nt, Artificial Sequence
  Description of Artificial Sequence: Synthetic oligonucleotide
  Antisense Strand to SEQ ID NO: 424267
auaugcagacgcuucagcu

SEQ ID NO: 424269 - RNA, 19 nt, Artificial Sequence
  Description of Artificial Sequence: Synthetic oligonucleotide
  Sense Strand Starting at position 1345 of SEQ ID NO: 318943
gcugaagcgucugcauauu

SEQ ID NO: 424270 - RNA, 19 nt, Artificial Sequence
  Description of Artificial Sequence: Synthetic oligonucleotide
  Antisense Strand to SEQ ID NO: 424269
aauaugcagacgcuucagc

SEQ ID NO: 424271 - RNA, 19 nt, Artificial Sequence
  Description of Artificial Sequence: Synthetic oligonucleotide
  Sense Strand Starting at position 1346 of SEQ ID NO: 315311
ccaaucaaauugucuggaa

SEQ ID NO: 424272 - RNA, 19 nt, Artificial Sequence
  Description of Artificial Sequence: Synthetic oligonucleotide
  Antisense Strand to SEQ ID NO: 424271
uuccagacaauuugauugg

SEQ ID NO: 424273 - RNA, 19 nt, Artificial Sequence
  Description of Artificial Sequence: Synthetic oligonucleotide
  Sense Strand Starting at position 1346 of SEQ ID NO: 315413
gucaaauauuaauucugga

SEQ ID NO: 424274 - RNA, 19 nt, Artificial Sequence
  Description of Artificial Sequence: Synthetic oligonucleotide
  Antisense Strand to SEQ ID NO: 424273
uccagaauuaauauuugac

SEQ ID NO: 424275 - RNA, 19 nt, Artificial Sequence
  Description of Artificial Sequence: Synthetic oligonucleotide
  Sense Strand Starting at position 1346 of SEQ ID NO: 315418
auauuaauucuggaacguc

SEQ ID NO: 424276 - RNA, 19 nt, Artificial Sequence
  Description of Artificial Sequence: Synthetic oligonucleotide
  Antisense Strand to SEQ ID NO: 424275
gacguuccagaauuaauau

SEQ ID NO: 424277 - RNA, 19 nt, Artificial Sequence
  Description of Artificial Sequence: Synthetic oligonucleotide
  Sense Strand Starting at position 1346 of SEQ ID NO: 315427
cuggaacguccagaugagu

SEQ ID NO: 424278 - RNA, 19 nt, Artificial Sequence
  Description of Artificial Sequence: Synthetic oligonucleotide
  Antisense Strand to SEQ ID NO: 424277
acucaucuggacguuccag

SEQ ID NO: 424279 - RNA, 19 nt, Artificial Sequence
  Description of Artificial Sequence: Synthetic oligonucleotide
  Sense Strand Starting at position 1346 of SEQ ID NO: 315436
ccagaugaguaggcauuga

SEQ ID NO: 424280 - RNA, 19 nt, Artificial Sequence
  Description of Artificial Sequence: Synthetic oligonucleotide
  Antisense Strand to SEQ ID NO: 424279
ucaaugccuacucaucugg

SEQ ID NO: 424281 - RNA, 19 nt, Artificial Sequence
  Description of Artificial Sequence: Synthetic oligonucleotide
  Sense Strand Starting at position 1346 of SEQ ID NO: 315483
uugugucauugauuugugu

SEQ ID NO: 424282 - RNA, 19 nt, Artificial Sequence
  Description of Artificial Sequence: Synthetic oligonucleotide
  Antisense Strand to SEQ ID NO: 424281
acacaaaucaaugacacaa

SEQ ID NO: 424283 - RNA, 19 nt, Artificial Sequence
  Description of Artificial Sequence: Synthetic oligonucleotide
  Sense Strand Starting at position 1346 of SEQ ID NO: 315489
cauugauuugugugcaaau

SEQ ID NO: 424284 - RNA, 19 nt, Artificial Sequence
  Description of Artificial Sequence: Synthetic oligonucleotide
  Antisense Strand to SEQ ID NO: 424283
auuugcacacaaaucaaug

SEQ ID NO: 424285 - RNA, 19 nt, Artificial Sequence
  Description of Artificial Sequence: Synthetic oligonucleotide
  Sense Strand Starting at position 1346 of SEQ ID NO: 315675
uuacuugacucuuuaagag

SEQ ID NO: 424286 - RNA, 19 nt, Artificial Sequence
  Description of Artificial Sequence: Synthetic oligonucleotide
  Antisense Strand to SEQ ID NO: 424285
cucuuaaagagucaaguaa

SEQ ID NO: 424287 - RNA, 19 nt, Artificial Sequence
  Description of Artificial Sequence: Synthetic oligonucleotide
  Sense Strand Starting at position 1346 of SEQ ID NO: 315699
cgguaaagccguaaucguu

SEQ ID NO: 424288 - RNA, 19 nt, Artificial Sequence
  Description of Artificial Sequence: Synthetic oligonucleotide
  Antisense Strand to SEQ ID NO: 424287
aacgauuacggcuuuaccg

SEQ ID NO: 424289 - RNA, 19 nt, Artificial Sequence
  Description of Artificial Sequence: Synthetic oligonucleotide
  Sense Strand Starting at position 1346 of SEQ ID NO: 315705
agccguaaucguuuccuca

SEQ ID NO: 424290 - RNA, 19 nt, Artificial Sequence
  Description of Artificial Sequence: Synthetic oligonucleotide
  Antisense Strand to SEQ ID NO: 424289
ugaggaaacgauuacggcu

SEQ ID NO: 424291 - RNA, 19 nt, Artificial Sequence
  Description of Artificial Sequence: Synthetic oligonucleotide
  Sense Strand Starting at position 1346 of SEQ ID NO: 315706
gccguaaucguuuccucau

SEQ ID NO: 424292 - RNA, 19 nt, Artificial Sequence
  Description of Artificial Sequence: Synthetic oligonucleotide
  Antisense Strand to SEQ ID NO: 424291
augaggaaacgauuacggc

SEQ ID NO: 424293 - RNA, 19 nt, Artificial Sequence
  Description of Artificial Sequence: Synthetic oligonucleotide
  Sense Strand Starting at position 1346 of SEQ ID NO: 315725
caccaaggaugucuuguau

SEQ ID NO: 424294 - RNA, 19 nt, Artificial Sequence
  Description of Artificial Sequence: Synthetic oligonucleotide
  Antisense Strand to SEQ ID NO: 424293
auacaagacauccuuggug

SEQ ID NO: 424295 - RNA, 19 nt, Artificial Sequence
  Description of Artificial Sequence: Synthetic oligonucleotide
  Sense Strand Starting at position 1346 of SEQ ID NO: 315781
agugacagucacuaguuaa

SEQ ID NO: 424296 - RNA, 19 nt, Artificial Sequence
  Description of Artificial Sequence: Synthetic oligonucleotide
  Antisense Strand to SEQ ID NO: 424295
uuaacuagugacugucacu

SEQ ID NO: 424297 - RNA, 19 nt, Artificial Sequence
  Description of Artificial Sequence: Synthetic oligonucleotide
  Sense Strand Starting at position 1346 of SEQ ID NO: 315831
gugguuugaauguaugaau

SEQ ID NO: 424298 - RNA, 19 nt, Artificial Sequence
  Description of Artificial Sequence: Synthetic oligonucleotide
  Antisense Strand to SEQ ID NO: 424297
auucauacauucaaaccac

SEQ ID NO: 424299 - RNA, 19 nt, Artificial Sequence
  Description of Artificial Sequence: Synthetic oligonucleotide
  Sense Strand Starting at position 1346 of SEQ ID NO: 315952
augauauaucuuuggugau

SEQ ID NO: 424300 - RNA, 19 nt, Artificial Sequence
  Description of Artificial Sequence: Synthetic oligonucleotide
  Antisense Strand to SEQ ID NO: 424299
aucaccaaagauauaucau

SEQ ID NO: 424301 - RNA, 19 nt, Artificial Sequence
  Description of Artificial Sequence: Synthetic oligonucleotide
  Sense Strand Starting at position 1346 of SEQ ID NO: 315954
gauauaucuuuggugauaa

SEQ ID NO: 424302 - RNA, 19 nt, Artificial Sequence
  Description of Artificial Sequence: Synthetic oligonucleotide
  Antisense Strand to SEQ ID NO: 424301
uuaucaccaaagauauauc

SEQ ID NO: 424303 - RNA, 19 nt, Artificial Sequence
  Description of Artificial Sequence: Synthetic oligonucleotide
  Sense Strand Starting at position 1346 of SEQ ID NO: 316093
ugaauuaauugcguaagaa

SEQ ID NO: 424304 - RNA, 19 nt, Artificial Sequence
  Description of Artificial Sequence: Synthetic oligonucleotide
  Antisense Strand to SEQ ID NO: 424303
uucuuacgcaauuaauuca

SEQ ID NO: 424305 - RNA, 19 nt, Artificial Sequence
  Description of Artificial Sequence: Synthetic oligonucleotide
  Sense Strand Starting at position 1346 of SEQ ID NO: 316094
gaauuaauugcguaagaaa

SEQ ID NO: 424306 - RNA, 19 nt, Artificial Sequence
  Description of Artificial Sequence: Synthetic oligonucleotide
  Antisense Strand to SEQ ID NO: 424305
uuucuuacgcaauuaauuc

SEQ ID NO: 424307 - RNA, 19 nt, Artificial Sequence
  Description of Artificial Sequence: Synthetic oligonucleotide
  Sense Strand Starting at position 1346 of SEQ ID NO: 316323
gggauucaucaccgguuga

SEQ ID NO: 424308 - RNA, 19 nt, Artificial Sequence
  Description of Artificial Sequence: Synthetic oligonucleotide
  Antisense Strand to SEQ ID NO: 424307
ucaaccggugaugaauccc

SEQ ID NO: 424309 - RNA, 19 nt, Artificial Sequence
  Description of Artificial Sequence: Synthetic oligonucleotide
  Sense Strand Starting at position 1346 of SEQ ID NO: 316418
cauaguugagaaggguaga

SEQ ID NO: 424310 - RNA, 19 nt, Artificial Sequence
  Description of Artificial Sequence: Synthetic oligonucleotide
  Antisense Strand to SEQ ID NO: 424309
ucuacccuucucaacuaug

SEQ ID NO: 424311 - RNA, 19 nt, Artificial Sequence
  Description of Artificial Sequence: Synthetic oligonucleotide
  Sense Strand Starting at position 1346 of SEQ ID NO: 316477
ucacuuugugacuaaaguu

SEQ ID NO: 424312 - RNA, 19 nt, Artificial Sequence
  Description of Artificial Sequence: Synthetic oligonucleotide
  Antisense Strand to SEQ ID NO: 424311
aacuuuagucacaaaguga

SEQ ID NO: 424313 - RNA, 19 nt, Artificial Sequence
  Description of Artificial Sequence: Synthetic oligonucleotide
  Sense Strand Starting at position 1346 of SEQ ID NO: 316688
gaugucugcccacagaaca

SEQ ID NO: 424314 - RNA, 19 nt, Artificial Sequence
  Description of Artificial Sequence: Synthetic oligonucleotide
  Antisense Strand to SEQ ID NO: 424313
uguucugugggcagacauc

SEQ ID NO: 424315 - RNA, 19 nt, Artificial Sequence
  Description of Artificial Sequence: Synthetic oligonucleotide
  Sense Strand Starting at position 1346 of SEQ ID NO: 316735
gccaaauccaagugggacu

SEQ ID NO: 424316 - RNA, 19 nt, Artificial Sequence
  Description of Artificial Sequence: Synthetic oligonucleotide
  Antisense Strand to SEQ ID NO: 424315
agucccacuuggauuuggc

SEQ ID NO: 424317 - RNA, 19 nt, Artificial Sequence
  Description of Artificial Sequence: Synthetic oligonucleotide
  Sense Strand Starting at position 1346 of SEQ ID NO: 316748
gggacucuguuaucuuaaa

SEQ ID NO: 424318 - RNA, 19 nt, Artificial Sequence
  Description of Artificial Sequence: Synthetic oligonucleotide
  Antisense Strand to SEQ ID NO: 424317
uuuaagauaacagaguccc

SEQ ID NO: 424319 - RNA, 19 nt, Artificial Sequence
  Description of Artificial Sequence: Synthetic oligonucleotide
  Sense Strand Starting at position 1346 of SEQ ID NO: 316749
ggacucuguuaucuuaaac

SEQ ID NO: 424320 - RNA, 19 nt, Artificial Sequence
  Description of Artificial Sequence: Synthetic oligonucleotide
  Antisense Strand to SEQ ID NO: 424319
guuuaagauaacagagucc

SEQ ID NO: 424321 - RNA, 19 nt, Artificial Sequence
  Description of Artificial Sequence: Synthetic oligonucleotide
  Sense Strand Starting at position 1346 of SEQ ID NO: 316776
guucucuaugcacaaagau

SEQ ID NO: 424322 - RNA, 19 nt, Artificial Sequence
  Description of Artificial Sequence: Synthetic oligonucleotide
  Antisense Strand to SEQ ID NO: 424321
aucuuugugcauagagaac

SEQ ID NO: 424323 - RNA, 19 nt, Artificial Sequence
  Description of Artificial Sequence: Synthetic oligonucleotide
  Sense Strand Starting at position 1346 of SEQ ID NO: 317053
gggcguccucgcucugaaa

SEQ ID NO: 424324 - RNA, 19 nt, Artificial Sequence
  Description of Artificial Sequence: Synthetic oligonucleotide
  Antisense Strand to SEQ ID NO: 424323
uuucagagcgaggacgccc

SEQ ID NO: 424325 - RNA, 19 nt, Artificial Sequence
  Description of Artificial Sequence: Synthetic oligonucleotide
  Sense Strand Starting at position 1346 of SEQ ID NO: 317054
ggcguccucgcucugaaau

SEQ ID NO: 424326 - RNA, 19 nt, Artificial Sequence
  Description of Artificial Sequence: Synthetic oligonucleotide
  Antisense Strand to SEQ ID NO: 424325
auuucagagcgaggacgcc

SEQ ID NO: 424327 - RNA, 19 nt, Artificial Sequence
  Description of Artificial Sequence: Synthetic oligonucleotide
  Sense Strand Starting at position 1346 of SEQ ID NO: 317110
guugguuggcaauaauaga

SEQ ID NO: 424328 - RNA, 19 nt, Artificial Sequence
  Description of Artificial Sequence: Synthetic oligonucleotide
  Antisense Strand to SEQ ID NO: 424327
ucuauuauugccaaccaac

SEQ ID NO: 424329 - RNA, 19 nt, Artificial Sequence
  Description of Artificial Sequence: Synthetic oligonucleotide
  Sense Strand Starting at position 1346 of SEQ ID NO: 317149
gggaaaugggugugagguu

SEQ ID NO: 424330 - RNA, 19 nt, Artificial Sequence
  Description of Artificial Sequence: Synthetic oligonucleotide
  Antisense Strand to SEQ ID NO: 424329
aaccucacacccauuuccc

SEQ ID NO: 424331 - RNA, 19 nt, Artificial Sequence
  Description of Artificial Sequence: Synthetic oligonucleotide
  Sense Strand Starting at position 1346 of SEQ ID NO: 317211
uucuaagaggucuggauca

SEQ ID NO: 424332 - RNA, 19 nt, Artificial Sequence
  Description of Artificial Sequence: Synthetic oligonucleotide
  Antisense Strand to SEQ ID NO: 424331
ugauccagaccucuuagaa

SEQ ID NO: 424333 - RNA, 19 nt, Artificial Sequence
  Description of Artificial Sequence: Synthetic oligonucleotide
  Sense Strand Starting at position 1346 of SEQ ID NO: 317377
ggguaaacaucuccuuuag

SEQ ID NO: 424334 - RNA, 19 nt, Artificial Sequence
  Description of Artificial Sequence: Synthetic oligonucleotide
  Antisense Strand to SEQ ID NO: 424333
cuaaaggagauguuuaccc

SEQ ID NO: 424335 - RNA, 19 nt, Artificial Sequence
  Description of Artificial Sequence: Synthetic oligonucleotide
  Sense Strand Starting at position 1346 of SEQ ID NO: 317428
agucaucuugcugaaagag

SEQ ID NO: 424336 - RNA, 19 nt, Artificial Sequence
  Description of Artificial Sequence: Synthetic oligonucleotide
  Antisense Strand to SEQ ID NO: 424335
cucuuucagcaagaugacu

SEQ ID NO: 424337 - RNA, 19 nt, Artificial Sequence
  Description of Artificial Sequence: Synthetic oligonucleotide
  Sense Strand Starting at position 1346 of SEQ ID NO: 317451
gagagaauuugggagcaau

SEQ ID NO: 424338 - RNA, 19 nt, Artificial Sequence
  Description of Artificial Sequence: Synthetic oligonucleotide
  Antisense Strand to SEQ ID NO: 424337
auugcucccaaauucucuc

SEQ ID NO: 424339 - RNA, 19 nt, Artificial Sequence
  Description of Artificial Sequence: Synthetic oligonucleotide
  Sense Strand Starting at position 1346 of SEQ ID NO: 317651
gggagcuccagugauugau

SEQ ID NO: 424340 - RNA, 19 nt, Artificial Sequence
  Description of Artificial Sequence: Synthetic oligonucleotide
  Antisense Strand to SEQ ID NO: 424339
aucaaucacuggagcuccc

SEQ ID NO: 424341 - RNA, 19 nt, Artificial Sequence
  Description of Artificial Sequence: Synthetic oligonucleotide
  Sense Strand Starting at position 1346 of SEQ ID NO: 318089
cuguucucuagagggagaa

SEQ ID NO: 424342 - RNA, 19 nt, Artificial Sequence
  Description of Artificial Sequence: Synthetic oligonucleotide
  Antisense Strand to SEQ ID NO: 424341
uucucccucuagagaacag

SEQ ID NO: 424343 - RNA, 19 nt, Artificial Sequence
  Description of Artificial Sequence: Synthetic oligonucleotide
  Sense Strand Starting at position 1346 of SEQ ID NO: 318099
gagggagaagcuuggguuu

SEQ ID NO: 424344 - RNA, 19 nt, Artificial Sequence
  Description of Artificial Sequence: Synthetic oligonucleotide
  Antisense Strand to SEQ ID NO: 424343
aaacccaagcuucucccuc

SEQ ID NO: 424345 - RNA, 19 nt, Artificial Sequence
  Description of Artificial Sequence: Synthetic oligonucleotide
  Sense Strand Starting at position 1346 of SEQ ID NO: 318161
cagaauagaguuuguauca

SEQ ID NO: 424346 - RNA, 19 nt, Artificial Sequence
  Description of Artificial Sequence: Synthetic oligonucleotide
  Antisense Strand to SEQ ID NO: 424345
ugauacaaacucuauucug

SEQ ID NO: 424347 - RNA, 19 nt, Artificial Sequence
  Description of Artificial Sequence: Synthetic oligonucleotide
  Sense Strand Starting at position 1346 of SEQ ID NO: 318162
agaauagaguuuguaucag

SEQ ID NO: 424348 - RNA, 19 nt, Artificial Sequence
  Description of Artificial Sequence: Synthetic oligonucleotide
  Antisense Strand to SEQ ID NO: 424347
cugauacaaacucuauucu

SEQ ID NO: 424349 - RNA, 19 nt, Artificial Sequence
  Description of Artificial Sequence: Synthetic oligonucleotide
  Sense Strand Starting at position 1346 of SEQ ID NO: 318394
uuccuaagacuuugacaug

SEQ ID NO: 424350 - RNA, 19 nt, Artificial Sequence
  Description of Artificial Sequence: Synthetic oligonucleotide
  Antisense Strand to SEQ ID NO: 424349
caugucaaagucuuaggaa

SEQ ID NO: 424351 - RNA, 19 nt, Artificial Sequence
  Description of Artificial Sequence: Synthetic oligonucleotide
  Sense Strand Starting at position 1347 of SEQ ID NO: 315241
ucacuuugugacuaaaguu

SEQ ID NO: 424352 - RNA, 19 nt, Artificial Sequence
  Description of Artificial Sequence: Synthetic oligonucleotide
  Antisense Strand to SEQ ID NO: 424351
aacuuuagucacaaaguga

SEQ ID NO: 424353 - RNA, 19 nt, Artificial Sequence
  Description of Artificial Sequence: Synthetic oligonucleotide
  Sense Strand Starting at position 1347 of SEQ ID NO: 315452
gaugucugcccacagaaca

SEQ ID NO: 424354 - RNA, 19 nt, Artificial Sequence
  Description of Artificial Sequence: Synthetic oligonucleotide
  Antisense Strand to SEQ ID NO: 424353
uguucugugggcagacauc

SEQ ID NO: 424355 - RNA, 19 nt, Artificial Sequence
  Description of Artificial Sequence: Synthetic oligonucleotide
  Sense Strand Starting at position 1347 of SEQ ID NO: 315468
acaagcaguuguuuaacuu

SEQ ID NO: 424356 - RNA, 19 nt, Artificial Sequence
  Description of Artificial Sequence: Synthetic oligonucleotide
  Antisense Strand to SEQ ID NO: 424355
aaguuaaacaacugcuugu

SEQ ID NO: 424357 - RNA, 19 nt, Artificial Sequence
  Description of Artificial Sequence: Synthetic oligonucleotide
  Sense Strand Starting at position 1347 of SEQ ID NO: 315499
gccaaauccaagugggacu

SEQ ID NO: 424358 - RNA, 19 nt, Artificial Sequence
  Description of Artificial Sequence: Synthetic oligonucleotide
  Antisense Strand to SEQ ID NO: 424357
agucccacuuggauuuggc

SEQ ID NO: 424359 - RNA, 19 nt, Artificial Sequence
  Description of Artificial Sequence: Synthetic oligonucleotide
  Sense Strand Starting at position 1347 of SEQ ID NO: 315512
gggacucuguuaucuuaaa

SEQ ID NO: 424360 - RNA, 19 nt, Artificial Sequence
  Description of Artificial Sequence: Synthetic oligonucleotide
  Antisense Strand to SEQ ID NO: 424359
uuuaagauaacagaguccc

SEQ ID NO: 424361 - RNA, 19 nt, Artificial Sequence
  Description of Artificial Sequence: Synthetic oligonucleotide
  Sense Strand Starting at position 1347 of SEQ ID NO: 315513
ggacucuguuaucuuaaac

SEQ ID NO: 424362 - RNA, 19 nt, Artificial Sequence
  Description of Artificial Sequence: Synthetic oligonucleotide
  Antisense Strand to SEQ ID NO: 424361
guuuaagauaacagagucc

SEQ ID NO: 424363 - RNA, 19 nt, Artificial Sequence
  Description of Artificial Sequence: Synthetic oligonucleotide
  Sense Strand Starting at position 1347 of SEQ ID NO: 315540
guucucuaugcacaaagau

SEQ ID NO: 424364 - RNA, 19 nt, Artificial Sequence
  Description of Artificial Sequence: Synthetic oligonucleotide
  Antisense Strand to SEQ ID NO: 424363
aucuuugugcauagagaac

SEQ ID NO: 424365 - RNA, 19 nt, Artificial Sequence
  Description of Artificial Sequence: Synthetic oligonucleotide
  Sense Strand Starting at position 1347 of SEQ ID NO: 315817
gggcguccucgcucugaaa

SEQ ID NO: 424366 - RNA, 19 nt, Artificial Sequence
  Description of Artificial Sequence: Synthetic oligonucleotide
  Antisense Strand to SEQ ID NO: 424365
uuucagagcgaggacgccc

SEQ ID NO: 424367 - RNA, 19 nt, Artificial Sequence
  Description of Artificial Sequence: Synthetic oligonucleotide
  Sense Strand Starting at position 1347 of SEQ ID NO: 315818
ggcguccucgcucugaaau

SEQ ID NO: 424368 - RNA, 19 nt, Artificial Sequence
  Description of Artificial Sequence: Synthetic oligonucleotide
  Antisense Strand to SEQ ID NO: 424367
auuucagagcgaggacgcc

SEQ ID NO: 424369 - RNA, 19 nt, Artificial Sequence
  Description of Artificial Sequence: Synthetic oligonucleotide
  Sense Strand Starting at position 1347 of SEQ ID NO: 315874
guugguuggcaauaauaga

SEQ ID NO: 424370 - RNA, 19 nt, Artificial Sequence
  Description of Artificial Sequence: Synthetic oligonucleotide
  Antisense Strand to SEQ ID NO: 424369
ucuauuauugccaaccaac

SEQ ID NO: 424371 - RNA, 19 nt, Artificial Sequence
  Description of Artificial Sequence: Synthetic oligonucleotide
  Sense Strand Starting at position 1347 of SEQ ID NO: 315913
gggaaaugggugugagguu

SEQ ID NO: 424372 - RNA, 19 nt, Artificial Sequence
  Description of Artificial Sequence: Synthetic oligonucleotide
  Antisense Strand to SEQ ID NO: 424371
aaccucacacccauuuccc

SEQ ID NO: 424373 - RNA, 19 nt, Artificial Sequence
  Description of Artificial Sequence: Synthetic oligonucleotide
  Sense Strand Starting at position 1347 of SEQ ID NO: 315922
gugugagguucccuagaga

SEQ ID NO: 424374 - RNA, 19 nt, Artificial Sequence
  Description of Artificial Sequence: Synthetic oligonucleotide
  Antisense Strand to SEQ ID NO: 424373
ucucuagggaaccucacac

SEQ ID NO: 424375 - RNA, 19 nt, Artificial Sequence
  Description of Artificial Sequence: Synthetic oligonucleotide
  Sense Strand Starting at position 1347 of SEQ ID NO: 315933
ccuagagaucccuguccac

SEQ ID NO: 424376 - RNA, 19 nt, Artificial Sequence
  Description of Artificial Sequence: Synthetic oligonucleotide
  Antisense Strand to SEQ ID NO: 424375
guggacagggaucucuagg

SEQ ID NO: 424377 - RNA, 19 nt, Artificial Sequence
  Description of Artificial Sequence: Synthetic oligonucleotide
  Sense Strand Starting at position 1347 of SEQ ID NO: 315975
uucuaagaggucuggauca

SEQ ID NO: 424378 - RNA, 19 nt, Artificial Sequence
  Description of Artificial Sequence: Synthetic oligonucleotide
  Antisense Strand to SEQ ID NO: 424377
ugauccagaccucuuagaa

SEQ ID NO: 424379 - RNA, 19 nt, Artificial Sequence
  Description of Artificial Sequence: Synthetic oligonucleotide
  Sense Strand Starting at position 1347 of SEQ ID NO: 316141
ggguaaacaucuccuuuag

SEQ ID NO: 424380 - RNA, 19 nt, Artificial Sequence
  Description of Artificial Sequence: Synthetic oligonucleotide
  Antisense Strand to SEQ ID NO: 424379
cuaaaggagauguuuaccc

SEQ ID NO: 424381 - RNA, 19 nt, Artificial Sequence
  Description of Artificial Sequence: Synthetic oligonucleotide
  Sense Strand Starting at position 1347 of SEQ ID NO: 316143
guaaacaucuccuuuaguu

SEQ ID NO: 424382 - RNA, 19 nt, Artificial Sequence
  Description of Artificial Sequence: Synthetic oligonucleotide
  Antisense Strand to SEQ ID NO: 424381
aacuaaaggagauguuuac

SEQ ID NO: 424383 - RNA, 19 nt, Artificial Sequence
  Description of Artificial Sequence: Synthetic oligonucleotide
  Sense Strand Starting at position 1347 of SEQ ID NO: 316190
ccagucaucuugcugaaag

SEQ ID NO: 424384 - RNA, 19 nt, Artificial Sequence
  Description of Artificial Sequence: Synthetic oligonucleotide
  Antisense Strand to SEQ ID NO: 424383
cuuucagcaagaugacugg

SEQ ID NO: 424385 - RNA, 19 nt, Artificial Sequence
  Description of Artificial Sequence: Synthetic oligonucleotide
  Sense Strand Starting at position 1347 of SEQ ID NO: 316192
agucaucuugcugaaagag

SEQ ID NO: 424386 - RNA, 19 nt, Artificial Sequence
  Description of Artificial Sequence: Synthetic oligonucleotide
  Antisense Strand to SEQ ID NO: 424385
cucuuucagcaagaugacu

SEQ ID NO: 424387 - RNA, 19 nt, Artificial Sequence
  Description of Artificial Sequence: Synthetic oligonucleotide
  Sense Strand Starting at position 1347 of SEQ ID NO: 316215
gagagaauuugggagcaau

SEQ ID NO: 424388 - RNA, 19 nt, Artificial Sequence
  Description of Artificial Sequence: Synthetic oligonucleotide
  Antisense Strand to SEQ ID NO: 424387
auugcucccaaauucucuc

SEQ ID NO: 424389 - RNA, 19 nt, Artificial Sequence
  Description of Artificial Sequence: Synthetic oligonucleotide
  Sense Strand Starting at position 1347 of SEQ ID NO: 316415
gggagcuccagugauugau

SEQ ID NO: 424390 - RNA, 19 nt, Artificial Sequence
  Description of Artificial Sequence: Synthetic oligonucleotide
  Antisense Strand to SEQ ID NO: 424389
aucaaucacuggagcuccc

SEQ ID NO: 424391 - RNA, 19 nt, Artificial Sequence
  Description of Artificial Sequence: Synthetic oligonucleotide
  Sense Strand Starting at position 1347 of SEQ ID NO: 316418
agcuccagugauugauagu

SEQ ID NO: 424392 - RNA, 19 nt, Artificial Sequence
  Description of Artificial Sequence: Synthetic oligonucleotide
  Antisense Strand to SEQ ID NO: 424391
acuaucaaucacuggagcu

SEQ ID NO: 424393 - RNA, 19 nt, Artificial Sequence
  Description of Artificial Sequence: Synthetic oligonucleotide
  Sense Strand Starting at position 1347 of SEQ ID NO: 316853
cuguucucuagagggagaa

SEQ ID NO: 424394 - RNA, 19 nt, Artificial Sequence
  Description of Artificial Sequence: Synthetic oligonucleotide
  Antisense Strand to SEQ ID NO: 424393
uucucccucuagagaacag

SEQ ID NO: 424395 - RNA, 19 nt, Artificial Sequence
  Description of Artificial Sequence: Synthetic oligonucleotide
  Sense Strand Starting at position 1347 of SEQ ID NO: 316863
gagggagaagcuuggguuu

SEQ ID NO: 424396 - RNA, 19 nt, Artificial Sequence
  Description of Artificial Sequence: Synthetic oligonucleotide
  Antisense Strand to SEQ ID NO: 424395
aaacccaagcuucucccuc

SEQ ID NO: 424397 - RNA, 19 nt, Artificial Sequence
  Description of Artificial Sequence: Synthetic oligonucleotide
  Sense Strand Starting at position 1347 of SEQ ID NO: 316925
cagaauagaguuuguauca

SEQ ID NO: 424398 - RNA, 19 nt, Artificial Sequence
  Description of Artificial Sequence: Synthetic oligonucleotide
  Antisense Strand to SEQ ID NO: 424397
ugauacaaacucuauucug

SEQ ID NO: 424399 - RNA, 19 nt, Artificial Sequence
  Description of Artificial Sequence: Synthetic oligonucleotide
  Sense Strand Starting at position 1347 of SEQ ID NO: 316926
agaauagaguuuguaucag

SEQ ID NO: 424400 - RNA, 19 nt, Artificial Sequence
  Description of Artificial Sequence: Synthetic oligonucleotide
  Antisense Strand to SEQ ID NO: 424399
cugauacaaacucuauucu

SEQ ID NO: 424401 - RNA, 19 nt, Artificial Sequence
  Description of Artificial Sequence: Synthetic oligonucleotide
  Sense Strand Starting at position 1347 of SEQ ID NO: 316932
gaguuuguaucaguagauc

SEQ ID NO: 424402 - RNA, 19 nt, Artificial Sequence
  Description of Artificial Sequence: Synthetic oligonucleotide
  Antisense Strand to SEQ ID NO: 424401
gaucuacugauacaaacuc

SEQ ID NO: 424403 - RNA, 19 nt, Artificial Sequence
  Description of Artificial Sequence: Synthetic oligonucleotide
  Sense Strand Starting at position 1347 of SEQ ID NO: 317158
uuccuaagacuuugacaug

SEQ ID NO: 424404 - RNA, 19 nt, Artificial Sequence
  Description of Artificial Sequence: Synthetic oligonucleotide
  Antisense Strand to SEQ ID NO: 424403
caugucaaagucuuaggaa

SEQ ID NO: 424405 - RNA, 19 nt, Artificial Sequence
  Description of Artificial Sequence: Synthetic oligonucleotide
  Sense Strand Starting at position 1347 of SEQ ID NO: 317301
gccagaauccuaggagcug

SEQ ID NO: 424406 - RNA, 19 nt, Artificial Sequence
  Description of Artificial Sequence: Synthetic oligonucleotide
  Antisense Strand to SEQ ID NO: 424405
cagcuccuaggauucuggc

SEQ ID NO: 424407 - RNA, 19 nt, Artificial Sequence
  Description of Artificial Sequence: Synthetic oligonucleotide
  Sense Strand Starting at position 1347 of SEQ ID NO: 318220
gaagcaguuagggaaugua

SEQ ID NO: 424408 - RNA, 19 nt, Artificial Sequence
  Description of Artificial Sequence: Synthetic oligonucleotide
  Antisense Strand to SEQ ID NO: 424407
uacauucccuaacugcuuc

SEQ ID NO: 424409 - RNA, 19 nt, Artificial Sequence
  Description of Artificial Sequence: Synthetic oligonucleotide
  Sense Strand Starting at position 1347 of SEQ ID NO: 318223
gcaguuagggaauguauga

SEQ ID NO: 424410 - RNA, 19 nt, Artificial Sequence
  Description of Artificial Sequence: Synthetic oligonucleotide
  Antisense Strand to SEQ ID NO: 424409
ucauacauucccuaacugc

SEQ ID NO: 424411 - RNA, 19 nt, Artificial Sequence
  Description of Artificial Sequence: Synthetic oligonucleotide
  Sense Strand Starting at position 1347 of SEQ ID NO: 318252
augagccgucaggaugaua

SEQ ID NO: 424412 - RNA, 19 nt, Artificial Sequence
  Description of Artificial Sequence: Synthetic oligonucleotide
  Antisense Strand to SEQ ID NO: 424411
uaucauccugacggcucau

SEQ ID NO: 424413 - RNA, 19 nt, Artificial Sequence
  Description of Artificial Sequence: Synthetic oligonucleotide
  Sense Strand Starting at position 1347 of SEQ ID NO: 318410
uguauauuuggauguguuu

SEQ ID NO: 424414 - RNA, 19 nt, Artificial Sequence
  Description of Artificial Sequence: Synthetic oligonucleotide
  Antisense Strand to SEQ ID NO: 424413
aaacacauccaaauauaca

SEQ ID NO: 424415 - RNA, 19 nt, Artificial Sequence
  Description of Artificial Sequence: Synthetic oligonucleotide
  Sense Strand Starting at position 1347 of SEQ ID NO: 318594
guguguuuccugaaaggcg

SEQ ID NO: 424416 - RNA, 19 nt, Artificial Sequence
  Description of Artificial Sequence: Synthetic oligonucleotide
  Antisense Strand to SEQ ID NO: 424415
cgccuuucaggaaacacac

SEQ ID NO: 424417 - RNA, 19 nt, Artificial Sequence
  Description of Artificial Sequence: Synthetic oligonucleotide
  Sense Strand Starting at position 1347 of SEQ ID NO: 318630
aucuguucucccuagugag

SEQ ID NO: 424418 - RNA, 19 nt, Artificial Sequence
  Description of Artificial Sequence: Synthetic oligonucleotide
  Antisense Strand to SEQ ID NO: 424417
cucacuagggagaacagau

SEQ ID NO: 424419 - RNA, 19 nt, Artificial Sequence
  Description of Artificial Sequence: Synthetic oligonucleotide
  Sense Strand Starting at position 1347 of SEQ ID NO: 318746
uagugccuccgauauaucu

SEQ ID NO: 424420 - RNA, 19 nt, Artificial Sequence
  Description of Artificial Sequence: Synthetic oligonucleotide
  Antisense Strand to SEQ ID NO: 424419
agauauaucggaggcacua

SEQ ID NO: 424421 - RNA, 19 nt, Artificial Sequence
  Description of Artificial Sequence: Synthetic oligonucleotide
  Sense Strand Starting at position 1347 of SEQ ID NO: 318845
cucaaaguuggugggaaau

SEQ ID NO: 424422 - RNA, 19 nt, Artificial Sequence
  Description of Artificial Sequence: Synthetic oligonucleotide
  Antisense Strand to SEQ ID NO: 424421
auuucccaccaacuuugag

SEQ ID NO: 424423 - RNA, 19 nt, Artificial Sequence
  Description of Artificial Sequence: Synthetic oligonucleotide
  Sense Strand Starting at position 1347 of SEQ ID NO: 318868
ggcugcuagacucagacuu

SEQ ID NO: 424424 - RNA, 19 nt, Artificial Sequence
  Description of Artificial Sequence: Synthetic oligonucleotide
  Antisense Strand to SEQ ID NO: 424423
aagucugagucuagcagcc

SEQ ID NO: 424425 - RNA, 19 nt, Artificial Sequence
  Description of Artificial Sequence: Synthetic oligonucleotide
  Sense Strand Starting at position 1347 of SEQ ID NO: 319056
cgagaaucuaguuggugag

SEQ ID NO: 424426 - RNA, 19 nt, Artificial Sequence
  Description of Artificial Sequence: Synthetic oligonucleotide
  Antisense Strand to SEQ ID NO: 424425
cucaccaacuagauucucg

SEQ ID NO: 424427 - RNA, 19 nt, Artificial Sequence
  Description of Artificial Sequence: Synthetic oligonucleotide
  Sense Strand Starting at position 1347 of SEQ ID NO: 319057
gagaaucuaguuggugaga

SEQ ID NO: 424428 - RNA, 19 nt, Artificial Sequence
  Description of Artificial Sequence: Synthetic oligonucleotide
  Antisense Strand to SEQ ID NO: 424427
ucucaccaacuagauucuc

SEQ ID NO: 424429 - RNA, 19 nt, Artificial Sequence
  Description of Artificial Sequence: Synthetic oligonucleotide
  Sense Strand Starting at position 1347 of SEQ ID NO: 319058
agaaucuaguuggugagaa

SEQ ID NO: 424430 - RNA, 19 nt, Artificial Sequence
  Description of Artificial Sequence: Synthetic oligonucleotide
  Antisense Strand to SEQ ID NO: 424429
uucucaccaacuagauucu

SEQ ID NO: 424431 - RNA, 19 nt, Artificial Sequence
  Description of Artificial Sequence: Synthetic oligonucleotide
  Sense Strand Starting at position 1348 of SEQ ID NO: 315564
cuguucucuagagggagaa

SEQ ID NO: 424432 - RNA, 19 nt, Artificial Sequence
  Description of Artificial Sequence: Synthetic oligonucleotide
  Antisense Strand to SEQ ID NO: 424431
uucucccucuagagaacag

SEQ ID NO: 424433 - RNA, 19 nt, Artificial Sequence
  Description of Artificial Sequence: Synthetic oligonucleotide
  Sense Strand Starting at position 1348 of SEQ ID NO: 315574
gagggagaagcuuggguuu

SEQ ID NO: 424434 - RNA, 19 nt, Artificial Sequence
  Description of Artificial Sequence: Synthetic oligonucleotide
  Antisense Strand to SEQ ID NO: 424433
aaacccaagcuucucccuc

SEQ ID NO: 424435 - RNA, 19 nt, Artificial Sequence
  Description of Artificial Sequence: Synthetic oligonucleotide
  Sense Strand Starting at position 1348 of SEQ ID NO: 315636
cagaauagaguuuguauca

SEQ ID NO: 424436 - RNA, 19 nt, Artificial Sequence
  Description of Artificial Sequence: Synthetic oligonucleotide
  Antisense Strand to SEQ ID NO: 424435
ugauacaaacucuauucug

SEQ ID NO: 424437 - RNA, 19 nt, Artificial Sequence
  Description of Artificial Sequence: Synthetic oligonucleotide
  Sense Strand Starting at position 1348 of SEQ ID NO: 315637
agaauagaguuuguaucag

SEQ ID NO: 424438 - RNA, 19 nt, Artificial Sequence
  Description of Artificial Sequence: Synthetic oligonucleotide
  Antisense Strand to SEQ ID NO: 424437
cugauacaaacucuauucu

SEQ ID NO: 424439 - RNA, 19 nt, Artificial Sequence
  Description of Artificial Sequence: Synthetic oligonucleotide
  Sense Strand Starting at position 1348 of SEQ ID NO: 315643
gaguuuguaucaguagauc

SEQ ID NO: 424440 - RNA, 19 nt, Artificial Sequence
  Description of Artificial Sequence: Synthetic oligonucleotide
  Antisense Strand to SEQ ID NO: 424439
gaucuacugauacaaacuc

SEQ ID NO: 424441 - RNA, 19 nt, Artificial Sequence
  Description of Artificial Sequence: Synthetic oligonucleotide
  Sense Strand Starting at position 1348 of SEQ ID NO: 315869
uuccuaagacuuugacaug

SEQ ID NO: 424442 - RNA, 19 nt, Artificial Sequence
  Description of Artificial Sequence: Synthetic oligonucleotide
  Antisense Strand to SEQ ID NO: 424441
caugucaaagucuuaggaa

SEQ ID NO: 424443 - RNA, 19 nt, Artificial Sequence
  Description of Artificial Sequence: Synthetic oligonucleotide
  Sense Strand Starting at position 1348 of SEQ ID NO: 316012
gccagaauccuaggagcug

SEQ ID NO: 424444 - RNA, 19 nt, Artificial Sequence
  Description of Artificial Sequence: Synthetic oligonucleotide
  Antisense Strand to SEQ ID NO: 424443
cagcuccuaggauucuggc

SEQ ID NO: 424445 - RNA, 19 nt, Artificial Sequence
  Description of Artificial Sequence: Synthetic oligonucleotide
  Sense Strand Starting at position 1348 of SEQ ID NO: 316062
cuuguucgcauuggagaua

SEQ ID NO: 424446 - RNA, 19 nt, Artificial Sequence
  Description of Artificial Sequence: Synthetic oligonucleotide
  Antisense Strand to SEQ ID NO: 424445
uaucuccaaugcgaacaag

SEQ ID NO: 424447 - RNA, 19 nt, Artificial Sequence
  Description of Artificial Sequence: Synthetic oligonucleotide
  Sense Strand Starting at position 1348 of SEQ ID NO: 316931
gaagcaguuagggaaugua

SEQ ID NO: 424448 - RNA, 19 nt, Artificial Sequence
  Description of Artificial Sequence: Synthetic oligonucleotide
  Antisense Strand to SEQ ID NO: 424447
uacauucccuaacugcuuc

SEQ ID NO: 424449 - RNA, 19 nt, Artificial Sequence
  Description of Artificial Sequence: Synthetic oligonucleotide
  Sense Strand Starting at position 1348 of SEQ ID NO: 316934
gcaguuagggaauguauga

SEQ ID NO: 424450 - RNA, 19 nt, Artificial Sequence
  Description of Artificial Sequence: Synthetic oligonucleotide
  Antisense Strand to SEQ ID NO: 424449
ucauacauucccuaacugc

SEQ ID NO: 424451 - RNA, 19 nt, Artificial Sequence
  Description of Artificial Sequence: Synthetic oligonucleotide
  Sense Strand Starting at position 1348 of SEQ ID NO: 316939
uagggaauguaugaugaag

SEQ ID NO: 424452 - RNA, 19 nt, Artificial Sequence
  Description of Artificial Sequence: Synthetic oligonucleotide
  Antisense Strand to SEQ ID NO: 424451
cuucaucauacauucccua

SEQ ID NO: 424453 - RNA, 19 nt, Artificial Sequence
  Description of Artificial Sequence: Synthetic oligonucleotide
  Sense Strand Starting at position 1348 of SEQ ID NO: 316963
augagccgucaggaugaua

SEQ ID NO: 424454 - RNA, 19 nt, Artificial Sequence
  Description of Artificial Sequence: Synthetic oligonucleotide
  Antisense Strand to SEQ ID NO: 424453
uaucauccugacggcucau

SEQ ID NO: 424455 - RNA, 19 nt, Artificial Sequence
  Description of Artificial Sequence: Synthetic oligonucleotide
  Sense Strand Starting at position 1348 of SEQ ID NO: 317121
uguauauuuggauguguuu

SEQ ID NO: 424456 - RNA, 19 nt, Artificial Sequence
  Description of Artificial Sequence: Synthetic oligonucleotide
  Antisense Strand to SEQ ID NO: 424455
aaacacauccaaauauaca

SEQ ID NO: 424457 - RNA, 19 nt, Artificial Sequence
  Description of Artificial Sequence: Synthetic oligonucleotide
  Sense Strand Starting at position 1348 of SEQ ID NO: 317305
guguguuuccugaaaggcg

SEQ ID NO: 424458 - RNA, 19 nt, Artificial Sequence
  Description of Artificial Sequence: Synthetic oligonucleotide
  Antisense Strand to SEQ ID NO: 424457
cgccuuucaggaaacacac

SEQ ID NO: 424459 - RNA, 19 nt, Artificial Sequence
  Description of Artificial Sequence: Synthetic oligonucleotide
  Sense Strand Starting at position 1348 of SEQ ID NO: 317341
aucuguucucccuagugag

SEQ ID NO: 424460 - RNA, 19 nt, Artificial Sequence
  Description of Artificial Sequence: Synthetic oligonucleotide
  Antisense Strand to SEQ ID NO: 424459
cucacuagggagaacagau

SEQ ID NO: 424461 - RNA, 19 nt, Artificial Sequence
  Description of Artificial Sequence: Synthetic oligonucleotide
  Sense Strand Starting at position 1348 of SEQ ID NO: 317457
uagugccuccgauauaucu

SEQ ID NO: 424462 - RNA, 19 nt, Artificial Sequence
  Description of Artificial Sequence: Synthetic oligonucleotide
  Antisense Strand to SEQ ID NO: 424461
agauauaucggaggcacua

SEQ ID NO: 424463 - RNA, 19 nt, Artificial Sequence
  Description of Artificial Sequence: Synthetic oligonucleotide
  Sense Strand Starting at position 1348 of SEQ ID NO: 317556
cucaaaguuggugggaaau

SEQ ID NO: 424464 - RNA, 19 nt, Artificial Sequence
  Description of Artificial Sequence: Synthetic oligonucleotide
  Antisense Strand to SEQ ID NO: 424463
auuucccaccaacuuugag

SEQ ID NO: 424465 - RNA, 19 nt, Artificial Sequence
  Description of Artificial Sequence: Synthetic oligonucleotide
  Sense Strand Starting at position 1348 of SEQ ID NO: 317579
ggcugcuagacucagacuu

SEQ ID NO: 424466 - RNA, 19 nt, Artificial Sequence
  Description of Artificial Sequence: Synthetic oligonucleotide
  Antisense Strand to SEQ ID NO: 424465
aagucugagucuagcagcc

SEQ ID NO: 424467 - RNA, 19 nt, Artificial Sequence
  Description of Artificial Sequence: Synthetic oligonucleotide
  Sense Strand Starting at position 1348 of SEQ ID NO: 317766
gcgagaaucuaguugguga

SEQ ID NO: 424468 - RNA, 19 nt, Artificial Sequence
  Description of Artificial Sequence: Synthetic oligonucleotide
  Antisense Strand to SEQ ID NO: 424467
ucaccaacuagauucucgc

SEQ ID NO: 424469 - RNA, 19 nt, Artificial Sequence
  Description of Artificial Sequence: Synthetic oligonucleotide
  Sense Strand Starting at position 1348 of SEQ ID NO: 317767
cgagaaucuaguuggugag

SEQ ID NO: 424470 - RNA, 19 nt, Artificial Sequence
  Description of Artificial Sequence: Synthetic oligonucleotide
  Antisense Strand to SEQ ID NO: 424469
cucaccaacuagauucucg

SEQ ID NO: 424471 - RNA, 19 nt, Artificial Sequence
  Description of Artificial Sequence: Synthetic oligonucleotide
  Sense Strand Starting at position 1348 of SEQ ID NO: 317768
gagaaucuaguuggugaga

SEQ ID NO: 424472 - RNA, 19 nt, Artificial Sequence
  Description of Artificial Sequence: Synthetic oligonucleotide
  Antisense Strand to SEQ ID NO: 424471
ucucaccaacuagauucuc

SEQ ID NO: 424473 - RNA, 19 nt, Artificial Sequence
  Description of Artificial Sequence: Synthetic oligonucleotide
  Sense Strand Starting at position 1348 of SEQ ID NO: 317769
agaaucuaguuggugagaa

SEQ ID NO: 424474 - RNA, 19 nt, Artificial Sequence
  Description of Artificial Sequence: Synthetic oligonucleotide
  Antisense Strand to SEQ ID NO: 424473
uucucaccaacuagauucu

SEQ ID NO: 424475 - RNA, 19 nt, Artificial Sequence
  Description of Artificial Sequence: Synthetic oligonucleotide
  Sense Strand Starting at position 1348 of SEQ ID NO: 317931
cgccuaugaaaggaugagu

SEQ ID NO: 424476 - RNA, 19 nt, Artificial Sequence
  Description of Artificial Sequence: Synthetic oligonucleotide
  Antisense Strand to SEQ ID NO: 424475
acucauccuuucauaggcg

SEQ ID NO: 424477 - RNA, 19 nt, Artificial Sequence
  Description of Artificial Sequence: Synthetic oligonucleotide
  Sense Strand Starting at position 1348 of SEQ ID NO: 317950
ugagguuucuuuguuugga

SEQ ID NO: 424478 - RNA, 19 nt, Artificial Sequence
  Description of Artificial Sequence: Synthetic oligonucleotide
  Antisense Strand to SEQ ID NO: 424477
uccaaacaaagaaaccuca

SEQ ID NO: 424479 - RNA, 19 nt, Artificial Sequence
  Description of Artificial Sequence: Synthetic oligonucleotide
  Sense Strand Starting at position 1348 of SEQ ID NO: 317951
gagguuucuuuguuuggaa

SEQ ID NO: 424480 - RNA, 19 nt, Artificial Sequence
  Description of Artificial Sequence: Synthetic oligonucleotide
  Antisense Strand to SEQ ID NO: 424479
uuccaaacaaagaaaccuc

SEQ ID NO: 424481 - RNA, 19 nt, Artificial Sequence
  Description of Artificial Sequence: Synthetic oligonucleotide
  Sense Strand Starting at position 1348 of SEQ ID NO: 317952
agguuucuuuguuuggaaa

SEQ ID NO: 424482 - RNA, 19 nt, Artificial Sequence
  Description of Artificial Sequence: Synthetic oligonucleotide
  Antisense Strand to SEQ ID NO: 424481
uuuccaaacaaagaaaccu

SEQ ID NO: 424483 - RNA, 19 nt, Artificial Sequence
  Description of Artificial Sequence: Synthetic oligonucleotide
  Sense Strand Starting at position 1348 of SEQ ID NO: 318144
aacagagcugcggagaaau

SEQ ID NO: 424484 - RNA, 19 nt, Artificial Sequence
  Description of Artificial Sequence: Synthetic oligonucleotide
  Antisense Strand to SEQ ID NO: 424483
auuucuccgcagcucuguu

SEQ ID NO: 424485 - RNA, 19 nt, Artificial Sequence
  Description of Artificial Sequence: Synthetic oligonucleotide
  Sense Strand Starting at position 1348 of SEQ ID NO: 318227
ggcuuaauugauugaguca

SEQ ID NO: 424486 - RNA, 19 nt, Artificial Sequence
  Description of Artificial Sequence: Synthetic oligonucleotide
  Antisense Strand to SEQ ID NO: 424485
ugacucaaucaauuaagcc

SEQ ID NO: 424487 - RNA, 19 nt, Artificial Sequence
  Description of Artificial Sequence: Synthetic oligonucleotide
  Sense Strand Starting at position 1348 of SEQ ID NO: 318314
gucaauggcucuuugugga

SEQ ID NO: 424488 - RNA, 19 nt, Artificial Sequence
  Description of Artificial Sequence: Synthetic oligonucleotide
  Antisense Strand to SEQ ID NO: 424487
uccacaaagagccauugac

SEQ ID NO: 424489 - RNA, 19 nt, Artificial Sequence
  Description of Artificial Sequence: Synthetic oligonucleotide
  Sense Strand Starting at position 1348 of SEQ ID NO: 318354
gcaguuguugaauagacuu

SEQ ID NO: 424490 - RNA, 19 nt, Artificial Sequence
  Description of Artificial Sequence: Synthetic oligonucleotide
  Antisense Strand to SEQ ID NO: 424489
aagucuauucaacaacugc

SEQ ID NO: 424491 - RNA, 19 nt, Artificial Sequence
  Description of Artificial Sequence: Synthetic oligonucleotide
  Sense Strand Starting at position 1348 of SEQ ID NO: 318366
uagacuuugcgcuaggcaa

SEQ ID NO: 424492 - RNA, 19 nt, Artificial Sequence
  Description of Artificial Sequence: Synthetic oligonucleotide
  Antisense Strand to SEQ ID NO: 424491
uugccuagcgcaaagucua

SEQ ID NO: 424493 - RNA, 19 nt, Artificial Sequence
  Description of Artificial Sequence: Synthetic oligonucleotide
  Sense Strand Starting at position 1348 of SEQ ID NO: 318471
aaucaaagggaguguuauu

SEQ ID NO: 424494 - RNA, 19 nt, Artificial Sequence
  Description of Artificial Sequence: Synthetic oligonucleotide
  Antisense Strand to SEQ ID NO: 424493
aauaacacucccuuugauu

SEQ ID NO: 424495 - RNA, 19 nt, Artificial Sequence
  Description of Artificial Sequence: Synthetic oligonucleotide
  Sense Strand Starting at position 1348 of SEQ ID NO: 318502
cacucaucugaagguaagu

SEQ ID NO: 424496 - RNA, 19 nt, Artificial Sequence
  Description of Artificial Sequence: Synthetic oligonucleotide
  Antisense Strand to SEQ ID NO: 424495
acuuaccuucagaugagug

SEQ ID NO: 424497 - RNA, 19 nt, Artificial Sequence
  Description of Artificial Sequence: Synthetic oligonucleotide
  Sense Strand Starting at position 1348 of SEQ ID NO: 318507
aucugaagguaaguaaauu

SEQ ID NO: 424498 - RNA, 19 nt, Artificial Sequence
  Description of Artificial Sequence: Synthetic oligonucleotide
  Antisense Strand to SEQ ID NO: 424497
aauuuacuuaccuucagau

SEQ ID NO: 424499 - RNA, 19 nt, Artificial Sequence
  Description of Artificial Sequence: Synthetic oligonucleotide
  Sense Strand Starting at position 1348 of SEQ ID NO: 318950
ccucaauaaccugggaacu

SEQ ID NO: 424500 - RNA, 19 nt, Artificial Sequence
  Description of Artificial Sequence: Synthetic oligonucleotide
  Antisense Strand to SEQ ID NO: 424499
aguucccagguuauugagg

SEQ ID NO: 424501 - RNA, 19 nt, Artificial Sequence
  Description of Artificial Sequence: Synthetic oligonucleotide
  Sense Strand Starting at position 1348 of SEQ ID NO: 318951
cucaauaaccugggaacuu

SEQ ID NO: 424502 - RNA, 19 nt, Artificial Sequence
  Description of Artificial Sequence: Synthetic oligonucleotide
  Antisense Strand to SEQ ID NO: 424501
aaguucccagguuauugag

SEQ ID NO: 424503 - RNA, 19 nt, Artificial Sequence
  Description of Artificial Sequence: Synthetic oligonucleotide
  Sense Strand Starting at position 1348 of SEQ ID NO: 319041
ccggaagucugauuagaua

SEQ ID NO: 424504 - RNA, 19 nt, Artificial Sequence
  Description of Artificial Sequence: Synthetic oligonucleotide
  Antisense Strand to SEQ ID NO: 424503
uaucuaaucagacuuccgg

SEQ ID NO: 424505 - RNA, 19 nt, Artificial Sequence
  Description of Artificial Sequence: Synthetic oligonucleotide
  Sense Strand Starting at position 1348 of SEQ ID NO: 319081
gccgguuacacugagaaau

SEQ ID NO: 424506 - RNA, 19 nt, Artificial Sequence
  Description of Artificial Sequence: Synthetic oligonucleotide
  Antisense Strand to SEQ ID NO: 424505
auuucucaguguaaccggc

SEQ ID NO: 424507 - RNA, 19 nt, Artificial Sequence
  Description of Artificial Sequence: Synthetic oligonucleotide
  Sense Strand Starting at position 1348 of SEQ ID NO: 319127
gcccgugugcucccaagau

SEQ ID NO: 424508 - RNA, 19 nt, Artificial Sequence
  Description of Artificial Sequence: Synthetic oligonucleotide
  Antisense Strand to SEQ ID NO: 424507
aucuugggagcacacgggc

SEQ ID NO: 424509 - RNA, 19 nt, Artificial Sequence
  Description of Artificial Sequence: Synthetic oligonucleotide
  Sense Strand Starting at position 1348 of SEQ ID NO: 319131
gugugcucccaagaucuua

SEQ ID NO: 424510 - RNA, 19 nt, Artificial Sequence
  Description of Artificial Sequence: Synthetic oligonucleotide
  Antisense Strand to SEQ ID NO: 424509
uaagaucuugggagcacac

SEQ ID NO: 424511 - RNA, 19 nt, Artificial Sequence
  Description of Artificial Sequence: Synthetic oligonucleotide
  Sense Strand Starting at position 1349 of SEQ ID NO: 315471
gguaguguggccuacagaa

SEQ ID NO: 424512 - RNA, 19 nt, Artificial Sequence
  Description of Artificial Sequence: Synthetic oligonucleotide
  Antisense Strand to SEQ ID NO: 424511
uucuguaggccacacuacc

SEQ ID NO: 424513 - RNA, 19 nt, Artificial Sequence
  Description of Artificial Sequence: Synthetic oligonucleotide
  Sense Strand Starting at position 1349 of SEQ ID NO: 315499
aaaucagaguucuuggagu

SEQ ID NO: 424514 - RNA, 19 nt, Artificial Sequence
  Description of Artificial Sequence: Synthetic oligonucleotide
  Antisense Strand to SEQ ID NO: 424513
acuccaagaacucugauuu

SEQ ID NO: 424515 - RNA, 19 nt, Artificial Sequence
  Description of Artificial Sequence: Synthetic oligonucleotide
  Sense Strand Starting at position 1349 of SEQ ID NO: 315501
aucagaguucuuggaguau

SEQ ID NO: 424516 - RNA, 19 nt, Artificial Sequence
  Description of Artificial Sequence: Synthetic oligonucleotide
  Antisense Strand to SEQ ID NO: 424515
auacuccaagaacucugau

SEQ ID NO: 424517 - RNA, 19 nt, Artificial Sequence
  Description of Artificial Sequence: Synthetic oligonucleotide
  Sense Strand Starting at position 1349 of SEQ ID NO: 315926
gggaguaagugaucaaacc

SEQ ID NO: 424518 - RNA, 19 nt, Artificial Sequence
  Description of Artificial Sequence: Synthetic oligonucleotide
  Antisense Strand to SEQ ID NO: 424517
gguuugaucacuuacuccc

SEQ ID NO: 424519 - RNA, 19 nt, Artificial Sequence
  Description of Artificial Sequence: Synthetic oligonucleotide
  Sense Strand Starting at position 1349 of SEQ ID NO: 315982
gagcuaaagcucuagagac

SEQ ID NO: 424520 - RNA, 19 nt, Artificial Sequence
  Description of Artificial Sequence: Synthetic oligonucleotide
  Antisense Strand to SEQ ID NO: 424519
gucucuagagcuuuagcuc

SEQ ID NO: 424521 - RNA, 19 nt, Artificial Sequence
  Description of Artificial Sequence: Synthetic oligonucleotide
  Sense Strand Starting at position 1349 of SEQ ID NO: 316171
cugguuuaugcacaacuca

SEQ ID NO: 424522 - RNA, 19 nt, Artificial Sequence
  Description of Artificial Sequence: Synthetic oligonucleotide
  Antisense Strand to SEQ ID NO: 424521
ugaguugugcauaaaccag

SEQ ID NO: 424523 - RNA, 19 nt, Artificial Sequence
  Description of Artificial Sequence: Synthetic oligonucleotide
  Sense Strand Starting at position 1349 of SEQ ID NO: 316521
acauuuagcugacacugaa

SEQ ID NO: 424524 - RNA, 19 nt, Artificial Sequence
  Description of Artificial Sequence: Synthetic oligonucleotide
  Antisense Strand to SEQ ID NO: 424523
uucagugucagcuaaaugu

SEQ ID NO: 424525 - RNA, 19 nt, Artificial Sequence
  Description of Artificial Sequence: Synthetic oligonucleotide
  Sense Strand Starting at position 1349 of SEQ ID NO: 316700
cccauauauguagaaaguu

SEQ ID NO: 424526 - RNA, 19 nt, Artificial Sequence
  Description of Artificial Sequence: Synthetic oligonucleotide
  Antisense Strand to SEQ ID NO: 424525
aacuuucuacauauauggg

SEQ ID NO: 424527 - RNA, 19 nt, Artificial Sequence
  Description of Artificial Sequence: Synthetic oligonucleotide
  Sense Strand Starting at position 1349 of SEQ ID NO: 316884
gcgaucuaccuuucguguu

SEQ ID NO: 424528 - RNA, 19 nt, Artificial Sequence
  Description of Artificial Sequence: Synthetic oligonucleotide
  Antisense Strand to SEQ ID NO: 424527
aacacgaaagguagaucgc

SEQ ID NO: 424529 - RNA, 19 nt, Artificial Sequence
  Description of Artificial Sequence: Synthetic oligonucleotide
  Sense Strand Starting at position 1349 of SEQ ID NO: 317254
cggaagucucguuugcgaa

SEQ ID NO: 424530 - RNA, 19 nt, Artificial Sequence
  Description of Artificial Sequence: Synthetic oligonucleotide
  Antisense Strand to SEQ ID NO: 424529
uucgcaaacgagacuuccg

SEQ ID NO: 424531 - RNA, 19 nt, Artificial Sequence
  Description of Artificial Sequence: Synthetic oligonucleotide
  Sense Strand Starting at position 1349 of SEQ ID NO: 317446
ccagguguccuugggaaag

SEQ ID NO: 424532 - RNA, 19 nt, Artificial Sequence
  Description of Artificial Sequence: Synthetic oligonucleotide
  Antisense Strand to SEQ ID NO: 424531
cuuucccaaggacaccugg

SEQ ID NO: 424533 - RNA, 19 nt, Artificial Sequence
  Description of Artificial Sequence: Synthetic oligonucleotide
  Sense Strand Starting at position 1349 of SEQ ID NO: 317540
accgcaugagguuaacaga

SEQ ID NO: 424534 - RNA, 19 nt, Artificial Sequence
  Description of Artificial Sequence: Synthetic oligonucleotide
  Antisense Strand to SEQ ID NO: 424533
ucuguuaaccucaugcggu

SEQ ID NO: 424535 - RNA, 19 nt, Artificial Sequence
  Description of Artificial Sequence: Synthetic oligonucleotide
  Sense Strand Starting at position 1349 of SEQ ID NO: 317669
gaagaagcaugucuagaaa

SEQ ID NO: 424536 - RNA, 19 nt, Artificial Sequence
  Description of Artificial Sequence: Synthetic oligonucleotide
  Antisense Strand to SEQ ID NO: 424535
uuucuagacaugcuucuuc

SEQ ID NO: 424537 - RNA, 19 nt, Artificial Sequence
  Description of Artificial Sequence: Synthetic oligonucleotide
  Sense Strand Starting at position 1349 of SEQ ID NO: 317703
ccauaaaugugguuaauau

SEQ ID NO: 424538 - RNA, 19 nt, Artificial Sequence
  Description of Artificial Sequence: Synthetic oligonucleotide
  Antisense Strand to SEQ ID NO: 424537
auauuaaccacauuuaugg

SEQ ID NO: 424539 - RNA, 19 nt, Artificial Sequence
  Description of Artificial Sequence: Synthetic oligonucleotide
  Sense Strand Starting at position 1349 of SEQ ID NO: 317710
ugugguuaauauuucguaa

SEQ ID NO: 424540 - RNA, 19 nt, Artificial Sequence
  Description of Artificial Sequence: Synthetic oligonucleotide
  Antisense Strand to SEQ ID NO: 424539
uuacgaaauauuaaccaca

SEQ ID NO: 424541 - RNA, 19 nt, Artificial Sequence
  Description of Artificial Sequence: Synthetic oligonucleotide
  Sense Strand Starting at position 1349 of SEQ ID NO: 317873
uuugaagaaugguuugcau

SEQ ID NO: 424542 - RNA, 19 nt, Artificial Sequence
  Description of Artificial Sequence: Synthetic oligonucleotide
  Antisense Strand to SEQ ID NO: 424541
augcaaaccauucuucaaa

SEQ ID NO: 424543 - RNA, 19 nt, Artificial Sequence
  Description of Artificial Sequence: Synthetic oligonucleotide
  Sense Strand Starting at position 1349 of SEQ ID NO: 317875
ugaagaaugguuugcauac

SEQ ID NO: 424544 - RNA, 19 nt, Artificial Sequence
  Description of Artificial Sequence: Synthetic oligonucleotide
  Antisense Strand to SEQ ID NO: 424543
guaugcaaaccauucuuca

SEQ ID NO: 424545 - RNA, 19 nt, Artificial Sequence
  Description of Artificial Sequence: Synthetic oligonucleotide
  Sense Strand Starting at position 1349 of SEQ ID NO: 317876
gaagaaugguuugcauaca

SEQ ID NO: 424546 - RNA, 19 nt, Artificial Sequence
  Description of Artificial Sequence: Synthetic oligonucleotide
  Antisense Strand to SEQ ID NO: 424545
uguaugcaaaccauucuuc

SEQ ID NO: 424547 - RNA, 19 nt, Artificial Sequence
  Description of Artificial Sequence: Synthetic oligonucleotide
  Sense Strand Starting at position 1349 of SEQ ID NO: 317900
aggauaugaacugguccuu

SEQ ID NO: 424548 - RNA, 19 nt, Artificial Sequence
  Description of Artificial Sequence: Synthetic oligonucleotide
  Antisense Strand to SEQ ID NO: 424547
aaggaccaguucauauccu

SEQ ID NO: 424549 - RNA, 19 nt, Artificial Sequence
  Description of Artificial Sequence: Synthetic oligonucleotide
  Sense Strand Starting at position 1349 of SEQ ID NO: 317949
guuaaugaccacgggugaa

SEQ ID NO: 424550 - RNA, 19 nt, Artificial Sequence
  Description of Artificial Sequence: Synthetic oligonucleotide
  Antisense Strand to SEQ ID NO: 424549
uucacccguggucauuaac

SEQ ID NO: 424551 - RNA, 19 nt, Artificial Sequence
  Description of Artificial Sequence: Synthetic oligonucleotide
  Sense Strand Starting at position 1349 of SEQ ID NO: 317968
gggcaaagggugugaugaa

SEQ ID NO: 424552 - RNA, 19 nt, Artificial Sequence
  Description of Artificial Sequence: Synthetic oligonucleotide
  Antisense Strand to SEQ ID NO: 424551
uucaucacacccuuugccc

SEQ ID NO: 424553 - RNA, 19 nt, Artificial Sequence
  Description of Artificial Sequence: Synthetic oligonucleotide
  Sense Strand Starting at position 1349 of SEQ ID NO: 317977
gugugaugaaguuaacugu

SEQ ID NO: 424554 - RNA, 19 nt, Artificial Sequence
  Description of Artificial Sequence: Synthetic oligonucleotide
  Antisense Strand to SEQ ID NO: 424553
acaguuaacuucaucacac

SEQ ID NO: 424555 - RNA, 19 nt, Artificial Sequence
  Description of Artificial Sequence: Synthetic oligonucleotide
  Sense Strand Starting at position 1349 of SEQ ID NO: 317980
ugaugaaguuaacugugua

SEQ ID NO: 424556 - RNA, 19 nt, Artificial Sequence
  Description of Artificial Sequence: Synthetic oligonucleotide
  Antisense Strand to SEQ ID NO: 424555
uacacaguuaacuucauca

SEQ ID NO: 424557 - RNA, 19 nt, Artificial Sequence
  Description of Artificial Sequence: Synthetic oligonucleotide
  Sense Strand Starting at position 1349 of SEQ ID NO: 318015
ggagauagguccuuuacag

SEQ ID NO: 424558 - RNA, 19 nt, Artificial Sequence
  Description of Artificial Sequence: Synthetic oligonucleotide
  Antisense Strand to SEQ ID NO: 424557
cuguaaaggaccuaucucc

SEQ ID NO: 424559 - RNA, 19 nt, Artificial Sequence
  Description of Artificial Sequence: Synthetic oligonucleotide
  Sense Strand Starting at position 1349 of SEQ ID NO: 318058
acugucuagggauggcaau

SEQ ID NO: 424560 - RNA, 19 nt, Artificial Sequence
  Description of Artificial Sequence: Synthetic oligonucleotide
  Antisense Strand to SEQ ID NO: 424559
auugccaucccuagacagu

SEQ ID NO: 424561 - RNA, 19 nt, Artificial Sequence
  Description of Artificial Sequence: Synthetic oligonucleotide
  Sense Strand Starting at position 1349 of SEQ ID NO: 318059
cugucuagggauggcaaua

SEQ ID NO: 424562 - RNA, 19 nt, Artificial Sequence
  Description of Artificial Sequence: Synthetic oligonucleotide
  Antisense Strand to SEQ ID NO: 424561
uauugccaucccuagacag

SEQ ID NO: 424563 - RNA, 19 nt, Artificial Sequence
  Description of Artificial Sequence: Synthetic oligonucleotide
  Sense Strand Starting at position 1349 of SEQ ID NO: 318110
ugacauauguuccucauau

SEQ ID NO: 424564 - RNA, 19 nt, Artificial Sequence
  Description of Artificial Sequence: Synthetic oligonucleotide
  Antisense Strand to SEQ ID NO: 424563
auaugaggaacauauguca

SEQ ID NO: 424565 - RNA, 19 nt, Artificial Sequence
  Description of Artificial Sequence: Synthetic oligonucleotide
  Sense Strand Starting at position 1349 of SEQ ID NO: 318129
aucugugugagccaagaua

SEQ ID NO: 424566 - RNA, 19 nt, Artificial Sequence
  Description of Artificial Sequence: Synthetic oligonucleotide
  Antisense Strand to SEQ ID NO: 424565
uaucuuggcucacacagau

SEQ ID NO: 424567 - RNA, 19 nt, Artificial Sequence
  Description of Artificial Sequence: Synthetic oligonucleotide
  Sense Strand Starting at position 1349 of SEQ ID NO: 318210
gcaaucuuuguccauugau

SEQ ID NO: 424568 - RNA, 19 nt, Artificial Sequence
  Description of Artificial Sequence: Synthetic oligonucleotide
  Antisense Strand to SEQ ID NO: 424567
aucaauggacaaagauugc

SEQ ID NO: 424569 - RNA, 19 nt, Artificial Sequence
  Description of Artificial Sequence: Synthetic oligonucleotide
  Sense Strand Starting at position 1349 of SEQ ID NO: 318364
gccucagaagcuuaggauu

SEQ ID NO: 424570 - RNA, 19 nt, Artificial Sequence
  Description of Artificial Sequence: Synthetic oligonucleotide
  Antisense Strand to SEQ ID NO: 424569
aauccuaagcuucugaggc

SEQ ID NO: 424571 - RNA, 19 nt, Artificial Sequence
  Description of Artificial Sequence: Synthetic oligonucleotide
  Sense Strand Starting at position 1349 of SEQ ID NO: 318414
agcuuaggauucuugagga

SEQ ID NO: 424572 - RNA, 19 nt, Artificial Sequence
  Description of Artificial Sequence: Synthetic oligonucleotide
  Antisense Strand to SEQ ID NO: 424571
uccucaagaauccuaagcu

SEQ ID NO: 424573 - RNA, 19 nt, Artificial Sequence
  Description of Artificial Sequence: Synthetic oligonucleotide
  Sense Strand Starting at position 1349 of SEQ ID NO: 318651
gaggcacuucugugaccaa

SEQ ID NO: 424574 - RNA, 19 nt, Artificial Sequence
  Description of Artificial Sequence: Synthetic oligonucleotide
  Antisense Strand to SEQ ID NO: 424573
uuggucacagaagugccuc

SEQ ID NO: 424575 - RNA, 19 nt, Artificial Sequence
  Description of Artificial Sequence: Synthetic oligonucleotide
  Sense Strand Starting at position 1349 of SEQ ID NO: 318716
gggcaagacacuugaugau

SEQ ID NO: 424576 - RNA, 19 nt, Artificial Sequence
  Description of Artificial Sequence: Synthetic oligonucleotide
  Antisense Strand to SEQ ID NO: 424575
aucaucaagugucuugccc

SEQ ID NO: 424577 - RNA, 19 nt, Artificial Sequence
  Description of Artificial Sequence: Synthetic oligonucleotide
  Sense Strand Starting at position 1349 of SEQ ID NO: 318728
ugaugaugccucgauauag

SEQ ID NO: 424578 - RNA, 19 nt, Artificial Sequence
  Description of Artificial Sequence: Synthetic oligonucleotide
  Antisense Strand to SEQ ID NO: 424577
cuauaucgaggcaucauca

SEQ ID NO: 424579 - RNA, 19 nt, Artificial Sequence
  Description of Artificial Sequence: Synthetic oligonucleotide
  Sense Strand Starting at position 1349 of SEQ ID NO: 318794
uuaggaauucuguacucca

SEQ ID NO: 424580 - RNA, 19 nt, Artificial Sequence
  Description of Artificial Sequence: Synthetic oligonucleotide
  Antisense Strand to SEQ ID NO: 424579
uggaguacagaauuccuaa

SEQ ID NO: 424581 - RNA, 19 nt, Artificial Sequence
  Description of Artificial Sequence: Synthetic oligonucleotide
  Sense Strand Starting at position 1349 of SEQ ID NO: 318797
ggaauucuguacuccaacu

SEQ ID NO: 424582 - RNA, 19 nt, Artificial Sequence
  Description of Artificial Sequence: Synthetic oligonucleotide
  Antisense Strand to SEQ ID NO: 424581
aguuggaguacagaauucc

SEQ ID NO: 424583 - RNA, 19 nt, Artificial Sequence
  Description of Artificial Sequence: Synthetic oligonucleotide
  Sense Strand Starting at position 1349 of SEQ ID NO: 318982
acuagaacccuggguguca

SEQ ID NO: 424584 - RNA, 19 nt, Artificial Sequence
  Description of Artificial Sequence: Synthetic oligonucleotide
  Antisense Strand to SEQ ID NO: 424583
ugacacccaggguucuagu

SEQ ID NO: 424585 - RNA, 19 nt, Artificial Sequence
  Description of Artificial Sequence: Synthetic oligonucleotide
  Sense Strand Starting at position 1349 of SEQ ID NO: 318983
cuagaacccugggugucau

SEQ ID NO: 424586 - RNA, 19 nt, Artificial Sequence
  Description of Artificial Sequence: Synthetic oligonucleotide
  Antisense Strand to SEQ ID NO: 424585
augacacccaggguucuag

SEQ ID NO: 424587 - RNA, 19 nt, Artificial Sequence
  Description of Artificial Sequence: Synthetic oligonucleotide
  Sense Strand Starting at position 1349 of SEQ ID NO: 319044
gugcauagcuuccuuauuu

SEQ ID NO: 424588 - RNA, 19 nt, Artificial Sequence
  Description of Artificial Sequence: Synthetic oligonucleotide
  Antisense Strand to SEQ ID NO: 424587
aaauaaggaagcuaugcac

SEQ ID NO: 424589 - RNA, 19 nt, Artificial Sequence
  Description of Artificial Sequence: Synthetic oligonucleotide
  Sense Strand Starting at position 1349 of SEQ ID NO: 319084
acuugaauuguagaguugu

SEQ ID NO: 424590 - RNA, 19 nt, Artificial Sequence
  Description of Artificial Sequence: Synthetic oligonucleotide
  Antisense Strand to SEQ ID NO: 424589
acaacucuacaauucaagu

SEQ ID NO: 424591 - RNA, 19 nt, Artificial Sequence
  Description of Artificial Sequence: Synthetic oligonucleotide
  Sense Strand Starting at position 1350 of SEQ ID NO: 315262
aaagucagguucucuguaa

SEQ ID NO: 424592 - RNA, 19 nt, Artificial Sequence
  Description of Artificial Sequence: Synthetic oligonucleotide
  Antisense Strand to SEQ ID NO: 424591
uuacagagaaccugacuuu

SEQ ID NO: 424593 - RNA, 19 nt, Artificial Sequence
  Description of Artificial Sequence: Synthetic oligonucleotide
  Sense Strand Starting at position 1350 of SEQ ID NO: 315266
ucagguucucuguaauggu

SEQ ID NO: 424594 - RNA, 19 nt, Artificial Sequence
  Description of Artificial Sequence: Synthetic oligonucleotide
  Antisense Strand to SEQ ID NO: 424593
accauuacagagaaccuga

SEQ ID NO: 424595 - RNA, 19 nt, Artificial Sequence
  Description of Artificial Sequence: Synthetic oligonucleotide
  Sense Strand Starting at position 1350 of SEQ ID NO: 315542
cuaccaauugccuaggcau

SEQ ID NO: 424596 - RNA, 19 nt, Artificial Sequence
  Description of Artificial Sequence: Synthetic oligonucleotide
  Antisense Strand to SEQ ID NO: 424595
augccuaggcaauugguag

SEQ ID NO: 424597 - RNA, 19 nt, Artificial Sequence
  Description of Artificial Sequence: Synthetic oligonucleotide
  Sense Strand Starting at position 1350 of SEQ ID NO: 315620
cccaguguuaucuacaggu

SEQ ID NO: 424598 - RNA, 19 nt, Artificial Sequence
  Description of Artificial Sequence: Synthetic oligonucleotide
  Antisense Strand to SEQ ID NO: 424597
accuguagauaacacuggg

SEQ ID NO: 424599 - RNA, 19 nt, Artificial Sequence
  Description of Artificial Sequence: Synthetic oligonucleotide
  Sense Strand Starting at position 1350 of SEQ ID NO: 315622
caguguuaucuacagguuu

SEQ ID NO: 424600 - RNA, 19 nt, Artificial Sequence
  Description of Artificial Sequence: Synthetic oligonucleotide
  Antisense Strand to SEQ ID NO: 424599
aaaccuguagauaacacug

SEQ ID NO: 424601 - RNA, 19 nt, Artificial Sequence
  Description of Artificial Sequence: Synthetic oligonucleotide
  Sense Strand Starting at position 1350 of SEQ ID NO: 315696
aggugacaguuaccugauu

SEQ ID NO: 424602 - RNA, 19 nt, Artificial Sequence
  Description of Artificial Sequence: Synthetic oligonucleotide
  Antisense Strand to SEQ ID NO: 424601
aaucagguaacugucaccu

SEQ ID NO: 424603 - RNA, 19 nt, Artificial Sequence
  Description of Artificial Sequence: Synthetic oligonucleotide
  Sense Strand Starting at position 1350 of SEQ ID NO: 315775
uuuaaagaguagcuugaua

SEQ ID NO: 424604 - RNA, 19 nt, Artificial Sequence
  Description of Artificial Sequence: Synthetic oligonucleotide
  Antisense Strand to SEQ ID NO: 424603
uaucaagcuacucuuuaaa

SEQ ID NO: 424605 - RNA, 19 nt, Artificial Sequence
  Description of Artificial Sequence: Synthetic oligonucleotide
  Sense Strand Starting at position 1350 of SEQ ID NO: 315777
uaaagaguagcuugauauc

SEQ ID NO: 424606 - RNA, 19 nt, Artificial Sequence
  Description of Artificial Sequence: Synthetic oligonucleotide
  Antisense Strand to SEQ ID NO: 424605
gauaucaagcuacucuuua

SEQ ID NO: 424607 - RNA, 19 nt, Artificial Sequence
  Description of Artificial Sequence: Synthetic oligonucleotide
  Sense Strand Starting at position 1350 of SEQ ID NO: 315783
guagcuugauaucccaaau

SEQ ID NO: 424608 - RNA, 19 nt, Artificial Sequence
  Description of Artificial Sequence: Synthetic oligonucleotide
  Antisense Strand to SEQ ID NO: 424607
auuugggauaucaagcuac

SEQ ID NO: 424609 - RNA, 19 nt, Artificial Sequence
  Description of Artificial Sequence: Synthetic oligonucleotide
  Sense Strand Starting at position 1350 of SEQ ID NO: 316105
gauuuaugcugguuaaugu

SEQ ID NO: 424610 - RNA, 19 nt, Artificial Sequence
  Description of Artificial Sequence: Synthetic oligonucleotide
  Antisense Strand to SEQ ID NO: 424609
acauuaaccagcauaaauc

SEQ ID NO: 424611 - RNA, 19 nt, Artificial Sequence
  Description of Artificial Sequence: Synthetic oligonucleotide
  Sense Strand Starting at position 1350 of SEQ ID NO: 316174
aagguacccuguuuaaaga

SEQ ID NO: 424612 - RNA, 19 nt, Artificial Sequence
  Description of Artificial Sequence: Synthetic oligonucleotide
  Antisense Strand to SEQ ID NO: 424611
ucuuuaaacaggguaccuu

SEQ ID NO: 424613 - RNA, 19 nt, Artificial Sequence
  Description of Artificial Sequence: Synthetic oligonucleotide
  Sense Strand Starting at position 1350 of SEQ ID NO: 316272
uugucucauuuggagaaau

SEQ ID NO: 424614 - RNA, 19 nt, Artificial Sequence
  Description of Artificial Sequence: Synthetic oligonucleotide
  Antisense Strand to SEQ ID NO: 424613
auuucuccaaaugagacaa

SEQ ID NO: 424615 - RNA, 19 nt, Artificial Sequence
  Description of Artificial Sequence: Synthetic oligonucleotide
  Sense Strand Starting at position 1350 of SEQ ID NO: 316344
cuagguaagucuguaauug

SEQ ID NO: 424616 - RNA, 19 nt, Artificial Sequence
  Description of Artificial Sequence: Synthetic oligonucleotide
  Antisense Strand to SEQ ID NO: 424615
caauuacagacuuaccuag

SEQ ID NO: 424617 - RNA, 19 nt, Artificial Sequence
  Description of Artificial Sequence: Synthetic oligonucleotide
  Sense Strand Starting at position 1350 of SEQ ID NO: 316348
guaagucuguaauugggaa

SEQ ID NO: 424618 - RNA, 19 nt, Artificial Sequence
  Description of Artificial Sequence: Synthetic oligonucleotide
  Antisense Strand to SEQ ID NO: 424617
uucccaauuacagacuuac

SEQ ID NO: 424619 - RNA, 19 nt, Artificial Sequence
  Description of Artificial Sequence: Synthetic oligonucleotide
  Sense Strand Starting at position 1350 of SEQ ID NO: 316524
ggaagaggccuuggugaau

SEQ ID NO: 424620 - RNA, 19 nt, Artificial Sequence
  Description of Artificial Sequence: Synthetic oligonucleotide
  Antisense Strand to SEQ ID NO: 424619
auucaccaaggccucuucc

SEQ ID NO: 424621 - RNA, 19 nt, Artificial Sequence
  Description of Artificial Sequence: Synthetic oligonucleotide
  Sense Strand Starting at position 1350 of SEQ ID NO: 316535
uggugaauuggcgaauguu

SEQ ID NO: 424622 - RNA, 19 nt, Artificial Sequence
  Description of Artificial Sequence: Synthetic oligonucleotide
  Antisense Strand to SEQ ID NO: 424621
aacauucgccaauucacca

SEQ ID NO: 424623 - RNA, 19 nt, Artificial Sequence
  Description of Artificial Sequence: Synthetic oligonucleotide
  Sense Strand Starting at position 1350 of SEQ ID NO: 316564
cgcugugacgguuccuaau

SEQ ID NO: 424624 - RNA, 19 nt, Artificial Sequence
  Description of Artificial Sequence: Synthetic oligonucleotide
  Antisense Strand to SEQ ID NO: 424623
auuaggaaccgucacagcg

SEQ ID NO: 424625 - RNA, 19 nt, Artificial Sequence
  Description of Artificial Sequence: Synthetic oligonucleotide
  Sense Strand Starting at position 1350 of SEQ ID NO: 316570
gacgguuccuaauccuaga

SEQ ID NO: 424626 - RNA, 19 nt, Artificial Sequence
  Description of Artificial Sequence: Synthetic oligonucleotide
  Antisense Strand to SEQ ID NO: 424625
ucuaggauuaggaaccguc

SEQ ID NO: 424627 - RNA, 19 nt, Artificial Sequence
  Description of Artificial Sequence: Synthetic oligonucleotide
  Sense Strand Starting at position 1350 of SEQ ID NO: 316587
gagaacuguuuacagauuu

SEQ ID NO: 424628 - RNA, 19 nt, Artificial Sequence
  Description of Artificial Sequence: Synthetic oligonucleotide
  Antisense Strand to SEQ ID NO: 424627
aaaucuguaaacaguucuc

SEQ ID NO: 424629 - RNA, 19 nt, Artificial Sequence
  Description of Artificial Sequence: Synthetic oligonucleotide
  Sense Strand Starting at position 1350 of SEQ ID NO: 316594
guuuacagauuugaaucaa

SEQ ID NO: 424630 - RNA, 19 nt, Artificial Sequence
  Description of Artificial Sequence: Synthetic oligonucleotide
  Antisense Strand to SEQ ID NO: 424629
uugauucaaaucuguaaac

SEQ ID NO: 424631 - RNA, 19 nt, Artificial Sequence
  Description of Artificial Sequence: Synthetic oligonucleotide
  Sense Strand Starting at position 1350 of SEQ ID NO: 316692
accucaacccgguauggau

SEQ ID NO: 424632 - RNA, 19 nt, Artificial Sequence
  Description of Artificial Sequence: Synthetic oligonucleotide
  Antisense Strand to SEQ ID NO: 424631
auccauaccggguugaggu

SEQ ID NO: 424633 - RNA, 19 nt, Artificial Sequence
  Description of Artificial Sequence: Synthetic oligonucleotide
  Sense Strand Starting at position 1350 of SEQ ID NO: 316804
acgugaaaugccugaaaca

SEQ ID NO: 424634 - RNA, 19 nt, Artificial Sequence
  Description of Artificial Sequence: Synthetic oligonucleotide
  Antisense Strand to SEQ ID NO: 424633
uguuucaggcauuucacgu

SEQ ID NO: 424635 - RNA, 19 nt, Artificial Sequence
  Description of Artificial Sequence: Synthetic oligonucleotide
  Sense Strand Starting at position 1350 of SEQ ID NO: 316805
cgugaaaugccugaaacaa

SEQ ID NO: 424636 - RNA, 19 nt, Artificial Sequence
  Description of Artificial Sequence: Synthetic oligonucleotide
  Antisense Strand to SEQ ID NO: 424635
uuguuucaggcauuucacg

SEQ ID NO: 424637 - RNA, 19 nt, Artificial Sequence
  Description of Artificial Sequence: Synthetic oligonucleotide
  Sense Strand Starting at position 1350 of SEQ ID NO: 317441
gcagaugcccuggaaaguu

SEQ ID NO: 424638 - RNA, 19 nt, Artificial Sequence
  Description of Artificial Sequence: Synthetic oligonucleotide
  Antisense Strand to SEQ ID NO: 424637
aacuuuccagggcaucugc

SEQ ID NO: 424639 - RNA, 19 nt, Artificial Sequence
  Description of Artificial Sequence: Synthetic oligonucleotide
  Sense Strand Starting at position 1350 of SEQ ID NO: 317453
gaaaguuaauccuugguag

SEQ ID NO: 424640 - RNA, 19 nt, Artificial Sequence
  Description of Artificial Sequence: Synthetic oligonucleotide
  Antisense Strand to SEQ ID NO: 424639
cuaccaaggauuaacuuuc

SEQ ID NO: 424641 - RNA, 19 nt, Artificial Sequence
  Description of Artificial Sequence: Synthetic oligonucleotide
  Sense Strand Starting at position 1350 of SEQ ID NO: 317455
aaguuaauccuugguagaa

SEQ ID NO: 424642 - RNA, 19 nt, Artificial Sequence
  Description of Artificial Sequence: Synthetic oligonucleotide
  Antisense Strand to SEQ ID NO: 424641
uucuaccaaggauuaacuu

SEQ ID NO: 424643 - RNA, 19 nt, Artificial Sequence
  Description of Artificial Sequence: Synthetic oligonucleotide
  Sense Strand Starting at position 1350 of SEQ ID NO: 317456
aguuaauccuugguagaag

SEQ ID NO: 424644 - RNA, 19 nt, Artificial Sequence
  Description of Artificial Sequence: Synthetic oligonucleotide
  Antisense Strand to SEQ ID NO: 424643
cuucuaccaaggauuaacu

SEQ ID NO: 424645 - RNA, 19 nt, Artificial Sequence
  Description of Artificial Sequence: Synthetic oligonucleotide
  Sense Strand Starting at position 1350 of SEQ ID NO: 317499
caucuccagucauugggau

SEQ ID NO: 424646 - RNA, 19 nt, Artificial Sequence
  Description of Artificial Sequence: Synthetic oligonucleotide
  Antisense Strand to SEQ ID NO: 424645
aucccaaugacuggagaug

SEQ ID NO: 424647 - RNA, 19 nt, Artificial Sequence
  Description of Artificial Sequence: Synthetic oligonucleotide
  Sense Strand Starting at position 1350 of SEQ ID NO: 317573
cugaguggauccuuuaaac

SEQ ID NO: 424648 - RNA, 19 nt, Artificial Sequence
  Description of Artificial Sequence: Synthetic oligonucleotide
  Antisense Strand to SEQ ID NO: 424647
guuuaaaggauccacucag

SEQ ID NO: 424649 - RNA, 19 nt, Artificial Sequence
  Description of Artificial Sequence: Synthetic oligonucleotide
  Sense Strand Starting at position 1350 of SEQ ID NO: 317864
caauguuaacacugaguga

SEQ ID NO: 424650 - RNA, 19 nt, Artificial Sequence
  Description of Artificial Sequence: Synthetic oligonucleotide
  Antisense Strand to SEQ ID NO: 424649
ucacucaguguuaacauug

SEQ ID NO: 424651 - RNA, 19 nt, Artificial Sequence
  Description of Artificial Sequence: Synthetic oligonucleotide
  Sense Strand Starting at position 1350 of SEQ ID NO: 317867
uguuaacacugagugauga

SEQ ID NO: 424652 - RNA, 19 nt, Artificial Sequence
  Description of Artificial Sequence: Synthetic oligonucleotide
  Antisense Strand to SEQ ID NO: 424651
ucaucacucaguguuaaca

SEQ ID NO: 424653 - RNA, 19 nt, Artificial Sequence
  Description of Artificial Sequence: Synthetic oligonucleotide
  Sense Strand Starting at position 1350 of SEQ ID NO: 318390
uaagaugugcccuauuagu

SEQ ID NO: 424654 - RNA, 19 nt, Artificial Sequence
  Description of Artificial Sequence: Synthetic oligonucleotide
  Antisense Strand to SEQ ID NO: 424653
acuaauagggcacaucuua

SEQ ID NO: 424655 - RNA, 19 nt, Artificial Sequence
  Description of Artificial Sequence: Synthetic oligonucleotide
  Sense Strand Starting at position 1350 of SEQ ID NO: 318398
gcccuauuaguagggaaac

SEQ ID NO: 424656 - RNA, 19 nt, Artificial Sequence
  Description of Artificial Sequence: Synthetic oligonucleotide
  Antisense Strand to SEQ ID NO: 424655
guuucccuacuaauagggc

SEQ ID NO: 424657 - RNA, 19 nt, Artificial Sequence
  Description of Artificial Sequence: Synthetic oligonucleotide
  Sense Strand Starting at position 1350 of SEQ ID NO: 318628
agggcuauauuguuucuaa

SEQ ID NO: 424658 - RNA, 19 nt, Artificial Sequence
  Description of Artificial Sequence: Synthetic oligonucleotide
  Antisense Strand to SEQ ID NO: 424657
uuagaaacaauauagcccu

SEQ ID NO: 424659 - RNA, 19 nt, Artificial Sequence
  Description of Artificial Sequence: Synthetic oligonucleotide
  Sense Strand Starting at position 1350 of SEQ ID NO: 318629
gggcuauauuguuucuaaa

SEQ ID NO: 424660 - RNA, 19 nt, Artificial Sequence
  Description of Artificial Sequence: Synthetic oligonucleotide
  Antisense Strand to SEQ ID NO: 424659
uuuagaaacaauauagccc

SEQ ID NO: 424661 - RNA, 19 nt, Artificial Sequence
  Description of Artificial Sequence: Synthetic oligonucleotide
  Sense Strand Starting at position 1350 of SEQ ID NO: 318986
uuuguugucccacauuaua

SEQ ID NO: 424662 - RNA, 19 nt, Artificial Sequence
  Description of Artificial Sequence: Synthetic oligonucleotide
  Antisense Strand to SEQ ID NO: 424661
uauaaugugggacaacaaa

SEQ ID NO: 424663 - RNA, 19 nt, Artificial Sequence
  Description of Artificial Sequence: Synthetic oligonucleotide
  Sense Strand Starting at position 1350 of SEQ ID NO: 318989
guugucccacauuauaauu

SEQ ID NO: 424664 - RNA, 19 nt, Artificial Sequence
  Description of Artificial Sequence: Synthetic oligonucleotide
  Antisense Strand to SEQ ID NO: 424663
aauuauaaugugggacaac

SEQ ID NO: 424665 - RNA, 19 nt, Artificial Sequence
  Description of Artificial Sequence: Synthetic oligonucleotide
  Sense Strand Starting at position 1350 of SEQ ID NO: 319032
uguaaauaccuugagucca

SEQ ID NO: 424666 - RNA, 19 nt, Artificial Sequence
  Description of Artificial Sequence: Synthetic oligonucleotide
  Antisense Strand to SEQ ID NO: 424665
uggacucaagguauuuaca

SEQ ID NO: 424667 - RNA, 19 nt, Artificial Sequence
  Description of Artificial Sequence: Synthetic oligonucleotide
  Sense Strand Starting at position 1350 of SEQ ID NO: 319056
gauaaaugucuuggaguuu

SEQ ID NO: 424668 - RNA, 19 nt, Artificial Sequence
  Description of Artificial Sequence: Synthetic oligonucleotide
  Antisense Strand to SEQ ID NO: 424667
aaacuccaagacauuuauc

SEQ ID NO: 424669 - RNA, 19 nt, Artificial Sequence
  Description of Artificial Sequence: Synthetic oligonucleotide
  Sense Strand Starting at position 1350 of SEQ ID NO: 319083
uauguuugauaguuugaug

SEQ ID NO: 424670 - RNA, 19 nt, Artificial Sequence
  Description of Artificial Sequence: Synthetic oligonucleotide
  Antisense Strand to SEQ ID NO: 424669
caucaaacuaucaaacaua

SEQ ID NO: 424671 - RNA, 19 nt, Artificial Sequence
  Description of Artificial Sequence: Synthetic oligonucleotide
  Sense Strand Starting at position 1351 of SEQ ID NO: 315388
augagaugggccuaccuuu

SEQ ID NO: 424672 - RNA, 19 nt, Artificial Sequence
  Description of Artificial Sequence: Synthetic oligonucleotide
  Antisense Strand to SEQ ID NO: 424671
aaagguaggcccaucucau

SEQ ID NO: 424673 - RNA, 19 nt, Artificial Sequence
  Description of Artificial Sequence: Synthetic oligonucleotide
  Sense Strand Starting at position 1351 of SEQ ID NO: 315477
auuccagacccaugaguau

SEQ ID NO: 424674 - RNA, 19 nt, Artificial Sequence
  Description of Artificial Sequence: Synthetic oligonucleotide
  Antisense Strand to SEQ ID NO: 424673
auacucaugggucuggaau

SEQ ID NO: 424675 - RNA, 19 nt, Artificial Sequence
  Description of Artificial Sequence: Synthetic oligonucleotide
  Sense Strand Starting at position 1351 of SEQ ID NO: 315486
ccaugaguauccuuccuga

SEQ ID NO: 424676 - RNA, 19 nt, Artificial Sequence
  Description of Artificial Sequence: Synthetic oligonucleotide
  Antisense Strand to SEQ ID NO: 424675
ucaggaaggauacucaugg

SEQ ID NO: 424677 - RNA, 19 nt, Artificial Sequence
  Description of Artificial Sequence: Synthetic oligonucleotide
  Sense Strand Starting at position 1351 of SEQ ID NO: 315489
ugaguauccuuccugacuu

SEQ ID NO: 424678 - RNA, 19 nt, Artificial Sequence
  Description of Artificial Sequence: Synthetic oligonucleotide
  Antisense Strand to SEQ ID NO: 424677
aagucaggaaggauacuca

SEQ ID NO: 424679 - RNA, 19 nt, Artificial Sequence
  Description of Artificial Sequence: Synthetic oligonucleotide
  Sense Strand Starting at position 1351 of SEQ ID NO: 315555
guggaugucccucaugcuu

SEQ ID NO: 424680 - RNA, 19 nt, Artificial Sequence
  Description of Artificial Sequence: Synthetic oligonucleotide
  Antisense Strand to SEQ ID NO: 424679
aagcaugagggacauccac

SEQ ID NO: 424681 - RNA, 19 nt, Artificial Sequence
  Description of Artificial Sequence: Synthetic oligonucleotide
  Sense Strand Starting at position 1351 of SEQ ID NO: 315561
gucccucaugcuuauguga

SEQ ID NO: 424682 - RNA, 19 nt, Artificial Sequence
  Description of Artificial Sequence: Synthetic oligonucleotide
  Antisense Strand to SEQ ID NO: 424681
ucacauaagcaugagggac

SEQ ID NO: 424683 - RNA, 19 nt, Artificial Sequence
  Description of Artificial Sequence: Synthetic oligonucleotide
  Sense Strand Starting at position 1351 of SEQ ID NO: 316144
uuggucaauugauaucuca

SEQ ID NO: 424684 - RNA, 19 nt, Artificial Sequence
  Description of Artificial Sequence: Synthetic oligonucleotide
  Antisense Strand to SEQ ID NO: 424683
ugagauaucaauugaccaa

SEQ ID NO: 424685 - RNA, 19 nt, Artificial Sequence
  Description of Artificial Sequence: Synthetic oligonucleotide
  Sense Strand Starting at position 1351 of SEQ ID NO: 316162
aggucaucugcuggugaca

SEQ ID NO: 424686 - RNA, 19 nt, Artificial Sequence
  Description of Artificial Sequence: Synthetic oligonucleotide
  Antisense Strand to SEQ ID NO: 424685
ugucaccagcagaugaccu

SEQ ID NO: 424687 - RNA, 19 nt, Artificial Sequence
  Description of Artificial Sequence: Synthetic oligonucleotide
  Sense Strand Starting at position 1351 of SEQ ID NO: 316205
gcaucucccugguuucuaa

SEQ ID NO: 424688 - RNA, 19 nt, Artificial Sequence
  Description of Artificial Sequence: Synthetic oligonucleotide
  Antisense Strand to SEQ ID NO: 424687
uuagaaaccagggagaugc

SEQ ID NO: 424689 - RNA, 19 nt, Artificial Sequence
  Description of Artificial Sequence: Synthetic oligonucleotide
  Sense Strand Starting at position 1351 of SEQ ID NO: 316392
agccuaagcuguucuagga

SEQ ID NO: 424690 - RNA, 19 nt, Artificial Sequence
  Description of Artificial Sequence: Synthetic oligonucleotide
  Antisense Strand to SEQ ID NO: 424689
uccuagaacagcuuaggcu

SEQ ID NO: 424691 - RNA, 19 nt, Artificial Sequence
  Description of Artificial Sequence: Synthetic oligonucleotide
  Sense Strand Starting at position 1351 of SEQ ID NO: 316396
uaagcuguucuaggaccua

SEQ ID NO: 424692 - RNA, 19 nt, Artificial Sequence
  Description of Artificial Sequence: Synthetic oligonucleotide
  Antisense Strand to SEQ ID NO: 424691
uagguccuagaacagcuua

SEQ ID NO: 424693 - RNA, 19 nt, Artificial Sequence
  Description of Artificial Sequence: Synthetic oligonucleotide
  Sense Strand Starting at position 1351 of SEQ ID NO: 316465
aguccuguccaauagggau

SEQ ID NO: 424694 - RNA, 19 nt, Artificial Sequence
  Description of Artificial Sequence: Synthetic oligonucleotide
  Antisense Strand to SEQ ID NO: 424693
aucccuauuggacaggacu

SEQ ID NO: 424695 - RNA, 19 nt, Artificial Sequence
  Description of Artificial Sequence: Synthetic oligonucleotide
  Sense Strand Starting at position 1351 of SEQ ID NO: 316498
guaacacauuccucuuugu

SEQ ID NO: 424696 - RNA, 19 nt, Artificial Sequence
  Description of Artificial Sequence: Synthetic oligonucleotide
  Antisense Strand to SEQ ID NO: 424695
acaaagaggaauguguuac

SEQ ID NO: 424697 - RNA, 19 nt, Artificial Sequence
  Description of Artificial Sequence: Synthetic oligonucleotide
  Sense Strand Starting at position 1351 of SEQ ID NO: 316577
gguagaguaggugagguau

SEQ ID NO: 424698 - RNA, 19 nt, Artificial Sequence
  Description of Artificial Sequence: Synthetic oligonucleotide
  Antisense Strand to SEQ ID NO: 424697
auaccucaccuacucuacc

SEQ ID NO: 424699 - RNA, 19 nt, Artificial Sequence
  Description of Artificial Sequence: Synthetic oligonucleotide
  Sense Strand Starting at position 1351 of SEQ ID NO: 316629
gguaccuucccauggguga

SEQ ID NO: 424700 - RNA, 19 nt, Artificial Sequence
  Description of Artificial Sequence: Synthetic oligonucleotide
  Antisense Strand to SEQ ID NO: 424699
ucacccaugggaagguacc

SEQ ID NO: 424701 - RNA, 19 nt, Artificial Sequence
  Description of Artificial Sequence: Synthetic oligonucleotide
  Sense Strand Starting at position 1351 of SEQ ID NO: 316773
acgugugugcauuaggagu

SEQ ID NO: 424702 - RNA, 19 nt, Artificial Sequence
  Description of Artificial Sequence: Synthetic oligonucleotide
  Antisense Strand to SEQ ID NO: 424701
acuccuaaugcacacacgu

SEQ ID NO: 424703 - RNA, 19 nt, Artificial Sequence
  Description of Artificial Sequence: Synthetic oligonucleotide
  Sense Strand Starting at position 1351 of SEQ ID NO: 316860
uaauacuccugucucggaa

SEQ ID NO: 424704 - RNA, 19 nt, Artificial Sequence
  Description of Artificial Sequence: Synthetic oligonucleotide
  Antisense Strand to SEQ ID NO: 424703
uuccgagacaggaguauua

SEQ ID NO: 424705 - RNA, 19 nt, Artificial Sequence
  Description of Artificial Sequence: Synthetic oligonucleotide
  Sense Strand Starting at position 1351 of SEQ ID NO: 316957
ggacaaugacuccgggacu

SEQ ID NO: 424706 - RNA, 19 nt, Artificial Sequence
  Description of Artificial Sequence: Synthetic oligonucleotide
  Antisense Strand to SEQ ID NO: 424705
agucccggagucauugucc

SEQ ID NO: 424707 - RNA, 19 nt, Artificial Sequence
  Description of Artificial Sequence: Synthetic oligonucleotide
  Sense Strand Starting at position 1351 of SEQ ID NO: 317212
gcgucaguucucgcagcca

SEQ ID NO: 424708 - RNA, 19 nt, Artificial Sequence
  Description of Artificial Sequence: Synthetic oligonucleotide
  Antisense Strand to SEQ ID NO: 424707
uggcugcgagaacugacgc

SEQ ID NO: 424709 - RNA, 19 nt, Artificial Sequence
  Description of Artificial Sequence: Synthetic oligonucleotide
  Sense Strand Starting at position 1351 of SEQ ID NO: 317336
ugccaaucgccauaguauu

SEQ ID NO: 424710 - RNA, 19 nt, Artificial Sequence
  Description of Artificial Sequence: Synthetic oligonucleotide
  Antisense Strand to SEQ ID NO: 424709
aauacuauggcgauuggca

SEQ ID NO: 424711 - RNA, 19 nt, Artificial Sequence
  Description of Artificial Sequence: Synthetic oligonucleotide
  Sense Strand Starting at position 1351 of SEQ ID NO: 317342
ucgccauaguauuuggauu

SEQ ID NO: 424712 - RNA, 19 nt, Artificial Sequence
  Description of Artificial Sequence: Synthetic oligonucleotide
  Antisense Strand to SEQ ID NO: 424711
aauccaaauacuauggcga

SEQ ID NO: 424713 - RNA, 19 nt, Artificial Sequence
  Description of Artificial Sequence: Synthetic oligonucleotide
  Sense Strand Starting at position 1351 of SEQ ID NO: 317540
gcuucuugguuccucuauu

SEQ ID NO: 424714 - RNA, 19 nt, Artificial Sequence
  Description of Artificial Sequence: Synthetic oligonucleotide
  Antisense Strand to SEQ ID NO: 424713
aauagaggaaccaagaagc

SEQ ID NO: 424715 - RNA, 19 nt, Artificial Sequence
  Description of Artificial Sequence: Synthetic oligonucleotide
  Sense Strand Starting at position 1351 of SEQ ID NO: 317541
cuucuugguuccucuauuu

SEQ ID NO: 424716 - RNA, 19 nt, Artificial Sequence
  Description of Artificial Sequence: Synthetic oligonucleotide
  Antisense Strand to SEQ ID NO: 424715
aaauagaggaaccaagaag

SEQ ID NO: 424717 - RNA, 19 nt, Artificial Sequence
  Description of Artificial Sequence: Synthetic oligonucleotide
  Sense Strand Starting at position 1351 of SEQ ID NO: 317645
ucaccugucaugggugaac

SEQ ID NO: 424718 - RNA, 19 nt, Artificial Sequence
  Description of Artificial Sequence: Synthetic oligonucleotide
  Antisense Strand to SEQ ID NO: 424717
guucacccaugacagguga

SEQ ID NO: 424719 - RNA, 19 nt, Artificial Sequence
  Description of Artificial Sequence: Synthetic oligonucleotide
  Sense Strand Starting at position 1351 of SEQ ID NO: 317693
cacgcuugauccucaugga

SEQ ID NO: 424720 - RNA, 19 nt, Artificial Sequence
  Description of Artificial Sequence: Synthetic oligonucleotide
  Antisense Strand to SEQ ID NO: 424719
uccaugaggaucaagcgug

SEQ ID NO: 424721 - RNA, 19 nt, Artificial Sequence
  Description of Artificial Sequence: Synthetic oligonucleotide
  Sense Strand Starting at position 1351 of SEQ ID NO: 318043
acauuacucccuugcguga

SEQ ID NO: 424722 - RNA, 19 nt, Artificial Sequence
  Description of Artificial Sequence: Synthetic oligonucleotide
  Antisense Strand to SEQ ID NO: 424721
ucacgcaagggaguaaugu

SEQ ID NO: 424723 - RNA, 19 nt, Artificial Sequence
  Description of Artificial Sequence: Synthetic oligonucleotide
  Sense Strand Starting at position 1351 of SEQ ID NO: 318115
acuagcagcucugcaagau

SEQ ID NO: 424724 - RNA, 19 nt, Artificial Sequence
  Description of Artificial Sequence: Synthetic oligonucleotide
  Antisense Strand to SEQ ID NO: 424723
aucuugcagagcugcuagu

SEQ ID NO: 424725 - RNA, 19 nt, Artificial Sequence
  Description of Artificial Sequence: Synthetic oligonucleotide
  Sense Strand Starting at position 1351 of SEQ ID NO: 318239
uugcacuuugccuggaaua

SEQ ID NO: 424726 - RNA, 19 nt, Artificial Sequence
  Description of Artificial Sequence: Synthetic oligonucleotide
  Antisense Strand to SEQ ID NO: 424725
uauuccaggcaaagugcaa

SEQ ID NO: 424727 - RNA, 19 nt, Artificial Sequence
  Description of Artificial Sequence: Synthetic oligonucleotide
  Sense Strand Starting at position 1351 of SEQ ID NO: 318240
ugcacuuugccuggaauac

SEQ ID NO: 424728 - RNA, 19 nt, Artificial Sequence
  Description of Artificial Sequence: Synthetic oligonucleotide
  Antisense Strand to SEQ ID NO: 424727
guauuccaggcaaagugca

SEQ ID NO: 424729 - RNA, 19 nt, Artificial Sequence
  Description of Artificial Sequence: Synthetic oligonucleotide
  Sense Strand Starting at position 1351 of SEQ ID NO: 318241
gcacuuugccuggaauacu

SEQ ID NO: 424730 - RNA, 19 nt, Artificial Sequence
  Description of Artificial Sequence: Synthetic oligonucleotide
  Antisense Strand to SEQ ID NO: 424729
aguauuccaggcaaagugc

SEQ ID NO: 424731 - RNA, 19 nt, Artificial Sequence
  Description of Artificial Sequence: Synthetic oligonucleotide
  Sense Strand Starting at position 1351 of SEQ ID NO: 318292
ggccuuucuuggccauuua

SEQ ID NO: 424732 - RNA, 19 nt, Artificial Sequence
  Description of Artificial Sequence: Synthetic oligonucleotide
  Antisense Strand to SEQ ID NO: 424731
uaaauggccaagaaaggcc

SEQ ID NO: 424733 - RNA, 19 nt, Artificial Sequence
  Description of Artificial Sequence: Synthetic oligonucleotide
  Sense Strand Starting at position 1351 of SEQ ID NO: 318365
gaaauugagucuccuguca

SEQ ID NO: 424734 - RNA, 19 nt, Artificial Sequence
  Description of Artificial Sequence: Synthetic oligonucleotide
  Antisense Strand to SEQ ID NO: 424733
ugacaggagacucaauuuc

SEQ ID NO: 424735 - RNA, 19 nt, Artificial Sequence
  Description of Artificial Sequence: Synthetic oligonucleotide
  Sense Strand Starting at position 1351 of SEQ ID NO: 318654
ugcuucuuucuagguuuau

SEQ ID NO: 424736 - RNA, 19 nt, Artificial Sequence
  Description of Artificial Sequence: Synthetic oligonucleotide
  Antisense Strand to SEQ ID NO: 424735
auaaaccuagaaagaagca

SEQ ID NO: 424737 - RNA, 19 nt, Artificial Sequence
  Description of Artificial Sequence: Synthetic oligonucleotide
  Sense Strand Starting at position 1351 of SEQ ID NO: 318655
gcuucuuucuagguuuauu

SEQ ID NO: 424738 - RNA, 19 nt, Artificial Sequence
  Description of Artificial Sequence: Synthetic oligonucleotide
  Antisense Strand to SEQ ID NO: 424737
aauaaaccuagaaagaagc

SEQ ID NO: 424739 - RNA, 19 nt, Artificial Sequence
  Description of Artificial Sequence: Synthetic oligonucleotide
  Sense Strand Starting at position 1351 of SEQ ID NO: 318735
ugggaucacagcuaaaugu

SEQ ID NO: 424740 - RNA, 19 nt, Artificial Sequence
  Description of Artificial Sequence: Synthetic oligonucleotide
  Antisense Strand to SEQ ID NO: 424739
acauuuagcugugauccca

SEQ ID NO: 424741 - RNA, 19 nt, Artificial Sequence
  Description of Artificial Sequence: Synthetic oligonucleotide
  Sense Strand Starting at position 1351 of SEQ ID NO: 318988
cucaauaaaggcuguuuga

SEQ ID NO: 424742 - RNA, 19 nt, Artificial Sequence
  Description of Artificial Sequence: Synthetic oligonucleotide
  Antisense Strand to SEQ ID NO: 424741
ucaaacagccuuuauugag

SEQ ID NO: 424743 - RNA, 19 nt, Artificial Sequence
  Description of Artificial Sequence: Synthetic oligonucleotide
  Sense Strand Starting at position 1351 of SEQ ID NO: 318997
ggcuguuugaaauggaugu

SEQ ID NO: 424744 - RNA, 19 nt, Artificial Sequence
  Description of Artificial Sequence: Synthetic oligonucleotide
  Antisense Strand to SEQ ID NO: 424743
acauccauuucaaacagcc

SEQ ID NO: 424745 - RNA, 19 nt, Artificial Sequence
  Description of Artificial Sequence: Synthetic oligonucleotide
  Sense Strand Starting at position 1351 of SEQ ID NO: 319001
guuugaaauggaugucuuu

SEQ ID NO: 424746 - RNA, 19 nt, Artificial Sequence
  Description of Artificial Sequence: Synthetic oligonucleotide
  Antisense Strand to SEQ ID NO: 424745
aaagacauccauuucaaac

SEQ ID NO: 424747 - RNA, 19 nt, Artificial Sequence
  Description of Artificial Sequence: Synthetic oligonucleotide
  Sense Strand Starting at position 1351 of SEQ ID NO: 319004
ugaaauggaugucuuuauu

SEQ ID NO: 424748 - RNA, 19 nt, Artificial Sequence
  Description of Artificial Sequence: Synthetic oligonucleotide
  Antisense Strand to SEQ ID NO: 424747
aauaaagacauccauuuca

SEQ ID NO: 424749 - RNA, 19 nt, Artificial Sequence
  Description of Artificial Sequence: Synthetic oligonucleotide
  Sense Strand Starting at position 1351 of SEQ ID NO: 319035
agucaaccucuagacagua

SEQ ID NO: 424750 - RNA, 19 nt, Artificial Sequence
  Description of Artificial Sequence: Synthetic oligonucleotide
  Antisense Strand to SEQ ID NO: 424749
uacugucuagagguugacu

SEQ ID NO: 424751 - RNA, 19 nt, Artificial Sequence
  Description of Artificial Sequence: Synthetic oligonucleotide
  Sense Strand Starting at position 1352 of SEQ ID NO: 315296
ggugaauaauauccgggua

SEQ ID NO: 424752 - RNA, 19 nt, Artificial Sequence
  Description of Artificial Sequence: Synthetic oligonucleotide
  Antisense Strand to SEQ ID NO: 424751
uacccggauauuauucacc

SEQ ID NO: 424753 - RNA, 19 nt, Artificial Sequence
  Description of Artificial Sequence: Synthetic oligonucleotide
  Sense Strand Starting at position 1352 of SEQ ID NO: 315299
gaauaauauccggguaguu

SEQ ID NO: 424754 - RNA, 19 nt, Artificial Sequence
  Description of Artificial Sequence: Synthetic oligonucleotide
  Antisense Strand to SEQ ID NO: 424753
aacuacccggauauuauuc

SEQ ID NO: 424755 - RNA, 19 nt, Artificial Sequence
  Description of Artificial Sequence: Synthetic oligonucleotide
  Sense Strand Starting at position 1352 of SEQ ID NO: 315327
augguucuagcccagaguu

SEQ ID NO: 424756 - RNA, 19 nt, Artificial Sequence
  Description of Artificial Sequence: Synthetic oligonucleotide
  Antisense Strand to SEQ ID NO: 424755
aacucugggcuagaaccau

SEQ ID NO: 424757 - RNA, 19 nt, Artificial Sequence
  Description of Artificial Sequence: Synthetic oligonucleotide
  Sense Strand Starting at position 1352 of SEQ ID NO: 315351
uuggaaaucuggucuggug

SEQ ID NO: 424758 - RNA, 19 nt, Artificial Sequence
  Description of Artificial Sequence: Synthetic oligonucleotide
  Antisense Strand to SEQ ID NO: 424757
caccagaccagauuuccaa

SEQ ID NO: 424759 - RNA, 19 nt, Artificial Sequence
  Description of Artificial Sequence: Synthetic oligonucleotide
  Sense Strand Starting at position 1352 of SEQ ID NO: 315584
ugccaucaugccugaauga

SEQ ID NO: 424760 - RNA, 19 nt, Artificial Sequence
  Description of Artificial Sequence: Synthetic oligonucleotide
  Antisense Strand to SEQ ID NO: 424759
ucauucaggcaugauggca

SEQ ID NO: 424761 - RNA, 19 nt, Artificial Sequence
  Description of Artificial Sequence: Synthetic oligonucleotide
  Sense Strand Starting at position 1352 of SEQ ID NO: 315597
gaaugagaguauucucuca

SEQ ID NO: 424762 - RNA, 19 nt, Artificial Sequence
  Description of Artificial Sequence: Synthetic oligonucleotide
  Antisense Strand to SEQ ID NO: 424761
ugagagaauacucucauuc

SEQ ID NO: 424763 - RNA, 19 nt, Artificial Sequence
  Description of Artificial Sequence: Synthetic oligonucleotide
  Sense Strand Starting at position 1352 of SEQ ID NO: 315599
augagaguauucucucacu

SEQ ID NO: 424764 - RNA, 19 nt, Artificial Sequence
  Description of Artificial Sequence: Synthetic oligonucleotide
  Antisense Strand to SEQ ID NO: 424763
agugagagaauacucucau

SEQ ID NO: 424765 - RNA, 19 nt, Artificial Sequence
  Description of Artificial Sequence: Synthetic oligonucleotide
  Sense Strand Starting at position 1352 of SEQ ID NO: 315604
aguauucucucacuggaga

SEQ ID NO: 424766 - RNA, 19 nt, Artificial Sequence
  Description of Artificial Sequence: Synthetic oligonucleotide
  Antisense Strand to SEQ ID NO: 424765
ucuccagugagagaauacu

SEQ ID NO: 424767 - RNA, 19 nt, Artificial Sequence
  Description of Artificial Sequence: Synthetic oligonucleotide
  Sense Strand Starting at position 1352 of SEQ ID NO: 315605
guauucucucacuggagaa

SEQ ID NO: 424768 - RNA, 19 nt, Artificial Sequence
  Description of Artificial Sequence: Synthetic oligonucleotide
  Antisense Strand to SEQ ID NO: 424767
uucuccagugagagaauac

SEQ ID NO: 424769 - RNA, 19 nt, Artificial Sequence
  Description of Artificial Sequence: Synthetic oligonucleotide
  Sense Strand Starting at position 1352 of SEQ ID NO: 315644
ggaacugugaauggcagaa

SEQ ID NO: 424770 - RNA, 19 nt, Artificial Sequence
  Description of Artificial Sequence: Synthetic oligonucleotide
  Antisense Strand to SEQ ID NO: 424769
uucugccauucacaguucc

SEQ ID NO: 424771 - RNA, 19 nt, Artificial Sequence
  Description of Artificial Sequence: Synthetic oligonucleotide
  Sense Strand Starting at position 1352 of SEQ ID NO: 315788
ugcaauccaggcugaauaa

SEQ ID NO: 424772 - RNA, 19 nt, Artificial Sequence
  Description of Artificial Sequence: Synthetic oligonucleotide
  Antisense Strand to SEQ ID NO: 424771
uuauucagccuggauugca

SEQ ID NO: 424773 - RNA, 19 nt, Artificial Sequence
  Description of Artificial Sequence: Synthetic oligonucleotide
  Sense Strand Starting at position 1352 of SEQ ID NO: 315789
gcaauccaggcugaauaau

SEQ ID NO: 424774 - RNA, 19 nt, Artificial Sequence
  Description of Artificial Sequence: Synthetic oligonucleotide
  Antisense Strand to SEQ ID NO: 424773
auuauucagccuggauugc

SEQ ID NO: 424775 - RNA, 19 nt, Artificial Sequence
  Description of Artificial Sequence: Synthetic oligonucleotide
  Sense Strand Starting at position 1352 of SEQ ID NO: 315800
ugaauaauacggcaccaau

SEQ ID NO: 424776 - RNA, 19 nt, Artificial Sequence
  Description of Artificial Sequence: Synthetic oligonucleotide
  Antisense Strand to SEQ ID NO: 424775
auuggugccguauuauuca

SEQ ID NO: 424777 - RNA, 19 nt, Artificial Sequence
  Description of Artificial Sequence: Synthetic oligonucleotide
  Sense Strand Starting at position 1352 of SEQ ID NO: 317188
gcaguagagacgcagacau

SEQ ID NO: 424778 - RNA, 19 nt, Artificial Sequence
  Description of Artificial Sequence: Synthetic oligonucleotide
  Antisense Strand to SEQ ID NO: 424777
augucugcgucucuacugc

SEQ ID NO: 424779 - RNA, 19 nt, Artificial Sequence
  Description of Artificial Sequence: Synthetic oligonucleotide
  Sense Strand Starting at position 1352 of SEQ ID NO: 317848
ccaaacuuuguauggcaaa

SEQ ID NO: 424780 - RNA, 19 nt, Artificial Sequence
  Description of Artificial Sequence: Synthetic oligonucleotide
  Antisense Strand to SEQ ID NO: 424779
uuugccauacaaaguuugg

SEQ ID NO: 424781 - RNA, 19 nt, Artificial Sequence
  Description of Artificial Sequence: Synthetic oligonucleotide
  Sense Strand Starting at position 1352 of SEQ ID NO: 317859
auggcaaagacuugguaau

SEQ ID NO: 424782 - RNA, 19 nt, Artificial Sequence
  Description of Artificial Sequence: Synthetic oligonucleotide
  Antisense Strand to SEQ ID NO: 424781
auuaccaagucuuugccau

SEQ ID NO: 424783 - RNA, 19 nt, Artificial Sequence
  Description of Artificial Sequence: Synthetic oligonucleotide
  Sense Strand Starting at position 1352 of SEQ ID NO: 317860
uggcaaagacuugguaaug

SEQ ID NO: 424784 - RNA, 19 nt, Artificial Sequence
  Description of Artificial Sequence: Synthetic oligonucleotide
  Antisense Strand to SEQ ID NO: 424783
cauuaccaagucuuugcca

SEQ ID NO: 424785 - RNA, 19 nt, Artificial Sequence
  Description of Artificial Sequence: Synthetic oligonucleotide
  Sense Strand Starting at position 1352 of SEQ ID NO: 317861
ggcaaagacuugguaauga

SEQ ID NO: 424786 - RNA, 19 nt, Artificial Sequence
  Description of Artificial Sequence: Synthetic oligonucleotide
  Antisense Strand to SEQ ID NO: 424785
ucauuaccaagucuuugcc

SEQ ID NO: 424787 - RNA, 19 nt, Artificial Sequence
  Description of Artificial Sequence: Synthetic oligonucleotide
  Sense Strand Starting at position 1352 of SEQ ID NO: 317871
ugguaaugaucucuauaga

SEQ ID NO: 424788 - RNA, 19 nt, Artificial Sequence
  Description of Artificial Sequence: Synthetic oligonucleotide
  Antisense Strand to SEQ ID NO: 424787
ucuauagagaucauuacca

SEQ ID NO: 424789 - RNA, 19 nt, Artificial Sequence
  Description of Artificial Sequence: Synthetic oligonucleotide
  Sense Strand Starting at position 1352 of SEQ ID NO: 317937
cugugaccuccuuaauggu

SEQ ID NO: 424790 - RNA, 19 nt, Artificial Sequence
  Description of Artificial Sequence: Synthetic oligonucleotide
  Antisense Strand to SEQ ID NO: 424789
accauuaaggaggucacag

SEQ ID NO: 424791 - RNA, 19 nt, Artificial Sequence
  Description of Artificial Sequence: Synthetic oligonucleotide
  Sense Strand Starting at position 1352 of SEQ ID NO: 317999
acugccaucguuuacaauu

SEQ ID NO: 424792 - RNA, 19 nt, Artificial Sequence
  Description of Artificial Sequence: Synthetic oligonucleotide
  Antisense Strand to SEQ ID NO: 424791
aauuguaaacgauggcagu

SEQ ID NO: 424793 - RNA, 19 nt, Artificial Sequence
  Description of Artificial Sequence: Synthetic oligonucleotide
  Sense Strand Starting at position 1352 of SEQ ID NO: 318066
aaagaugcucagugaaugu

SEQ ID NO: 424794 - RNA, 19 nt, Artificial Sequence
  Description of Artificial Sequence: Synthetic oligonucleotide
  Antisense Strand to SEQ ID NO: 424793
acauucacugagcaucuuu

SEQ ID NO: 424795 - RNA, 19 nt, Artificial Sequence
  Description of Artificial Sequence: Synthetic oligonucleotide
  Sense Strand Starting at position 1352 of SEQ ID NO: 318076
agugaauguugaguaauug

SEQ ID NO: 424796 - RNA, 19 nt, Artificial Sequence
  Description of Artificial Sequence: Synthetic oligonucleotide
  Antisense Strand to SEQ ID NO: 424795
caauuacucaacauucacu

SEQ ID NO: 424797 - RNA, 19 nt, Artificial Sequence
  Description of Artificial Sequence: Synthetic oligonucleotide
  Sense Strand Starting at position 1352 of SEQ ID NO: 318077
gugaauguugaguaauugu

SEQ ID NO: 424798 - RNA, 19 nt, Artificial Sequence
  Description of Artificial Sequence: Synthetic oligonucleotide
  Antisense Strand to SEQ ID NO: 424797
acaauuacucaacauucac

SEQ ID NO: 424799 - RNA, 19 nt, Artificial Sequence
  Description of Artificial Sequence: Synthetic oligonucleotide
  Sense Strand Starting at position 1352 of SEQ ID NO: 318086
gaguaauugugagcaucug

SEQ ID NO: 424800 - RNA, 19 nt, Artificial Sequence
  Description of Artificial Sequence: Synthetic oligonucleotide
  Antisense Strand to SEQ ID NO: 424799
cagaugcucacaauuacuc

SEQ ID NO: 424801 - RNA, 19 nt, Artificial Sequence
  Description of Artificial Sequence: Synthetic oligonucleotide
  Sense Strand Starting at position 1352 of SEQ ID NO: 318103
uggaacuugccgugggaua

SEQ ID NO: 424802 - RNA, 19 nt, Artificial Sequence
  Description of Artificial Sequence: Synthetic oligonucleotide
  Antisense Strand to SEQ ID NO: 424801
uaucccacggcaaguucca

SEQ ID NO: 424803 - RNA, 19 nt, Artificial Sequence
  Description of Artificial Sequence: Synthetic oligonucleotide
  Sense Strand Starting at position 1352 of SEQ ID NO: 318104
ggaacuugccgugggauaa

SEQ ID NO: 424804 - RNA, 19 nt, Artificial Sequence
  Description of Artificial Sequence: Synthetic oligonucleotide
  Antisense Strand to SEQ ID NO: 424803
uuaucccacggcaaguucc

SEQ ID NO: 424805 - RNA, 19 nt, Artificial Sequence
  Description of Artificial Sequence: Synthetic oligonucleotide
  Sense Strand Starting at position 1352 of SEQ ID NO: 318105
gaacuugccgugggauaaa

SEQ ID NO: 424806 - RNA, 19 nt, Artificial Sequence
  Description of Artificial Sequence: Synthetic oligonucleotide
  Antisense Strand to SEQ ID NO: 424805
uuuaucccacggcaaguuc

SEQ ID NO: 424807 - RNA, 19 nt, Artificial Sequence
  Description of Artificial Sequence: Synthetic oligonucleotide
  Sense Strand Starting at position 1352 of SEQ ID NO: 318152
auaugaagauuccauuuag

SEQ ID NO: 424808 - RNA, 19 nt, Artificial Sequence
  Description of Artificial Sequence: Synthetic oligonucleotide
  Antisense Strand to SEQ ID NO: 424807
cuaaauggaaucuucauau

SEQ ID NO: 424809 - RNA, 19 nt, Artificial Sequence
  Description of Artificial Sequence: Synthetic oligonucleotide
  Sense Strand Starting at position 1352 of SEQ ID NO: 318357
uugugaugacacugaauua

SEQ ID NO: 424810 - RNA, 19 nt, Artificial Sequence
  Description of Artificial Sequence: Synthetic oligonucleotide
  Antisense Strand to SEQ ID NO: 424809
uaauucagugucaucacaa

SEQ ID NO: 424811 - RNA, 19 nt, Artificial Sequence
  Description of Artificial Sequence: Synthetic oligonucleotide
  Sense Strand Starting at position 1352 of SEQ ID NO: 318406
aggcauuaaccuuaguaaa

SEQ ID NO: 424812 - RNA, 19 nt, Artificial Sequence
  Description of Artificial Sequence: Synthetic oligonucleotide
  Antisense Strand to SEQ ID NO: 424811
uuuacuaagguuaaugccu

SEQ ID NO: 424813 - RNA, 19 nt, Artificial Sequence
  Description of Artificial Sequence: Synthetic oligonucleotide
  Sense Strand Starting at position 1352 of SEQ ID NO: 318414
accuuaguaaaucgugaug

SEQ ID NO: 424814 - RNA, 19 nt, Artificial Sequence
  Description of Artificial Sequence: Synthetic oligonucleotide
  Antisense Strand to SEQ ID NO: 424813
caucacgauuuacuaaggu

SEQ ID NO: 424815 - RNA, 19 nt, Artificial Sequence
  Description of Artificial Sequence: Synthetic oligonucleotide
  Sense Strand Starting at position 1352 of SEQ ID NO: 318526
cucugugugcuuucuccau

SEQ ID NO: 424816 - RNA, 19 nt, Artificial Sequence
  Description of Artificial Sequence: Synthetic oligonucleotide
  Antisense Strand to SEQ ID NO: 424815
auggagaaagcacacagag

SEQ ID NO: 424817 - RNA, 19 nt, Artificial Sequence
  Description of Artificial Sequence: Synthetic oligonucleotide
  Sense Strand Starting at position 1352 of SEQ ID NO: 318530
gugugcuuucuccauuaaa

SEQ ID NO: 424818 - RNA, 19 nt, Artificial Sequence
  Description of Artificial Sequence: Synthetic oligonucleotide
  Antisense Strand to SEQ ID NO: 424817
uuuaauggagaaagcacac

SEQ ID NO: 424819 - RNA, 19 nt, Artificial Sequence
  Description of Artificial Sequence: Synthetic oligonucleotide
  Sense Strand Starting at position 1352 of SEQ ID NO: 318563
auaagaugaccgcacauau

SEQ ID NO: 424820 - RNA, 19 nt, Artificial Sequence
  Description of Artificial Sequence: Synthetic oligonucleotide
  Antisense Strand to SEQ ID NO: 424819
auaugugcggucaucuuau

SEQ ID NO: 424821 - RNA, 19 nt, Artificial Sequence
  Description of Artificial Sequence: Synthetic oligonucleotide
  Sense Strand Starting at position 1352 of SEQ ID NO: 318736
aguauuaggcagugggaaa

SEQ ID NO: 424822 - RNA, 19 nt, Artificial Sequence
  Description of Artificial Sequence: Synthetic oligonucleotide
  Antisense Strand to SEQ ID NO: 424821
uuucccacugccuaauacu

SEQ ID NO: 424823 - RNA, 19 nt, Artificial Sequence
  Description of Artificial Sequence: Synthetic oligonucleotide
  Sense Strand Starting at position 1352 of SEQ ID NO: 318786
gguuacauccaaugggcua

SEQ ID NO: 424824 - RNA, 19 nt, Artificial Sequence
  Description of Artificial Sequence: Synthetic oligonucleotide
  Antisense Strand to SEQ ID NO: 424823
uagcccauuggauguaacc

SEQ ID NO: 424825 - RNA, 19 nt, Artificial Sequence
  Description of Artificial Sequence: Synthetic oligonucleotide
  Sense Strand Starting at position 1352 of SEQ ID NO: 318807
auugauugguuugcuauua

SEQ ID NO: 424826 - RNA, 19 nt, Artificial Sequence
  Description of Artificial Sequence: Synthetic oligonucleotide
  Antisense Strand to SEQ ID NO: 424825
uaauagcaaaccaaucaau

SEQ ID NO: 424827 - RNA, 19 nt, Artificial Sequence
  Description of Artificial Sequence: Synthetic oligonucleotide
  Sense Strand Starting at position 1352 of SEQ ID NO: 318950
gguccuuuauaaguuaaac

SEQ ID NO: 424828 - RNA, 19 nt, Artificial Sequence
  Description of Artificial Sequence: Synthetic oligonucleotide
  Antisense Strand to SEQ ID NO: 424827
guuuaacuuauaaaggacc

SEQ ID NO: 424829 - RNA, 19 nt, Artificial Sequence
  Description of Artificial Sequence: Synthetic oligonucleotide
  Sense Strand Starting at position 1352 of SEQ ID NO: 319160
cuuacaaagcucuaguaag

SEQ ID NO: 424830 - RNA, 19 nt, Artificial Sequence
  Description of Artificial Sequence: Synthetic oligonucleotide
  Antisense Strand to SEQ ID NO: 424829
cuuacuagagcuuuguaag

SEQ ID NO: 424831 - RNA, 19 nt, Artificial Sequence
  Description of Artificial Sequence: Synthetic oligonucleotide
  Sense Strand Starting at position 1353 of SEQ ID NO: 315369
augaauaaucuugggcaua

SEQ ID NO: 424832 - RNA, 19 nt, Artificial Sequence
  Description of Artificial Sequence: Synthetic oligonucleotide
  Antisense Strand to SEQ ID NO: 424831
uaugcccaagauuauucau

SEQ ID NO: 424833 - RNA, 19 nt, Artificial Sequence
  Description of Artificial Sequence: Synthetic oligonucleotide
  Sense Strand Starting at position 1353 of SEQ ID NO: 315381
gggcauacaucaguuugga

SEQ ID NO: 424834 - RNA, 19 nt, Artificial Sequence
  Description of Artificial Sequence: Synthetic oligonucleotide
  Antisense Strand to SEQ ID NO: 424833
uccaaacugauguaugccc

SEQ ID NO: 424835 - RNA, 19 nt, Artificial Sequence
  Description of Artificial Sequence: Synthetic oligonucleotide
  Sense Strand Starting at position 1353 of SEQ ID NO: 315384
cauacaucaguuuggaugu

SEQ ID NO: 424836 - RNA, 19 nt, Artificial Sequence
  Description of Artificial Sequence: Synthetic oligonucleotide
  Antisense Strand to SEQ ID NO: 424835
acauccaaacugauguaug

SEQ ID NO: 424837 - RNA, 19 nt, Artificial Sequence
  Description of Artificial Sequence: Synthetic oligonucleotide
  Sense Strand Starting at position 1353 of SEQ ID NO: 315402
uguguaggcauauauaaga

SEQ ID NO: 424838 - RNA, 19 nt, Artificial Sequence
  Description of Artificial Sequence: Synthetic oligonucleotide
  Antisense Strand to SEQ ID NO: 424837
ucuuauauaugccuacaca

SEQ ID NO: 424839 - RNA, 19 nt, Artificial Sequence
  Description of Artificial Sequence: Synthetic oligonucleotide
  Sense Strand Starting at position 1353 of SEQ ID NO: 315431
gaaucagaauugcugaguu

SEQ ID NO: 424840 - RNA, 19 nt, Artificial Sequence
  Description of Artificial Sequence: Synthetic oligonucleotide
  Antisense Strand to SEQ ID NO: 424839
aacucagcaauucugauuc

SEQ ID NO: 424841 - RNA, 19 nt, Artificial Sequence
  Description of Artificial Sequence: Synthetic oligonucleotide
  Sense Strand Starting at position 1353 of SEQ ID NO: 315433
aucagaauugcugaguuaa

SEQ ID NO: 424842 - RNA, 19 nt, Artificial Sequence
  Description of Artificial Sequence: Synthetic oligonucleotide
  Antisense Strand to SEQ ID NO: 424841
uuaacucagcaauucugau

SEQ ID NO: 424843 - RNA, 19 nt, Artificial Sequence
  Description of Artificial Sequence: Synthetic oligonucleotide
  Sense Strand Starting at position 1353 of SEQ ID NO: 315569
ccaauauguuucucaaagu

SEQ ID NO: 424844 - RNA, 19 nt, Artificial Sequence
  Description of Artificial Sequence: Synthetic oligonucleotide
  Antisense Strand to SEQ ID NO: 424843
acuuugagaaacauauugg

SEQ ID NO: 424845 - RNA, 19 nt, Artificial Sequence
  Description of Artificial Sequence: Synthetic oligonucleotide
  Sense Strand Starting at position 1353 of SEQ ID NO: 315589
ugugcucuucgccaaauuu

SEQ ID NO: 424846 - RNA, 19 nt, Artificial Sequence
  Description of Artificial Sequence: Synthetic oligonucleotide
  Antisense Strand to SEQ ID NO: 424845
aaauuuggcgaagagcaca

SEQ ID NO: 424847 - RNA, 19 nt, Artificial Sequence
  Description of Artificial Sequence: Synthetic oligonucleotide
  Sense Strand Starting at position 1353 of SEQ ID NO: 315791
ugucuuugugacuauauau

SEQ ID NO: 424848 - RNA, 19 nt, Artificial Sequence
  Description of Artificial Sequence: Synthetic oligonucleotide
  Antisense Strand to SEQ ID NO: 424847
auauauagucacaaagaca

SEQ ID NO: 424849 - RNA, 19 nt, Artificial Sequence
  Description of Artificial Sequence: Synthetic oligonucleotide
  Sense Strand Starting at position 1353 of SEQ ID NO: 315814
ugugacuuugcuuaaagug

SEQ ID NO: 424850 - RNA, 19 nt, Artificial Sequence
  Description of Artificial Sequence: Synthetic oligonucleotide
  Antisense Strand to SEQ ID NO: 424849
cacuuuaagcaaagucaca

SEQ ID NO: 424851 - RNA, 19 nt, Artificial Sequence
  Description of Artificial Sequence: Synthetic oligonucleotide
  Sense Strand Starting at position 1353 of SEQ ID NO: 315858
acgacuucuggguacugua

SEQ ID NO: 424852 - RNA, 19 nt, Artificial Sequence
  Description of Artificial Sequence: Synthetic oligonucleotide
  Antisense Strand to SEQ ID NO: 424851
uacaguacccagaagucgu

SEQ ID NO: 424853 - RNA, 19 nt, Artificial Sequence
  Description of Artificial Sequence: Synthetic oligonucleotide
  Sense Strand Starting at position 1353 of SEQ ID NO: 315928
gugucaggacucuauuagu

SEQ ID NO: 424854 - RNA, 19 nt, Artificial Sequence
  Description of Artificial Sequence: Synthetic oligonucleotide
  Antisense Strand to SEQ ID NO: 424853
acuaauagaguccugacac

SEQ ID NO: 424855 - RNA, 19 nt, Artificial Sequence
  Description of Artificial Sequence: Synthetic oligonucleotide
  Sense Strand Starting at position 1353 of SEQ ID NO: 315978
caagaaaggucaguuaggu

SEQ ID NO: 424856 - RNA, 19 nt, Artificial Sequence
  Description of Artificial Sequence: Synthetic oligonucleotide
  Antisense Strand to SEQ ID NO: 424855
accuaacugaccuuucuug

SEQ ID NO: 424857 - RNA, 19 nt, Artificial Sequence
  Description of Artificial Sequence: Synthetic oligonucleotide
  Sense Strand Starting at position 1353 of SEQ ID NO: 316515
cgcaaaggccagcauuuau

SEQ ID NO: 424858 - RNA, 19 nt, Artificial Sequence
  Description of Artificial Sequence: Synthetic oligonucleotide
  Antisense Strand to SEQ ID NO: 424857
auaaaugcuggccuuugcg

SEQ ID NO: 424859 - RNA, 19 nt, Artificial Sequence
  Description of Artificial Sequence: Synthetic oligonucleotide
  Sense Strand Starting at position 1353 of SEQ ID NO: 316522
gccagcauuuauucugagu

SEQ ID NO: 424860 - RNA, 19 nt, Artificial Sequence
  Description of Artificial Sequence: Synthetic oligonucleotide
  Antisense Strand to SEQ ID NO: 424859
acucagaauaaaugcuggc

SEQ ID NO: 424861 - RNA, 19 nt, Artificial Sequence
  Description of Artificial Sequence: Synthetic oligonucleotide
  Sense Strand Starting at position 1353 of SEQ ID NO: 316566
aauguauugccugaaguaa

SEQ ID NO: 424862 - RNA, 19 nt, Artificial Sequence
  Description of Artificial Sequence: Synthetic oligonucleotide
  Antisense Strand to SEQ ID NO: 424861
uuacuucaggcaauacauu

SEQ ID NO: 424863 - RNA, 19 nt, Artificial Sequence
  Description of Artificial Sequence: Synthetic oligonucleotide
  Sense Strand Starting at position 1353 of SEQ ID NO: 316751
cucagaauguuucugugga

SEQ ID NO: 424864 - RNA, 19 nt, Artificial Sequence
  Description of Artificial Sequence: Synthetic oligonucleotide
  Antisense Strand to SEQ ID NO: 424863
uccacagaaacauucugag

SEQ ID NO: 424865 - RNA, 19 nt, Artificial Sequence
  Description of Artificial Sequence: Synthetic oligonucleotide
  Sense Strand Starting at position 1353 of SEQ ID NO: 316753
cagaauguuucuguggauu

SEQ ID NO: 424866 - RNA, 19 nt, Artificial Sequence
  Description of Artificial Sequence: Synthetic oligonucleotide
  Antisense Strand to SEQ ID NO: 424865
aauccacagaaacauucug

SEQ ID NO: 424867 - RNA, 19 nt, Artificial Sequence
  Description of Artificial Sequence: Synthetic oligonucleotide
  Sense Strand Starting at position 1353 of SEQ ID NO: 316765
guggauuagccucagacaa

SEQ ID NO: 424868 - RNA, 19 nt, Artificial Sequence
  Description of Artificial Sequence: Synthetic oligonucleotide
  Antisense Strand to SEQ ID NO: 424867
uugucugaggcuaauccac

SEQ ID NO: 424869 - RNA, 19 nt, Artificial Sequence
  Description of Artificial Sequence: Synthetic oligonucleotide
  Sense Strand Starting at position 1353 of SEQ ID NO: 316852
agcagaguccguuagacag

SEQ ID NO: 424870 - RNA, 19 nt, Artificial Sequence
  Description of Artificial Sequence: Synthetic oligonucleotide
  Antisense Strand to SEQ ID NO: 424869
cugucuaacggacucugcu

SEQ ID NO: 424871 - RNA, 19 nt, Artificial Sequence
  Description of Artificial Sequence: Synthetic oligonucleotide
  Sense Strand Starting at position 1353 of SEQ ID NO: 317357
uguuccuuacaucgaacaa

SEQ ID NO: 424872 - RNA, 19 nt, Artificial Sequence
  Description of Artificial Sequence: Synthetic oligonucleotide
  Antisense Strand to SEQ ID NO: 424871
uuguucgauguaaggaaca

SEQ ID NO: 424873 - RNA, 19 nt, Artificial Sequence
  Description of Artificial Sequence: Synthetic oligonucleotide
  Sense Strand Starting at position 1353 of SEQ ID NO: 317451
uccuaagagaguuggacau

SEQ ID NO: 424874 - RNA, 19 nt, Artificial Sequence
  Description of Artificial Sequence: Synthetic oligonucleotide
  Antisense Strand to SEQ ID NO: 424873
auguccaacucucuuagga

SEQ ID NO: 424875 - RNA, 19 nt, Artificial Sequence
  Description of Artificial Sequence: Synthetic oligonucleotide
  Sense Strand Starting at position 1353 of SEQ ID NO: 317453
cuaagagaguuggacauuu

SEQ ID NO: 424876 - RNA, 19 nt, Artificial Sequence
  Description of Artificial Sequence: Synthetic oligonucleotide
  Antisense Strand to SEQ ID NO: 424875
aaauguccaacucucuuag

SEQ ID NO: 424877 - RNA, 19 nt, Artificial Sequence
  Description of Artificial Sequence: Synthetic oligonucleotide
  Sense Strand Starting at position 1353 of SEQ ID NO: 317548
uggucucuucuugaacuua

SEQ ID NO: 424878 - RNA, 19 nt, Artificial Sequence
  Description of Artificial Sequence: Synthetic oligonucleotide
  Antisense Strand to SEQ ID NO: 424877
uaaguucaagaagagacca

SEQ ID NO: 424879 - RNA, 19 nt, Artificial Sequence
  Description of Artificial Sequence: Synthetic oligonucleotide
  Sense Strand Starting at position 1353 of SEQ ID NO: 317634
guaucucuugcccacauga

SEQ ID NO: 424880 - RNA, 19 nt, Artificial Sequence
  Description of Artificial Sequence: Synthetic oligonucleotide
  Antisense Strand to SEQ ID NO: 424879
ucaugugggcaagagauac

SEQ ID NO: 424881 - RNA, 19 nt, Artificial Sequence
  Description of Artificial Sequence: Synthetic oligonucleotide
  Sense Strand Starting at position 1353 of SEQ ID NO: 317650
ugaugacauauuggagcua

SEQ ID NO: 424882 - RNA, 19 nt, Artificial Sequence
  Description of Artificial Sequence: Synthetic oligonucleotide
  Antisense Strand to SEQ ID NO: 424881
uagcuccaauaugucauca

SEQ ID NO: 424883 - RNA, 19 nt, Artificial Sequence
  Description of Artificial Sequence: Synthetic oligonucleotide
  Sense Strand Starting at position 1353 of SEQ ID NO: 317739
agaagagguuauucuagcu

SEQ ID NO: 424884 - RNA, 19 nt, Artificial Sequence
  Description of Artificial Sequence: Synthetic oligonucleotide
  Antisense Strand to SEQ ID NO: 424883
agcuagaauaaccucuucu

SEQ ID NO: 424885 - RNA, 19 nt, Artificial Sequence
  Description of Artificial Sequence: Synthetic oligonucleotide
  Sense Strand Starting at position 1353 of SEQ ID NO: 317773
uaaagucagguguauauaa

SEQ ID NO: 424886 - RNA, 19 nt, Artificial Sequence
  Description of Artificial Sequence: Synthetic oligonucleotide
  Antisense Strand to SEQ ID NO: 424885
uuauauacaccugacuuua

SEQ ID NO: 424887 - RNA, 19 nt, Artificial Sequence
  Description of Artificial Sequence: Synthetic oligonucleotide
  Sense Strand Starting at position 1353 of SEQ ID NO: 317781
gguguauauaaaggaaacu

SEQ ID NO: 424888 - RNA, 19 nt, Artificial Sequence
  Description of Artificial Sequence: Synthetic oligonucleotide
  Antisense Strand to SEQ ID NO: 424887
aguuuccuuuauauacacc

SEQ ID NO: 424889 - RNA, 19 nt, Artificial Sequence
  Description of Artificial Sequence: Synthetic oligonucleotide
  Sense Strand Starting at position 1353 of SEQ ID NO: 317867
ugggacuauggcugaaaca

SEQ ID NO: 424890 - RNA, 19 nt, Artificial Sequence
  Description of Artificial Sequence: Synthetic oligonucleotide
  Antisense Strand to SEQ ID NO: 424889
uguuucagccauaguccca

SEQ ID NO: 424891 - RNA, 19 nt, Artificial Sequence
  Description of Artificial Sequence: Synthetic oligonucleotide
  Sense Strand Starting at position 1353 of SEQ ID NO: 317903
aggccaugucugcauggau

SEQ ID NO: 424892 - RNA, 19 nt, Artificial Sequence
  Description of Artificial Sequence: Synthetic oligonucleotide
  Antisense Strand to SEQ ID NO: 424891
auccaugcagacauggccu

SEQ ID NO: 424893 - RNA, 19 nt, Artificial Sequence
  Description of Artificial Sequence: Synthetic oligonucleotide
  Sense Strand Starting at position 1353 of SEQ ID NO: 317959
auagguuguagaugaaugu

SEQ ID NO: 424894 - RNA, 19 nt, Artificial Sequence
  Description of Artificial Sequence: Synthetic oligonucleotide
  Antisense Strand to SEQ ID NO: 424893
acauucaucuacaaccuau

SEQ ID NO: 424895 - RNA, 19 nt, Artificial Sequence
  Description of Artificial Sequence: Synthetic oligonucleotide
  Sense Strand Starting at position 1353 of SEQ ID NO: 317960
uagguuguagaugaauguu

SEQ ID NO: 424896 - RNA, 19 nt, Artificial Sequence
  Description of Artificial Sequence: Synthetic oligonucleotide
  Antisense Strand to SEQ ID NO: 424895
aacauucaucuacaaccua

SEQ ID NO: 424897 - RNA, 19 nt, Artificial Sequence
  Description of Artificial Sequence: Synthetic oligonucleotide
  Sense Strand Starting at position 1353 of SEQ ID NO: 318282
uucuaaaguguuggaauca

SEQ ID NO: 424898 - RNA, 19 nt, Artificial Sequence
  Description of Artificial Sequence: Synthetic oligonucleotide
  Antisense Strand to SEQ ID NO: 424897
ugauuccaacacuuuagaa

SEQ ID NO: 424899 - RNA, 19 nt, Artificial Sequence
  Description of Artificial Sequence: Synthetic oligonucleotide
  Sense Strand Starting at position 1353 of SEQ ID NO: 318322
ggcuuauucuguuuauuuc

SEQ ID NO: 424900 - RNA, 19 nt, Artificial Sequence
  Description of Artificial Sequence: Synthetic oligonucleotide
  Antisense Strand to SEQ ID NO: 424899
gaaauaaacagaauaagcc

SEQ ID NO: 424901 - RNA, 19 nt, Artificial Sequence
  Description of Artificial Sequence: Synthetic oligonucleotide
  Sense Strand Starting at position 1353 of SEQ ID NO: 318498
cauuucuagugggauaaac

SEQ ID NO: 424902 - RNA, 19 nt, Artificial Sequence
  Description of Artificial Sequence: Synthetic oligonucleotide
  Antisense Strand to SEQ ID NO: 424901
guuuaucccacuagaaaug

SEQ ID NO: 424903 - RNA, 19 nt, Artificial Sequence
  Description of Artificial Sequence: Synthetic oligonucleotide
  Sense Strand Starting at position 1353 of SEQ ID NO: 318564
ugugaaagcugaucauaag

SEQ ID NO: 424904 - RNA, 19 nt, Artificial Sequence
  Description of Artificial Sequence: Synthetic oligonucleotide
  Antisense Strand to SEQ ID NO: 424903
cuuaugaucagcuuucaca

SEQ ID NO: 424905 - RNA, 19 nt, Artificial Sequence
  Description of Artificial Sequence: Synthetic oligonucleotide
  Sense Strand Starting at position 1353 of SEQ ID NO: 318668
gaauguuauucucuguaag

SEQ ID NO: 424906 - RNA, 19 nt, Artificial Sequence
  Description of Artificial Sequence: Synthetic oligonucleotide
  Antisense Strand to SEQ ID NO: 424905
cuuacagagaauaacauuc

SEQ ID NO: 424907 - RNA, 19 nt, Artificial Sequence
  Description of Artificial Sequence: Synthetic oligonucleotide
  Sense Strand Starting at position 1353 of SEQ ID NO: 318694
gcugaaacugcuuauuaua

SEQ ID NO: 424908 - RNA, 19 nt, Artificial Sequence
  Description of Artificial Sequence: Synthetic oligonucleotide
  Antisense Strand to SEQ ID NO: 424907
uauaauaagcaguuucagc

SEQ ID NO: 424909 - RNA, 19 nt, Artificial Sequence
  Description of Artificial Sequence: Synthetic oligonucleotide
  Sense Strand Starting at position 1353 of SEQ ID NO: 318696
ugaaacugcuuauuauaag

SEQ ID NO: 424910 - RNA, 19 nt, Artificial Sequence
  Description of Artificial Sequence: Synthetic oligonucleotide
  Antisense Strand to SEQ ID NO: 424909
cuuauaauaagcaguuuca

SEQ ID NO: 424911 - RNA, 19 nt, Artificial Sequence
  Description of Artificial Sequence: Synthetic oligonucleotide
  Sense Strand Starting at position 1354 of SEQ ID NO: 315311
agcagcaaaugauuaagaa

SEQ ID NO: 424912 - RNA, 19 nt, Artificial Sequence
  Description of Artificial Sequence: Synthetic oligonucleotide
  Antisense Strand to SEQ ID NO: 424911
uucuuaaucauuugcugcu

SEQ ID NO: 424913 - RNA, 19 nt, Artificial Sequence
  Description of Artificial Sequence: Synthetic oligonucleotide
  Sense Strand Starting at position 1354 of SEQ ID NO: 315586
ucuuuauaccaacguguua

SEQ ID NO: 424914 - RNA, 19 nt, Artificial Sequence
  Description of Artificial Sequence: Synthetic oligonucleotide
  Antisense Strand to SEQ ID NO: 424913
uaacacguugguauaaaga

SEQ ID NO: 424915 - RNA, 19 nt, Artificial Sequence
  Description of Artificial Sequence: Synthetic oligonucleotide
  Sense Strand Starting at position 1354 of SEQ ID NO: 315601
guuagcaguggguaguuaa

SEQ ID NO: 424916 - RNA, 19 nt, Artificial Sequence
  Description of Artificial Sequence: Synthetic oligonucleotide
  Antisense Strand to SEQ ID NO: 424915
uuaacuacccacugcuaac

SEQ ID NO: 424917 - RNA, 19 nt, Artificial Sequence
  Description of Artificial Sequence: Synthetic oligonucleotide
  Sense Strand Starting at position 1354 of SEQ ID NO: 315615
guuaacucuggauggugua

SEQ ID NO: 424918 - RNA, 19 nt, Artificial Sequence
  Description of Artificial Sequence: Synthetic oligonucleotide
  Antisense Strand to SEQ ID NO: 424917
uacaccauccagaguuaac

SEQ ID NO: 424919 - RNA, 19 nt, Artificial Sequence
  Description of Artificial Sequence: Synthetic oligonucleotide
  Sense Strand Starting at position 1354 of SEQ ID NO: 315616
uuaacucuggaugguguaa

SEQ ID NO: 424920 - RNA, 19 nt, Artificial Sequence
  Description of Artificial Sequence: Synthetic oligonucleotide
  Antisense Strand to SEQ ID NO: 424919
uuacaccauccagaguuaa

SEQ ID NO: 424921 - RNA, 19 nt, Artificial Sequence
  Description of Artificial Sequence: Synthetic oligonucleotide
  Sense Strand Starting at position 1354 of SEQ ID NO: 315618
aacucuggaugguguaauu

SEQ ID NO: 424922 - RNA, 19 nt, Artificial Sequence
  Description of Artificial Sequence: Synthetic oligonucleotide
  Antisense Strand to SEQ ID NO: 424921
aauuacaccauccagaguu

SEQ ID NO: 424923 - RNA, 19 nt, Artificial Sequence
  Description of Artificial Sequence: Synthetic oligonucleotide
  Sense Strand Starting at position 1354 of SEQ ID NO: 315628
gguguaauuacagguaguu

SEQ ID NO: 424924 - RNA, 19 nt, Artificial Sequence
  Description of Artificial Sequence: Synthetic oligonucleotide
  Antisense Strand to SEQ ID NO: 424923
aacuaccuguaauuacacc

SEQ ID NO: 424925 - RNA, 19 nt, Artificial Sequence
  Description of Artificial Sequence: Synthetic oligonucleotide
  Sense Strand Starting at position 1354 of SEQ ID NO: 315695
uuccaaauguccugugaga

SEQ ID NO: 424926 - RNA, 19 nt, Artificial Sequence
  Description of Artificial Sequence: Synthetic oligonucleotide
  Antisense Strand to SEQ ID NO: 424925
ucucacaggacauuuggaa

SEQ ID NO: 424927 - RNA, 19 nt, Artificial Sequence
  Description of Artificial Sequence: Synthetic oligonucleotide
  Sense Strand Starting at position 1354 of SEQ ID NO: 315697
ccaaauguccugugagaua

SEQ ID NO: 424928 - RNA, 19 nt, Artificial Sequence
  Description of Artificial Sequence: Synthetic oligonucleotide
  Antisense Strand to SEQ ID NO: 424927
uaucucacaggacauuugg

SEQ ID NO: 424929 - RNA, 19 nt, Artificial Sequence
  Description of Artificial Sequence: Synthetic oligonucleotide
  Sense Strand Starting at position 1354 of SEQ ID NO: 315793
aaccuaugguguugauaaa

SEQ ID NO: 424930 - RNA, 19 nt, Artificial Sequence
  Description of Artificial Sequence: Synthetic oligonucleotide
  Antisense Strand to SEQ ID NO: 424929
uuuaucaacaccauagguu

SEQ ID NO: 424931 - RNA, 19 nt, Artificial Sequence
  Description of Artificial Sequence: Synthetic oligonucleotide
  Sense Strand Starting at position 1354 of SEQ ID NO: 315831
aggaucaaguaauacagaa

SEQ ID NO: 424932 - RNA, 19 nt, Artificial Sequence
  Description of Artificial Sequence: Synthetic oligonucleotide
  Antisense Strand to SEQ ID NO: 424931
uucuguauuacuugauccu

SEQ ID NO: 424933 - RNA, 19 nt, Artificial Sequence
  Description of Artificial Sequence: Synthetic oligonucleotide
  Sense Strand Starting at position 1354 of SEQ ID NO: 316010
uuuagaucaucacaguuau

SEQ ID NO: 424934 - RNA, 19 nt, Artificial Sequence
  Description of Artificial Sequence: Synthetic oligonucleotide
  Antisense Strand to SEQ ID NO: 424933
auaacugugaugaucuaaa

SEQ ID NO: 424935 - RNA, 19 nt, Artificial Sequence
  Description of Artificial Sequence: Synthetic oligonucleotide
  Sense Strand Starting at position 1354 of SEQ ID NO: 316119
accucauucuggcauagua

SEQ ID NO: 424936 - RNA, 19 nt, Artificial Sequence
  Description of Artificial Sequence: Synthetic oligonucleotide
  Antisense Strand to SEQ ID NO: 424935
uacuaugccagaaugaggu

SEQ ID NO: 424937 - RNA, 19 nt, Artificial Sequence
  Description of Artificial Sequence: Synthetic oligonucleotide
  Sense Strand Starting at position 1354 of SEQ ID NO: 316121
cucauucuggcauaguauu

SEQ ID NO: 424938 - RNA, 19 nt, Artificial Sequence
  Description of Artificial Sequence: Synthetic oligonucleotide
  Antisense Strand to SEQ ID NO: 424937
aauacuaugccagaaugag

SEQ ID NO: 424939 - RNA, 19 nt, Artificial Sequence
  Description of Artificial Sequence: Synthetic oligonucleotide
  Sense Strand Starting at position 1354 of SEQ ID NO: 316127
cuggcauaguauucuaaau

SEQ ID NO: 424940 - RNA, 19 nt, Artificial Sequence
  Description of Artificial Sequence: Synthetic oligonucleotide
  Antisense Strand to SEQ ID NO: 424939
auuuagaauacuaugccag

SEQ ID NO: 424941 - RNA, 19 nt, Artificial Sequence
  Description of Artificial Sequence: Synthetic oligonucleotide
  Sense Strand Starting at position 1354 of SEQ ID NO: 316129
ggcauaguauucuaaauug

SEQ ID NO: 424942 - RNA, 19 nt, Artificial Sequence
  Description of Artificial Sequence: Synthetic oligonucleotide
  Antisense Strand to SEQ ID NO: 424941
caauuuagaauacuaugcc

SEQ ID NO: 424943 - RNA, 19 nt, Artificial Sequence
  Description of Artificial Sequence: Synthetic oligonucleotide
  Sense Strand Starting at position 1354 of SEQ ID NO: 316137
auucuaaauuguggcuaua

SEQ ID NO: 424944 - RNA, 19 nt, Artificial Sequence
  Description of Artificial Sequence: Synthetic oligonucleotide
  Antisense Strand to SEQ ID NO: 424943
uauagccacaauuuagaau

SEQ ID NO: 424945 - RNA, 19 nt, Artificial Sequence
  Description of Artificial Sequence: Synthetic oligonucleotide
  Sense Strand Starting at position 1354 of SEQ ID NO: 316139
ucuaaauuguggcuauauu

SEQ ID NO: 424946 - RNA, 19 nt, Artificial Sequence
  Description of Artificial Sequence: Synthetic oligonucleotide
  Antisense Strand to SEQ ID NO: 424945
aauauagccacaauuuaga

SEQ ID NO: 424947 - RNA, 19 nt, Artificial Sequence
  Description of Artificial Sequence: Synthetic oligonucleotide
  Sense Strand Starting at position 1354 of SEQ ID NO: 316140
cuaaauuguggcuauauua

SEQ ID NO: 424948 - RNA, 19 nt, Artificial Sequence
  Description of Artificial Sequence: Synthetic oligonucleotide
  Antisense Strand to SEQ ID NO: 424947
uaauauagccacaauuuag

SEQ ID NO: 424949 - RNA, 19 nt, Artificial Sequence
  Description of Artificial Sequence: Synthetic oligonucleotide
  Sense Strand Starting at position 1354 of SEQ ID NO: 316264
gcugaauuauuccuuuaga

SEQ ID NO: 424950 - RNA, 19 nt, Artificial Sequence
  Description of Artificial Sequence: Synthetic oligonucleotide
  Antisense Strand to SEQ ID NO: 424949
ucuaaaggaauaauucagc

SEQ ID NO: 424951 - RNA, 19 nt, Artificial Sequence
  Description of Artificial Sequence: Synthetic oligonucleotide
  Sense Strand Starting at position 1354 of SEQ ID NO: 316445
uuacuaguuugauugcuua

SEQ ID NO: 424952 - RNA, 19 nt, Artificial Sequence
  Description of Artificial Sequence: Synthetic oligonucleotide
  Antisense Strand to SEQ ID NO: 424951
uaagcaaucaaacuaguaa

SEQ ID NO: 424953 - RNA, 19 nt, Artificial Sequence
  Description of Artificial Sequence: Synthetic oligonucleotide
  Sense Strand Starting at position 1354 of SEQ ID NO: 316448
cuaguuugauugcuuauga

SEQ ID NO: 424954 - RNA, 19 nt, Artificial Sequence
  Description of Artificial Sequence: Synthetic oligonucleotide
  Antisense Strand to SEQ ID NO: 424953
ucauaagcaaucaaacuag

SEQ ID NO: 424955 - RNA, 19 nt, Artificial Sequence
  Description of Artificial Sequence: Synthetic oligonucleotide
  Sense Strand Starting at position 1354 of SEQ ID NO: 316449
uaguuugauugcuuaugaa

SEQ ID NO: 424956 - RNA, 19 nt, Artificial Sequence
  Description of Artificial Sequence: Synthetic oligonucleotide
  Antisense Strand to SEQ ID NO: 424955
uucauaagcaaucaaacua

SEQ ID NO: 424957 - RNA, 19 nt, Artificial Sequence
  Description of Artificial Sequence: Synthetic oligonucleotide
  Sense Strand Starting at position 1354 of SEQ ID NO: 316452
uuugauugcuuaugaagag

SEQ ID NO: 424958 - RNA, 19 nt, Artificial Sequence
  Description of Artificial Sequence: Synthetic oligonucleotide
  Antisense Strand to SEQ ID NO: 424957
cucuucauaagcaaucaaa

SEQ ID NO: 424959 - RNA, 19 nt, Artificial Sequence
  Description of Artificial Sequence: Synthetic oligonucleotide
  Sense Strand Starting at position 1354 of SEQ ID NO: 316453
uugauugcuuaugaagaga

SEQ ID NO: 424960 - RNA, 19 nt, Artificial Sequence
  Description of Artificial Sequence: Synthetic oligonucleotide
  Antisense Strand to SEQ ID NO: 424959
ucucuucauaagcaaucaa

SEQ ID NO: 424961 - RNA, 19 nt, Artificial Sequence
  Description of Artificial Sequence: Synthetic oligonucleotide
  Sense Strand Starting at position 1354 of SEQ ID NO: 316653
cuuaauucuggaggacuau

SEQ ID NO: 424962 - RNA, 19 nt, Artificial Sequence
  Description of Artificial Sequence: Synthetic oligonucleotide
  Antisense Strand to SEQ ID NO: 424961
auaguccuccagaauuaag

SEQ ID NO: 424963 - RNA, 19 nt, Artificial Sequence
  Description of Artificial Sequence: Synthetic oligonucleotide
  Sense Strand Starting at position 1354 of SEQ ID NO: 316662
ggaggacuauucuuuccau

SEQ ID NO: 424964 - RNA, 19 nt, Artificial Sequence
  Description of Artificial Sequence: Synthetic oligonucleotide
  Antisense Strand to SEQ ID NO: 424963
auggaaagaauaguccucc

SEQ ID NO: 424965 - RNA, 19 nt, Artificial Sequence
  Description of Artificial Sequence: Synthetic oligonucleotide
  Sense Strand Starting at position 1354 of SEQ ID NO: 316701
guaugaagguccuuaagac

SEQ ID NO: 424966 - RNA, 19 nt, Artificial Sequence
  Description of Artificial Sequence: Synthetic oligonucleotide
  Antisense Strand to SEQ ID NO: 424965
gucuuaaggaccuucauac

SEQ ID NO: 424967 - RNA, 19 nt, Artificial Sequence
  Description of Artificial Sequence: Synthetic oligonucleotide
  Sense Strand Starting at position 1354 of SEQ ID NO: 316705
gaagguccuuaagacuagu

SEQ ID NO: 424968 - RNA, 19 nt, Artificial Sequence
  Description of Artificial Sequence: Synthetic oligonucleotide
  Antisense Strand to SEQ ID NO: 424967
acuagucuuaaggaccuuc

SEQ ID NO: 424969 - RNA, 19 nt, Artificial Sequence
  Description of Artificial Sequence: Synthetic oligonucleotide
  Sense Strand Starting at position 1354 of SEQ ID NO: 316719
cuaguuccaccuuguguau

SEQ ID NO: 424970 - RNA, 19 nt, Artificial Sequence
  Description of Artificial Sequence: Synthetic oligonucleotide
  Antisense Strand to SEQ ID NO: 424969
auacacaagguggaacuag

SEQ ID NO: 424971 - RNA, 19 nt, Artificial Sequence
  Description of Artificial Sequence: Synthetic oligonucleotide
  Sense Strand Starting at position 1354 of SEQ ID NO: 316723
uuccaccuuguguauaaga

SEQ ID NO: 424972 - RNA, 19 nt, Artificial Sequence
  Description of Artificial Sequence: Synthetic oligonucleotide
  Antisense Strand to SEQ ID NO: 424971
ucuuauacacaagguggaa

SEQ ID NO: 424973 - RNA, 19 nt, Artificial Sequence
  Description of Artificial Sequence: Synthetic oligonucleotide
  Sense Strand Starting at position 1354 of SEQ ID NO: 316725
ccaccuuguguauaagacu

SEQ ID NO: 424974 - RNA, 19 nt, Artificial Sequence
  Description of Artificial Sequence: Synthetic oligonucleotide
  Antisense Strand to SEQ ID NO: 424973
agucuuauacacaaggugg

SEQ ID NO: 424975 - RNA, 19 nt, Artificial Sequence
  Description of Artificial Sequence: Synthetic oligonucleotide
  Sense Strand Starting at position 1354 of SEQ ID NO: 316734
guauaagacugccuacagu

SEQ ID NO: 424976 - RNA, 19 nt, Artificial Sequence
  Description of Artificial Sequence: Synthetic oligonucleotide
  Antisense Strand to SEQ ID NO: 424975
acuguaggcagucuuauac

SEQ ID NO: 424977 - RNA, 19 nt, Artificial Sequence
  Description of Artificial Sequence: Synthetic oligonucleotide
  Sense Strand Starting at position 1354 of SEQ ID NO: 316752
ugaguacucucaucagacu

SEQ ID NO: 424978 - RNA, 19 nt, Artificial Sequence
  Description of Artificial Sequence: Synthetic oligonucleotide
  Antisense Strand to SEQ ID NO: 424977
agucugaugagaguacuca

SEQ ID NO: 424979 - RNA, 19 nt, Artificial Sequence
  Description of Artificial Sequence: Synthetic oligonucleotide
  Sense Strand Starting at position 1354 of SEQ ID NO: 316761
ucaucagacuucugaucag

SEQ ID NO: 424980 - RNA, 19 nt, Artificial Sequence
  Description of Artificial Sequence: Synthetic oligonucleotide
  Antisense Strand to SEQ ID NO: 424979
cugaucagaagucugauga

SEQ ID NO: 424981 - RNA, 19 nt, Artificial Sequence
  Description of Artificial Sequence: Synthetic oligonucleotide
  Sense Strand Starting at position 1354 of SEQ ID NO: 316764
ucagacuucugaucagauu

SEQ ID NO: 424982 - RNA, 19 nt, Artificial Sequence
  Description of Artificial Sequence: Synthetic oligonucleotide
  Antisense Strand to SEQ ID NO: 424981
aaucugaucagaagucuga

SEQ ID NO: 424983 - RNA, 19 nt, Artificial Sequence
  Description of Artificial Sequence: Synthetic oligonucleotide
  Sense Strand Starting at position 1354 of SEQ ID NO: 316868
auccauucuuuccacguau

SEQ ID NO: 424984 - RNA, 19 nt, Artificial Sequence
  Description of Artificial Sequence: Synthetic oligonucleotide
  Antisense Strand to SEQ ID NO: 424983
auacguggaaagaauggau

SEQ ID NO: 424985 - RNA, 19 nt, Artificial Sequence
  Description of Artificial Sequence: Synthetic oligonucleotide
  Sense Strand Starting at position 1354 of SEQ ID NO: 316870
ccauucuuuccacguauag

SEQ ID NO: 424986 - RNA, 19 nt, Artificial Sequence
  Description of Artificial Sequence: Synthetic oligonucleotide
  Antisense Strand to SEQ ID NO: 424985
cuauacguggaaagaaugg

SEQ ID NO: 424987 - RNA, 19 nt, Artificial Sequence
  Description of Artificial Sequence: Synthetic oligonucleotide
  Sense Strand Starting at position 1354 of SEQ ID NO: 317491
uguagaaagcccugauaau

SEQ ID NO: 424988 - RNA, 19 nt, Artificial Sequence
  Description of Artificial Sequence: Synthetic oligonucleotide
  Antisense Strand to SEQ ID NO: 424987
auuaucagggcuuucuaca

SEQ ID NO: 424989 - RNA, 19 nt, Artificial Sequence
  Description of Artificial Sequence: Synthetic oligonucleotide
  Sense Strand Starting at position 1354 of SEQ ID NO: 317492
guagaaagcccugauaauu

SEQ ID NO: 424990 - RNA, 19 nt, Artificial Sequence
  Description of Artificial Sequence: Synthetic oligonucleotide
  Antisense Strand to SEQ ID NO: 424989
aauuaucagggcuuucuac

SEQ ID NO: 424991 - RNA, 19 nt, Artificial Sequence
  Description of Artificial Sequence: Synthetic oligonucleotide
  Sense Strand Starting at position 1355 of SEQ ID NO: 315310
uuguuucaagagggugaaa

SEQ ID NO: 424992 - RNA, 19 nt, Artificial Sequence
  Description of Artificial Sequence: Synthetic oligonucleotide
  Antisense Strand to SEQ ID NO: 424991
uuucacccucuugaaacaa

SEQ ID NO: 424993 - RNA, 19 nt, Artificial Sequence
  Description of Artificial Sequence: Synthetic oligonucleotide
  Sense Strand Starting at position 1355 of SEQ ID NO: 315449
augauaaacucuguuagug

SEQ ID NO: 424994 - RNA, 19 nt, Artificial Sequence
  Description of Artificial Sequence: Synthetic oligonucleotide
  Antisense Strand to SEQ ID NO: 424993
cacuaacagaguuuaucau

SEQ ID NO: 424995 - RNA, 19 nt, Artificial Sequence
  Description of Artificial Sequence: Synthetic oligonucleotide
  Sense Strand Starting at position 1355 of SEQ ID NO: 315461
guuaguggccaauaaacaa

SEQ ID NO: 424996 - RNA, 19 nt, Artificial Sequence
  Description of Artificial Sequence: Synthetic oligonucleotide
  Antisense Strand to SEQ ID NO: 424995
uuguuuauuggccacuaac

SEQ ID NO: 424997 - RNA, 19 nt, Artificial Sequence
  Description of Artificial Sequence: Synthetic oligonucleotide
  Sense Strand Starting at position 1355 of SEQ ID NO: 316057
uaaguugcggcguuagagu

SEQ ID NO: 424998 - RNA, 19 nt, Artificial Sequence
  Description of Artificial Sequence: Synthetic oligonucleotide
  Antisense Strand to SEQ ID NO: 424997
acucuaacgccgcaacuua

SEQ ID NO: 424999 - RNA, 19 nt, Artificial Sequence
  Description of Artificial Sequence: Synthetic oligonucleotide
  Sense Strand Starting at position 1355 of SEQ ID NO: 316134
ucaacaugcuuucuggaaa

SEQ ID NO: 425000 - RNA, 19 nt, Artificial Sequence
  Description of Artificial Sequence: Synthetic oligonucleotide
  Antisense Strand to SEQ ID NO: 424999
uuuccagaaagcauguuga

SEQ ID NO: 425001 - RNA, 19 nt, Artificial Sequence
  Description of Artificial Sequence: Synthetic oligonucleotide
  Sense Strand Starting at position 1355 of SEQ ID NO: 316228
cuccgagaccucuaaaggu

SEQ ID NO: 425002 - RNA, 19 nt, Artificial Sequence
  Description of Artificial Sequence: Synthetic oligonucleotide
  Antisense Strand to SEQ ID NO: 425001
accuuuagaggucucggag

SEQ ID NO: 425003 - RNA, 19 nt, Artificial Sequence
  Description of Artificial Sequence: Synthetic oligonucleotide
  Sense Strand Starting at position 1355 of SEQ ID NO: 316429
gcaucaauuguauagaaac

SEQ ID NO: 425004 - RNA, 19 nt, Artificial Sequence
  Description of Artificial Sequence: Synthetic oligonucleotide
  Antisense Strand to SEQ ID NO: 425003
guuucuauacaauugaugc

SEQ ID NO: 425005 - RNA, 19 nt, Artificial Sequence
  Description of Artificial Sequence: Synthetic oligonucleotide
  Sense Strand Starting at position 1355 of SEQ ID NO: 316535
ggcaaaucaaggcaaaguu

SEQ ID NO: 425006 - RNA, 19 nt, Artificial Sequence
  Description of Artificial Sequence: Synthetic oligonucleotide
  Antisense Strand to SEQ ID NO: 425005
aacuuugccuugauuugcc

SEQ ID NO: 425007 - RNA, 19 nt, Artificial Sequence
  Description of Artificial Sequence: Synthetic oligonucleotide
  Sense Strand Starting at position 1355 of SEQ ID NO: 316606
cucauccacggcuaaauua

SEQ ID NO: 425008 - RNA, 19 nt, Artificial Sequence
  Description of Artificial Sequence: Synthetic oligonucleotide
  Antisense Strand to SEQ ID NO: 425007
uaauuuagccguggaugag

SEQ ID NO: 425009 - RNA, 19 nt, Artificial Sequence
  Description of Artificial Sequence: Synthetic oligonucleotide
  Sense Strand Starting at position 1355 of SEQ ID NO: 316631
ccaguuguggcacaaagga

SEQ ID NO: 425010 - RNA, 19 nt, Artificial Sequence
  Description of Artificial Sequence: Synthetic oligonucleotide
  Antisense Strand to SEQ ID NO: 425009
uccuuugugccacaacugg

SEQ ID NO: 425011 - RNA, 19 nt, Artificial Sequence
  Description of Artificial Sequence: Synthetic oligonucleotide
  Sense Strand Starting at position 1355 of SEQ ID NO: 316714
auucuugcugcuuaaagaa

SEQ ID NO: 425012 - RNA, 19 nt, Artificial Sequence
  Description of Artificial Sequence: Synthetic oligonucleotide
  Antisense Strand to SEQ ID NO: 425011
uucuuuaagcagcaagaau

SEQ ID NO: 425013 - RNA, 19 nt, Artificial Sequence
  Description of Artificial Sequence: Synthetic oligonucleotide
  Sense Strand Starting at position 1355 of SEQ ID NO: 316912
cuacauucgguggaaaugu

SEQ ID NO: 425014 - RNA, 19 nt, Artificial Sequence
  Description of Artificial Sequence: Synthetic oligonucleotide
  Antisense Strand to SEQ ID NO: 425013
acauuuccaccgaauguag

SEQ ID NO: 425015 - RNA, 19 nt, Artificial Sequence
  Description of Artificial Sequence: Synthetic oligonucleotide
  Sense Strand Starting at position 1355 of SEQ ID NO: 317285
cucuuaaagcgagaagagu

SEQ ID NO: 425016 - RNA, 19 nt, Artificial Sequence
  Description of Artificial Sequence: Synthetic oligonucleotide
  Antisense Strand to SEQ ID NO: 425015
acucuucucgcuuuaagag

SEQ ID NO: 425017 - RNA, 19 nt, Artificial Sequence
  Description of Artificial Sequence: Synthetic oligonucleotide
  Sense Strand Starting at position 1355 of SEQ ID NO: 317368
cgaguucugccauuaacgu

SEQ ID NO: 425018 - RNA, 19 nt, Artificial Sequence
  Description of Artificial Sequence: Synthetic oligonucleotide
  Antisense Strand to SEQ ID NO: 425017
acguuaauggcagaacucg

SEQ ID NO: 425019 - RNA, 19 nt, Artificial Sequence
  Description of Artificial Sequence: Synthetic oligonucleotide
  Sense Strand Starting at position 1355 of SEQ ID NO: 317379
auuaacguguaauuagaca

SEQ ID NO: 425020 - RNA, 19 nt, Artificial Sequence
  Description of Artificial Sequence: Synthetic oligonucleotide
  Antisense Strand to SEQ ID NO: 425019
ugucuaauuacacguuaau

SEQ ID NO: 425021 - RNA, 19 nt, Artificial Sequence
  Description of Artificial Sequence: Synthetic oligonucleotide
  Sense Strand Starting at position 1355 of SEQ ID NO: 317684
agcuauuauguugauagaa

SEQ ID NO: 425022 - RNA, 19 nt, Artificial Sequence
  Description of Artificial Sequence: Synthetic oligonucleotide
  Antisense Strand to SEQ ID NO: 425021
uucuaucaacauaauagcu

SEQ ID NO: 425023 - RNA, 19 nt, Artificial Sequence
  Description of Artificial Sequence: Synthetic oligonucleotide
  Sense Strand Starting at position 1355 of SEQ ID NO: 317802
cugaaaugaucuuugaccu

SEQ ID NO: 425024 - RNA, 19 nt, Artificial Sequence
  Description of Artificial Sequence: Synthetic oligonucleotide
  Antisense Strand to SEQ ID NO: 425023
aggucaaagaucauuucag

SEQ ID NO: 425025 - RNA, 19 nt, Artificial Sequence
  Description of Artificial Sequence: Synthetic oligonucleotide
  Sense Strand Starting at position 1355 of SEQ ID NO: 317803
ugaaaugaucuuugaccuc

SEQ ID NO: 425026 - RNA, 19 nt, Artificial Sequence
  Description of Artificial Sequence: Synthetic oligonucleotide
  Antisense Strand to SEQ ID NO: 425025
gaggucaaagaucauuuca

SEQ ID NO: 425027 - RNA, 19 nt, Artificial Sequence
  Description of Artificial Sequence: Synthetic oligonucleotide
  Sense Strand Starting at position 1355 of SEQ ID NO: 317831
agagacgauuagccugaaa

SEQ ID NO: 425028 - RNA, 19 nt, Artificial Sequence
  Description of Artificial Sequence: Synthetic oligonucleotide
  Antisense Strand to SEQ ID NO: 425027
uuucaggcuaaucgucucu

SEQ ID NO: 425029 - RNA, 19 nt, Artificial Sequence
  Description of Artificial Sequence: Synthetic oligonucleotide
  Sense Strand Starting at position 1355 of SEQ ID NO: 317833
agacgauuagccugaaagg

SEQ ID NO: 425030 - RNA, 19 nt, Artificial Sequence
  Description of Artificial Sequence: Synthetic oligonucleotide
  Antisense Strand to SEQ ID NO: 425029
ccuuucaggcuaaucgucu

SEQ ID NO: 425031 - RNA, 19 nt, Artificial Sequence
  Description of Artificial Sequence: Synthetic oligonucleotide
  Sense Strand Starting at position 1355 of SEQ ID NO: 317857
aacauugugccauaguuag

SEQ ID NO: 425032 - RNA, 19 nt, Artificial Sequence
  Description of Artificial Sequence: Synthetic oligonucleotide
  Antisense Strand to SEQ ID NO: 425031
cuaacuauggcacaauguu

SEQ ID NO: 425033 - RNA, 19 nt, Artificial Sequence
  Description of Artificial Sequence: Synthetic oligonucleotide
  Sense Strand Starting at position 1355 of SEQ ID NO: 317874
agaguccagucaccaauau

SEQ ID NO: 425034 - RNA, 19 nt, Artificial Sequence
  Description of Artificial Sequence: Synthetic oligonucleotide
  Antisense Strand to SEQ ID NO: 425033
auauuggugacuggacucu

SEQ ID NO: 425035 - RNA, 19 nt, Artificial Sequence
  Description of Artificial Sequence: Synthetic oligonucleotide
  Sense Strand Starting at position 1355 of SEQ ID NO: 317956
cucauuaaauuugagauga

SEQ ID NO: 425036 - RNA, 19 nt, Artificial Sequence
  Description of Artificial Sequence: Synthetic oligonucleotide
  Antisense Strand to SEQ ID NO: 425035
ucaucucaaauuuaaugag

SEQ ID NO: 425037 - RNA, 19 nt, Artificial Sequence
  Description of Artificial Sequence: Synthetic oligonucleotide
  Sense Strand Starting at position 1355 of SEQ ID NO: 318079
gaaagcugugcugauuaau

SEQ ID NO: 425038 - RNA, 19 nt, Artificial Sequence
  Description of Artificial Sequence: Synthetic oligonucleotide
  Antisense Strand to SEQ ID NO: 425037
auuaaucagcacagcuuuc

SEQ ID NO: 425039 - RNA, 19 nt, Artificial Sequence
  Description of Artificial Sequence: Synthetic oligonucleotide
  Sense Strand Starting at position 1355 of SEQ ID NO: 318088
gcugauuaauacuuaaaug

SEQ ID NO: 425040 - RNA, 19 nt, Artificial Sequence
  Description of Artificial Sequence: Synthetic oligonucleotide
  Antisense Strand to SEQ ID NO: 425039
cauuuaaguauuaaucagc

SEQ ID NO: 425041 - RNA, 19 nt, Artificial Sequence
  Description of Artificial Sequence: Synthetic oligonucleotide
  Sense Strand Starting at position 1355 of SEQ ID NO: 318183
acuggaacauuugaacuua

SEQ ID NO: 425042 - RNA, 19 nt, Artificial Sequence
  Description of Artificial Sequence: Synthetic oligonucleotide
  Antisense Strand to SEQ ID NO: 425041
uaaguucaaauguuccagu

SEQ ID NO: 425043 - RNA, 19 nt, Artificial Sequence
  Description of Artificial Sequence: Synthetic oligonucleotide
  Sense Strand Starting at position 1355 of SEQ ID NO: 318250
aacuguagucuauggaaga

SEQ ID NO: 425044 - RNA, 19 nt, Artificial Sequence
  Description of Artificial Sequence: Synthetic oligonucleotide
  Antisense Strand to SEQ ID NO: 425043
ucuuccauagacuacaguu

SEQ ID NO: 425045 - RNA, 19 nt, Artificial Sequence
  Description of Artificial Sequence: Synthetic oligonucleotide
  Sense Strand Starting at position 1355 of SEQ ID NO: 318350
auagcauuuccuuacgcga

SEQ ID NO: 425046 - RNA, 19 nt, Artificial Sequence
  Description of Artificial Sequence: Synthetic oligonucleotide
  Antisense Strand to SEQ ID NO: 425045
ucgcguaaggaaaugcuau

SEQ ID NO: 425047 - RNA, 19 nt, Artificial Sequence
  Description of Artificial Sequence: Synthetic oligonucleotide
  Sense Strand Starting at position 1355 of SEQ ID NO: 318466
auucuaccucugugaagag

SEQ ID NO: 425048 - RNA, 19 nt, Artificial Sequence
  Description of Artificial Sequence: Synthetic oligonucleotide
  Antisense Strand to SEQ ID NO: 425047
cucuucacagagguagaau

SEQ ID NO: 425049 - RNA, 19 nt, Artificial Sequence
  Description of Artificial Sequence: Synthetic oligonucleotide
  Sense Strand Starting at position 1355 of SEQ ID NO: 318475
cugugaagagugcaaugaa

SEQ ID NO: 425050 - RNA, 19 nt, Artificial Sequence
  Description of Artificial Sequence: Synthetic oligonucleotide
  Antisense Strand to SEQ ID NO: 425049
uucauugcacucuucacag

SEQ ID NO: 425051 - RNA, 19 nt, Artificial Sequence
  Description of Artificial Sequence: Synthetic oligonucleotide
  Sense Strand Starting at position 1355 of SEQ ID NO: 318478
ugaagagugcaaugaacaa

SEQ ID NO: 425052 - RNA, 19 nt, Artificial Sequence
  Description of Artificial Sequence: Synthetic oligonucleotide
  Antisense Strand to SEQ ID NO: 425051
uuguucauugcacucuuca

SEQ ID NO: 425053 - RNA, 19 nt, Artificial Sequence
  Description of Artificial Sequence: Synthetic oligonucleotide
  Sense Strand Starting at position 1355 of SEQ ID NO: 318536
gaaaguagguaagcaaaua

SEQ ID NO: 425054 - RNA, 19 nt, Artificial Sequence
  Description of Artificial Sequence: Synthetic oligonucleotide
  Antisense Strand to SEQ ID NO: 425053
uauuugcuuaccuacuuuc

SEQ ID NO: 425055 - RNA, 19 nt, Artificial Sequence
  Description of Artificial Sequence: Synthetic oligonucleotide
  Sense Strand Starting at position 1355 of SEQ ID NO: 318582
aagauaaaucuagggcugu

SEQ ID NO: 425056 - RNA, 19 nt, Artificial Sequence
  Description of Artificial Sequence: Synthetic oligonucleotide
  Antisense Strand to SEQ ID NO: 425055
acagcccuagauuuaucuu

SEQ ID NO: 425057 - RNA, 19 nt, Artificial Sequence
  Description of Artificial Sequence: Synthetic oligonucleotide
  Sense Strand Starting at position 1355 of SEQ ID NO: 318800
aagaaccaucugugguaga

SEQ ID NO: 425058 - RNA, 19 nt, Artificial Sequence
  Description of Artificial Sequence: Synthetic oligonucleotide
  Antisense Strand to SEQ ID NO: 425057
ucuaccacagaugguucuu

SEQ ID NO: 425059 - RNA, 19 nt, Artificial Sequence
  Description of Artificial Sequence: Synthetic oligonucleotide
  Sense Strand Starting at position 1355 of SEQ ID NO: 318900
ccauuugaguuccuguagu

SEQ ID NO: 425060 - RNA, 19 nt, Artificial Sequence
  Description of Artificial Sequence: Synthetic oligonucleotide
  Antisense Strand to SEQ ID NO: 425059
acuacaggaacucaaaugg

SEQ ID NO: 425061 - RNA, 19 nt, Artificial Sequence
  Description of Artificial Sequence: Synthetic oligonucleotide
  Sense Strand Starting at position 1355 of SEQ ID NO: 319000
cuugcauuugcaugacauu

SEQ ID NO: 425062 - RNA, 19 nt, Artificial Sequence
  Description of Artificial Sequence: Synthetic oligonucleotide
  Antisense Strand to SEQ ID NO: 425061
aaugucaugcaaaugcaag

SEQ ID NO: 425063 - RNA, 19 nt, Artificial Sequence
  Description of Artificial Sequence: Synthetic oligonucleotide
  Sense Strand Starting at position 1355 of SEQ ID NO: 319137
uucuuaaugaugugaugag

SEQ ID NO: 425064 - RNA, 19 nt, Artificial Sequence
  Description of Artificial Sequence: Synthetic oligonucleotide
  Antisense Strand to SEQ ID NO: 425063
cucaucacaucauuaagaa

SEQ ID NO: 425065 - RNA, 19 nt, Artificial Sequence
  Description of Artificial Sequence: Synthetic oligonucleotide
  Sense Strand Starting at position 1355 of SEQ ID NO: 319158
agaaacaguugucuuacua

SEQ ID NO: 425066 - RNA, 19 nt, Artificial Sequence
  Description of Artificial Sequence: Synthetic oligonucleotide
  Antisense Strand to SEQ ID NO: 425065
uaguaagacaacuguuucu

SEQ ID NO: 425067 - RNA, 19 nt, Artificial Sequence
  Description of Artificial Sequence: Synthetic oligonucleotide
  Sense Strand Starting at position 1355 of SEQ ID NO: 319170
cuuacuauuuguuuguuga

SEQ ID NO: 425068 - RNA, 19 nt, Artificial Sequence
  Description of Artificial Sequence: Synthetic oligonucleotide
  Antisense Strand to SEQ ID NO: 425067
ucaacaaacaaauaguaag

SEQ ID NO: 425069 - RNA, 19 nt, Artificial Sequence
  Description of Artificial Sequence: Synthetic oligonucleotide
  Sense Strand Starting at position 1355 of SEQ ID NO: 319198
acaguucuccaacagguuu

SEQ ID NO: 425070 - RNA, 19 nt, Artificial Sequence
  Description of Artificial Sequence: Synthetic oligonucleotide
  Antisense Strand to SEQ ID NO: 425069
aaaccuguuggagaacugu

SEQ ID NO: 425071 - RNA, 19 nt, Artificial Sequence
  Description of Artificial Sequence: Synthetic oligonucleotide
  Sense Strand Starting at position 1356 of SEQ ID NO: 315659
ccuaacaauucgccugaga

SEQ ID NO: 425072 - RNA, 19 nt, Artificial Sequence
  Description of Artificial Sequence: Synthetic oligonucleotide
  Antisense Strand to SEQ ID NO: 425071
ucucaggcgaauuguuagg

SEQ ID NO: 425073 - RNA, 19 nt, Artificial Sequence
  Description of Artificial Sequence: Synthetic oligonucleotide
  Sense Strand Starting at position 1356 of SEQ ID NO: 315662
aacaauucgccugagaguc

SEQ ID NO: 425074 - RNA, 19 nt, Artificial Sequence
  Description of Artificial Sequence: Synthetic oligonucleotide
  Antisense Strand to SEQ ID NO: 425073
gacucucaggcgaauuguu

SEQ ID NO: 425075 - RNA, 19 nt, Artificial Sequence
  Description of Artificial Sequence: Synthetic oligonucleotide
  Sense Strand Starting at position 1356 of SEQ ID NO: 315752
acuauaguuuacucucuga

SEQ ID NO: 425076 - RNA, 19 nt, Artificial Sequence
  Description of Artificial Sequence: Synthetic oligonucleotide
  Antisense Strand to SEQ ID NO: 425075
ucagagaguaaacuauagu

SEQ ID NO: 425077 - RNA, 19 nt, Artificial Sequence
  Description of Artificial Sequence: Synthetic oligonucleotide
  Sense Strand Starting at position 1356 of SEQ ID NO: 315755
auaguuuacucucugacau

SEQ ID NO: 425078 - RNA, 19 nt, Artificial Sequence
  Description of Artificial Sequence: Synthetic oligonucleotide
  Antisense Strand to SEQ ID NO: 425077
augucagagaguaaacuau

SEQ ID NO: 425079 - RNA, 19 nt, Artificial Sequence
  Description of Artificial Sequence: Synthetic oligonucleotide
  Sense Strand Starting at position 1356 of SEQ ID NO: 315787
ugcacuaauucuuccugga

SEQ ID NO: 425080 - RNA, 19 nt, Artificial Sequence
  Description of Artificial Sequence: Synthetic oligonucleotide
  Antisense Strand to SEQ ID NO: 425079
uccaggaagaauuagugca

SEQ ID NO: 425081 - RNA, 19 nt, Artificial Sequence
  Description of Artificial Sequence: Synthetic oligonucleotide
  Sense Strand Starting at position 1356 of SEQ ID NO: 315917
uucggcuuacaguaagacu

SEQ ID NO: 425082 - RNA, 19 nt, Artificial Sequence
  Description of Artificial Sequence: Synthetic oligonucleotide
  Antisense Strand to SEQ ID NO: 425081
agucuuacuguaagccgaa

SEQ ID NO: 425083 - RNA, 19 nt, Artificial Sequence
  Description of Artificial Sequence: Synthetic oligonucleotide
  Sense Strand Starting at position 1356 of SEQ ID NO: 315995
cuaauucuuuggucccuga

SEQ ID NO: 425084 - RNA, 19 nt, Artificial Sequence
  Description of Artificial Sequence: Synthetic oligonucleotide
  Antisense Strand to SEQ ID NO: 425083
ucagggaccaaagaauuag

SEQ ID NO: 425085 - RNA, 19 nt, Artificial Sequence
  Description of Artificial Sequence: Synthetic oligonucleotide
  Sense Strand Starting at position 1356 of SEQ ID NO: 316171
agccguuugaaacagaaua

SEQ ID NO: 425086 - RNA, 19 nt, Artificial Sequence
  Description of Artificial Sequence: Synthetic oligonucleotide
  Antisense Strand to SEQ ID NO: 425085
uauucuguuucaaacggcu

SEQ ID NO: 425087 - RNA, 19 nt, Artificial Sequence
  Description of Artificial Sequence: Synthetic oligonucleotide
  Sense Strand Starting at position 1356 of SEQ ID NO: 316269
gcuacaaucgcugcagguu

SEQ ID NO: 425088 - RNA, 19 nt, Artificial Sequence
  Description of Artificial Sequence: Synthetic oligonucleotide
  Antisense Strand to SEQ ID NO: 425087
aaccugcagcgauuguagc

SEQ ID NO: 425089 - RNA, 19 nt, Artificial Sequence
  Description of Artificial Sequence: Synthetic oligonucleotide
  Sense Strand Starting at position 1356 of SEQ ID NO: 316572
aaagcaguaguauggauau

SEQ ID NO: 425090 - RNA, 19 nt, Artificial Sequence
  Description of Artificial Sequence: Synthetic oligonucleotide
  Antisense Strand to SEQ ID NO: 425089
auauccauacuacugcuuu

SEQ ID NO: 425091 - RNA, 19 nt, Artificial Sequence
  Description of Artificial Sequence: Synthetic oligonucleotide
  Sense Strand Starting at position 1356 of SEQ ID NO: 316629
augguaaacguuuauguau

SEQ ID NO: 425092 - RNA, 19 nt, Artificial Sequence
  Description of Artificial Sequence: Synthetic oligonucleotide
  Antisense Strand to SEQ ID NO: 425091
auacauaaacguuuaccau

SEQ ID NO: 425093 - RNA, 19 nt, Artificial Sequence
  Description of Artificial Sequence: Synthetic oligonucleotide
  Sense Strand Starting at position 1356 of SEQ ID NO: 316731
cgcucucauuucguaauau

SEQ ID NO: 425094 - RNA, 19 nt, Artificial Sequence
  Description of Artificial Sequence: Synthetic oligonucleotide
  Antisense Strand to SEQ ID NO: 425093
auauuacgaaaugagagcg

SEQ ID NO: 425095 - RNA, 19 nt, Artificial Sequence
  Description of Artificial Sequence: Synthetic oligonucleotide
  Sense Strand Starting at position 1356 of SEQ ID NO: 316759
gaugucagugugcagaauu

SEQ ID NO: 425096 - RNA, 19 nt, Artificial Sequence
  Description of Artificial Sequence: Synthetic oligonucleotide
  Antisense Strand to SEQ ID NO: 425095
aauucugcacacugacauc

SEQ ID NO: 425097 - RNA, 19 nt, Artificial Sequence
  Description of Artificial Sequence: Synthetic oligonucleotide
  Sense Strand Starting at position 1356 of SEQ ID NO: 316875
ucugauaaauacgcuuuau

SEQ ID NO: 425098 - RNA, 19 nt, Artificial Sequence
  Description of Artificial Sequence: Synthetic oligonucleotide
  Antisense Strand to SEQ ID NO: 425097
auaaagcguauuuaucaga

SEQ ID NO: 425099 - RNA, 19 nt, Artificial Sequence
  Description of Artificial Sequence: Synthetic oligonucleotide
  Sense Strand Starting at position 1356 of SEQ ID NO: 316911
acgagaaagcccggagaaa

SEQ ID NO: 425100 - RNA, 19 nt, Artificial Sequence
  Description of Artificial Sequence: Synthetic oligonucleotide
  Antisense Strand to SEQ ID NO: 425099
uuucuccgggcuuucucgu

SEQ ID NO: 425101 - RNA, 19 nt, Artificial Sequence
  Description of Artificial Sequence: Synthetic oligonucleotide
  Sense Strand Starting at position 1356 of SEQ ID NO: 317457
ccucuuucccuccagggaa

SEQ ID NO: 425102 - RNA, 19 nt, Artificial Sequence
  Description of Artificial Sequence: Synthetic oligonucleotide
  Antisense Strand to SEQ ID NO: 425101
uucccuggagggaaagagg

SEQ ID NO: 425103 - RNA, 19 nt, Artificial Sequence
  Description of Artificial Sequence: Synthetic oligonucleotide
  Sense Strand Starting at position 1356 of SEQ ID NO: 317698
agaggugcaccauacuuua

SEQ ID NO: 425104 - RNA, 19 nt, Artificial Sequence
  Description of Artificial Sequence: Synthetic oligonucleotide
  Antisense Strand to SEQ ID NO: 425103
uaaaguauggugcaccucu

SEQ ID NO: 425105 - RNA, 19 nt, Artificial Sequence
  Description of Artificial Sequence: Synthetic oligonucleotide
  Sense Strand Starting at position 1356 of SEQ ID NO: 317750
ggugaauucuaacuaggcu

SEQ ID NO: 425106 - RNA, 19 nt, Artificial Sequence
  Description of Artificial Sequence: Synthetic oligonucleotide
  Antisense Strand to SEQ ID NO: 425105
agccuaguuagaauucacc

SEQ ID NO: 425107 - RNA, 19 nt, Artificial Sequence
  Description of Artificial Sequence: Synthetic oligonucleotide
  Sense Strand Starting at position 1356 of SEQ ID NO: 317791
gccauugcccaauaauaug

SEQ ID NO: 425108 - RNA, 19 nt, Artificial Sequence
  Description of Artificial Sequence: Synthetic oligonucleotide
  Antisense Strand to SEQ ID NO: 425107
cauauuauugggcaauggc

SEQ ID NO: 425109 - RNA, 19 nt, Artificial Sequence
  Description of Artificial Sequence: Synthetic oligonucleotide
  Sense Strand Starting at position 1356 of SEQ ID NO: 317797
gcccaauaauauguggaau

SEQ ID NO: 425110 - RNA, 19 nt, Artificial Sequence
  Description of Artificial Sequence: Synthetic oligonucleotide
  Antisense Strand to SEQ ID NO: 425109
auuccacauauuauugggc

SEQ ID NO: 425111 - RNA, 19 nt, Artificial Sequence
  Description of Artificial Sequence: Synthetic oligonucleotide
  Sense Strand Starting at position 1356 of SEQ ID NO: 317903
gagcaaaugucaucuauug

SEQ ID NO: 425112 - RNA, 19 nt, Artificial Sequence
  Description of Artificial Sequence: Synthetic oligonucleotide
  Antisense Strand to SEQ ID NO: 425111
caauagaugacauuugcuc

SEQ ID NO: 425113 - RNA, 19 nt, Artificial Sequence
  Description of Artificial Sequence: Synthetic oligonucleotide
  Sense Strand Starting at position 1356 of SEQ ID NO: 318045
caacauguugacgauugau

SEQ ID NO: 425114 - RNA, 19 nt, Artificial Sequence
  Description of Artificial Sequence: Synthetic oligonucleotide
  Antisense Strand to SEQ ID NO: 425113
aucaaucgucaacauguug

SEQ ID NO: 425115 - RNA, 19 nt, Artificial Sequence
  Description of Artificial Sequence: Synthetic oligonucleotide
  Sense Strand Starting at position 1356 of SEQ ID NO: 318048
cauguugacgauugaucuu

SEQ ID NO: 425116 - RNA, 19 nt, Artificial Sequence
  Description of Artificial Sequence: Synthetic oligonucleotide
  Antisense Strand to SEQ ID NO: 425115
aagaucaaucgucaacaug

SEQ ID NO: 425117 - RNA, 19 nt, Artificial Sequence
  Description of Artificial Sequence: Synthetic oligonucleotide
  Sense Strand Starting at position 1356 of SEQ ID NO: 318101
gaggcuuugcuuuacucau

SEQ ID NO: 425118 - RNA, 19 nt, Artificial Sequence
  Description of Artificial Sequence: Synthetic oligonucleotide
  Antisense Strand to SEQ ID NO: 425117
augaguaaagcaaagccuc

SEQ ID NO: 425119 - RNA, 19 nt, Artificial Sequence
  Description of Artificial Sequence: Synthetic oligonucleotide
  Sense Strand Starting at position 1356 of SEQ ID NO: 318618
auagaaacugcuugucaau

SEQ ID NO: 425120 - RNA, 19 nt, Artificial Sequence
  Description of Artificial Sequence: Synthetic oligonucleotide
  Antisense Strand to SEQ ID NO: 425119
auugacaagcaguuucuau

SEQ ID NO: 425121 - RNA, 19 nt, Artificial Sequence
  Description of Artificial Sequence: Synthetic oligonucleotide
  Sense Strand Starting at position 1356 of SEQ ID NO: 318627
gcuugucaaugccuaauuu

SEQ ID NO: 425122 - RNA, 19 nt, Artificial Sequence
  Description of Artificial Sequence: Synthetic oligonucleotide
  Antisense Strand to SEQ ID NO: 425121
aaauuaggcauugacaagc

SEQ ID NO: 425123 - RNA, 19 nt, Artificial Sequence
  Description of Artificial Sequence: Synthetic oligonucleotide
  Sense Strand Starting at position 1356 of SEQ ID NO: 318662
ucgauauaauguucuugag

SEQ ID NO: 425124 - RNA, 19 nt, Artificial Sequence
  Description of Artificial Sequence: Synthetic oligonucleotide
  Antisense Strand to SEQ ID NO: 425123
cucaagaacauuauaucga

SEQ ID NO: 425125 - RNA, 19 nt, Artificial Sequence
  Description of Artificial Sequence: Synthetic oligonucleotide
  Sense Strand Starting at position 1356 of SEQ ID NO: 318664
gauauaauguucuugagug

SEQ ID NO: 425126 - RNA, 19 nt, Artificial Sequence
  Description of Artificial Sequence: Synthetic oligonucleotide
  Antisense Strand to SEQ ID NO: 425125
cacucaagaacauuauauc

SEQ ID NO: 425127 - RNA, 19 nt, Artificial Sequence
  Description of Artificial Sequence: Synthetic oligonucleotide
  Sense Strand Starting at position 1356 of SEQ ID NO: 318666
uauaauguucuugagugac

SEQ ID NO: 425128 - RNA, 19 nt, Artificial Sequence
  Description of Artificial Sequence: Synthetic oligonucleotide
  Antisense Strand to SEQ ID NO: 425127
gucacucaagaacauuaua

SEQ ID NO: 425129 - RNA, 19 nt, Artificial Sequence
  Description of Artificial Sequence: Synthetic oligonucleotide
  Sense Strand Starting at position 1356 of SEQ ID NO: 318668
uaauguucuugagugacuc

SEQ ID NO: 425130 - RNA, 19 nt, Artificial Sequence
  Description of Artificial Sequence: Synthetic oligonucleotide
  Antisense Strand to SEQ ID NO: 425129
gagucacucaagaacauua

SEQ ID NO: 425131 - RNA, 19 nt, Artificial Sequence
  Description of Artificial Sequence: Synthetic oligonucleotide
  Sense Strand Starting at position 1356 of SEQ ID NO: 318669
aauguucuugagugacuca

SEQ ID NO: 425132 - RNA, 19 nt, Artificial Sequence
  Description of Artificial Sequence: Synthetic oligonucleotide
  Antisense Strand to SEQ ID NO: 425131
ugagucacucaagaacauu

SEQ ID NO: 425133 - RNA, 19 nt, Artificial Sequence
  Description of Artificial Sequence: Synthetic oligonucleotide
  Sense Strand Starting at position 1356 of SEQ ID NO: 318672
guucuugagugacucagaa

SEQ ID NO: 425134 - RNA, 19 nt, Artificial Sequence
  Description of Artificial Sequence: Synthetic oligonucleotide
  Antisense Strand to SEQ ID NO: 425133
uucugagucacucaagaac

SEQ ID NO: 425135 - RNA, 19 nt, Artificial Sequence
  Description of Artificial Sequence: Synthetic oligonucleotide
  Sense Strand Starting at position 1356 of SEQ ID NO: 318740
uuucccaucguagaagagu

SEQ ID NO: 425136 - RNA, 19 nt, Artificial Sequence
  Description of Artificial Sequence: Synthetic oligonucleotide
  Antisense Strand to SEQ ID NO: 425135
acucuucuacgaugggaaa

SEQ ID NO: 425137 - RNA, 19 nt, Artificial Sequence
  Description of Artificial Sequence: Synthetic oligonucleotide
  Sense Strand Starting at position 1356 of SEQ ID NO: 318751
agaagaguuugagcagguu

SEQ ID NO: 425138 - RNA, 19 nt, Artificial Sequence
  Description of Artificial Sequence: Synthetic oligonucleotide
  Antisense Strand to SEQ ID NO: 425137
aaccugcucaaacucuucu

SEQ ID NO: 425139 - RNA, 19 nt, Artificial Sequence
  Description of Artificial Sequence: Synthetic oligonucleotide
  Sense Strand Starting at position 1356 of SEQ ID NO: 318815
gugguuagcauggauagca

SEQ ID NO: 425140 - RNA, 19 nt, Artificial Sequence
  Description of Artificial Sequence: Synthetic oligonucleotide
  Antisense Strand to SEQ ID NO: 425139
ugcuauccaugcuaaccac

SEQ ID NO: 425141 - RNA, 19 nt, Artificial Sequence
  Description of Artificial Sequence: Synthetic oligonucleotide
  Sense Strand Starting at position 1356 of SEQ ID NO: 318973
gauuucuccgagugccaca

SEQ ID NO: 425142 - RNA, 19 nt, Artificial Sequence
  Description of Artificial Sequence: Synthetic oligonucleotide
  Antisense Strand to SEQ ID NO: 425141
uguggcacucggagaaauc

SEQ ID NO: 425143 - RNA, 19 nt, Artificial Sequence
  Description of Artificial Sequence: Synthetic oligonucleotide
  Sense Strand Starting at position 1356 of SEQ ID NO: 318999
agccuauaaccaugagguu

SEQ ID NO: 425144 - RNA, 19 nt, Artificial Sequence
  Description of Artificial Sequence: Synthetic oligonucleotide
  Antisense Strand to SEQ ID NO: 425143
aaccucaugguuauaggcu

SEQ ID NO: 425145 - RNA, 19 nt, Artificial Sequence
  Description of Artificial Sequence: Synthetic oligonucleotide
  Sense Strand Starting at position 1356 of SEQ ID NO: 319000
gccuauaaccaugagguuu

SEQ ID NO: 425146 - RNA, 19 nt, Artificial Sequence
  Description of Artificial Sequence: Synthetic oligonucleotide
  Antisense Strand to SEQ ID NO: 425145
aaaccucaugguuauaggc

SEQ ID NO: 425147 - RNA, 19 nt, Artificial Sequence
  Description of Artificial Sequence: Synthetic oligonucleotide
  Sense Strand Starting at position 1356 of SEQ ID NO: 319129
uucucaugugcauaugaau

SEQ ID NO: 425148 - RNA, 19 nt, Artificial Sequence
  Description of Artificial Sequence: Synthetic oligonucleotide
  Antisense Strand to SEQ ID NO: 425147
auucauaugcacaugagaa

SEQ ID NO: 425149 - RNA, 19 nt, Artificial Sequence
  Description of Artificial Sequence: Synthetic oligonucleotide
  Sense Strand Starting at position 1356 of SEQ ID NO: 319153
ucacuugggaucugguuaa

SEQ ID NO: 425150 - RNA, 19 nt, Artificial Sequence
  Description of Artificial Sequence: Synthetic oligonucleotide
  Antisense Strand to SEQ ID NO: 425149
uuaaccagaucccaaguga

SEQ ID NO: 425151 - RNA, 19 nt, Artificial Sequence
  Description of Artificial Sequence: Synthetic oligonucleotide
  Sense Strand Starting at position 1357 of SEQ ID NO: 315485
agaauaucguuauuauccu

SEQ ID NO: 425152 - RNA, 19 nt, Artificial Sequence
  Description of Artificial Sequence: Synthetic oligonucleotide
  Antisense Strand to SEQ ID NO: 425151
aggauaauaacgauauucu

SEQ ID NO: 425153 - RNA, 19 nt, Artificial Sequence
  Description of Artificial Sequence: Synthetic oligonucleotide
  Sense Strand Starting at position 1357 of SEQ ID NO: 315493
guuauuauccuagaggagu

SEQ ID NO: 425154 - RNA, 19 nt, Artificial Sequence
  Description of Artificial Sequence: Synthetic oligonucleotide
  Antisense Strand to SEQ ID NO: 425153
acuccucuaggauaauaac

SEQ ID NO: 425155 - RNA, 19 nt, Artificial Sequence
  Description of Artificial Sequence: Synthetic oligonucleotide
  Sense Strand Starting at position 1357 of SEQ ID NO: 315504
agaggaguaucuccaguga

SEQ ID NO: 425156 - RNA, 19 nt, Artificial Sequence
  Description of Artificial Sequence: Synthetic oligonucleotide
  Antisense Strand to SEQ ID NO: 425155
ucacuggagauacuccucu

SEQ ID NO: 425157 - RNA, 19 nt, Artificial Sequence
  Description of Artificial Sequence: Synthetic oligonucleotide
  Sense Strand Starting at position 1357 of SEQ ID NO: 315508
gaguaucuccagugacaaa

SEQ ID NO: 425158 - RNA, 19 nt, Artificial Sequence
  Description of Artificial Sequence: Synthetic oligonucleotide
  Antisense Strand to SEQ ID NO: 425157
uuugucacuggagauacuc

SEQ ID NO: 425159 - RNA, 19 nt, Artificial Sequence
  Description of Artificial Sequence: Synthetic oligonucleotide
  Sense Strand Starting at position 1357 of SEQ ID NO: 315526
aaauuagugaguuggcaga

SEQ ID NO: 425160 - RNA, 19 nt, Artificial Sequence
  Description of Artificial Sequence: Synthetic oligonucleotide
  Antisense Strand to SEQ ID NO: 425159
ucugccaacucacuaauuu

SEQ ID NO: 425161 - RNA, 19 nt, Artificial Sequence
  Description of Artificial Sequence: Synthetic oligonucleotide
  Sense Strand Starting at position 1357 of SEQ ID NO: 315578
agguccuuccuaggacuaa

SEQ ID NO: 425162 - RNA, 19 nt, Artificial Sequence
  Description of Artificial Sequence: Synthetic oligonucleotide
  Antisense Strand to SEQ ID NO: 425161
uuaguccuaggaaggaccu

SEQ ID NO: 425163 - RNA, 19 nt, Artificial Sequence
  Description of Artificial Sequence: Synthetic oligonucleotide
  Sense Strand Starting at position 1357 of SEQ ID NO: 315735
ucagucaagagguguggau

SEQ ID NO: 425164 - RNA, 19 nt, Artificial Sequence
  Description of Artificial Sequence: Synthetic oligonucleotide
  Antisense Strand to SEQ ID NO: 425163
auccacaccucuugacuga

SEQ ID NO: 425165 - RNA, 19 nt, Artificial Sequence
  Description of Artificial Sequence: Synthetic oligonucleotide
  Sense Strand Starting at position 1357 of SEQ ID NO: 315739
ucaagagguguggauucua

SEQ ID NO: 425166 - RNA, 19 nt, Artificial Sequence
  Description of Artificial Sequence: Synthetic oligonucleotide
  Antisense Strand to SEQ ID NO: 425165
uagaauccacaccucuuga

SEQ ID NO: 425167 - RNA, 19 nt, Artificial Sequence
  Description of Artificial Sequence: Synthetic oligonucleotide
  Sense Strand Starting at position 1357 of SEQ ID NO: 315944
ccaguccaucuuugauuga

SEQ ID NO: 425168 - RNA, 19 nt, Artificial Sequence
  Description of Artificial Sequence: Synthetic oligonucleotide
  Antisense Strand to SEQ ID NO: 425167
ucaaucaaagauggacugg

SEQ ID NO: 425169 - RNA, 19 nt, Artificial Sequence
  Description of Artificial Sequence: Synthetic oligonucleotide
  Sense Strand Starting at position 1357 of SEQ ID NO: 315947
guccaucuuugauugaauc

SEQ ID NO: 425170 - RNA, 19 nt, Artificial Sequence
  Description of Artificial Sequence: Synthetic oligonucleotide
  Antisense Strand to SEQ ID NO: 425169
gauucaaucaaagauggac

SEQ ID NO: 425171 - RNA, 19 nt, Artificial Sequence
  Description of Artificial Sequence: Synthetic oligonucleotide
  Sense Strand Starting at position 1357 of SEQ ID NO: 316129
uaaggaguaucugcuguaa

SEQ ID NO: 425172 - RNA, 19 nt, Artificial Sequence
  Description of Artificial Sequence: Synthetic oligonucleotide
  Antisense Strand to SEQ ID NO: 425171
uuacagcagauacuccuua

SEQ ID NO: 425173 - RNA, 19 nt, Artificial Sequence
  Description of Artificial Sequence: Synthetic oligonucleotide
  Sense Strand Starting at position 1357 of SEQ ID NO: 316133
gaguaucugcuguaagaug

SEQ ID NO: 425174 - RNA, 19 nt, Artificial Sequence
  Description of Artificial Sequence: Synthetic oligonucleotide
  Antisense Strand to SEQ ID NO: 425173
caucuuacagcagauacuc

SEQ ID NO: 425175 - RNA, 19 nt, Artificial Sequence
  Description of Artificial Sequence: Synthetic oligonucleotide
  Sense Strand Starting at position 1357 of SEQ ID NO: 316227
ugguuuccugucuaauaca

SEQ ID NO: 425176 - RNA, 19 nt, Artificial Sequence
  Description of Artificial Sequence: Synthetic oligonucleotide
  Antisense Strand to SEQ ID NO: 425175
uguauuagacaggaaacca

SEQ ID NO: 425177 - RNA, 19 nt, Artificial Sequence
  Description of Artificial Sequence: Synthetic oligonucleotide
  Sense Strand Starting at position 1357 of SEQ ID NO: 316443
ucgucuacauucucaaaga

SEQ ID NO: 425178 - RNA, 19 nt, Artificial Sequence
  Description of Artificial Sequence: Synthetic oligonucleotide
  Antisense Strand to SEQ ID NO: 425177
ucuuugagaauguagacga

SEQ ID NO: 425179 - RNA, 19 nt, Artificial Sequence
  Description of Artificial Sequence: Synthetic oligonucleotide
  Sense Strand Starting at position 1357 of SEQ ID NO: 316482
aggacuuucuagucugauu

SEQ ID NO: 425180 - RNA, 19 nt, Artificial Sequence
  Description of Artificial Sequence: Synthetic oligonucleotide
  Antisense Strand to SEQ ID NO: 425179
aaucagacuagaaaguccu

SEQ ID NO: 425181 - RNA, 19 nt, Artificial Sequence
  Description of Artificial Sequence: Synthetic oligonucleotide
  Sense Strand Starting at position 1357 of SEQ ID NO: 316639
gguugucguaaugaauaag

SEQ ID NO: 425182 - RNA, 19 nt, Artificial Sequence
  Description of Artificial Sequence: Synthetic oligonucleotide
  Antisense Strand to SEQ ID NO: 425181
cuuauucauuacgacaacc

SEQ ID NO: 425183 - RNA, 19 nt, Artificial Sequence
  Description of Artificial Sequence: Synthetic oligonucleotide
  Sense Strand Starting at position 1357 of SEQ ID NO: 316648
aaugaauaaguggguuacu

SEQ ID NO: 425184 - RNA, 19 nt, Artificial Sequence
  Description of Artificial Sequence: Synthetic oligonucleotide
  Antisense Strand to SEQ ID NO: 425183
aguaacccacuuauucauu

SEQ ID NO: 425185 - RNA, 19 nt, Artificial Sequence
  Description of Artificial Sequence: Synthetic oligonucleotide
  Sense Strand Starting at position 1357 of SEQ ID NO: 316649
augaauaaguggguuacua

SEQ ID NO: 425186 - RNA, 19 nt, Artificial Sequence
  Description of Artificial Sequence: Synthetic oligonucleotide
  Antisense Strand to SEQ ID NO: 425185
uaguaacccacuuauucau

SEQ ID NO: 425187 - RNA, 19 nt, Artificial Sequence
  Description of Artificial Sequence: Synthetic oligonucleotide
  Sense Strand Starting at position 1357 of SEQ ID NO: 316714
uagugccugcuguuaaagu

SEQ ID NO: 425188 - RNA, 19 nt, Artificial Sequence
  Description of Artificial Sequence: Synthetic oligonucleotide
  Antisense Strand to SEQ ID NO: 425187
acuuuaacagcaggcacua

SEQ ID NO: 425189 - RNA, 19 nt, Artificial Sequence
  Description of Artificial Sequence: Synthetic oligonucleotide
  Sense Strand Starting at position 1357 of SEQ ID NO: 316724
uguuaaaguauugagucua

SEQ ID NO: 425190 - RNA, 19 nt, Artificial Sequence
  Description of Artificial Sequence: Synthetic oligonucleotide
  Antisense Strand to SEQ ID NO: 425189
uagacucaauacuuuaaca

SEQ ID NO: 425191 - RNA, 19 nt, Artificial Sequence
  Description of Artificial Sequence: Synthetic oligonucleotide
  Sense Strand Starting at position 1357 of SEQ ID NO: 316729
aaguauugagucuacaugu

SEQ ID NO: 425192 - RNA, 19 nt, Artificial Sequence
  Description of Artificial Sequence: Synthetic oligonucleotide
  Antisense Strand to SEQ ID NO: 425191
acauguagacucaauacuu

SEQ ID NO: 425193 - RNA, 19 nt, Artificial Sequence
  Description of Artificial Sequence: Synthetic oligonucleotide
  Sense Strand Starting at position 1357 of SEQ ID NO: 316768
guuguuguuagagaagaau

SEQ ID NO: 425194 - RNA, 19 nt, Artificial Sequence
  Description of Artificial Sequence: Synthetic oligonucleotide
  Antisense Strand to SEQ ID NO: 425193
auucuucucuaacaacaac

SEQ ID NO: 425195 - RNA, 19 nt, Artificial Sequence
  Description of Artificial Sequence: Synthetic oligonucleotide
  Sense Strand Starting at position 1357 of SEQ ID NO: 316801
aggcacuaauucuugcaua

SEQ ID NO: 425196 - RNA, 19 nt, Artificial Sequence
  Description of Artificial Sequence: Synthetic oligonucleotide
  Antisense Strand to SEQ ID NO: 425195
uaugcaagaauuagugccu

SEQ ID NO: 425197 - RNA, 19 nt, Artificial Sequence
  Description of Artificial Sequence: Synthetic oligonucleotide
  Sense Strand Starting at position 1357 of SEQ ID NO: 317486
acauuuagcuuccuauguu

SEQ ID NO: 425198 - RNA, 19 nt, Artificial Sequence
  Description of Artificial Sequence: Synthetic oligonucleotide
  Antisense Strand to SEQ ID NO: 425197
aacauaggaagcuaaaugu

SEQ ID NO: 425199 - RNA, 19 nt, Artificial Sequence
  Description of Artificial Sequence: Synthetic oligonucleotide
  Sense Strand Starting at position 1357 of SEQ ID NO: 317978
ggcucaaaucccugauucu

SEQ ID NO: 425200 - RNA, 19 nt, Artificial Sequence
  Description of Artificial Sequence: Synthetic oligonucleotide
  Antisense Strand to SEQ ID NO: 425199
agaaucagggauuugagcc

SEQ ID NO: 425201 - RNA, 19 nt, Artificial Sequence
  Description of Artificial Sequence: Synthetic oligonucleotide
  Sense Strand Starting at position 1357 of SEQ ID NO: 317987
cccugauucucaguguaug

SEQ ID NO: 425202 - RNA, 19 nt, Artificial Sequence
  Description of Artificial Sequence: Synthetic oligonucleotide
  Antisense Strand to SEQ ID NO: 425201
cauacacugagaaucaggg

SEQ ID NO: 425203 - RNA, 19 nt, Artificial Sequence
  Description of Artificial Sequence: Synthetic oligonucleotide
  Sense Strand Starting at position 1357 of SEQ ID NO: 317990
ugauucucaguguaugaac

SEQ ID NO: 425204 - RNA, 19 nt, Artificial Sequence
  Description of Artificial Sequence: Synthetic oligonucleotide
  Antisense Strand to SEQ ID NO: 425203
guucauacacugagaauca

SEQ ID NO: 425205 - RNA, 19 nt, Artificial Sequence
  Description of Artificial Sequence: Synthetic oligonucleotide
  Sense Strand Starting at position 1357 of SEQ ID NO: 318090
ugagguuaauacgugugaa

SEQ ID NO: 425206 - RNA, 19 nt, Artificial Sequence
  Description of Artificial Sequence: Synthetic oligonucleotide
  Antisense Strand to SEQ ID NO: 425205
uucacacguauuaaccuca

SEQ ID NO: 425207 - RNA, 19 nt, Artificial Sequence
  Description of Artificial Sequence: Synthetic oligonucleotide
  Sense Strand Starting at position 1357 of SEQ ID NO: 318091
gagguuaauacgugugaau

SEQ ID NO: 425208 - RNA, 19 nt, Artificial Sequence
  Description of Artificial Sequence: Synthetic oligonucleotide
  Antisense Strand to SEQ ID NO: 425207
auucacacguauuaaccuc

SEQ ID NO: 425209 - RNA, 19 nt, Artificial Sequence
  Description of Artificial Sequence: Synthetic oligonucleotide
  Sense Strand Starting at position 1357 of SEQ ID NO: 318098
auacgugugaauuacuaag

SEQ ID NO: 425210 - RNA, 19 nt, Artificial Sequence
  Description of Artificial Sequence: Synthetic oligonucleotide
  Antisense Strand to SEQ ID NO: 425209
cuuaguaauucacacguau

SEQ ID NO: 425211 - RNA, 19 nt, Artificial Sequence
  Description of Artificial Sequence: Synthetic oligonucleotide
  Sense Strand Starting at position 1357 of SEQ ID NO: 318100
acgugugaauuacuaagaa

SEQ ID NO: 425212 - RNA, 19 nt, Artificial Sequence
  Description of Artificial Sequence: Synthetic oligonucleotide
  Antisense Strand to SEQ ID NO: 425211
uucuuaguaauucacacgu

SEQ ID NO: 425213 - RNA, 19 nt, Artificial Sequence
  Description of Artificial Sequence: Synthetic oligonucleotide
  Sense Strand Starting at position 1357 of SEQ ID NO: 318285
aggaaauauuugcacacau

SEQ ID NO: 425214 - RNA, 19 nt, Artificial Sequence
  Description of Artificial Sequence: Synthetic oligonucleotide
  Antisense Strand to SEQ ID NO: 425213
augugugcaaauauuuccu

SEQ ID NO: 425215 - RNA, 19 nt, Artificial Sequence
  Description of Artificial Sequence: Synthetic oligonucleotide
  Sense Strand Starting at position 1357 of SEQ ID NO: 318407
cugugugcacaccaucaua

SEQ ID NO: 425216 - RNA, 19 nt, Artificial Sequence
  Description of Artificial Sequence: Synthetic oligonucleotide
  Antisense Strand to SEQ ID NO: 425215
uaugauggugugcacacag

SEQ ID NO: 425217 - RNA, 19 nt, Artificial Sequence
  Description of Artificial Sequence: Synthetic oligonucleotide
  Sense Strand Starting at position 1357 of SEQ ID NO: 318430
uagugugcagcauauagaa

SEQ ID NO: 425218 - RNA, 19 nt, Artificial Sequence
  Description of Artificial Sequence: Synthetic oligonucleotide
  Antisense Strand to SEQ ID NO: 425217
uucuauaugcugcacacua

SEQ ID NO: 425219 - RNA, 19 nt, Artificial Sequence
  Description of Artificial Sequence: Synthetic oligonucleotide
  Sense Strand Starting at position 1357 of SEQ ID NO: 318448
agugaacacuugcuguaua

SEQ ID NO: 425220 - RNA, 19 nt, Artificial Sequence
  Description of Artificial Sequence: Synthetic oligonucleotide
  Antisense Strand to SEQ ID NO: 425219
uauacagcaaguguucacu

SEQ ID NO: 425221 - RNA, 19 nt, Artificial Sequence
  Description of Artificial Sequence: Synthetic oligonucleotide
  Sense Strand Starting at position 1357 of SEQ ID NO: 318930
guugacaugccauguaaca

SEQ ID NO: 425222 - RNA, 19 nt, Artificial Sequence
  Description of Artificial Sequence: Synthetic oligonucleotide
  Antisense Strand to SEQ ID NO: 425221
uguuacauggcaugucaac

SEQ ID NO: 425223 - RNA, 19 nt, Artificial Sequence
  Description of Artificial Sequence: Synthetic oligonucleotide
  Sense Strand Starting at position 1357 of SEQ ID NO: 318983
cucagcacuucuuuggaau

SEQ ID NO: 425224 - RNA, 19 nt, Artificial Sequence
  Description of Artificial Sequence: Synthetic oligonucleotide
  Antisense Strand to SEQ ID NO: 425223
auuccaaagaagugcugag

SEQ ID NO: 425225 - RNA, 19 nt, Artificial Sequence
  Description of Artificial Sequence: Synthetic oligonucleotide
  Sense Strand Starting at position 1357 of SEQ ID NO: 319044
cagagacccuaggucuaau

SEQ ID NO: 425226 - RNA, 19 nt, Artificial Sequence
  Description of Artificial Sequence: Synthetic oligonucleotide
  Antisense Strand to SEQ ID NO: 425225
auuagaccuagggucucug

SEQ ID NO: 425227 - RNA, 19 nt, Artificial Sequence
  Description of Artificial Sequence: Synthetic oligonucleotide
  Sense Strand Starting at position 1357 of SEQ ID NO: 319114
uaguguguggaggacauua

SEQ ID NO: 425228 - RNA, 19 nt, Artificial Sequence
  Description of Artificial Sequence: Synthetic oligonucleotide
  Antisense Strand to SEQ ID NO: 425227
uaauguccuccacacacua

SEQ ID NO: 425229 - RNA, 19 nt, Artificial Sequence
  Description of Artificial Sequence: Synthetic oligonucleotide
  Sense Strand Starting at position 1357 of SEQ ID NO: 319164
aaccguaaucuggaguuua

SEQ ID NO: 425230 - RNA, 19 nt, Artificial Sequence
  Description of Artificial Sequence: Synthetic oligonucleotide
  Antisense Strand to SEQ ID NO: 425229
uaaacuccagauuacgguu

SEQ ID NO: 425231 - RNA, 19 nt, Artificial Sequence
  Description of Artificial Sequence: Synthetic oligonucleotide
  Sense Strand Starting at position 1358 of SEQ ID NO: 315316
uuagguuuaauggguuaaa

SEQ ID NO: 425232 - RNA, 19 nt, Artificial Sequence
  Description of Artificial Sequence: Synthetic oligonucleotide
  Antisense Strand to SEQ ID NO: 425231
uuuaacccauuaaaccuaa

SEQ ID NO: 425233 - RNA, 19 nt, Artificial Sequence
  Description of Artificial Sequence: Synthetic oligonucleotide
  Sense Strand Starting at position 1358 of SEQ ID NO: 315317
uagguuuaauggguuaaau

SEQ ID NO: 425234 - RNA, 19 nt, Artificial Sequence
  Description of Artificial Sequence: Synthetic oligonucleotide
  Antisense Strand to SEQ ID NO: 425233
auuuaacccauuaaaccua

SEQ ID NO: 425235 - RNA, 19 nt, Artificial Sequence
  Description of Artificial Sequence: Synthetic oligonucleotide
  Sense Strand Starting at position 1358 of SEQ ID NO: 315485
gacuccuaggucuauaagu

SEQ ID NO: 425236 - RNA, 19 nt, Artificial Sequence
  Description of Artificial Sequence: Synthetic oligonucleotide
  Antisense Strand to SEQ ID NO: 425235
acuuauagaccuaggaguc

SEQ ID NO: 425237 - RNA, 19 nt, Artificial Sequence
  Description of Artificial Sequence: Synthetic oligonucleotide
  Sense Strand Starting at position 1358 of SEQ ID NO: 315495
ucuauaaguugcccagaaa

SEQ ID NO: 425238 - RNA, 19 nt, Artificial Sequence
  Description of Artificial Sequence: Synthetic oligonucleotide
  Antisense Strand to SEQ ID NO: 425237
uuucugggcaacuuauaga

SEQ ID NO: 425239 - RNA, 19 nt, Artificial Sequence
  Description of Artificial Sequence: Synthetic oligonucleotide
  Sense Strand Starting at position 1358 of SEQ ID NO: 315496
cuauaaguugcccagaaag

SEQ ID NO: 425240 - RNA, 19 nt, Artificial Sequence
  Description of Artificial Sequence: Synthetic oligonucleotide
  Antisense Strand to SEQ ID NO: 425239
cuuucugggcaacuuauag

SEQ ID NO: 425241 - RNA, 19 nt, Artificial Sequence
  Description of Artificial Sequence: Synthetic oligonucleotide
  Sense Strand Starting at position 1358 of SEQ ID NO: 315498
auaaguugcccagaaagua

SEQ ID NO: 425242 - RNA, 19 nt, Artificial Sequence
  Description of Artificial Sequence: Synthetic oligonucleotide
  Antisense Strand to SEQ ID NO: 425241
uacuuucugggcaacuuau

SEQ ID NO: 425243 - RNA, 19 nt, Artificial Sequence
  Description of Artificial Sequence: Synthetic oligonucleotide
  Sense Strand Starting at position 1358 of SEQ ID NO: 315537
augccuauuguggaauaau

SEQ ID NO: 425244 - RNA, 19 nt, Artificial Sequence
  Description of Artificial Sequence: Synthetic oligonucleotide
  Antisense Strand to SEQ ID NO: 425243
auuauuccacaauaggcau

SEQ ID NO: 425245 - RNA, 19 nt, Artificial Sequence
  Description of Artificial Sequence: Synthetic oligonucleotide
  Sense Strand Starting at position 1358 of SEQ ID NO: 315548
ggaauaaucuggcuguuag

SEQ ID NO: 425246 - RNA, 19 nt, Artificial Sequence
  Description of Artificial Sequence: Synthetic oligonucleotide
  Antisense Strand to SEQ ID NO: 425245
cuaacagccagauuauucc

SEQ ID NO: 425247 - RNA, 19 nt, Artificial Sequence
  Description of Artificial Sequence: Synthetic oligonucleotide
  Sense Strand Starting at position 1358 of SEQ ID NO: 315614
gaguauuauggugaaaggu

SEQ ID NO: 425248 - RNA, 19 nt, Artificial Sequence
  Description of Artificial Sequence: Synthetic oligonucleotide
  Antisense Strand to SEQ ID NO: 425247
accuuucaccauaauacuc

SEQ ID NO: 425249 - RNA, 19 nt, Artificial Sequence
  Description of Artificial Sequence: Synthetic oligonucleotide
  Sense Strand Starting at position 1358 of SEQ ID NO: 315928
uuagcaaugugaucuggga

SEQ ID NO: 425250 - RNA, 19 nt, Artificial Sequence
  Description of Artificial Sequence: Synthetic oligonucleotide
  Antisense Strand to SEQ ID NO: 425249
ucccagaucacauugcuaa

SEQ ID NO: 425251 - RNA, 19 nt, Artificial Sequence
  Description of Artificial Sequence: Synthetic oligonucleotide
  Sense Strand Starting at position 1358 of SEQ ID NO: 315930
agcaaugugaucugggaca

SEQ ID NO: 425252 - RNA, 19 nt, Artificial Sequence
  Description of Artificial Sequence: Synthetic oligonucleotide
  Antisense Strand to SEQ ID NO: 425251
ugucccagaucacauugcu

SEQ ID NO: 425253 - RNA, 19 nt, Artificial Sequence
  Description of Artificial Sequence: Synthetic oligonucleotide
  Sense Strand Starting at position 1358 of SEQ ID NO: 315935
ugugaucugggacaaguuu

SEQ ID NO: 425254 - RNA, 19 nt, Artificial Sequence
  Description of Artificial Sequence: Synthetic oligonucleotide
  Antisense Strand to SEQ ID NO: 425253
aaacuugucccagaucaca

SEQ ID NO: 425255 - RNA, 19 nt, Artificial Sequence
  Description of Artificial Sequence: Synthetic oligonucleotide
  Sense Strand Starting at position 1358 of SEQ ID NO: 316323
acgcaauacgcuguuguga

SEQ ID NO: 425256 - RNA, 19 nt, Artificial Sequence
  Description of Artificial Sequence: Synthetic oligonucleotide
  Antisense Strand to SEQ ID NO: 425255
ucacaacagcguauugcgu

SEQ ID NO: 425257 - RNA, 19 nt, Artificial Sequence
  Description of Artificial Sequence: Synthetic oligonucleotide
  Sense Strand Starting at position 1358 of SEQ ID NO: 316324
cgcaauacgcuguugugaa

SEQ ID NO: 425258 - RNA, 19 nt, Artificial Sequence
  Description of Artificial Sequence: Synthetic oligonucleotide
  Antisense Strand to SEQ ID NO: 425257
uucacaacagcguauugcg

SEQ ID NO: 425259 - RNA, 19 nt, Artificial Sequence
  Description of Artificial Sequence: Synthetic oligonucleotide
  Sense Strand Starting at position 1358 of SEQ ID NO: 316462
cuggaagcaucuuuacaug

SEQ ID NO: 425260 - RNA, 19 nt, Artificial Sequence
  Description of Artificial Sequence: Synthetic oligonucleotide
  Antisense Strand to SEQ ID NO: 425259
cauguaaagaugcuuccag

SEQ ID NO: 425261 - RNA, 19 nt, Artificial Sequence
  Description of Artificial Sequence: Synthetic oligonucleotide
  Sense Strand Starting at position 1358 of SEQ ID NO: 316530
uaauguuuggcauauaaug

SEQ ID NO: 425262 - RNA, 19 nt, Artificial Sequence
  Description of Artificial Sequence: Synthetic oligonucleotide
  Antisense Strand to SEQ ID NO: 425261
cauuauaugccaaacauua

SEQ ID NO: 425263 - RNA, 19 nt, Artificial Sequence
  Description of Artificial Sequence: Synthetic oligonucleotide
  Sense Strand Starting at position 1358 of SEQ ID NO: 316532
auguuuggcauauaaugga

SEQ ID NO: 425264 - RNA, 19 nt, Artificial Sequence
  Description of Artificial Sequence: Synthetic oligonucleotide
  Antisense Strand to SEQ ID NO: 425263
uccauuauaugccaaacau

SEQ ID NO: 425265 - RNA, 19 nt, Artificial Sequence
  Description of Artificial Sequence: Synthetic oligonucleotide
  Sense Strand Starting at position 1358 of SEQ ID NO: 316536
uuggcauauaauggauagu

SEQ ID NO: 425266 - RNA, 19 nt, Artificial Sequence
  Description of Artificial Sequence: Synthetic oligonucleotide
  Antisense Strand to SEQ ID NO: 425265
acuauccauuauaugccaa

SEQ ID NO: 425267 - RNA, 19 nt, Artificial Sequence
  Description of Artificial Sequence: Synthetic oligonucleotide
  Sense Strand Starting at position 1358 of SEQ ID NO: 316615
gagcuuugugaagaagcaa

SEQ ID NO: 425268 - RNA, 19 nt, Artificial Sequence
  Description of Artificial Sequence: Synthetic oligonucleotide
  Antisense Strand to SEQ ID NO: 425267
uugcuucuucacaaagcuc

SEQ ID NO: 425269 - RNA, 19 nt, Artificial Sequence
  Description of Artificial Sequence: Synthetic oligonucleotide
  Sense Strand Starting at position 1358 of SEQ ID NO: 316648
gacaguacuuuagagauuu

SEQ ID NO: 425270 - RNA, 19 nt, Artificial Sequence
  Description of Artificial Sequence: Synthetic oligonucleotide
  Antisense Strand to SEQ ID NO: 425269
aaaucucuaaaguacuguc

SEQ ID NO: 425271 - RNA, 19 nt, Artificial Sequence
  Description of Artificial Sequence: Synthetic oligonucleotide
  Sense Strand Starting at position 1358 of SEQ ID NO: 316676
ccagaauuguaacucaggu

SEQ ID NO: 425272 - RNA, 19 nt, Artificial Sequence
  Description of Artificial Sequence: Synthetic oligonucleotide
  Antisense Strand to SEQ ID NO: 425271
accugaguuacaauucugg

SEQ ID NO: 425273 - RNA, 19 nt, Artificial Sequence
  Description of Artificial Sequence: Synthetic oligonucleotide
  Sense Strand Starting at position 1358 of SEQ ID NO: 317268
cgcgcauccauucucugau

SEQ ID NO: 425274 - RNA, 19 nt, Artificial Sequence
  Description of Artificial Sequence: Synthetic oligonucleotide
  Antisense Strand to SEQ ID NO: 425273
aucagagaauggaugcgcg

SEQ ID NO: 425275 - RNA, 19 nt, Artificial Sequence
  Description of Artificial Sequence: Synthetic oligonucleotide
  Sense Strand Starting at position 1358 of SEQ ID NO: 317278
uucucugauucucuaggaa

SEQ ID NO: 425276 - RNA, 19 nt, Artificial Sequence
  Description of Artificial Sequence: Synthetic oligonucleotide
  Antisense Strand to SEQ ID NO: 425275
uuccuagagaaucagagaa

SEQ ID NO: 425277 - RNA, 19 nt, Artificial Sequence
  Description of Artificial Sequence: Synthetic oligonucleotide
  Sense Strand Starting at position 1358 of SEQ ID NO: 317416
cccagucgcguuccugaua

SEQ ID NO: 425278 - RNA, 19 nt, Artificial Sequence
  Description of Artificial Sequence: Synthetic oligonucleotide
  Antisense Strand to SEQ ID NO: 425277
uaucaggaacgcgacuggg

SEQ ID NO: 425279 - RNA, 19 nt, Artificial Sequence
  Description of Artificial Sequence: Synthetic oligonucleotide
  Sense Strand Starting at position 1358 of SEQ ID NO: 317443
acaacuaucuuggccugaa

SEQ ID NO: 425280 - RNA, 19 nt, Artificial Sequence
  Description of Artificial Sequence: Synthetic oligonucleotide
  Antisense Strand to SEQ ID NO: 425279
uucaggccaagauaguugu

SEQ ID NO: 425281 - RNA, 19 nt, Artificial Sequence
  Description of Artificial Sequence: Synthetic oligonucleotide
  Sense Strand Starting at position 1358 of SEQ ID NO: 317446
acuaucuuggccugaaaca

SEQ ID NO: 425282 - RNA, 19 nt, Artificial Sequence
  Description of Artificial Sequence: Synthetic oligonucleotide
  Antisense Strand to SEQ ID NO: 425281
uguuucaggccaagauagu

SEQ ID NO: 425283 - RNA, 19 nt, Artificial Sequence
  Description of Artificial Sequence: Synthetic oligonucleotide
  Sense Strand Starting at position 1358 of SEQ ID NO: 317593
uauuaagaaccuugaguga

SEQ ID NO: 425284 - RNA, 19 nt, Artificial Sequence
  Description of Artificial Sequence: Synthetic oligonucleotide
  Antisense Strand to SEQ ID NO: 425283
ucacucaagguucuuaaua

SEQ ID NO: 425285 - RNA, 19 nt, Artificial Sequence
  Description of Artificial Sequence: Synthetic oligonucleotide
  Sense Strand Starting at position 1358 of SEQ ID NO: 317992
uguauuucuuucguaggua

SEQ ID NO: 425286 - RNA, 19 nt, Artificial Sequence
  Description of Artificial Sequence: Synthetic oligonucleotide
  Antisense Strand to SEQ ID NO: 425285
uaccuacgaaagaaauaca

SEQ ID NO: 425287 - RNA, 19 nt, Artificial Sequence
  Description of Artificial Sequence: Synthetic oligonucleotide
  Sense Strand Starting at position 1358 of SEQ ID NO: 318136
uagcacaaugauugguaga

SEQ ID NO: 425288 - RNA, 19 nt, Artificial Sequence
  Description of Artificial Sequence: Synthetic oligonucleotide
  Antisense Strand to SEQ ID NO: 425287
ucuaccaaucauugugcua

SEQ ID NO: 425289 - RNA, 19 nt, Artificial Sequence
  Description of Artificial Sequence: Synthetic oligonucleotide
  Sense Strand Starting at position 1358 of SEQ ID NO: 318138
gcacaaugauugguagaga

SEQ ID NO: 425290 - RNA, 19 nt, Artificial Sequence
  Description of Artificial Sequence: Synthetic oligonucleotide
  Antisense Strand to SEQ ID NO: 425289
ucucuaccaaucauugugc

SEQ ID NO: 425291 - RNA, 19 nt, Artificial Sequence
  Description of Artificial Sequence: Synthetic oligonucleotide
  Sense Strand Starting at position 1358 of SEQ ID NO: 318175
uguugaauucguuaaucag

SEQ ID NO: 425292 - RNA, 19 nt, Artificial Sequence
  Description of Artificial Sequence: Synthetic oligonucleotide
  Antisense Strand to SEQ ID NO: 425291
cugauuaacgaauucaaca

SEQ ID NO: 425293 - RNA, 19 nt, Artificial Sequence
  Description of Artificial Sequence: Synthetic oligonucleotide
  Sense Strand Starting at position 1358 of SEQ ID NO: 318178
ugaauucguuaaucagaaa

SEQ ID NO: 425294 - RNA, 19 nt, Artificial Sequence
  Description of Artificial Sequence: Synthetic oligonucleotide
  Antisense Strand to SEQ ID NO: 425293
uuucugauuaacgaauuca

SEQ ID NO: 425295 - RNA, 19 nt, Artificial Sequence
  Description of Artificial Sequence: Synthetic oligonucleotide
  Sense Strand Starting at position 1358 of SEQ ID NO: 318279
gcacaucugaaaggaugua

SEQ ID NO: 425296 - RNA, 19 nt, Artificial Sequence
  Description of Artificial Sequence: Synthetic oligonucleotide
  Antisense Strand to SEQ ID NO: 425295
uacauccuuucagaugugc

SEQ ID NO: 425297 - RNA, 19 nt, Artificial Sequence
  Description of Artificial Sequence: Synthetic oligonucleotide
  Sense Strand Starting at position 1358 of SEQ ID NO: 318361
gaauguaagcuguaugaag

SEQ ID NO: 425298 - RNA, 19 nt, Artificial Sequence
  Description of Artificial Sequence: Synthetic oligonucleotide
  Antisense Strand to SEQ ID NO: 425297
cuucauacagcuuacauuc

SEQ ID NO: 425299 - RNA, 19 nt, Artificial Sequence
  Description of Artificial Sequence: Synthetic oligonucleotide
  Sense Strand Starting at position 1358 of SEQ ID NO: 318467
augacuaggucaccaucaa

SEQ ID NO: 425300 - RNA, 19 nt, Artificial Sequence
  Description of Artificial Sequence: Synthetic oligonucleotide
  Antisense Strand to SEQ ID NO: 425299
uugauggugaccuagucau

SEQ ID NO: 425301 - RNA, 19 nt, Artificial Sequence
  Description of Artificial Sequence: Synthetic oligonucleotide
  Sense Strand Starting at position 1358 of SEQ ID NO: 318502
ggaaauaguuacuccacau

SEQ ID NO: 425302 - RNA, 19 nt, Artificial Sequence
  Description of Artificial Sequence: Synthetic oligonucleotide
  Antisense Strand to SEQ ID NO: 425301
auguggaguaacuauuucc

SEQ ID NO: 425303 - RNA, 19 nt, Artificial Sequence
  Description of Artificial Sequence: Synthetic oligonucleotide
  Sense Strand Starting at position 1358 of SEQ ID NO: 319041
aaucucuucggucaugaag

SEQ ID NO: 425304 - RNA, 19 nt, Artificial Sequence
  Description of Artificial Sequence: Synthetic oligonucleotide
  Antisense Strand to SEQ ID NO: 425303
cuucaugaccgaagagauu

SEQ ID NO: 425305 - RNA, 19 nt, Artificial Sequence
  Description of Artificial Sequence: Synthetic oligonucleotide
  Sense Strand Starting at position 1358 of SEQ ID NO: 319085
caugaacuccgacaaaugu

SEQ ID NO: 425306 - RNA, 19 nt, Artificial Sequence
  Description of Artificial Sequence: Synthetic oligonucleotide
  Antisense Strand to SEQ ID NO: 425305
acauuugucggaguucaug

SEQ ID NO: 425307 - RNA, 19 nt, Artificial Sequence
  Description of Artificial Sequence: Synthetic oligonucleotide
  Sense Strand Starting at position 1358 of SEQ ID NO: 319172
agaagauguugccuuacaa

SEQ ID NO: 425308 - RNA, 19 nt, Artificial Sequence
  Description of Artificial Sequence: Synthetic oligonucleotide
  Antisense Strand to SEQ ID NO: 425307
uuguaaggcaacaucuucu

SEQ ID NO: 425309 - RNA, 19 nt, Artificial Sequence
  Description of Artificial Sequence: Synthetic oligonucleotide
  Sense Strand Starting at position 1358 of SEQ ID NO: 319182
gccuuacaacugggauuaa

SEQ ID NO: 425310 - RNA, 19 nt, Artificial Sequence
  Description of Artificial Sequence: Synthetic oligonucleotide
  Antisense Strand to SEQ ID NO: 425309
uuaaucccaguuguaaggc

SEQ ID NO: 425311 - RNA, 19 nt, Artificial Sequence
  Description of Artificial Sequence: Synthetic oligonucleotide
  Sense Strand Starting at position 1359 of SEQ ID NO: 315604
cggcaaugcucauucguuu

SEQ ID NO: 425312 - RNA, 19 nt, Artificial Sequence
  Description of Artificial Sequence: Synthetic oligonucleotide
  Antisense Strand to SEQ ID NO: 425311
aaacgaaugagcauugccg

SEQ ID NO: 425313 - RNA, 19 nt, Artificial Sequence
  Description of Artificial Sequence: Synthetic oligonucleotide
  Sense Strand Starting at position 1359 of SEQ ID NO: 315610
ugcucauucguuuaccuau

SEQ ID NO: 425314 - RNA, 19 nt, Artificial Sequence
  Description of Artificial Sequence: Synthetic oligonucleotide
  Antisense Strand to SEQ ID NO: 425313
auagguaaacgaaugagca

SEQ ID NO: 425315 - RNA, 19 nt, Artificial Sequence
  Description of Artificial Sequence: Synthetic oligonucleotide
  Sense Strand Starting at position 1359 of SEQ ID NO: 315657
gaccacuagucguaacaaa

SEQ ID NO: 425316 - RNA, 19 nt, Artificial Sequence
  Description of Artificial Sequence: Synthetic oligonucleotide
  Antisense Strand to SEQ ID NO: 425315
uuuguuacgacuagugguc

SEQ ID NO: 425317 - RNA, 19 nt, Artificial Sequence
  Description of Artificial Sequence: Synthetic oligonucleotide
  Sense Strand Starting at position 1359 of SEQ ID NO: 315891
guucuagacuguuccuguu

SEQ ID NO: 425318 - RNA, 19 nt, Artificial Sequence
  Description of Artificial Sequence: Synthetic oligonucleotide
  Antisense Strand to SEQ ID NO: 425317
aacaggaacagucuagaac

SEQ ID NO: 425319 - RNA, 19 nt, Artificial Sequence
  Description of Artificial Sequence: Synthetic oligonucleotide
  Sense Strand Starting at position 1359 of SEQ ID NO: 315894
cuagacuguuccuguuguu

SEQ ID NO: 425320 - RNA, 19 nt, Artificial Sequence
  Description of Artificial Sequence: Synthetic oligonucleotide
  Antisense Strand to SEQ ID NO: 425319
aacaacaggaacagucuag

SEQ ID NO: 425321 - RNA, 19 nt, Artificial Sequence
  Description of Artificial Sequence: Synthetic oligonucleotide
  Sense Strand Starting at position 1359 of SEQ ID NO: 315897
gacuguuccuguuguuaca

SEQ ID NO: 425322 - RNA, 19 nt, Artificial Sequence
  Description of Artificial Sequence: Synthetic oligonucleotide
  Antisense Strand to SEQ ID NO: 425321
uguaacaacaggaacaguc

SEQ ID NO: 425323 - RNA, 19 nt, Artificial Sequence
  Description of Artificial Sequence: Synthetic oligonucleotide
  Sense Strand Starting at position 1359 of SEQ ID NO: 316916
ggugaagagucguggagug

SEQ ID NO: 425324 - RNA, 19 nt, Artificial Sequence
  Description of Artificial Sequence: Synthetic oligonucleotide
  Antisense Strand to SEQ ID NO: 425323
cacuccacgacucuucacc

SEQ ID NO: 425325 - RNA, 19 nt, Artificial Sequence
  Description of Artificial Sequence: Synthetic oligonucleotide
  Sense Strand Starting at position 1359 of SEQ ID NO: 316917
gugaagagucguggaguga

SEQ ID NO: 425326 - RNA, 19 nt, Artificial Sequence
  Description of Artificial Sequence: Synthetic oligonucleotide
  Antisense Strand to SEQ ID NO: 425325
ucacuccacgacucuucac

SEQ ID NO: 425327 - RNA, 19 nt, Artificial Sequence
  Description of Artificial Sequence: Synthetic oligonucleotide
  Sense Strand Starting at position 1359 of SEQ ID NO: 317038
cgcgcaucccugguggaua

SEQ ID NO: 425328 - RNA, 19 nt, Artificial Sequence
  Description of Artificial Sequence: Synthetic oligonucleotide
  Antisense Strand to SEQ ID NO: 425327
uauccaccagggaugcgcg

SEQ ID NO: 425329 - RNA, 19 nt, Artificial Sequence
  Description of Artificial Sequence: Synthetic oligonucleotide
  Sense Strand Starting at position 1359 of SEQ ID NO: 317335
gcgaaaugcggcuugugca

SEQ ID NO: 425330 - RNA, 19 nt, Artificial Sequence
  Description of Artificial Sequence: Synthetic oligonucleotide
  Antisense Strand to SEQ ID NO: 425329
ugcacaagccgcauuucgc

SEQ ID NO: 425331 - RNA, 19 nt, Artificial Sequence
  Description of Artificial Sequence: Synthetic oligonucleotide
  Sense Strand Starting at position 1359 of SEQ ID NO: 317461
uuuccaugguuguaaacau

SEQ ID NO: 425332 - RNA, 19 nt, Artificial Sequence
  Description of Artificial Sequence: Synthetic oligonucleotide
  Antisense Strand to SEQ ID NO: 425331
auguuuacaaccauggaaa

SEQ ID NO: 425333 - RNA, 19 nt, Artificial Sequence
  Description of Artificial Sequence: Synthetic oligonucleotide
  Sense Strand Starting at position 1359 of SEQ ID NO: 317518
ugcgcaguucuauaaugac

SEQ ID NO: 425334 - RNA, 19 nt, Artificial Sequence
  Description of Artificial Sequence: Synthetic oligonucleotide
  Antisense Strand to SEQ ID NO: 425333
gucauuauagaacugcgca

SEQ ID NO: 425335 - RNA, 19 nt, Artificial Sequence
  Description of Artificial Sequence: Synthetic oligonucleotide
  Sense Strand Starting at position 1359 of SEQ ID NO: 317559
uguucacugcuguguggua

SEQ ID NO: 425336 - RNA, 19 nt, Artificial Sequence
  Description of Artificial Sequence: Synthetic oligonucleotide
  Antisense Strand to SEQ ID NO: 425335
uaccacacagcagugaaca

SEQ ID NO: 425337 - RNA, 19 nt, Artificial Sequence
  Description of Artificial Sequence: Synthetic oligonucleotide
  Sense Strand Starting at position 1359 of SEQ ID NO: 317564
acugcugugugguaucuaa

SEQ ID NO: 425338 - RNA, 19 nt, Artificial Sequence
  Description of Artificial Sequence: Synthetic oligonucleotide
  Antisense Strand to SEQ ID NO: 425337
uuagauaccacacagcagu

SEQ ID NO: 425339 - RNA, 19 nt, Artificial Sequence
  Description of Artificial Sequence: Synthetic oligonucleotide
  Sense Strand Starting at position 1359 of SEQ ID NO: 317568
cugugugguaucuaaugua

SEQ ID NO: 425340 - RNA, 19 nt, Artificial Sequence
  Description of Artificial Sequence: Synthetic oligonucleotide
  Antisense Strand to SEQ ID NO: 425339
uacauuagauaccacacag

SEQ ID NO: 425341 - RNA, 19 nt, Artificial Sequence
  Description of Artificial Sequence: Synthetic oligonucleotide
  Sense Strand Starting at position 1359 of SEQ ID NO: 317571
ugugguaucuaauguagaa

SEQ ID NO: 425342 - RNA, 19 nt, Artificial Sequence
  Description of Artificial Sequence: Synthetic oligonucleotide
  Antisense Strand to SEQ ID NO: 425341
uucuacauuagauaccaca

SEQ ID NO: 425343 - RNA, 19 nt, Artificial Sequence
  Description of Artificial Sequence: Synthetic oligonucleotide
  Sense Strand Starting at position 1359 of SEQ ID NO: 317633
agagcuucucaaggacagu

SEQ ID NO: 425344 - RNA, 19 nt, Artificial Sequence
  Description of Artificial Sequence: Synthetic oligonucleotide
  Antisense Strand to SEQ ID NO: 425343
acuguccuugagaagcucu

SEQ ID NO: 425345 - RNA, 19 nt, Artificial Sequence
  Description of Artificial Sequence: Synthetic oligonucleotide
  Sense Strand Starting at position 1359 of SEQ ID NO: 317646
gacagugguucgcaaacuu

SEQ ID NO: 425346 - RNA, 19 nt, Artificial Sequence
  Description of Artificial Sequence: Synthetic oligonucleotide
  Antisense Strand to SEQ ID NO: 425345
aaguuugcgaaccacuguc

SEQ ID NO: 425347 - RNA, 19 nt, Artificial Sequence
  Description of Artificial Sequence: Synthetic oligonucleotide
  Sense Strand Starting at position 1359 of SEQ ID NO: 317656
cgcaaacuuguuguuguua

SEQ ID NO: 425348 - RNA, 19 nt, Artificial Sequence
  Description of Artificial Sequence: Synthetic oligonucleotide
  Antisense Strand to SEQ ID NO: 425347
uaacaacaacaaguuugcg

SEQ ID NO: 425349 - RNA, 19 nt, Artificial Sequence
  Description of Artificial Sequence: Synthetic oligonucleotide
  Sense Strand Starting at position 1359 of SEQ ID NO: 317657
gcaaacuuguuguuguuaa

SEQ ID NO: 425350 - RNA, 19 nt, Artificial Sequence
  Description of Artificial Sequence: Synthetic oligonucleotide
  Antisense Strand to SEQ ID NO: 425349
uuaacaacaacaaguuugc

SEQ ID NO: 425351 - RNA, 19 nt, Artificial Sequence
  Description of Artificial Sequence: Synthetic oligonucleotide
  Sense Strand Starting at position 1359 of SEQ ID NO: 317848
ccagaaagguuucuugucu

SEQ ID NO: 425352 - RNA, 19 nt, Artificial Sequence
  Description of Artificial Sequence: Synthetic oligonucleotide
  Antisense Strand to SEQ ID NO: 425351
agacaagaaaccuuucugg

SEQ ID NO: 425353 - RNA, 19 nt, Artificial Sequence
  Description of Artificial Sequence: Synthetic oligonucleotide
  Sense Strand Starting at position 1359 of SEQ ID NO: 317849
cagaaagguuucuugucua

SEQ ID NO: 425354 - RNA, 19 nt, Artificial Sequence
  Description of Artificial Sequence: Synthetic oligonucleotide
  Antisense Strand to SEQ ID NO: 425353
uagacaagaaaccuuucug

SEQ ID NO: 425355 - RNA, 19 nt, Artificial Sequence
  Description of Artificial Sequence: Synthetic oligonucleotide
  Sense Strand Starting at position 1359 of SEQ ID NO: 317852
aaagguuucuugucuagca

SEQ ID NO: 425356 - RNA, 19 nt, Artificial Sequence
  Description of Artificial Sequence: Synthetic oligonucleotide
  Antisense Strand to SEQ ID NO: 425355
ugcuagacaagaaaccuuu

SEQ ID NO: 425357 - RNA, 19 nt, Artificial Sequence
  Description of Artificial Sequence: Synthetic oligonucleotide
  Sense Strand Starting at position 1359 of SEQ ID NO: 317895
gauggcaagcuuugauaug

SEQ ID NO: 425358 - RNA, 19 nt, Artificial Sequence
  Description of Artificial Sequence: Synthetic oligonucleotide
  Antisense Strand to SEQ ID NO: 425357
cauaucaaagcuugccauc

SEQ ID NO: 425359 - RNA, 19 nt, Artificial Sequence
  Description of Artificial Sequence: Synthetic oligonucleotide
  Sense Strand Starting at position 1359 of SEQ ID NO: 317970
uuucuuugcccugacaugu

SEQ ID NO: 425360 - RNA, 19 nt, Artificial Sequence
  Description of Artificial Sequence: Synthetic oligonucleotide
  Antisense Strand to SEQ ID NO: 425359
acaugucagggcaaagaaa

SEQ ID NO: 425361 - RNA, 19 nt, Artificial Sequence
  Description of Artificial Sequence: Synthetic oligonucleotide
  Sense Strand Starting at position 1359 of SEQ ID NO: 318011
cacauauucccacgugugu

SEQ ID NO: 425362 - RNA, 19 nt, Artificial Sequence
  Description of Artificial Sequence: Synthetic oligonucleotide
  Antisense Strand to SEQ ID NO: 425361
acacacgugggaauaugug

SEQ ID NO: 425363 - RNA, 19 nt, Artificial Sequence
  Description of Artificial Sequence: Synthetic oligonucleotide
  Sense Strand Starting at position 1359 of SEQ ID NO: 318200
gcgcuuucucuuuguugga

SEQ ID NO: 425364 - RNA, 19 nt, Artificial Sequence
  Description of Artificial Sequence: Synthetic oligonucleotide
  Antisense Strand to SEQ ID NO: 425363
uccaacaaagagaaagcgc

SEQ ID NO: 425365 - RNA, 19 nt, Artificial Sequence
  Description of Artificial Sequence: Synthetic oligonucleotide
  Sense Strand Starting at position 1359 of SEQ ID NO: 318201
cgcuuucucuuuguuggaa

SEQ ID NO: 425366 - RNA, 19 nt, Artificial Sequence
  Description of Artificial Sequence: Synthetic oligonucleotide
  Antisense Strand to SEQ ID NO: 425365
uuccaacaaagagaaagcg

SEQ ID NO: 425367 - RNA, 19 nt, Artificial Sequence
  Description of Artificial Sequence: Synthetic oligonucleotide
  Sense Strand Starting at position 1359 of SEQ ID NO: 318202
gcuuucucuuuguuggaau

SEQ ID NO: 425368 - RNA, 19 nt, Artificial Sequence
  Description of Artificial Sequence: Synthetic oligonucleotide
  Antisense Strand to SEQ ID NO: 425367
auuccaacaaagagaaagc

SEQ ID NO: 425369 - RNA, 19 nt, Artificial Sequence
  Description of Artificial Sequence: Synthetic oligonucleotide
  Sense Strand Starting at position 1359 of SEQ ID NO: 318311
ccacgugugucuguguuau

SEQ ID NO: 425370 - RNA, 19 nt, Artificial Sequence
  Description of Artificial Sequence: Synthetic oligonucleotide
  Antisense Strand to SEQ ID NO: 425369
auaacacagacacacgugg

SEQ ID NO: 425371 - RNA, 19 nt, Artificial Sequence
  Description of Artificial Sequence: Synthetic oligonucleotide
  Sense Strand Starting at position 1359 of SEQ ID NO: 318313
acgugugucuguguuauua

SEQ ID NO: 425372 - RNA, 19 nt, Artificial Sequence
  Description of Artificial Sequence: Synthetic oligonucleotide
  Antisense Strand to SEQ ID NO: 425371
uaauaacacagacacacgu

SEQ ID NO: 425373 - RNA, 19 nt, Artificial Sequence
  Description of Artificial Sequence: Synthetic oligonucleotide
  Sense Strand Starting at position 1359 of SEQ ID NO: 318315
gugugucuguguuauuaag

SEQ ID NO: 425374 - RNA, 19 nt, Artificial Sequence
  Description of Artificial Sequence: Synthetic oligonucleotide
  Antisense Strand to SEQ ID NO: 425373
cuuaauaacacagacacac

SEQ ID NO: 425375 - RNA, 19 nt, Artificial Sequence
  Description of Artificial Sequence: Synthetic oligonucleotide
  Sense Strand Starting at position 1359 of SEQ ID NO: 318324
uguuauuaagccuaucaga

SEQ ID NO: 425376 - RNA, 19 nt, Artificial Sequence
  Description of Artificial Sequence: Synthetic oligonucleotide
  Antisense Strand to SEQ ID NO: 425375
ucugauaggcuuaauaaca

SEQ ID NO: 425377 - RNA, 19 nt, Artificial Sequence
  Description of Artificial Sequence: Synthetic oligonucleotide
  Sense Strand Starting at position 1359 of SEQ ID NO: 318371
aucagagccuuaucaauga

SEQ ID NO: 425378 - RNA, 19 nt, Artificial Sequence
  Description of Artificial Sequence: Synthetic oligonucleotide
  Antisense Strand to SEQ ID NO: 425377
ucauugauaaggcucugau

SEQ ID NO: 425379 - RNA, 19 nt, Artificial Sequence
  Description of Artificial Sequence: Synthetic oligonucleotide
  Sense Strand Starting at position 1359 of SEQ ID NO: 318524
gggcuaaacuguucuugua

SEQ ID NO: 425380 - RNA, 19 nt, Artificial Sequence
  Description of Artificial Sequence: Synthetic oligonucleotide
  Antisense Strand to SEQ ID NO: 425379
uacaagaacaguuuagccc

SEQ ID NO: 425381 - RNA, 19 nt, Artificial Sequence
  Description of Artificial Sequence: Synthetic oligonucleotide
  Sense Strand Starting at position 1359 of SEQ ID NO: 318564
ccaccaaauuaggaugaga

SEQ ID NO: 425382 - RNA, 19 nt, Artificial Sequence
  Description of Artificial Sequence: Synthetic oligonucleotide
  Antisense Strand to SEQ ID NO: 425381
ucucauccuaauuuggugg

SEQ ID NO: 425383 - RNA, 19 nt, Artificial Sequence
  Description of Artificial Sequence: Synthetic oligonucleotide
  Sense Strand Starting at position 1360 of SEQ ID NO: 315346
cguuuaauccacugucauu

SEQ ID NO: 425384 - RNA, 19 nt, Artificial Sequence
  Description of Artificial Sequence: Synthetic oligonucleotide
  Antisense Strand to SEQ ID NO: 425383
aaugacaguggauuaaacg

SEQ ID NO: 425385 - RNA, 19 nt, Artificial Sequence
  Description of Artificial Sequence: Synthetic oligonucleotide
  Sense Strand Starting at position 1360 of SEQ ID NO: 315380
ggaaucuaauccuaaguga

SEQ ID NO: 425386 - RNA, 19 nt, Artificial Sequence
  Description of Artificial Sequence: Synthetic oligonucleotide
  Antisense Strand to SEQ ID NO: 425385
ucacuuaggauuagauucc

SEQ ID NO: 425387 - RNA, 19 nt, Artificial Sequence
  Description of Artificial Sequence: Synthetic oligonucleotide
  Sense Strand Starting at position 1360 of SEQ ID NO: 315479
gcugaaguucucgaacaga

SEQ ID NO: 425388 - RNA, 19 nt, Artificial Sequence
  Description of Artificial Sequence: Synthetic oligonucleotide
  Antisense Strand to SEQ ID NO: 425387
ucuguucgagaacuucagc

SEQ ID NO: 425389 - RNA, 19 nt, Artificial Sequence
  Description of Artificial Sequence: Synthetic oligonucleotide
  Sense Strand Starting at position 1360 of SEQ ID NO: 315482
gaaguucucgaacagaagu

SEQ ID NO: 425390 - RNA, 19 nt, Artificial Sequence
  Description of Artificial Sequence: Synthetic oligonucleotide
  Antisense Strand to SEQ ID NO: 425389
acuucuguucgagaacuuc

SEQ ID NO: 425391 - RNA, 19 nt, Artificial Sequence
  Description of Artificial Sequence: Synthetic oligonucleotide
  Sense Strand Starting at position 1360 of SEQ ID NO: 315495
agaaguggaugguccaaua

SEQ ID NO: 425392 - RNA, 19 nt, Artificial Sequence
  Description of Artificial Sequence: Synthetic oligonucleotide
  Antisense Strand to SEQ ID NO: 425391
uauuggaccauccacuucu

SEQ ID NO: 425393 - RNA, 19 nt, Artificial Sequence
  Description of Artificial Sequence: Synthetic oligonucleotide
  Sense Strand Starting at position 1360 of SEQ ID NO: 315553
gauggagcuuucucauuac

SEQ ID NO: 425394 - RNA, 19 nt, Artificial Sequence
  Description of Artificial Sequence: Synthetic oligonucleotide
  Antisense Strand to SEQ ID NO: 425393
guaaugagaaagcuccauc

SEQ ID NO: 425395 - RNA, 19 nt, Artificial Sequence
  Description of Artificial Sequence: Synthetic oligonucleotide
  Sense Strand Starting at position 1360 of SEQ ID NO: 315556
ggagcuuucucauuacaag

SEQ ID NO: 425396 - RNA, 19 nt, Artificial Sequence
  Description of Artificial Sequence: Synthetic oligonucleotide
  Antisense Strand to SEQ ID NO: 425395
cuuguaaugagaaagcucc

SEQ ID NO: 425397 - RNA, 19 nt, Artificial Sequence
  Description of Artificial Sequence: Synthetic oligonucleotide
  Sense Strand Starting at position 1360 of SEQ ID NO: 315609
uuccaugaucuaggacacu

SEQ ID NO: 425398 - RNA, 19 nt, Artificial Sequence
  Description of Artificial Sequence: Synthetic oligonucleotide
  Antisense Strand to SEQ ID NO: 425397
aguguccuagaucauggaa

SEQ ID NO: 425399 - RNA, 19 nt, Artificial Sequence
  Description of Artificial Sequence: Synthetic oligonucleotide
  Sense Strand Starting at position 1360 of SEQ ID NO: 315718
gauauagacucucacagag

SEQ ID NO: 425400 - RNA, 19 nt, Artificial Sequence
  Description of Artificial Sequence: Synthetic oligonucleotide
  Antisense Strand to SEQ ID NO: 425399
cucugugagagucuauauc

SEQ ID NO: 425401 - RNA, 19 nt, Artificial Sequence
  Description of Artificial Sequence: Synthetic oligonucleotide
  Sense Strand Starting at position 1360 of SEQ ID NO: 315870
cugaguggucugcagggua

SEQ ID NO: 425402 - RNA, 19 nt, Artificial Sequence
  Description of Artificial Sequence: Synthetic oligonucleotide
  Antisense Strand to SEQ ID NO: 425401
uacccugcagaccacucag

SEQ ID NO: 425403 - RNA, 19 nt, Artificial Sequence
  Description of Artificial Sequence: Synthetic oligonucleotide
  Sense Strand Starting at position 1360 of SEQ ID NO: 315886
guaaacuccucccuuggaa

SEQ ID NO: 425404 - RNA, 19 nt, Artificial Sequence
  Description of Artificial Sequence: Synthetic oligonucleotide
  Antisense Strand to SEQ ID NO: 425403
uuccaagggaggaguuuac

SEQ ID NO: 425405 - RNA, 19 nt, Artificial Sequence
  Description of Artificial Sequence: Synthetic oligonucleotide
  Sense Strand Starting at position 1360 of SEQ ID NO: 316059
acaagagcccucuguaaug

SEQ ID NO: 425406 - RNA, 19 nt, Artificial Sequence
  Description of Artificial Sequence: Synthetic oligonucleotide
  Antisense Strand to SEQ ID NO: 425405
cauuacagagggcucuugu

SEQ ID NO: 425407 - RNA, 19 nt, Artificial Sequence
  Description of Artificial Sequence: Synthetic oligonucleotide
  Sense Strand Starting at position 1360 of SEQ ID NO: 316109
aguucucaugaaugcagau

SEQ ID NO: 425408 - RNA, 19 nt, Artificial Sequence
  Description of Artificial Sequence: Synthetic oligonucleotide
  Antisense Strand to SEQ ID NO: 425407
aucugcauucaugagaacu

SEQ ID NO: 425409 - RNA, 19 nt, Artificial Sequence
  Description of Artificial Sequence: Synthetic oligonucleotide
  Sense Strand Starting at position 1360 of SEQ ID NO: 316230
uacuuuauugaaggaugua

SEQ ID NO: 425410 - RNA, 19 nt, Artificial Sequence
  Description of Artificial Sequence: Synthetic oligonucleotide
  Antisense Strand to SEQ ID NO: 425409
uacauccuucaauaaagua

SEQ ID NO: 425411 - RNA, 19 nt, Artificial Sequence
  Description of Artificial Sequence: Synthetic oligonucleotide
  Sense Strand Starting at position 1360 of SEQ ID NO: 316304
aucuguucugaguauggaa

SEQ ID NO: 425412 - RNA, 19 nt, Artificial Sequence
  Description of Artificial Sequence: Synthetic oligonucleotide
  Antisense Strand to SEQ ID NO: 425411
uuccauacucagaacagau

SEQ ID NO: 425413 - RNA, 19 nt, Artificial Sequence
  Description of Artificial Sequence: Synthetic oligonucleotide
  Sense Strand Starting at position 1360 of SEQ ID NO: 316446
caaugagacugaucugucu

SEQ ID NO: 425414 - RNA, 19 nt, Artificial Sequence
  Description of Artificial Sequence: Synthetic oligonucleotide
  Antisense Strand to SEQ ID NO: 425413
agacagaucagucucauug

SEQ ID NO: 425415 - RNA, 19 nt, Artificial Sequence
  Description of Artificial Sequence: Synthetic oligonucleotide
  Sense Strand Starting at position 1360 of SEQ ID NO: 316515
gcagauauucuuggcacac

SEQ ID NO: 425416 - RNA, 19 nt, Artificial Sequence
  Description of Artificial Sequence: Synthetic oligonucleotide
  Antisense Strand to SEQ ID NO: 425415
gugugccaagaauaucugc

SEQ ID NO: 425417 - RNA, 19 nt, Artificial Sequence
  Description of Artificial Sequence: Synthetic oligonucleotide
  Sense Strand Starting at position 1360 of SEQ ID NO: 316560
ugauucaugggauguugca

SEQ ID NO: 425418 - RNA, 19 nt, Artificial Sequence
  Description of Artificial Sequence: Synthetic oligonucleotide
  Antisense Strand to SEQ ID NO: 425417
ugcaacaucccaugaauca

SEQ ID NO: 425419 - RNA, 19 nt, Artificial Sequence
  Description of Artificial Sequence: Synthetic oligonucleotide
  Sense Strand Starting at position 1360 of SEQ ID NO: 316602
uauagaucugcuuggugac

SEQ ID NO: 425420 - RNA, 19 nt, Artificial Sequence
  Description of Artificial Sequence: Synthetic oligonucleotide
  Antisense Strand to SEQ ID NO: 425419
gucaccaagcagaucuaua

SEQ ID NO: 425421 - RNA, 19 nt, Artificial Sequence
  Description of Artificial Sequence: Synthetic oligonucleotide
  Sense Strand Starting at position 1360 of SEQ ID NO: 316603
auagaucugcuuggugaca

SEQ ID NO: 425422 - RNA, 19 nt, Artificial Sequence
  Description of Artificial Sequence: Synthetic oligonucleotide
  Antisense Strand to SEQ ID NO: 425421
ugucaccaagcagaucuau

SEQ ID NO: 425423 - RNA, 19 nt, Artificial Sequence
  Description of Artificial Sequence: Synthetic oligonucleotide
  Sense Strand Starting at position 1360 of SEQ ID NO: 316669
aguggauucguggcuguuu

SEQ ID NO: 425424 - RNA, 19 nt, Artificial Sequence
  Description of Artificial Sequence: Synthetic oligonucleotide
  Antisense Strand to SEQ ID NO: 425423
aaacagccacgaauccacu

SEQ ID NO: 425425 - RNA, 19 nt, Artificial Sequence
  Description of Artificial Sequence: Synthetic oligonucleotide
  Sense Strand Starting at position 1360 of SEQ ID NO: 316735
uguauugaaugcuucuagu

SEQ ID NO: 425426 - RNA, 19 nt, Artificial Sequence
  Description of Artificial Sequence: Synthetic oligonucleotide
  Antisense Strand to SEQ ID NO: 425425
acuagaagcauucaauaca

SEQ ID NO: 425427 - RNA, 19 nt, Artificial Sequence
  Description of Artificial Sequence: Synthetic oligonucleotide
  Sense Strand Starting at position 1360 of SEQ ID NO: 316785
gagagaaaguaggauauaa

SEQ ID NO: 425428 - RNA, 19 nt, Artificial Sequence
  Description of Artificial Sequence: Synthetic oligonucleotide
  Antisense Strand to SEQ ID NO: 425427
uuauauccuacuuucucuc

SEQ ID NO: 425429 - RNA, 19 nt, Artificial Sequence
  Description of Artificial Sequence: Synthetic oligonucleotide
  Sense Strand Starting at position 1360 of SEQ ID NO: 316872
ggguaagacgcuuaauguc

SEQ ID NO: 425430 - RNA, 19 nt, Artificial Sequence
  Description of Artificial Sequence: Synthetic oligonucleotide
  Antisense Strand to SEQ ID NO: 425429
gacauuaagcgucuuaccc

SEQ ID NO: 425431 - RNA, 19 nt, Artificial Sequence
  Description of Artificial Sequence: Synthetic oligonucleotide
  Sense Strand Starting at position 1360 of SEQ ID NO: 316896
gggugaugcugaccgaaga

SEQ ID NO: 425432 - RNA, 19 nt, Artificial Sequence
  Description of Artificial Sequence: Synthetic oligonucleotide
  Antisense Strand to SEQ ID NO: 425431
ucuucggucagcaucaccc

SEQ ID NO: 425433 - RNA, 19 nt, Artificial Sequence
  Description of Artificial Sequence: Synthetic oligonucleotide
  Sense Strand Starting at position 1360 of SEQ ID NO: 317259
ucucuaugguucccacgaa

SEQ ID NO: 425434 - RNA, 19 nt, Artificial Sequence
  Description of Artificial Sequence: Synthetic oligonucleotide
  Antisense Strand to SEQ ID NO: 425433
uucgugggaaccauagaga

SEQ ID NO: 425435 - RNA, 19 nt, Artificial Sequence
  Description of Artificial Sequence: Synthetic oligonucleotide
  Sense Strand Starting at position 1360 of SEQ ID NO: 317263
uaugguucccacgaaacga

SEQ ID NO: 425436 - RNA, 19 nt, Artificial Sequence
  Description of Artificial Sequence: Synthetic oligonucleotide
  Antisense Strand to SEQ ID NO: 425435
ucguuucgugggaaccaua

SEQ ID NO: 425437 - RNA, 19 nt, Artificial Sequence
  Description of Artificial Sequence: Synthetic oligonucleotide
  Sense Strand Starting at position 1360 of SEQ ID NO: 317506
uuucucuuaugucuuagua

SEQ ID NO: 425438 - RNA, 19 nt, Artificial Sequence
  Description of Artificial Sequence: Synthetic oligonucleotide
  Antisense Strand to SEQ ID NO: 425437
uacuaagacauaagagaaa

SEQ ID NO: 425439 - RNA, 19 nt, Artificial Sequence
  Description of Artificial Sequence: Synthetic oligonucleotide
  Sense Strand Starting at position 1360 of SEQ ID NO: 317642
ccugucucccacugaauga

SEQ ID NO: 425440 - RNA, 19 nt, Artificial Sequence
  Description of Artificial Sequence: Synthetic oligonucleotide
  Antisense Strand to SEQ ID NO: 425439
ucauucagugggagacagg

SEQ ID NO: 425441 - RNA, 19 nt, Artificial Sequence
  Description of Artificial Sequence: Synthetic oligonucleotide
  Sense Strand Starting at position 1360 of SEQ ID NO: 317652
acugaaugacugugaccua

SEQ ID NO: 425442 - RNA, 19 nt, Artificial Sequence
  Description of Artificial Sequence: Synthetic oligonucleotide
  Antisense Strand to SEQ ID NO: 425441
uaggucacagucauucagu

SEQ ID NO: 425443 - RNA, 19 nt, Artificial Sequence
  Description of Artificial Sequence: Synthetic oligonucleotide
  Sense Strand Starting at position 1360 of SEQ ID NO: 317720
uauggacuugcucaaguua

SEQ ID NO: 425444 - RNA, 19 nt, Artificial Sequence
  Description of Artificial Sequence: Synthetic oligonucleotide
  Antisense Strand to SEQ ID NO: 425443
uaacuugagcaaguccaua

SEQ ID NO: 425445 - RNA, 19 nt, Artificial Sequence
  Description of Artificial Sequence: Synthetic oligonucleotide
  Sense Strand Starting at position 1360 of SEQ ID NO: 317741
cuuaaaucguugccucaau

SEQ ID NO: 425446 - RNA, 19 nt, Artificial Sequence
  Description of Artificial Sequence: Synthetic oligonucleotide
  Antisense Strand to SEQ ID NO: 425445
auugaggcaacgauuuaag

SEQ ID NO: 425447 - RNA, 19 nt, Artificial Sequence
  Description of Artificial Sequence: Synthetic oligonucleotide
  Sense Strand Starting at position 1360 of SEQ ID NO: 317742
uuaaaucguugccucaauu

SEQ ID NO: 425448 - RNA, 19 nt, Artificial Sequence
  Description of Artificial Sequence: Synthetic oligonucleotide
  Antisense Strand to SEQ ID NO: 425447
aauugaggcaacgauuuaa

SEQ ID NO: 425449 - RNA, 19 nt, Artificial Sequence
  Description of Artificial Sequence: Synthetic oligonucleotide
  Sense Strand Starting at position 1360 of SEQ ID NO: 317752
gccucaauuuaucaguuga

SEQ ID NO: 425450 - RNA, 19 nt, Artificial Sequence
  Description of Artificial Sequence: Synthetic oligonucleotide
  Antisense Strand to SEQ ID NO: 425449
ucaacugauaaauugaggc

SEQ ID NO: 425451 - RNA, 19 nt, Artificial Sequence
  Description of Artificial Sequence: Synthetic oligonucleotide
  Sense Strand Starting at position 1360 of SEQ ID NO: 317762
aucaguugagaaugguaaa

SEQ ID NO: 425452 - RNA, 19 nt, Artificial Sequence
  Description of Artificial Sequence: Synthetic oligonucleotide
  Antisense Strand to SEQ ID NO: 425451
uuuaccauucucaacugau

SEQ ID NO: 425453 - RNA, 19 nt, Artificial Sequence
  Description of Artificial Sequence: Synthetic oligonucleotide
  Sense Strand Starting at position 1360 of SEQ ID NO: 317803
ugaauuaacugagucaauu

SEQ ID NO: 425454 - RNA, 19 nt, Artificial Sequence
  Description of Artificial Sequence: Synthetic oligonucleotide
  Antisense Strand to SEQ ID NO: 425453
aauugacucaguuaauuca

SEQ ID NO: 425455 - RNA, 19 nt, Artificial Sequence
  Description of Artificial Sequence: Synthetic oligonucleotide
  Sense Strand Starting at position 1360 of SEQ ID NO: 318257
ugaacuagaccucgugauc

SEQ ID NO: 425456 - RNA, 19 nt, Artificial Sequence
  Description of Artificial Sequence: Synthetic oligonucleotide
  Antisense Strand to SEQ ID NO: 425455
gaucacgaggucuaguuca

SEQ ID NO: 425457 - RNA, 19 nt, Artificial Sequence
  Description of Artificial Sequence: Synthetic oligonucleotide
  Sense Strand Starting at position 1360 of SEQ ID NO: 318605
acaaucguuucucucugaa

SEQ ID NO: 425458 - RNA, 19 nt, Artificial Sequence
  Description of Artificial Sequence: Synthetic oligonucleotide
  Antisense Strand to SEQ ID NO: 425457
uucagagagaaacgauugu

SEQ ID NO: 425459 - RNA, 19 nt, Artificial Sequence
  Description of Artificial Sequence: Synthetic oligonucleotide
  Sense Strand Starting at position 1360 of SEQ ID NO: 319207
uccggauggagcuaaugua

SEQ ID NO: 425460 - RNA, 19 nt, Artificial Sequence
  Description of Artificial Sequence: Synthetic oligonucleotide
  Antisense Strand to SEQ ID NO: 425459
uacauuagcuccauccgga

SEQ ID NO: 425461 - RNA, 19 nt, Artificial Sequence
  Description of Artificial Sequence: Synthetic oligonucleotide
  Sense Strand Starting at position 1360 of SEQ ID NO: 319214
ggagcuaauguacauccua

SEQ ID NO: 425462 - RNA, 19 nt, Artificial Sequence
  Description of Artificial Sequence: Synthetic oligonucleotide
  Antisense Strand to SEQ ID NO: 425461
uaggauguacauuagcucc

SEQ ID NO: 425463 - RNA, 19 nt, Artificial Sequence
  Description of Artificial Sequence: Synthetic oligonucleotide
  Sense Strand Starting at position 1361 of SEQ ID NO: 315375
cguuuaauccacugucauu

SEQ ID NO: 425464 - RNA, 19 nt, Artificial Sequence
  Description of Artificial Sequence: Synthetic oligonucleotide
  Antisense Strand to SEQ ID NO: 425463
aaugacaguggauuaaacg

SEQ ID NO: 425465 - RNA, 19 nt, Artificial Sequence
  Description of Artificial Sequence: Synthetic oligonucleotide
  Sense Strand Starting at position 1361 of SEQ ID NO: 315409
ggaaucuaauccuaaguga

SEQ ID NO: 425466 - RNA, 19 nt, Artificial Sequence
  Description of Artificial Sequence: Synthetic oligonucleotide
  Antisense Strand to SEQ ID NO: 425465
ucacuuaggauuagauucc

SEQ ID NO: 425467 - RNA, 19 nt, Artificial Sequence
  Description of Artificial Sequence: Synthetic oligonucleotide
  Sense Strand Starting at position 1361 of SEQ ID NO: 315508
gcugaaguucucgaacaga

SEQ ID NO: 425468 - RNA, 19 nt, Artificial Sequence
  Description of Artificial Sequence: Synthetic oligonucleotide
  Antisense Strand to SEQ ID NO: 425467
ucuguucgagaacuucagc

SEQ ID NO: 425469 - RNA, 19 nt, Artificial Sequence
  Description of Artificial Sequence: Synthetic oligonucleotide
  Sense Strand Starting at position 1361 of SEQ ID NO: 315511
gaaguucucgaacagaagu

SEQ ID NO: 425470 - RNA, 19 nt, Artificial Sequence
  Description of Artificial Sequence: Synthetic oligonucleotide
  Antisense Strand to SEQ ID NO: 425469
acuucuguucgagaacuuc

SEQ ID NO: 425471 - RNA, 19 nt, Artificial Sequence
  Description of Artificial Sequence: Synthetic oligonucleotide
  Sense Strand Starting at position 1361 of SEQ ID NO: 315524
agaaguggaugguccaaua

SEQ ID NO: 425472 - RNA, 19 nt, Artificial Sequence
  Description of Artificial Sequence: Synthetic oligonucleotide
  Antisense Strand to SEQ ID NO: 425471
uauuggaccauccacuucu

SEQ ID NO: 425473 - RNA, 19 nt, Artificial Sequence
  Description of Artificial Sequence: Synthetic oligonucleotide
  Sense Strand Starting at position 1361 of SEQ ID NO: 315582
gauggagcuuucucauuac

SEQ ID NO: 425474 - RNA, 19 nt, Artificial Sequence
  Description of Artificial Sequence: Synthetic oligonucleotide
  Antisense Strand to SEQ ID NO: 425473
guaaugagaaagcuccauc

SEQ ID NO: 425475 - RNA, 19 nt, Artificial Sequence
  Description of Artificial Sequence: Synthetic oligonucleotide
  Sense Strand Starting at position 1361 of SEQ ID NO: 315585
ggagcuuucucauuacaag

SEQ ID NO: 425476 - RNA, 19 nt, Artificial Sequence
  Description of Artificial Sequence: Synthetic oligonucleotide
  Antisense Strand to SEQ ID NO: 425475
cuuguaaugagaaagcucc

SEQ ID NO: 425477 - RNA, 19 nt, Artificial Sequence
  Description of Artificial Sequence: Synthetic oligonucleotide
  Sense Strand Starting at position 1361 of SEQ ID NO: 315638
uuccaugaucuaggacacu

SEQ ID NO: 425478 - RNA, 19 nt, Artificial Sequence
  Description of Artificial Sequence: Synthetic oligonucleotide
  Antisense Strand to SEQ ID NO: 425477
aguguccuagaucauggaa

SEQ ID NO: 425479 - RNA, 19 nt, Artificial Sequence
  Description of Artificial Sequence: Synthetic oligonucleotide
  Sense Strand Starting at position 1361 of SEQ ID NO: 315747
gauauagacucucacagag

SEQ ID NO: 425480 - RNA, 19 nt, Artificial Sequence
  Description of Artificial Sequence: Synthetic oligonucleotide
  Antisense Strand to SEQ ID NO: 425479
cucugugagagucuauauc

SEQ ID NO: 425481 - RNA, 19 nt, Artificial Sequence
  Description of Artificial Sequence: Synthetic oligonucleotide
  Sense Strand Starting at position 1361 of SEQ ID NO: 315899
cugaguggucugcagggua

SEQ ID NO: 425482 - RNA, 19 nt, Artificial Sequence
  Description of Artificial Sequence: Synthetic oligonucleotide
  Antisense Strand to SEQ ID NO: 425481
uacccugcagaccacucag

SEQ ID NO: 425483 - RNA, 19 nt, Artificial Sequence
  Description of Artificial Sequence: Synthetic oligonucleotide
  Sense Strand Starting at position 1361 of SEQ ID NO: 315915
guaaacuccucccuuggaa

SEQ ID NO: 425484 - RNA, 19 nt, Artificial Sequence
  Description of Artificial Sequence: Synthetic oligonucleotide
  Antisense Strand to SEQ ID NO: 425483
uuccaagggaggaguuuac

SEQ ID NO: 425485 - RNA, 19 nt, Artificial Sequence
  Description of Artificial Sequence: Synthetic oligonucleotide
  Sense Strand Starting at position 1361 of SEQ ID NO: 316088
acaagagcccucuguaaug

SEQ ID NO: 425486 - RNA, 19 nt, Artificial Sequence
  Description of Artificial Sequence: Synthetic oligonucleotide
  Antisense Strand to SEQ ID NO: 425485
cauuacagagggcucuugu

SEQ ID NO: 425487 - RNA, 19 nt, Artificial Sequence
  Description of Artificial Sequence: Synthetic oligonucleotide
  Sense Strand Starting at position 1361 of SEQ ID NO: 316138
aguucucaugaaugcagau

SEQ ID NO: 425488 - RNA, 19 nt, Artificial Sequence
  Description of Artificial Sequence: Synthetic oligonucleotide
  Antisense Strand to SEQ ID NO: 425487
aucugcauucaugagaacu

SEQ ID NO: 425489 - RNA, 19 nt, Artificial Sequence
  Description of Artificial Sequence: Synthetic oligonucleotide
  Sense Strand Starting at position 1361 of SEQ ID NO: 316259
uacuuuauugaaggaugua

SEQ ID NO: 425490 - RNA, 19 nt, Artificial Sequence
  Description of Artificial Sequence: Synthetic oligonucleotide
  Antisense Strand to SEQ ID NO: 425489
uacauccuucaauaaagua

SEQ ID NO: 425491 - RNA, 19 nt, Artificial Sequence
  Description of Artificial Sequence: Synthetic oligonucleotide
  Sense Strand Starting at position 1361 of SEQ ID NO: 316333
aucuguucugaguauggaa

SEQ ID NO: 425492 - RNA, 19 nt, Artificial Sequence
  Description of Artificial Sequence: Synthetic oligonucleotide
  Antisense Strand to SEQ ID NO: 425491
uuccauacucagaacagau

SEQ ID NO: 425493 - RNA, 19 nt, Artificial Sequence
  Description of Artificial Sequence: Synthetic oligonucleotide
  Sense Strand Starting at position 1361 of SEQ ID NO: 316475
caaugagacugaucugucu

SEQ ID NO: 425494 - RNA, 19 nt, Artificial Sequence
  Description of Artificial Sequence: Synthetic oligonucleotide
  Antisense Strand to SEQ ID NO: 425493
agacagaucagucucauug

SEQ ID NO: 425495 - RNA, 19 nt, Artificial Sequence
  Description of Artificial Sequence: Synthetic oligonucleotide
  Sense Strand Starting at position 1361 of SEQ ID NO: 316544
gcagauauucuuggcacac

SEQ ID NO: 425496 - RNA, 19 nt, Artificial Sequence
  Description of Artificial Sequence: Synthetic oligonucleotide
  Antisense Strand to SEQ ID NO: 425495
gugugccaagaauaucugc

SEQ ID NO: 425497 - RNA, 19 nt, Artificial Sequence
  Description of Artificial Sequence: Synthetic oligonucleotide
  Sense Strand Starting at position 1361 of SEQ ID NO: 316589
ugauucaugggauguugca

SEQ ID NO: 425498 - RNA, 19 nt, Artificial Sequence
  Description of Artificial Sequence: Synthetic oligonucleotide
  Antisense Strand to SEQ ID NO: 425497
ugcaacaucccaugaauca

SEQ ID NO: 425499 - RNA, 19 nt, Artificial Sequence
  Description of Artificial Sequence: Synthetic oligonucleotide
  Sense Strand Starting at position 1361 of SEQ ID NO: 316631
uauagaucugcuuggugac

SEQ ID NO: 425500 - RNA, 19 nt, Artificial Sequence
  Description of Artificial Sequence: Synthetic oligonucleotide
  Antisense Strand to SEQ ID NO: 425499
gucaccaagcagaucuaua

SEQ ID NO: 425501 - RNA, 19 nt, Artificial Sequence
  Description of Artificial Sequence: Synthetic oligonucleotide
  Sense Strand Starting at position 1361 of SEQ ID NO: 316632
auagaucugcuuggugaca

SEQ ID NO: 425502 - RNA, 19 nt, Artificial Sequence
  Description of Artificial Sequence: Synthetic oligonucleotide
  Antisense Strand to SEQ ID NO: 425501
ugucaccaagcagaucuau

SEQ ID NO: 425503 - RNA, 19 nt, Artificial Sequence
  Description of Artificial Sequence: Synthetic oligonucleotide
  Sense Strand Starting at position 1361 of SEQ ID NO: 316698
aguggauucguggcuguuu

SEQ ID NO: 425504 - RNA, 19 nt, Artificial Sequence
  Description of Artificial Sequence: Synthetic oligonucleotide
  Antisense Strand to SEQ ID NO: 425503
aaacagccacgaauccacu

SEQ ID NO: 425505 - RNA, 19 nt, Artificial Sequence
  Description of Artificial Sequence: Synthetic oligonucleotide
  Sense Strand Starting at position 1361 of SEQ ID NO: 316764
uguauugaaugcuucuagu

SEQ ID NO: 425506 - RNA, 19 nt, Artificial Sequence
  Description of Artificial Sequence: Synthetic oligonucleotide
  Antisense Strand to SEQ ID NO: 425505
acuagaagcauucaauaca

SEQ ID NO: 425507 - RNA, 19 nt, Artificial Sequence
  Description of Artificial Sequence: Synthetic oligonucleotide
  Sense Strand Starting at position 1361 of SEQ ID NO: 316814
gagagaaaguaggauauaa

SEQ ID NO: 425508 - RNA, 19 nt, Artificial Sequence
  Description of Artificial Sequence: Synthetic oligonucleotide
  Antisense Strand to SEQ ID NO: 425507
uuauauccuacuuucucuc

SEQ ID NO: 425509 - RNA, 19 nt, Artificial Sequence
  Description of Artificial Sequence: Synthetic oligonucleotide
  Sense Strand Starting at position 1361 of SEQ ID NO: 316901
ggguaagacgcuuaauguc

SEQ ID NO: 425510 - RNA, 19 nt, Artificial Sequence
  Description of Artificial Sequence: Synthetic oligonucleotide
  Antisense Strand to SEQ ID NO: 425509
gacauuaagcgucuuaccc

SEQ ID NO: 425511 - RNA, 19 nt, Artificial Sequence
  Description of Artificial Sequence: Synthetic oligonucleotide
  Sense Strand Starting at position 1361 of SEQ ID NO: 316925
gggugaugcugaccgaaga

SEQ ID NO: 425512 - RNA, 19 nt, Artificial Sequence
  Description of Artificial Sequence: Synthetic oligonucleotide
  Antisense Strand to SEQ ID NO: 425511
ucuucggucagcaucaccc

SEQ ID NO: 425513 - RNA, 19 nt, Artificial Sequence
  Description of Artificial Sequence: Synthetic oligonucleotide
  Sense Strand Starting at position 1361 of SEQ ID NO: 317288
ucucuaugguucccacgaa

SEQ ID NO: 425514 - RNA, 19 nt, Artificial Sequence
  Description of Artificial Sequence: Synthetic oligonucleotide
  Antisense Strand to SEQ ID NO: 425513
uucgugggaaccauagaga

SEQ ID NO: 425515 - RNA, 19 nt, Artificial Sequence
  Description of Artificial Sequence: Synthetic oligonucleotide
  Sense Strand Starting at position 1361 of SEQ ID NO: 317292
uaugguucccacgaaacga

SEQ ID NO: 425516 - RNA, 19 nt, Artificial Sequence
  Description of Artificial Sequence: Synthetic oligonucleotide
  Antisense Strand to SEQ ID NO: 425515
ucguuucgugggaaccaua

SEQ ID NO: 425517 - RNA, 19 nt, Artificial Sequence
  Description of Artificial Sequence: Synthetic oligonucleotide
  Sense Strand Starting at position 1361 of SEQ ID NO: 317535
uuucucuuaugucuuagua

SEQ ID NO: 425518 - RNA, 19 nt, Artificial Sequence
  Description of Artificial Sequence: Synthetic oligonucleotide
  Antisense Strand to SEQ ID NO: 425517
uacuaagacauaagagaaa

SEQ ID NO: 425519 - RNA, 19 nt, Artificial Sequence
  Description of Artificial Sequence: Synthetic oligonucleotide
  Sense Strand Starting at position 1361 of SEQ ID NO: 317671
ccugucucccacugaauga

SEQ ID NO: 425520 - RNA, 19 nt, Artificial Sequence
  Description of Artificial Sequence: Synthetic oligonucleotide
  Antisense Strand to SEQ ID NO: 425519
ucauucagugggagacagg

SEQ ID NO: 425521 - RNA, 19 nt, Artificial Sequence
  Description of Artificial Sequence: Synthetic oligonucleotide
  Sense Strand Starting at position 1361 of SEQ ID NO: 317681
acugaaugacugugaccua

SEQ ID NO: 425522 - RNA, 19 nt, Artificial Sequence
  Description of Artificial Sequence: Synthetic oligonucleotide
  Antisense Strand to SEQ ID NO: 425521
uaggucacagucauucagu

SEQ ID NO: 425523 - RNA, 19 nt, Artificial Sequence
  Description of Artificial Sequence: Synthetic oligonucleotide
  Sense Strand Starting at position 1361 of SEQ ID NO: 317749
uauggacuugcucaaguua

SEQ ID NO: 425524 - RNA, 19 nt, Artificial Sequence
  Description of Artificial Sequence: Synthetic oligonucleotide
  Antisense Strand to SEQ ID NO: 425523
uaacuugagcaaguccaua

SEQ ID NO: 425525 - RNA, 19 nt, Artificial Sequence
  Description of Artificial Sequence: Synthetic oligonucleotide
  Sense Strand Starting at position 1361 of SEQ ID NO: 317770
cuuaaaucguugccucaau

SEQ ID NO: 425526 - RNA, 19 nt, Artificial Sequence
  Description of Artificial Sequence: Synthetic oligonucleotide
  Antisense Strand to SEQ ID NO: 425525
auugaggcaacgauuuaag

SEQ ID NO: 425527 - RNA, 19 nt, Artificial Sequence
  Description of Artificial Sequence: Synthetic oligonucleotide
  Sense Strand Starting at position 1361 of SEQ ID NO: 317771
uuaaaucguugccucaauu

SEQ ID NO: 425528 - RNA, 19 nt, Artificial Sequence
  Description of Artificial Sequence: Synthetic oligonucleotide
  Antisense Strand to SEQ ID NO: 425527
aauugaggcaacgauuuaa

SEQ ID NO: 425529 - RNA, 19 nt, Artificial Sequence
  Description of Artificial Sequence: Synthetic oligonucleotide
  Sense Strand Starting at position 1361 of SEQ ID NO: 317781
gccucaauuuaucaguuga

SEQ ID NO: 425530 - RNA, 19 nt, Artificial Sequence
  Description of Artificial Sequence: Synthetic oligonucleotide
  Antisense Strand to SEQ ID NO: 425529
ucaacugauaaauugaggc

SEQ ID NO: 425531 - RNA, 19 nt, Artificial Sequence
  Description of Artificial Sequence: Synthetic oligonucleotide
  Sense Strand Starting at position 1361 of SEQ ID NO: 317791
aucaguugagaaugguaaa

SEQ ID NO: 425532 - RNA, 19 nt, Artificial Sequence
  Description of Artificial Sequence: Synthetic oligonucleotide
  Antisense Strand to SEQ ID NO: 425531
uuuaccauucucaacugau

SEQ ID NO: 425533 - RNA, 19 nt, Artificial Sequence
  Description of Artificial Sequence: Synthetic oligonucleotide
  Sense Strand Starting at position 1361 of SEQ ID NO: 317832
ugaauuaacugagucaauu

SEQ ID NO: 425534 - RNA, 19 nt, Artificial Sequence
  Description of Artificial Sequence: Synthetic oligonucleotide
  Antisense Strand to SEQ ID NO: 425533
aauugacucaguuaauuca

SEQ ID NO: 425535 - RNA, 19 nt, Artificial Sequence
  Description of Artificial Sequence: Synthetic oligonucleotide
  Sense Strand Starting at position 1361 of SEQ ID NO: 317993
ucguuaugcccuuggaauu

SEQ ID NO: 425536 - RNA, 19 nt, Artificial Sequence
  Description of Artificial Sequence: Synthetic oligonucleotide
  Antisense Strand to SEQ ID NO: 425535
aauuccaagggcauaacga

SEQ ID NO: 425537 - RNA, 19 nt, Artificial Sequence
  Description of Artificial Sequence: Synthetic oligonucleotide
  Sense Strand Starting at position 1361 of SEQ ID NO: 318286
ugaacuagaccucgugauc

SEQ ID NO: 425538 - RNA, 19 nt, Artificial Sequence
  Description of Artificial Sequence: Synthetic oligonucleotide
  Antisense Strand to SEQ ID NO: 425537
gaucacgaggucuaguuca

SEQ ID NO: 425539 - RNA, 19 nt, Artificial Sequence
  Description of Artificial Sequence: Synthetic oligonucleotide
  Sense Strand Starting at position 1361 of SEQ ID NO: 318613
gaagucugguaagaaacau

SEQ ID NO: 425540 - RNA, 19 nt, Artificial Sequence
  Description of Artificial Sequence: Synthetic oligonucleotide
  Antisense Strand to SEQ ID NO: 425539
auguuucuuaccagacuuc

SEQ ID NO: 425541 - RNA, 19 nt, Artificial Sequence
  Description of Artificial Sequence: Synthetic oligonucleotide
  Sense Strand Starting at position 1361 of SEQ ID NO: 318634
acaaucguuucucucugaa

SEQ ID NO: 425542 - RNA, 19 nt, Artificial Sequence
  Description of Artificial Sequence: Synthetic oligonucleotide
  Antisense Strand to SEQ ID NO: 425541
uucagagagaaacgauugu

SEQ ID NO: 425543 - RNA, 19 nt, Artificial Sequence
  Description of Artificial Sequence: Synthetic oligonucleotide
  Sense Strand Starting at position 1362 of SEQ ID NO: 315314
ccuugaaaggcacaaguua

SEQ ID NO: 425544 - RNA, 19 nt, Artificial Sequence
  Description of Artificial Sequence: Synthetic oligonucleotide
  Antisense Strand to SEQ ID NO: 425543
uaacuugugccuuucaagg

SEQ ID NO: 425545 - RNA, 19 nt, Artificial Sequence
  Description of Artificial Sequence: Synthetic oligonucleotide
  Sense Strand Starting at position 1362 of SEQ ID NO: 315656
gggaauauuucucauucua

SEQ ID NO: 425546 - RNA, 19 nt, Artificial Sequence
  Description of Artificial Sequence: Synthetic oligonucleotide
  Antisense Strand to SEQ ID NO: 425545
uagaaugagaaauauuccc

SEQ ID NO: 425547 - RNA, 19 nt, Artificial Sequence
  Description of Artificial Sequence: Synthetic oligonucleotide
  Sense Strand Starting at position 1362 of SEQ ID NO: 315824
accgcagaguugguuuaau

SEQ ID NO: 425548 - RNA, 19 nt, Artificial Sequence
  Description of Artificial Sequence: Synthetic oligonucleotide
  Antisense Strand to SEQ ID NO: 425547
auuaaaccaacucugcggu

SEQ ID NO: 425549 - RNA, 19 nt, Artificial Sequence
  Description of Artificial Sequence: Synthetic oligonucleotide
  Sense Strand Starting at position 1362 of SEQ ID NO: 316276
gagaaugccugauaaagga

SEQ ID NO: 425550 - RNA, 19 nt, Artificial Sequence
  Description of Artificial Sequence: Synthetic oligonucleotide
  Antisense Strand to SEQ ID NO: 425549
uccuuuaucaggcauucuc

SEQ ID NO: 425551 - RNA, 19 nt, Artificial Sequence
  Description of Artificial Sequence: Synthetic oligonucleotide
  Sense Strand Starting at position 1362 of SEQ ID NO: 316354
gugugaaagauugaaugcu

SEQ ID NO: 425552 - RNA, 19 nt, Artificial Sequence
  Description of Artificial Sequence: Synthetic oligonucleotide
  Antisense Strand to SEQ ID NO: 425551
agcauucaaucuuucacac

SEQ ID NO: 425553 - RNA, 19 nt, Artificial Sequence
  Description of Artificial Sequence: Synthetic oligonucleotide
  Sense Strand Starting at position 1362 of SEQ ID NO: 316589
agaaguaaguacuucucca

SEQ ID NO: 425554 - RNA, 19 nt, Artificial Sequence
  Description of Artificial Sequence: Synthetic oligonucleotide
  Antisense Strand to SEQ ID NO: 425553
uggagaaguacuuacuucu

SEQ ID NO: 425555 - RNA, 19 nt, Artificial Sequence
  Description of Artificial Sequence: Synthetic oligonucleotide
  Sense Strand Starting at position 1362 of SEQ ID NO: 316632
gucuuuauuggauguaaua

SEQ ID NO: 425556 - RNA, 19 nt, Artificial Sequence
  Description of Artificial Sequence: Synthetic oligonucleotide
  Antisense Strand to SEQ ID NO: 425555
uauuacauccaauaaagac

SEQ ID NO: 425557 - RNA, 19 nt, Artificial Sequence
  Description of Artificial Sequence: Synthetic oligonucleotide
  Sense Strand Starting at position 1362 of SEQ ID NO: 316741
gucuuaauuugggcauucu

SEQ ID NO: 425558 - RNA, 19 nt, Artificial Sequence
  Description of Artificial Sequence: Synthetic oligonucleotide
  Antisense Strand to SEQ ID NO: 425557
agaaugcccaaauuaagac

SEQ ID NO: 425559 - RNA, 19 nt, Artificial Sequence
  Description of Artificial Sequence: Synthetic oligonucleotide
  Sense Strand Starting at position 1362 of SEQ ID NO: 316825
ucugaaugcagaggugaca

SEQ ID NO: 425560 - RNA, 19 nt, Artificial Sequence
  Description of Artificial Sequence: Synthetic oligonucleotide
  Antisense Strand to SEQ ID NO: 425559
ugucaccucugcauucaga

SEQ ID NO: 425561 - RNA, 19 nt, Artificial Sequence
  Description of Artificial Sequence: Synthetic oligonucleotide
  Sense Strand Starting at position 1362 of SEQ ID NO: 317337
gucccuacugccugagaca

SEQ ID NO: 425562 - RNA, 19 nt, Artificial Sequence
  Description of Artificial Sequence: Synthetic oligonucleotide
  Antisense Strand to SEQ ID NO: 425561
ugucucaggcaguagggac

SEQ ID NO: 425563 - RNA, 19 nt, Artificial Sequence
  Description of Artificial Sequence: Synthetic oligonucleotide
  Sense Strand Starting at position 1362 of SEQ ID NO: 317338
ucccuacugccugagacaa

SEQ ID NO: 425564 - RNA, 19 nt, Artificial Sequence
  Description of Artificial Sequence: Synthetic oligonucleotide
  Antisense Strand to SEQ ID NO: 425563
uugucucaggcaguaggga

SEQ ID NO: 425565 - RNA, 19 nt, Artificial Sequence
  Description of Artificial Sequence: Synthetic oligonucleotide
  Sense Strand Starting at position 1362 of SEQ ID NO: 317445
gccacagaaugguuacuau

SEQ ID NO: 425566 - RNA, 19 nt, Artificial Sequence
  Description of Artificial Sequence: Synthetic oligonucleotide
  Antisense Strand to SEQ ID NO: 425565
auaguaaccauucuguggc

SEQ ID NO: 425567 - RNA, 19 nt, Artificial Sequence
  Description of Artificial Sequence: Synthetic oligonucleotide
  Sense Strand Starting at position 1362 of SEQ ID NO: 317455
gguuacuauccuggguauu

SEQ ID NO: 425568 - RNA, 19 nt, Artificial Sequence
  Description of Artificial Sequence: Synthetic oligonucleotide
  Antisense Strand to SEQ ID NO: 425567
aauacccaggauaguaacc

SEQ ID NO: 425569 - RNA, 19 nt, Artificial Sequence
  Description of Artificial Sequence: Synthetic oligonucleotide
  Sense Strand Starting at position 1362 of SEQ ID NO: 317456
guuacuauccuggguauua

SEQ ID NO: 425570 - RNA, 19 nt, Artificial Sequence
  Description of Artificial Sequence: Synthetic oligonucleotide
  Antisense Strand to SEQ ID NO: 425569
uaauacccaggauaguaac

SEQ ID NO: 425571 - RNA, 19 nt, Artificial Sequence
  Description of Artificial Sequence: Synthetic oligonucleotide
  Sense Strand Starting at position 1362 of SEQ ID NO: 317457
uuacuauccuggguauuau

SEQ ID NO: 425572 - RNA, 19 nt, Artificial Sequence
  Description of Artificial Sequence: Synthetic oligonucleotide
  Antisense Strand to SEQ ID NO: 425571
auaauacccaggauaguaa

SEQ ID NO: 425573 - RNA, 19 nt, Artificial Sequence
  Description of Artificial Sequence: Synthetic oligonucleotide
  Sense Strand Starting at position 1362 of SEQ ID NO: 317466
uggguauuauucgugguua

SEQ ID NO: 425574 - RNA, 19 nt, Artificial Sequence
  Description of Artificial Sequence: Synthetic oligonucleotide
  Antisense Strand to SEQ ID NO: 425573
uaaccacgaauaauaccca

SEQ ID NO: 425575 - RNA, 19 nt, Artificial Sequence
  Description of Artificial Sequence: Synthetic oligonucleotide
  Sense Strand Starting at position 1362 of SEQ ID NO: 317468
gguauuauucgugguuauc

SEQ ID NO: 425576 - RNA, 19 nt, Artificial Sequence
  Description of Artificial Sequence: Synthetic oligonucleotide
  Antisense Strand to SEQ ID NO: 425575
gauaaccacgaauaauacc

SEQ ID NO: 425577 - RNA, 19 nt, Artificial Sequence
  Description of Artificial Sequence: Synthetic oligonucleotide
  Sense Strand Starting at position 1362 of SEQ ID NO: 317504
gguguccuuccagauaaug

SEQ ID NO: 425578 - RNA, 19 nt, Artificial Sequence
  Description of Artificial Sequence: Synthetic oligonucleotide
  Antisense Strand to SEQ ID NO: 425577
cauuaucuggaaggacacc

SEQ ID NO: 425579 - RNA, 19 nt, Artificial Sequence
  Description of Artificial Sequence: Synthetic oligonucleotide
  Sense Strand Starting at position 1362 of SEQ ID NO: 317628
gccgaauguguauggacua

SEQ ID NO: 425580 - RNA, 19 nt, Artificial Sequence
  Description of Artificial Sequence: Synthetic oligonucleotide
  Antisense Strand to SEQ ID NO: 425579
uaguccauacacauucggc

SEQ ID NO: 425581 - RNA, 19 nt, Artificial Sequence
  Description of Artificial Sequence: Synthetic oligonucleotide
  Sense Strand Starting at position 1362 of SEQ ID NO: 317712
cgguuuccuugucuauuaa

SEQ ID NO: 425582 - RNA, 19 nt, Artificial Sequence
  Description of Artificial Sequence: Synthetic oligonucleotide
  Antisense Strand to SEQ ID NO: 425581
uuaauagacaaggaaaccg

SEQ ID NO: 425583 - RNA, 19 nt, Artificial Sequence
  Description of Artificial Sequence: Synthetic oligonucleotide
  Sense Strand Starting at position 1362 of SEQ ID NO: 317713
gguuuccuugucuauuaaa

SEQ ID NO: 425584 - RNA, 19 nt, Artificial Sequence
  Description of Artificial Sequence: Synthetic oligonucleotide
  Antisense Strand to SEQ ID NO: 425583
uuuaauagacaaggaaacc

SEQ ID NO: 425585 - RNA, 19 nt, Artificial Sequence
  Description of Artificial Sequence: Synthetic oligonucleotide
  Sense Strand Starting at position 1362 of SEQ ID NO: 317733
ggguauuaugaugguggua

SEQ ID NO: 425586 - RNA, 19 nt, Artificial Sequence
  Description of Artificial Sequence: Synthetic oligonucleotide
  Antisense Strand to SEQ ID NO: 425585
uaccaccaucauaauaccc

SEQ ID NO: 425587 - RNA, 19 nt, Artificial Sequence
  Description of Artificial Sequence: Synthetic oligonucleotide
  Sense Strand Starting at position 1362 of SEQ ID NO: 317832
auaguauguacucgugagu

SEQ ID NO: 425588 - RNA, 19 nt, Artificial Sequence
  Description of Artificial Sequence: Synthetic oligonucleotide
  Antisense Strand to SEQ ID NO: 425587
acucacgaguacauacuau

SEQ ID NO: 425589 - RNA, 19 nt, Artificial Sequence
  Description of Artificial Sequence: Synthetic oligonucleotide
  Sense Strand Starting at position 1362 of SEQ ID NO: 317835
guauguacucgugaguuug

SEQ ID NO: 425590 - RNA, 19 nt, Artificial Sequence
  Description of Artificial Sequence: Synthetic oligonucleotide
  Antisense Strand to SEQ ID NO: 425589
caaacucacgaguacauac

SEQ ID NO: 425591 - RNA, 19 nt, Artificial Sequence
  Description of Artificial Sequence: Synthetic oligonucleotide
  Sense Strand Starting at position 1362 of SEQ ID NO: 317922
gcgugcuuuagggaaauag

SEQ ID NO: 425592 - RNA, 19 nt, Artificial Sequence
  Description of Artificial Sequence: Synthetic oligonucleotide
  Antisense Strand to SEQ ID NO: 425591
cuauuucccuaaagcacgc

SEQ ID NO: 425593 - RNA, 19 nt, Artificial Sequence
  Description of Artificial Sequence: Synthetic oligonucleotide
  Sense Strand Starting at position 1362 of SEQ ID NO: 318108
ugccauggagaguauauua

SEQ ID NO: 425594 - RNA, 19 nt, Artificial Sequence
  Description of Artificial Sequence: Synthetic oligonucleotide
  Antisense Strand to SEQ ID NO: 425593
uaauauacucuccauggca

SEQ ID NO: 425595 - RNA, 19 nt, Artificial Sequence
  Description of Artificial Sequence: Synthetic oligonucleotide
  Sense Strand Starting at position 1362 of SEQ ID NO: 318128
guaucuacugcuggauaau

SEQ ID NO: 425596 - RNA, 19 nt, Artificial Sequence
  Description of Artificial Sequence: Synthetic oligonucleotide
  Antisense Strand to SEQ ID NO: 425595
auuauccagcaguagauac

SEQ ID NO: 425597 - RNA, 19 nt, Artificial Sequence
  Description of Artificial Sequence: Synthetic oligonucleotide
  Sense Strand Starting at position 1362 of SEQ ID NO: 318153
cucuaaugcuuuguggcua

SEQ ID NO: 425598 - RNA, 19 nt, Artificial Sequence
  Description of Artificial Sequence: Synthetic oligonucleotide
  Antisense Strand to SEQ ID NO: 425597
uagccacaaagcauuagag

SEQ ID NO: 425599 - RNA, 19 nt, Artificial Sequence
  Description of Artificial Sequence: Synthetic oligonucleotide
  Sense Strand Starting at position 1362 of SEQ ID NO: 318290
gcugaagucaucugaagcu

SEQ ID NO: 425600 - RNA, 19 nt, Artificial Sequence
  Description of Artificial Sequence: Synthetic oligonucleotide
  Antisense Strand to SEQ ID NO: 425599
agcuucagaugacuucagc

SEQ ID NO: 425601 - RNA, 19 nt, Artificial Sequence
  Description of Artificial Sequence: Synthetic oligonucleotide
  Sense Strand Starting at position 1362 of SEQ ID NO: 318297
ucaucugaagcuugacuga

SEQ ID NO: 425602 - RNA, 19 nt, Artificial Sequence
  Description of Artificial Sequence: Synthetic oligonucleotide
  Antisense Strand to SEQ ID NO: 425601
ucagucaagcuucagauga

SEQ ID NO: 425603 - RNA, 19 nt, Artificial Sequence
  Description of Artificial Sequence: Synthetic oligonucleotide
  Sense Strand Starting at position 1362 of SEQ ID NO: 318300
ucugaagcuugacugaguu

SEQ ID NO: 425604 - RNA, 19 nt, Artificial Sequence
  Description of Artificial Sequence: Synthetic oligonucleotide
  Antisense Strand to SEQ ID NO: 425603
aacucagucaagcuucaga

SEQ ID NO: 425605 - RNA, 19 nt, Artificial Sequence
  Description of Artificial Sequence: Synthetic oligonucleotide
  Sense Strand Starting at position 1362 of SEQ ID NO: 318334
caaggugguuuacucacau

SEQ ID NO: 425606 - RNA, 19 nt, Artificial Sequence
  Description of Artificial Sequence: Synthetic oligonucleotide
  Antisense Strand to SEQ ID NO: 425605
augugaguaaaccaccuug

SEQ ID NO: 425607 - RNA, 19 nt, Artificial Sequence
  Description of Artificial Sequence: Synthetic oligonucleotide
  Sense Strand Starting at position 1362 of SEQ ID NO: 318424
gcauguagcuuucucccaa

SEQ ID NO: 425608 - RNA, 19 nt, Artificial Sequence
  Description of Artificial Sequence: Synthetic oligonucleotide
  Antisense Strand to SEQ ID NO: 425607
uugggagaaagcuacaugc

SEQ ID NO: 425609 - RNA, 19 nt, Artificial Sequence
  Description of Artificial Sequence: Synthetic oligonucleotide
  Sense Strand Starting at position 1362 of SEQ ID NO: 318525
uccucagauuagucaugau

SEQ ID NO: 425610 - RNA, 19 nt, Artificial Sequence
  Description of Artificial Sequence: Synthetic oligonucleotide
  Antisense Strand to SEQ ID NO: 425609
aucaugacuaaucugagga

SEQ ID NO: 425611 - RNA, 19 nt, Artificial Sequence
  Description of Artificial Sequence: Synthetic oligonucleotide
  Sense Strand Starting at position 1362 of SEQ ID NO: 318541
gauucagugugggaagaga

SEQ ID NO: 425612 - RNA, 19 nt, Artificial Sequence
  Description of Artificial Sequence: Synthetic oligonucleotide
  Antisense Strand to SEQ ID NO: 425611
ucucuucccacacugaauc

SEQ ID NO: 425613 - RNA, 19 nt, Artificial Sequence
  Description of Artificial Sequence: Synthetic oligonucleotide
  Sense Strand Starting at position 1362 of SEQ ID NO: 318568
guuugaaugccaggauaug

SEQ ID NO: 425614 - RNA, 19 nt, Artificial Sequence
  Description of Artificial Sequence: Synthetic oligonucleotide
  Antisense Strand to SEQ ID NO: 425613
cauauccuggcauucaaac

SEQ ID NO: 425615 - RNA, 19 nt, Artificial Sequence
  Description of Artificial Sequence: Synthetic oligonucleotide
  Sense Strand Starting at position 1362 of SEQ ID NO: 318754
gcauacugucccuucgcua

SEQ ID NO: 425616 - RNA, 19 nt, Artificial Sequence
  Description of Artificial Sequence: Synthetic oligonucleotide
  Antisense Strand to SEQ ID NO: 425615
uagcgaagggacaguaugc

SEQ ID NO: 425617 - RNA, 19 nt, Artificial Sequence
  Description of Artificial Sequence: Synthetic oligonucleotide
  Sense Strand Starting at position 1362 of SEQ ID NO: 318784
augaacauuuaccaugagu

SEQ ID NO: 425618 - RNA, 19 nt, Artificial Sequence
  Description of Artificial Sequence: Synthetic oligonucleotide
  Antisense Strand to SEQ ID NO: 425617
acucaugguaaauguucau

SEQ ID NO: 425619 - RNA, 19 nt, Artificial Sequence
  Description of Artificial Sequence: Synthetic oligonucleotide
  Sense Strand Starting at position 1362 of SEQ ID NO: 319127
cauuguuagucauuagaga

SEQ ID NO: 425620 - RNA, 19 nt, Artificial Sequence
  Description of Artificial Sequence: Synthetic oligonucleotide
  Antisense Strand to SEQ ID NO: 425619
ucucuaaugacuaacaaug

SEQ ID NO: 425621 - RNA, 19 nt, Artificial Sequence
  Description of Artificial Sequence: Synthetic oligonucleotide
  Sense Strand Starting at position 1362 of SEQ ID NO: 319217
aguguaggcaaagauguau

SEQ ID NO: 425622 - RNA, 19 nt, Artificial Sequence
  Description of Artificial Sequence: Synthetic oligonucleotide
  Antisense Strand to SEQ ID NO: 425621
auacaucuuugccuacacu

SEQ ID NO: 425623 - RNA, 19 nt, Artificial Sequence
  Description of Artificial Sequence: Synthetic oligonucleotide
  Sense Strand Starting at position 1363 of SEQ ID NO: 315296
gugacaucacugcagguaa

SEQ ID NO: 425624 - RNA, 19 nt, Artificial Sequence
  Description of Artificial Sequence: Synthetic oligonucleotide
  Antisense Strand to SEQ ID NO: 425623
uuaccugcagugaugucac

SEQ ID NO: 425625 - RNA, 19 nt, Artificial Sequence
  Description of Artificial Sequence: Synthetic oligonucleotide
  Sense Strand Starting at position 1363 of SEQ ID NO: 315298
gacaucacugcagguaaua

SEQ ID NO: 425626 - RNA, 19 nt, Artificial Sequence
  Description of Artificial Sequence: Synthetic oligonucleotide
  Antisense Strand to SEQ ID NO: 425625
uauuaccugcagugauguc

SEQ ID NO: 425627 - RNA, 19 nt, Artificial Sequence
  Description of Artificial Sequence: Synthetic oligonucleotide
  Sense Strand Starting at position 1363 of SEQ ID NO: 315386
ccuugaaaggcacaaguua

SEQ ID NO: 425628 - RNA, 19 nt, Artificial Sequence
  Description of Artificial Sequence: Synthetic oligonucleotide
  Antisense Strand to SEQ ID NO: 425627
uaacuugugccuuucaagg

SEQ ID NO: 425629 - RNA, 19 nt, Artificial Sequence
  Description of Artificial Sequence: Synthetic oligonucleotide
  Sense Strand Starting at position 1363 of SEQ ID NO: 315728
gggaauauuucucauucua

SEQ ID NO: 425630 - RNA, 19 nt, Artificial Sequence
  Description of Artificial Sequence: Synthetic oligonucleotide
  Antisense Strand to SEQ ID NO: 425629
uagaaugagaaauauuccc

SEQ ID NO: 425631 - RNA, 19 nt, Artificial Sequence
  Description of Artificial Sequence: Synthetic oligonucleotide
  Sense Strand Starting at position 1363 of SEQ ID NO: 315896
accgcagaguugguuuaau

SEQ ID NO: 425632 - RNA, 19 nt, Artificial Sequence
  Description of Artificial Sequence: Synthetic oligonucleotide
  Antisense Strand to SEQ ID NO: 425631
auuaaaccaacucugcggu

SEQ ID NO: 425633 - RNA, 19 nt, Artificial Sequence
  Description of Artificial Sequence: Synthetic oligonucleotide
  Sense Strand Starting at position 1363 of SEQ ID NO: 316348
gagaaugccugauaaagga

SEQ ID NO: 425634 - RNA, 19 nt, Artificial Sequence
  Description of Artificial Sequence: Synthetic oligonucleotide
  Antisense Strand to SEQ ID NO: 425633
uccuuuaucaggcauucuc

SEQ ID NO: 425635 - RNA, 19 nt, Artificial Sequence
  Description of Artificial Sequence: Synthetic oligonucleotide
  Sense Strand Starting at position 1363 of SEQ ID NO: 316426
gugugaaagauugaaugcu

SEQ ID NO: 425636 - RNA, 19 nt, Artificial Sequence
  Description of Artificial Sequence: Synthetic oligonucleotide
  Antisense Strand to SEQ ID NO: 425635
agcauucaaucuuucacac

SEQ ID NO: 425637 - RNA, 19 nt, Artificial Sequence
  Description of Artificial Sequence: Synthetic oligonucleotide
  Sense Strand Starting at position 1363 of SEQ ID NO: 316661
agaaguaaguacuucucca

SEQ ID NO: 425638 - RNA, 19 nt, Artificial Sequence
  Description of Artificial Sequence: Synthetic oligonucleotide
  Antisense Strand to SEQ ID NO: 425637
uggagaaguacuuacuucu

SEQ ID NO: 425639 - RNA, 19 nt, Artificial Sequence
  Description of Artificial Sequence: Synthetic oligonucleotide
  Sense Strand Starting at position 1363 of SEQ ID NO: 316704
gucuuuauuggauguaaua

SEQ ID NO: 425640 - RNA, 19 nt, Artificial Sequence
  Description of Artificial Sequence: Synthetic oligonucleotide
  Antisense Strand to SEQ ID NO: 425639
uauuacauccaauaaagac

SEQ ID NO: 425641 - RNA, 19 nt, Artificial Sequence
  Description of Artificial Sequence: Synthetic oligonucleotide
  Sense Strand Starting at position 1363 of SEQ ID NO: 316813
gucuuaauuugggcauucu

SEQ ID NO: 425642 - RNA, 19 nt, Artificial Sequence
  Description of Artificial Sequence: Synthetic oligonucleotide
  Antisense Strand to SEQ ID NO: 425641
agaaugcccaaauuaagac

SEQ ID NO: 425643 - RNA, 19 nt, Artificial Sequence
  Description of Artificial Sequence: Synthetic oligonucleotide
  Sense Strand Starting at position 1363 of SEQ ID NO: 316897
ucugaaugcagaggugaca

SEQ ID NO: 425644 - RNA, 19 nt, Artificial Sequence
  Description of Artificial Sequence: Synthetic oligonucleotide
  Antisense Strand to SEQ ID NO: 425643
ugucaccucugcauucaga

SEQ ID NO: 425645 - RNA, 19 nt, Artificial Sequence
  Description of Artificial Sequence: Synthetic oligonucleotide
  Sense Strand Starting at position 1363 of SEQ ID NO: 317409
gucccuacugccugagaca

SEQ ID NO: 425646 - RNA, 19 nt, Artificial Sequence
  Description of Artificial Sequence: Synthetic oligonucleotide
  Antisense Strand to SEQ ID NO: 425645
ugucucaggcaguagggac

SEQ ID NO: 425647 - RNA, 19 nt, Artificial Sequence
  Description of Artificial Sequence: Synthetic oligonucleotide
  Sense Strand Starting at position 1363 of SEQ ID NO: 317410
ucccuacugccugagacaa

SEQ ID NO: 425648 - RNA, 19 nt, Artificial Sequence
  Description of Artificial Sequence: Synthetic oligonucleotide
  Antisense Strand to SEQ ID NO: 425647
uugucucaggcaguaggga

SEQ ID NO: 425649 - RNA, 19 nt, Artificial Sequence
  Description of Artificial Sequence: Synthetic oligonucleotide
  Sense Strand Starting at position 1363 of SEQ ID NO: 317517
gccacagaaugguuacuau

SEQ ID NO: 425650 - RNA, 19 nt, Artificial Sequence
  Description of Artificial Sequence: Synthetic oligonucleotide
  Antisense Strand to SEQ ID NO: 425649
auaguaaccauucuguggc

SEQ ID NO: 425651 - RNA, 19 nt, Artificial Sequence
  Description of Artificial Sequence: Synthetic oligonucleotide
  Sense Strand Starting at position 1363 of SEQ ID NO: 317527
gguuacuauccuggguauu

SEQ ID NO: 425652 - RNA, 19 nt, Artificial Sequence
  Description of Artificial Sequence: Synthetic oligonucleotide
  Antisense Strand to SEQ ID NO: 425651
aauacccaggauaguaacc

SEQ ID NO: 425653 - RNA, 19 nt, Artificial Sequence
  Description of Artificial Sequence: Synthetic oligonucleotide
  Sense Strand Starting at position 1363 of SEQ ID NO: 317528
guuacuauccuggguauua

SEQ ID NO: 425654 - RNA, 19 nt, Artificial Sequence
  Description of Artificial Sequence: Synthetic oligonucleotide
  Antisense Strand to SEQ ID NO: 425653
uaauacccaggauaguaac

SEQ ID NO: 425655 - RNA, 19 nt, Artificial Sequence
  Description of Artificial Sequence: Synthetic oligonucleotide
  Sense Strand Starting at position 1363 of SEQ ID NO: 317529
uuacuauccuggguauuau

SEQ ID NO: 425656 - RNA, 19 nt, Artificial Sequence
  Description of Artificial Sequence: Synthetic oligonucleotide
  Antisense Strand to SEQ ID NO: 425655
auaauacccaggauaguaa

SEQ ID NO: 425657 - RNA, 19 nt, Artificial Sequence
  Description of Artificial Sequence: Synthetic oligonucleotide
  Sense Strand Starting at position 1363 of SEQ ID NO: 317538
uggguauuauucgugguua

SEQ ID NO: 425658 - RNA, 19 nt, Artificial Sequence
  Description of Artificial Sequence: Synthetic oligonucleotide
  Antisense Strand to SEQ ID NO: 425657
uaaccacgaauaauaccca

SEQ ID NO: 425659 - RNA, 19 nt, Artificial Sequence
  Description of Artificial Sequence: Synthetic oligonucleotide
  Sense Strand Starting at position 1363 of SEQ ID NO: 317540
gguauuauucgugguuauc

SEQ ID NO: 425660 - RNA, 19 nt, Artificial Sequence
  Description of Artificial Sequence: Synthetic oligonucleotide
  Antisense Strand to SEQ ID NO: 425659
gauaaccacgaauaauacc

SEQ ID NO: 425661 - RNA, 19 nt, Artificial Sequence
  Description of Artificial Sequence: Synthetic oligonucleotide
  Sense Strand Starting at position 1363 of SEQ ID NO: 317576
gguguccuuccagauaaug

SEQ ID NO: 425662 - RNA, 19 nt, Artificial Sequence
  Description of Artificial Sequence: Synthetic oligonucleotide
  Antisense Strand to SEQ ID NO: 425661
cauuaucuggaaggacacc

SEQ ID NO: 425663 - RNA, 19 nt, Artificial Sequence
  Description of Artificial Sequence: Synthetic oligonucleotide
  Sense Strand Starting at position 1363 of SEQ ID NO: 317700
gccgaauguguauggacua

SEQ ID NO: 425664 - RNA, 19 nt, Artificial Sequence
  Description of Artificial Sequence: Synthetic oligonucleotide
  Antisense Strand to SEQ ID NO: 425663
uaguccauacacauucggc

SEQ ID NO: 425665 - RNA, 19 nt, Artificial Sequence
  Description of Artificial Sequence: Synthetic oligonucleotide
  Sense Strand Starting at position 1363 of SEQ ID NO: 317784
cgguuuccuugucuauuaa

SEQ ID NO: 425666 - RNA, 19 nt, Artificial Sequence
  Description of Artificial Sequence: Synthetic oligonucleotide
  Antisense Strand to SEQ ID NO: 425665
uuaauagacaaggaaaccg

SEQ ID NO: 425667 - RNA, 19 nt, Artificial Sequence
  Description of Artificial Sequence: Synthetic oligonucleotide
  Sense Strand Starting at position 1363 of SEQ ID NO: 317785
gguuuccuugucuauuaaa

SEQ ID NO: 425668 - RNA, 19 nt, Artificial Sequence
  Description of Artificial Sequence: Synthetic oligonucleotide
  Antisense Strand to SEQ ID NO: 425667
uuuaauagacaaggaaacc

SEQ ID NO: 425669 - RNA, 19 nt, Artificial Sequence
  Description of Artificial Sequence: Synthetic oligonucleotide
  Sense Strand Starting at position 1363 of SEQ ID NO: 317805
ggguauuaugaugguggua

SEQ ID NO: 425670 - RNA, 19 nt, Artificial Sequence
  Description of Artificial Sequence: Synthetic oligonucleotide
  Antisense Strand to SEQ ID NO: 425669
uaccaccaucauaauaccc

SEQ ID NO: 425671 - RNA, 19 nt, Artificial Sequence
  Description of Artificial Sequence: Synthetic oligonucleotide
  Sense Strand Starting at position 1363 of SEQ ID NO: 317904
auaguauguacucgugagu

SEQ ID NO: 425672 - RNA, 19 nt, Artificial Sequence
  Description of Artificial Sequence: Synthetic oligonucleotide
  Antisense Strand to SEQ ID NO: 425671
acucacgaguacauacuau

SEQ ID NO: 425673 - RNA, 19 nt, Artificial Sequence
  Description of Artificial Sequence: Synthetic oligonucleotide
  Sense Strand Starting at position 1363 of SEQ ID NO: 317907
guauguacucgugaguuug

SEQ ID NO: 425674 - RNA, 19 nt, Artificial Sequence
  Description of Artificial Sequence: Synthetic oligonucleotide
  Antisense Strand to SEQ ID NO: 425673
caaacucacgaguacauac

SEQ ID NO: 425675 - RNA, 19 nt, Artificial Sequence
  Description of Artificial Sequence: Synthetic oligonucleotide
  Sense Strand Starting at position 1363 of SEQ ID NO: 317994
gcgugcuuuagggaaauag

SEQ ID NO: 425676 - RNA, 19 nt, Artificial Sequence
  Description of Artificial Sequence: Synthetic oligonucleotide
  Antisense Strand to SEQ ID NO: 425675
cuauuucccuaaagcacgc

SEQ ID NO: 425677 - RNA, 19 nt, Artificial Sequence
  Description of Artificial Sequence: Synthetic oligonucleotide
  Sense Strand Starting at position 1363 of SEQ ID NO: 318180
ugccauggagaguauauua

SEQ ID NO: 425678 - RNA, 19 nt, Artificial Sequence
  Description of Artificial Sequence: Synthetic oligonucleotide
  Antisense Strand to SEQ ID NO: 425677
uaauauacucuccauggca

SEQ ID NO: 425679 - RNA, 19 nt, Artificial Sequence
  Description of Artificial Sequence: Synthetic oligonucleotide
  Sense Strand Starting at position 1363 of SEQ ID NO: 318200
guaucuacugcuggauaau

SEQ ID NO: 425680 - RNA, 19 nt, Artificial Sequence
  Description of Artificial Sequence: Synthetic oligonucleotide
  Antisense Strand to SEQ ID NO: 425679
auuauccagcaguagauac

SEQ ID NO: 425681 - RNA, 19 nt, Artificial Sequence
  Description of Artificial Sequence: Synthetic oligonucleotide
  Sense Strand Starting at position 1363 of SEQ ID NO: 318362
gcugaagucaucugaagcu

SEQ ID NO: 425682 - RNA, 19 nt, Artificial Sequence
  Description of Artificial Sequence: Synthetic oligonucleotide
  Antisense Strand to SEQ ID NO: 425681
agcuucagaugacuucagc

SEQ ID NO: 425683 - RNA, 19 nt, Artificial Sequence
  Description of Artificial Sequence: Synthetic oligonucleotide
  Sense Strand Starting at position 1363 of SEQ ID NO: 318369
ucaucugaagcuugacuga

SEQ ID NO: 425684 - RNA, 19 nt, Artificial Sequence
  Description of Artificial Sequence: Synthetic oligonucleotide
  Antisense Strand to SEQ ID NO: 425683
ucagucaagcuucagauga

SEQ ID NO: 425685 - RNA, 19 nt, Artificial Sequence
  Description of Artificial Sequence: Synthetic oligonucleotide
  Sense Strand Starting at position 1363 of SEQ ID NO: 318372
ucugaagcuugacugaguu

SEQ ID NO: 425686 - RNA, 19 nt, Artificial Sequence
  Description of Artificial Sequence: Synthetic oligonucleotide
  Antisense Strand to SEQ ID NO: 425685
aacucagucaagcuucaga

SEQ ID NO: 425687 - RNA, 19 nt, Artificial Sequence
  Description of Artificial Sequence: Synthetic oligonucleotide
  Sense Strand Starting at position 1363 of SEQ ID NO: 318406
caaggugguuuacucacau

SEQ ID NO: 425688 - RNA, 19 nt, Artificial Sequence
  Description of Artificial Sequence: Synthetic oligonucleotide
  Antisense Strand to SEQ ID NO: 425687
augugaguaaaccaccuug

SEQ ID NO: 425689 - RNA, 19 nt, Artificial Sequence
  Description of Artificial Sequence: Synthetic oligonucleotide
  Sense Strand Starting at position 1363 of SEQ ID NO: 318496
gcauguagcuuucucccaa

SEQ ID NO: 425690 - RNA, 19 nt, Artificial Sequence
  Description of Artificial Sequence: Synthetic oligonucleotide
  Antisense Strand to SEQ ID NO: 425689
uugggagaaagcuacaugc

SEQ ID NO: 425691 - RNA, 19 nt, Artificial Sequence
  Description of Artificial Sequence: Synthetic oligonucleotide
  Sense Strand Starting at position 1363 of SEQ ID NO: 318597
uccucagauuagucaugau

SEQ ID NO: 425692 - RNA, 19 nt, Artificial Sequence
  Description of Artificial Sequence: Synthetic oligonucleotide
  Antisense Strand to SEQ ID NO: 425691
aucaugacuaaucugagga

SEQ ID NO: 425693 - RNA, 19 nt, Artificial Sequence
  Description of Artificial Sequence: Synthetic oligonucleotide
  Sense Strand Starting at position 1363 of SEQ ID NO: 318613
gauucagugugggaagaga

SEQ ID NO: 425694 - RNA, 19 nt, Artificial Sequence
  Description of Artificial Sequence: Synthetic oligonucleotide
  Antisense Strand to SEQ ID NO: 425693
ucucuucccacacugaauc

SEQ ID NO: 425695 - RNA, 19 nt, Artificial Sequence
  Description of Artificial Sequence: Synthetic oligonucleotide
  Sense Strand Starting at position 1363 of SEQ ID NO: 318640
guuugaaugccaggauaug

SEQ ID NO: 425696 - RNA, 19 nt, Artificial Sequence
  Description of Artificial Sequence: Synthetic oligonucleotide
  Antisense Strand to SEQ ID NO: 425695
cauauccuggcauucaaac

SEQ ID NO: 425697 - RNA, 19 nt, Artificial Sequence
  Description of Artificial Sequence: Synthetic oligonucleotide
  Sense Strand Starting at position 1363 of SEQ ID NO: 318826
gcauacugucccuucgcua

SEQ ID NO: 425698 - RNA, 19 nt, Artificial Sequence
  Description of Artificial Sequence: Synthetic oligonucleotide
  Antisense Strand to SEQ ID NO: 425697
uagcgaagggacaguaugc

SEQ ID NO: 425699 - RNA, 19 nt, Artificial Sequence
  Description of Artificial Sequence: Synthetic oligonucleotide
  Sense Strand Starting at position 1363 of SEQ ID NO: 318856
augaacauuuaccaugagu

SEQ ID NO: 425700 - RNA, 19 nt, Artificial Sequence
  Description of Artificial Sequence: Synthetic oligonucleotide
  Antisense Strand to SEQ ID NO: 425699
acucaugguaaauguucau

SEQ ID NO: 425701 - RNA, 19 nt, Artificial Sequence
  Description of Artificial Sequence: Synthetic oligonucleotide
  Sense Strand Starting at position 1363 of SEQ ID NO: 319199
cauuguuagucauuagaga

SEQ ID NO: 425702 - RNA, 19 nt, Artificial Sequence
  Description of Artificial Sequence: Synthetic oligonucleotide
  Antisense Strand to SEQ ID NO: 425701
ucucuaaugacuaacaaug

SEQ ID NO: 425703 - RNA, 19 nt, Artificial Sequence
  Description of Artificial Sequence: Synthetic oligonucleotide
  Sense Strand Starting at position 1364 of SEQ ID NO: 315385
gugccuucccaaugaacca

SEQ ID NO: 425704 - RNA, 19 nt, Artificial Sequence
  Description of Artificial Sequence: Synthetic oligonucleotide
  Antisense Strand to SEQ ID NO: 425703
ugguucauugggaaggcac

SEQ ID NO: 425705 - RNA, 19 nt, Artificial Sequence
  Description of Artificial Sequence: Synthetic oligonucleotide
  Sense Strand Starting at position 1364 of SEQ ID NO: 315573
auacuagucucucugggau

SEQ ID NO: 425706 - RNA, 19 nt, Artificial Sequence
  Description of Artificial Sequence: Synthetic oligonucleotide
  Antisense Strand to SEQ ID NO: 425705
aucccagagagacuaguau

SEQ ID NO: 425707 - RNA, 19 nt, Artificial Sequence
  Description of Artificial Sequence: Synthetic oligonucleotide
  Sense Strand Starting at position 1364 of SEQ ID NO: 315576
cuagucucucugggauaca

SEQ ID NO: 425708 - RNA, 19 nt, Artificial Sequence
  Description of Artificial Sequence: Synthetic oligonucleotide
  Antisense Strand to SEQ ID NO: 425707
uguaucccagagagacuag

SEQ ID NO: 425709 - RNA, 19 nt, Artificial Sequence
  Description of Artificial Sequence: Synthetic oligonucleotide
  Sense Strand Starting at position 1364 of SEQ ID NO: 315609
ugggcaaucucuccaauaa

SEQ ID NO: 425710 - RNA, 19 nt, Artificial Sequence
  Description of Artificial Sequence: Synthetic oligonucleotide
  Antisense Strand to SEQ ID NO: 425709
uuauuggagagauugccca

SEQ ID NO: 425711 - RNA, 19 nt, Artificial Sequence
  Description of Artificial Sequence: Synthetic oligonucleotide
  Sense Strand Starting at position 1364 of SEQ ID NO: 315997
gaaagaauuucuugguaua

SEQ ID NO: 425712 - RNA, 19 nt, Artificial Sequence
  Description of Artificial Sequence: Synthetic oligonucleotide
  Antisense Strand to SEQ ID NO: 425711
uauaccaagaaauucuuuc

SEQ ID NO: 425713 - RNA, 19 nt, Artificial Sequence
  Description of Artificial Sequence: Synthetic oligonucleotide
  Sense Strand Starting at position 1364 of SEQ ID NO: 316000
agaauuucuugguauaggu

SEQ ID NO: 425714 - RNA, 19 nt, Artificial Sequence
  Description of Artificial Sequence: Synthetic oligonucleotide
  Antisense Strand to SEQ ID NO: 425713
accuauaccaagaaauucu

SEQ ID NO: 425715 - RNA, 19 nt, Artificial Sequence
  Description of Artificial Sequence: Synthetic oligonucleotide
  Sense Strand Starting at position 1364 of SEQ ID NO: 316103
cugccauagcccuggagau

SEQ ID NO: 425716 - RNA, 19 nt, Artificial Sequence
  Description of Artificial Sequence: Synthetic oligonucleotide
  Antisense Strand to SEQ ID NO: 425715
aucuccagggcuauggcag

SEQ ID NO: 425717 - RNA, 19 nt, Artificial Sequence
  Description of Artificial Sequence: Synthetic oligonucleotide
  Sense Strand Starting at position 1364 of SEQ ID NO: 316104
ugccauagcccuggagaua

SEQ ID NO: 425718 - RNA, 19 nt, Artificial Sequence
  Description of Artificial Sequence: Synthetic oligonucleotide
  Antisense Strand to SEQ ID NO: 425717
uaucuccagggcuauggca

SEQ ID NO: 425719 - RNA, 19 nt, Artificial Sequence
  Description of Artificial Sequence: Synthetic oligonucleotide
  Sense Strand Starting at position 1364 of SEQ ID NO: 316455
cucuaauuguucucacgcu

SEQ ID NO: 425720 - RNA, 19 nt, Artificial Sequence
  Description of Artificial Sequence: Synthetic oligonucleotide
  Antisense Strand to SEQ ID NO: 425719
agcgugagaacaauuagag

SEQ ID NO: 425721 - RNA, 19 nt, Artificial Sequence
  Description of Artificial Sequence: Synthetic oligonucleotide
  Sense Strand Starting at position 1364 of SEQ ID NO: 316492
augaauuguucugccuagu

SEQ ID NO: 425722 - RNA, 19 nt, Artificial Sequence
  Description of Artificial Sequence: Synthetic oligonucleotide
  Antisense Strand to SEQ ID NO: 425721
acuaggcagaacaauucau

SEQ ID NO: 425723 - RNA, 19 nt, Artificial Sequence
  Description of Artificial Sequence: Synthetic oligonucleotide
  Sense Strand Starting at position 1364 of SEQ ID NO: 316560
agcccauucguacggguaa

SEQ ID NO: 425724 - RNA, 19 nt, Artificial Sequence
  Description of Artificial Sequence: Synthetic oligonucleotide
  Antisense Strand to SEQ ID NO: 425723
uuacccguacgaaugggcu

SEQ ID NO: 425725 - RNA, 19 nt, Artificial Sequence
  Description of Artificial Sequence: Synthetic oligonucleotide
  Sense Strand Starting at position 1364 of SEQ ID NO: 316562
cccauucguacggguaaac

SEQ ID NO: 425726 - RNA, 19 nt, Artificial Sequence
  Description of Artificial Sequence: Synthetic oligonucleotide
  Antisense Strand to SEQ ID NO: 425725
guuuacccguacgaauggg

SEQ ID NO: 425727 - RNA, 19 nt, Artificial Sequence
  Description of Artificial Sequence: Synthetic oligonucleotide
  Sense Strand Starting at position 1364 of SEQ ID NO: 316608
uguguugggucucuacaaa

SEQ ID NO: 425728 - RNA, 19 nt, Artificial Sequence
  Description of Artificial Sequence: Synthetic oligonucleotide
  Antisense Strand to SEQ ID NO: 425727
uuuguagagacccaacaca

SEQ ID NO: 425729 - RNA, 19 nt, Artificial Sequence
  Description of Artificial Sequence: Synthetic oligonucleotide
  Sense Strand Starting at position 1364 of SEQ ID NO: 316627
cguaaagagucuuuacaga

SEQ ID NO: 425730 - RNA, 19 nt, Artificial Sequence
  Description of Artificial Sequence: Synthetic oligonucleotide
  Antisense Strand to SEQ ID NO: 425729
ucuguaaagacucuuuacg

SEQ ID NO: 425731 - RNA, 19 nt, Artificial Sequence
  Description of Artificial Sequence: Synthetic oligonucleotide
  Sense Strand Starting at position 1364 of SEQ ID NO: 316644
gaaugcuuacagggacgau

SEQ ID NO: 425732 - RNA, 19 nt, Artificial Sequence
  Description of Artificial Sequence: Synthetic oligonucleotide
  Antisense Strand to SEQ ID NO: 425731
aucgucccuguaagcauuc

SEQ ID NO: 425733 - RNA, 19 nt, Artificial Sequence
  Description of Artificial Sequence: Synthetic oligonucleotide
  Sense Strand Starting at position 1364 of SEQ ID NO: 316750
gggugaugcugaccggaga

SEQ ID NO: 425734 - RNA, 19 nt, Artificial Sequence
  Description of Artificial Sequence: Synthetic oligonucleotide
  Antisense Strand to SEQ ID NO: 425733
ucuccggucagcaucaccc

SEQ ID NO: 425735 - RNA, 19 nt, Artificial Sequence
  Description of Artificial Sequence: Synthetic oligonucleotide
  Sense Strand Starting at position 1364 of SEQ ID NO: 316771
ccacccaaccgugaucuua

SEQ ID NO: 425736 - RNA, 19 nt, Artificial Sequence
  Description of Artificial Sequence: Synthetic oligonucleotide
  Antisense Strand to SEQ ID NO: 425735
uaagaucacgguugggugg

SEQ ID NO: 425737 - RNA, 19 nt, Artificial Sequence
  Description of Artificial Sequence: Synthetic oligonucleotide
  Sense Strand Starting at position 1364 of SEQ ID NO: 317366
uggagugucacggacugau

SEQ ID NO: 425738 - RNA, 19 nt, Artificial Sequence
  Description of Artificial Sequence: Synthetic oligonucleotide
  Antisense Strand to SEQ ID NO: 425737
aucaguccgugacacucca

SEQ ID NO: 425739 - RNA, 19 nt, Artificial Sequence
  Description of Artificial Sequence: Synthetic oligonucleotide
  Sense Strand Starting at position 1364 of SEQ ID NO: 317525
cuuugucaucucuaagagg

SEQ ID NO: 425740 - RNA, 19 nt, Artificial Sequence
  Description of Artificial Sequence: Synthetic oligonucleotide
  Antisense Strand to SEQ ID NO: 425739
ccucuuagagaugacaaag

SEQ ID NO: 425741 - RNA, 19 nt, Artificial Sequence
  Description of Artificial Sequence: Synthetic oligonucleotide
  Sense Strand Starting at position 1364 of SEQ ID NO: 317636
gaccuagaugugcguagaa

SEQ ID NO: 425742 - RNA, 19 nt, Artificial Sequence
  Description of Artificial Sequence: Synthetic oligonucleotide
  Antisense Strand to SEQ ID NO: 425741
uucuacgcacaucuagguc

SEQ ID NO: 425743 - RNA, 19 nt, Artificial Sequence
  Description of Artificial Sequence: Synthetic oligonucleotide
  Sense Strand Starting at position 1364 of SEQ ID NO: 317749
gaucuuguccuguguugac

SEQ ID NO: 425744 - RNA, 19 nt, Artificial Sequence
  Description of Artificial Sequence: Synthetic oligonucleotide
  Antisense Strand to SEQ ID NO: 425743
gucaacacaggacaagauc

SEQ ID NO: 425745 - RNA, 19 nt, Artificial Sequence
  Description of Artificial Sequence: Synthetic oligonucleotide
  Sense Strand Starting at position 1364 of SEQ ID NO: 317937
auggucuguucuguuaguu

SEQ ID NO: 425746 - RNA, 19 nt, Artificial Sequence
  Description of Artificial Sequence: Synthetic oligonucleotide
  Antisense Strand to SEQ ID NO: 425745
aacuaacagaacagaccau

SEQ ID NO: 425747 - RNA, 19 nt, Artificial Sequence
  Description of Artificial Sequence: Synthetic oligonucleotide
  Sense Strand Starting at position 1364 of SEQ ID NO: 318102
caguacacguacucugaaa

SEQ ID NO: 425748 - RNA, 19 nt, Artificial Sequence
  Description of Artificial Sequence: Synthetic oligonucleotide
  Antisense Strand to SEQ ID NO: 425747
uuucagaguacguguacug

SEQ ID NO: 425749 - RNA, 19 nt, Artificial Sequence
  Description of Artificial Sequence: Synthetic oligonucleotide
  Sense Strand Starting at position 1364 of SEQ ID NO: 318159
acaugagccagucagugau

SEQ ID NO: 425750 - RNA, 19 nt, Artificial Sequence
  Description of Artificial Sequence: Synthetic oligonucleotide
  Antisense Strand to SEQ ID NO: 425749
aucacugacuggcucaugu

SEQ ID NO: 425751 - RNA, 19 nt, Artificial Sequence
  Description of Artificial Sequence: Synthetic oligonucleotide
  Sense Strand Starting at position 1364 of SEQ ID NO: 318161
augagccagucagugauaa

SEQ ID NO: 425752 - RNA, 19 nt, Artificial Sequence
  Description of Artificial Sequence: Synthetic oligonucleotide
  Antisense Strand to SEQ ID NO: 425751
uuaucacugacuggcucau

SEQ ID NO: 425753 - RNA, 19 nt, Artificial Sequence
  Description of Artificial Sequence: Synthetic oligonucleotide
  Sense Strand Starting at position 1364 of SEQ ID NO: 318162
ugagccagucagugauaaa

SEQ ID NO: 425754 - RNA, 19 nt, Artificial Sequence
  Description of Artificial Sequence: Synthetic oligonucleotide
  Antisense Strand to SEQ ID NO: 425753
uuuaucacugacuggcuca

SEQ ID NO: 425755 - RNA, 19 nt, Artificial Sequence
  Description of Artificial Sequence: Synthetic oligonucleotide
  Sense Strand Starting at position 1364 of SEQ ID NO: 318224
gcaaguaccucacuacugu

SEQ ID NO: 425756 - RNA, 19 nt, Artificial Sequence
  Description of Artificial Sequence: Synthetic oligonucleotide
  Antisense Strand to SEQ ID NO: 425755
acaguagugagguacuugc

SEQ ID NO: 425757 - RNA, 19 nt, Artificial Sequence
  Description of Artificial Sequence: Synthetic oligonucleotide
  Sense Strand Starting at position 1364 of SEQ ID NO: 318259
aggagccuuucuccaguau

SEQ ID NO: 425758 - RNA, 19 nt, Artificial Sequence
  Description of Artificial Sequence: Synthetic oligonucleotide
  Antisense Strand to SEQ ID NO: 425757
auacuggagaaaggcuccu

SEQ ID NO: 425759 - RNA, 19 nt, Artificial Sequence
  Description of Artificial Sequence: Synthetic oligonucleotide
  Sense Strand Starting at position 1364 of SEQ ID NO: 318274
guaucaaagugguugcuaa

SEQ ID NO: 425760 - RNA, 19 nt, Artificial Sequence
  Description of Artificial Sequence: Synthetic oligonucleotide
  Antisense Strand to SEQ ID NO: 425759
uuagcaaccacuuugauac

SEQ ID NO: 425761 - RNA, 19 nt, Artificial Sequence
  Description of Artificial Sequence: Synthetic oligonucleotide
  Sense Strand Starting at position 1364 of SEQ ID NO: 318646
cuuuaaucacgcugauaac

SEQ ID NO: 425762 - RNA, 19 nt, Artificial Sequence
  Description of Artificial Sequence: Synthetic oligonucleotide
  Antisense Strand to SEQ ID NO: 425761
guuaucagcgugauuaaag

SEQ ID NO: 425763 - RNA, 19 nt, Artificial Sequence
  Description of Artificial Sequence: Synthetic oligonucleotide
  Sense Strand Starting at position 1364 of SEQ ID NO: 318647
uuuaaucacgcugauaacu

SEQ ID NO: 425764 - RNA, 19 nt, Artificial Sequence
  Description of Artificial Sequence: Synthetic oligonucleotide
  Antisense Strand to SEQ ID NO: 425763
aguuaucagcgugauuaaa

SEQ ID NO: 425765 - RNA, 19 nt, Artificial Sequence
  Description of Artificial Sequence: Synthetic oligonucleotide
  Sense Strand Starting at position 1364 of SEQ ID NO: 318656
gcugauaacuucuccugaa

SEQ ID NO: 425766 - RNA, 19 nt, Artificial Sequence
  Description of Artificial Sequence: Synthetic oligonucleotide
  Antisense Strand to SEQ ID NO: 425765
uucaggagaaguuaucagc

SEQ ID NO: 425767 - RNA, 19 nt, Artificial Sequence
  Description of Artificial Sequence: Synthetic oligonucleotide
  Sense Strand Starting at position 1364 of SEQ ID NO: 318708
gcauuuccaugcuauaaag

SEQ ID NO: 425768 - RNA, 19 nt, Artificial Sequence
  Description of Artificial Sequence: Synthetic oligonucleotide
  Antisense Strand to SEQ ID NO: 425767
cuuuauagcauggaaaugc

SEQ ID NO: 425769 - RNA, 19 nt, Artificial Sequence
  Description of Artificial Sequence: Synthetic oligonucleotide
  Sense Strand Starting at position 1364 of SEQ ID NO: 318727
gggaauuggucucccacca

SEQ ID NO: 425770 - RNA, 19 nt, Artificial Sequence
  Description of Artificial Sequence: Synthetic oligonucleotide
  Antisense Strand to SEQ ID NO: 425769
uggugggagaccaauuccc

SEQ ID NO: 425771 - RNA, 19 nt, Artificial Sequence
  Description of Artificial Sequence: Synthetic oligonucleotide
  Sense Strand Starting at position 1364 of SEQ ID NO: 318865
agaguaucuuagguaucua

SEQ ID NO: 425772 - RNA, 19 nt, Artificial Sequence
  Description of Artificial Sequence: Synthetic oligonucleotide
  Antisense Strand to SEQ ID NO: 425771
uagauaccuaagauacucu

SEQ ID NO: 425773 - RNA, 19 nt, Artificial Sequence
  Description of Artificial Sequence: Synthetic oligonucleotide
  Sense Strand Starting at position 1364 of SEQ ID NO: 318952
uucuaugaaucagugaaca

SEQ ID NO: 425774 - RNA, 19 nt, Artificial Sequence
  Description of Artificial Sequence: Synthetic oligonucleotide
  Antisense Strand to SEQ ID NO: 425773
uguucacugauucauagaa

SEQ ID NO: 425775 - RNA, 19 nt, Artificial Sequence
  Description of Artificial Sequence: Synthetic oligonucleotide
  Sense Strand Starting at position 1364 of SEQ ID NO: 319012
agguucuguggaugaggaa

SEQ ID NO: 425776 - RNA, 19 nt, Artificial Sequence
  Description of Artificial Sequence: Synthetic oligonucleotide
  Antisense Strand to SEQ ID NO: 425775
uuccucauccacagaaccu

SEQ ID NO: 425777 - RNA, 19 nt, Artificial Sequence
  Description of Artificial Sequence: Synthetic oligonucleotide
  Sense Strand Starting at position 1364 of SEQ ID NO: 319021
ggaugaggaauucgggagu

SEQ ID NO: 425778 - RNA, 19 nt, Artificial Sequence
  Description of Artificial Sequence: Synthetic oligonucleotide
  Antisense Strand to SEQ ID NO: 425777
acucccgaauuccucaucc

SEQ ID NO: 425779 - RNA, 19 nt, Artificial Sequence
  Description of Artificial Sequence: Synthetic oligonucleotide
  Sense Strand Starting at position 1364 of SEQ ID NO: 319182
cagcuauuagugugaaacu

SEQ ID NO: 425780 - RNA, 19 nt, Artificial Sequence
  Description of Artificial Sequence: Synthetic oligonucleotide
  Antisense Strand to SEQ ID NO: 425779
aguuucacacuaauagcug

SEQ ID NO: 425781 - RNA, 19 nt, Artificial Sequence
  Description of Artificial Sequence: Synthetic oligonucleotide
  Sense Strand Starting at position 1364 of SEQ ID NO: 319191
gugugaaacuucccuuccu

SEQ ID NO: 425782 - RNA, 19 nt, Artificial Sequence
  Description of Artificial Sequence: Synthetic oligonucleotide
  Antisense Strand to SEQ ID NO: 425781
aggaagggaaguuucacac

SEQ ID NO: 425783 - RNA, 19 nt, Artificial Sequence
  Description of Artificial Sequence: Synthetic oligonucleotide
  Sense Strand Starting at position 1365 of SEQ ID NO: 315500
gaaacagccuuagugaaag

SEQ ID NO: 425784 - RNA, 19 nt, Artificial Sequence
  Description of Artificial Sequence: Synthetic oligonucleotide
  Antisense Strand to SEQ ID NO: 425783
cuuucacuaaggcuguuuc

SEQ ID NO: 425785 - RNA, 19 nt, Artificial Sequence
  Description of Artificial Sequence: Synthetic oligonucleotide
  Sense Strand Starting at position 1365 of SEQ ID NO: 315511
agugaaaguuaagucaacu

SEQ ID NO: 425786 - RNA, 19 nt, Artificial Sequence
  Description of Artificial Sequence: Synthetic oligonucleotide
  Antisense Strand to SEQ ID NO: 425785
aguugacuuaacuuucacu

SEQ ID NO: 425787 - RNA, 19 nt, Artificial Sequence
  Description of Artificial Sequence: Synthetic oligonucleotide
  Sense Strand Starting at position 1365 of SEQ ID NO: 316359
uaaccaaaugucuaucgga

SEQ ID NO: 425788 - RNA, 19 nt, Artificial Sequence
  Description of Artificial Sequence: Synthetic oligonucleotide
  Antisense Strand to SEQ ID NO: 425787
uccgauagacauuugguua

SEQ ID NO: 425789 - RNA, 19 nt, Artificial Sequence
  Description of Artificial Sequence: Synthetic oligonucleotide
  Sense Strand Starting at position 1365 of SEQ ID NO: 316392
aauggugaugccuacucaa

SEQ ID NO: 425790 - RNA, 19 nt, Artificial Sequence
  Description of Artificial Sequence: Synthetic oligonucleotide
  Antisense Strand to SEQ ID NO: 425789
uugaguaggcaucaccauu

SEQ ID NO: 425791 - RNA, 19 nt, Artificial Sequence
  Description of Artificial Sequence: Synthetic oligonucleotide
  Sense Strand Starting at position 1365 of SEQ ID NO: 316395
ggugaugccuacucaagac

SEQ ID NO: 425792 - RNA, 19 nt, Artificial Sequence
  Description of Artificial Sequence: Synthetic oligonucleotide
  Antisense Strand to SEQ ID NO: 425791
gucuugaguaggcaucacc

SEQ ID NO: 425793 - RNA, 19 nt, Artificial Sequence
  Description of Artificial Sequence: Synthetic oligonucleotide
  Sense Strand Starting at position 1365 of SEQ ID NO: 316489
uuagcuuucuacucaagga

SEQ ID NO: 425794 - RNA, 19 nt, Artificial Sequence
  Description of Artificial Sequence: Synthetic oligonucleotide
  Antisense Strand to SEQ ID NO: 425793
uccuugaguagaaagcuaa

SEQ ID NO: 425795 - RNA, 19 nt, Artificial Sequence
  Description of Artificial Sequence: Synthetic oligonucleotide
  Sense Strand Starting at position 1365 of SEQ ID NO: 316496
ucuacucaaggaugucaua

SEQ ID NO: 425796 - RNA, 19 nt, Artificial Sequence
  Description of Artificial Sequence: Synthetic oligonucleotide
  Antisense Strand to SEQ ID NO: 425795
uaugacauccuugaguaga

SEQ ID NO: 425797 - RNA, 19 nt, Artificial Sequence
  Description of Artificial Sequence: Synthetic oligonucleotide
  Sense Strand Starting at position 1365 of SEQ ID NO: 316530
gucuucuuagcaggaagau

SEQ ID NO: 425798 - RNA, 19 nt, Artificial Sequence
  Description of Artificial Sequence: Synthetic oligonucleotide
  Antisense Strand to SEQ ID NO: 425797
aucuuccugcuaagaagac

SEQ ID NO: 425799 - RNA, 19 nt, Artificial Sequence
  Description of Artificial Sequence: Synthetic oligonucleotide
  Sense Strand Starting at position 1365 of SEQ ID NO: 316531
ucuucuuagcaggaagauu

SEQ ID NO: 425800 - RNA, 19 nt, Artificial Sequence
  Description of Artificial Sequence: Synthetic oligonucleotide
  Antisense Strand to SEQ ID NO: 425799
aaucuuccugcuaagaaga

SEQ ID NO: 425801 - RNA, 19 nt, Artificial Sequence
  Description of Artificial Sequence: Synthetic oligonucleotide
  Sense Strand Starting at position 1365 of SEQ ID NO: 316815
guaagacgucuuuacagua

SEQ ID NO: 425802 - RNA, 19 nt, Artificial Sequence
  Description of Artificial Sequence: Synthetic oligonucleotide
  Antisense Strand to SEQ ID NO: 425801
uacuguaaagacgucuuac

SEQ ID NO: 425803 - RNA, 19 nt, Artificial Sequence
  Description of Artificial Sequence: Synthetic oligonucleotide
  Sense Strand Starting at position 1365 of SEQ ID NO: 316820
acgucuuuacaguaaauaa

SEQ ID NO: 425804 - RNA, 19 nt, Artificial Sequence
  Description of Artificial Sequence: Synthetic oligonucleotide
  Antisense Strand to SEQ ID NO: 425803
uuauuuacuguaaagacgu

SEQ ID NO: 425805 - RNA, 19 nt, Artificial Sequence
  Description of Artificial Sequence: Synthetic oligonucleotide
  Sense Strand Starting at position 1365 of SEQ ID NO: 317002
aucacacggucacuaaaua

SEQ ID NO: 425806 - RNA, 19 nt, Artificial Sequence
  Description of Artificial Sequence: Synthetic oligonucleotide
  Antisense Strand to SEQ ID NO: 425805
uauuuagugaccgugugau

SEQ ID NO: 425807 - RNA, 19 nt, Artificial Sequence
  Description of Artificial Sequence: Synthetic oligonucleotide
  Sense Strand Starting at position 1365 of SEQ ID NO: 317359
ggcagaagucccugggacu

SEQ ID NO: 425808 - RNA, 19 nt, Artificial Sequence
  Description of Artificial Sequence: Synthetic oligonucleotide
  Antisense Strand to SEQ ID NO: 425807
agucccagggacuucugcc

SEQ ID NO: 425809 - RNA, 19 nt, Artificial Sequence
  Description of Artificial Sequence: Synthetic oligonucleotide
  Sense Strand Starting at position 1365 of SEQ ID NO: 317458
accaaagguuccguaaaga

SEQ ID NO: 425810 - RNA, 19 nt, Artificial Sequence
  Description of Artificial Sequence: Synthetic oligonucleotide
  Antisense Strand to SEQ ID NO: 425809
ucuuuacggaaccuuuggu

SEQ ID NO: 425811 - RNA, 19 nt, Artificial Sequence
  Description of Artificial Sequence: Synthetic oligonucleotide
  Sense Strand Starting at position 1365 of SEQ ID NO: 318494
cugcgagucguuguugagu

SEQ ID NO: 425812 - RNA, 19 nt, Artificial Sequence
  Description of Artificial Sequence: Synthetic oligonucleotide
  Antisense Strand to SEQ ID NO: 425811
acucaacaacgacucgcag

SEQ ID NO: 425813 - RNA, 19 nt, Artificial Sequence
  Description of Artificial Sequence: Synthetic oligonucleotide
  Sense Strand Starting at position 1365 of SEQ ID NO: 318520
gauuccuuggcucgagaaa

SEQ ID NO: 425814 - RNA, 19 nt, Artificial Sequence
  Description of Artificial Sequence: Synthetic oligonucleotide
  Antisense Strand to SEQ ID NO: 425813
uuucucgagccaaggaauc

SEQ ID NO: 425815 - RNA, 19 nt, Artificial Sequence
  Description of Artificial Sequence: Synthetic oligonucleotide
  Sense Strand Starting at position 1365 of SEQ ID NO: 318521
auuccuuggcucgagaaau

SEQ ID NO: 425816 - RNA, 19 nt, Artificial Sequence
  Description of Artificial Sequence: Synthetic oligonucleotide
  Antisense Strand to SEQ ID NO: 425815
auuucucgagccaaggaau

SEQ ID NO: 425817 - RNA, 19 nt, Artificial Sequence
  Description of Artificial Sequence: Synthetic oligonucleotide
  Sense Strand Starting at position 1365 of SEQ ID NO: 318564
gggacuggacucgacgauu

SEQ ID NO: 425818 - RNA, 19 nt, Artificial Sequence
  Description of Artificial Sequence: Synthetic oligonucleotide
  Antisense Strand to SEQ ID NO: 425817
aaucgucgaguccaguccc

SEQ ID NO: 425819 - RNA, 19 nt, Artificial Sequence
  Description of Artificial Sequence: Synthetic oligonucleotide
  Sense Strand Starting at position 1365 of SEQ ID NO: 318655
uugugaacaugguuccaua

SEQ ID NO: 425820 - RNA, 19 nt, Artificial Sequence
  Description of Artificial Sequence: Synthetic oligonucleotide
  Antisense Strand to SEQ ID NO: 425819
uauggaaccauguucacaa

SEQ ID NO: 425821 - RNA, 19 nt, Artificial Sequence
  Description of Artificial Sequence: Synthetic oligonucleotide
  Sense Strand Starting at position 1365 of SEQ ID NO: 318671
auaaaugaucucugugcaa

SEQ ID NO: 425822 - RNA, 19 nt, Artificial Sequence
  Description of Artificial Sequence: Synthetic oligonucleotide
  Antisense Strand to SEQ ID NO: 425821
uugcacagagaucauuuau

SEQ ID NO: 425823 - RNA, 19 nt, Artificial Sequence
  Description of Artificial Sequence: Synthetic oligonucleotide
  Sense Strand Starting at position 1365 of SEQ ID NO: 318718
uugacaaugaguugagguu

SEQ ID NO: 425824 - RNA, 19 nt, Artificial Sequence
  Description of Artificial Sequence: Synthetic oligonucleotide
  Antisense Strand to SEQ ID NO: 425823
aaccucaacucauugucaa

SEQ ID NO: 425825 - RNA, 19 nt, Artificial Sequence
  Description of Artificial Sequence: Synthetic oligonucleotide
  Sense Strand Starting at position 1365 of SEQ ID NO: 318719
ugacaaugaguugagguuu

SEQ ID NO: 425826 - RNA, 19 nt, Artificial Sequence
  Description of Artificial Sequence: Synthetic oligonucleotide
  Antisense Strand to SEQ ID NO: 425825
aaaccucaacucauuguca

SEQ ID NO: 425827 - RNA, 19 nt, Artificial Sequence
  Description of Artificial Sequence: Synthetic oligonucleotide
  Sense Strand Starting at position 1365 of SEQ ID NO: 318761
aaaguaaaugugugagaag

SEQ ID NO: 425828 - RNA, 19 nt, Artificial Sequence
  Description of Artificial Sequence: Synthetic oligonucleotide
  Antisense Strand to SEQ ID NO: 425827
cuucucacacauuuacuuu

SEQ ID NO: 425829 - RNA, 19 nt, Artificial Sequence
  Description of Artificial Sequence: Synthetic oligonucleotide
  Sense Strand Starting at position 1365 of SEQ ID NO: 318778
agcuaaagacugggucuua

SEQ ID NO: 425830 - RNA, 19 nt, Artificial Sequence
  Description of Artificial Sequence: Synthetic oligonucleotide
  Antisense Strand to SEQ ID NO: 425829
uaagacccagucuuuagcu

SEQ ID NO: 425831 - RNA, 19 nt, Artificial Sequence
  Description of Artificial Sequence: Synthetic oligonucleotide
  Sense Strand Starting at position 1365 of SEQ ID NO: 318779
gcuaaagacugggucuuaa

SEQ ID NO: 425832 - RNA, 19 nt, Artificial Sequence
  Description of Artificial Sequence: Synthetic oligonucleotide
  Antisense Strand to SEQ ID NO: 425831
uuaagacccagucuuuagc

SEQ ID NO: 425833 - RNA, 19 nt, Artificial Sequence
  Description of Artificial Sequence: Synthetic oligonucleotide
  Sense Strand Starting at position 1365 of SEQ ID NO: 318845
gacugagagccauguggau

SEQ ID NO: 425834 - RNA, 19 nt, Artificial Sequence
  Description of Artificial Sequence: Synthetic oligonucleotide
  Antisense Strand to SEQ ID NO: 425833
auccacauggcucucaguc

SEQ ID NO: 425835 - RNA, 19 nt, Artificial Sequence
  Description of Artificial Sequence: Synthetic oligonucleotide
  Sense Strand Starting at position 1365 of SEQ ID NO: 318847
cugagagccauguggauua

SEQ ID NO: 425836 - RNA, 19 nt, Artificial Sequence
  Description of Artificial Sequence: Synthetic oligonucleotide
  Antisense Strand to SEQ ID NO: 425835
uaauccacauggcucucag

SEQ ID NO: 425837 - RNA, 19 nt, Artificial Sequence
  Description of Artificial Sequence: Synthetic oligonucleotide
  Sense Strand Starting at position 1365 of SEQ ID NO: 318854
ccauguggauuaucaggua

SEQ ID NO: 425838 - RNA, 19 nt, Artificial Sequence
  Description of Artificial Sequence: Synthetic oligonucleotide
  Antisense Strand to SEQ ID NO: 425837
uaccugauaauccacaugg

SEQ ID NO: 425839 - RNA, 19 nt, Artificial Sequence
  Description of Artificial Sequence: Synthetic oligonucleotide
  Sense Strand Starting at position 1365 of SEQ ID NO: 318889
uaguuagggcugcaaugau

SEQ ID NO: 425840 - RNA, 19 nt, Artificial Sequence
  Description of Artificial Sequence: Synthetic oligonucleotide
  Antisense Strand to SEQ ID NO: 425839
aucauugcagcccuaacua

SEQ ID NO: 425841 - RNA, 19 nt, Artificial Sequence
  Description of Artificial Sequence: Synthetic oligonucleotide
  Sense Strand Starting at position 1365 of SEQ ID NO: 318957
accaaucaaucgcuggaaa

SEQ ID NO: 425842 - RNA, 19 nt, Artificial Sequence
  Description of Artificial Sequence: Synthetic oligonucleotide
  Antisense Strand to SEQ ID NO: 425841
uuuccagcgauugauuggu

SEQ ID NO: 425843 - RNA, 19 nt, Artificial Sequence
  Description of Artificial Sequence: Synthetic oligonucleotide
  Sense Strand Starting at position 1365 of SEQ ID NO: 318958
ccaaucaaucgcuggaaag

SEQ ID NO: 425844 - RNA, 19 nt, Artificial Sequence
  Description of Artificial Sequence: Synthetic oligonucleotide
  Antisense Strand to SEQ ID NO: 425843
cuuuccagcgauugauugg

SEQ ID NO: 425845 - RNA, 19 nt, Artificial Sequence
  Description of Artificial Sequence: Synthetic oligonucleotide
  Sense Strand Starting at position 1365 of SEQ ID NO: 318960
aaucaaucgcuggaaagua

SEQ ID NO: 425846 - RNA, 19 nt, Artificial Sequence
  Description of Artificial Sequence: Synthetic oligonucleotide
  Antisense Strand to SEQ ID NO: 425845
uacuuuccagcgauugauu

SEQ ID NO: 425847 - RNA, 19 nt, Artificial Sequence
  Description of Artificial Sequence: Synthetic oligonucleotide
  Sense Strand Starting at position 1365 of SEQ ID NO: 318965
aucgcuggaaaguaauaau

SEQ ID NO: 425848 - RNA, 19 nt, Artificial Sequence
  Description of Artificial Sequence: Synthetic oligonucleotide
  Antisense Strand to SEQ ID NO: 425847
auuauuacuuuccagcgau

SEQ ID NO: 425849 - RNA, 19 nt, Artificial Sequence
  Description of Artificial Sequence: Synthetic oligonucleotide
  Sense Strand Starting at position 1365 of SEQ ID NO: 319042
agacacuacuuguuuguga

SEQ ID NO: 425850 - RNA, 19 nt, Artificial Sequence
  Description of Artificial Sequence: Synthetic oligonucleotide
  Antisense Strand to SEQ ID NO: 425849
ucacaaacaaguagugucu

SEQ ID NO: 425851 - RNA, 19 nt, Artificial Sequence
  Description of Artificial Sequence: Synthetic oligonucleotide
  Sense Strand Starting at position 1365 of SEQ ID NO: 319092
gugcguacucagcucaaau

SEQ ID NO: 425852 - RNA, 19 nt, Artificial Sequence
  Description of Artificial Sequence: Synthetic oligonucleotide
  Antisense Strand to SEQ ID NO: 425851
auuugagcugaguacgcac

SEQ ID NO: 425853 - RNA, 19 nt, Artificial Sequence
  Description of Artificial Sequence: Synthetic oligonucleotide
  Sense Strand Starting at position 1365 of SEQ ID NO: 319105
ucaaauaaaugcucacgaa

SEQ ID NO: 425854 - RNA, 19 nt, Artificial Sequence
  Description of Artificial Sequence: Synthetic oligonucleotide
  Antisense Strand to SEQ ID NO: 425853
uucgugagcauuuauuuga

SEQ ID NO: 425855 - RNA, 19 nt, Artificial Sequence
  Description of Artificial Sequence: Synthetic oligonucleotide
  Sense Strand Starting at position 1365 of SEQ ID NO: 319126
cuaguauggcccgaauuaa

SEQ ID NO: 425856 - RNA, 19 nt, Artificial Sequence
  Description of Artificial Sequence: Synthetic oligonucleotide
  Antisense Strand to SEQ ID NO: 425855
uuaauucgggccauacuag

SEQ ID NO: 425857 - RNA, 19 nt, Artificial Sequence
  Description of Artificial Sequence: Synthetic oligonucleotide
  Sense Strand Starting at position 1365 of SEQ ID NO: 319137
cgaauuaaaguucgaagaa

SEQ ID NO: 425858 - RNA, 19 nt, Artificial Sequence
  Description of Artificial Sequence: Synthetic oligonucleotide
  Antisense Strand to SEQ ID NO: 425857
uucuucgaacuuuaauucg

SEQ ID NO: 425859 - RNA, 19 nt, Artificial Sequence
  Description of Artificial Sequence: Synthetic oligonucleotide
  Sense Strand Starting at position 1365 of SEQ ID NO: 319174
auccuagaauaguuaguau

SEQ ID NO: 425860 - RNA, 19 nt, Artificial Sequence
  Description of Artificial Sequence: Synthetic oligonucleotide
  Antisense Strand to SEQ ID NO: 425859
auacuaacuauucuaggau

SEQ ID NO: 425861 - RNA, 19 nt, Artificial Sequence
  Description of Artificial Sequence: Synthetic oligonucleotide
  Sense Strand Starting at position 1365 of SEQ ID NO: 319177
cuagaauaguuaguaucua

SEQ ID NO: 425862 - RNA, 19 nt, Artificial Sequence
  Description of Artificial Sequence: Synthetic oligonucleotide
  Antisense Strand to SEQ ID NO: 425861
uagauacuaacuauucuag

SEQ ID NO: 425863 - RNA, 19 nt, Artificial Sequence
  Description of Artificial Sequence: Synthetic oligonucleotide
  Sense Strand Starting at position 1366 of SEQ ID NO: 315268
agauaccucuacuaagaag

SEQ ID NO: 425864 - RNA, 19 nt, Artificial Sequence
  Description of Artificial Sequence: Synthetic oligonucleotide
  Antisense Strand to SEQ ID NO: 425863
cuucuuaguagagguaucu

SEQ ID NO: 425865 - RNA, 19 nt, Artificial Sequence
  Description of Artificial Sequence: Synthetic oligonucleotide
  Sense Strand Starting at position 1366 of SEQ ID NO: 317256
uuagaaaucuaacugcuga

SEQ ID NO: 425866 - RNA, 19 nt, Artificial Sequence
  Description of Artificial Sequence: Synthetic oligonucleotide
  Antisense Strand to SEQ ID NO: 425865
ucagcaguuagauuucuaa

SEQ ID NO: 425867 - RNA, 19 nt, Artificial Sequence
  Description of Artificial Sequence: Synthetic oligonucleotide
  Sense Strand Starting at position 1366 of SEQ ID NO: 317482
aaauauugagagugcacaa

SEQ ID NO: 425868 - RNA, 19 nt, Artificial Sequence
  Description of Artificial Sequence: Synthetic oligonucleotide
  Antisense Strand to SEQ ID NO: 425867
uugugcacucucaauauuu

SEQ ID NO: 425869 - RNA, 19 nt, Artificial Sequence
  Description of Artificial Sequence: Synthetic oligonucleotide
  Sense Strand Starting at position 1366 of SEQ ID NO: 317567
uugggaucaucaugaaggu

SEQ ID NO: 425870 - RNA, 19 nt, Artificial Sequence
  Description of Artificial Sequence: Synthetic oligonucleotide
  Antisense Strand to SEQ ID NO: 425869
accuucaugaugaucccaa

SEQ ID NO: 425871 - RNA, 19 nt, Artificial Sequence
  Description of Artificial Sequence: Synthetic oligonucleotide
  Sense Strand Starting at position 1366 of SEQ ID NO: 317583
ggucgaguuguagagcaca

SEQ ID NO: 425872 - RNA, 19 nt, Artificial Sequence
  Description of Artificial Sequence: Synthetic oligonucleotide
  Antisense Strand to SEQ ID NO: 425871
ugugcucuacaacucgacc

SEQ ID NO: 425873 - RNA, 19 nt, Artificial Sequence
  Description of Artificial Sequence: Synthetic oligonucleotide
  Sense Strand Starting at position 1366 of SEQ ID NO: 317691
ugguuauacuagucuaucu

SEQ ID NO: 425874 - RNA, 19 nt, Artificial Sequence
  Description of Artificial Sequence: Synthetic oligonucleotide
  Antisense Strand to SEQ ID NO: 425873
agauagacuaguauaacca

SEQ ID NO: 425875 - RNA, 19 nt, Artificial Sequence
  Description of Artificial Sequence: Synthetic oligonucleotide
  Sense Strand Starting at position 1366 of SEQ ID NO: 317693
guuauacuagucuaucuuu

SEQ ID NO: 425876 - RNA, 19 nt, Artificial Sequence
  Description of Artificial Sequence: Synthetic oligonucleotide
  Antisense Strand to SEQ ID NO: 425875
aaagauagacuaguauaac

SEQ ID NO: 425877 - RNA, 19 nt, Artificial Sequence
  Description of Artificial Sequence: Synthetic oligonucleotide
  Sense Strand Starting at position 1366 of SEQ ID NO: 317748
auaguauuccaauguccaa

SEQ ID NO: 425878 - RNA, 19 nt, Artificial Sequence
  Description of Artificial Sequence: Synthetic oligonucleotide
  Antisense Strand to SEQ ID NO: 425877
uuggacauuggaauacuau

SEQ ID NO: 425879 - RNA, 19 nt, Artificial Sequence
  Description of Artificial Sequence: Synthetic oligonucleotide
  Sense Strand Starting at position 1366 of SEQ ID NO: 317777
uuaguagccuuguuuaacu

SEQ ID NO: 425880 - RNA, 19 nt, Artificial Sequence
  Description of Artificial Sequence: Synthetic oligonucleotide
  Antisense Strand to SEQ ID NO: 425879
aguuaaacaaggcuacuaa

SEQ ID NO: 425881 - RNA, 19 nt, Artificial Sequence
  Description of Artificial Sequence: Synthetic oligonucleotide
  Sense Strand Starting at position 1366 of SEQ ID NO: 317931
ucauaaacuuauggugauu

SEQ ID NO: 425882 - RNA, 19 nt, Artificial Sequence
  Description of Artificial Sequence: Synthetic oligonucleotide
  Antisense Strand to SEQ ID NO: 425881
aaucaccauaaguuuauga

SEQ ID NO: 425883 - RNA, 19 nt, Artificial Sequence
  Description of Artificial Sequence: Synthetic oligonucleotide
  Sense Strand Starting at position 1366 of SEQ ID NO: 317936
aacuuauggugauuaagau

SEQ ID NO: 425884 - RNA, 19 nt, Artificial Sequence
  Description of Artificial Sequence: Synthetic oligonucleotide
  Antisense Strand to SEQ ID NO: 425883
aucuuaaucaccauaaguu

SEQ ID NO: 425885 - RNA, 19 nt, Artificial Sequence
  Description of Artificial Sequence: Synthetic oligonucleotide
  Sense Strand Starting at position 1366 of SEQ ID NO: 317990
aucucauauucuuugagag

SEQ ID NO: 425886 - RNA, 19 nt, Artificial Sequence
  Description of Artificial Sequence: Synthetic oligonucleotide
  Antisense Strand to SEQ ID NO: 425885
cucucaaagaauaugagau

SEQ ID NO: 425887 - RNA, 19 nt, Artificial Sequence
  Description of Artificial Sequence: Synthetic oligonucleotide
  Sense Strand Starting at position 1366 of SEQ ID NO: 317991
ucucauauucuuugagaga

SEQ ID NO: 425888 - RNA, 19 nt, Artificial Sequence
  Description of Artificial Sequence: Synthetic oligonucleotide
  Antisense Strand to SEQ ID NO: 425887
ucucucaaagaauaugaga

SEQ ID NO: 425889 - RNA, 19 nt, Artificial Sequence
  Description of Artificial Sequence: Synthetic oligonucleotide
  Sense Strand Starting at position 1366 of SEQ ID NO: 317992
cucauauucuuugagagaa

SEQ ID NO: 425890 - RNA, 19 nt, Artificial Sequence
  Description of Artificial Sequence: Synthetic oligonucleotide
  Antisense Strand to SEQ ID NO: 425889
uucucucaaagaauaugag

SEQ ID NO: 425891 - RNA, 19 nt, Artificial Sequence
  Description of Artificial Sequence: Synthetic oligonucleotide
  Sense Strand Starting at position 1366 of SEQ ID NO: 318224
guauauaagccucagaaua

SEQ ID NO: 425892 - RNA, 19 nt, Artificial Sequence
  Description of Artificial Sequence: Synthetic oligonucleotide
  Antisense Strand to SEQ ID NO: 425891
uauucugaggcuuauauac

SEQ ID NO: 425893 - RNA, 19 nt, Artificial Sequence
  Description of Artificial Sequence: Synthetic oligonucleotide
  Sense Strand Starting at position 1366 of SEQ ID NO: 318251
ccuggaaguuaucugaaca

SEQ ID NO: 425894 - RNA, 19 nt, Artificial Sequence
  Description of Artificial Sequence: Synthetic oligonucleotide
  Antisense Strand to SEQ ID NO: 425893
uguucagauaacuuccagg

SEQ ID NO: 425895 - RNA, 19 nt, Artificial Sequence
  Description of Artificial Sequence: Synthetic oligonucleotide
  Sense Strand Starting at position 1366 of SEQ ID NO: 318252
cuggaaguuaucugaacag

SEQ ID NO: 425896 - RNA, 19 nt, Artificial Sequence
  Description of Artificial Sequence: Synthetic oligonucleotide
  Antisense Strand to SEQ ID NO: 425895
cuguucagauaacuuccag

SEQ ID NO: 425897 - RNA, 19 nt, Artificial Sequence
  Description of Artificial Sequence: Synthetic oligonucleotide
  Sense Strand Starting at position 1366 of SEQ ID NO: 318270
guacucaagcuuugaaaca

SEQ ID NO: 425898 - RNA, 19 nt, Artificial Sequence
  Description of Artificial Sequence: Synthetic oligonucleotide
  Antisense Strand to SEQ ID NO: 425897
uguuucaaagcuugaguac

SEQ ID NO: 425899 - RNA, 19 nt, Artificial Sequence
  Description of Artificial Sequence: Synthetic oligonucleotide
  Sense Strand Starting at position 1366 of SEQ ID NO: 318305
ggauaauugcaucagcuuu

SEQ ID NO: 425900 - RNA, 19 nt, Artificial Sequence
  Description of Artificial Sequence: Synthetic oligonucleotide
  Antisense Strand to SEQ ID NO: 425899
aaagcugaugcaauuaucc

SEQ ID NO: 425901 - RNA, 19 nt, Artificial Sequence
  Description of Artificial Sequence: Synthetic oligonucleotide
  Sense Strand Starting at position 1366 of SEQ ID NO: 318331
gaaucuauugucgacccau

SEQ ID NO: 425902 - RNA, 19 nt, Artificial Sequence
  Description of Artificial Sequence: Synthetic oligonucleotide
  Antisense Strand to SEQ ID NO: 425901
augggucgacaauagauuc

SEQ ID NO: 425903 - RNA, 19 nt, Artificial Sequence
  Description of Artificial Sequence: Synthetic oligonucleotide
  Sense Strand Starting at position 1366 of SEQ ID NO: 318342
cgacccaucuuaguuauaa

SEQ ID NO: 425904 - RNA, 19 nt, Artificial Sequence
  Description of Artificial Sequence: Synthetic oligonucleotide
  Antisense Strand to SEQ ID NO: 425903
uuauaacuaagaugggucg

SEQ ID NO: 425905 - RNA, 19 nt, Artificial Sequence
  Description of Artificial Sequence: Synthetic oligonucleotide
  Sense Strand Starting at position 1366 of SEQ ID NO: 318346
ccaucuuaguuauaauagu

SEQ ID NO: 425906 - RNA, 19 nt, Artificial Sequence
  Description of Artificial Sequence: Synthetic oligonucleotide
  Antisense Strand to SEQ ID NO: 425905
acuauuauaacuaagaugg

SEQ ID NO: 425907 - RNA, 19 nt, Artificial Sequence
  Description of Artificial Sequence: Synthetic oligonucleotide
  Sense Strand Starting at position 1366 of SEQ ID NO: 318355
uuauaauagugucucuagu

SEQ ID NO: 425908 - RNA, 19 nt, Artificial Sequence
  Description of Artificial Sequence: Synthetic oligonucleotide
  Antisense Strand to SEQ ID NO: 425907
acuagagacacuauuauaa

SEQ ID NO: 425909 - RNA, 19 nt, Artificial Sequence
  Description of Artificial Sequence: Synthetic oligonucleotide
  Sense Strand Starting at position 1366 of SEQ ID NO: 318364
ugucucuagugguuuggaa

SEQ ID NO: 425910 - RNA, 19 nt, Artificial Sequence
  Description of Artificial Sequence: Synthetic oligonucleotide
  Antisense Strand to SEQ ID NO: 425909
uuccaaaccacuagagaca

SEQ ID NO: 425911 - RNA, 19 nt, Artificial Sequence
  Description of Artificial Sequence: Synthetic oligonucleotide
  Sense Strand Starting at position 1366 of SEQ ID NO: 318366
ucucuagugguuuggaaua

SEQ ID NO: 425912 - RNA, 19 nt, Artificial Sequence
  Description of Artificial Sequence: Synthetic oligonucleotide
  Antisense Strand to SEQ ID NO: 425911
uauuccaaaccacuagaga

SEQ ID NO: 425913 - RNA, 19 nt, Artificial Sequence
  Description of Artificial Sequence: Synthetic oligonucleotide
  Sense Strand Starting at position 1366 of SEQ ID NO: 318368
ucuagugguuuggaauaau

SEQ ID NO: 425914 - RNA, 19 nt, Artificial Sequence
  Description of Artificial Sequence: Synthetic oligonucleotide
  Antisense Strand to SEQ ID NO: 425913
auuauuccaaaccacuaga

SEQ ID NO: 425915 - RNA, 19 nt, Artificial Sequence
  Description of Artificial Sequence: Synthetic oligonucleotide
  Sense Strand Starting at position 1366 of SEQ ID NO: 318464
cuacauaugguauaguaua

SEQ ID NO: 425916 - RNA, 19 nt, Artificial Sequence
  Description of Artificial Sequence: Synthetic oligonucleotide
  Antisense Strand to SEQ ID NO: 425915
uauacuauaccauauguag

SEQ ID NO: 425917 - RNA, 19 nt, Artificial Sequence
  Description of Artificial Sequence: Synthetic oligonucleotide
  Sense Strand Starting at position 1366 of SEQ ID NO: 318539
cuguguaacccugaagaac

SEQ ID NO: 425918 - RNA, 19 nt, Artificial Sequence
  Description of Artificial Sequence: Synthetic oligonucleotide
  Antisense Strand to SEQ ID NO: 425917
guucuucaggguuacacag

SEQ ID NO: 425919 - RNA, 19 nt, Artificial Sequence
  Description of Artificial Sequence: Synthetic oligonucleotide
  Sense Strand Starting at position 1366 of SEQ ID NO: 318578
agacuuuaacuuggcacau

SEQ ID NO: 425920 - RNA, 19 nt, Artificial Sequence
  Description of Artificial Sequence: Synthetic oligonucleotide
  Antisense Strand to SEQ ID NO: 425919
augugccaaguuaaagucu

SEQ ID NO: 425921 - RNA, 19 nt, Artificial Sequence
  Description of Artificial Sequence: Synthetic oligonucleotide
  Sense Strand Starting at position 1366 of SEQ ID NO: 318616
gcuaguaaauuccuacuga

SEQ ID NO: 425922 - RNA, 19 nt, Artificial Sequence
  Description of Artificial Sequence: Synthetic oligonucleotide
  Antisense Strand to SEQ ID NO: 425921
ucaguaggaauuuacuagc

SEQ ID NO: 425923 - RNA, 19 nt, Artificial Sequence
  Description of Artificial Sequence: Synthetic oligonucleotide
  Sense Strand Starting at position 1366 of SEQ ID NO: 318649
cuuugagaaucaguucuaa

SEQ ID NO: 425924 - RNA, 19 nt, Artificial Sequence
  Description of Artificial Sequence: Synthetic oligonucleotide
  Antisense Strand to SEQ ID NO: 425923
uuagaacugauucucaaag

SEQ ID NO: 425925 - RNA, 19 nt, Artificial Sequence
  Description of Artificial Sequence: Synthetic oligonucleotide
  Sense Strand Starting at position 1366 of SEQ ID NO: 318653
gagaaucaguucuaaucug

SEQ ID NO: 425926 - RNA, 19 nt, Artificial Sequence
  Description of Artificial Sequence: Synthetic oligonucleotide
  Antisense Strand to SEQ ID NO: 425925
cagauuagaacugauucuc

SEQ ID NO: 425927 - RNA, 19 nt, Artificial Sequence
  Description of Artificial Sequence: Synthetic oligonucleotide
  Sense Strand Starting at position 1366 of SEQ ID NO: 318695
uggucucugcccugaggua

SEQ ID NO: 425928 - RNA, 19 nt, Artificial Sequence
  Description of Artificial Sequence: Synthetic oligonucleotide
  Antisense Strand to SEQ ID NO: 425927
uaccucagggcagagacca

SEQ ID NO: 425929 - RNA, 19 nt, Artificial Sequence
  Description of Artificial Sequence: Synthetic oligonucleotide
  Sense Strand Starting at position 1366 of SEQ ID NO: 318861
ucucccuaugguuagcaua

SEQ ID NO: 425930 - RNA, 19 nt, Artificial Sequence
  Description of Artificial Sequence: Synthetic oligonucleotide
  Antisense Strand to SEQ ID NO: 425929
uaugcuaaccauagggaga

SEQ ID NO: 425931 - RNA, 19 nt, Artificial Sequence
  Description of Artificial Sequence: Synthetic oligonucleotide
  Sense Strand Starting at position 1366 of SEQ ID NO: 318863
ucccuaugguuagcauaaa

SEQ ID NO: 425932 - RNA, 19 nt, Artificial Sequence
  Description of Artificial Sequence: Synthetic oligonucleotide
  Antisense Strand to SEQ ID NO: 425931
uuuaugcuaaccauaggga

SEQ ID NO: 425933 - RNA, 19 nt, Artificial Sequence
  Description of Artificial Sequence: Synthetic oligonucleotide
  Sense Strand Starting at position 1366 of SEQ ID NO: 318894
guaaccucugaauaaaugu

SEQ ID NO: 425934 - RNA, 19 nt, Artificial Sequence
  Description of Artificial Sequence: Synthetic oligonucleotide
  Antisense Strand to SEQ ID NO: 425933
acauuuauucagagguuac

SEQ ID NO: 425935 - RNA, 19 nt, Artificial Sequence
  Description of Artificial Sequence: Synthetic oligonucleotide
  Sense Strand Starting at position 1366 of SEQ ID NO: 318901
cugaauaaauguuugcaga

SEQ ID NO: 425936 - RNA, 19 nt, Artificial Sequence
  Description of Artificial Sequence: Synthetic oligonucleotide
  Antisense Strand to SEQ ID NO: 425935
ucugcaaacauuuauucag

SEQ ID NO: 425937 - RNA, 19 nt, Artificial Sequence
  Description of Artificial Sequence: Synthetic oligonucleotide
  Sense Strand Starting at position 1366 of SEQ ID NO: 318902
ugaauaaauguuugcagaa

SEQ ID NO: 425938 - RNA, 19 nt, Artificial Sequence
  Description of Artificial Sequence: Synthetic oligonucleotide
  Antisense Strand to SEQ ID NO: 425937
uucugcaaacauuuauuca

SEQ ID NO: 425939 - RNA, 19 nt, Artificial Sequence
  Description of Artificial Sequence: Synthetic oligonucleotide
  Sense Strand Starting at position 1366 of SEQ ID NO: 318983
uuggaauccuuucugaauu

SEQ ID NO: 425940 - RNA, 19 nt, Artificial Sequence
  Description of Artificial Sequence: Synthetic oligonucleotide
  Antisense Strand to SEQ ID NO: 425939
aauucagaaaggauuccaa

SEQ ID NO: 425941 - RNA, 19 nt, Artificial Sequence
  Description of Artificial Sequence: Synthetic oligonucleotide
  Sense Strand Starting at position 1366 of SEQ ID NO: 319187
guagaauggcaugaucuca

SEQ ID NO: 425942 - RNA, 19 nt, Artificial Sequence
  Description of Artificial Sequence: Synthetic oligonucleotide
  Antisense Strand to SEQ ID NO: 425941
ugagaucaugccauucuac

SEQ ID NO: 425943 - RNA, 19 nt, Artificial Sequence
  Description of Artificial Sequence: Synthetic oligonucleotide
  Sense Strand Starting at position 1367 of SEQ ID NO: 315283
uguguccauccucaaauau

SEQ ID NO: 425944 - RNA, 19 nt, Artificial Sequence
  Description of Artificial Sequence: Synthetic oligonucleotide
  Antisense Strand to SEQ ID NO: 425943
auauuugaggauggacaca

SEQ ID NO: 425945 - RNA, 19 nt, Artificial Sequence
  Description of Artificial Sequence: Synthetic oligonucleotide
  Sense Strand Starting at position 1367 of SEQ ID NO: 315555
guauuugcauucuuggcaa

SEQ ID NO: 425946 - RNA, 19 nt, Artificial Sequence
  Description of Artificial Sequence: Synthetic oligonucleotide
  Antisense Strand to SEQ ID NO: 425945
uugccaagaaugcaaauac

SEQ ID NO: 425947 - RNA, 19 nt, Artificial Sequence
  Description of Artificial Sequence: Synthetic oligonucleotide
  Sense Strand Starting at position 1367 of SEQ ID NO: 315557
auuugcauucuuggcaauu

SEQ ID NO: 425948 - RNA, 19 nt, Artificial Sequence
  Description of Artificial Sequence: Synthetic oligonucleotide
  Antisense Strand to SEQ ID NO: 425947
aauugccaagaaugcaaau

SEQ ID NO: 425949 - RNA, 19 nt, Artificial Sequence
  Description of Artificial Sequence: Synthetic oligonucleotide
  Sense Strand Starting at position 1367 of SEQ ID NO: 315586
agagucaucccagggacua

SEQ ID NO: 425950 - RNA, 19 nt, Artificial Sequence
  Description of Artificial Sequence: Synthetic oligonucleotide
  Antisense Strand to SEQ ID NO: 425949
uagucccugggaugacucu

SEQ ID NO: 425951 - RNA, 19 nt, Artificial Sequence
  Description of Artificial Sequence: Synthetic oligonucleotide
  Sense Strand Starting at position 1367 of SEQ ID NO: 315614
agagauugaccugguccca

SEQ ID NO: 425952 - RNA, 19 nt, Artificial Sequence
  Description of Artificial Sequence: Synthetic oligonucleotide
  Antisense Strand to SEQ ID NO: 425951
ugggaccaggucaaucucu

SEQ ID NO: 425953 - RNA, 19 nt, Artificial Sequence
  Description of Artificial Sequence: Synthetic oligonucleotide
  Sense Strand Starting at position 1367 of SEQ ID NO: 315639
agagacucucaguauguca

SEQ ID NO: 425954 - RNA, 19 nt, Artificial Sequence
  Description of Artificial Sequence: Synthetic oligonucleotide
  Antisense Strand to SEQ ID NO: 425953
ugacauacugagagucucu

SEQ ID NO: 425955 - RNA, 19 nt, Artificial Sequence
  Description of Artificial Sequence: Synthetic oligonucleotide
  Sense Strand Starting at position 1367 of SEQ ID NO: 316082
agggucuugagucacugua

SEQ ID NO: 425956 - RNA, 19 nt, Artificial Sequence
  Description of Artificial Sequence: Synthetic oligonucleotide
  Antisense Strand to SEQ ID NO: 425955
uacagugacucaagacccu

SEQ ID NO: 425957 - RNA, 19 nt, Artificial Sequence
  Description of Artificial Sequence: Synthetic oligonucleotide
  Sense Strand Starting at position 1367 of SEQ ID NO: 316105
gauauaaaugacugaguuc

SEQ ID NO: 425958 - RNA, 19 nt, Artificial Sequence
  Description of Artificial Sequence: Synthetic oligonucleotide
  Antisense Strand to SEQ ID NO: 425957
gaacucagucauuuauauc

SEQ ID NO: 425959 - RNA, 19 nt, Artificial Sequence
  Description of Artificial Sequence: Synthetic oligonucleotide
  Sense Strand Starting at position 1367 of SEQ ID NO: 316240
ugaagcucccagggauuga

SEQ ID NO: 425960 - RNA, 19 nt, Artificial Sequence
  Description of Artificial Sequence: Synthetic oligonucleotide
  Antisense Strand to SEQ ID NO: 425959
ucaaucccugggagcuuca

SEQ ID NO: 425961 - RNA, 19 nt, Artificial Sequence
  Description of Artificial Sequence: Synthetic oligonucleotide
  Sense Strand Starting at position 1367 of SEQ ID NO: 316416
uggagaacuuccuugcaau

SEQ ID NO: 425962 - RNA, 19 nt, Artificial Sequence
  Description of Artificial Sequence: Synthetic oligonucleotide
  Antisense Strand to SEQ ID NO: 425961
auugcaaggaaguucucca

SEQ ID NO: 425963 - RNA, 19 nt, Artificial Sequence
  Description of Artificial Sequence: Synthetic oligonucleotide
  Sense Strand Starting at position 1367 of SEQ ID NO: 316417
ggagaacuuccuugcaauc

SEQ ID NO: 425964 - RNA, 19 nt, Artificial Sequence
  Description of Artificial Sequence: Synthetic oligonucleotide
  Antisense Strand to SEQ ID NO: 425963
gauugcaaggaaguucucc

SEQ ID NO: 425965 - RNA, 19 nt, Artificial Sequence
  Description of Artificial Sequence: Synthetic oligonucleotide
  Sense Strand Starting at position 1367 of SEQ ID NO: 316475
gagaacuuugcugagucaa

SEQ ID NO: 425966 - RNA, 19 nt, Artificial Sequence
  Description of Artificial Sequence: Synthetic oligonucleotide
  Antisense Strand to SEQ ID NO: 425965
uugacucagcaaaguucuc

SEQ ID NO: 425967 - RNA, 19 nt, Artificial Sequence
  Description of Artificial Sequence: Synthetic oligonucleotide
  Sense Strand Starting at position 1367 of SEQ ID NO: 316674
gaauuuaguucuguccugu

SEQ ID NO: 425968 - RNA, 19 nt, Artificial Sequence
  Description of Artificial Sequence: Synthetic oligonucleotide
  Antisense Strand to SEQ ID NO: 425967
acaggacagaacuaaauuc

SEQ ID NO: 425969 - RNA, 19 nt, Artificial Sequence
  Description of Artificial Sequence: Synthetic oligonucleotide
  Sense Strand Starting at position 1367 of SEQ ID NO: 316726
uggguuagugcucaauaaa

SEQ ID NO: 425970 - RNA, 19 nt, Artificial Sequence
  Description of Artificial Sequence: Synthetic oligonucleotide
  Antisense Strand to SEQ ID NO: 425969
uuuauugagcacuaaccca

SEQ ID NO: 425971 - RNA, 19 nt, Artificial Sequence
  Description of Artificial Sequence: Synthetic oligonucleotide
  Sense Strand Starting at position 1367 of SEQ ID NO: 316825
ugguaacgggagggauauu

SEQ ID NO: 425972 - RNA, 19 nt, Artificial Sequence
  Description of Artificial Sequence: Synthetic oligonucleotide
  Antisense Strand to SEQ ID NO: 425971
aauaucccucccguuacca

SEQ ID NO: 425973 - RNA, 19 nt, Artificial Sequence
  Description of Artificial Sequence: Synthetic oligonucleotide
  Sense Strand Starting at position 1367 of SEQ ID NO: 316836
gggauauuggacuggugau

SEQ ID NO: 425974 - RNA, 19 nt, Artificial Sequence
  Description of Artificial Sequence: Synthetic oligonucleotide
  Antisense Strand to SEQ ID NO: 425973
aucaccaguccaauauccc

SEQ ID NO: 425975 - RNA, 19 nt, Artificial Sequence
  Description of Artificial Sequence: Synthetic oligonucleotide
  Sense Strand Starting at position 1367 of SEQ ID NO: 316837
ggauauuggacuggugauu

SEQ ID NO: 425976 - RNA, 19 nt, Artificial Sequence
  Description of Artificial Sequence: Synthetic oligonucleotide
  Antisense Strand to SEQ ID NO: 425975
aaucaccaguccaauaucc

SEQ ID NO: 425977 - RNA, 19 nt, Artificial Sequence
  Description of Artificial Sequence: Synthetic oligonucleotide
  Sense Strand Starting at position 1367 of SEQ ID NO: 317761
aggagacaaugauaaauaa

SEQ ID NO: 425978 - RNA, 19 nt, Artificial Sequence
  Description of Artificial Sequence: Synthetic oligonucleotide
  Antisense Strand to SEQ ID NO: 425977
uuauuuaucauugucuccu

SEQ ID NO: 425979 - RNA, 19 nt, Artificial Sequence
  Description of Artificial Sequence: Synthetic oligonucleotide
  Sense Strand Starting at position 1367 of SEQ ID NO: 317828
ggagauaguggugggacua

SEQ ID NO: 425980 - RNA, 19 nt, Artificial Sequence
  Description of Artificial Sequence: Synthetic oligonucleotide
  Antisense Strand to SEQ ID NO: 425979
uagucccaccacuaucucc

SEQ ID NO: 425981 - RNA, 19 nt, Artificial Sequence
  Description of Artificial Sequence: Synthetic oligonucleotide
  Sense Strand Starting at position 1367 of SEQ ID NO: 317829
gagauaguggugggacuau

SEQ ID NO: 425982 - RNA, 19 nt, Artificial Sequence
  Description of Artificial Sequence: Synthetic oligonucleotide
  Antisense Strand to SEQ ID NO: 425981
auagucccaccacuaucuc

SEQ ID NO: 425983 - RNA, 19 nt, Artificial Sequence
  Description of Artificial Sequence: Synthetic oligonucleotide
  Sense Strand Starting at position 1367 of SEQ ID NO: 317910
gaaagaguauucccauagu

SEQ ID NO: 425984 - RNA, 19 nt, Artificial Sequence
  Description of Artificial Sequence: Synthetic oligonucleotide
  Antisense Strand to SEQ ID NO: 425983
acuaugggaauacucuuuc

SEQ ID NO: 425985 - RNA, 19 nt, Artificial Sequence
  Description of Artificial Sequence: Synthetic oligonucleotide
  Sense Strand Starting at position 1367 of SEQ ID NO: 317988
ucuuguagacuaugauaag

SEQ ID NO: 425986 - RNA, 19 nt, Artificial Sequence
  Description of Artificial Sequence: Synthetic oligonucleotide
  Antisense Strand to SEQ ID NO: 425985
cuuaucauagucuacaaga

SEQ ID NO: 425987 - RNA, 19 nt, Artificial Sequence
  Description of Artificial Sequence: Synthetic oligonucleotide
  Sense Strand Starting at position 1367 of SEQ ID NO: 318011
uuggauuugcucugcauaa

SEQ ID NO: 425988 - RNA, 19 nt, Artificial Sequence
  Description of Artificial Sequence: Synthetic oligonucleotide
  Antisense Strand to SEQ ID NO: 425987
uuaugcagagcaaauccaa

SEQ ID NO: 425989 - RNA, 19 nt, Artificial Sequence
  Description of Artificial Sequence: Synthetic oligonucleotide
  Sense Strand Starting at position 1367 of SEQ ID NO: 318012
uggauuugcucugcauaac

SEQ ID NO: 425990 - RNA, 19 nt, Artificial Sequence
  Description of Artificial Sequence: Synthetic oligonucleotide
  Antisense Strand to SEQ ID NO: 425989
guuaugcagagcaaaucca

SEQ ID NO: 425991 - RNA, 19 nt, Artificial Sequence
  Description of Artificial Sequence: Synthetic oligonucleotide
  Sense Strand Starting at position 1367 of SEQ ID NO: 318094
aaagacuuguuagcuauga

SEQ ID NO: 425992 - RNA, 19 nt, Artificial Sequence
  Description of Artificial Sequence: Synthetic oligonucleotide
  Antisense Strand to SEQ ID NO: 425991
ucauagcuaacaagucuuu

SEQ ID NO: 425993 - RNA, 19 nt, Artificial Sequence
  Description of Artificial Sequence: Synthetic oligonucleotide
  Sense Strand Starting at position 1367 of SEQ ID NO: 318096
agacuuguuagcuaugaga

SEQ ID NO: 425994 - RNA, 19 nt, Artificial Sequence
  Description of Artificial Sequence: Synthetic oligonucleotide
  Antisense Strand to SEQ ID NO: 425993
ucucauagcuaacaagucu

SEQ ID NO: 425995 - RNA, 19 nt, Artificial Sequence
  Description of Artificial Sequence: Synthetic oligonucleotide
  Sense Strand Starting at position 1367 of SEQ ID NO: 318129
agaagccuguuacuauaaa

SEQ ID NO: 425996 - RNA, 19 nt, Artificial Sequence
  Description of Artificial Sequence: Synthetic oligonucleotide
  Antisense Strand to SEQ ID NO: 425995
uuuauaguaacaggcuucu

SEQ ID NO: 425997 - RNA, 19 nt, Artificial Sequence
  Description of Artificial Sequence: Synthetic oligonucleotide
  Sense Strand Starting at position 1367 of SEQ ID NO: 318284
gggagauuaagaggccauu

SEQ ID NO: 425998 - RNA, 19 nt, Artificial Sequence
  Description of Artificial Sequence: Synthetic oligonucleotide
  Antisense Strand to SEQ ID NO: 425997
aauggccucuuaaucuccc

SEQ ID NO: 425999 - RNA, 19 nt, Artificial Sequence
  Description of Artificial Sequence: Synthetic oligonucleotide
  Sense Strand Starting at position 1367 of SEQ ID NO: 318351
gaugcagguagugagaaau

SEQ ID NO: 426000 - RNA, 19 nt, Artificial Sequence
  Description of Artificial Sequence: Synthetic oligonucleotide
  Antisense Strand to SEQ ID NO: 425999
auuucucacuaccugcauc

SEQ ID NO: 426001 - RNA, 19 nt, Artificial Sequence
  Description of Artificial Sequence: Synthetic oligonucleotide
  Sense Strand Starting at position 1367 of SEQ ID NO: 318364
agaaaugguucugcauaua

SEQ ID NO: 426002 - RNA, 19 nt, Artificial Sequence
  Description of Artificial Sequence: Synthetic oligonucleotide
  Antisense Strand to SEQ ID NO: 426001
uauaugcagaaccauuucu

SEQ ID NO: 426003 - RNA, 19 nt, Artificial Sequence
  Description of Artificial Sequence: Synthetic oligonucleotide
  Sense Strand Starting at position 1367 of SEQ ID NO: 318418
uugaauguugguuacugau

SEQ ID NO: 426004 - RNA, 19 nt, Artificial Sequence
  Description of Artificial Sequence: Synthetic oligonucleotide
  Antisense Strand to SEQ ID NO: 426003
aucaguaaccaacauucaa

SEQ ID NO: 426005 - RNA, 19 nt, Artificial Sequence
  Description of Artificial Sequence: Synthetic oligonucleotide
  Sense Strand Starting at position 1367 of SEQ ID NO: 318420
gaauguugguuacugauga

SEQ ID NO: 426006 - RNA, 19 nt, Artificial Sequence
  Description of Artificial Sequence: Synthetic oligonucleotide
  Antisense Strand to SEQ ID NO: 426005
ucaucaguaaccaacauuc

SEQ ID NO: 426007 - RNA, 19 nt, Artificial Sequence
  Description of Artificial Sequence: Synthetic oligonucleotide
  Sense Strand Starting at position 1367 of SEQ ID NO: 318430
uacugaugacuccaugguu

SEQ ID NO: 426008 - RNA, 19 nt, Artificial Sequence
  Description of Artificial Sequence: Synthetic oligonucleotide
  Antisense Strand to SEQ ID NO: 426007
aaccauggagucaucagua

SEQ ID NO: 426009 - RNA, 19 nt, Artificial Sequence
  Description of Artificial Sequence: Synthetic oligonucleotide
  Sense Strand Starting at position 1367 of SEQ ID NO: 318436
ugacuccaugguuauugau

SEQ ID NO: 426010 - RNA, 19 nt, Artificial Sequence
  Description of Artificial Sequence: Synthetic oligonucleotide
  Antisense Strand to SEQ ID NO: 426009
aucaauaaccauggaguca

SEQ ID NO: 426011 - RNA, 19 nt, Artificial Sequence
  Description of Artificial Sequence: Synthetic oligonucleotide
  Sense Strand Starting at position 1367 of SEQ ID NO: 318481
uuagaaaucgaguagcuug

SEQ ID NO: 426012 - RNA, 19 nt, Artificial Sequence
  Description of Artificial Sequence: Synthetic oligonucleotide
  Antisense Strand to SEQ ID NO: 426011
caagcuacucgauuucuaa

SEQ ID NO: 426013 - RNA, 19 nt, Artificial Sequence
  Description of Artificial Sequence: Synthetic oligonucleotide
  Sense Strand Starting at position 1367 of SEQ ID NO: 318484
gaaaucgaguagcuugaaa

SEQ ID NO: 426014 - RNA, 19 nt, Artificial Sequence
  Description of Artificial Sequence: Synthetic oligonucleotide
  Antisense Strand to SEQ ID NO: 426013
uuucaagcuacucgauuuc

SEQ ID NO: 426015 - RNA, 19 nt, Artificial Sequence
  Description of Artificial Sequence: Synthetic oligonucleotide
  Sense Strand Starting at position 1367 of SEQ ID NO: 318541
ggauguguuaaagaugcca

SEQ ID NO: 426016 - RNA, 19 nt, Artificial Sequence
  Description of Artificial Sequence: Synthetic oligonucleotide
  Antisense Strand to SEQ ID NO: 426015
uggcaucuuuaacacaucc

SEQ ID NO: 426017 - RNA, 19 nt, Artificial Sequence
  Description of Artificial Sequence: Synthetic oligonucleotide
  Sense Strand Starting at position 1367 of SEQ ID NO: 318596
ggaauaggagucuggacuu

SEQ ID NO: 426018 - RNA, 19 nt, Artificial Sequence
  Description of Artificial Sequence: Synthetic oligonucleotide
  Antisense Strand to SEQ ID NO: 426017
aaguccagacuccuauucc

SEQ ID NO: 426019 - RNA, 19 nt, Artificial Sequence
  Description of Artificial Sequence: Synthetic oligonucleotide
  Sense Strand Starting at position 1367 of SEQ ID NO: 318607
cuggacuuccgugaagaga

SEQ ID NO: 426020 - RNA, 19 nt, Artificial Sequence
  Description of Artificial Sequence: Synthetic oligonucleotide
  Antisense Strand to SEQ ID NO: 426019
ucucuucacggaaguccag

SEQ ID NO: 426021 - RNA, 19 nt, Artificial Sequence
  Description of Artificial Sequence: Synthetic oligonucleotide
  Sense Strand Starting at position 1367 of SEQ ID NO: 318721
gaaguacuucgucaauuga

SEQ ID NO: 426022 - RNA, 19 nt, Artificial Sequence
  Description of Artificial Sequence: Synthetic oligonucleotide
  Antisense Strand to SEQ ID NO: 426021
ucaauugacgaaguacuuc

SEQ ID NO: 426023 - RNA, 19 nt, Artificial Sequence
  Description of Artificial Sequence: Synthetic oligonucleotide
  Sense Strand Starting at position 1368 of SEQ ID NO: 315393
guguuuaaaugcccuagga

SEQ ID NO: 426024 - RNA, 19 nt, Artificial Sequence
  Description of Artificial Sequence: Synthetic oligonucleotide
  Antisense Strand to SEQ ID NO: 426023
uccuagggcauuuaaacac

SEQ ID NO: 426025 - RNA, 19 nt, Artificial Sequence
  Description of Artificial Sequence: Synthetic oligonucleotide
  Sense Strand Starting at position 1368 of SEQ ID NO: 315395
guuuaaaugcccuaggaca

SEQ ID NO: 426026 - RNA, 19 nt, Artificial Sequence
  Description of Artificial Sequence: Synthetic oligonucleotide
  Antisense Strand to SEQ ID NO: 426025
uguccuagggcauuuaaac

SEQ ID NO: 426027 - RNA, 19 nt, Artificial Sequence
  Description of Artificial Sequence: Synthetic oligonucleotide
  Sense Strand Starting at position 1368 of SEQ ID NO: 315505
ggaacucuaucagcagaag

SEQ ID NO: 426028 - RNA, 19 nt, Artificial Sequence
  Description of Artificial Sequence: Synthetic oligonucleotide
  Antisense Strand to SEQ ID NO: 426027
cuucugcugauagaguucc

SEQ ID NO: 426029 - RNA, 19 nt, Artificial Sequence
  Description of Artificial Sequence: Synthetic oligonucleotide
  Sense Strand Starting at position 1368 of SEQ ID NO: 315745
uuauuaagccugugccaag

SEQ ID NO: 426030 - RNA, 19 nt, Artificial Sequence
  Description of Artificial Sequence: Synthetic oligonucleotide
  Antisense Strand to SEQ ID NO: 426029
cuuggcacaggcuuaauaa

SEQ ID NO: 426031 - RNA, 19 nt, Artificial Sequence
  Description of Artificial Sequence: Synthetic oligonucleotide
  Sense Strand Starting at position 1368 of SEQ ID NO: 315757
ugccaagcacuugacauau

SEQ ID NO: 426032 - RNA, 19 nt, Artificial Sequence
  Description of Artificial Sequence: Synthetic oligonucleotide
  Antisense Strand to SEQ ID NO: 426031
auaugucaagugcuuggca

SEQ ID NO: 426033 - RNA, 19 nt, Artificial Sequence
  Description of Artificial Sequence: Synthetic oligonucleotide
  Sense Strand Starting at position 1368 of SEQ ID NO: 315828
aacugagacucggagggau

SEQ ID NO: 426034 - RNA, 19 nt, Artificial Sequence
  Description of Artificial Sequence: Synthetic oligonucleotide
  Antisense Strand to SEQ ID NO: 426033
aucccuccgagucucaguu

SEQ ID NO: 426035 - RNA, 19 nt, Artificial Sequence
  Description of Artificial Sequence: Synthetic oligonucleotide
  Sense Strand Starting at position 1368 of SEQ ID NO: 315830
cugagacucggagggauua

SEQ ID NO: 426036 - RNA, 19 nt, Artificial Sequence
  Description of Artificial Sequence: Synthetic oligonucleotide
  Antisense Strand to SEQ ID NO: 426035
uaaucccuccgagucucag

SEQ ID NO: 426037 - RNA, 19 nt, Artificial Sequence
  Description of Artificial Sequence: Synthetic oligonucleotide
  Sense Strand Starting at position 1368 of SEQ ID NO: 316067
ggcagauccucguugugac

SEQ ID NO: 426038 - RNA, 19 nt, Artificial Sequence
  Description of Artificial Sequence: Synthetic oligonucleotide
  Antisense Strand to SEQ ID NO: 426037
gucacaacgaggaucugcc

SEQ ID NO: 426039 - RNA, 19 nt, Artificial Sequence
  Description of Artificial Sequence: Synthetic oligonucleotide
  Sense Strand Starting at position 1368 of SEQ ID NO: 316068
gcagauccucguugugacu

SEQ ID NO: 426040 - RNA, 19 nt, Artificial Sequence
  Description of Artificial Sequence: Synthetic oligonucleotide
  Antisense Strand to SEQ ID NO: 426039
agucacaacgaggaucugc

SEQ ID NO: 426041 - RNA, 19 nt, Artificial Sequence
  Description of Artificial Sequence: Synthetic oligonucleotide
  Sense Strand Starting at position 1368 of SEQ ID NO: 316174
uuucuauaucucuaggagu

SEQ ID NO: 426042 - RNA, 19 nt, Artificial Sequence
  Description of Artificial Sequence: Synthetic oligonucleotide
  Antisense Strand to SEQ ID NO: 426041
acuccuagagauauagaaa

SEQ ID NO: 426043 - RNA, 19 nt, Artificial Sequence
  Description of Artificial Sequence: Synthetic oligonucleotide
  Sense Strand Starting at position 1368 of SEQ ID NO: 316176
ucuauaucucuaggagucu

SEQ ID NO: 426044 - RNA, 19 nt, Artificial Sequence
  Description of Artificial Sequence: Synthetic oligonucleotide
  Antisense Strand to SEQ ID NO: 426043
agacuccuagagauauaga

SEQ ID NO: 426045 - RNA, 19 nt, Artificial Sequence
  Description of Artificial Sequence: Synthetic oligonucleotide
  Sense Strand Starting at position 1368 of SEQ ID NO: 316257
ugggacuucccguaauucu

SEQ ID NO: 426046 - RNA, 19 nt, Artificial Sequence
  Description of Artificial Sequence: Synthetic oligonucleotide
  Antisense Strand to SEQ ID NO: 426045
agaauuacgggaaguccca

SEQ ID NO: 426047 - RNA, 19 nt, Artificial Sequence
  Description of Artificial Sequence: Synthetic oligonucleotide
  Sense Strand Starting at position 1368 of SEQ ID NO: 316346
guccuugcgcacuagaaag

SEQ ID NO: 426048 - RNA, 19 nt, Artificial Sequence
  Description of Artificial Sequence: Synthetic oligonucleotide
  Antisense Strand to SEQ ID NO: 426047
cuuucuagugcgcaaggac

SEQ ID NO: 426049 - RNA, 19 nt, Artificial Sequence
  Description of Artificial Sequence: Synthetic oligonucleotide
  Sense Strand Starting at position 1368 of SEQ ID NO: 316413
gcucaacuuugucugccua

SEQ ID NO: 426050 - RNA, 19 nt, Artificial Sequence
  Description of Artificial Sequence: Synthetic oligonucleotide
  Antisense Strand to SEQ ID NO: 426049
uaggcagacaaaguugagc

SEQ ID NO: 426051 - RNA, 19 nt, Artificial Sequence
  Description of Artificial Sequence: Synthetic oligonucleotide
  Sense Strand Starting at position 1368 of SEQ ID NO: 316486
cagcuuuccuggccaggau

SEQ ID NO: 426052 - RNA, 19 nt, Artificial Sequence
  Description of Artificial Sequence: Synthetic oligonucleotide
  Antisense Strand to SEQ ID NO: 426051
auccuggccaggaaagcug

SEQ ID NO: 426053 - RNA, 19 nt, Artificial Sequence
  Description of Artificial Sequence: Synthetic oligonucleotide
  Sense Strand Starting at position 1368 of SEQ ID NO: 316538
ucaccauugcauugggaaa

SEQ ID NO: 426054 - RNA, 19 nt, Artificial Sequence
  Description of Artificial Sequence: Synthetic oligonucleotide
  Antisense Strand to SEQ ID NO: 426053
uuucccaaugcaaugguga

SEQ ID NO: 426055 - RNA, 19 nt, Artificial Sequence
  Description of Artificial Sequence: Synthetic oligonucleotide
  Sense Strand Starting at position 1368 of SEQ ID NO: 316596
gcggcuacucuugccugaa

SEQ ID NO: 426056 - RNA, 19 nt, Artificial Sequence
  Description of Artificial Sequence: Synthetic oligonucleotide
  Antisense Strand to SEQ ID NO: 426055
uucaggcaagaguagccgc

SEQ ID NO: 426057 - RNA, 19 nt, Artificial Sequence
  Description of Artificial Sequence: Synthetic oligonucleotide
  Sense Strand Starting at position 1368 of SEQ ID NO: 316597
cggcuacucuugccugaau

SEQ ID NO: 426058 - RNA, 19 nt, Artificial Sequence
  Description of Artificial Sequence: Synthetic oligonucleotide
  Antisense Strand to SEQ ID NO: 426057
auucaggcaagaguagccg

SEQ ID NO: 426059 - RNA, 19 nt, Artificial Sequence
  Description of Artificial Sequence: Synthetic oligonucleotide
  Sense Strand Starting at position 1368 of SEQ ID NO: 316598
ggcuacucuugccugaaua

SEQ ID NO: 426060 - RNA, 19 nt, Artificial Sequence
  Description of Artificial Sequence: Synthetic oligonucleotide
  Antisense Strand to SEQ ID NO: 426059
uauucaggcaagaguagcc

SEQ ID NO: 426061 - RNA, 19 nt, Artificial Sequence
  Description of Artificial Sequence: Synthetic oligonucleotide
  Sense Strand Starting at position 1368 of SEQ ID NO: 316599
gcuacucuugccugaauau

SEQ ID NO: 426062 - RNA, 19 nt, Artificial Sequence
  Description of Artificial Sequence: Synthetic oligonucleotide
  Antisense Strand to SEQ ID NO: 426061
auauucaggcaagaguagc

SEQ ID NO: 426063 - RNA, 19 nt, Artificial Sequence
  Description of Artificial Sequence: Synthetic oligonucleotide
  Sense Strand Starting at position 1368 of SEQ ID NO: 317507
gcggguacuucacuagacu

SEQ ID NO: 426064 - RNA, 19 nt, Artificial Sequence
  Description of Artificial Sequence: Synthetic oligonucleotide
  Antisense Strand to SEQ ID NO: 426063
agucuagugaaguacccgc

SEQ ID NO: 426065 - RNA, 19 nt, Artificial Sequence
  Description of Artificial Sequence: Synthetic oligonucleotide
  Sense Strand Starting at position 1368 of SEQ ID NO: 317559
uuugcauucccagagcaga

SEQ ID NO: 426066 - RNA, 19 nt, Artificial Sequence
  Description of Artificial Sequence: Synthetic oligonucleotide
  Antisense Strand to SEQ ID NO: 426065
ucugcucugggaaugcaaa

SEQ ID NO: 426067 - RNA, 19 nt, Artificial Sequence
  Description of Artificial Sequence: Synthetic oligonucleotide
  Sense Strand Starting at position 1368 of SEQ ID NO: 317661
uuuaacugccaaggaauau

SEQ ID NO: 426068 - RNA, 19 nt, Artificial Sequence
  Description of Artificial Sequence: Synthetic oligonucleotide
  Antisense Strand to SEQ ID NO: 426067
auauuccuuggcaguuaaa

SEQ ID NO: 426069 - RNA, 19 nt, Artificial Sequence
  Description of Artificial Sequence: Synthetic oligonucleotide
  Sense Strand Starting at position 1368 of SEQ ID NO: 317681
uguagaauuguccacgaaa

SEQ ID NO: 426070 - RNA, 19 nt, Artificial Sequence
  Description of Artificial Sequence: Synthetic oligonucleotide
  Antisense Strand to SEQ ID NO: 426069
uuucguggacaauucuaca

SEQ ID NO: 426071 - RNA, 19 nt, Artificial Sequence
  Description of Artificial Sequence: Synthetic oligonucleotide
  Sense Strand Starting at position 1368 of SEQ ID NO: 317872
acguugguucgguauggaa

SEQ ID NO: 426072 - RNA, 19 nt, Artificial Sequence
  Description of Artificial Sequence: Synthetic oligonucleotide
  Antisense Strand to SEQ ID NO: 426071
uuccauaccgaaccaacgu

SEQ ID NO: 426073 - RNA, 19 nt, Artificial Sequence
  Description of Artificial Sequence: Synthetic oligonucleotide
  Sense Strand Starting at position 1368 of SEQ ID NO: 317907
agaggaggcuuucaggaca

SEQ ID NO: 426074 - RNA, 19 nt, Artificial Sequence
  Description of Artificial Sequence: Synthetic oligonucleotide
  Antisense Strand to SEQ ID NO: 426073
uguccugaaagccuccucu

SEQ ID NO: 426075 - RNA, 19 nt, Artificial Sequence
  Description of Artificial Sequence: Synthetic oligonucleotide
  Sense Strand Starting at position 1368 of SEQ ID NO: 318005
agggaugucucaguuaaga

SEQ ID NO: 426076 - RNA, 19 nt, Artificial Sequence
  Description of Artificial Sequence: Synthetic oligonucleotide
  Antisense Strand to SEQ ID NO: 426075
ucuuaacugagacaucccu

SEQ ID NO: 426077 - RNA, 19 nt, Artificial Sequence
  Description of Artificial Sequence: Synthetic oligonucleotide
  Sense Strand Starting at position 1368 of SEQ ID NO: 318067
uguagcaggcuucagagaa

SEQ ID NO: 426078 - RNA, 19 nt, Artificial Sequence
  Description of Artificial Sequence: Synthetic oligonucleotide
  Antisense Strand to SEQ ID NO: 426077
uucucugaagccugcuaca

SEQ ID NO: 426079 - RNA, 19 nt, Artificial Sequence
  Description of Artificial Sequence: Synthetic oligonucleotide
  Sense Strand Starting at position 1368 of SEQ ID NO: 318120
ccggauagucugugagacu

SEQ ID NO: 426080 - RNA, 19 nt, Artificial Sequence
  Description of Artificial Sequence: Synthetic oligonucleotide
  Antisense Strand to SEQ ID NO: 426079
agucucacagacuauccgg

SEQ ID NO: 426081 - RNA, 19 nt, Artificial Sequence
  Description of Artificial Sequence: Synthetic oligonucleotide
  Sense Strand Starting at position 1368 of SEQ ID NO: 318146
gcuguucuaucagucuuaa

SEQ ID NO: 426082 - RNA, 19 nt, Artificial Sequence
  Description of Artificial Sequence: Synthetic oligonucleotide
  Antisense Strand to SEQ ID NO: 426081
uuaagacugauagaacagc

SEQ ID NO: 426083 - RNA, 19 nt, Artificial Sequence
  Description of Artificial Sequence: Synthetic oligonucleotide
  Sense Strand Starting at position 1368 of SEQ ID NO: 318274
ucacguuaacuuuggaaug

SEQ ID NO: 426084 - RNA, 19 nt, Artificial Sequence
  Description of Artificial Sequence: Synthetic oligonucleotide
  Antisense Strand to SEQ ID NO: 426083
cauuccaaaguuaacguga

SEQ ID NO: 426085 - RNA, 19 nt, Artificial Sequence
  Description of Artificial Sequence: Synthetic oligonucleotide
  Sense Strand Starting at position 1368 of SEQ ID NO: 318369
augaauaaauguugaacca

SEQ ID NO: 426086 - RNA, 19 nt, Artificial Sequence
  Description of Artificial Sequence: Synthetic oligonucleotide
  Antisense Strand to SEQ ID NO: 426085
ugguucaacauuuauucau

SEQ ID NO: 426087 - RNA, 19 nt, Artificial Sequence
  Description of Artificial Sequence: Synthetic oligonucleotide
  Sense Strand Starting at position 1368 of SEQ ID NO: 318444
ugcaacaugccaggaaauu

SEQ ID NO: 426088 - RNA, 19 nt, Artificial Sequence
  Description of Artificial Sequence: Synthetic oligonucleotide
  Antisense Strand to SEQ ID NO: 426087
aauuuccuggcauguugca

SEQ ID NO: 426089 - RNA, 19 nt, Artificial Sequence
  Description of Artificial Sequence: Synthetic oligonucleotide
  Sense Strand Starting at position 1368 of SEQ ID NO: 318445
gcaacaugccaggaaauua

SEQ ID NO: 426090 - RNA, 19 nt, Artificial Sequence
  Description of Artificial Sequence: Synthetic oligonucleotide
  Antisense Strand to SEQ ID NO: 426089
uaauuuccuggcauguugc

SEQ ID NO: 426091 - RNA, 19 nt, Artificial Sequence
  Description of Artificial Sequence: Synthetic oligonucleotide
  Sense Strand Starting at position 1368 of SEQ ID NO: 318521
cagagcuugcuauauauga

SEQ ID NO: 426092 - RNA, 19 nt, Artificial Sequence
  Description of Artificial Sequence: Synthetic oligonucleotide
  Antisense Strand to SEQ ID NO: 426091
ucauauauagcaagcucug

SEQ ID NO: 426093 - RNA, 19 nt, Artificial Sequence
  Description of Artificial Sequence: Synthetic oligonucleotide
  Sense Strand Starting at position 1368 of SEQ ID NO: 318528
ugcuauauaugacaagaga

SEQ ID NO: 426094 - RNA, 19 nt, Artificial Sequence
  Description of Artificial Sequence: Synthetic oligonucleotide
  Antisense Strand to SEQ ID NO: 426093
ucucuugucauauauagca

SEQ ID NO: 426095 - RNA, 19 nt, Artificial Sequence
  Description of Artificial Sequence: Synthetic oligonucleotide
  Sense Strand Starting at position 1368 of SEQ ID NO: 318632
cagguauucccuuauugga

SEQ ID NO: 426096 - RNA, 19 nt, Artificial Sequence
  Description of Artificial Sequence: Synthetic oligonucleotide
  Antisense Strand to SEQ ID NO: 426095
uccaauaagggaauaccug

SEQ ID NO: 426097 - RNA, 19 nt, Artificial Sequence
  Description of Artificial Sequence: Synthetic oligonucleotide
  Sense Strand Starting at position 1368 of SEQ ID NO: 318634
gguauucccuuauuggaag

SEQ ID NO: 426098 - RNA, 19 nt, Artificial Sequence
  Description of Artificial Sequence: Synthetic oligonucleotide
  Antisense Strand to SEQ ID NO: 426097
cuuccaauaagggaauacc

SEQ ID NO: 426099 - RNA, 19 nt, Artificial Sequence
  Description of Artificial Sequence: Synthetic oligonucleotide
  Sense Strand Starting at position 1368 of SEQ ID NO: 318693
agggaaucuuauguaauug

SEQ ID NO: 426100 - RNA, 19 nt, Artificial Sequence
  Description of Artificial Sequence: Synthetic oligonucleotide
  Antisense Strand to SEQ ID NO: 426099
caauuacauaagauucccu

SEQ ID NO: 426101 - RNA, 19 nt, Artificial Sequence
  Description of Artificial Sequence: Synthetic oligonucleotide
  Sense Strand Starting at position 1368 of SEQ ID NO: 318751
uuggaaguaguaugggaaa

SEQ ID NO: 426102 - RNA, 19 nt, Artificial Sequence
  Description of Artificial Sequence: Synthetic oligonucleotide
  Antisense Strand to SEQ ID NO: 426101
uuucccauacuacuuccaa

SEQ ID NO: 426103 - RNA, 19 nt, Artificial Sequence
  Description of Artificial Sequence: Synthetic oligonucleotide
  Sense Strand Starting at position 1369 of SEQ ID NO: 315249
ggaacucuaucagcagaag

SEQ ID NO: 426104 - RNA, 19 nt, Artificial Sequence
  Description of Artificial Sequence: Synthetic oligonucleotide
  Antisense Strand to SEQ ID NO: 426103
cuucugcugauagaguucc

SEQ ID NO: 426105 - RNA, 19 nt, Artificial Sequence
  Description of Artificial Sequence: Synthetic oligonucleotide
  Sense Strand Starting at position 1369 of SEQ ID NO: 315489
uuauuaagccugugccaag

SEQ ID NO: 426106 - RNA, 19 nt, Artificial Sequence
  Description of Artificial Sequence: Synthetic oligonucleotide
  Antisense Strand to SEQ ID NO: 426105
cuuggcacaggcuuaauaa

SEQ ID NO: 426107 - RNA, 19 nt, Artificial Sequence
  Description of Artificial Sequence: Synthetic oligonucleotide
  Sense Strand Starting at position 1369 of SEQ ID NO: 315501
ugccaagcacuugacauau

SEQ ID NO: 426108 - RNA, 19 nt, Artificial Sequence
  Description of Artificial Sequence: Synthetic oligonucleotide
  Antisense Strand to SEQ ID NO: 426107
auaugucaagugcuuggca

SEQ ID NO: 426109 - RNA, 19 nt, Artificial Sequence
  Description of Artificial Sequence: Synthetic oligonucleotide
  Sense Strand Starting at position 1369 of SEQ ID NO: 315572
aacugagacucggagggau

SEQ ID NO: 426110 - RNA, 19 nt, Artificial Sequence
  Description of Artificial Sequence: Synthetic oligonucleotide
  Antisense Strand to SEQ ID NO: 426109
aucccuccgagucucaguu

SEQ ID NO: 426111 - RNA, 19 nt, Artificial Sequence
  Description of Artificial Sequence: Synthetic oligonucleotide
  Sense Strand Starting at position 1369 of SEQ ID NO: 315574
cugagacucggagggauua

SEQ ID NO: 426112 - RNA, 19 nt, Artificial Sequence
  Description of Artificial Sequence: Synthetic oligonucleotide
  Antisense Strand to SEQ ID NO: 426111
uaaucccuccgagucucag

SEQ ID NO: 426113 - RNA, 19 nt, Artificial Sequence
  Description of Artificial Sequence: Synthetic oligonucleotide
  Sense Strand Starting at position 1369 of SEQ ID NO: 315811
ggcagauccucguugugac

SEQ ID NO: 426114 - RNA, 19 nt, Artificial Sequence
  Description of Artificial Sequence: Synthetic oligonucleotide
  Antisense Strand to SEQ ID NO: 426113
gucacaacgaggaucugcc

SEQ ID NO: 426115 - RNA, 19 nt, Artificial Sequence
  Description of Artificial Sequence: Synthetic oligonucleotide
  Sense Strand Starting at position 1369 of SEQ ID NO: 315918
uuucuauaucucuaggagu

SEQ ID NO: 426116 - RNA, 19 nt, Artificial Sequence
  Description of Artificial Sequence: Synthetic oligonucleotide
  Antisense Strand to SEQ ID NO: 426115
acuccuagagauauagaaa

SEQ ID NO: 426117 - RNA, 19 nt, Artificial Sequence
  Description of Artificial Sequence: Synthetic oligonucleotide
  Sense Strand Starting at position 1369 of SEQ ID NO: 315920
ucuauaucucuaggagucu

SEQ ID NO: 426118 - RNA, 19 nt, Artificial Sequence
  Description of Artificial Sequence: Synthetic oligonucleotide
  Antisense Strand to SEQ ID NO: 426117
agacuccuagagauauaga

SEQ ID NO: 426119 - RNA, 19 nt, Artificial Sequence
  Description of Artificial Sequence: Synthetic oligonucleotide
  Sense Strand Starting at position 1369 of SEQ ID NO: 316001
ugggacuucccguaauucu

SEQ ID NO: 426120 - RNA, 19 nt, Artificial Sequence
  Description of Artificial Sequence: Synthetic oligonucleotide
  Antisense Strand to SEQ ID NO: 426119
agaauuacgggaaguccca

SEQ ID NO: 426121 - RNA, 19 nt, Artificial Sequence
  Description of Artificial Sequence: Synthetic oligonucleotide
  Sense Strand Starting at position 1369 of SEQ ID NO: 316090
guccuugcgcacuagaaag

SEQ ID NO: 426122 - RNA, 19 nt, Artificial Sequence
  Description of Artificial Sequence: Synthetic oligonucleotide
  Antisense Strand to SEQ ID NO: 426121
cuuucuagugcgcaaggac

SEQ ID NO: 426123 - RNA, 19 nt, Artificial Sequence
  Description of Artificial Sequence: Synthetic oligonucleotide
  Sense Strand Starting at position 1369 of SEQ ID NO: 316230
cagcuuuccuggccaggau

SEQ ID NO: 426124 - RNA, 19 nt, Artificial Sequence
  Description of Artificial Sequence: Synthetic oligonucleotide
  Antisense Strand to SEQ ID NO: 426123
auccuggccaggaaagcug

SEQ ID NO: 426125 - RNA, 19 nt, Artificial Sequence
  Description of Artificial Sequence: Synthetic oligonucleotide
  Sense Strand Starting at position 1369 of SEQ ID NO: 316282
ucaccauugcauugggaaa

SEQ ID NO: 426126 - RNA, 19 nt, Artificial Sequence
  Description of Artificial Sequence: Synthetic oligonucleotide
  Antisense Strand to SEQ ID NO: 426125
uuucccaaugcaaugguga

SEQ ID NO: 426127 - RNA, 19 nt, Artificial Sequence
  Description of Artificial Sequence: Synthetic oligonucleotide
  Sense Strand Starting at position 1369 of SEQ ID NO: 316340
gcggcuacucuugccugaa

SEQ ID NO: 426128 - RNA, 19 nt, Artificial Sequence
  Description of Artificial Sequence: Synthetic oligonucleotide
  Antisense Strand to SEQ ID NO: 426127
uucaggcaagaguagccgc

SEQ ID NO: 426129 - RNA, 19 nt, Artificial Sequence
  Description of Artificial Sequence: Synthetic oligonucleotide
  Sense Strand Starting at position 1369 of SEQ ID NO: 316341
cggcuacucuugccugaau

SEQ ID NO: 426130 - RNA, 19 nt, Artificial Sequence
  Description of Artificial Sequence: Synthetic oligonucleotide
  Antisense Strand to SEQ ID NO: 426129
auucaggcaagaguagccg

SEQ ID NO: 426131 - RNA, 19 nt, Artificial Sequence
  Description of Artificial Sequence: Synthetic oligonucleotide
  Sense Strand Starting at position 1369 of SEQ ID NO: 316342
ggcuacucuugccugaaua

SEQ ID NO: 426132 - RNA, 19 nt, Artificial Sequence
  Description of Artificial Sequence: Synthetic oligonucleotide
  Antisense Strand to SEQ ID NO: 426131
uauucaggcaagaguagcc

SEQ ID NO: 426133 - RNA, 19 nt, Artificial Sequence
  Description of Artificial Sequence: Synthetic oligonucleotide
  Sense Strand Starting at position 1369 of SEQ ID NO: 316343
gcuacucuugccugaauau

SEQ ID NO: 426134 - RNA, 19 nt, Artificial Sequence
  Description of Artificial Sequence: Synthetic oligonucleotide
  Antisense Strand to SEQ ID NO: 426133
auauucaggcaagaguagc

SEQ ID NO: 426135 - RNA, 19 nt, Artificial Sequence
  Description of Artificial Sequence: Synthetic oligonucleotide
  Sense Strand Starting at position 1369 of SEQ ID NO: 317251
gcggguacuucacuagacu

SEQ ID NO: 426136 - RNA, 19 nt, Artificial Sequence
  Description of Artificial Sequence: Synthetic oligonucleotide
  Antisense Strand to SEQ ID NO: 426135
agucuagugaaguacccgc

SEQ ID NO: 426137 - RNA, 19 nt, Artificial Sequence
  Description of Artificial Sequence: Synthetic oligonucleotide
  Sense Strand Starting at position 1369 of SEQ ID NO: 317303
uuugcauucccagagcaga

SEQ ID NO: 426138 - RNA, 19 nt, Artificial Sequence
  Description of Artificial Sequence: Synthetic oligonucleotide
  Antisense Strand to SEQ ID NO: 426137
ucugcucugggaaugcaaa

SEQ ID NO: 426139 - RNA, 19 nt, Artificial Sequence
  Description of Artificial Sequence: Synthetic oligonucleotide
  Sense Strand Starting at position 1369 of SEQ ID NO: 317405
uuuaacugccaaggaauau

SEQ ID NO: 426140 - RNA, 19 nt, Artificial Sequence
  Description of Artificial Sequence: Synthetic oligonucleotide
  Antisense Strand to SEQ ID NO: 426139
auauuccuuggcaguuaaa

SEQ ID NO: 426141 - RNA, 19 nt, Artificial Sequence
  Description of Artificial Sequence: Synthetic oligonucleotide
  Sense Strand Starting at position 1369 of SEQ ID NO: 317425
uguagaauuguccacgaaa

SEQ ID NO: 426142 - RNA, 19 nt, Artificial Sequence
  Description of Artificial Sequence: Synthetic oligonucleotide
  Antisense Strand to SEQ ID NO: 426141
uuucguggacaauucuaca

SEQ ID NO: 426143 - RNA, 19 nt, Artificial Sequence
  Description of Artificial Sequence: Synthetic oligonucleotide
  Sense Strand Starting at position 1369 of SEQ ID NO: 317616
acguugguucgguauggaa

SEQ ID NO: 426144 - RNA, 19 nt, Artificial Sequence
  Description of Artificial Sequence: Synthetic oligonucleotide
  Antisense Strand to SEQ ID NO: 426143
uuccauaccgaaccaacgu

SEQ ID NO: 426145 - RNA, 19 nt, Artificial Sequence
  Description of Artificial Sequence: Synthetic oligonucleotide
  Sense Strand Starting at position 1369 of SEQ ID NO: 317651
agaggaggcuuucaggaca

SEQ ID NO: 426146 - RNA, 19 nt, Artificial Sequence
  Description of Artificial Sequence: Synthetic oligonucleotide
  Antisense Strand to SEQ ID NO: 426145
uguccugaaagccuccucu

SEQ ID NO: 426147 - RNA, 19 nt, Artificial Sequence
  Description of Artificial Sequence: Synthetic oligonucleotide
  Sense Strand Starting at position 1369 of SEQ ID NO: 317749
agggaugucucaguuaaga

SEQ ID NO: 426148 - RNA, 19 nt, Artificial Sequence
  Description of Artificial Sequence: Synthetic oligonucleotide
  Antisense Strand to SEQ ID NO: 426147
ucuuaacugagacaucccu

SEQ ID NO: 426149 - RNA, 19 nt, Artificial Sequence
  Description of Artificial Sequence: Synthetic oligonucleotide
  Sense Strand Starting at position 1369 of SEQ ID NO: 317811
uguagcaggcuucagagaa

SEQ ID NO: 426150 - RNA, 19 nt, Artificial Sequence
  Description of Artificial Sequence: Synthetic oligonucleotide
  Antisense Strand to SEQ ID NO: 426149
uucucugaagccugcuaca

SEQ ID NO: 426151 - RNA, 19 nt, Artificial Sequence
  Description of Artificial Sequence: Synthetic oligonucleotide
  Sense Strand Starting at position 1369 of SEQ ID NO: 317864
ccggauagucugugagacu

SEQ ID NO: 426152 - RNA, 19 nt, Artificial Sequence
  Description of Artificial Sequence: Synthetic oligonucleotide
  Antisense Strand to SEQ ID NO: 426151
agucucacagacuauccgg

SEQ ID NO: 426153 - RNA, 19 nt, Artificial Sequence
  Description of Artificial Sequence: Synthetic oligonucleotide
  Sense Strand Starting at position 1369 of SEQ ID NO: 317890
gcuguucuaucagucuuaa

SEQ ID NO: 426154 - RNA, 19 nt, Artificial Sequence
  Description of Artificial Sequence: Synthetic oligonucleotide
  Antisense Strand to SEQ ID NO: 426153
uuaagacugauagaacagc

SEQ ID NO: 426155 - RNA, 19 nt, Artificial Sequence
  Description of Artificial Sequence: Synthetic oligonucleotide
  Sense Strand Starting at position 1369 of SEQ ID NO: 318018
ucacguuaacuuuggaaug

SEQ ID NO: 426156 - RNA, 19 nt, Artificial Sequence
  Description of Artificial Sequence: Synthetic oligonucleotide
  Antisense Strand to SEQ ID NO: 426155
cauuccaaaguuaacguga

SEQ ID NO: 426157 - RNA, 19 nt, Artificial Sequence
  Description of Artificial Sequence: Synthetic oligonucleotide
  Sense Strand Starting at position 1369 of SEQ ID NO: 318188
ugcaacaugccaggaaauu

SEQ ID NO: 426158 - RNA, 19 nt, Artificial Sequence
  Description of Artificial Sequence: Synthetic oligonucleotide
  Antisense Strand to SEQ ID NO: 426157
aauuuccuggcauguugca

SEQ ID NO: 426159 - RNA, 19 nt, Artificial Sequence
  Description of Artificial Sequence: Synthetic oligonucleotide
  Sense Strand Starting at position 1369 of SEQ ID NO: 318189
gcaacaugccaggaaauua

SEQ ID NO: 426160 - RNA, 19 nt, Artificial Sequence
  Description of Artificial Sequence: Synthetic oligonucleotide
  Antisense Strand to SEQ ID NO: 426159
uaauuuccuggcauguugc

SEQ ID NO: 426161 - RNA, 19 nt, Artificial Sequence
  Description of Artificial Sequence: Synthetic oligonucleotide
  Sense Strand Starting at position 1369 of SEQ ID NO: 318265
cagagcuugcuauauauga

SEQ ID NO: 426162 - RNA, 19 nt, Artificial Sequence
  Description of Artificial Sequence: Synthetic oligonucleotide
  Antisense Strand to SEQ ID NO: 426161
ucauauauagcaagcucug

SEQ ID NO: 426163 - RNA, 19 nt, Artificial Sequence
  Description of Artificial Sequence: Synthetic oligonucleotide
  Sense Strand Starting at position 1369 of SEQ ID NO: 318272
ugcuauauaugacaagaga

SEQ ID NO: 426164 - RNA, 19 nt, Artificial Sequence
  Description of Artificial Sequence: Synthetic oligonucleotide
  Antisense Strand to SEQ ID NO: 426163
ucucuugucauauauagca

SEQ ID NO: 426165 - RNA, 19 nt, Artificial Sequence
  Description of Artificial Sequence: Synthetic oligonucleotide
  Sense Strand Starting at position 1369 of SEQ ID NO: 318376
cagguauucccuuauugga

SEQ ID NO: 426166 - RNA, 19 nt, Artificial Sequence
  Description of Artificial Sequence: Synthetic oligonucleotide
  Antisense Strand to SEQ ID NO: 426165
uccaauaagggaauaccug

SEQ ID NO: 426167 - RNA, 19 nt, Artificial Sequence
  Description of Artificial Sequence: Synthetic oligonucleotide
  Sense Strand Starting at position 1369 of SEQ ID NO: 318378
gguauucccuuauuggaag

SEQ ID NO: 426168 - RNA, 19 nt, Artificial Sequence
  Description of Artificial Sequence: Synthetic oligonucleotide
  Antisense Strand to SEQ ID NO: 426167
cuuccaauaagggaauacc

SEQ ID NO: 426169 - RNA, 19 nt, Artificial Sequence
  Description of Artificial Sequence: Synthetic oligonucleotide
  Sense Strand Starting at position 1369 of SEQ ID NO: 318437
agggaaucuuauguaauug

SEQ ID NO: 426170 - RNA, 19 nt, Artificial Sequence
  Description of Artificial Sequence: Synthetic oligonucleotide
  Antisense Strand to SEQ ID NO: 426169
caauuacauaagauucccu

SEQ ID NO: 426171 - RNA, 19 nt, Artificial Sequence
  Description of Artificial Sequence: Synthetic oligonucleotide
  Sense Strand Starting at position 1369 of SEQ ID NO: 318495
uuggaaguaguaugggaaa

SEQ ID NO: 426172 - RNA, 19 nt, Artificial Sequence
  Description of Artificial Sequence: Synthetic oligonucleotide
  Antisense Strand to SEQ ID NO: 426171
uuucccauacuacuuccaa

SEQ ID NO: 426173 - RNA, 19 nt, Artificial Sequence
  Description of Artificial Sequence: Synthetic oligonucleotide
  Sense Strand Starting at position 1369 of SEQ ID NO: 319105
aauugcuaccaggguuauu

SEQ ID NO: 426174 - RNA, 19 nt, Artificial Sequence
  Description of Artificial Sequence: Synthetic oligonucleotide
  Antisense Strand to SEQ ID NO: 426173
aauaacccugguagcaauu

SEQ ID NO: 426175 - RNA, 19 nt, Artificial Sequence
  Description of Artificial Sequence: Synthetic oligonucleotide
  Sense Strand Starting at position 1369 of SEQ ID NO: 319155
gugauuuagugguuugacu

SEQ ID NO: 426176 - RNA, 19 nt, Artificial Sequence
  Description of Artificial Sequence: Synthetic oligonucleotide
  Antisense Strand to SEQ ID NO: 426175
agucaaaccacuaaaucac

SEQ ID NO: 426177 - RNA, 19 nt, Artificial Sequence
  Description of Artificial Sequence: Synthetic oligonucleotide
  Sense Strand Starting at position 1369 of SEQ ID NO: 319164
ugguuugacuuccuagagu

SEQ ID NO: 426178 - RNA, 19 nt, Artificial Sequence
  Description of Artificial Sequence: Synthetic oligonucleotide
  Antisense Strand to SEQ ID NO: 426177
acucuaggaagucaaacca

SEQ ID NO: 426179 - RNA, 19 nt, Artificial Sequence
  Description of Artificial Sequence: Synthetic oligonucleotide
  Sense Strand Starting at position 1369 of SEQ ID NO: 319173
uuccuagagugguuaccau

SEQ ID NO: 426180 - RNA, 19 nt, Artificial Sequence
  Description of Artificial Sequence: Synthetic oligonucleotide
  Antisense Strand to SEQ ID NO: 426179
augguaaccacucuaggaa

SEQ ID NO: 426181 - RNA, 19 nt, Artificial Sequence
  Description of Artificial Sequence: Synthetic oligonucleotide
  Sense Strand Starting at position 1369 of SEQ ID NO: 319218
guugcuacagauuguguga

SEQ ID NO: 426182 - RNA, 19 nt, Artificial Sequence
  Description of Artificial Sequence: Synthetic oligonucleotide
  Antisense Strand to SEQ ID NO: 426181
ucacacaaucuguagcaac

SEQ ID NO: 426183 - RNA, 19 nt, Artificial Sequence
  Description of Artificial Sequence: Synthetic oligonucleotide
  Sense Strand Starting at position 1370 of SEQ ID NO: 315453
ucuuguagcucuuggaaac

SEQ ID NO: 426184 - RNA, 19 nt, Artificial Sequence
  Description of Artificial Sequence: Synthetic oligonucleotide
  Antisense Strand to SEQ ID NO: 426183
guuuccaagagcuacaaga

SEQ ID NO: 426185 - RNA, 19 nt, Artificial Sequence
  Description of Artificial Sequence: Synthetic oligonucleotide
  Sense Strand Starting at position 1370 of SEQ ID NO: 315454
cuuguagcucuuggaaaca

SEQ ID NO: 426186 - RNA, 19 nt, Artificial Sequence
  Description of Artificial Sequence: Synthetic oligonucleotide
  Antisense Strand to SEQ ID NO: 426185
uguuuccaagagcuacaag

SEQ ID NO: 426187 - RNA, 19 nt, Artificial Sequence
  Description of Artificial Sequence: Synthetic oligonucleotide
  Sense Strand Starting at position 1370 of SEQ ID NO: 315504
gaaggcaaaugacgugaau

SEQ ID NO: 426188 - RNA, 19 nt, Artificial Sequence
  Description of Artificial Sequence: Synthetic oligonucleotide
  Antisense Strand to SEQ ID NO: 426187
auucacgucauuugccuuc

SEQ ID NO: 426189 - RNA, 19 nt, Artificial Sequence
  Description of Artificial Sequence: Synthetic oligonucleotide
  Sense Strand Starting at position 1370 of SEQ ID NO: 315506
aggcaaaugacgugaauua

SEQ ID NO: 426190 - RNA, 19 nt, Artificial Sequence
  Description of Artificial Sequence: Synthetic oligonucleotide
  Antisense Strand to SEQ ID NO: 426189
uaauucacgucauuugccu

SEQ ID NO: 426191 - RNA, 19 nt, Artificial Sequence
  Description of Artificial Sequence: Synthetic oligonucleotide
  Sense Strand Starting at position 1370 of SEQ ID NO: 315507
ggcaaaugacgugaauuaa

SEQ ID NO: 426192 - RNA, 19 nt, Artificial Sequence
  Description of Artificial Sequence: Synthetic oligonucleotide
  Antisense Strand to SEQ ID NO: 426191
uuaauucacgucauuugcc

SEQ ID NO: 426193 - RNA, 19 nt, Artificial Sequence
  Description of Artificial Sequence: Synthetic oligonucleotide
  Sense Strand Starting at position 1370 of SEQ ID NO: 315898
ucauaugaguguucccaug

SEQ ID NO: 426194 - RNA, 19 nt, Artificial Sequence
  Description of Artificial Sequence: Synthetic oligonucleotide
  Antisense Strand to SEQ ID NO: 426193
caugggaacacucauauga

SEQ ID NO: 426195 - RNA, 19 nt, Artificial Sequence
  Description of Artificial Sequence: Synthetic oligonucleotide
  Sense Strand Starting at position 1370 of SEQ ID NO: 315900
auaugaguguucccaugac

SEQ ID NO: 426196 - RNA, 19 nt, Artificial Sequence
  Description of Artificial Sequence: Synthetic oligonucleotide
  Antisense Strand to SEQ ID NO: 426195
gucaugggaacacucauau

SEQ ID NO: 426197 - RNA, 19 nt, Artificial Sequence
  Description of Artificial Sequence: Synthetic oligonucleotide
  Sense Strand Starting at position 1370 of SEQ ID NO: 316192
gucauauugugaggagguc

SEQ ID NO: 426198 - RNA, 19 nt, Artificial Sequence
  Description of Artificial Sequence: Synthetic oligonucleotide
  Antisense Strand to SEQ ID NO: 426197
gaccuccucacaauaugac

SEQ ID NO: 426199 - RNA, 19 nt, Artificial Sequence
  Description of Artificial Sequence: Synthetic oligonucleotide
  Sense Strand Starting at position 1370 of SEQ ID NO: 316200
gugaggaggucuggagcua

SEQ ID NO: 426200 - RNA, 19 nt, Artificial Sequence
  Description of Artificial Sequence: Synthetic oligonucleotide
  Antisense Strand to SEQ ID NO: 426199
uagcuccagaccuccucac

SEQ ID NO: 426201 - RNA, 19 nt, Artificial Sequence
  Description of Artificial Sequence: Synthetic oligonucleotide
  Sense Strand Starting at position 1370 of SEQ ID NO: 316594
agcuaaauuuggugaugga

SEQ ID NO: 426202 - RNA, 19 nt, Artificial Sequence
  Description of Artificial Sequence: Synthetic oligonucleotide
  Antisense Strand to SEQ ID NO: 426201
uccaucaccaaauuuagcu

SEQ ID NO: 426203 - RNA, 19 nt, Artificial Sequence
  Description of Artificial Sequence: Synthetic oligonucleotide
  Sense Strand Starting at position 1370 of SEQ ID NO: 316688
uuaaucuucucagguauga

SEQ ID NO: 426204 - RNA, 19 nt, Artificial Sequence
  Description of Artificial Sequence: Synthetic oligonucleotide
  Antisense Strand to SEQ ID NO: 426203
ucauaccugagaagauuaa

SEQ ID NO: 426205 - RNA, 19 nt, Artificial Sequence
  Description of Artificial Sequence: Synthetic oligonucleotide
  Sense Strand Starting at position 1370 of SEQ ID NO: 316697
ucagguaugacaggucacu

SEQ ID NO: 426206 - RNA, 19 nt, Artificial Sequence
  Description of Artificial Sequence: Synthetic oligonucleotide
  Antisense Strand to SEQ ID NO: 426205
agugaccugucauaccuga

SEQ ID NO: 426207 - RNA, 19 nt, Artificial Sequence
  Description of Artificial Sequence: Synthetic oligonucleotide
  Sense Strand Starting at position 1370 of SEQ ID NO: 316775
gccuguucuucucagccga

SEQ ID NO: 426208 - RNA, 19 nt, Artificial Sequence
  Description of Artificial Sequence: Synthetic oligonucleotide
  Antisense Strand to SEQ ID NO: 426207
ucggcugagaagaacaggc

SEQ ID NO: 426209 - RNA, 19 nt, Artificial Sequence
  Description of Artificial Sequence: Synthetic oligonucleotide
  Sense Strand Starting at position 1370 of SEQ ID NO: 316777
cuguucuucucagccgaau

SEQ ID NO: 426210 - RNA, 19 nt, Artificial Sequence
  Description of Artificial Sequence: Synthetic oligonucleotide
  Antisense Strand to SEQ ID NO: 426209
auucggcugagaagaacag

SEQ ID NO: 426211 - RNA, 19 nt, Artificial Sequence
  Description of Artificial Sequence: Synthetic oligonucleotide
  Sense Strand Starting at position 1370 of SEQ ID NO: 316835
gucaccuagucuuugcaaa

SEQ ID NO: 426212 - RNA, 19 nt, Artificial Sequence
  Description of Artificial Sequence: Synthetic oligonucleotide
  Antisense Strand to SEQ ID NO: 426211
uuugcaaagacuaggugac

SEQ ID NO: 426213 - RNA, 19 nt, Artificial Sequence
  Description of Artificial Sequence: Synthetic oligonucleotide
  Sense Strand Starting at position 1370 of SEQ ID NO: 316877
auuaauauuucccgagcga

SEQ ID NO: 426214 - RNA, 19 nt, Artificial Sequence
  Description of Artificial Sequence: Synthetic oligonucleotide
  Antisense Strand to SEQ ID NO: 426213
ucgcucgggaaauauuaau

SEQ ID NO: 426215 - RNA, 19 nt, Artificial Sequence
  Description of Artificial Sequence: Synthetic oligonucleotide
  Sense Strand Starting at position 1370 of SEQ ID NO: 317026
cacgguuaagacugaagua

SEQ ID NO: 426216 - RNA, 19 nt, Artificial Sequence
  Description of Artificial Sequence: Synthetic oligonucleotide
  Antisense Strand to SEQ ID NO: 426215
uacuucagucuuaaccgug

SEQ ID NO: 426217 - RNA, 19 nt, Artificial Sequence
  Description of Artificial Sequence: Synthetic oligonucleotide
  Sense Strand Starting at position 1370 of SEQ ID NO: 317123
cguauaaacuucuguaaac

SEQ ID NO: 426218 - RNA, 19 nt, Artificial Sequence
  Description of Artificial Sequence: Synthetic oligonucleotide
  Antisense Strand to SEQ ID NO: 426217
guuuacagaaguuuauacg

SEQ ID NO: 426219 - RNA, 19 nt, Artificial Sequence
  Description of Artificial Sequence: Synthetic oligonucleotide
  Sense Strand Starting at position 1370 of SEQ ID NO: 317308
guguguucgcacugggaca

SEQ ID NO: 426220 - RNA, 19 nt, Artificial Sequence
  Description of Artificial Sequence: Synthetic oligonucleotide
  Antisense Strand to SEQ ID NO: 426219
ugucccagugcgaacacac

SEQ ID NO: 426221 - RNA, 19 nt, Artificial Sequence
  Description of Artificial Sequence: Synthetic oligonucleotide
  Sense Strand Starting at position 1370 of SEQ ID NO: 318360
auaaaugcauucgaaagca

SEQ ID NO: 426222 - RNA, 19 nt, Artificial Sequence
  Description of Artificial Sequence: Synthetic oligonucleotide
  Antisense Strand to SEQ ID NO: 426221
ugcuuucgaaugcauuuau

SEQ ID NO: 426223 - RNA, 19 nt, Artificial Sequence
  Description of Artificial Sequence: Synthetic oligonucleotide
  Sense Strand Starting at position 1370 of SEQ ID NO: 318860
ggcagugaaguuuguaggu

SEQ ID NO: 426224 - RNA, 19 nt, Artificial Sequence
  Description of Artificial Sequence: Synthetic oligonucleotide
  Antisense Strand to SEQ ID NO: 426223
accuacaaacuucacugcc

SEQ ID NO: 426225 - RNA, 19 nt, Artificial Sequence
  Description of Artificial Sequence: Synthetic oligonucleotide
  Sense Strand Starting at position 1370 of SEQ ID NO: 318985
ugccgugacaguuugccaa

SEQ ID NO: 426226 - RNA, 19 nt, Artificial Sequence
  Description of Artificial Sequence: Synthetic oligonucleotide
  Antisense Strand to SEQ ID NO: 426225
uuggcaaacugucacggca

SEQ ID NO: 426227 - RNA, 19 nt, Artificial Sequence
  Description of Artificial Sequence: Synthetic oligonucleotide
  Sense Strand Starting at position 1371 of SEQ ID NO: 315419
ucauaugaguguucccaug

SEQ ID NO: 426228 - RNA, 19 nt, Artificial Sequence
  Description of Artificial Sequence: Synthetic oligonucleotide
  Antisense Strand to SEQ ID NO: 426227
caugggaacacucauauga

SEQ ID NO: 426229 - RNA, 19 nt, Artificial Sequence
  Description of Artificial Sequence: Synthetic oligonucleotide
  Sense Strand Starting at position 1371 of SEQ ID NO: 315421
auaugaguguucccaugac

SEQ ID NO: 426230 - RNA, 19 nt, Artificial Sequence
  Description of Artificial Sequence: Synthetic oligonucleotide
  Antisense Strand to SEQ ID NO: 426229
gucaugggaacacucauau

SEQ ID NO: 426231 - RNA, 19 nt, Artificial Sequence
  Description of Artificial Sequence: Synthetic oligonucleotide
  Sense Strand Starting at position 1371 of SEQ ID NO: 315713
gucauauugugaggagguc

SEQ ID NO: 426232 - RNA, 19 nt, Artificial Sequence
  Description of Artificial Sequence: Synthetic oligonucleotide
  Antisense Strand to SEQ ID NO: 426231
gaccuccucacaauaugac

SEQ ID NO: 426233 - RNA, 19 nt, Artificial Sequence
  Description of Artificial Sequence: Synthetic oligonucleotide
  Sense Strand Starting at position 1371 of SEQ ID NO: 315721
gugaggaggucuggagcua

SEQ ID NO: 426234 - RNA, 19 nt, Artificial Sequence
  Description of Artificial Sequence: Synthetic oligonucleotide
  Antisense Strand to SEQ ID NO: 426233
uagcuccagaccuccucac

SEQ ID NO: 426235 - RNA, 19 nt, Artificial Sequence
  Description of Artificial Sequence: Synthetic oligonucleotide
  Sense Strand Starting at position 1371 of SEQ ID NO: 316115
agcuaaauuuggugaugga

SEQ ID NO: 426236 - RNA, 19 nt, Artificial Sequence
  Description of Artificial Sequence: Synthetic oligonucleotide
  Antisense Strand to SEQ ID NO: 426235
uccaucaccaaauuuagcu

SEQ ID NO: 426237 - RNA, 19 nt, Artificial Sequence
  Description of Artificial Sequence: Synthetic oligonucleotide
  Sense Strand Starting at position 1371 of SEQ ID NO: 316209
uuaaucuucucagguauga

SEQ ID NO: 426238 - RNA, 19 nt, Artificial Sequence
  Description of Artificial Sequence: Synthetic oligonucleotide
  Antisense Strand to SEQ ID NO: 426237
ucauaccugagaagauuaa

SEQ ID NO: 426239 - RNA, 19 nt, Artificial Sequence
  Description of Artificial Sequence: Synthetic oligonucleotide
  Sense Strand Starting at position 1371 of SEQ ID NO: 316218
ucagguaugacaggucacu

SEQ ID NO: 426240 - RNA, 19 nt, Artificial Sequence
  Description of Artificial Sequence: Synthetic oligonucleotide
  Antisense Strand to SEQ ID NO: 426239
agugaccugucauaccuga

SEQ ID NO: 426241 - RNA, 19 nt, Artificial Sequence
  Description of Artificial Sequence: Synthetic oligonucleotide
  Sense Strand Starting at position 1371 of SEQ ID NO: 316296
gccuguucuucucagccga

SEQ ID NO: 426242 - RNA, 19 nt, Artificial Sequence
  Description of Artificial Sequence: Synthetic oligonucleotide
  Antisense Strand to SEQ ID NO: 426241
ucggcugagaagaacaggc

SEQ ID NO: 426243 - RNA, 19 nt, Artificial Sequence
  Description of Artificial Sequence: Synthetic oligonucleotide
  Sense Strand Starting at position 1371 of SEQ ID NO: 316298
cuguucuucucagccgaau

SEQ ID NO: 426244 - RNA, 19 nt, Artificial Sequence
  Description of Artificial Sequence: Synthetic oligonucleotide
  Antisense Strand to SEQ ID NO: 426243
auucggcugagaagaacag

SEQ ID NO: 426245 - RNA, 19 nt, Artificial Sequence
  Description of Artificial Sequence: Synthetic oligonucleotide
  Sense Strand Starting at position 1371 of SEQ ID NO: 316356
gucaccuagucuuugcaaa

SEQ ID NO: 426246 - RNA, 19 nt, Artificial Sequence
  Description of Artificial Sequence: Synthetic oligonucleotide
  Antisense Strand to SEQ ID NO: 426245
uuugcaaagacuaggugac

SEQ ID NO: 426247 - RNA, 19 nt, Artificial Sequence
  Description of Artificial Sequence: Synthetic oligonucleotide
  Sense Strand Starting at position 1371 of SEQ ID NO: 316398
auuaauauuucccgagcga

SEQ ID NO: 426248 - RNA, 19 nt, Artificial Sequence
  Description of Artificial Sequence: Synthetic oligonucleotide
  Antisense Strand to SEQ ID NO: 426247
ucgcucgggaaauauuaau

SEQ ID NO: 426249 - RNA, 19 nt, Artificial Sequence
  Description of Artificial Sequence: Synthetic oligonucleotide
  Sense Strand Starting at position 1371 of SEQ ID NO: 316547
cacgguuaagacugaagua

SEQ ID NO: 426250 - RNA, 19 nt, Artificial Sequence
  Description of Artificial Sequence: Synthetic oligonucleotide
  Antisense Strand to SEQ ID NO: 426249
uacuucagucuuaaccgug

SEQ ID NO: 426251 - RNA, 19 nt, Artificial Sequence
  Description of Artificial Sequence: Synthetic oligonucleotide
  Sense Strand Starting at position 1371 of SEQ ID NO: 316644
cguauaaacuucuguaaac

SEQ ID NO: 426252 - RNA, 19 nt, Artificial Sequence
  Description of Artificial Sequence: Synthetic oligonucleotide
  Antisense Strand to SEQ ID NO: 426251
guuuacagaaguuuauacg

SEQ ID NO: 426253 - RNA, 19 nt, Artificial Sequence
  Description of Artificial Sequence: Synthetic oligonucleotide
  Sense Strand Starting at position 1371 of SEQ ID NO: 316829
guguguucgcacugggaca

SEQ ID NO: 426254 - RNA, 19 nt, Artificial Sequence
  Description of Artificial Sequence: Synthetic oligonucleotide
  Antisense Strand to SEQ ID NO: 426253
ugucccagugcgaacacac

SEQ ID NO: 426255 - RNA, 19 nt, Artificial Sequence
  Description of Artificial Sequence: Synthetic oligonucleotide
  Sense Strand Starting at position 1371 of SEQ ID NO: 317881
auaaaugcauucgaaagca

SEQ ID NO: 426256 - RNA, 19 nt, Artificial Sequence
  Description of Artificial Sequence: Synthetic oligonucleotide
  Antisense Strand to SEQ ID NO: 426255
ugcuuucgaaugcauuuau

SEQ ID NO: 426257 - RNA, 19 nt, Artificial Sequence
  Description of Artificial Sequence: Synthetic oligonucleotide
  Sense Strand Starting at position 1371 of SEQ ID NO: 318381
ggcagugaaguuuguaggu

SEQ ID NO: 426258 - RNA, 19 nt, Artificial Sequence
  Description of Artificial Sequence: Synthetic oligonucleotide
  Antisense Strand to SEQ ID NO: 426257
accuacaaacuucacugcc

SEQ ID NO: 426259 - RNA, 19 nt, Artificial Sequence
  Description of Artificial Sequence: Synthetic oligonucleotide
  Sense Strand Starting at position 1371 of SEQ ID NO: 318506
ugccgugacaguuugccaa

SEQ ID NO: 426260 - RNA, 19 nt, Artificial Sequence
  Description of Artificial Sequence: Synthetic oligonucleotide
  Antisense Strand to SEQ ID NO: 426259
uuggcaaacugucacggca

SEQ ID NO: 426261 - RNA, 19 nt, Artificial Sequence
  Description of Artificial Sequence: Synthetic oligonucleotide
  Sense Strand Starting at position 1371 of SEQ ID NO: 318976
cccuguugucuccaauauc

SEQ ID NO: 426262 - RNA, 19 nt, Artificial Sequence
  Description of Artificial Sequence: Synthetic oligonucleotide
  Antisense Strand to SEQ ID NO: 426261
gauauuggagacaacaggg

SEQ ID NO: 426263 - RNA, 19 nt, Artificial Sequence
  Description of Artificial Sequence: Synthetic oligonucleotide
  Sense Strand Starting at position 1371 of SEQ ID NO: 318979
uguugucuccaauaucgga

SEQ ID NO: 426264 - RNA, 19 nt, Artificial Sequence
  Description of Artificial Sequence: Synthetic oligonucleotide
  Antisense Strand to SEQ ID NO: 426263
uccgauauuggagacaaca

SEQ ID NO: 426265 - RNA, 19 nt, Artificial Sequence
  Description of Artificial Sequence: Synthetic oligonucleotide
  Sense Strand Starting at position 1371 of SEQ ID NO: 319100
ggguuacauagcggaaauc

SEQ ID NO: 426266 - RNA, 19 nt, Artificial Sequence
  Description of Artificial Sequence: Synthetic oligonucleotide
  Antisense Strand to SEQ ID NO: 426265
gauuuccgcuauguaaccc

SEQ ID NO: 426267 - RNA, 19 nt, Artificial Sequence
  Description of Artificial Sequence: Synthetic oligonucleotide
  Sense Strand Starting at position 1371 of SEQ ID NO: 319101
gguuacauagcggaaauca

SEQ ID NO: 426268 - RNA, 19 nt, Artificial Sequence
  Description of Artificial Sequence: Synthetic oligonucleotide
  Antisense Strand to SEQ ID NO: 426267
ugauuuccgcuauguaacc

SEQ ID NO: 426269 - RNA, 19 nt, Artificial Sequence
  Description of Artificial Sequence: Synthetic oligonucleotide
  Sense Strand Starting at position 1372 of SEQ ID NO: 315296
aguuaaucuuuacagagga

SEQ ID NO: 426270 - RNA, 19 nt, Artificial Sequence
  Description of Artificial Sequence: Synthetic oligonucleotide
  Antisense Strand to SEQ ID NO: 426269
uccucuguaaagauuaacu

SEQ ID NO: 426271 - RNA, 19 nt, Artificial Sequence
  Description of Artificial Sequence: Synthetic oligonucleotide
  Sense Strand Starting at position 1372 of SEQ ID NO: 315309
agaggacaauucuccugua

SEQ ID NO: 426272 - RNA, 19 nt, Artificial Sequence
  Description of Artificial Sequence: Synthetic oligonucleotide
  Antisense Strand to SEQ ID NO: 426271
uacaggagaauuguccucu

SEQ ID NO: 426273 - RNA, 19 nt, Artificial Sequence
  Description of Artificial Sequence: Synthetic oligonucleotide
  Sense Strand Starting at position 1372 of SEQ ID NO: 315446
gacagaagcuaugcaugaa

SEQ ID NO: 426274 - RNA, 19 nt, Artificial Sequence
  Description of Artificial Sequence: Synthetic oligonucleotide
  Antisense Strand to SEQ ID NO: 426273
uucaugcauagcuucuguc

SEQ ID NO: 426275 - RNA, 19 nt, Artificial Sequence
  Description of Artificial Sequence: Synthetic oligonucleotide
  Sense Strand Starting at position 1372 of SEQ ID NO: 315514
ccugaaguggcuuagugau

SEQ ID NO: 426276 - RNA, 19 nt, Artificial Sequence
  Description of Artificial Sequence: Synthetic oligonucleotide
  Antisense Strand to SEQ ID NO: 426275
aucacuaagccacuucagg

SEQ ID NO: 426277 - RNA, 19 nt, Artificial Sequence
  Description of Artificial Sequence: Synthetic oligonucleotide
  Sense Strand Starting at position 1372 of SEQ ID NO: 315516
ugaaguggcuuagugauau

SEQ ID NO: 426278 - RNA, 19 nt, Artificial Sequence
  Description of Artificial Sequence: Synthetic oligonucleotide
  Antisense Strand to SEQ ID NO: 426277
auaucacuaagccacuuca

SEQ ID NO: 426279 - RNA, 19 nt, Artificial Sequence
  Description of Artificial Sequence: Synthetic oligonucleotide
  Sense Strand Starting at position 1372 of SEQ ID NO: 315530
gauauaaacuauggagaga

SEQ ID NO: 426280 - RNA, 19 nt, Artificial Sequence
  Description of Artificial Sequence: Synthetic oligonucleotide
  Antisense Strand to SEQ ID NO: 426279
ucucuccauaguuuauauc

SEQ ID NO: 426281 - RNA, 19 nt, Artificial Sequence
  Description of Artificial Sequence: Synthetic oligonucleotide
  Sense Strand Starting at position 1372 of SEQ ID NO: 315681
aguuuaaguucucugacgu

SEQ ID NO: 426282 - RNA, 19 nt, Artificial Sequence
  Description of Artificial Sequence: Synthetic oligonucleotide
  Antisense Strand to SEQ ID NO: 426281
acgucagagaacuuaaacu

SEQ ID NO: 426283 - RNA, 19 nt, Artificial Sequence
  Description of Artificial Sequence: Synthetic oligonucleotide
  Sense Strand Starting at position 1372 of SEQ ID NO: 315688
guucucugacguugacuga

SEQ ID NO: 426284 - RNA, 19 nt, Artificial Sequence
  Description of Artificial Sequence: Synthetic oligonucleotide
  Antisense Strand to SEQ ID NO: 426283
ucagucaacgucagagaac

SEQ ID NO: 426285 - RNA, 19 nt, Artificial Sequence
  Description of Artificial Sequence: Synthetic oligonucleotide
  Sense Strand Starting at position 1372 of SEQ ID NO: 315743
cauagaguuuaucucugga

SEQ ID NO: 426286 - RNA, 19 nt, Artificial Sequence
  Description of Artificial Sequence: Synthetic oligonucleotide
  Antisense Strand to SEQ ID NO: 426285
uccagagauaaacucuaug

SEQ ID NO: 426287 - RNA, 19 nt, Artificial Sequence
  Description of Artificial Sequence: Synthetic oligonucleotide
  Sense Strand Starting at position 1372 of SEQ ID NO: 315745
uagaguuuaucucuggaag

SEQ ID NO: 426288 - RNA, 19 nt, Artificial Sequence
  Description of Artificial Sequence: Synthetic oligonucleotide
  Antisense Strand to SEQ ID NO: 426287
cuuccagagauaaacucua

SEQ ID NO: 426289 - RNA, 19 nt, Artificial Sequence
  Description of Artificial Sequence: Synthetic oligonucleotide
  Sense Strand Starting at position 1372 of SEQ ID NO: 315746
agaguuuaucucuggaagg

SEQ ID NO: 426290 - RNA, 19 nt, Artificial Sequence
  Description of Artificial Sequence: Synthetic oligonucleotide
  Antisense Strand to SEQ ID NO: 426289
ccuuccagagauaaacucu

SEQ ID NO: 426291 - RNA, 19 nt, Artificial Sequence
  Description of Artificial Sequence: Synthetic oligonucleotide
  Sense Strand Starting at position 1372 of SEQ ID NO: 315845
guggcucucuauguaucaa

SEQ ID NO: 426292 - RNA, 19 nt, Artificial Sequence
  Description of Artificial Sequence: Synthetic oligonucleotide
  Antisense Strand to SEQ ID NO: 426291
uugauacauagagagccac

SEQ ID NO: 426293 - RNA, 19 nt, Artificial Sequence
  Description of Artificial Sequence: Synthetic oligonucleotide
  Sense Strand Starting at position 1372 of SEQ ID NO: 315936
ucuuacucuguugggcaaa

SEQ ID NO: 426294 - RNA, 19 nt, Artificial Sequence
  Description of Artificial Sequence: Synthetic oligonucleotide
  Antisense Strand to SEQ ID NO: 426293
uuugcccaacagaguaaga

SEQ ID NO: 426295 - RNA, 19 nt, Artificial Sequence
  Description of Artificial Sequence: Synthetic oligonucleotide
  Sense Strand Starting at position 1372 of SEQ ID NO: 316011
cagugugacuccuuguaug

SEQ ID NO: 426296 - RNA, 19 nt, Artificial Sequence
  Description of Artificial Sequence: Synthetic oligonucleotide
  Antisense Strand to SEQ ID NO: 426295
cauacaaggagucacacug

SEQ ID NO: 426297 - RNA, 19 nt, Artificial Sequence
  Description of Artificial Sequence: Synthetic oligonucleotide
  Sense Strand Starting at position 1372 of SEQ ID NO: 316023
uuguaugucgagugaggga

SEQ ID NO: 426298 - RNA, 19 nt, Artificial Sequence
  Description of Artificial Sequence: Synthetic oligonucleotide
  Antisense Strand to SEQ ID NO: 426297
ucccucacucgacauacaa

SEQ ID NO: 426299 - RNA, 19 nt, Artificial Sequence
  Description of Artificial Sequence: Synthetic oligonucleotide
  Sense Strand Starting at position 1372 of SEQ ID NO: 316093
ugcagugugggucauacua

SEQ ID NO: 426300 - RNA, 19 nt, Artificial Sequence
  Description of Artificial Sequence: Synthetic oligonucleotide
  Antisense Strand to SEQ ID NO: 426299
uaguaugacccacacugca

SEQ ID NO: 426301 - RNA, 19 nt, Artificial Sequence
  Description of Artificial Sequence: Synthetic oligonucleotide
  Sense Strand Starting at position 1372 of SEQ ID NO: 316101
gggucauacuaugucggaa

SEQ ID NO: 426302 - RNA, 19 nt, Artificial Sequence
  Description of Artificial Sequence: Synthetic oligonucleotide
  Antisense Strand to SEQ ID NO: 426301
uuccgacauaguaugaccc

SEQ ID NO: 426303 - RNA, 19 nt, Artificial Sequence
  Description of Artificial Sequence: Synthetic oligonucleotide
  Sense Strand Starting at position 1372 of SEQ ID NO: 316104
ucauacuaugucggaagaa

SEQ ID NO: 426304 - RNA, 19 nt, Artificial Sequence
  Description of Artificial Sequence: Synthetic oligonucleotide
  Antisense Strand to SEQ ID NO: 426303
uucuuccgacauaguauga

SEQ ID NO: 426305 - RNA, 19 nt, Artificial Sequence
  Description of Artificial Sequence: Synthetic oligonucleotide
  Sense Strand Starting at position 1372 of SEQ ID NO: 316293
cagagugauagcugaaggu

SEQ ID NO: 426306 - RNA, 19 nt, Artificial Sequence
  Description of Artificial Sequence: Synthetic oligonucleotide
  Antisense Strand to SEQ ID NO: 426305
accuucagcuaucacucug

SEQ ID NO: 426307 - RNA, 19 nt, Artificial Sequence
  Description of Artificial Sequence: Synthetic oligonucleotide
  Sense Strand Starting at position 1372 of SEQ ID NO: 316297
gugauagcugaaggucuuu

SEQ ID NO: 426308 - RNA, 19 nt, Artificial Sequence
  Description of Artificial Sequence: Synthetic oligonucleotide
  Antisense Strand to SEQ ID NO: 426307
aaagaccuucagcuaucac

SEQ ID NO: 426309 - RNA, 19 nt, Artificial Sequence
  Description of Artificial Sequence: Synthetic oligonucleotide
  Sense Strand Starting at position 1372 of SEQ ID NO: 316302
agcugaaggucuuuccaca

SEQ ID NO: 426310 - RNA, 19 nt, Artificial Sequence
  Description of Artificial Sequence: Synthetic oligonucleotide
  Antisense Strand to SEQ ID NO: 426309
uguggaaagaccuucagcu

SEQ ID NO: 426311 - RNA, 19 nt, Artificial Sequence
  Description of Artificial Sequence: Synthetic oligonucleotide
  Sense Strand Starting at position 1372 of SEQ ID NO: 316436
ugaauccucaugggucgaa

SEQ ID NO: 426312 - RNA, 19 nt, Artificial Sequence
  Description of Artificial Sequence: Synthetic oligonucleotide
  Antisense Strand to SEQ ID NO: 426311
uucgacccaugaggauuca

SEQ ID NO: 426313 - RNA, 19 nt, Artificial Sequence
  Description of Artificial Sequence: Synthetic oligonucleotide
  Sense Strand Starting at position 1372 of SEQ ID NO: 316604
accaaagugucuuuacuug

SEQ ID NO: 426314 - RNA, 19 nt, Artificial Sequence
  Description of Artificial Sequence: Synthetic oligonucleotide
  Antisense Strand to SEQ ID NO: 426313
caaguaaagacacuuuggu

SEQ ID NO: 426315 - RNA, 19 nt, Artificial Sequence
  Description of Artificial Sequence: Synthetic oligonucleotide
  Sense Strand Starting at position 1372 of SEQ ID NO: 316616
uuacuuggucccugggagu

SEQ ID NO: 426316 - RNA, 19 nt, Artificial Sequence
  Description of Artificial Sequence: Synthetic oligonucleotide
  Antisense Strand to SEQ ID NO: 426315
acucccagggaccaaguaa

SEQ ID NO: 426317 - RNA, 19 nt, Artificial Sequence
  Description of Artificial Sequence: Synthetic oligonucleotide
  Sense Strand Starting at position 1372 of SEQ ID NO: 316647
gauugucuccuguggagac

SEQ ID NO: 426318 - RNA, 19 nt, Artificial Sequence
  Description of Artificial Sequence: Synthetic oligonucleotide
  Antisense Strand to SEQ ID NO: 426317
gucuccacaggagacaauc

SEQ ID NO: 426319 - RNA, 19 nt, Artificial Sequence
  Description of Artificial Sequence: Synthetic oligonucleotide
  Sense Strand Starting at position 1372 of SEQ ID NO: 316725
ggcucaucuuccuccagaa

SEQ ID NO: 426320 - RNA, 19 nt, Artificial Sequence
  Description of Artificial Sequence: Synthetic oligonucleotide
  Antisense Strand to SEQ ID NO: 426319
uucuggaggaagaugagcc

SEQ ID NO: 426321 - RNA, 19 nt, Artificial Sequence
  Description of Artificial Sequence: Synthetic oligonucleotide
  Sense Strand Starting at position 1372 of SEQ ID NO: 316791
uuccaacuguguccggaau

SEQ ID NO: 426322 - RNA, 19 nt, Artificial Sequence
  Description of Artificial Sequence: Synthetic oligonucleotide
  Antisense Strand to SEQ ID NO: 426321
auuccggacacaguuggaa

SEQ ID NO: 426323 - RNA, 19 nt, Artificial Sequence
  Description of Artificial Sequence: Synthetic oligonucleotide
  Sense Strand Starting at position 1372 of SEQ ID NO: 316792
uccaacuguguccggaauu

SEQ ID NO: 426324 - RNA, 19 nt, Artificial Sequence
  Description of Artificial Sequence: Synthetic oligonucleotide
  Antisense Strand to SEQ ID NO: 426323
aauuccggacacaguugga

SEQ ID NO: 426325 - RNA, 19 nt, Artificial Sequence
  Description of Artificial Sequence: Synthetic oligonucleotide
  Sense Strand Starting at position 1372 of SEQ ID NO: 317104
gaguguuacagcugguaaa

SEQ ID NO: 426326 - RNA, 19 nt, Artificial Sequence
  Description of Artificial Sequence: Synthetic oligonucleotide
  Antisense Strand to SEQ ID NO: 426325
uuuaccagcuguaacacuc

SEQ ID NO: 426327 - RNA, 19 nt, Artificial Sequence
  Description of Artificial Sequence: Synthetic oligonucleotide
  Sense Strand Starting at position 1372 of SEQ ID NO: 318563
gaguuagucuuuccaggag

SEQ ID NO: 426328 - RNA, 19 nt, Artificial Sequence
  Description of Artificial Sequence: Synthetic oligonucleotide
  Antisense Strand to SEQ ID NO: 426327
cuccuggaaagacuaacuc

SEQ ID NO: 426329 - RNA, 19 nt, Artificial Sequence
  Description of Artificial Sequence: Synthetic oligonucleotide
  Sense Strand Starting at position 1372 of SEQ ID NO: 318566
uuagucuuuccaggagcaa

SEQ ID NO: 426330 - RNA, 19 nt, Artificial Sequence
  Description of Artificial Sequence: Synthetic oligonucleotide
  Antisense Strand to SEQ ID NO: 426329
uugcuccuggaaagacuaa

SEQ ID NO: 426331 - RNA, 19 nt, Artificial Sequence
  Description of Artificial Sequence: Synthetic oligonucleotide
  Sense Strand Starting at position 1372 of SEQ ID NO: 318567
uagucuuuccaggagcaag

SEQ ID NO: 426332 - RNA, 19 nt, Artificial Sequence
  Description of Artificial Sequence: Synthetic oligonucleotide
  Antisense Strand to SEQ ID NO: 426331
cuugcuccuggaaagacua

SEQ ID NO: 426333 - RNA, 19 nt, Artificial Sequence
  Description of Artificial Sequence: Synthetic oligonucleotide
  Sense Strand Starting at position 1372 of SEQ ID NO: 318785
ccacuucuuccagguuaag

SEQ ID NO: 426334 - RNA, 19 nt, Artificial Sequence
  Description of Artificial Sequence: Synthetic oligonucleotide
  Antisense Strand to SEQ ID NO: 426333
cuuaaccuggaagaagugg

SEQ ID NO: 426335 - RNA, 19 nt, Artificial Sequence
  Description of Artificial Sequence: Synthetic oligonucleotide
  Sense Strand Starting at position 1372 of SEQ ID NO: 318809
ggacauguccugcaccacu

SEQ ID NO: 426336 - RNA, 19 nt, Artificial Sequence
  Description of Artificial Sequence: Synthetic oligonucleotide
  Antisense Strand to SEQ ID NO: 426335
aguggugcaggacaugucc

SEQ ID NO: 426337 - RNA, 19 nt, Artificial Sequence
  Description of Artificial Sequence: Synthetic oligonucleotide
  Sense Strand Starting at position 1372 of SEQ ID NO: 318881
cgcauaugcagagaguacu

SEQ ID NO: 426338 - RNA, 19 nt, Artificial Sequence
  Description of Artificial Sequence: Synthetic oligonucleotide
  Antisense Strand to SEQ ID NO: 426337
aguacucucugcauaugcg

SEQ ID NO: 426339 - RNA, 19 nt, Artificial Sequence
  Description of Artificial Sequence: Synthetic oligonucleotide
  Sense Strand Starting at position 1372 of SEQ ID NO: 318894
aguacuuccgacuacagau

SEQ ID NO: 426340 - RNA, 19 nt, Artificial Sequence
  Description of Artificial Sequence: Synthetic oligonucleotide
  Antisense Strand to SEQ ID NO: 426339
aucuguagucggaaguacu

SEQ ID NO: 426341 - RNA, 19 nt, Artificial Sequence
  Description of Artificial Sequence: Synthetic oligonucleotide
  Sense Strand Starting at position 1372 of SEQ ID NO: 318977
uuuaauuccugggaauuua

SEQ ID NO: 426342 - RNA, 19 nt, Artificial Sequence
  Description of Artificial Sequence: Synthetic oligonucleotide
  Antisense Strand to SEQ ID NO: 426341
uaaauucccaggaauuaaa

SEQ ID NO: 426343 - RNA, 19 nt, Artificial Sequence
  Description of Artificial Sequence: Synthetic oligonucleotide
  Sense Strand Starting at position 1372 of SEQ ID NO: 319112
gagagagugugucccacuu

SEQ ID NO: 426344 - RNA, 19 nt, Artificial Sequence
  Description of Artificial Sequence: Synthetic oligonucleotide
  Antisense Strand to SEQ ID NO: 426343
aagugggacacacucucuc

SEQ ID NO: 426345 - RNA, 19 nt, Artificial Sequence
  Description of Artificial Sequence: Synthetic oligonucleotide
  Sense Strand Starting at position 1372 of SEQ ID NO: 319120
gugucccacuuaucacuua

SEQ ID NO: 426346 - RNA, 19 nt, Artificial Sequence
  Description of Artificial Sequence: Synthetic oligonucleotide
  Antisense Strand to SEQ ID NO: 426345
uaagugauaagugggacac

SEQ ID NO: 426347 - RNA, 19 nt, Artificial Sequence
  Description of Artificial Sequence: Synthetic oligonucleotide
  Sense Strand Starting at position 1372 of SEQ ID NO: 319203
aaauacucaguguggagaa

SEQ ID NO: 426348 - RNA, 19 nt, Artificial Sequence
  Description of Artificial Sequence: Synthetic oligonucleotide
  Antisense Strand to SEQ ID NO: 426347
uucuccacacugaguauuu

SEQ ID NO: 426349 - RNA, 19 nt, Artificial Sequence
  Description of Artificial Sequence: Synthetic oligonucleotide
  Sense Strand Starting at position 1373 of SEQ ID NO: 315236
gacaauuggcuaggcaaau

SEQ ID NO: 426350 - RNA, 19 nt, Artificial Sequence
  Description of Artificial Sequence: Synthetic oligonucleotide
  Antisense Strand to SEQ ID NO: 426349
auuugccuagccaauuguc

SEQ ID NO: 426351 - RNA, 19 nt, Artificial Sequence
  Description of Artificial Sequence: Synthetic oligonucleotide
  Sense Strand Starting at position 1373 of SEQ ID NO: 315237
acaauuggcuaggcaaaua

SEQ ID NO: 426352 - RNA, 19 nt, Artificial Sequence
  Description of Artificial Sequence: Synthetic oligonucleotide
  Antisense Strand to SEQ ID NO: 426351
uauuugccuagccaauugu

SEQ ID NO: 426353 - RNA, 19 nt, Artificial Sequence
  Description of Artificial Sequence: Synthetic oligonucleotide
  Sense Strand Starting at position 1373 of SEQ ID NO: 315621
cucuaagaacccuggugua

SEQ ID NO: 426354 - RNA, 19 nt, Artificial Sequence
  Description of Artificial Sequence: Synthetic oligonucleotide
  Antisense Strand to SEQ ID NO: 426353
uacaccaggguucuuagag

SEQ ID NO: 426355 - RNA, 19 nt, Artificial Sequence
  Description of Artificial Sequence: Synthetic oligonucleotide
  Sense Strand Starting at position 1373 of SEQ ID NO: 315822
agacauauuccuuacgcua

SEQ ID NO: 426356 - RNA, 19 nt, Artificial Sequence
  Description of Artificial Sequence: Synthetic oligonucleotide
  Antisense Strand to SEQ ID NO: 426355
uagcguaaggaauaugucu

SEQ ID NO: 426357 - RNA, 19 nt, Artificial Sequence
  Description of Artificial Sequence: Synthetic oligonucleotide
  Sense Strand Starting at position 1373 of SEQ ID NO: 315855
guaagaaucugcccugaaa

SEQ ID NO: 426358 - RNA, 19 nt, Artificial Sequence
  Description of Artificial Sequence: Synthetic oligonucleotide
  Antisense Strand to SEQ ID NO: 426357
uuucagggcagauucuuac

SEQ ID NO: 426359 - RNA, 19 nt, Artificial Sequence
  Description of Artificial Sequence: Synthetic oligonucleotide
  Sense Strand Starting at position 1373 of SEQ ID NO: 316084
cugugcugccaagauuaaa

SEQ ID NO: 426360 - RNA, 19 nt, Artificial Sequence
  Description of Artificial Sequence: Synthetic oligonucleotide
  Antisense Strand to SEQ ID NO: 426359
uuuaaucuuggcagcacag

SEQ ID NO: 426361 - RNA, 19 nt, Artificial Sequence
  Description of Artificial Sequence: Synthetic oligonucleotide
  Sense Strand Starting at position 1373 of SEQ ID NO: 316174
agagguacagcguauacuu

SEQ ID NO: 426362 - RNA, 19 nt, Artificial Sequence
  Description of Artificial Sequence: Synthetic oligonucleotide
  Antisense Strand to SEQ ID NO: 426361
aaguauacgcuguaccucu

SEQ ID NO: 426363 - RNA, 19 nt, Artificial Sequence
  Description of Artificial Sequence: Synthetic oligonucleotide
  Sense Strand Starting at position 1373 of SEQ ID NO: 316351
gugugaaauacagaaggcu

SEQ ID NO: 426364 - RNA, 19 nt, Artificial Sequence
  Description of Artificial Sequence: Synthetic oligonucleotide
  Antisense Strand to SEQ ID NO: 426363
agccuucuguauuucacac

SEQ ID NO: 426365 - RNA, 19 nt, Artificial Sequence
  Description of Artificial Sequence: Synthetic oligonucleotide
  Sense Strand Starting at position 1373 of SEQ ID NO: 316477
cugugagggcucuaacucu

SEQ ID NO: 426366 - RNA, 19 nt, Artificial Sequence
  Description of Artificial Sequence: Synthetic oligonucleotide
  Antisense Strand to SEQ ID NO: 426365
agaguuagagcccucacag

SEQ ID NO: 426367 - RNA, 19 nt, Artificial Sequence
  Description of Artificial Sequence: Synthetic oligonucleotide
  Sense Strand Starting at position 1373 of SEQ ID NO: 316484
ggcucuaacucugcaagga

SEQ ID NO: 426368 - RNA, 19 nt, Artificial Sequence
  Description of Artificial Sequence: Synthetic oligonucleotide
  Antisense Strand to SEQ ID NO: 426367
uccuugcagaguuagagcc

SEQ ID NO: 426369 - RNA, 19 nt, Artificial Sequence
  Description of Artificial Sequence: Synthetic oligonucleotide
  Sense Strand Starting at position 1373 of SEQ ID NO: 316488
cuaacucugcaaggaaaug

SEQ ID NO: 426370 - RNA, 19 nt, Artificial Sequence
  Description of Artificial Sequence: Synthetic oligonucleotide
  Antisense Strand to SEQ ID NO: 426369
cauuuccuugcagaguuag

SEQ ID NO: 426371 - RNA, 19 nt, Artificial Sequence
  Description of Artificial Sequence: Synthetic oligonucleotide
  Sense Strand Starting at position 1373 of SEQ ID NO: 316500
ggaaauguuccaggcucaa

SEQ ID NO: 426372 - RNA, 19 nt, Artificial Sequence
  Description of Artificial Sequence: Synthetic oligonucleotide
  Antisense Strand to SEQ ID NO: 426371
uugagccuggaacauuucc

SEQ ID NO: 426373 - RNA, 19 nt, Artificial Sequence
  Description of Artificial Sequence: Synthetic oligonucleotide
  Sense Strand Starting at position 1373 of SEQ ID NO: 316596
ugucucccaguuuagauau

SEQ ID NO: 426374 - RNA, 19 nt, Artificial Sequence
  Description of Artificial Sequence: Synthetic oligonucleotide
  Antisense Strand to SEQ ID NO: 426373
auaucuaaacugggagaca

SEQ ID NO: 426375 - RNA, 19 nt, Artificial Sequence
  Description of Artificial Sequence: Synthetic oligonucleotide
  Sense Strand Starting at position 1373 of SEQ ID NO: 316776
ggugccaggaagugaaaua

SEQ ID NO: 426376 - RNA, 19 nt, Artificial Sequence
  Description of Artificial Sequence: Synthetic oligonucleotide
  Antisense Strand to SEQ ID NO: 426375
uauuucacuuccuggcacc

SEQ ID NO: 426377 - RNA, 19 nt, Artificial Sequence
  Description of Artificial Sequence: Synthetic oligonucleotide
  Sense Strand Starting at position 1373 of SEQ ID NO: 316807
gggagaagucuaugccaga

SEQ ID NO: 426378 - RNA, 19 nt, Artificial Sequence
  Description of Artificial Sequence: Synthetic oligonucleotide
  Antisense Strand to SEQ ID NO: 426377
ucuggcauagacuucuccc

SEQ ID NO: 426379 - RNA, 19 nt, Artificial Sequence
  Description of Artificial Sequence: Synthetic oligonucleotide
  Sense Strand Starting at position 1373 of SEQ ID NO: 316808
ggagaagucuaugccagau

SEQ ID NO: 426380 - RNA, 19 nt, Artificial Sequence
  Description of Artificial Sequence: Synthetic oligonucleotide
  Antisense Strand to SEQ ID NO: 426379
aucuggcauagacuucucc

SEQ ID NO: 426381 - RNA, 19 nt, Artificial Sequence
  Description of Artificial Sequence: Synthetic oligonucleotide
  Sense Strand Starting at position 1373 of SEQ ID NO: 316812
aagucuaugccagauguuu

SEQ ID NO: 426382 - RNA, 19 nt, Artificial Sequence
  Description of Artificial Sequence: Synthetic oligonucleotide
  Antisense Strand to SEQ ID NO: 426381
aaacaucuggcauagacuu

SEQ ID NO: 426383 - RNA, 19 nt, Artificial Sequence
  Description of Artificial Sequence: Synthetic oligonucleotide
  Sense Strand Starting at position 1373 of SEQ ID NO: 316906
cucuaauaaguacgcuuua

SEQ ID NO: 426384 - RNA, 19 nt, Artificial Sequence
  Description of Artificial Sequence: Synthetic oligonucleotide
  Antisense Strand to SEQ ID NO: 426383
uaaagcguacuuauuagag

SEQ ID NO: 426385 - RNA, 19 nt, Artificial Sequence
  Description of Artificial Sequence: Synthetic oligonucleotide
  Sense Strand Starting at position 1373 of SEQ ID NO: 316907
ucuaauaaguacgcuuuau

SEQ ID NO: 426386 - RNA, 19 nt, Artificial Sequence
  Description of Artificial Sequence: Synthetic oligonucleotide
  Antisense Strand to SEQ ID NO: 426385
auaaagcguacuuauuaga

SEQ ID NO: 426387 - RNA, 19 nt, Artificial Sequence
  Description of Artificial Sequence: Synthetic oligonucleotide
  Sense Strand Starting at position 1373 of SEQ ID NO: 316919
gcuuuauucgcauaauugg

SEQ ID NO: 426388 - RNA, 19 nt, Artificial Sequence
  Description of Artificial Sequence: Synthetic oligonucleotide
  Antisense Strand to SEQ ID NO: 426387
ccaauuaugcgaauaaagc

SEQ ID NO: 426389 - RNA, 19 nt, Artificial Sequence
  Description of Artificial Sequence: Synthetic oligonucleotide
  Sense Strand Starting at position 1373 of SEQ ID NO: 317462
cguauuauccuacaucccu

SEQ ID NO: 426390 - RNA, 19 nt, Artificial Sequence
  Description of Artificial Sequence: Synthetic oligonucleotide
  Antisense Strand to SEQ ID NO: 426389
agggauguaggauaauacg

SEQ ID NO: 426391 - RNA, 19 nt, Artificial Sequence
  Description of Artificial Sequence: Synthetic oligonucleotide
  Sense Strand Starting at position 1373 of SEQ ID NO: 317538
uccaaagcuagcggugaaa

SEQ ID NO: 426392 - RNA, 19 nt, Artificial Sequence
  Description of Artificial Sequence: Synthetic oligonucleotide
  Antisense Strand to SEQ ID NO: 426391
uuucaccgcuagcuuugga

SEQ ID NO: 426393 - RNA, 19 nt, Artificial Sequence
  Description of Artificial Sequence: Synthetic oligonucleotide
  Sense Strand Starting at position 1373 of SEQ ID NO: 317636
ucaggagaucgguggcuaa

SEQ ID NO: 426394 - RNA, 19 nt, Artificial Sequence
  Description of Artificial Sequence: Synthetic oligonucleotide
  Antisense Strand to SEQ ID NO: 426393
uuagccaccgaucuccuga

SEQ ID NO: 426395 - RNA, 19 nt, Artificial Sequence
  Description of Artificial Sequence: Synthetic oligonucleotide
  Sense Strand Starting at position 1373 of SEQ ID NO: 317901
uggagaaauucccaaacaa

SEQ ID NO: 426396 - RNA, 19 nt, Artificial Sequence
  Description of Artificial Sequence: Synthetic oligonucleotide
  Antisense Strand to SEQ ID NO: 426395
uuguuugggaauuucucca

SEQ ID NO: 426397 - RNA, 19 nt, Artificial Sequence
  Description of Artificial Sequence: Synthetic oligonucleotide
  Sense Strand Starting at position 1373 of SEQ ID NO: 318114
aaugucaagugguuacgaa

SEQ ID NO: 426398 - RNA, 19 nt, Artificial Sequence
  Description of Artificial Sequence: Synthetic oligonucleotide
  Antisense Strand to SEQ ID NO: 426397
uucguaaccacuugacauu

SEQ ID NO: 426399 - RNA, 19 nt, Artificial Sequence
  Description of Artificial Sequence: Synthetic oligonucleotide
  Sense Strand Starting at position 1373 of SEQ ID NO: 318124
gguuacgaacacuguugaa

SEQ ID NO: 426400 - RNA, 19 nt, Artificial Sequence
  Description of Artificial Sequence: Synthetic oligonucleotide
  Antisense Strand to SEQ ID NO: 426399
uucaacaguguucguaacc

SEQ ID NO: 426401 - RNA, 19 nt, Artificial Sequence
  Description of Artificial Sequence: Synthetic oligonucleotide
  Sense Strand Starting at position 1373 of SEQ ID NO: 318157
uuuaauugacagcgacuga

SEQ ID NO: 426402 - RNA, 19 nt, Artificial Sequence
  Description of Artificial Sequence: Synthetic oligonucleotide
  Antisense Strand to SEQ ID NO: 426401
ucagucgcugucaauuaaa

SEQ ID NO: 426403 - RNA, 19 nt, Artificial Sequence
  Description of Artificial Sequence: Synthetic oligonucleotide
  Sense Strand Starting at position 1373 of SEQ ID NO: 318158
uuaauugacagcgacugau

SEQ ID NO: 426404 - RNA, 19 nt, Artificial Sequence
  Description of Artificial Sequence: Synthetic oligonucleotide
  Antisense Strand to SEQ ID NO: 426403
aucagucgcugucaauuaa

SEQ ID NO: 426405 - RNA, 19 nt, Artificial Sequence
  Description of Artificial Sequence: Synthetic oligonucleotide
  Sense Strand Starting at position 1373 of SEQ ID NO: 318162
uugacagcgacugaugaua

SEQ ID NO: 426406 - RNA, 19 nt, Artificial Sequence
  Description of Artificial Sequence: Synthetic oligonucleotide
  Antisense Strand to SEQ ID NO: 426405
uaucaucagucgcugucaa

SEQ ID NO: 426407 - RNA, 19 nt, Artificial Sequence
  Description of Artificial Sequence: Synthetic oligonucleotide
  Sense Strand Starting at position 1373 of SEQ ID NO: 318173
ugaugauaaugcuuguauu

SEQ ID NO: 426408 - RNA, 19 nt, Artificial Sequence
  Description of Artificial Sequence: Synthetic oligonucleotide
  Antisense Strand to SEQ ID NO: 426407
aauacaagcauuaucauca

SEQ ID NO: 426409 - RNA, 19 nt, Artificial Sequence
  Description of Artificial Sequence: Synthetic oligonucleotide
  Sense Strand Starting at position 1373 of SEQ ID NO: 318209
guauacuuccgguagcuca

SEQ ID NO: 426410 - RNA, 19 nt, Artificial Sequence
  Description of Artificial Sequence: Synthetic oligonucleotide
  Antisense Strand to SEQ ID NO: 426409
ugagcuaccggaaguauac

SEQ ID NO: 426411 - RNA, 19 nt, Artificial Sequence
  Description of Artificial Sequence: Synthetic oligonucleotide
  Sense Strand Starting at position 1373 of SEQ ID NO: 318255
ugaguugcccaaggaaaua

SEQ ID NO: 426412 - RNA, 19 nt, Artificial Sequence
  Description of Artificial Sequence: Synthetic oligonucleotide
  Antisense Strand to SEQ ID NO: 426411
uauuuccuugggcaacuca

SEQ ID NO: 426413 - RNA, 19 nt, Artificial Sequence
  Description of Artificial Sequence: Synthetic oligonucleotide
  Sense Strand Starting at position 1373 of SEQ ID NO: 318268
gaaauagagucaguaacug

SEQ ID NO: 426414 - RNA, 19 nt, Artificial Sequence
  Description of Artificial Sequence: Synthetic oligonucleotide
  Antisense Strand to SEQ ID NO: 426413
caguuacugacucuauuuc

SEQ ID NO: 426415 - RNA, 19 nt, Artificial Sequence
  Description of Artificial Sequence: Synthetic oligonucleotide
  Sense Strand Starting at position 1373 of SEQ ID NO: 318273
agagucaguaacuggaaua

SEQ ID NO: 426416 - RNA, 19 nt, Artificial Sequence
  Description of Artificial Sequence: Synthetic oligonucleotide
  Antisense Strand to SEQ ID NO: 426415
uauuccaguuacugacucu

SEQ ID NO: 426417 - RNA, 19 nt, Artificial Sequence
  Description of Artificial Sequence: Synthetic oligonucleotide
  Sense Strand Starting at position 1373 of SEQ ID NO: 318420
gaagguugugggcaggaua

SEQ ID NO: 426418 - RNA, 19 nt, Artificial Sequence
  Description of Artificial Sequence: Synthetic oligonucleotide
  Antisense Strand to SEQ ID NO: 426417
uauccugcccacaaccuuc

SEQ ID NO: 426419 - RNA, 19 nt, Artificial Sequence
  Description of Artificial Sequence: Synthetic oligonucleotide
  Sense Strand Starting at position 1373 of SEQ ID NO: 318445
agggcaagauuccaaggaa

SEQ ID NO: 426420 - RNA, 19 nt, Artificial Sequence
  Description of Artificial Sequence: Synthetic oligonucleotide
  Antisense Strand to SEQ ID NO: 426419
uuccuuggaaucuugcccu

SEQ ID NO: 426421 - RNA, 19 nt, Artificial Sequence
  Description of Artificial Sequence: Synthetic oligonucleotide
  Sense Strand Starting at position 1373 of SEQ ID NO: 318485
acgguuaccaccugggaaa

SEQ ID NO: 426422 - RNA, 19 nt, Artificial Sequence
  Description of Artificial Sequence: Synthetic oligonucleotide
  Antisense Strand to SEQ ID NO: 426421
uuucccaggugguaaccgu

SEQ ID NO: 426423 - RNA, 19 nt, Artificial Sequence
  Description of Artificial Sequence: Synthetic oligonucleotide
  Sense Strand Starting at position 1373 of SEQ ID NO: 318529
cccagaguguacucaaaga

SEQ ID NO: 426424 - RNA, 19 nt, Artificial Sequence
  Description of Artificial Sequence: Synthetic oligonucleotide
  Antisense Strand to SEQ ID NO: 426423
ucuuugaguacacucuggg

SEQ ID NO: 426425 - RNA, 19 nt, Artificial Sequence
  Description of Artificial Sequence: Synthetic oligonucleotide
  Sense Strand Starting at position 1373 of SEQ ID NO: 319070
cuuucugaaugguugcuau

SEQ ID NO: 426426 - RNA, 19 nt, Artificial Sequence
  Description of Artificial Sequence: Synthetic oligonucleotide
  Antisense Strand to SEQ ID NO: 426425
auagcaaccauucagaaag

SEQ ID NO: 426427 - RNA, 19 nt, Artificial Sequence
  Description of Artificial Sequence: Synthetic oligonucleotide
  Sense Strand Starting at position 1373 of SEQ ID NO: 319073
ucugaaugguugcuaugaa

SEQ ID NO: 426428 - RNA, 19 nt, Artificial Sequence
  Description of Artificial Sequence: Synthetic oligonucleotide
  Antisense Strand to SEQ ID NO: 426427
uucauagcaaccauucaga

SEQ ID NO: 426429 - RNA, 19 nt, Artificial Sequence
  Description of Artificial Sequence: Synthetic oligonucleotide
  Sense Strand Starting at position 1374 of SEQ ID NO: 315297
agugacuuguaauccauaa

SEQ ID NO: 426430 - RNA, 19 nt, Artificial Sequence
  Description of Artificial Sequence: Synthetic oligonucleotide
  Antisense Strand to SEQ ID NO: 426429
uuauggauuacaagucacu

SEQ ID NO: 426431 - RNA, 19 nt, Artificial Sequence
  Description of Artificial Sequence: Synthetic oligonucleotide
  Sense Strand Starting at position 1374 of SEQ ID NO: 315309
uccauaacuccauggguga

SEQ ID NO: 426432 - RNA, 19 nt, Artificial Sequence
  Description of Artificial Sequence: Synthetic oligonucleotide
  Antisense Strand to SEQ ID NO: 426431
ucacccauggaguuaugga

SEQ ID NO: 426433 - RNA, 19 nt, Artificial Sequence
  Description of Artificial Sequence: Synthetic oligonucleotide
  Sense Strand Starting at position 1374 of SEQ ID NO: 315531
cuugaacuggucuaucuca

SEQ ID NO: 426434 - RNA, 19 nt, Artificial Sequence
  Description of Artificial Sequence: Synthetic oligonucleotide
  Antisense Strand to SEQ ID NO: 426433
ugagauagaccaguucaag

SEQ ID NO: 426435 - RNA, 19 nt, Artificial Sequence
  Description of Artificial Sequence: Synthetic oligonucleotide
  Sense Strand Starting at position 1374 of SEQ ID NO: 315539
ggucuaucucaagggucua

SEQ ID NO: 426436 - RNA, 19 nt, Artificial Sequence
  Description of Artificial Sequence: Synthetic oligonucleotide
  Antisense Strand to SEQ ID NO: 426435
uagacccuugagauagacc

SEQ ID NO: 426437 - RNA, 19 nt, Artificial Sequence
  Description of Artificial Sequence: Synthetic oligonucleotide
  Sense Strand Starting at position 1374 of SEQ ID NO: 315562
uuuaguccaaggugagaau

SEQ ID NO: 426438 - RNA, 19 nt, Artificial Sequence
  Description of Artificial Sequence: Synthetic oligonucleotide
  Antisense Strand to SEQ ID NO: 426437
auucucaccuuggacuaaa

SEQ ID NO: 426439 - RNA, 19 nt, Artificial Sequence
  Description of Artificial Sequence: Synthetic oligonucleotide
  Sense Strand Starting at position 1374 of SEQ ID NO: 315580
uuuguugugcuagcucauu

SEQ ID NO: 426440 - RNA, 19 nt, Artificial Sequence
  Description of Artificial Sequence: Synthetic oligonucleotide
  Antisense Strand to SEQ ID NO: 426439
aaugagcuagcacaacaaa

SEQ ID NO: 426441 - RNA, 19 nt, Artificial Sequence
  Description of Artificial Sequence: Synthetic oligonucleotide
  Sense Strand Starting at position 1374 of SEQ ID NO: 315613
cugcauaagguggaguaau

SEQ ID NO: 426442 - RNA, 19 nt, Artificial Sequence
  Description of Artificial Sequence: Synthetic oligonucleotide
  Antisense Strand to SEQ ID NO: 426441
auuacuccaccuuaugcag

SEQ ID NO: 426443 - RNA, 19 nt, Artificial Sequence
  Description of Artificial Sequence: Synthetic oligonucleotide
  Sense Strand Starting at position 1374 of SEQ ID NO: 315635
ggcauagguuagguaauau

SEQ ID NO: 426444 - RNA, 19 nt, Artificial Sequence
  Description of Artificial Sequence: Synthetic oligonucleotide
  Antisense Strand to SEQ ID NO: 426443
auauuaccuaaccuaugcc

SEQ ID NO: 426445 - RNA, 19 nt, Artificial Sequence
  Description of Artificial Sequence: Synthetic oligonucleotide
  Sense Strand Starting at position 1374 of SEQ ID NO: 315694
gguggcagucuccaauaaa

SEQ ID NO: 426446 - RNA, 19 nt, Artificial Sequence
  Description of Artificial Sequence: Synthetic oligonucleotide
  Antisense Strand to SEQ ID NO: 426445
uuuauuggagacugccacc

SEQ ID NO: 426447 - RNA, 19 nt, Artificial Sequence
  Description of Artificial Sequence: Synthetic oligonucleotide
  Sense Strand Starting at position 1374 of SEQ ID NO: 315983
aguccuuauccgggacaug

SEQ ID NO: 426448 - RNA, 19 nt, Artificial Sequence
  Description of Artificial Sequence: Synthetic oligonucleotide
  Antisense Strand to SEQ ID NO: 426447
caugucccggauaaggacu

SEQ ID NO: 426449 - RNA, 19 nt, Artificial Sequence
  Description of Artificial Sequence: Synthetic oligonucleotide
  Sense Strand Starting at position 1374 of SEQ ID NO: 316221
gccgguaucauuuguccca

SEQ ID NO: 426450 - RNA, 19 nt, Artificial Sequence
  Description of Artificial Sequence: Synthetic oligonucleotide
  Antisense Strand to SEQ ID NO: 426449
ugggacaaaugauaccggc

SEQ ID NO: 426451 - RNA, 19 nt, Artificial Sequence
  Description of Artificial Sequence: Synthetic oligonucleotide
  Sense Strand Starting at position 1374 of SEQ ID NO: 316222
ccgguaucauuugucccau

SEQ ID NO: 426452 - RNA, 19 nt, Artificial Sequence
  Description of Artificial Sequence: Synthetic oligonucleotide
  Antisense Strand to SEQ ID NO: 426451
augggacaaaugauaccgg

SEQ ID NO: 426453 - RNA, 19 nt, Artificial Sequence
  Description of Artificial Sequence: Synthetic oligonucleotide
  Sense Strand Starting at position 1374 of SEQ ID NO: 316223
cgguaucauuugucccauu

SEQ ID NO: 426454 - RNA, 19 nt, Artificial Sequence
  Description of Artificial Sequence: Synthetic oligonucleotide
  Antisense Strand to SEQ ID NO: 426453
aaugggacaaaugauaccg

SEQ ID NO: 426455 - RNA, 19 nt, Artificial Sequence
  Description of Artificial Sequence: Synthetic oligonucleotide
  Sense Strand Starting at position 1374 of SEQ ID NO: 316371
ggcaccuggaauuguaauu

SEQ ID NO: 426456 - RNA, 19 nt, Artificial Sequence
  Description of Artificial Sequence: Synthetic oligonucleotide
  Antisense Strand to SEQ ID NO: 426455
aauuacaauuccaggugcc

SEQ ID NO: 426457 - RNA, 19 nt, Artificial Sequence
  Description of Artificial Sequence: Synthetic oligonucleotide
  Sense Strand Starting at position 1374 of SEQ ID NO: 316590
agauccuuuggacggagau

SEQ ID NO: 426458 - RNA, 19 nt, Artificial Sequence
  Description of Artificial Sequence: Synthetic oligonucleotide
  Antisense Strand to SEQ ID NO: 426457
aucuccguccaaaggaucu

SEQ ID NO: 426459 - RNA, 19 nt, Artificial Sequence
  Description of Artificial Sequence: Synthetic oligonucleotide
  Sense Strand Starting at position 1374 of SEQ ID NO: 316591
gauccuuuggacggagauc

SEQ ID NO: 426460 - RNA, 19 nt, Artificial Sequence
  Description of Artificial Sequence: Synthetic oligonucleotide
  Antisense Strand to SEQ ID NO: 426459
gaucuccguccaaaggauc

SEQ ID NO: 426461 - RNA, 19 nt, Artificial Sequence
  Description of Artificial Sequence: Synthetic oligonucleotide
  Sense Strand Starting at position 1374 of SEQ ID NO: 316658
gagucugaguuccucaaag

SEQ ID NO: 426462 - RNA, 19 nt, Artificial Sequence
  Description of Artificial Sequence: Synthetic oligonucleotide
  Antisense Strand to SEQ ID NO: 426461
cuuugaggaacucagacuc

SEQ ID NO: 426463 - RNA, 19 nt, Artificial Sequence
  Description of Artificial Sequence: Synthetic oligonucleotide
  Sense Strand Starting at position 1374 of SEQ ID NO: 316750
gaaagaguaucuuuaggua

SEQ ID NO: 426464 - RNA, 19 nt, Artificial Sequence
  Description of Artificial Sequence: Synthetic oligonucleotide
  Antisense Strand to SEQ ID NO: 426463
uaccuaaagauacucuuuc

SEQ ID NO: 426465 - RNA, 19 nt, Artificial Sequence
  Description of Artificial Sequence: Synthetic oligonucleotide
  Sense Strand Starting at position 1374 of SEQ ID NO: 316754
gaguaucuuuagguaggaa

SEQ ID NO: 426466 - RNA, 19 nt, Artificial Sequence
  Description of Artificial Sequence: Synthetic oligonucleotide
  Antisense Strand to SEQ ID NO: 426465
uuccuaccuaaagauacuc

SEQ ID NO: 426467 - RNA, 19 nt, Artificial Sequence
  Description of Artificial Sequence: Synthetic oligonucleotide
  Sense Strand Starting at position 1374 of SEQ ID NO: 316900
gguagcaauggauagguuu

SEQ ID NO: 426468 - RNA, 19 nt, Artificial Sequence
  Description of Artificial Sequence: Synthetic oligonucleotide
  Antisense Strand to SEQ ID NO: 426467
aaaccuauccauugcuacc

SEQ ID NO: 426469 - RNA, 19 nt, Artificial Sequence
  Description of Artificial Sequence: Synthetic oligonucleotide
  Sense Strand Starting at position 1374 of SEQ ID NO: 316929
gguuuaugcgugccauuca

SEQ ID NO: 426470 - RNA, 19 nt, Artificial Sequence
  Description of Artificial Sequence: Synthetic oligonucleotide
  Antisense Strand to SEQ ID NO: 426469
ugaauggcacgcauaaacc

SEQ ID NO: 426471 - RNA, 19 nt, Artificial Sequence
  Description of Artificial Sequence: Synthetic oligonucleotide
  Sense Strand Starting at position 1374 of SEQ ID NO: 316972
gugagugaccuaggacacu

SEQ ID NO: 426472 - RNA, 19 nt, Artificial Sequence
  Description of Artificial Sequence: Synthetic oligonucleotide
  Antisense Strand to SEQ ID NO: 426471
aguguccuaggucacucac

SEQ ID NO: 426473 - RNA, 19 nt, Artificial Sequence
  Description of Artificial Sequence: Synthetic oligonucleotide
  Sense Strand Starting at position 1374 of SEQ ID NO: 317051
ugugucuguuaagcauuua

SEQ ID NO: 426474 - RNA, 19 nt, Artificial Sequence
  Description of Artificial Sequence: Synthetic oligonucleotide
  Antisense Strand to SEQ ID NO: 426473
uaaaugcuuaacagacaca

SEQ ID NO: 426475 - RNA, 19 nt, Artificial Sequence
  Description of Artificial Sequence: Synthetic oligonucleotide
  Sense Strand Starting at position 1374 of SEQ ID NO: 317052
gugucuguuaagcauuuau

SEQ ID NO: 426476 - RNA, 19 nt, Artificial Sequence
  Description of Artificial Sequence: Synthetic oligonucleotide
  Antisense Strand to SEQ ID NO: 426475
auaaaugcuuaacagacac

SEQ ID NO: 426477 - RNA, 19 nt, Artificial Sequence
  Description of Artificial Sequence: Synthetic oligonucleotide
  Sense Strand Starting at position 1374 of SEQ ID NO: 317072
auaauccugcugcaugaaa

SEQ ID NO: 426478 - RNA, 19 nt, Artificial Sequence
  Description of Artificial Sequence: Synthetic oligonucleotide
  Antisense Strand to SEQ ID NO: 426477
uuucaugcagcaggauuau

SEQ ID NO: 426479 - RNA, 19 nt, Artificial Sequence
  Description of Artificial Sequence: Synthetic oligonucleotide
  Sense Strand Starting at position 1374 of SEQ ID NO: 317354
gggagugacgugcagagau

SEQ ID NO: 426480 - RNA, 19 nt, Artificial Sequence
  Description of Artificial Sequence: Synthetic oligonucleotide
  Antisense Strand to SEQ ID NO: 426479
aucucugcacgucacuccc

SEQ ID NO: 426481 - RNA, 19 nt, Artificial Sequence
  Description of Artificial Sequence: Synthetic oligonucleotide
  Sense Strand Starting at position 1374 of SEQ ID NO: 317422
ggugacuuggcguggauuu

SEQ ID NO: 426482 - RNA, 19 nt, Artificial Sequence
  Description of Artificial Sequence: Synthetic oligonucleotide
  Antisense Strand to SEQ ID NO: 426481
aaauccacgccaagucacc

SEQ ID NO: 426483 - RNA, 19 nt, Artificial Sequence
  Description of Artificial Sequence: Synthetic oligonucleotide
  Sense Strand Starting at position 1374 of SEQ ID NO: 317423
gugacuuggcguggauuua

SEQ ID NO: 426484 - RNA, 19 nt, Artificial Sequence
  Description of Artificial Sequence: Synthetic oligonucleotide
  Antisense Strand to SEQ ID NO: 426483
uaaauccacgccaagucac

SEQ ID NO: 426485 - RNA, 19 nt, Artificial Sequence
  Description of Artificial Sequence: Synthetic oligonucleotide
  Sense Strand Starting at position 1374 of SEQ ID NO: 317562
gaacuugcccgggaaacua

SEQ ID NO: 426486 - RNA, 19 nt, Artificial Sequence
  Description of Artificial Sequence: Synthetic oligonucleotide
  Antisense Strand to SEQ ID NO: 426485
uaguuucccgggcaaguuc

SEQ ID NO: 426487 - RNA, 19 nt, Artificial Sequence
  Description of Artificial Sequence: Synthetic oligonucleotide
  Sense Strand Starting at position 1374 of SEQ ID NO: 317692
uccuguaugagucaggcau

SEQ ID NO: 426488 - RNA, 19 nt, Artificial Sequence
  Description of Artificial Sequence: Synthetic oligonucleotide
  Antisense Strand to SEQ ID NO: 426487
augccugacucauacagga

SEQ ID NO: 426489 - RNA, 19 nt, Artificial Sequence
  Description of Artificial Sequence: Synthetic oligonucleotide
  Sense Strand Starting at position 1374 of SEQ ID NO: 318210
gcgauugugccuucagcga

SEQ ID NO: 426490 - RNA, 19 nt, Artificial Sequence
  Description of Artificial Sequence: Synthetic oligonucleotide
  Antisense Strand to SEQ ID NO: 426489
ucgcugaaggcacaaucgc

SEQ ID NO: 426491 - RNA, 19 nt, Artificial Sequence
  Description of Artificial Sequence: Synthetic oligonucleotide
  Sense Strand Starting at position 1374 of SEQ ID NO: 318528
cuccgauuacaguaauucu

SEQ ID NO: 426492 - RNA, 19 nt, Artificial Sequence
  Description of Artificial Sequence: Synthetic oligonucleotide
  Antisense Strand to SEQ ID NO: 426491
agaauuacuguaaucggag

SEQ ID NO: 426493 - RNA, 19 nt, Artificial Sequence
  Description of Artificial Sequence: Synthetic oligonucleotide
  Sense Strand Starting at position 1374 of SEQ ID NO: 318531
cgauuacaguaauucucua

SEQ ID NO: 426494 - RNA, 19 nt, Artificial Sequence
  Description of Artificial Sequence: Synthetic oligonucleotide
  Antisense Strand to SEQ ID NO: 426493
uagagaauuacuguaaucg

SEQ ID NO: 426495 - RNA, 19 nt, Artificial Sequence
  Description of Artificial Sequence: Synthetic oligonucleotide
  Sense Strand Starting at position 1374 of SEQ ID NO: 318539
guaauucucuaaguaacag

SEQ ID NO: 426496 - RNA, 19 nt, Artificial Sequence
  Description of Artificial Sequence: Synthetic oligonucleotide
  Antisense Strand to SEQ ID NO: 426495
cuguuacuuagagaauuac

SEQ ID NO: 426497 - RNA, 19 nt, Artificial Sequence
  Description of Artificial Sequence: Synthetic oligonucleotide
  Sense Strand Starting at position 1374 of SEQ ID NO: 318671
gauguuuguaauggaaguu

SEQ ID NO: 426498 - RNA, 19 nt, Artificial Sequence
  Description of Artificial Sequence: Synthetic oligonucleotide
  Antisense Strand to SEQ ID NO: 426497
aacuuccauuacaaacauc

SEQ ID NO: 426499 - RNA, 19 nt, Artificial Sequence
  Description of Artificial Sequence: Synthetic oligonucleotide
  Sense Strand Starting at position 1374 of SEQ ID NO: 318672
auguuuguaauggaaguuu

SEQ ID NO: 426500 - RNA, 19 nt, Artificial Sequence
  Description of Artificial Sequence: Synthetic oligonucleotide
  Antisense Strand to SEQ ID NO: 426499
aaacuuccauuacaaacau

SEQ ID NO: 426501 - RNA, 19 nt, Artificial Sequence
  Description of Artificial Sequence: Synthetic oligonucleotide
  Sense Strand Starting at position 1374 of SEQ ID NO: 319108
auuugaaguuuccugcuca

SEQ ID NO: 426502 - RNA, 19 nt, Artificial Sequence
  Description of Artificial Sequence: Synthetic oligonucleotide
  Antisense Strand to SEQ ID NO: 426501
ugagcaggaaacuucaaau

SEQ ID NO: 426503 - RNA, 19 nt, Artificial Sequence
  Description of Artificial Sequence: Synthetic oligonucleotide
  Sense Strand Starting at position 1374 of SEQ ID NO: 319139
aguugagaagccuaguuau

SEQ ID NO: 426504 - RNA, 19 nt, Artificial Sequence
  Description of Artificial Sequence: Synthetic oligonucleotide
  Antisense Strand to SEQ ID NO: 426503
auaacuaggcuucucaacu

SEQ ID NO: 426505 - RNA, 19 nt, Artificial Sequence
  Description of Artificial Sequence: Synthetic oligonucleotide
  Sense Strand Starting at position 1374 of SEQ ID NO: 319142
ugagaagccuaguuaugga

SEQ ID NO: 426506 - RNA, 19 nt, Artificial Sequence
  Description of Artificial Sequence: Synthetic oligonucleotide
  Antisense Strand to SEQ ID NO: 426505
uccauaacuaggcuucuca

SEQ ID NO: 426507 - RNA, 19 nt, Artificial Sequence
  Description of Artificial Sequence: Synthetic oligonucleotide
  Sense Strand Starting at position 1374 of SEQ ID NO: 319151
uaguuauggacacguggaa

SEQ ID NO: 426508 - RNA, 19 nt, Artificial Sequence
  Description of Artificial Sequence: Synthetic oligonucleotide
  Antisense Strand to SEQ ID NO: 426507
uuccacguguccauaacua

SEQ ID NO: 426509 - RNA, 19 nt, Artificial Sequence
  Description of Artificial Sequence: Synthetic oligonucleotide
  Sense Strand Starting at position 1375 of SEQ ID NO: 315399
auuacagaaucaggaauuu

SEQ ID NO: 426510 - RNA, 19 nt, Artificial Sequence
  Description of Artificial Sequence: Synthetic oligonucleotide
  Antisense Strand to SEQ ID NO: 426509
aaauuccugauucuguaau

SEQ ID NO: 426511 - RNA, 19 nt, Artificial Sequence
  Description of Artificial Sequence: Synthetic oligonucleotide
  Sense Strand Starting at position 1375 of SEQ ID NO: 315567
uauaaugaugggugagguu

SEQ ID NO: 426512 - RNA, 19 nt, Artificial Sequence
  Description of Artificial Sequence: Synthetic oligonucleotide
  Antisense Strand to SEQ ID NO: 426511
aaccucacccaucauuaua

SEQ ID NO: 426513 - RNA, 19 nt, Artificial Sequence
  Description of Artificial Sequence: Synthetic oligonucleotide
  Sense Strand Starting at position 1375 of SEQ ID NO: 315617
ugagucucagaagguuuaa

SEQ ID NO: 426514 - RNA, 19 nt, Artificial Sequence
  Description of Artificial Sequence: Synthetic oligonucleotide
  Antisense Strand to SEQ ID NO: 426513
uuaaaccuucugagacuca

SEQ ID NO: 426515 - RNA, 19 nt, Artificial Sequence
  Description of Artificial Sequence: Synthetic oligonucleotide
  Sense Strand Starting at position 1375 of SEQ ID NO: 315626
gaagguuuaaaugacguga

SEQ ID NO: 426516 - RNA, 19 nt, Artificial Sequence
  Description of Artificial Sequence: Synthetic oligonucleotide
  Antisense Strand to SEQ ID NO: 426515
ucacgucauuuaaaccuuc

SEQ ID NO: 426517 - RNA, 19 nt, Artificial Sequence
  Description of Artificial Sequence: Synthetic oligonucleotide
  Sense Strand Starting at position 1375 of SEQ ID NO: 315672
cccuaagucuuucugauag

SEQ ID NO: 426518 - RNA, 19 nt, Artificial Sequence
  Description of Artificial Sequence: Synthetic oligonucleotide
  Antisense Strand to SEQ ID NO: 426517
cuaucagaaagacuuaggg

SEQ ID NO: 426519 - RNA, 19 nt, Artificial Sequence
  Description of Artificial Sequence: Synthetic oligonucleotide
  Sense Strand Starting at position 1375 of SEQ ID NO: 315686
gauaguaaaguuuguugaa

SEQ ID NO: 426520 - RNA, 19 nt, Artificial Sequence
  Description of Artificial Sequence: Synthetic oligonucleotide
  Antisense Strand to SEQ ID NO: 426519
uucaacaaacuuuacuauc

SEQ ID NO: 426521 - RNA, 19 nt, Artificial Sequence
  Description of Artificial Sequence: Synthetic oligonucleotide
  Sense Strand Starting at position 1375 of SEQ ID NO: 315687
auaguaaaguuuguugaac

SEQ ID NO: 426522 - RNA, 19 nt, Artificial Sequence
  Description of Artificial Sequence: Synthetic oligonucleotide
  Antisense Strand to SEQ ID NO: 426521
guucaacaaacuuuacuau

SEQ ID NO: 426523 - RNA, 19 nt, Artificial Sequence
  Description of Artificial Sequence: Synthetic oligonucleotide
  Sense Strand Starting at position 1375 of SEQ ID NO: 315688
uaguaaaguuuguugaaca

SEQ ID NO: 426524 - RNA, 19 nt, Artificial Sequence
  Description of Artificial Sequence: Synthetic oligonucleotide
  Antisense Strand to SEQ ID NO: 426523
uguucaacaaacuuuacua

SEQ ID NO: 426525 - RNA, 19 nt, Artificial Sequence
  Description of Artificial Sequence: Synthetic oligonucleotide
  Sense Strand Starting at position 1375 of SEQ ID NO: 315693
aaguuuguugaacaagcua

SEQ ID NO: 426526 - RNA, 19 nt, Artificial Sequence
  Description of Artificial Sequence: Synthetic oligonucleotide
  Antisense Strand to SEQ ID NO: 426525
uagcuuguucaacaaacuu

SEQ ID NO: 426527 - RNA, 19 nt, Artificial Sequence
  Description of Artificial Sequence: Synthetic oligonucleotide
  Sense Strand Starting at position 1375 of SEQ ID NO: 315753
gccauuuaucaucagcugu

SEQ ID NO: 426528 - RNA, 19 nt, Artificial Sequence
  Description of Artificial Sequence: Synthetic oligonucleotide
  Antisense Strand to SEQ ID NO: 426527
acagcugaugauaaauggc

SEQ ID NO: 426529 - RNA, 19 nt, Artificial Sequence
  Description of Artificial Sequence: Synthetic oligonucleotide
  Sense Strand Starting at position 1375 of SEQ ID NO: 315983
cacauuuguguuggccaaa

SEQ ID NO: 426530 - RNA, 19 nt, Artificial Sequence
  Description of Artificial Sequence: Synthetic oligonucleotide
  Antisense Strand to SEQ ID NO: 426529
uuuggccaacacaaaugug

SEQ ID NO: 426531 - RNA, 19 nt, Artificial Sequence
  Description of Artificial Sequence: Synthetic oligonucleotide
  Sense Strand Starting at position 1375 of SEQ ID NO: 316200
ggcagcuuucuuuaacaga

SEQ ID NO: 426532 - RNA, 19 nt, Artificial Sequence
  Description of Artificial Sequence: Synthetic oligonucleotide
  Antisense Strand to SEQ ID NO: 426531
ucuguuaaagaaagcugcc

SEQ ID NO: 426533 - RNA, 19 nt, Artificial Sequence
  Description of Artificial Sequence: Synthetic oligonucleotide
  Sense Strand Starting at position 1375 of SEQ ID NO: 316641
aguauaagugcauaaagua

SEQ ID NO: 426534 - RNA, 19 nt, Artificial Sequence
  Description of Artificial Sequence: Synthetic oligonucleotide
  Antisense Strand to SEQ ID NO: 426533
uacuuuaugcacuuauacu

SEQ ID NO: 426535 - RNA, 19 nt, Artificial Sequence
  Description of Artificial Sequence: Synthetic oligonucleotide
  Sense Strand Starting at position 1375 of SEQ ID NO: 316648
gugcauaaaguauaguaua

SEQ ID NO: 426536 - RNA, 19 nt, Artificial Sequence
  Description of Artificial Sequence: Synthetic oligonucleotide
  Antisense Strand to SEQ ID NO: 426535
uauacuauacuuuaugcac

SEQ ID NO: 426537 - RNA, 19 nt, Artificial Sequence
  Description of Artificial Sequence: Synthetic oligonucleotide
  Sense Strand Starting at position 1375 of SEQ ID NO: 316658
uauaguauaguuuggacau

SEQ ID NO: 426538 - RNA, 19 nt, Artificial Sequence
  Description of Artificial Sequence: Synthetic oligonucleotide
  Antisense Strand to SEQ ID NO: 426537
auguccaaacuauacuaua

SEQ ID NO: 426539 - RNA, 19 nt, Artificial Sequence
  Description of Artificial Sequence: Synthetic oligonucleotide
  Sense Strand Starting at position 1375 of SEQ ID NO: 316761
aaacaaugucuaggucuga

SEQ ID NO: 426540 - RNA, 19 nt, Artificial Sequence
  Description of Artificial Sequence: Synthetic oligonucleotide
  Antisense Strand to SEQ ID NO: 426539
ucagaccuagacauuguuu

SEQ ID NO: 426541 - RNA, 19 nt, Artificial Sequence
  Description of Artificial Sequence: Synthetic oligonucleotide
  Sense Strand Starting at position 1375 of SEQ ID NO: 316762
aacaaugucuaggucugaa

SEQ ID NO: 426542 - RNA, 19 nt, Artificial Sequence
  Description of Artificial Sequence: Synthetic oligonucleotide
  Antisense Strand to SEQ ID NO: 426541
uucagaccuagacauuguu

SEQ ID NO: 426543 - RNA, 19 nt, Artificial Sequence
  Description of Artificial Sequence: Synthetic oligonucleotide
  Sense Strand Starting at position 1375 of SEQ ID NO: 316765
aaugucuaggucugaacuu

SEQ ID NO: 426544 - RNA, 19 nt, Artificial Sequence
  Description of Artificial Sequence: Synthetic oligonucleotide
  Antisense Strand to SEQ ID NO: 426543
aaguucagaccuagacauu

SEQ ID NO: 426545 - RNA, 19 nt, Artificial Sequence
  Description of Artificial Sequence: Synthetic oligonucleotide
  Sense Strand Starting at position 1375 of SEQ ID NO: 316774
gucugaacuucuuuggacu

SEQ ID NO: 426546 - RNA, 19 nt, Artificial Sequence
  Description of Artificial Sequence: Synthetic oligonucleotide
  Antisense Strand to SEQ ID NO: 426545
aguccaaagaaguucagac

SEQ ID NO: 426547 - RNA, 19 nt, Artificial Sequence
  Description of Artificial Sequence: Synthetic oligonucleotide
  Sense Strand Starting at position 1375 of SEQ ID NO: 316775
ucugaacuucuuuggacua

SEQ ID NO: 426548 - RNA, 19 nt, Artificial Sequence
  Description of Artificial Sequence: Synthetic oligonucleotide
  Antisense Strand to SEQ ID NO: 426547
uaguccaaagaaguucaga

SEQ ID NO: 426549 - RNA, 19 nt, Artificial Sequence
  Description of Artificial Sequence: Synthetic oligonucleotide
  Sense Strand Starting at position 1375 of SEQ ID NO: 316795
ccauguacucuagagcuaa

SEQ ID NO: 426550 - RNA, 19 nt, Artificial Sequence
  Description of Artificial Sequence: Synthetic oligonucleotide
  Antisense Strand to SEQ ID NO: 426549
uuagcucuagaguacaugg

SEQ ID NO: 426551 - RNA, 19 nt, Artificial Sequence
  Description of Artificial Sequence: Synthetic oligonucleotide
  Sense Strand Starting at position 1375 of SEQ ID NO: 316848
ucccuaauugguugaaucu

SEQ ID NO: 426552 - RNA, 19 nt, Artificial Sequence
  Description of Artificial Sequence: Synthetic oligonucleotide
  Antisense Strand to SEQ ID NO: 426551
agauucaaccaauuaggga

SEQ ID NO: 426553 - RNA, 19 nt, Artificial Sequence
  Description of Artificial Sequence: Synthetic oligonucleotide
  Sense Strand Starting at position 1375 of SEQ ID NO: 316867
cuauuugaguuacaaugau

SEQ ID NO: 426554 - RNA, 19 nt, Artificial Sequence
  Description of Artificial Sequence: Synthetic oligonucleotide
  Antisense Strand to SEQ ID NO: 426553
aucauuguaacucaaauag

SEQ ID NO: 426555 - RNA, 19 nt, Artificial Sequence
  Description of Artificial Sequence: Synthetic oligonucleotide
  Sense Strand Starting at position 1375 of SEQ ID NO: 317267
ucaggcucccuagaucuua

SEQ ID NO: 426556 - RNA, 19 nt, Artificial Sequence
  Description of Artificial Sequence: Synthetic oligonucleotide
  Antisense Strand to SEQ ID NO: 426555
uaagaucuagggagccuga

SEQ ID NO: 426557 - RNA, 19 nt, Artificial Sequence
  Description of Artificial Sequence: Synthetic oligonucleotide
  Sense Strand Starting at position 1375 of SEQ ID NO: 317290
ggugcaauuccagacaugu

SEQ ID NO: 426558 - RNA, 19 nt, Artificial Sequence
  Description of Artificial Sequence: Synthetic oligonucleotide
  Antisense Strand to SEQ ID NO: 426557
acaugucuggaauugcacc

SEQ ID NO: 426559 - RNA, 19 nt, Artificial Sequence
  Description of Artificial Sequence: Synthetic oligonucleotide
  Sense Strand Starting at position 1375 of SEQ ID NO: 317328
guuauaaagguuuagugga

SEQ ID NO: 426560 - RNA, 19 nt, Artificial Sequence
  Description of Artificial Sequence: Synthetic oligonucleotide
  Antisense Strand to SEQ ID NO: 426559
uccacuaaaccuuuauaac

SEQ ID NO: 426561 - RNA, 19 nt, Artificial Sequence
  Description of Artificial Sequence: Synthetic oligonucleotide
  Sense Strand Starting at position 1375 of SEQ ID NO: 317498
aaugucucugcuuggauuu

SEQ ID NO: 426562 - RNA, 19 nt, Artificial Sequence
  Description of Artificial Sequence: Synthetic oligonucleotide
  Antisense Strand to SEQ ID NO: 426561
aaauccaagcagagacauu

SEQ ID NO: 426563 - RNA, 19 nt, Artificial Sequence
  Description of Artificial Sequence: Synthetic oligonucleotide
  Sense Strand Starting at position 1375 of SEQ ID NO: 317529
acaagaaugccuugucuaa

SEQ ID NO: 426564 - RNA, 19 nt, Artificial Sequence
  Description of Artificial Sequence: Synthetic oligonucleotide
  Antisense Strand to SEQ ID NO: 426563
uuagacaaggcauucuugu

SEQ ID NO: 426565 - RNA, 19 nt, Artificial Sequence
  Description of Artificial Sequence: Synthetic oligonucleotide
  Sense Strand Starting at position 1375 of SEQ ID NO: 317585
agaugauaauggccuugaa

SEQ ID NO: 426566 - RNA, 19 nt, Artificial Sequence
  Description of Artificial Sequence: Synthetic oligonucleotide
  Antisense Strand to SEQ ID NO: 426565
uucaaggccauuaucaucu

SEQ ID NO: 426567 - RNA, 19 nt, Artificial Sequence
  Description of Artificial Sequence: Synthetic oligonucleotide
  Sense Strand Starting at position 1375 of SEQ ID NO: 317786
gucauaugcuaagugauuu

SEQ ID NO: 426568 - RNA, 19 nt, Artificial Sequence
  Description of Artificial Sequence: Synthetic oligonucleotide
  Antisense Strand to SEQ ID NO: 426567
aaaucacuuagcauaugac

SEQ ID NO: 426569 - RNA, 19 nt, Artificial Sequence
  Description of Artificial Sequence: Synthetic oligonucleotide
  Sense Strand Starting at position 1375 of SEQ ID NO: 317794
cuaagugauuugcugucaa

SEQ ID NO: 426570 - RNA, 19 nt, Artificial Sequence
  Description of Artificial Sequence: Synthetic oligonucleotide
  Antisense Strand to SEQ ID NO: 426569
uugacagcaaaucacuuag

SEQ ID NO: 426571 - RNA, 19 nt, Artificial Sequence
  Description of Artificial Sequence: Synthetic oligonucleotide
  Sense Strand Starting at position 1375 of SEQ ID NO: 317891
agaauuaaauuuggaguca

SEQ ID NO: 426572 - RNA, 19 nt, Artificial Sequence
  Description of Artificial Sequence: Synthetic oligonucleotide
  Antisense Strand to SEQ ID NO: 426571
ugacuccaaauuuaauucu

SEQ ID NO: 426573 - RNA, 19 nt, Artificial Sequence
  Description of Artificial Sequence: Synthetic oligonucleotide
  Sense Strand Starting at position 1375 of SEQ ID NO: 317892
gaauuaaauuuggagucag

SEQ ID NO: 426574 - RNA, 19 nt, Artificial Sequence
  Description of Artificial Sequence: Synthetic oligonucleotide
  Antisense Strand to SEQ ID NO: 426573
cugacuccaaauuuaauuc

SEQ ID NO: 426575 - RNA, 19 nt, Artificial Sequence
  Description of Artificial Sequence: Synthetic oligonucleotide
  Sense Strand Starting at position 1375 of SEQ ID NO: 318025
ugagaucuguuacuguaug

SEQ ID NO: 426576 - RNA, 19 nt, Artificial Sequence
  Description of Artificial Sequence: Synthetic oligonucleotide
  Antisense Strand to SEQ ID NO: 426575
cauacaguaacagaucuca

SEQ ID NO: 426577 - RNA, 19 nt, Artificial Sequence
  Description of Artificial Sequence: Synthetic oligonucleotide
  Sense Strand Starting at position 1375 of SEQ ID NO: 318610
ucagaagaaugccuugaac

SEQ ID NO: 426578 - RNA, 19 nt, Artificial Sequence
  Description of Artificial Sequence: Synthetic oligonucleotide
  Antisense Strand to SEQ ID NO: 426577
guucaaggcauucuucuga

SEQ ID NO: 426579 - RNA, 19 nt, Artificial Sequence
  Description of Artificial Sequence: Synthetic oligonucleotide
  Sense Strand Starting at position 1375 of SEQ ID NO: 318874
ggcacaguaaucugaagua

SEQ ID NO: 426580 - RNA, 19 nt, Artificial Sequence
  Description of Artificial Sequence: Synthetic oligonucleotide
  Antisense Strand to SEQ ID NO: 426579
uacuucagauuacugugcc

SEQ ID NO: 426581 - RNA, 19 nt, Artificial Sequence
  Description of Artificial Sequence: Synthetic oligonucleotide
  Sense Strand Starting at position 1375 of SEQ ID NO: 319035
gcaauuucuugguaaauuu

SEQ ID NO: 426582 - RNA, 19 nt, Artificial Sequence
  Description of Artificial Sequence: Synthetic oligonucleotide
  Antisense Strand to SEQ ID NO: 426581
aaauuuaccaagaaauugc

SEQ ID NO: 426583 - RNA, 19 nt, Artificial Sequence
  Description of Artificial Sequence: Synthetic oligonucleotide
  Sense Strand Starting at position 1375 of SEQ ID NO: 319074
uguguauacugaucaaaua

SEQ ID NO: 426584 - RNA, 19 nt, Artificial Sequence
  Description of Artificial Sequence: Synthetic oligonucleotide
  Antisense Strand to SEQ ID NO: 426583
uauuugaucaguauacaca

SEQ ID NO: 426585 - RNA, 19 nt, Artificial Sequence
  Description of Artificial Sequence: Synthetic oligonucleotide
  Sense Strand Starting at position 1375 of SEQ ID NO: 319171
auugcauaucugcauagaa

SEQ ID NO: 426586 - RNA, 19 nt, Artificial Sequence
  Description of Artificial Sequence: Synthetic oligonucleotide
  Antisense Strand to SEQ ID NO: 426585
uucuaugcagauaugcaau

SEQ ID NO: 426587 - RNA, 19 nt, Artificial Sequence
  Description of Artificial Sequence: Synthetic oligonucleotide
  Sense Strand Starting at position 1375 of SEQ ID NO: 319173
ugcauaucugcauagaacu

SEQ ID NO: 426588 - RNA, 19 nt, Artificial Sequence
  Description of Artificial Sequence: Synthetic oligonucleotide
  Antisense Strand to SEQ ID NO: 426587
aguucuaugcagauaugca

SEQ ID NO: 426589 - RNA, 19 nt, Artificial Sequence
  Description of Artificial Sequence: Synthetic oligonucleotide
  Sense Strand Starting at position 1376 of SEQ ID NO: 315261
acccuaucccugugaaagc

SEQ ID NO: 426590 - RNA, 19 nt, Artificial Sequence
  Description of Artificial Sequence: Synthetic oligonucleotide
  Antisense Strand to SEQ ID NO: 426589
gcuuucacagggauagggu

SEQ ID NO: 426591 - RNA, 19 nt, Artificial Sequence
  Description of Artificial Sequence: Synthetic oligonucleotide
  Sense Strand Starting at position 1376 of SEQ ID NO: 315301
ugaagagcucacuguguug

SEQ ID NO: 426592 - RNA, 19 nt, Artificial Sequence
  Description of Artificial Sequence: Synthetic oligonucleotide
  Antisense Strand to SEQ ID NO: 426591
caacacagugagcucuuca

SEQ ID NO: 426593 - RNA, 19 nt, Artificial Sequence
  Description of Artificial Sequence: Synthetic oligonucleotide
  Sense Strand Starting at position 1376 of SEQ ID NO: 315689
ggacuuuauccacaaggcu

SEQ ID NO: 426594 - RNA, 19 nt, Artificial Sequence
  Description of Artificial Sequence: Synthetic oligonucleotide
  Antisense Strand to SEQ ID NO: 426593
agccuuguggauaaagucc

SEQ ID NO: 426595 - RNA, 19 nt, Artificial Sequence
  Description of Artificial Sequence: Synthetic oligonucleotide
  Sense Strand Starting at position 1376 of SEQ ID NO: 315851
cuauccucccagcguguua

SEQ ID NO: 426596 - RNA, 19 nt, Artificial Sequence
  Description of Artificial Sequence: Synthetic oligonucleotide
  Antisense Strand to SEQ ID NO: 426595
uaacacgcugggaggauag

SEQ ID NO: 426597 - RNA, 19 nt, Artificial Sequence
  Description of Artificial Sequence: Synthetic oligonucleotide
  Sense Strand Starting at position 1376 of SEQ ID NO: 315873
uccugaaucuggccacauu

SEQ ID NO: 426598 - RNA, 19 nt, Artificial Sequence
  Description of Artificial Sequence: Synthetic oligonucleotide
  Antisense Strand to SEQ ID NO: 426597
aauguggccagauucagga

SEQ ID NO: 426599 - RNA, 19 nt, Artificial Sequence
  Description of Artificial Sequence: Synthetic oligonucleotide
  Sense Strand Starting at position 1376 of SEQ ID NO: 315974
cgugccacucugugaagau

SEQ ID NO: 426600 - RNA, 19 nt, Artificial Sequence
  Description of Artificial Sequence: Synthetic oligonucleotide
  Antisense Strand to SEQ ID NO: 426599
aucuucacagaguggcacg

SEQ ID NO: 426601 - RNA, 19 nt, Artificial Sequence
  Description of Artificial Sequence: Synthetic oligonucleotide
  Sense Strand Starting at position 1376 of SEQ ID NO: 315975
gugccacucugugaagaug

SEQ ID NO: 426602 - RNA, 19 nt, Artificial Sequence
  Description of Artificial Sequence: Synthetic oligonucleotide
  Antisense Strand to SEQ ID NO: 426601
caucuucacagaguggcac

SEQ ID NO: 426603 - RNA, 19 nt, Artificial Sequence
  Description of Artificial Sequence: Synthetic oligonucleotide
  Sense Strand Starting at position 1376 of SEQ ID NO: 316017
gcagguuaaggauaucugu

SEQ ID NO: 426604 - RNA, 19 nt, Artificial Sequence
  Description of Artificial Sequence: Synthetic oligonucleotide
  Antisense Strand to SEQ ID NO: 426603
acagauauccuuaaccugc

SEQ ID NO: 426605 - RNA, 19 nt, Artificial Sequence
  Description of Artificial Sequence: Synthetic oligonucleotide
  Sense Strand Starting at position 1376 of SEQ ID NO: 316116
ucucaaaucgaaugacaug

SEQ ID NO: 426606 - RNA, 19 nt, Artificial Sequence
  Description of Artificial Sequence: Synthetic oligonucleotide
  Antisense Strand to SEQ ID NO: 426605
caugucauucgauuugaga

SEQ ID NO: 426607 - RNA, 19 nt, Artificial Sequence
  Description of Artificial Sequence: Synthetic oligonucleotide
  Sense Strand Starting at position 1376 of SEQ ID NO: 316265
gcgcgguuaccgggaaagu

SEQ ID NO: 426608 - RNA, 19 nt, Artificial Sequence
  Description of Artificial Sequence: Synthetic oligonucleotide
  Antisense Strand to SEQ ID NO: 426607
acuuucccgguaaccgcgc

SEQ ID NO: 426609 - RNA, 19 nt, Artificial Sequence
  Description of Artificial Sequence: Synthetic oligonucleotide
  Sense Strand Starting at position 1376 of SEQ ID NO: 316274
ccgggaaagucacacuugu

SEQ ID NO: 426610 - RNA, 19 nt, Artificial Sequence
  Description of Artificial Sequence: Synthetic oligonucleotide
  Antisense Strand to SEQ ID NO: 426609
acaagugugacuuucccgg

SEQ ID NO: 426611 - RNA, 19 nt, Artificial Sequence
  Description of Artificial Sequence: Synthetic oligonucleotide
  Sense Strand Starting at position 1376 of SEQ ID NO: 316419
gguuauagaccguagugaa

SEQ ID NO: 426612 - RNA, 19 nt, Artificial Sequence
  Description of Artificial Sequence: Synthetic oligonucleotide
  Antisense Strand to SEQ ID NO: 426611
uucacuacggucuauaacc

SEQ ID NO: 426613 - RNA, 19 nt, Artificial Sequence
  Description of Artificial Sequence: Synthetic oligonucleotide
  Sense Strand Starting at position 1376 of SEQ ID NO: 317287
cguagaguccggcucggaa

SEQ ID NO: 426614 - RNA, 19 nt, Artificial Sequence
  Description of Artificial Sequence: Synthetic oligonucleotide
  Antisense Strand to SEQ ID NO: 426613
uuccgagccggacucuacg

SEQ ID NO: 426615 - RNA, 19 nt, Artificial Sequence
  Description of Artificial Sequence: Synthetic oligonucleotide
  Sense Strand Starting at position 1376 of SEQ ID NO: 317619
gagcgauuccuucucguuc

SEQ ID NO: 426616 - RNA, 19 nt, Artificial Sequence
  Description of Artificial Sequence: Synthetic oligonucleotide
  Antisense Strand to SEQ ID NO: 426615
gaacgagaaggaaucgcuc

SEQ ID NO: 426617 - RNA, 19 nt, Artificial Sequence
  Description of Artificial Sequence: Synthetic oligonucleotide
  Sense Strand Starting at position 1376 of SEQ ID NO: 317665
uugacuucgaaucguauua

SEQ ID NO: 426618 - RNA, 19 nt, Artificial Sequence
  Description of Artificial Sequence: Synthetic oligonucleotide
  Antisense Strand to SEQ ID NO: 426617
uaauacgauucgaagucaa

SEQ ID NO: 426619 - RNA, 19 nt, Artificial Sequence
  Description of Artificial Sequence: Synthetic oligonucleotide
  Sense Strand Starting at position 1376 of SEQ ID NO: 317667
gacuucgaaucguauuaau

SEQ ID NO: 426620 - RNA, 19 nt, Artificial Sequence
  Description of Artificial Sequence: Synthetic oligonucleotide
  Antisense Strand to SEQ ID NO: 426619
auuaauacgauucgaaguc

SEQ ID NO: 426621 - RNA, 19 nt, Artificial Sequence
  Description of Artificial Sequence: Synthetic oligonucleotide
  Sense Strand Starting at position 1376 of SEQ ID NO: 317743
accuguccgagcugauuaa

SEQ ID NO: 426622 - RNA, 19 nt, Artificial Sequence
  Description of Artificial Sequence: Synthetic oligonucleotide
  Antisense Strand to SEQ ID NO: 426621
uuaaucagcucggacaggu

SEQ ID NO: 426623 - RNA, 19 nt, Artificial Sequence
  Description of Artificial Sequence: Synthetic oligonucleotide
  Sense Strand Starting at position 1376 of SEQ ID NO: 317832
aggauucgaaccuguccaa

SEQ ID NO: 426624 - RNA, 19 nt, Artificial Sequence
  Description of Artificial Sequence: Synthetic oligonucleotide
  Antisense Strand to SEQ ID NO: 426623
uuggacagguucgaauccu

SEQ ID NO: 426625 - RNA, 19 nt, Artificial Sequence
  Description of Artificial Sequence: Synthetic oligonucleotide
  Sense Strand Starting at position 1376 of SEQ ID NO: 318144
cgcacuuuauuccugggua

SEQ ID NO: 426626 - RNA, 19 nt, Artificial Sequence
  Description of Artificial Sequence: Synthetic oligonucleotide
  Antisense Strand to SEQ ID NO: 426625
uacccaggaauaaagugcg

SEQ ID NO: 426627 - RNA, 19 nt, Artificial Sequence
  Description of Artificial Sequence: Synthetic oligonucleotide
  Sense Strand Starting at position 1376 of SEQ ID NO: 318147
acuuuauuccuggguaccu

SEQ ID NO: 426628 - RNA, 19 nt, Artificial Sequence
  Description of Artificial Sequence: Synthetic oligonucleotide
  Antisense Strand to SEQ ID NO: 426627
agguacccaggaauaaagu

SEQ ID NO: 426629 - RNA, 19 nt, Artificial Sequence
  Description of Artificial Sequence: Synthetic oligonucleotide
  Sense Strand Starting at position 1376 of SEQ ID NO: 318419
guuccagccucagagacuu

SEQ ID NO: 426630 - RNA, 19 nt, Artificial Sequence
  Description of Artificial Sequence: Synthetic oligonucleotide
  Antisense Strand to SEQ ID NO: 426629
aagucucugaggcuggaac

SEQ ID NO: 426631 - RNA, 19 nt, Artificial Sequence
  Description of Artificial Sequence: Synthetic oligonucleotide
  Sense Strand Starting at position 1376 of SEQ ID NO: 318448
aucucugauuccucuggga

SEQ ID NO: 426632 - RNA, 19 nt, Artificial Sequence
  Description of Artificial Sequence: Synthetic oligonucleotide
  Antisense Strand to SEQ ID NO: 426631
ucccagaggaaucagagau

SEQ ID NO: 426633 - RNA, 19 nt, Artificial Sequence
  Description of Artificial Sequence: Synthetic oligonucleotide
  Sense Strand Starting at position 1376 of SEQ ID NO: 318451
ucugauuccucugggagga

SEQ ID NO: 426634 - RNA, 19 nt, Artificial Sequence
  Description of Artificial Sequence: Synthetic oligonucleotide
  Antisense Strand to SEQ ID NO: 426633
uccucccagaggaaucaga

SEQ ID NO: 426635 - RNA, 19 nt, Artificial Sequence
  Description of Artificial Sequence: Synthetic oligonucleotide
  Sense Strand Starting at position 1376 of SEQ ID NO: 318521
accucugucugaucuguuu

SEQ ID NO: 426636 - RNA, 19 nt, Artificial Sequence
  Description of Artificial Sequence: Synthetic oligonucleotide
  Antisense Strand to SEQ ID NO: 426635
aaacagaucagacagaggu

SEQ ID NO: 426637 - RNA, 19 nt, Artificial Sequence
  Description of Artificial Sequence: Synthetic oligonucleotide
  Sense Strand Starting at position 1376 of SEQ ID NO: 318528
ucugaucuguuugcucuua

SEQ ID NO: 426638 - RNA, 19 nt, Artificial Sequence
  Description of Artificial Sequence: Synthetic oligonucleotide
  Antisense Strand to SEQ ID NO: 426637
uaagagcaaacagaucaga

SEQ ID NO: 426639 - RNA, 19 nt, Artificial Sequence
  Description of Artificial Sequence: Synthetic oligonucleotide
  Sense Strand Starting at position 1376 of SEQ ID NO: 318530
ugaucuguuugcucuuaga

SEQ ID NO: 426640 - RNA, 19 nt, Artificial Sequence
  Description of Artificial Sequence: Synthetic oligonucleotide
  Antisense Strand to SEQ ID NO: 426639
ucuaagagcaaacagauca

SEQ ID NO: 426641 - RNA, 19 nt, Artificial Sequence
  Description of Artificial Sequence: Synthetic oligonucleotide
  Sense Strand Starting at position 1376 of SEQ ID NO: 318673
cuuggugcauauuuguuaa

SEQ ID NO: 426642 - RNA, 19 nt, Artificial Sequence
  Description of Artificial Sequence: Synthetic oligonucleotide
  Antisense Strand to SEQ ID NO: 426641
uuaacaaauaugcaccaag

SEQ ID NO: 426643 - RNA, 19 nt, Artificial Sequence
  Description of Artificial Sequence: Synthetic oligonucleotide
  Sense Strand Starting at position 1376 of SEQ ID NO: 318675
uggugcauauuuguuaaau

SEQ ID NO: 426644 - RNA, 19 nt, Artificial Sequence
  Description of Artificial Sequence: Synthetic oligonucleotide
  Antisense Strand to SEQ ID NO: 426643
auuuaacaaauaugcacca

SEQ ID NO: 426645 - RNA, 19 nt, Artificial Sequence
  Description of Artificial Sequence: Synthetic oligonucleotide
  Sense Strand Starting at position 1376 of SEQ ID NO: 318677
gugcauauuuguuaaauac

SEQ ID NO: 426646 - RNA, 19 nt, Artificial Sequence
  Description of Artificial Sequence: Synthetic oligonucleotide
  Antisense Strand to SEQ ID NO: 426645
guauuuaacaaauaugcac

SEQ ID NO: 426647 - RNA, 19 nt, Artificial Sequence
  Description of Artificial Sequence: Synthetic oligonucleotide
  Sense Strand Starting at position 1376 of SEQ ID NO: 318776
auaucaguuuaugccgaaa

SEQ ID NO: 426648 - RNA, 19 nt, Artificial Sequence
  Description of Artificial Sequence: Synthetic oligonucleotide
  Antisense Strand to SEQ ID NO: 426647
uuucggcauaaacugauau

SEQ ID NO: 426649 - RNA, 19 nt, Artificial Sequence
  Description of Artificial Sequence: Synthetic oligonucleotide
  Sense Strand Starting at position 1376 of SEQ ID NO: 318795
acauauuguuccuagacca

SEQ ID NO: 426650 - RNA, 19 nt, Artificial Sequence
  Description of Artificial Sequence: Synthetic oligonucleotide
  Antisense Strand to SEQ ID NO: 426649
uggucuaggaacaauaugu

SEQ ID NO: 426651 - RNA, 19 nt, Artificial Sequence
  Description of Artificial Sequence: Synthetic oligonucleotide
  Sense Strand Starting at position 1376 of SEQ ID NO: 318886
ccaauuuggacguguaucu

SEQ ID NO: 426652 - RNA, 19 nt, Artificial Sequence
  Description of Artificial Sequence: Synthetic oligonucleotide
  Antisense Strand to SEQ ID NO: 426651
agauacacguccaaauugg

SEQ ID NO: 426653 - RNA, 19 nt, Artificial Sequence
  Description of Artificial Sequence: Synthetic oligonucleotide
  Sense Strand Starting at position 1376 of SEQ ID NO: 318893
ggacguguaucucucauca

SEQ ID NO: 426654 - RNA, 19 nt, Artificial Sequence
  Description of Artificial Sequence: Synthetic oligonucleotide
  Antisense Strand to SEQ ID NO: 426653
ugaugagagauacacgucc

SEQ ID NO: 426655 - RNA, 19 nt, Artificial Sequence
  Description of Artificial Sequence: Synthetic oligonucleotide
  Sense Strand Starting at position 1376 of SEQ ID NO: 318897
guguaucucucaucagagg

SEQ ID NO: 426656 - RNA, 19 nt, Artificial Sequence
  Description of Artificial Sequence: Synthetic oligonucleotide
  Antisense Strand to SEQ ID NO: 426655
ccucugaugagagauacac

SEQ ID NO: 426657 - RNA, 19 nt, Artificial Sequence
  Description of Artificial Sequence: Synthetic oligonucleotide
  Sense Strand Starting at position 1376 of SEQ ID NO: 318981
gguguaaaucuaugugacc

SEQ ID NO: 426658 - RNA, 19 nt, Artificial Sequence
  Description of Artificial Sequence: Synthetic oligonucleotide
  Antisense Strand to SEQ ID NO: 426657
ggucacauagauuuacacc

SEQ ID NO: 426659 - RNA, 19 nt, Artificial Sequence
  Description of Artificial Sequence: Synthetic oligonucleotide
  Sense Strand Starting at position 1376 of SEQ ID NO: 318990
cuaugugacccuggauuag

SEQ ID NO: 426660 - RNA, 19 nt, Artificial Sequence
  Description of Artificial Sequence: Synthetic oligonucleotide
  Antisense Strand to SEQ ID NO: 426659
cuaauccagggucacauag

SEQ ID NO: 426661 - RNA, 19 nt, Artificial Sequence
  Description of Artificial Sequence: Synthetic oligonucleotide
  Sense Strand Starting at position 1376 of SEQ ID NO: 319136
gggagaagggugugcaaau

SEQ ID NO: 426662 - RNA, 19 nt, Artificial Sequence
  Description of Artificial Sequence: Synthetic oligonucleotide
  Antisense Strand to SEQ ID NO: 426661
auuugcacacccuucuccc

SEQ ID NO: 426663 - RNA, 19 nt, Artificial Sequence
  Description of Artificial Sequence: Synthetic oligonucleotide
  Sense Strand Starting at position 1376 of SEQ ID NO: 319143
gggugugcaaaucgaauau

SEQ ID NO: 426664 - RNA, 19 nt, Artificial Sequence
  Description of Artificial Sequence: Synthetic oligonucleotide
  Antisense Strand to SEQ ID NO: 426663
auauucgauuugcacaccc

SEQ ID NO: 426665 - RNA, 19 nt, Artificial Sequence
  Description of Artificial Sequence: Synthetic oligonucleotide
  Sense Strand Starting at position 1376 of SEQ ID NO: 319147
gugcaaaucgaauaucuga

SEQ ID NO: 426666 - RNA, 19 nt, Artificial Sequence
  Description of Artificial Sequence: Synthetic oligonucleotide
  Antisense Strand to SEQ ID NO: 426665
ucagauauucgauuugcac

SEQ ID NO: 426667 - RNA, 19 nt, Artificial Sequence
  Description of Artificial Sequence: Synthetic oligonucleotide
  Sense Strand Starting at position 1376 of SEQ ID NO: 319154
ucgaauaucugauaaggau

SEQ ID NO: 426668 - RNA, 19 nt, Artificial Sequence
  Description of Artificial Sequence: Synthetic oligonucleotide
  Antisense Strand to SEQ ID NO: 426667
auccuuaucagauauucga

SEQ ID NO: 426669 - RNA, 19 nt, Artificial Sequence
  Description of Artificial Sequence: Synthetic oligonucleotide
  Sense strand starting at position 27 of SEQ ID NO: 316612
uuggucauugaaugaccaa

SEQ ID NO: 426670 - RNA, 19 nt, Artificial Sequence
  Description of Artificial Sequence: Synthetic oligonucleotide
  Antisense Strand to SEQ ID NO: 426669
uuggucauucaaugaccaa

SEQ ID NO: 426671 - RNA, 19 nt, Artificial Sequence
  Description of Artificial Sequence: Synthetic oligonucleotide
  Sense strand starting at position 30 of SEQ ID NO: 316612
gucauugaaugaccaaaug

SEQ ID NO: 426672 - RNA, 19 nt, Artificial Sequence
  Description of Artificial Sequence: Synthetic oligonucleotide
  Antisense Strand to SEQ ID NO: 426671
cauuuggucauucaaugac

SEQ ID NO: 426673 - RNA, 19 nt, Artificial Sequence
  Description of Artificial Sequence: Synthetic oligonucleotide
  Sense strand starting at position 49 of SEQ ID NO: 316612
ggucaauggcuuuagaaua

SEQ ID NO: 426674 - RNA, 19 nt, Artificial Sequence
  Description of Artificial Sequence: Synthetic oligonucleotide
  Antisense Strand to SEQ ID NO: 426673
uauucuaaagccauugacc

SEQ ID NO: 426675 - RNA, 19 nt, Artificial Sequence
  Description of Artificial Sequence: Synthetic oligonucleotide
  Sense strand starting at position 172 of SEQ ID NO: 316612
uacccagcacucggagaau

SEQ ID NO: 426676 - RNA, 19 nt, Artificial Sequence
  Description of Artificial Sequence: Synthetic oligonucleotide
  Antisense Strand to SEQ ID NO: 426675
auucuccgagugcugggua

SEQ ID NO: 426677 - RNA, 19 nt, Artificial Sequence
  Description of Artificial Sequence: Synthetic oligonucleotide
  Sense strand starting at position 175 of SEQ ID NO: 316612
ccagcacucggagaauacu

SEQ ID NO: 426678 - RNA, 19 nt, Artificial Sequence
  Description of Artificial Sequence: Synthetic oligonucleotide
  Antisense Strand to SEQ ID NO: 426677
aguauucuccgagugcugg

SEQ ID NO: 426679 - RNA, 19 nt, Artificial Sequence
  Description of Artificial Sequence: Synthetic oligonucleotide
  Sense strand starting at position 224 of SEQ ID NO: 316612
auuggauggucuuuccauu

SEQ ID NO: 426680 - RNA, 19 nt, Artificial Sequence
  Description of Artificial Sequence: Synthetic oligonucleotide
  Antisense Strand to SEQ ID NO: 426679
aauggaaagaccauccaau

SEQ ID NO: 426681 - RNA, 19 nt, Artificial Sequence
  Description of Artificial Sequence: Synthetic oligonucleotide
  Sense strand starting at position 376 of SEQ ID NO: 316612
cauugaagauuguuauaag

SEQ ID NO: 426682 - RNA, 19 nt, Artificial Sequence
  Description of Artificial Sequence: Synthetic oligonucleotide
  Antisense Strand to SEQ ID NO: 426681
cuuauaacaaucuucaaug

SEQ ID NO: 426683 - RNA, 19 nt, Artificial Sequence
  Description of Artificial Sequence: Synthetic oligonucleotide
  Sense strand starting at position 383 of SEQ ID NO: 316612
gauuguuauaagcggauag

SEQ ID NO: 426684 - RNA, 19 nt, Artificial Sequence
  Description of Artificial Sequence: Synthetic oligonucleotide
  Antisense Strand to SEQ ID NO: 426683
cuauccgcuuauaacaauc

SEQ ID NO: 426685 - RNA, 19 nt, Artificial Sequence
  Description of Artificial Sequence: Synthetic oligonucleotide
  Sense strand starting at position 385 of SEQ ID NO: 316612
uuguuauaagcggauaguu

SEQ ID NO: 426686 - RNA, 19 nt, Artificial Sequence
  Description of Artificial Sequence: Synthetic oligonucleotide
  Antisense Strand to SEQ ID NO: 426685
aacuauccgcuuauaacaa

SEQ ID NO: 426687 - RNA, 19 nt, Artificial Sequence
  Description of Artificial Sequence: Synthetic oligonucleotide
  Sense strand starting at position 387 of SEQ ID NO: 316612
guuauaagcggauaguuaa

SEQ ID NO: 426688 - RNA, 19 nt, Artificial Sequence
  Description of Artificial Sequence: Synthetic oligonucleotide
  Antisense Strand to SEQ ID NO: 426687
uuaacuauccgcuuauaac

SEQ ID NO: 426689 - RNA, 19 nt, Artificial Sequence
  Description of Artificial Sequence: Synthetic oligonucleotide
  Sense strand starting at position 395 of SEQ ID NO: 316612
cggauaguuaagcaugcau

SEQ ID NO: 426690 - RNA, 19 nt, Artificial Sequence
  Description of Artificial Sequence: Synthetic oligonucleotide
  Antisense Strand to SEQ ID NO: 426689
augcaugcuuaacuauccg

SEQ ID NO: 426691 - RNA, 19 nt, Artificial Sequence
  Description of Artificial Sequence: Synthetic oligonucleotide
  Sense strand starting at position 442 of SEQ ID NO: 316612
gauuucuagugauagagug

SEQ ID NO: 426692 - RNA, 19 nt, Artificial Sequence
  Description of Artificial Sequence: Synthetic oligonucleotide
  Antisense Strand to SEQ ID NO: 426691
cacucuaucacuagaaauc

SEQ ID NO: 426693 - RNA, 19 nt, Artificial Sequence
  Description of Artificial Sequence: Synthetic oligonucleotide
  Sense strand starting at position 680 of SEQ ID NO: 316612
caagauggcucugucuaua

SEQ ID NO: 426694 - RNA, 19 nt, Artificial Sequence
  Description of Artificial Sequence: Synthetic oligonucleotide
  Antisense Strand to SEQ ID NO: 426693
uauagacagagccaucuug

SEQ ID NO: 426695 - RNA, 19 nt, Artificial Sequence
  Description of Artificial Sequence: Synthetic oligonucleotide
  Sense strand starting at position 685 of SEQ ID NO: 316612
uggcucugucuauaaggaa

SEQ ID NO: 426696 - RNA, 19 nt, Artificial Sequence
  Description of Artificial Sequence: Synthetic oligonucleotide
  Antisense Strand to SEQ ID NO: 426695
uuccuuauagacagagcca

SEQ ID NO: 426697 - RNA, 19 nt, Artificial Sequence
  Description of Artificial Sequence: Synthetic oligonucleotide
  Sense strand starting at position 893 of SEQ ID NO: 316612
ucacuuguggagggacuaa

SEQ ID NO: 426698 - RNA, 19 nt, Artificial Sequence
  Description of Artificial Sequence: Synthetic oligonucleotide
  Antisense Strand to SEQ ID NO: 426697
uuagucccuccacaaguga

SEQ ID NO: 426699 - RNA, 19 nt, Artificial Sequence
  Description of Artificial Sequence: Synthetic oligonucleotide
  Sense strand starting at position 1099 of SEQ ID NO: 316612
ggaagagccuuucuugaua

SEQ ID NO: 426700 - RNA, 19 nt, Artificial Sequence
  Description of Artificial Sequence: Synthetic oligonucleotide
  Antisense Strand to SEQ ID NO: 426699
uaucaagaaaggcucuucc

SEQ ID NO: 426701 - RNA, 19 nt, Artificial Sequence
  Description of Artificial Sequence: Synthetic oligonucleotide
  Sense strand starting at position 1102 of SEQ ID NO: 316612
agagccuuucuugauagca

SEQ ID NO: 426702 - RNA, 19 nt, Artificial Sequence
  Description of Artificial Sequence: Synthetic oligonucleotide
  Antisense Strand to SEQ ID NO: 426701
ugcuaucaagaaaggcucu

SEQ ID NO: 426703 - RNA, 19 nt, Artificial Sequence
  Description of Artificial Sequence: Synthetic oligonucleotide
  Sense strand starting at position 1234 of SEQ ID NO: 316612
gaacaaaggcugugucuau

SEQ ID NO: 426704 - RNA, 19 nt, Artificial Sequence
  Description of Artificial Sequence: Synthetic oligonucleotide
  Antisense Strand to SEQ ID NO: 426703
auagacacagccuuuguuc

SEQ ID NO: 426705 - RNA, 19 nt, Artificial Sequence
  Description of Artificial Sequence: Synthetic oligonucleotide
  Sense strand starting at position 1235 of SEQ ID NO: 316612
aacaaaggcugugucuauu

SEQ ID NO: 426706 - RNA, 19 nt, Artificial Sequence
  Description of Artificial Sequence: Synthetic oligonucleotide
  Antisense Strand to SEQ ID NO: 426705
aauagacacagccuuuguu

SEQ ID NO: 426707 - RNA, 19 nt, Artificial Sequence
  Description of Artificial Sequence: Synthetic oligonucleotide
  Sense strand starting at position 1445 of SEQ ID NO: 316612
ccgugaugaaccgugcgua

SEQ ID NO: 426708 - RNA, 19 nt, Artificial Sequence
  Description of Artificial Sequence: Synthetic oligonucleotide
  Antisense Strand to SEQ ID NO: 426707
uacgcacgguucaucacgg

SEQ ID NO: 426709 - RNA, 19 nt, Artificial Sequence
  Description of Artificial Sequence: Synthetic oligonucleotide
  Sense strand starting at position 1497 of SEQ ID NO: 316612
cuucuucagugguugagga

SEQ ID NO: 426710 - RNA, 19 nt, Artificial Sequence
  Description of Artificial Sequence: Synthetic oligonucleotide
  Antisense Strand to SEQ ID NO: 426709
uccucaaccacugaagaag

SEQ ID NO: 426711 - RNA, 19 nt, Artificial Sequence
  Description of Artificial Sequence: Synthetic oligonucleotide
  Sense strand starting at position 1536 of SEQ ID NO: 316612
cgucaaguccugccugcua

SEQ ID NO: 426712 - RNA, 19 nt, Artificial Sequence
  Description of Artificial Sequence: Synthetic oligonucleotide
  Antisense Strand to SEQ ID NO: 426711
uagcaggcaggacuugacg

SEQ ID NO: 426713 - RNA, 19 nt, Artificial Sequence
  Description of Artificial Sequence: Synthetic oligonucleotide
  Sense strand starting at position 2025 of SEQ ID NO: 316612
ugauccuaauccucgggaa

SEQ ID NO: 426714 - RNA, 19 nt, Artificial Sequence
  Description of Artificial Sequence: Synthetic oligonucleotide
  Antisense Strand to SEQ ID NO: 426713
uucccgaggauuaggauca

SEQ ID NO: 426715 - RNA, 19 nt, Artificial Sequence
  Description of Artificial Sequence: Synthetic oligonucleotide
  Sense strand starting at position 2026 of SEQ ID NO: 316612
gauccuaauccucgggaac

SEQ ID NO: 426716 - RNA, 19 nt, Artificial Sequence
  Description of Artificial Sequence: Synthetic oligonucleotide
  Antisense Strand to SEQ ID NO: 426715
guucccgaggauuaggauc

SEQ ID NO: 426717 - RNA, 19 nt, Artificial Sequence
  Description of Artificial Sequence: Synthetic oligonucleotide
  Sense strand starting at position 2029 of SEQ ID NO: 316612
ccuaauccucgggaaccau

SEQ ID NO: 426718 - RNA, 19 nt, Artificial Sequence
  Description of Artificial Sequence: Synthetic oligonucleotide
  Antisense Strand to SEQ ID NO: 426717
augguucccgaggauuagg

SEQ ID NO: 426719 - RNA, 19 nt, Artificial Sequence
  Description of Artificial Sequence: Synthetic oligonucleotide
  Sense strand starting at position 2175 of SEQ ID NO: 316612
agaccauggcuaugcuaaa

SEQ ID NO: 426720 - RNA, 19 nt, Artificial Sequence
  Description of Artificial Sequence: Synthetic oligonucleotide
  Antisense Strand to SEQ ID NO: 426719
uuuagcauagccauggucu

SEQ ID NO: 426721 - RNA, 19 nt, Artificial Sequence
  Description of Artificial Sequence: Synthetic oligonucleotide
  Sense strand starting at position 2196 of SEQ ID NO: 316612
cccaucuuucguuagugaa

SEQ ID NO: 426722 - RNA, 19 nt, Artificial Sequence
  Description of Artificial Sequence: Synthetic oligonucleotide
  Antisense Strand to SEQ ID NO: 426721
uucacuaacgaaagauggg

SEQ ID NO: 426723 - RNA, 19 nt, Artificial Sequence
  Description of Artificial Sequence: Synthetic oligonucleotide
  Sense strand starting at position 2378 of SEQ ID NO: 316612
ucugaccuuucguuaaaua

SEQ ID NO: 426724 - RNA, 19 nt, Artificial Sequence
  Description of Artificial Sequence: Synthetic oligonucleotide
  Antisense Strand to SEQ ID NO: 426723
uauuuaacgaaaggucaga

SEQ ID NO: 426725 - RNA, 19 nt, Artificial Sequence
  Description of Artificial Sequence: Synthetic oligonucleotide
  Sense strand starting at position 2379 of SEQ ID NO: 316612
cugaccuuucguuaaauaa

SEQ ID NO: 426726 - RNA, 19 nt, Artificial Sequence
  Description of Artificial Sequence: Synthetic oligonucleotide
  Antisense Strand to SEQ ID NO: 426725
uuauuuaacgaaaggucag

SEQ ID NO: 426727 - RNA, 19 nt, Artificial Sequence
  Description of Artificial Sequence: Synthetic oligonucleotide
  Sense strand starting at position 2396 of SEQ ID NO: 316612
aagaauuauguuggaagug

SEQ ID NO: 426728 - RNA, 19 nt, Artificial Sequence
  Description of Artificial Sequence: Synthetic oligonucleotide
  Antisense Strand to SEQ ID NO: 426727
cacuuccaacauaauucuu

SEQ ID NO: 426729 - RNA, 19 nt, Artificial Sequence
  Description of Artificial Sequence: Synthetic oligonucleotide
  Sense strand starting at position 2401 of SEQ ID NO: 316612
uuauguuggaagugaauau

SEQ ID NO: 426730 - RNA, 19 nt, Artificial Sequence
  Description of Artificial Sequence: Synthetic oligonucleotide
  Antisense Strand to SEQ ID NO: 426729
auauucacuuccaacauaa

SEQ ID NO: 426731 - RNA, 19 nt, Artificial Sequence
  Description of Artificial Sequence: Synthetic oligonucleotide
  Sense strand starting at position 2411 of SEQ ID NO: 316612
agugaauauccggaucuuu

SEQ ID NO: 426732 - RNA, 19 nt, Artificial Sequence
  Description of Artificial Sequence: Synthetic oligonucleotide
  Antisense Strand to SEQ ID NO: 426731
aaagauccggauauucacu

SEQ ID NO: 426733 - RNA, 19 nt, Artificial Sequence
  Description of Artificial Sequence: Synthetic oligonucleotide
  Sense strand starting at position 2531 of SEQ ID NO: 316612
uggaauguacaagguuuaa

SEQ ID NO: 426734 - RNA, 19 nt, Artificial Sequence
  Description of Artificial Sequence: Synthetic oligonucleotide
  Antisense Strand to SEQ ID NO: 426733
uuaaaccuuguacauucca

SEQ ID NO: 426735 - RNA, 19 nt, Artificial Sequence
  Description of Artificial Sequence: Synthetic oligonucleotide
  Sense strand starting at position 2544 of SEQ ID NO: 316612
guuuaaugugagcacuuaa

SEQ ID NO: 426736 - RNA, 19 nt, Artificial Sequence
  Description of Artificial Sequence: Synthetic oligonucleotide
  Antisense Strand to SEQ ID NO: 426735
uuaagugcucacauuaaac

SEQ ID NO: 426737 - RNA, 19 nt, Artificial Sequence
  Description of Artificial Sequence: Synthetic oligonucleotide
  Sense strand starting at position 2667 of SEQ ID NO: 316612
cuuccuagaugauuauuga

SEQ ID NO: 426738 - RNA, 19 nt, Artificial Sequence
  Description of Artificial Sequence: Synthetic oligonucleotide
  Antisense Strand to SEQ ID NO: 426737
ucaauaaucaucuaggaag

SEQ ID NO: 426739 - RNA, 19 nt, Artificial Sequence
  Description of Artificial Sequence: Synthetic oligonucleotide
  Sense strand starting at position 2715 of SEQ ID NO: 316612
uaccuaauagguuggucaa

SEQ ID NO: 426740 - RNA, 19 nt, Artificial Sequence
  Description of Artificial Sequence: Synthetic oligonucleotide
  Antisense Strand to SEQ ID NO: 426739
uugaccaaccuauuaggua

SEQ ID NO: 426741 - RNA, 19 nt, Artificial Sequence
  Description of Artificial Sequence: Synthetic oligonucleotide
  Sense strand starting at position 2718 of SEQ ID NO: 316612
cuaauagguuggucaagga

SEQ ID NO: 426742 - RNA, 19 nt, Artificial Sequence
  Description of Artificial Sequence: Synthetic oligonucleotide
  Antisense Strand to SEQ ID NO: 426741
uccuugaccaaccuauuag

SEQ ID NO: 426743 - RNA, 19 nt, Artificial Sequence
  Description of Artificial Sequence: Synthetic oligonucleotide
  Sense strand starting at position 2821 of SEQ ID NO: 316612
gaaguauugagaggugaca

SEQ ID NO: 426744 - RNA, 19 nt, Artificial Sequence
  Description of Artificial Sequence: Synthetic oligonucleotide
  Antisense Strand to SEQ ID NO: 426743
ugucaccucucaauacuuc

SEQ ID NO: 426745 - RNA, 19 nt, Artificial Sequence
  Description of Artificial Sequence: Synthetic oligonucleotide
  Sense strand starting at position 3666 of SEQ ID NO: 316612
ucuaacucaugguuuguaa

SEQ ID NO: 426746 - RNA, 19 nt, Artificial Sequence
  Description of Artificial Sequence: Synthetic oligonucleotide
  Antisense Strand to SEQ ID NO: 426745
uuacaaaccaugaguuaga

SEQ ID NO: 426747 - RNA, 19 nt, Artificial Sequence
  Description of Artificial Sequence: Synthetic oligonucleotide
  Sense strand starting at position 3669 of SEQ ID NO: 316612
aacucaugguuuguaaaug

SEQ ID NO: 426748 - RNA, 19 nt, Artificial Sequence
  Description of Artificial Sequence: Synthetic oligonucleotide
  Antisense Strand to SEQ ID NO: 426747
cauuuacaaaccaugaguu

SEQ ID NO: 426749 - RNA, 19 nt, Artificial Sequence
  Description of Artificial Sequence: Synthetic oligonucleotide
  Sense strand starting at position 6 of SEQ ID NO: 316613
uacccagcacucggagaau

SEQ ID NO: 426750 - RNA, 19 nt, Artificial Sequence
  Description of Artificial Sequence: Synthetic oligonucleotide
  Antisense Strand to SEQ ID NO: 426749
auucuccgagugcugggua

SEQ ID NO: 426751 - RNA, 19 nt, Artificial Sequence
  Description of Artificial Sequence: Synthetic oligonucleotide
  Sense strand starting at position 9 of SEQ ID NO: 316613
ccagcacucggagaauacu

SEQ ID NO: 426752 - RNA, 19 nt, Artificial Sequence
  Description of Artificial Sequence: Synthetic oligonucleotide
  Antisense Strand to SEQ ID NO: 426751
aguauucuccgagugcugg

SEQ ID NO: 426753 - RNA, 19 nt, Artificial Sequence
  Description of Artificial Sequence: Synthetic oligonucleotide
  Sense strand starting at position 58 of SEQ ID NO: 316613
auuggauggucuuuccauu

SEQ ID NO: 426754 - RNA, 19 nt, Artificial Sequence
  Description of Artificial Sequence: Synthetic oligonucleotide
  Antisense Strand to SEQ ID NO: 426753
aauggaaagaccauccaau

SEQ ID NO: 426755 - RNA, 19 nt, Artificial Sequence
  Description of Artificial Sequence: Synthetic oligonucleotide
  Sense strand starting at position 210 of SEQ ID NO: 316613
cauugaagauuguuauaag

SEQ ID NO: 426756 - RNA, 19 nt, Artificial Sequence
  Description of Artificial Sequence: Synthetic oligonucleotide
  Antisense Strand to SEQ ID NO: 426755
cuuauaacaaucuucaaug

SEQ ID NO: 426757 - RNA, 19 nt, Artificial Sequence
  Description of Artificial Sequence: Synthetic oligonucleotide
  Sense strand starting at position 217 of SEQ ID NO: 316613
gauuguuauaagcggauag

SEQ ID NO: 426758 - RNA, 19 nt, Artificial Sequence
  Description of Artificial Sequence: Synthetic oligonucleotide
  Antisense Strand to SEQ ID NO: 426757
cuauccgcuuauaacaauc

SEQ ID NO: 426759 - RNA, 19 nt, Artificial Sequence
  Description of Artificial Sequence: Synthetic oligonucleotide
  Sense strand starting at position 219 of SEQ ID NO: 316613
uuguuauaagcggauaguu

SEQ ID NO: 426760 - RNA, 19 nt, Artificial Sequence
  Description of Artificial Sequence: Synthetic oligonucleotide
  Antisense Strand to SEQ ID NO: 426759
aacuauccgcuuauaacaa

SEQ ID NO: 426761 - RNA, 19 nt, Artificial Sequence
  Description of Artificial Sequence: Synthetic oligonucleotide
  Sense strand starting at position 221 of SEQ ID NO: 316613
guuauaagcggauaguuaa

SEQ ID NO: 426762 - RNA, 19 nt, Artificial Sequence
  Description of Artificial Sequence: Synthetic oligonucleotide
  Antisense Strand to SEQ ID NO: 426761
uuaacuauccgcuuauaac

SEQ ID NO: 426763 - RNA, 19 nt, Artificial Sequence
  Description of Artificial Sequence: Synthetic oligonucleotide
  Sense strand starting at position 229 of SEQ ID NO: 316613
cggauaguuaagcaugcau

SEQ ID NO: 426764 - RNA, 19 nt, Artificial Sequence
  Description of Artificial Sequence: Synthetic oligonucleotide
  Antisense Strand to SEQ ID NO: 426763
augcaugcuuaacuauccg

SEQ ID NO: 426765 - RNA, 19 nt, Artificial Sequence
  Description of Artificial Sequence: Synthetic oligonucleotide
  Sense strand starting at position 231 of SEQ ID NO: 316613
gauaguuaagcaugcauua

SEQ ID NO: 426766 - RNA, 19 nt, Artificial Sequence
  Description of Artificial Sequence: Synthetic oligonucleotide
  Antisense Strand to SEQ ID NO: 426765
uaaugcaugcuuaacuauc

SEQ ID NO: 426767 - RNA, 19 nt, Artificial Sequence
  Description of Artificial Sequence: Synthetic oligonucleotide
  Sense strand starting at position 276 of SEQ ID NO: 316613
gauuucuagugauagagug

SEQ ID NO: 426768 - RNA, 19 nt, Artificial Sequence
  Description of Artificial Sequence: Synthetic oligonucleotide
  Antisense Strand to SEQ ID NO: 426767
cacucuaucacuagaaauc

SEQ ID NO: 426769 - RNA, 19 nt, Artificial Sequence
  Description of Artificial Sequence: Synthetic oligonucleotide
  Sense strand starting at position 514 of SEQ ID NO: 316613
caagauggcucugucuaua

SEQ ID NO: 426770 - RNA, 19 nt, Artificial Sequence
  Description of Artificial Sequence: Synthetic oligonucleotide
  Antisense Strand to SEQ ID NO: 426769
uauagacagagccaucuug

SEQ ID NO: 426771 - RNA, 19 nt, Artificial Sequence
  Description of Artificial Sequence: Synthetic oligonucleotide
  Sense strand starting at position 519 of SEQ ID NO: 316613
uggcucugucuauaaggaa

SEQ ID NO: 426772 - RNA, 19 nt, Artificial Sequence
  Description of Artificial Sequence: Synthetic oligonucleotide
  Antisense Strand to SEQ ID NO: 426771
uuccuuauagacagagcca

SEQ ID NO: 426773 - RNA, 19 nt, Artificial Sequence
  Description of Artificial Sequence: Synthetic oligonucleotide
  Sense strand starting at position 727 of SEQ ID NO: 316613
ucacuuguggagggacuaa

SEQ ID NO: 426774 - RNA, 19 nt, Artificial Sequence
  Description of Artificial Sequence: Synthetic oligonucleotide
  Antisense Strand to SEQ ID NO: 426773
uuagucccuccacaaguga

SEQ ID NO: 426775 - RNA, 19 nt, Artificial Sequence
  Description of Artificial Sequence: Synthetic oligonucleotide
  Sense strand starting at position 933 of SEQ ID NO: 316613
ggaagagccuuucuugaua

SEQ ID NO: 426776 - RNA, 19 nt, Artificial Sequence
  Description of Artificial Sequence: Synthetic oligonucleotide
  Antisense Strand to SEQ ID NO: 426775
uaucaagaaaggcucuucc

SEQ ID NO: 426777 - RNA, 19 nt, Artificial Sequence
  Description of Artificial Sequence: Synthetic oligonucleotide
  Sense strand starting at position 936 of SEQ ID NO: 316613
agagccuuucuugauagca

SEQ ID NO: 426778 - RNA, 19 nt, Artificial Sequence
  Description of Artificial Sequence: Synthetic oligonucleotide
  Antisense Strand to SEQ ID NO: 426777
ugcuaucaagaaaggcucu

SEQ ID NO: 426779 - RNA, 19 nt, Artificial Sequence
  Description of Artificial Sequence: Synthetic oligonucleotide
  Sense strand starting at position 1068 of SEQ ID NO: 316613
gaacaaaggcugugucuau

SEQ ID NO: 426780 - RNA, 19 nt, Artificial Sequence
  Description of Artificial Sequence: Synthetic oligonucleotide
  Antisense Strand to SEQ ID NO: 426779
auagacacagccuuuguuc

SEQ ID NO: 426781 - RNA, 19 nt, Artificial Sequence
  Description of Artificial Sequence: Synthetic oligonucleotide
  Sense strand starting at position 1069 of SEQ ID NO: 316613
aacaaaggcugugucuauu

SEQ ID NO: 426782 - RNA, 19 nt, Artificial Sequence
  Description of Artificial Sequence: Synthetic oligonucleotide
  Antisense Strand to SEQ ID NO: 426781
aauagacacagccuuuguu

SEQ ID NO: 426783 - RNA, 19 nt, Artificial Sequence
  Description of Artificial Sequence: Synthetic oligonucleotide
  Sense strand starting at position 1279 of SEQ ID NO: 316613
ccgugaugaaccgugcgua

SEQ ID NO: 426784 - RNA, 19 nt, Artificial Sequence
  Description of Artificial Sequence: Synthetic oligonucleotide
  Antisense Strand to SEQ ID NO: 426783
uacgcacgguucaucacgg

SEQ ID NO: 426785 - RNA, 19 nt, Artificial Sequence
  Description of Artificial Sequence: Synthetic oligonucleotide
  Sense strand starting at position 1331 of SEQ ID NO: 316613
cuucuucagugguugagga

SEQ ID NO: 426786 - RNA, 19 nt, Artificial Sequence
  Description of Artificial Sequence: Synthetic oligonucleotide
  Antisense Strand to SEQ ID NO: 426785
uccucaaccacugaagaag

SEQ ID NO: 426787 - RNA, 19 nt, Artificial Sequence
  Description of Artificial Sequence: Synthetic oligonucleotide
  Sense strand starting at position 1370 of SEQ ID NO: 316613
cgucaaguccugccugcua

SEQ ID NO: 426788 - RNA, 19 nt, Artificial Sequence
  Description of Artificial Sequence: Synthetic oligonucleotide
  Antisense Strand to SEQ ID NO: 426787
uagcaggcaggacuugacg

SEQ ID NO: 426789 - RNA, 19 nt, Artificial Sequence
  Description of Artificial Sequence: Synthetic oligonucleotide
  Sense strand starting at position 1848 of SEQ ID NO: 316613
ggaagugcccgugauccua

SEQ ID NO: 426790 - RNA, 19 nt, Artificial Sequence
  Description of Artificial Sequence: Synthetic oligonucleotide
  Antisense Strand to SEQ ID NO: 426789
uaggaucacgggcacuucc

SEQ ID NO: 426791 - RNA, 19 nt, Artificial Sequence
  Description of Artificial Sequence: Synthetic oligonucleotide
  Sense strand starting at position 1859 of SEQ ID NO: 316613
ugauccuaauccucgggaa

SEQ ID NO: 426792 - RNA, 19 nt, Artificial Sequence
  Description of Artificial Sequence: Synthetic oligonucleotide
  Antisense Strand to SEQ ID NO: 426791
uucccgaggauuaggauca

SEQ ID NO: 426793 - RNA, 19 nt, Artificial Sequence
  Description of Artificial Sequence: Synthetic oligonucleotide
  Sense strand starting at position 1860 of SEQ ID NO: 316613
gauccuaauccucgggaac

SEQ ID NO: 426794 - RNA, 19 nt, Artificial Sequence
  Description of Artificial Sequence: Synthetic oligonucleotide
  Antisense Strand to SEQ ID NO: 426793
guucccgaggauuaggauc

SEQ ID NO: 426795 - RNA, 19 nt, Artificial Sequence
  Description of Artificial Sequence: Synthetic oligonucleotide
  Sense strand starting at position 1863 of SEQ ID NO: 316613
ccuaauccucgggaaccau

SEQ ID NO: 426796 - RNA, 19 nt, Artificial Sequence
  Description of Artificial Sequence: Synthetic oligonucleotide
  Antisense Strand to SEQ ID NO: 426795
augguucccgaggauuagg

SEQ ID NO: 426797 - RNA, 19 nt, Artificial Sequence
  Description of Artificial Sequence: Synthetic oligonucleotide
  Sense strand starting at position 2009 of SEQ ID NO: 316613
agaccauggcuaugcuaaa

SEQ ID NO: 426798 - RNA, 19 nt, Artificial Sequence
  Description of Artificial Sequence: Synthetic oligonucleotide
  Antisense Strand to SEQ ID NO: 426797
uuuagcauagccauggucu

SEQ ID NO: 426799 - RNA, 19 nt, Artificial Sequence
  Description of Artificial Sequence: Synthetic oligonucleotide
  Sense strand starting at position 2030 of SEQ ID NO: 316613
cccaucuuucguuagugaa

SEQ ID NO: 426800 - RNA, 19 nt, Artificial Sequence
  Description of Artificial Sequence: Synthetic oligonucleotide
  Antisense Strand to SEQ ID NO: 426799
uucacuaacgaaagauggg

SEQ ID NO: 426801 - RNA, 19 nt, Artificial Sequence
  Description of Artificial Sequence: Synthetic oligonucleotide
  Sense strand starting at position 2212 of SEQ ID NO: 316613
ucugaccuuucguuaaaua

SEQ ID NO: 426802 - RNA, 19 nt, Artificial Sequence
  Description of Artificial Sequence: Synthetic oligonucleotide
  Antisense Strand to SEQ ID NO: 426801
uauuuaacgaaaggucaga

SEQ ID NO: 426803 - RNA, 19 nt, Artificial Sequence
  Description of Artificial Sequence: Synthetic oligonucleotide
  Sense strand starting at position 2213 of SEQ ID NO: 316613
cugaccuuucguuaaauaa

SEQ ID NO: 426804 - RNA, 19 nt, Artificial Sequence
  Description of Artificial Sequence: Synthetic oligonucleotide
  Antisense Strand to SEQ ID NO: 426803
uuauuuaacgaaaggucag

SEQ ID NO: 426805 - RNA, 19 nt, Artificial Sequence
  Description of Artificial Sequence: Synthetic oligonucleotide
  Sense strand starting at position 2230 of SEQ ID NO: 316613
aagaauuauguuggaagug

SEQ ID NO: 426806 - RNA, 19 nt, Artificial Sequence
  Description of Artificial Sequence: Synthetic oligonucleotide
  Antisense Strand to SEQ ID NO: 426805
cacuuccaacauaauucuu

SEQ ID NO: 426807 - RNA, 19 nt, Artificial Sequence
  Description of Artificial Sequence: Synthetic oligonucleotide
  Sense strand starting at position 2235 of SEQ ID NO: 316613
uuauguuggaagugaauau

SEQ ID NO: 426808 - RNA, 19 nt, Artificial Sequence
  Description of Artificial Sequence: Synthetic oligonucleotide
  Antisense Strand to SEQ ID NO: 426807
auauucacuuccaacauaa

SEQ ID NO: 426809 - RNA, 19 nt, Artificial Sequence
  Description of Artificial Sequence: Synthetic oligonucleotide
  Sense strand starting at position 2245 of SEQ ID NO: 316613
agugaauauccggaucuuu

SEQ ID NO: 426810 - RNA, 19 nt, Artificial Sequence
  Description of Artificial Sequence: Synthetic oligonucleotide
  Antisense Strand to SEQ ID NO: 426809
aaagauccggauauucacu

SEQ ID NO: 426811 - RNA, 19 nt, Artificial Sequence
  Description of Artificial Sequence: Synthetic oligonucleotide
  Sense strand starting at position 2365 of SEQ ID NO: 316613
uggaauguacaagguuuaa

SEQ ID NO: 426812 - RNA, 19 nt, Artificial Sequence
  Description of Artificial Sequence: Synthetic oligonucleotide
  Antisense Strand to SEQ ID NO: 426811
uuaaaccuuguacauucca

SEQ ID NO: 426813 - RNA, 19 nt, Artificial Sequence
  Description of Artificial Sequence: Synthetic oligonucleotide
  Sense strand starting at position 2377 of SEQ ID NO: 316613
gguuuaaugugagcacuua

SEQ ID NO: 426814 - RNA, 19 nt, Artificial Sequence
  Description of Artificial Sequence: Synthetic oligonucleotide
  Antisense Strand to SEQ ID NO: 426813
uaagugcucacauuaaacc

SEQ ID NO: 426815 - RNA, 19 nt, Artificial Sequence
  Description of Artificial Sequence: Synthetic oligonucleotide
  Sense strand starting at position 2378 of SEQ ID NO: 316613
guuuaaugugagcacuuaa

SEQ ID NO: 426816 - RNA, 19 nt, Artificial Sequence
  Description of Artificial Sequence: Synthetic oligonucleotide
  Antisense Strand to SEQ ID NO: 426815
uuaagugcucacauuaaac

SEQ ID NO: 426817 - RNA, 19 nt, Artificial Sequence
  Description of Artificial Sequence: Synthetic oligonucleotide
  Sense strand starting at position 2501 of SEQ ID NO: 316613
cuuccuagaugauuauuga

SEQ ID NO: 426818 - RNA, 19 nt, Artificial Sequence
  Description of Artificial Sequence: Synthetic oligonucleotide
  Antisense Strand to SEQ ID NO: 426817
ucaauaaucaucuaggaag

SEQ ID NO: 426819 - RNA, 19 nt, Artificial Sequence
  Description of Artificial Sequence: Synthetic oligonucleotide
  Sense strand starting at position 2549 of SEQ ID NO: 316613
uaccuaauagguuggucaa

SEQ ID NO: 426820 - RNA, 19 nt, Artificial Sequence
  Description of Artificial Sequence: Synthetic oligonucleotide
  Antisense Strand to SEQ ID NO: 426819
uugaccaaccuauuaggua

SEQ ID NO: 426821 - RNA, 19 nt, Artificial Sequence
  Description of Artificial Sequence: Synthetic oligonucleotide
  Sense strand starting at position 2552 of SEQ ID NO: 316613
cuaauagguuggucaagga

SEQ ID NO: 426822 - RNA, 19 nt, Artificial Sequence
  Description of Artificial Sequence: Synthetic oligonucleotide
  Antisense Strand to SEQ ID NO: 426821
uccuugaccaaccuauuag

SEQ ID NO: 426823 - RNA, 19 nt, Artificial Sequence
  Description of Artificial Sequence: Synthetic oligonucleotide
  Sense strand starting at position 2655 of SEQ ID NO: 316613
gaaguauugagaggugaca

SEQ ID NO: 426824 - RNA, 19 nt, Artificial Sequence
  Description of Artificial Sequence: Synthetic oligonucleotide
  Antisense Strand to SEQ ID NO: 426823
ugucaccucucaauacuuc

SEQ ID NO: 426825 - RNA, 19 nt, Artificial Sequence
  Description of Artificial Sequence: Synthetic oligonucleotide
  Sense strand starting at position 3500 of SEQ ID NO: 316613
ucuaacucaugguuuguaa

SEQ ID NO: 426826 - RNA, 19 nt, Artificial Sequence
  Description of Artificial Sequence: Synthetic oligonucleotide
  Antisense Strand to SEQ ID NO: 426825
uuacaaaccaugaguuaga

SEQ ID NO: 426827 - RNA, 19 nt, Artificial Sequence
  Description of Artificial Sequence: Synthetic oligonucleotide
  Sense strand starting at position 3503 of SEQ ID NO: 316613
aacucaugguuuguaaaug

SEQ ID NO: 426828 - RNA, 19 nt, Artificial Sequence
  Description of Artificial Sequence: Synthetic oligonucleotide
  Antisense Strand to SEQ ID NO: 426827
cauuuacaaaccaugaguu

SEQ ID NO: 426829 - RNA, 19 nt, Artificial Sequence
  Description of Artificial Sequence: Synthetic oligonucleotide
  Sense strand starting at position 63 of SEQ ID NO: 316614
gaagccuucuuggucauuu

SEQ ID NO: 426830 - RNA, 19 nt, Artificial Sequence
  Description of Artificial Sequence: Synthetic oligonucleotide
  Antisense Strand to SEQ ID NO: 426829
aaaugaccaagaaggcuuc

SEQ ID NO: 426831 - RNA, 19 nt, Artificial Sequence
  Description of Artificial Sequence: Synthetic oligonucleotide
  Sense strand starting at position 67 of SEQ ID NO: 316614
ccuucuuggucauuugcga

SEQ ID NO: 426832 - RNA, 19 nt, Artificial Sequence
  Description of Artificial Sequence: Synthetic oligonucleotide
  Antisense Strand to SEQ ID NO: 426831
ucgcaaaugaccaagaagg

SEQ ID NO: 426833 - RNA, 19 nt, Artificial Sequence
  Description of Artificial Sequence: Synthetic oligonucleotide
  Sense strand starting at position 93 of SEQ ID NO: 316614
gcaaucacugaggaguguu

SEQ ID NO: 426834 - RNA, 19 nt, Artificial Sequence
  Description of Artificial Sequence: Synthetic oligonucleotide
  Antisense Strand to SEQ ID NO: 426833
aacacuccucagugauugc

SEQ ID NO: 426835 - RNA, 19 nt, Artificial Sequence
  Description of Artificial Sequence: Synthetic oligonucleotide
  Sense strand starting at position 96 of SEQ ID NO: 316614
aucacugaggaguguuaaa

SEQ ID NO: 426836 - RNA, 19 nt, Artificial Sequence
  Description of Artificial Sequence: Synthetic oligonucleotide
  Antisense Strand to SEQ ID NO: 426835
uuuaacacuccucagugau

SEQ ID NO: 426837 - RNA, 19 nt, Artificial Sequence
  Description of Artificial Sequence: Synthetic oligonucleotide
  Sense strand starting at position 216 of SEQ ID NO: 316614
uuggucauugaaugaccaa

SEQ ID NO: 426838 - RNA, 19 nt, Artificial Sequence
  Description of Artificial Sequence: Synthetic oligonucleotide
  Antisense Strand to SEQ ID NO: 426837
uuggucauucaaugaccaa

SEQ ID NO: 426839 - RNA, 19 nt, Artificial Sequence
  Description of Artificial Sequence: Synthetic oligonucleotide
  Sense strand starting at position 219 of SEQ ID NO: 316614
gucauugaaugaccaaaug

SEQ ID NO: 426840 - RNA, 19 nt, Artificial Sequence
  Description of Artificial Sequence: Synthetic oligonucleotide
  Antisense Strand to SEQ ID NO: 426839
cauuuggucauucaaugac

SEQ ID NO: 426841 - RNA, 19 nt, Artificial Sequence
  Description of Artificial Sequence: Synthetic oligonucleotide
  Sense strand starting at position 238 of SEQ ID NO: 316614
ggucaauggcuuuagaaua

SEQ ID NO: 426842 - RNA, 19 nt, Artificial Sequence
  Description of Artificial Sequence: Synthetic oligonucleotide
  Antisense Strand to SEQ ID NO: 426841
uauucuaaagccauugacc

SEQ ID NO: 426843 - RNA, 19 nt, Artificial Sequence
  Description of Artificial Sequence: Synthetic oligonucleotide
  Sense strand starting at position 361 of SEQ ID NO: 316614
uacccagcacucggagaau

SEQ ID NO: 426844 - RNA, 19 nt, Artificial Sequence
  Description of Artificial Sequence: Synthetic oligonucleotide
  Antisense Strand to SEQ ID NO: 426843
auucuccgagugcugggua

SEQ ID NO: 426845 - RNA, 19 nt, Artificial Sequence
  Description of Artificial Sequence: Synthetic oligonucleotide
  Sense strand starting at position 364 of SEQ ID NO: 316614
ccagcacucggagaauacu

SEQ ID NO: 426846 - RNA, 19 nt, Artificial Sequence
  Description of Artificial Sequence: Synthetic oligonucleotide
  Antisense Strand to SEQ ID NO: 426845
aguauucuccgagugcugg

SEQ ID NO: 426847 - RNA, 19 nt, Artificial Sequence
  Description of Artificial Sequence: Synthetic oligonucleotide
  Sense strand starting at position 413 of SEQ ID NO: 316614
auuggauggucuuuccauu

SEQ ID NO: 426848 - RNA, 19 nt, Artificial Sequence
  Description of Artificial Sequence: Synthetic oligonucleotide
  Antisense Strand to SEQ ID NO: 426847
aauggaaagaccauccaau

SEQ ID NO: 426849 - RNA, 19 nt, Artificial Sequence
  Description of Artificial Sequence: Synthetic oligonucleotide
  Sense strand starting at position 565 of SEQ ID NO: 316614
cauugaagauuguuauaag

SEQ ID NO: 426850 - RNA, 19 nt, Artificial Sequence
  Description of Artificial Sequence: Synthetic oligonucleotide
  Antisense Strand to SEQ ID NO: 426849
cuuauaacaaucuucaaug

SEQ ID NO: 426851 - RNA, 19 nt, Artificial Sequence
  Description of Artificial Sequence: Synthetic oligonucleotide
  Sense strand starting at position 572 of SEQ ID NO: 316614
gauuguuauaagcggauag

SEQ ID NO: 426852 - RNA, 19 nt, Artificial Sequence
  Description of Artificial Sequence: Synthetic oligonucleotide
  Antisense Strand to SEQ ID NO: 426851
cuauccgcuuauaacaauc

SEQ ID NO: 426853 - RNA, 19 nt, Artificial Sequence
  Description of Artificial Sequence: Synthetic oligonucleotide
  Sense strand starting at position 576 of SEQ ID NO: 316614
guuauaagcggauaguuaa

SEQ ID NO: 426854 - RNA, 19 nt, Artificial Sequence
  Description of Artificial Sequence: Synthetic oligonucleotide
  Antisense Strand to SEQ ID NO: 426853
uuaacuauccgcuuauaac

SEQ ID NO: 426855 - RNA, 19 nt, Artificial Sequence
  Description of Artificial Sequence: Synthetic oligonucleotide
  Sense strand starting at position 631 of SEQ ID NO: 316614
gauuucuagugauagagug

SEQ ID NO: 426856 - RNA, 19 nt, Artificial Sequence
  Description of Artificial Sequence: Synthetic oligonucleotide
  Antisense Strand to SEQ ID NO: 426855
cacucuaucacuagaaauc

SEQ ID NO: 426857 - RNA, 19 nt, Artificial Sequence
  Description of Artificial Sequence: Synthetic oligonucleotide
  Sense strand starting at position 869 of SEQ ID NO: 316614
caagauggcucugucuaua

SEQ ID NO: 426858 - RNA, 19 nt, Artificial Sequence
  Description of Artificial Sequence: Synthetic oligonucleotide
  Antisense Strand to SEQ ID NO: 426857
uauagacagagccaucuug

SEQ ID NO: 426859 - RNA, 19 nt, Artificial Sequence
  Description of Artificial Sequence: Synthetic oligonucleotide
  Sense strand starting at position 874 of SEQ ID NO: 316614
uggcucugucuauaaggaa

SEQ ID NO: 426860 - RNA, 19 nt, Artificial Sequence
  Description of Artificial Sequence: Synthetic oligonucleotide
  Antisense Strand to SEQ ID NO: 426859
uuccuuauagacagagcca

SEQ ID NO: 426861 - RNA, 19 nt, Artificial Sequence
  Description of Artificial Sequence: Synthetic oligonucleotide
  Sense strand starting at position 1082 of SEQ ID NO: 316614
ucacuuguggagggacuaa

SEQ ID NO: 426862 - RNA, 19 nt, Artificial Sequence
  Description of Artificial Sequence: Synthetic oligonucleotide
  Antisense Strand to SEQ ID NO: 426861
uuagucccuccacaaguga

SEQ ID NO: 426863 - RNA, 19 nt, Artificial Sequence
  Description of Artificial Sequence: Synthetic oligonucleotide
  Sense strand starting at position 1288 of SEQ ID NO: 316614
ggaagagccuuucuugaua

SEQ ID NO: 426864 - RNA, 19 nt, Artificial Sequence
  Description of Artificial Sequence: Synthetic oligonucleotide
  Antisense Strand to SEQ ID NO: 426863
uaucaagaaaggcucuucc

SEQ ID NO: 426865 - RNA, 19 nt, Artificial Sequence
  Description of Artificial Sequence: Synthetic oligonucleotide
  Sense strand starting at position 1291 of SEQ ID NO: 316614
agagccuuucuugauagca

SEQ ID NO: 426866 - RNA, 19 nt, Artificial Sequence
  Description of Artificial Sequence: Synthetic oligonucleotide
  Antisense Strand to SEQ ID NO: 426865
ugcuaucaagaaaggcucu

SEQ ID NO: 426867 - RNA, 19 nt, Artificial Sequence
  Description of Artificial Sequence: Synthetic oligonucleotide
  Sense strand starting at position 1423 of SEQ ID NO: 316614
gaacaaaggcugugucuau

SEQ ID NO: 426868 - RNA, 19 nt, Artificial Sequence
  Description of Artificial Sequence: Synthetic oligonucleotide
  Antisense Strand to SEQ ID NO: 426867
auagacacagccuuuguuc

SEQ ID NO: 426869 - RNA, 19 nt, Artificial Sequence
  Description of Artificial Sequence: Synthetic oligonucleotide
  Sense strand starting at position 1634 of SEQ ID NO: 316614
ccgugaugaaccgugcgua

SEQ ID NO: 426870 - RNA, 19 nt, Artificial Sequence
  Description of Artificial Sequence: Synthetic oligonucleotide
  Antisense Strand to SEQ ID NO: 426869
uacgcacgguucaucacgg

SEQ ID NO: 426871 - RNA, 19 nt, Artificial Sequence
  Description of Artificial Sequence: Synthetic oligonucleotide
  Sense strand starting at position 1686 of SEQ ID NO: 316614
cuucuucagugguugagga

SEQ ID NO: 426872 - RNA, 19 nt, Artificial Sequence
  Description of Artificial Sequence: Synthetic oligonucleotide
  Antisense Strand to SEQ ID NO: 426871
uccucaaccacugaagaag

SEQ ID NO: 426873 - RNA, 19 nt, Artificial Sequence
  Description of Artificial Sequence: Synthetic oligonucleotide
  Sense strand starting at position 1725 of SEQ ID NO: 316614
cgucaaguccugccugcua

SEQ ID NO: 426874 - RNA, 19 nt, Artificial Sequence
  Description of Artificial Sequence: Synthetic oligonucleotide
  Antisense Strand to SEQ ID NO: 426873
uagcaggcaggacuugacg

SEQ ID NO: 426875 - RNA, 19 nt, Artificial Sequence
  Description of Artificial Sequence: Synthetic oligonucleotide
  Sense strand starting at position 2214 of SEQ ID NO: 316614
ugauccuaauccucgggaa

SEQ ID NO: 426876 - RNA, 19 nt, Artificial Sequence
  Description of Artificial Sequence: Synthetic oligonucleotide
  Antisense Strand to SEQ ID NO: 426875
uucccgaggauuaggauca

SEQ ID NO: 426877 - RNA, 19 nt, Artificial Sequence
  Description of Artificial Sequence: Synthetic oligonucleotide
  Sense strand starting at position 2215 of SEQ ID NO: 316614
gauccuaauccucgggaac

SEQ ID NO: 426878 - RNA, 19 nt, Artificial Sequence
  Description of Artificial Sequence: Synthetic oligonucleotide
  Antisense Strand to SEQ ID NO: 426877
guucccgaggauuaggauc

SEQ ID NO: 426879 - RNA, 19 nt, Artificial Sequence
  Description of Artificial Sequence: Synthetic oligonucleotide
  Sense strand starting at position 2218 of SEQ ID NO: 316614
ccuaauccucgggaaccau

SEQ ID NO: 426880 - RNA, 19 nt, Artificial Sequence
  Description of Artificial Sequence: Synthetic oligonucleotide
  Antisense Strand to SEQ ID NO: 426879
augguucccgaggauuagg

SEQ ID NO: 426881 - RNA, 19 nt, Artificial Sequence
  Description of Artificial Sequence: Synthetic oligonucleotide
  Sense strand starting at position 2364 of SEQ ID NO: 316614
agaccauggcuaugcuaaa

SEQ ID NO: 426882 - RNA, 19 nt, Artificial Sequence
  Description of Artificial Sequence: Synthetic oligonucleotide
  Antisense Strand to SEQ ID NO: 426881
uuuagcauagccauggucu

SEQ ID NO: 426883 - RNA, 19 nt, Artificial Sequence
  Description of Artificial Sequence: Synthetic oligonucleotide
  Sense strand starting at position 2385 of SEQ ID NO: 316614
cccaucuuucguuagugaa

SEQ ID NO: 426884 - RNA, 19 nt, Artificial Sequence
  Description of Artificial Sequence: Synthetic oligonucleotide
  Antisense Strand to SEQ ID NO: 426883
uucacuaacgaaagauggg

SEQ ID NO: 426885 - RNA, 19 nt, Artificial Sequence
  Description of Artificial Sequence: Synthetic oligonucleotide
  Sense strand starting at position 2568 of SEQ ID NO: 316614
cugaccuuucguuaaauaa

SEQ ID NO: 426886 - RNA, 19 nt, Artificial Sequence
  Description of Artificial Sequence: Synthetic oligonucleotide
  Antisense Strand to SEQ ID NO: 426885
uuauuuaacgaaaggucag

SEQ ID NO: 426887 - RNA, 19 nt, Artificial Sequence
  Description of Artificial Sequence: Synthetic oligonucleotide
  Sense strand starting at position 2585 of SEQ ID NO: 316614
aagaauuauguuggaagug

SEQ ID NO: 426888 - RNA, 19 nt, Artificial Sequence
  Description of Artificial Sequence: Synthetic oligonucleotide
  Antisense Strand to SEQ ID NO: 426887
cacuuccaacauaauucuu

SEQ ID NO: 426889 - RNA, 19 nt, Artificial Sequence
  Description of Artificial Sequence: Synthetic oligonucleotide
  Sense strand starting at position 2590 of SEQ ID NO: 316614
uuauguuggaagugaauau

SEQ ID NO: 426890 - RNA, 19 nt, Artificial Sequence
  Description of Artificial Sequence: Synthetic oligonucleotide
  Antisense Strand to SEQ ID NO: 426889
auauucacuuccaacauaa

SEQ ID NO: 426891 - RNA, 19 nt, Artificial Sequence
  Description of Artificial Sequence: Synthetic oligonucleotide
  Sense strand starting at position 2600 of SEQ ID NO: 316614
agugaauauccggaucuuu

SEQ ID NO: 426892 - RNA, 19 nt, Artificial Sequence
  Description of Artificial Sequence: Synthetic oligonucleotide
  Antisense Strand to SEQ ID NO: 426891
aaagauccggauauucacu

SEQ ID NO: 426893 - RNA, 19 nt, Artificial Sequence
  Description of Artificial Sequence: Synthetic oligonucleotide
  Sense strand starting at position 2720 of SEQ ID NO: 316614
uggaauguacaagguuuaa

SEQ ID NO: 426894 - RNA, 19 nt, Artificial Sequence
  Description of Artificial Sequence: Synthetic oligonucleotide
  Antisense Strand to SEQ ID NO: 426893
uuaaaccuuguacauucca

SEQ ID NO: 426895 - RNA, 19 nt, Artificial Sequence
  Description of Artificial Sequence: Synthetic oligonucleotide
  Sense strand starting at position 2733 of SEQ ID NO: 316614
guuuaaugugagcacuuaa

SEQ ID NO: 426896 - RNA, 19 nt, Artificial Sequence
  Description of Artificial Sequence: Synthetic oligonucleotide
  Antisense Strand to SEQ ID NO: 426895
uuaagugcucacauuaaac

SEQ ID NO: 426897 - RNA, 19 nt, Artificial Sequence
  Description of Artificial Sequence: Synthetic oligonucleotide
  Sense strand starting at position 2856 of SEQ ID NO: 316614
cuuccuagaugauuauuga

SEQ ID NO: 426898 - RNA, 19 nt, Artificial Sequence
  Description of Artificial Sequence: Synthetic oligonucleotide
  Antisense Strand to SEQ ID NO: 426897
ucaauaaucaucuaggaag

SEQ ID NO: 426899 - RNA, 19 nt, Artificial Sequence
  Description of Artificial Sequence: Synthetic oligonucleotide
  Sense strand starting at position 2904 of SEQ ID NO: 316614
uaccuaauagguuggucaa

SEQ ID NO: 426900 - RNA, 19 nt, Artificial Sequence
  Description of Artificial Sequence: Synthetic oligonucleotide
  Antisense Strand to SEQ ID NO: 426899
uugaccaaccuauuaggua

SEQ ID NO: 426901 - RNA, 19 nt, Artificial Sequence
  Description of Artificial Sequence: Synthetic oligonucleotide
  Sense strand starting at position 2907 of SEQ ID NO: 316614
cuaauagguuggucaagga

SEQ ID NO: 426902 - RNA, 19 nt, Artificial Sequence
  Description of Artificial Sequence: Synthetic oligonucleotide
  Antisense Strand to SEQ ID NO: 426901
uccuugaccaaccuauuag

SEQ ID NO: 426903 - RNA, 19 nt, Artificial Sequence
  Description of Artificial Sequence: Synthetic oligonucleotide
  Sense strand starting at position 3010 of SEQ ID NO: 316614
gaaguauugagaggugaca

SEQ ID NO: 426904 - RNA, 19 nt, Artificial Sequence
  Description of Artificial Sequence: Synthetic oligonucleotide
  Antisense Strand to SEQ ID NO: 426903
ugucaccucucaauacuuc

SEQ ID NO: 426905 - RNA, 19 nt, Artificial Sequence
  Description of Artificial Sequence: Synthetic oligonucleotide
  Sense strand starting at position 3855 of SEQ ID NO: 316614
ucuaacucaugguuuguaa

SEQ ID NO: 426906 - RNA, 19 nt, Artificial Sequence
  Description of Artificial Sequence: Synthetic oligonucleotide
  Antisense Strand to SEQ ID NO: 426905
uuacaaaccaugaguuaga

SEQ ID NO: 426907 - RNA, 19 nt, Artificial Sequence
  Description of Artificial Sequence: Synthetic oligonucleotide
  Sense strand starting at position 3858 of SEQ ID NO: 316614
aacucaugguuuguaaaug

SEQ ID NO: 426908 - RNA, 19 nt, Artificial Sequence
  Description of Artificial Sequence: Synthetic oligonucleotide
  Antisense Strand to SEQ ID NO: 426907
cauuuacaaaccaugaguu

SEQ ID NO: 426909 - RNA, 19 nt, Artificial Sequence
  Description of Artificial Sequence: Synthetic oligonucleotide
  Sense strand starting at position 549 of SEQ ID NO: 316615
ugccaagacccauaaguuu

SEQ ID NO: 426910 - RNA, 19 nt, Artificial Sequence
  Description of Artificial Sequence: Synthetic oligonucleotide
  Antisense Strand to SEQ ID NO: 426909
aaacuuaugggucuuggca

SEQ ID NO: 426911 - RNA, 19 nt, Artificial Sequence
  Description of Artificial Sequence: Synthetic oligonucleotide
  Sense strand starting at position 744 of SEQ ID NO: 316615
ugcagcaggcgcuuaaauu

SEQ ID NO: 426912 - RNA, 19 nt, Artificial Sequence
  Description of Artificial Sequence: Synthetic oligonucleotide
  Antisense Strand to SEQ ID NO: 426911
aauuuaagcgccugcugca

SEQ ID NO: 426913 - RNA, 19 nt, Artificial Sequence
  Description of Artificial Sequence: Synthetic oligonucleotide
  Sense strand starting at position 851 of SEQ ID NO: 316615
ucccaaugguugcuacaga

SEQ ID NO: 426914 - RNA, 19 nt, Artificial Sequence
  Description of Artificial Sequence: Synthetic oligonucleotide
  Antisense Strand to SEQ ID NO: 426913
ucuguagcaaccauuggga

SEQ ID NO: 426915 - RNA, 19 nt, Artificial Sequence
  Description of Artificial Sequence: Synthetic oligonucleotide
  Sense strand starting at position 935 of SEQ ID NO: 316615
cauucucugcaguagagaa

SEQ ID NO: 426916 - RNA, 19 nt, Artificial Sequence
  Description of Artificial Sequence: Synthetic oligonucleotide
  Antisense Strand to SEQ ID NO: 426915
uucucuacugcagagaaug

SEQ ID NO: 426917 - RNA, 19 nt, Artificial Sequence
  Description of Artificial Sequence: Synthetic oligonucleotide
  Sense strand starting at position 937 of SEQ ID NO: 316615
uucucugcaguagagaaua

SEQ ID NO: 426918 - RNA, 19 nt, Artificial Sequence
  Description of Artificial Sequence: Synthetic oligonucleotide
  Antisense Strand to SEQ ID NO: 426917
uauucucuacugcagagaa

SEQ ID NO: 426919 - RNA, 19 nt, Artificial Sequence
  Description of Artificial Sequence: Synthetic oligonucleotide
  Sense strand starting at position 1386 of SEQ ID NO: 316615
agaagcugcuauuuaguca

SEQ ID NO: 426920 - RNA, 19 nt, Artificial Sequence
  Description of Artificial Sequence: Synthetic oligonucleotide
  Antisense Strand to SEQ ID NO: 426919
ugacuaaauagcagcuucu

SEQ ID NO: 426921 - RNA, 19 nt, Artificial Sequence
  Description of Artificial Sequence: Synthetic oligonucleotide
  Sense strand starting at position 1389 of SEQ ID NO: 316615
agcugcuauuuagucaaca

SEQ ID NO: 426922 - RNA, 19 nt, Artificial Sequence
  Description of Artificial Sequence: Synthetic oligonucleotide
  Antisense Strand to SEQ ID NO: 426921
uguugacuaaauagcagcu

SEQ ID NO: 426923 - RNA, 19 nt, Artificial Sequence
  Description of Artificial Sequence: Synthetic oligonucleotide
  Sense strand starting at position 1390 of SEQ ID NO: 316615
gcugcuauuuagucaacaa

SEQ ID NO: 426924 - RNA, 19 nt, Artificial Sequence
  Description of Artificial Sequence: Synthetic oligonucleotide
  Antisense Strand to SEQ ID NO: 426923
uuguugacuaaauagcagc

SEQ ID NO: 426925 - RNA, 19 nt, Artificial Sequence
  Description of Artificial Sequence: Synthetic oligonucleotide
  Sense strand starting at position 1414 of SEQ ID NO: 316615
uuaagagugucagcaaauu

SEQ ID NO: 426926 - RNA, 19 nt, Artificial Sequence
  Description of Artificial Sequence: Synthetic oligonucleotide
  Antisense Strand to SEQ ID NO: 426925
aauuugcugacacucuuaa

SEQ ID NO: 426927 - RNA, 19 nt, Artificial Sequence
  Description of Artificial Sequence: Synthetic oligonucleotide
  Sense strand starting at position 1533 of SEQ ID NO: 316615
guaugcaacgaguaacaau

SEQ ID NO: 426928 - RNA, 19 nt, Artificial Sequence
  Description of Artificial Sequence: Synthetic oligonucleotide
  Antisense Strand to SEQ ID NO: 426927
auuguuacucguugcauac

SEQ ID NO: 426929 - RNA, 19 nt, Artificial Sequence
  Description of Artificial Sequence: Synthetic oligonucleotide
  Sense strand starting at position 1686 of SEQ ID NO: 316615
aggguuagucugcaccaca

SEQ ID NO: 426930 - RNA, 19 nt, Artificial Sequence
  Description of Artificial Sequence: Synthetic oligonucleotide
  Antisense Strand to SEQ ID NO: 426929
uguggugcagacuaacccu

SEQ ID NO: 426931 - RNA, 19 nt, Artificial Sequence
  Description of Artificial Sequence: Synthetic oligonucleotide
  Sense strand starting at position 1760 of SEQ ID NO: 316615
ugagcaaauguauguggaa

SEQ ID NO: 426932 - RNA, 19 nt, Artificial Sequence
  Description of Artificial Sequence: Synthetic oligonucleotide
  Antisense Strand to SEQ ID NO: 426931
uuccacauacauuugcuca

SEQ ID NO: 426933 - RNA, 19 nt, Artificial Sequence
  Description of Artificial Sequence: Synthetic oligonucleotide
  Sense strand starting at position 1854 of SEQ ID NO: 316615
uuagcaagucucgcggauu

SEQ ID NO: 426934 - RNA, 19 nt, Artificial Sequence
  Description of Artificial Sequence: Synthetic oligonucleotide
  Antisense Strand to SEQ ID NO: 426933
aauccgcgagacuugcuaa

SEQ ID NO: 426935 - RNA, 19 nt, Artificial Sequence
  Description of Artificial Sequence: Synthetic oligonucleotide
  Sense strand starting at position 1900 of SEQ ID NO: 316615
ggauagcucgucgcggaua

SEQ ID NO: 426936 - RNA, 19 nt, Artificial Sequence
  Description of Artificial Sequence: Synthetic oligonucleotide
  Antisense Strand to SEQ ID NO: 426935
uauccgcgacgagcuaucc

SEQ ID NO: 426937 - RNA, 19 nt, Artificial Sequence
  Description of Artificial Sequence: Synthetic oligonucleotide
  Sense strand starting at position 1983 of SEQ ID NO: 316615
uaaaucuuccgcgucgcua

SEQ ID NO: 426938 - RNA, 19 nt, Artificial Sequence
  Description of Artificial Sequence: Synthetic oligonucleotide
  Antisense Strand to SEQ ID NO: 426937
uagcgacgcggaagauuua

SEQ ID NO: 426939 - RNA, 19 nt, Artificial Sequence
  Description of Artificial Sequence: Synthetic oligonucleotide
  Sense strand starting at position 2067 of SEQ ID NO: 316615
aggcgcuaacuugagugaa

SEQ ID NO: 426940 - RNA, 19 nt, Artificial Sequence
  Description of Artificial Sequence: Synthetic oligonucleotide
  Antisense Strand to SEQ ID NO: 426939
uucacucaaguuagcgccu

SEQ ID NO: 426941 - RNA, 19 nt, Artificial Sequence
  Description of Artificial Sequence: Synthetic oligonucleotide
  Sense strand starting at position 2070 of SEQ ID NO: 316615
cgcuaacuugagugaagag

SEQ ID NO: 426942 - RNA, 19 nt, Artificial Sequence
  Description of Artificial Sequence: Synthetic oligonucleotide
  Antisense Strand to SEQ ID NO: 426941
cucuucacucaaguuagcg

SEQ ID NO: 426943 - RNA, 19 nt, Artificial Sequence
  Description of Artificial Sequence: Synthetic oligonucleotide
  Sense strand starting at position 2082 of SEQ ID NO: 316615
ugaagaggucuauaggcuu

SEQ ID NO: 426944 - RNA, 19 nt, Artificial Sequence
  Description of Artificial Sequence: Synthetic oligonucleotide
  Antisense Strand to SEQ ID NO: 426943
aagccuauagaccucuuca

SEQ ID NO: 426945 - RNA, 19 nt, Artificial Sequence
  Description of Artificial Sequence: Synthetic oligonucleotide
  Sense strand starting at position 2260 of SEQ ID NO: 316615
cguucauaaggugagaaua

SEQ ID NO: 426946 - RNA, 19 nt, Artificial Sequence
  Description of Artificial Sequence: Synthetic oligonucleotide
  Antisense Strand to SEQ ID NO: 426945
uauucucaccuuaugaacg

SEQ ID NO: 426947 - RNA, 19 nt, Artificial Sequence
  Description of Artificial Sequence: Synthetic oligonucleotide
  Sense strand starting at position 2326 of SEQ ID NO: 316615
auaggagaguuauugcuuu

SEQ ID NO: 426948 - RNA, 19 nt, Artificial Sequence
  Description of Artificial Sequence: Synthetic oligonucleotide
  Antisense Strand to SEQ ID NO: 426947
aaagcaauaacucuccuau

SEQ ID NO: 426949 - RNA, 19 nt, Artificial Sequence
  Description of Artificial Sequence: Synthetic oligonucleotide
  Sense strand starting at position 2362 of SEQ ID NO: 316615
uggaaacgugcuggagaua

SEQ ID NO: 426950 - RNA, 19 nt, Artificial Sequence
  Description of Artificial Sequence: Synthetic oligonucleotide
  Antisense Strand to SEQ ID NO: 426949
uaucuccagcacguuucca

SEQ ID NO: 426951 - RNA, 19 nt, Artificial Sequence
  Description of Artificial Sequence: Synthetic oligonucleotide
  Sense strand starting at position 2363 of SEQ ID NO: 316615
ggaaacgugcuggagauau

SEQ ID NO: 426952 - RNA, 19 nt, Artificial Sequence
  Description of Artificial Sequence: Synthetic oligonucleotide
  Antisense Strand to SEQ ID NO: 426951
auaucuccagcacguuucc

SEQ ID NO: 426953 - RNA, 19 nt, Artificial Sequence
  Description of Artificial Sequence: Synthetic oligonucleotide
  Sense strand starting at position 2485 of SEQ ID NO: 316615
uuuaguaggaccuguaaag

SEQ ID NO: 426954 - RNA, 19 nt, Artificial Sequence
  Description of Artificial Sequence: Synthetic oligonucleotide
  Antisense Strand to SEQ ID NO: 426953
cuuuacagguccuacuaaa

SEQ ID NO: 426955 - RNA, 19 nt, Artificial Sequence
  Description of Artificial Sequence: Synthetic oligonucleotide
  Sense strand starting at position 2558 of SEQ ID NO: 316615
uucuguuuccaagggaauu

SEQ ID NO: 426956 - RNA, 19 nt, Artificial Sequence
  Description of Artificial Sequence: Synthetic oligonucleotide
  Antisense Strand to SEQ ID NO: 426955
aauucccuuggaaacagaa

SEQ ID NO: 426957 - RNA, 19 nt, Artificial Sequence
  Description of Artificial Sequence: Synthetic oligonucleotide
  Sense strand starting at position 2559 of SEQ ID NO: 316615
ucuguuuccaagggaauug

SEQ ID NO: 426958 - RNA, 19 nt, Artificial Sequence
  Description of Artificial Sequence: Synthetic oligonucleotide
  Antisense Strand to SEQ ID NO: 426957
caauucccuuggaaacaga

SEQ ID NO: 426959 - RNA, 19 nt, Artificial Sequence
  Description of Artificial Sequence: Synthetic oligonucleotide
  Sense strand starting at position 2619 of SEQ ID NO: 316615
ggcaauaacagagguguuu

SEQ ID NO: 426960 - RNA, 19 nt, Artificial Sequence
  Description of Artificial Sequence: Synthetic oligonucleotide
  Antisense Strand to SEQ ID NO: 426959
aaacaccucuguuauugcc

SEQ ID NO: 426961 - RNA, 19 nt, Artificial Sequence
  Description of Artificial Sequence: Synthetic oligonucleotide
  Sense strand starting at position 2653 of SEQ ID NO: 316615
guggcagaauaaucgggau

SEQ ID NO: 426962 - RNA, 19 nt, Artificial Sequence
  Description of Artificial Sequence: Synthetic oligonucleotide
  Antisense Strand to SEQ ID NO: 426961
aucccgauuauucugccac

SEQ ID NO: 426963 - RNA, 19 nt, Artificial Sequence
  Description of Artificial Sequence: Synthetic oligonucleotide
  Sense strand starting at position 2842 of SEQ ID NO: 316615
caagauguaccauggacua

SEQ ID NO: 426964 - RNA, 19 nt, Artificial Sequence
  Description of Artificial Sequence: Synthetic oligonucleotide
  Antisense Strand to SEQ ID NO: 426963
uaguccaugguacaucuug

SEQ ID NO: 426965 - RNA, 19 nt, Artificial Sequence
  Description of Artificial Sequence: Synthetic oligonucleotide
  Sense strand starting at position 2968 of SEQ ID NO: 316615
gccagacaguuaucaaccu

SEQ ID NO: 426966 - RNA, 19 nt, Artificial Sequence
  Description of Artificial Sequence: Synthetic oligonucleotide
  Antisense Strand to SEQ ID NO: 426965
agguugauaacugucuggc

SEQ ID NO: 426967 - RNA, 19 nt, Artificial Sequence
  Description of Artificial Sequence: Synthetic oligonucleotide
  Sense strand starting at position 3034 of SEQ ID NO: 316615
guucucagucuugagacca

SEQ ID NO: 426968 - RNA, 19 nt, Artificial Sequence
  Description of Artificial Sequence: Synthetic oligonucleotide
  Antisense Strand to SEQ ID NO: 426967
uggucucaagacugagaac

SEQ ID NO: 426969 - RNA, 19 nt, Artificial Sequence
  Description of Artificial Sequence: Synthetic oligonucleotide
  Sense strand starting at position 3261 of SEQ ID NO: 316615
gccucugauugacucugaa

SEQ ID NO: 426970 - RNA, 19 nt, Artificial Sequence
  Description of Artificial Sequence: Synthetic oligonucleotide
  Antisense Strand to SEQ ID NO: 426969
uucagagucaaucagaggc

SEQ ID NO: 426971 - RNA, 19 nt, Artificial Sequence
  Description of Artificial Sequence: Synthetic oligonucleotide
  Sense strand starting at position 3264 of SEQ ID NO: 316615
ucugauugacucugaauug

SEQ ID NO: 426972 - RNA, 19 nt, Artificial Sequence
  Description of Artificial Sequence: Synthetic oligonucleotide
  Antisense Strand to SEQ ID NO: 426971
caauucagagucaaucaga

SEQ ID NO: 426973 - RNA, 19 nt, Artificial Sequence
  Description of Artificial Sequence: Synthetic oligonucleotide
  Sense strand starting at position 3433 of SEQ ID NO: 316615
auuagaggcuuuccuagga

SEQ ID NO: 426974 - RNA, 19 nt, Artificial Sequence
  Description of Artificial Sequence: Synthetic oligonucleotide
  Antisense Strand to SEQ ID NO: 426973
uccuaggaaagccucuaau

SEQ ID NO: 426975 - RNA, 19 nt, Artificial Sequence
  Description of Artificial Sequence: Synthetic oligonucleotide
  Sense strand starting at position 3437 of SEQ ID NO: 316615
gaggcuuuccuaggauguc

SEQ ID NO: 426976 - RNA, 19 nt, Artificial Sequence
  Description of Artificial Sequence: Synthetic oligonucleotide
  Antisense Strand to SEQ ID NO: 426975
gacauccuaggaaagccuc

SEQ ID NO: 426977 - RNA, 19 nt, Artificial Sequence
  Description of Artificial Sequence: Synthetic oligonucleotide
  Sense strand starting at position 3627 of SEQ ID NO: 316615
ccugauguccuccauuaca

SEQ ID NO: 426978 - RNA, 19 nt, Artificial Sequence
  Description of Artificial Sequence: Synthetic oligonucleotide
  Antisense Strand to SEQ ID NO: 426977
uguaauggaggacaucagg

SEQ ID NO: 426979 - RNA, 19 nt, Artificial Sequence
  Description of Artificial Sequence: Synthetic oligonucleotide
  Sense strand starting at position 3887 of SEQ ID NO: 316615
cuuugcuauugauuccaga

SEQ ID NO: 426980 - RNA, 19 nt, Artificial Sequence
  Description of Artificial Sequence: Synthetic oligonucleotide
  Antisense Strand to SEQ ID NO: 426979
ucuggaaucaauagcaaag

SEQ ID NO: 426981 - RNA, 19 nt, Artificial Sequence
  Description of Artificial Sequence: Synthetic oligonucleotide
  Sense strand starting at position 3927 of SEQ ID NO: 316615
uucuuuaauccuuaagggu

SEQ ID NO: 426982 - RNA, 19 nt, Artificial Sequence
  Description of Artificial Sequence: Synthetic oligonucleotide
  Antisense Strand to SEQ ID NO: 426981
acccuuaaggauuaaagaa

SEQ ID NO: 426983 - RNA, 19 nt, Artificial Sequence
  Description of Artificial Sequence: Synthetic oligonucleotide
  Sense strand starting at position 3933 of SEQ ID NO: 316615
aauccuuaaggguguauga

SEQ ID NO: 426984 - RNA, 19 nt, Artificial Sequence
  Description of Artificial Sequence: Synthetic oligonucleotide
  Antisense Strand to SEQ ID NO: 426983
ucauacacccuuaaggauu

SEQ ID NO: 426985 - RNA, 19 nt, Artificial Sequence
  Description of Artificial Sequence: Synthetic oligonucleotide
  Sense strand starting at position 3935 of SEQ ID NO: 316615
uccuuaaggguguaugacu

SEQ ID NO: 426986 - RNA, 19 nt, Artificial Sequence
  Description of Artificial Sequence: Synthetic oligonucleotide
  Antisense Strand to SEQ ID NO: 426985
agucauacacccuuaagga

SEQ ID NO: 426987 - RNA, 19 nt, Artificial Sequence
  Description of Artificial Sequence: Synthetic oligonucleotide
  Sense strand starting at position 3940 of SEQ ID NO: 316615
aaggguguaugacuuuaaa

SEQ ID NO: 426988 - RNA, 19 nt, Artificial Sequence
  Description of Artificial Sequence: Synthetic oligonucleotide
  Antisense Strand to SEQ ID NO: 426987
uuuaaagucauacacccuu

SEQ ID NO: 426989 - RNA, 19 nt, Artificial Sequence
  Description of Artificial Sequence: Synthetic oligonucleotide
  Sense strand starting at position 239 of SEQ ID NO: 316616
gacugcuguuaacuaauga

SEQ ID NO: 426990 - RNA, 19 nt, Artificial Sequence
  Description of Artificial Sequence: Synthetic oligonucleotide
  Antisense Strand to SEQ ID NO: 426989
ucauuaguuaacagcaguc

SEQ ID NO: 426991 - RNA, 19 nt, Artificial Sequence
  Description of Artificial Sequence: Synthetic oligonucleotide
  Sense strand starting at position 324 of SEQ ID NO: 316616
agaaguuaggagugguaca

SEQ ID NO: 426992 - RNA, 19 nt, Artificial Sequence
  Description of Artificial Sequence: Synthetic oligonucleotide
  Antisense Strand to SEQ ID NO: 426991
uguaccacuccuaacuucu

SEQ ID NO: 426993 - RNA, 19 nt, Artificial Sequence
  Description of Artificial Sequence: Synthetic oligonucleotide
  Sense strand starting at position 545 of SEQ ID NO: 316616
ugagccuuugguuacacua

SEQ ID NO: 426994 - RNA, 19 nt, Artificial Sequence
  Description of Artificial Sequence: Synthetic oligonucleotide
  Antisense Strand to SEQ ID NO: 426993
uaguguaaccaaaggcuca

SEQ ID NO: 426995 - RNA, 19 nt, Artificial Sequence
  Description of Artificial Sequence: Synthetic oligonucleotide
  Sense strand starting at position 585 of SEQ ID NO: 316616
gcugguauacaaugaauau

SEQ ID NO: 426996 - RNA, 19 nt, Artificial Sequence
  Description of Artificial Sequence: Synthetic oligonucleotide
  Antisense Strand to SEQ ID NO: 426995
auauucauuguauaccagc

SEQ ID NO: 426997 - RNA, 19 nt, Artificial Sequence
  Description of Artificial Sequence: Synthetic oligonucleotide
  Sense strand starting at position 784 of SEQ ID NO: 316616
cggcuuuggcugucauuca

SEQ ID NO: 426998 - RNA, 19 nt, Artificial Sequence
  Description of Artificial Sequence: Synthetic oligonucleotide
  Antisense Strand to SEQ ID NO: 426997
ugaaugacagccaaagccg

SEQ ID NO: 426999 - RNA, 19 nt, Artificial Sequence
  Description of Artificial Sequence: Synthetic oligonucleotide
  Sense strand starting at position 813 of SEQ ID NO: 316616
guauuaaaugccuacaaug

SEQ ID NO: 427000 - RNA, 19 nt, Artificial Sequence
  Description of Artificial Sequence: Synthetic oligonucleotide
  Antisense Strand to SEQ ID NO: 426999
cauuguaggcauuuaauac

SEQ ID NO: 427001 - RNA, 19 nt, Artificial Sequence
  Description of Artificial Sequence: Synthetic oligonucleotide
  Sense strand starting at position 831 of SEQ ID NO: 316616
guacgaagcccugaagaga

SEQ ID NO: 427002 - RNA, 19 nt, Artificial Sequence
  Description of Artificial Sequence: Synthetic oligonucleotide
  Antisense Strand to SEQ ID NO: 427001
ucucuucagggcuucguac

SEQ ID NO: 427003 - RNA, 19 nt, Artificial Sequence
  Description of Artificial Sequence: Synthetic oligonucleotide
  Sense strand starting at position 850 of SEQ ID NO: 316616
uaauaaagguauucugagu

SEQ ID NO: 427004 - RNA, 19 nt, Artificial Sequence
  Description of Artificial Sequence: Synthetic oligonucleotide
  Antisense Strand to SEQ ID NO: 427003
acucagaauaccuuuauua

SEQ ID NO: 427005 - RNA, 19 nt, Artificial Sequence
  Description of Artificial Sequence: Synthetic oligonucleotide
  Sense strand starting at position 880 of SEQ ID NO: 316616
ccuugaucucaaugaguau

SEQ ID NO: 427006 - RNA, 19 nt, Artificial Sequence
  Description of Artificial Sequence: Synthetic oligonucleotide
  Antisense Strand to SEQ ID NO: 427005
auacucauugagaucaagg

SEQ ID NO: 427007 - RNA, 19 nt, Artificial Sequence
  Description of Artificial Sequence: Synthetic oligonucleotide
  Sense strand starting at position 929 of SEQ ID NO: 316616
ggagaaagugccuagugcu

SEQ ID NO: 427008 - RNA, 19 nt, Artificial Sequence
  Description of Artificial Sequence: Synthetic oligonucleotide
  Antisense Strand to SEQ ID NO: 427007
agcacuaggcacuuucucc

SEQ ID NO: 427009 - RNA, 19 nt, Artificial Sequence
  Description of Artificial Sequence: Synthetic oligonucleotide
  Sense strand starting at position 971 of SEQ ID NO: 316616
uaggauuucuacugggaaa

SEQ ID NO: 427010 - RNA, 19 nt, Artificial Sequence
  Description of Artificial Sequence: Synthetic oligonucleotide
  Antisense Strand to SEQ ID NO: 427009
uuucccaguagaaauccua

SEQ ID NO: 427011 - RNA, 19 nt, Artificial Sequence
  Description of Artificial Sequence: Synthetic oligonucleotide
  Sense strand starting at position 1045 of SEQ ID NO: 316616
gugacaugugggcaucauu

SEQ ID NO: 427012 - RNA, 19 nt, Artificial Sequence
  Description of Artificial Sequence: Synthetic oligonucleotide
  Antisense Strand to SEQ ID NO: 427011
aaugaugcccacaugucac

SEQ ID NO: 427013 - RNA, 19 nt, Artificial Sequence
  Description of Artificial Sequence: Synthetic oligonucleotide
  Sense strand starting at position 1054 of SEQ ID NO: 316616
gggcaucauuucuauaaag

SEQ ID NO: 427014 - RNA, 19 nt, Artificial Sequence
  Description of Artificial Sequence: Synthetic oligonucleotide
  Antisense Strand to SEQ ID NO: 427013
cuuuauagaaaugaugccc

SEQ ID NO: 427015 - RNA, 19 nt, Artificial Sequence
  Description of Artificial Sequence: Synthetic oligonucleotide
  Sense strand starting at position 1063 of SEQ ID NO: 316616
uucuauaaagccugggagu

SEQ ID NO: 427016 - RNA, 19 nt, Artificial Sequence
  Description of Artificial Sequence: Synthetic oligonucleotide
  Antisense Strand to SEQ ID NO: 427015
acucccaggcuuuauagaa

SEQ ID NO: 427017 - RNA, 19 nt, Artificial Sequence
  Description of Artificial Sequence: Synthetic oligonucleotide
  Sense strand starting at position 1109 of SEQ ID NO: 316616
gcaagaugccaugacucau

SEQ ID NO: 427018 - RNA, 19 nt, Artificial Sequence
  Description of Artificial Sequence: Synthetic oligonucleotide
  Antisense Strand to SEQ ID NO: 427017
augagucauggcaucuugc

SEQ ID NO: 427019 - RNA, 19 nt, Artificial Sequence
  Description of Artificial Sequence: Synthetic oligonucleotide
  Sense strand starting at position 1165 of SEQ ID NO: 316616
accaaauaugcacauguga

SEQ ID NO: 427020 - RNA, 19 nt, Artificial Sequence
  Description of Artificial Sequence: Synthetic oligonucleotide
  Antisense Strand to SEQ ID NO: 427019
ucacaugugcauauuuggu

SEQ ID NO: 427021 - RNA, 19 nt, Artificial Sequence
  Description of Artificial Sequence: Synthetic oligonucleotide
  Sense strand starting at position 1224 of SEQ ID NO: 316616
uagagagugcuguaaguuc

SEQ ID NO: 427022 - RNA, 19 nt, Artificial Sequence
  Description of Artificial Sequence: Synthetic oligonucleotide
  Antisense Strand to SEQ ID NO: 427021
gaacuuacagcacucucua

SEQ ID NO: 427023 - RNA, 19 nt, Artificial Sequence
  Description of Artificial Sequence: Synthetic oligonucleotide
  Sense strand starting at position 1511 of SEQ ID NO: 316616
ggagaacgucccuacauuc

SEQ ID NO: 427024 - RNA, 19 nt, Artificial Sequence
  Description of Artificial Sequence: Synthetic oligonucleotide
  Antisense Strand to SEQ ID NO: 427023
gaauguagggacguucucc

SEQ ID NO: 427025 - RNA, 19 nt, Artificial Sequence
  Description of Artificial Sequence: Synthetic oligonucleotide
  Sense strand starting at position 2199 of SEQ ID NO: 316616
guugaauucugcccuaaag

SEQ ID NO: 427026 - RNA, 19 nt, Artificial Sequence
  Description of Artificial Sequence: Synthetic oligonucleotide
  Antisense Strand to SEQ ID NO: 427025
cuuuagggcagaauucaac

SEQ ID NO: 427027 - RNA, 19 nt, Artificial Sequence
  Description of Artificial Sequence: Synthetic oligonucleotide
  Sense strand starting at position 2201 of SEQ ID NO: 316616
ugaauucugcccuaaagau

SEQ ID NO: 427028 - RNA, 19 nt, Artificial Sequence
  Description of Artificial Sequence: Synthetic oligonucleotide
  Antisense Strand to SEQ ID NO: 427027
aucuuuagggcagaauuca

SEQ ID NO: 427029 - RNA, 19 nt, Artificial Sequence
  Description of Artificial Sequence: Synthetic oligonucleotide
  Sense strand starting at position 2209 of SEQ ID NO: 316616
gcccuaaagaugggcuuua

SEQ ID NO: 427030 - RNA, 19 nt, Artificial Sequence
  Description of Artificial Sequence: Synthetic oligonucleotide
  Antisense Strand to SEQ ID NO: 427029
uaaagcccaucuuuagggc

SEQ ID NO: 427031 - RNA, 19 nt, Artificial Sequence
  Description of Artificial Sequence: Synthetic oligonucleotide
  Sense strand starting at position 2210 of SEQ ID NO: 316616
cccuaaagaugggcuuuau

SEQ ID NO: 427032 - RNA, 19 nt, Artificial Sequence
  Description of Artificial Sequence: Synthetic oligonucleotide
  Antisense Strand to SEQ ID NO: 427031
auaaagcccaucuuuaggg

SEQ ID NO: 427033 - RNA, 19 nt, Artificial Sequence
  Description of Artificial Sequence: Synthetic oligonucleotide
  Sense strand starting at position 2427 of SEQ ID NO: 316616
gucugccguuauuuaguaa

SEQ ID NO: 427034 - RNA, 19 nt, Artificial Sequence
  Description of Artificial Sequence: Synthetic oligonucleotide
  Antisense Strand to SEQ ID NO: 427033
uuacuaaauaacggcagac

SEQ ID NO: 427035 - RNA, 19 nt, Artificial Sequence
  Description of Artificial Sequence: Synthetic oligonucleotide
  Sense strand starting at position 2430 of SEQ ID NO: 316616
ugccguuauuuaguaagua

SEQ ID NO: 427036 - RNA, 19 nt, Artificial Sequence
  Description of Artificial Sequence: Synthetic oligonucleotide
  Antisense Strand to SEQ ID NO: 427035
uacuuacuaaauaacggca

SEQ ID NO: 427037 - RNA, 19 nt, Artificial Sequence
  Description of Artificial Sequence: Synthetic oligonucleotide
  Sense strand starting at position 2452 of SEQ ID NO: 316616
agugcuugugugccgauua

SEQ ID NO: 427038 - RNA, 19 nt, Artificial Sequence
  Description of Artificial Sequence: Synthetic oligonucleotide
  Antisense Strand to SEQ ID NO: 427037
uaaucggcacacaagcacu

SEQ ID NO: 427039 - RNA, 19 nt, Artificial Sequence
  Description of Artificial Sequence: Synthetic oligonucleotide
  Sense strand starting at position 2457 of SEQ ID NO: 316616
uugugugccgauuaaagaa

SEQ ID NO: 427040 - RNA, 19 nt, Artificial Sequence
  Description of Artificial Sequence: Synthetic oligonucleotide
  Antisense Strand to SEQ ID NO: 427039
uucuuuaaucggcacacaa

SEQ ID NO: 427041 - RNA, 19 nt, Artificial Sequence
  Description of Artificial Sequence: Synthetic oligonucleotide
  Sense strand starting at position 2685 of SEQ ID NO: 316616
uuuagaaugggccaguuau

SEQ ID NO: 427042 - RNA, 19 nt, Artificial Sequence
  Description of Artificial Sequence: Synthetic oligonucleotide
  Antisense Strand to SEQ ID NO: 427041
auaacuggcccauucuaaa

SEQ ID NO: 427043 - RNA, 19 nt, Artificial Sequence
  Description of Artificial Sequence: Synthetic oligonucleotide
  Sense strand starting at position 2735 of SEQ ID NO: 316616
ccuuaucuucuaugguaag

SEQ ID NO: 427044 - RNA, 19 nt, Artificial Sequence
  Description of Artificial Sequence: Synthetic oligonucleotide
  Antisense Strand to SEQ ID NO: 427043
cuuaccauagaagauaagg

SEQ ID NO: 427045 - RNA, 19 nt, Artificial Sequence
  Description of Artificial Sequence: Synthetic oligonucleotide
  Sense strand starting at position 2746 of SEQ ID NO: 316616
augguaagagcauauguaa

SEQ ID NO: 427046 - RNA, 19 nt, Artificial Sequence
  Description of Artificial Sequence: Synthetic oligonucleotide
  Antisense Strand to SEQ ID NO: 427045
uuacauaugcucuuaccau

SEQ ID NO: 427047 - RNA, 19 nt, Artificial Sequence
  Description of Artificial Sequence: Synthetic oligonucleotide
  Sense strand starting at position 2753 of SEQ ID NO: 316616
gagcauauguaagugaacu

SEQ ID NO: 427048 - RNA, 19 nt, Artificial Sequence
  Description of Artificial Sequence: Synthetic oligonucleotide
  Antisense Strand to SEQ ID NO: 427047
aguucacuuacauaugcuc

SEQ ID NO: 427049 - RNA, 19 nt, Artificial Sequence
  Description of Artificial Sequence: Synthetic oligonucleotide
  Sense strand starting at position 3401 of SEQ ID NO: 316616
cauagcauuguagaaguaa

SEQ ID NO: 427050 - RNA, 19 nt, Artificial Sequence
  Description of Artificial Sequence: Synthetic oligonucleotide
  Antisense Strand to SEQ ID NO: 427049
uuacuucuacaaugcuaug

SEQ ID NO: 427051 - RNA, 19 nt, Artificial Sequence
  Description of Artificial Sequence: Synthetic oligonucleotide
  Sense strand starting at position 3471 of SEQ ID NO: 316616
cucaaagucuaggcugauu

SEQ ID NO: 427052 - RNA, 19 nt, Artificial Sequence
  Description of Artificial Sequence: Synthetic oligonucleotide
  Antisense Strand to SEQ ID NO: 427051
aaucagccuagacuuugag

SEQ ID NO: 427053 - RNA, 19 nt, Artificial Sequence
  Description of Artificial Sequence: Synthetic oligonucleotide
  Sense strand starting at position 3473 of SEQ ID NO: 316616
caaagucuaggcugauuaa

SEQ ID NO: 427054 - RNA, 19 nt, Artificial Sequence
  Description of Artificial Sequence: Synthetic oligonucleotide
  Antisense Strand to SEQ ID NO: 427053
uuaaucagccuagacuuug

SEQ ID NO: 427055 - RNA, 19 nt, Artificial Sequence
  Description of Artificial Sequence: Synthetic oligonucleotide
  Sense strand starting at position 3553 of SEQ ID NO: 316616
ugcauaucuggucauauga

SEQ ID NO: 427056 - RNA, 19 nt, Artificial Sequence
  Description of Artificial Sequence: Synthetic oligonucleotide
  Antisense Strand to SEQ ID NO: 427055
ucauaugaccagauaugca

SEQ ID NO: 427057 - RNA, 19 nt, Artificial Sequence
  Description of Artificial Sequence: Synthetic oligonucleotide
  Sense strand starting at position 3786 of SEQ ID NO: 316616
gauuaaugucaggguauau

SEQ ID NO: 427058 - RNA, 19 nt, Artificial Sequence
  Description of Artificial Sequence: Synthetic oligonucleotide
  Antisense Strand to SEQ ID NO: 427057
auauacccugacauuaauc

SEQ ID NO: 427059 - RNA, 19 nt, Artificial Sequence
  Description of Artificial Sequence: Synthetic oligonucleotide
  Sense strand starting at position 3795 of SEQ ID NO: 316616
caggguauaugaguuccau

SEQ ID NO: 427060 - RNA, 19 nt, Artificial Sequence
  Description of Artificial Sequence: Synthetic oligonucleotide
  Antisense Strand to SEQ ID NO: 427059
auggaacucauauacccug

SEQ ID NO: 427061 - RNA, 19 nt, Artificial Sequence
  Description of Artificial Sequence: Synthetic oligonucleotide
  Sense strand starting at position 3849 of SEQ ID NO: 316616
ugcccaguuccugauacaa

SEQ ID NO: 427062 - RNA, 19 nt, Artificial Sequence
  Description of Artificial Sequence: Synthetic oligonucleotide
  Antisense Strand to SEQ ID NO: 427061
uuguaucaggaacugggca

SEQ ID NO: 427063 - RNA, 19 nt, Artificial Sequence
  Description of Artificial Sequence: Synthetic oligonucleotide
  Sense strand starting at position 3862 of SEQ ID NO: 316616
auacaaugugugcauucuu

SEQ ID NO: 427064 - RNA, 19 nt, Artificial Sequence
  Description of Artificial Sequence: Synthetic oligonucleotide
  Antisense Strand to SEQ ID NO: 427063
aagaaugcacacauuguau

SEQ ID NO: 427065 - RNA, 19 nt, Artificial Sequence
  Description of Artificial Sequence: Synthetic oligonucleotide
  Sense strand starting at position 3962 of SEQ ID NO: 316616
uggaacaguacgggaaauu

SEQ ID NO: 427066 - RNA, 19 nt, Artificial Sequence
  Description of Artificial Sequence: Synthetic oligonucleotide
  Antisense Strand to SEQ ID NO: 427065
aauuucccguacuguucca

SEQ ID NO: 427067 - RNA, 19 nt, Artificial Sequence
  Description of Artificial Sequence: Synthetic oligonucleotide
  Sense strand starting at position 3971 of SEQ ID NO: 316616
acgggaaauugggucacaa

SEQ ID NO: 427068 - RNA, 19 nt, Artificial Sequence
  Description of Artificial Sequence: Synthetic oligonucleotide
  Antisense Strand to SEQ ID NO: 427067
uugugacccaauuucccgu

SEQ ID NO: 427069 - RNA, 19 nt, Artificial Sequence
  Description of Artificial Sequence: Synthetic oligonucleotide
  Sense strand starting at position 226 of SEQ ID NO: 316617
gcuucuacucuaggagaac

SEQ ID NO: 427070 - RNA, 19 nt, Artificial Sequence
  Description of Artificial Sequence: Synthetic oligonucleotide
  Antisense Strand to SEQ ID NO: 427069
guucuccuagaguagaagc

SEQ ID NO: 427071 - RNA, 19 nt, Artificial Sequence
  Description of Artificial Sequence: Synthetic oligonucleotide
  Sense strand starting at position 264 of SEQ ID NO: 316617
agauucuauuuccaggaua

SEQ ID NO: 427072 - RNA, 19 nt, Artificial Sequence
  Description of Artificial Sequence: Synthetic oligonucleotide
  Antisense Strand to SEQ ID NO: 427071
uauccuggaaauagaaucu

SEQ ID NO: 427073 - RNA, 19 nt, Artificial Sequence
  Description of Artificial Sequence: Synthetic oligonucleotide
  Sense strand starting at position 399 of SEQ ID NO: 316617
agguauauuuccucgccau

SEQ ID NO: 427074 - RNA, 19 nt, Artificial Sequence
  Description of Artificial Sequence: Synthetic oligonucleotide
  Antisense Strand to SEQ ID NO: 427073
auggcgaggaaauauaccu

SEQ ID NO: 427075 - RNA, 19 nt, Artificial Sequence
  Description of Artificial Sequence: Synthetic oligonucleotide
  Sense strand starting at position 400 of SEQ ID NO: 316617
gguauauuuccucgccauu

SEQ ID NO: 427076 - RNA, 19 nt, Artificial Sequence
  Description of Artificial Sequence: Synthetic oligonucleotide
  Antisense Strand to SEQ ID NO: 427075
aauggcgaggaaauauacc

SEQ ID NO: 427077 - RNA, 19 nt, Artificial Sequence
  Description of Artificial Sequence: Synthetic oligonucleotide
  Sense strand starting at position 470 of SEQ ID NO: 316617
aacuguaaauuguuuggga

SEQ ID NO: 427078 - RNA, 19 nt, Artificial Sequence
  Description of Artificial Sequence: Synthetic oligonucleotide
  Antisense Strand to SEQ ID NO: 427077
ucccaaacaauuuacaguu

SEQ ID NO: 427079 - RNA, 19 nt, Artificial Sequence
  Description of Artificial Sequence: Synthetic oligonucleotide
  Sense strand starting at position 472 of SEQ ID NO: 316617
cuguaaauuguuugggaca

SEQ ID NO: 427080 - RNA, 19 nt, Artificial Sequence
  Description of Artificial Sequence: Synthetic oligonucleotide
  Antisense Strand to SEQ ID NO: 427079
ugucccaaacaauuuacag

SEQ ID NO: 427081 - RNA, 19 nt, Artificial Sequence
  Description of Artificial Sequence: Synthetic oligonucleotide
  Sense strand starting at position 521 of SEQ ID NO: 316617
aggccuguuacaggaggau

SEQ ID NO: 427082 - RNA, 19 nt, Artificial Sequence
  Description of Artificial Sequence: Synthetic oligonucleotide
  Antisense Strand to SEQ ID NO: 427081
auccuccuguaacaggccu

SEQ ID NO: 427083 - RNA, 19 nt, Artificial Sequence
  Description of Artificial Sequence: Synthetic oligonucleotide
  Sense strand starting at position 1110 of SEQ ID NO: 316617
ccagaugaggcaugauaua

SEQ ID NO: 427084 - RNA, 19 nt, Artificial Sequence
  Description of Artificial Sequence: Synthetic oligonucleotide
  Antisense Strand to SEQ ID NO: 427083
uauaucaugccucaucugg

SEQ ID NO: 427085 - RNA, 19 nt, Artificial Sequence
  Description of Artificial Sequence: Synthetic oligonucleotide
  Sense strand starting at position 1119 of SEQ ID NO: 316617
gcaugauauaggcaguuaa

SEQ ID NO: 427086 - RNA, 19 nt, Artificial Sequence
  Description of Artificial Sequence: Synthetic oligonucleotide
  Antisense Strand to SEQ ID NO: 427085
uuaacugccuauaucaugc

SEQ ID NO: 427087 - RNA, 19 nt, Artificial Sequence
  Description of Artificial Sequence: Synthetic oligonucleotide
  Sense strand starting at position 1169 of SEQ ID NO: 316617
cuccaaguggccuauauaa

SEQ ID NO: 427088 - RNA, 19 nt, Artificial Sequence
  Description of Artificial Sequence: Synthetic oligonucleotide
  Antisense Strand to SEQ ID NO: 427087
uuauauaggccacuuggag

SEQ ID NO: 427089 - RNA, 19 nt, Artificial Sequence
  Description of Artificial Sequence: Synthetic oligonucleotide
  Sense strand starting at position 1171 of SEQ ID NO: 316617
ccaaguggccuauauaauc

SEQ ID NO: 427090 - RNA, 19 nt, Artificial Sequence
  Description of Artificial Sequence: Synthetic oligonucleotide
  Antisense Strand to SEQ ID NO: 427089
gauuauauaggccacuugg

SEQ ID NO: 427091 - RNA, 19 nt, Artificial Sequence
  Description of Artificial Sequence: Synthetic oligonucleotide
  Sense strand starting at position 1223 of SEQ ID NO: 316617
gguaaucuggcuuaccaca

SEQ ID NO: 427092 - RNA, 19 nt, Artificial Sequence
  Description of Artificial Sequence: Synthetic oligonucleotide
  Antisense Strand to SEQ ID NO: 427091
ugugguaagccagauuacc

SEQ ID NO: 427093 - RNA, 19 nt, Artificial Sequence
  Description of Artificial Sequence: Synthetic oligonucleotide
  Sense strand starting at position 1307 of SEQ ID NO: 316617
aaaggauguugucugauug

SEQ ID NO: 427094 - RNA, 19 nt, Artificial Sequence
  Description of Artificial Sequence: Synthetic oligonucleotide
  Antisense Strand to SEQ ID NO: 427093
caaucagacaacauccuuu

SEQ ID NO: 427095 - RNA, 19 nt, Artificial Sequence
  Description of Artificial Sequence: Synthetic oligonucleotide
  Sense strand starting at position 1331 of SEQ ID NO: 316617
ucaggugcucaacauaaau

SEQ ID NO: 427096 - RNA, 19 nt, Artificial Sequence
  Description of Artificial Sequence: Synthetic oligonucleotide
  Antisense Strand to SEQ ID NO: 427095
auuuauguugagcaccuga

SEQ ID NO: 427097 - RNA, 19 nt, Artificial Sequence
  Description of Artificial Sequence: Synthetic oligonucleotide
  Sense strand starting at position 1441 of SEQ ID NO: 316617
caaagugugguccauagag

SEQ ID NO: 427098 - RNA, 19 nt, Artificial Sequence
  Description of Artificial Sequence: Synthetic oligonucleotide
  Antisense Strand to SEQ ID NO: 427097
cucuauggaccacacuuug

SEQ ID NO: 427099 - RNA, 19 nt, Artificial Sequence
  Description of Artificial Sequence: Synthetic oligonucleotide
  Sense strand starting at position 1443 of SEQ ID NO: 316617
aagugugguccauagaggu

SEQ ID NO: 427100 - RNA, 19 nt, Artificial Sequence
  Description of Artificial Sequence: Synthetic oligonucleotide
  Antisense Strand to SEQ ID NO: 427099
accucuauggaccacacuu

SEQ ID NO: 427101 - RNA, 19 nt, Artificial Sequence
  Description of Artificial Sequence: Synthetic oligonucleotide
  Sense strand starting at position 1553 of SEQ ID NO: 316617
caaguuaguguaugagaag

SEQ ID NO: 427102 - RNA, 19 nt, Artificial Sequence
  Description of Artificial Sequence: Synthetic oligonucleotide
  Antisense Strand to SEQ ID NO: 427101
cuucucauacacuaacuug

SEQ ID NO: 427103 - RNA, 19 nt, Artificial Sequence
  Description of Artificial Sequence: Synthetic oligonucleotide
  Sense strand starting at position 1560 of SEQ ID NO: 316617
guguaugagaaguaccaau

SEQ ID NO: 427104 - RNA, 19 nt, Artificial Sequence
  Description of Artificial Sequence: Synthetic oligonucleotide
  Antisense Strand to SEQ ID NO: 427103
auugguacuucucauacac

SEQ ID NO: 427105 - RNA, 19 nt, Artificial Sequence
  Description of Artificial Sequence: Synthetic oligonucleotide
  Sense strand starting at position 1800 of SEQ ID NO: 316617
uaaacagacgaguaucagu

SEQ ID NO: 427106 - RNA, 19 nt, Artificial Sequence
  Description of Artificial Sequence: Synthetic oligonucleotide
  Antisense Strand to SEQ ID NO: 427105
acugauacucgucuguuua

SEQ ID NO: 427107 - RNA, 19 nt, Artificial Sequence
  Description of Artificial Sequence: Synthetic oligonucleotide
  Sense strand starting at position 1808 of SEQ ID NO: 316617
cgaguaucaguccaggaac

SEQ ID NO: 427108 - RNA, 19 nt, Artificial Sequence
  Description of Artificial Sequence: Synthetic oligonucleotide
  Antisense Strand to SEQ ID NO: 427107
guuccuggacugauacucg

SEQ ID NO: 427109 - RNA, 19 nt, Artificial Sequence
  Description of Artificial Sequence: Synthetic oligonucleotide
  Sense strand starting at position 1810 of SEQ ID NO: 316617
aguaucaguccaggaacuu

SEQ ID NO: 427110 - RNA, 19 nt, Artificial Sequence
  Description of Artificial Sequence: Synthetic oligonucleotide
  Antisense Strand to SEQ ID NO: 427109
aaguuccuggacugauacu

SEQ ID NO: 427111 - RNA, 19 nt, Artificial Sequence
  Description of Artificial Sequence: Synthetic oligonucleotide
  Sense strand starting at position 1811 of SEQ ID NO: 316617
guaucaguccaggaacuuu

SEQ ID NO: 427112 - RNA, 19 nt, Artificial Sequence
  Description of Artificial Sequence: Synthetic oligonucleotide
  Antisense Strand to SEQ ID NO: 427111
aaaguuccuggacugauac

SEQ ID NO: 427113 - RNA, 19 nt, Artificial Sequence
  Description of Artificial Sequence: Synthetic oligonucleotide
  Sense strand starting at position 1900 of SEQ ID NO: 316617
gcagcuaccagggaacauu

SEQ ID NO: 427114 - RNA, 19 nt, Artificial Sequence
  Description of Artificial Sequence: Synthetic oligonucleotide
  Antisense Strand to SEQ ID NO: 427113
aauguucccugguagcugc

SEQ ID NO: 427115 - RNA, 19 nt, Artificial Sequence
  Description of Artificial Sequence: Synthetic oligonucleotide
  Sense strand starting at position 1920 of SEQ ID NO: 316617
aggcuuuccgaguaaacua

SEQ ID NO: 427116 - RNA, 19 nt, Artificial Sequence
  Description of Artificial Sequence: Synthetic oligonucleotide
  Antisense Strand to SEQ ID NO: 427115
uaguuuacucggaaagccu

SEQ ID NO: 427117 - RNA, 19 nt, Artificial Sequence
  Description of Artificial Sequence: Synthetic oligonucleotide
  Sense strand starting at position 1945 of SEQ ID NO: 316617
aggaaaugucccgagugaa

SEQ ID NO: 427118 - RNA, 19 nt, Artificial Sequence
  Description of Artificial Sequence: Synthetic oligonucleotide
  Antisense Strand to SEQ ID NO: 427117
uucacucgggacauuuccu

SEQ ID NO: 427119 - RNA, 19 nt, Artificial Sequence
  Description of Artificial Sequence: Synthetic oligonucleotide
  Sense strand starting at position 2004 of SEQ ID NO: 316617
acuacuagcugauuaugaa

SEQ ID NO: 427120 - RNA, 19 nt, Artificial Sequence
  Description of Artificial Sequence: Synthetic oligonucleotide
  Antisense Strand to SEQ ID NO: 427119
uucauaaucagcuaguagu

SEQ ID NO: 427121 - RNA, 19 nt, Artificial Sequence
  Description of Artificial Sequence: Synthetic oligonucleotide
  Sense strand starting at position 2125 of SEQ ID NO: 316617
gggaaaguuacaugucaga

SEQ ID NO: 427122 - RNA, 19 nt, Artificial Sequence
  Description of Artificial Sequence: Synthetic oligonucleotide
  Antisense Strand to SEQ ID NO: 427121
ucugacauguaacuuuccc

SEQ ID NO: 427123 - RNA, 19 nt, Artificial Sequence
  Description of Artificial Sequence: Synthetic oligonucleotide
  Sense strand starting at position 2162 of SEQ ID NO: 316617
ucucuuugugccgcggaau

SEQ ID NO: 427124 - RNA, 19 nt, Artificial Sequence
  Description of Artificial Sequence: Synthetic oligonucleotide
  Antisense Strand to SEQ ID NO: 427123
auuccgcggcacaaagaga

SEQ ID NO: 427125 - RNA, 19 nt, Artificial Sequence
  Description of Artificial Sequence: Synthetic oligonucleotide
  Sense strand starting at position 2175 of SEQ ID NO: 316617
cggaauucugaugacagca

SEQ ID NO: 427126 - RNA, 19 nt, Artificial Sequence
  Description of Artificial Sequence: Synthetic oligonucleotide
  Antisense Strand to SEQ ID NO: 427125
ugcugucaucagaauuccg

SEQ ID NO: 427127 - RNA, 19 nt, Artificial Sequence
  Description of Artificial Sequence: Synthetic oligonucleotide
  Sense strand starting at position 2744 of SEQ ID NO: 316617
uuucuuaggcaagaucuca

SEQ ID NO: 427128 - RNA, 19 nt, Artificial Sequence
  Description of Artificial Sequence: Synthetic oligonucleotide
  Antisense Strand to SEQ ID NO: 427127
ugagaucuugccuaagaaa

SEQ ID NO: 427129 - RNA, 19 nt, Artificial Sequence
  Description of Artificial Sequence: Synthetic oligonucleotide
  Sense strand starting at position 2776 of SEQ ID NO: 316617
gcuggaguuaaauaggcau

SEQ ID NO: 427130 - RNA, 19 nt, Artificial Sequence
  Description of Artificial Sequence: Synthetic oligonucleotide
  Antisense Strand to SEQ ID NO: 427129
augccuauuuaacuccagc

SEQ ID NO: 427131 - RNA, 19 nt, Artificial Sequence
  Description of Artificial Sequence: Synthetic oligonucleotide
  Sense strand starting at position 2991 of SEQ ID NO: 316617
gaauuugucuugcuguuaa

SEQ ID NO: 427132 - RNA, 19 nt, Artificial Sequence
  Description of Artificial Sequence: Synthetic oligonucleotide
  Antisense Strand to SEQ ID NO: 427131
uuaacagcaagacaaauuc

SEQ ID NO: 427133 - RNA, 19 nt, Artificial Sequence
  Description of Artificial Sequence: Synthetic oligonucleotide
  Sense strand starting at position 2994 of SEQ ID NO: 316617
uuugucuugcuguuaaguu

SEQ ID NO: 427134 - RNA, 19 nt, Artificial Sequence
  Description of Artificial Sequence: Synthetic oligonucleotide
  Antisense Strand to SEQ ID NO: 427133
aacuuaacagcaagacaaa

SEQ ID NO: 427135 - RNA, 19 nt, Artificial Sequence
  Description of Artificial Sequence: Synthetic oligonucleotide
  Sense strand starting at position 3026 of SEQ ID NO: 316617
agucacuauccugauuauu

SEQ ID NO: 427136 - RNA, 19 nt, Artificial Sequence
  Description of Artificial Sequence: Synthetic oligonucleotide
  Antisense Strand to SEQ ID NO: 427135
aauaaucaggauagugacu

SEQ ID NO: 427137 - RNA, 19 nt, Artificial Sequence
  Description of Artificial Sequence: Synthetic oligonucleotide
  Sense strand starting at position 3047 of SEQ ID NO: 316617
cuguguugugcaguaccua

SEQ ID NO: 427138 - RNA, 19 nt, Artificial Sequence
  Description of Artificial Sequence: Synthetic oligonucleotide
  Antisense Strand to SEQ ID NO: 427137
uagguacugcacaacacag

SEQ ID NO: 427139 - RNA, 19 nt, Artificial Sequence
  Description of Artificial Sequence: Synthetic oligonucleotide
  Sense strand starting at position 3323 of SEQ ID NO: 316617
caauaacuccgucagggau

SEQ ID NO: 427140 - RNA, 19 nt, Artificial Sequence
  Description of Artificial Sequence: Synthetic oligonucleotide
  Antisense Strand to SEQ ID NO: 427139
aucccugacggaguuauug

SEQ ID NO: 427141 - RNA, 19 nt, Artificial Sequence
  Description of Artificial Sequence: Synthetic oligonucleotide
  Sense strand starting at position 3445 of SEQ ID NO: 316617
ugguaaucucaucagggua

SEQ ID NO: 427142 - RNA, 19 nt, Artificial Sequence
  Description of Artificial Sequence: Synthetic oligonucleotide
  Antisense Strand to SEQ ID NO: 427141
uacccugaugagauuacca

SEQ ID NO: 427143 - RNA, 19 nt, Artificial Sequence
  Description of Artificial Sequence: Synthetic oligonucleotide
  Sense strand starting at position 3758 of SEQ ID NO: 316617
ucacauugucgugcuagca

SEQ ID NO: 427144 - RNA, 19 nt, Artificial Sequence
  Description of Artificial Sequence: Synthetic oligonucleotide
  Antisense Strand to SEQ ID NO: 427143
ugcuagcacgacaauguga

SEQ ID NO: 427145 - RNA, 19 nt, Artificial Sequence
  Description of Artificial Sequence: Synthetic oligonucleotide
  Sense strand starting at position 3759 of SEQ ID NO: 316617
cacauugucgugcuagcaa

SEQ ID NO: 427146 - RNA, 19 nt, Artificial Sequence
  Description of Artificial Sequence: Synthetic oligonucleotide
  Antisense Strand to SEQ ID NO: 427145
uugcuagcacgacaaugug

SEQ ID NO: 427147 - RNA, 19 nt, Artificial Sequence
  Description of Artificial Sequence: Synthetic oligonucleotide
  Sense strand starting at position 3773 of SEQ ID NO: 316617
agcaaauacuaggucuuaa

SEQ ID NO: 427148 - RNA, 19 nt, Artificial Sequence
  Description of Artificial Sequence: Synthetic oligonucleotide
  Antisense Strand to SEQ ID NO: 427147
uuaagaccuaguauuugcu

SEQ ID NO: 427149 - RNA, 19 nt, Artificial Sequence
  Description of Artificial Sequence: Synthetic oligonucleotide
  Sense strand starting at position 273 of SEQ ID NO: 316618
augacauacugagauggaa

SEQ ID NO: 427150 - RNA, 19 nt, Artificial Sequence
  Description of Artificial Sequence: Synthetic oligonucleotide
  Antisense Strand to SEQ ID NO: 427149
uuccaucucaguaugucau

SEQ ID NO: 427151 - RNA, 19 nt, Artificial Sequence
  Description of Artificial Sequence: Synthetic oligonucleotide
  Sense strand starting at position 292 of SEQ ID NO: 316618
acuuuacuucugugacauu

SEQ ID NO: 427152 - RNA, 19 nt, Artificial Sequence
  Description of Artificial Sequence: Synthetic oligonucleotide
  Antisense Strand to SEQ ID NO: 427151
aaugucacagaaguaaagu

SEQ ID NO: 427153 - RNA, 19 nt, Artificial Sequence
  Description of Artificial Sequence: Synthetic oligonucleotide
  Sense strand starting at position 293 of SEQ ID NO: 316618
cuuuacuucugugacauuu

SEQ ID NO: 427154 - RNA, 19 nt, Artificial Sequence
  Description of Artificial Sequence: Synthetic oligonucleotide
  Antisense Strand to SEQ ID NO: 427153
aaaugucacagaaguaaag

SEQ ID NO: 427155 - RNA, 19 nt, Artificial Sequence
  Description of Artificial Sequence: Synthetic oligonucleotide
  Sense strand starting at position 413 of SEQ ID NO: 316618
agugucaagguccaugaaa

SEQ ID NO: 427156 - RNA, 19 nt, Artificial Sequence
  Description of Artificial Sequence: Synthetic oligonucleotide
  Antisense Strand to SEQ ID NO: 427155
uuucauggaccuugacacu

SEQ ID NO: 427157 - RNA, 19 nt, Artificial Sequence
  Description of Artificial Sequence: Synthetic oligonucleotide
  Sense strand starting at position 475 of SEQ ID NO: 316618
aaggauauuuagcaguuaa

SEQ ID NO: 427158 - RNA, 19 nt, Artificial Sequence
  Description of Artificial Sequence: Synthetic oligonucleotide
  Antisense Strand to SEQ ID NO: 427157
uuaacugcuaaauauccuu

SEQ ID NO: 427159 - RNA, 19 nt, Artificial Sequence
  Description of Artificial Sequence: Synthetic oligonucleotide
  Sense strand starting at position 513 of SEQ ID NO: 316618
auuggauccugggcagaaa

SEQ ID NO: 427160 - RNA, 19 nt, Artificial Sequence
  Description of Artificial Sequence: Synthetic oligonucleotide
  Antisense Strand to SEQ ID NO: 427159
uuucugcccaggauccaau

SEQ ID NO: 427161 - RNA, 19 nt, Artificial Sequence
  Description of Artificial Sequence: Synthetic oligonucleotide
  Sense strand starting at position 622 of SEQ ID NO: 316618
ccuuguuaugcaugauauu

SEQ ID NO: 427162 - RNA, 19 nt, Artificial Sequence
  Description of Artificial Sequence: Synthetic oligonucleotide
  Antisense Strand to SEQ ID NO: 427161
aauaucaugcauaacaagg

SEQ ID NO: 427163 - RNA, 19 nt, Artificial Sequence
  Description of Artificial Sequence: Synthetic oligonucleotide
  Sense strand starting at position 623 of SEQ ID NO: 316618
cuuguuaugcaugauauua

SEQ ID NO: 427164 - RNA, 19 nt, Artificial Sequence
  Description of Artificial Sequence: Synthetic oligonucleotide
  Antisense Strand to SEQ ID NO: 427163
uaauaucaugcauaacaag

SEQ ID NO: 427165 - RNA, 19 nt, Artificial Sequence
  Description of Artificial Sequence: Synthetic oligonucleotide
  Sense strand starting at position 783 of SEQ ID NO: 316618
ccaucuuugucguugaaac

SEQ ID NO: 427166 - RNA, 19 nt, Artificial Sequence
  Description of Artificial Sequence: Synthetic oligonucleotide
  Antisense Strand to SEQ ID NO: 427165
guuucaacgacaaagaugg

SEQ ID NO: 427167 - RNA, 19 nt, Artificial Sequence
  Description of Artificial Sequence: Synthetic oligonucleotide
  Sense strand starting at position 784 of SEQ ID NO: 316618
caucuuugucguugaaacc

SEQ ID NO: 427168 - RNA, 19 nt, Artificial Sequence
  Description of Artificial Sequence: Synthetic oligonucleotide
  Antisense Strand to SEQ ID NO: 427167
gguuucaacgacaaagaug

SEQ ID NO: 427169 - RNA, 19 nt, Artificial Sequence
  Description of Artificial Sequence: Synthetic oligonucleotide
  Sense strand starting at position 785 of SEQ ID NO: 316618
aucuuugucguugaaaccu

SEQ ID NO: 427170 - RNA, 19 nt, Artificial Sequence
  Description of Artificial Sequence: Synthetic oligonucleotide
  Antisense Strand to SEQ ID NO: 427169
agguuucaacgacaaagau

SEQ ID NO: 427171 - RNA, 19 nt, Artificial Sequence
  Description of Artificial Sequence: Synthetic oligonucleotide
  Sense strand starting at position 898 of SEQ ID NO: 316618
uccuuacuacucuggugua

SEQ ID NO: 427172 - RNA, 19 nt, Artificial Sequence
  Description of Artificial Sequence: Synthetic oligonucleotide
  Antisense Strand to SEQ ID NO: 427171
uacaccagaguaguaagga

SEQ ID NO: 427173 - RNA, 19 nt, Artificial Sequence
  Description of Artificial Sequence: Synthetic oligonucleotide
  Sense strand starting at position 944 of SEQ ID NO: 316618
ugauaagagagcuguaaga

SEQ ID NO: 427174 - RNA, 19 nt, Artificial Sequence
  Description of Artificial Sequence: Synthetic oligonucleotide
  Antisense Strand to SEQ ID NO: 427173
ucuuacagcucucuuauca

SEQ ID NO: 427175 - RNA, 19 nt, Artificial Sequence
  Description of Artificial Sequence: Synthetic oligonucleotide
  Sense strand starting at position 987 of SEQ ID NO: 316618
ggauaucucuaggacugag

SEQ ID NO: 427176 - RNA, 19 nt, Artificial Sequence
  Description of Artificial Sequence: Synthetic oligonucleotide
  Antisense Strand to SEQ ID NO: 427175
cucaguccuagagauaucc

SEQ ID NO: 427177 - RNA, 19 nt, Artificial Sequence
  Description of Artificial Sequence: Synthetic oligonucleotide
  Sense strand starting at position 1198 of SEQ ID NO: 316618
auaguaacuucugugcuca

SEQ ID NO: 427178 - RNA, 19 nt, Artificial Sequence
  Description of Artificial Sequence: Synthetic oligonucleotide
  Antisense Strand to SEQ ID NO: 427177
ugagcacagaaguuacuau

SEQ ID NO: 427179 - RNA, 19 nt, Artificial Sequence
  Description of Artificial Sequence: Synthetic oligonucleotide
  Sense strand starting at position 1416 of SEQ ID NO: 316618
cucagucgucucguuugaa

SEQ ID NO: 427180 - RNA, 19 nt, Artificial Sequence
  Description of Artificial Sequence: Synthetic oligonucleotide
  Antisense Strand to SEQ ID NO: 427179
uucaaacgagacgacugag

SEQ ID NO: 427181 - RNA, 19 nt, Artificial Sequence
  Description of Artificial Sequence: Synthetic oligonucleotide
  Sense strand starting at position 1422 of SEQ ID NO: 316618
cgucucguuugaacgguua

SEQ ID NO: 427182 - RNA, 19 nt, Artificial Sequence
  Description of Artificial Sequence: Synthetic oligonucleotide
  Antisense Strand to SEQ ID NO: 427181
uaaccguucaaacgagacg

SEQ ID NO: 427183 - RNA, 19 nt, Artificial Sequence
  Description of Artificial Sequence: Synthetic oligonucleotide
  Sense strand starting at position 1532 of SEQ ID NO: 316618
uuaauagagcucggucuua

SEQ ID NO: 427184 - RNA, 19 nt, Artificial Sequence
  Description of Artificial Sequence: Synthetic oligonucleotide
  Antisense Strand to SEQ ID NO: 427183
uaagaccgagcucuauuaa

SEQ ID NO: 427185 - RNA, 19 nt, Artificial Sequence
  Description of Artificial Sequence: Synthetic oligonucleotide
  Sense strand starting at position 1586 of SEQ ID NO: 316618
gaggcagcgcuuuaacaau

SEQ ID NO: 427186 - RNA, 19 nt, Artificial Sequence
  Description of Artificial Sequence: Synthetic oligonucleotide
  Antisense Strand to SEQ ID NO: 427185
auuguuaaagcgcugccuc

SEQ ID NO: 427187 - RNA, 19 nt, Artificial Sequence
  Description of Artificial Sequence: Synthetic oligonucleotide
  Sense strand starting at position 1609 of SEQ ID NO: 316618
gauguaaauguugggauga

SEQ ID NO: 427188 - RNA, 19 nt, Artificial Sequence
  Description of Artificial Sequence: Synthetic oligonucleotide
  Antisense Strand to SEQ ID NO: 427187
ucaucccaacauuuacauc

SEQ ID NO: 427189 - RNA, 19 nt, Artificial Sequence
  Description of Artificial Sequence: Synthetic oligonucleotide
  Sense strand starting at position 1752 of SEQ ID NO: 316618
ucucaaucucagugggagu

SEQ ID NO: 427190 - RNA, 19 nt, Artificial Sequence
  Description of Artificial Sequence: Synthetic oligonucleotide
  Antisense Strand to SEQ ID NO: 427189
acucccacugagauugaga

SEQ ID NO: 427191 - RNA, 19 nt, Artificial Sequence
  Description of Artificial Sequence: Synthetic oligonucleotide
  Sense strand starting at position 2298 of SEQ ID NO: 316618
agugauuaacuacgagaau

SEQ ID NO: 427192 - RNA, 19 nt, Artificial Sequence
  Description of Artificial Sequence: Synthetic oligonucleotide
  Antisense Strand to SEQ ID NO: 427191
auucucguaguuaaucacu

SEQ ID NO: 427193 - RNA, 19 nt, Artificial Sequence
  Description of Artificial Sequence: Synthetic oligonucleotide
  Sense strand starting at position 2325 of SEQ ID NO: 316618
gcucauugggcugaucagu

SEQ ID NO: 427194 - RNA, 19 nt, Artificial Sequence
  Description of Artificial Sequence: Synthetic oligonucleotide
  Antisense Strand to SEQ ID NO: 427193
acugaucagcccaaugagc

SEQ ID NO: 427195 - RNA, 19 nt, Artificial Sequence
  Description of Artificial Sequence: Synthetic oligonucleotide
  Sense strand starting at position 2336 of SEQ ID NO: 316618
ugaucaguaccucgucuga

SEQ ID NO: 427196 - RNA, 19 nt, Artificial Sequence
  Description of Artificial Sequence: Synthetic oligonucleotide
  Antisense Strand to SEQ ID NO: 427195
ucagacgagguacugauca

SEQ ID NO: 427197 - RNA, 19 nt, Artificial Sequence
  Description of Artificial Sequence: Synthetic oligonucleotide
  Sense strand starting at position 2452 of SEQ ID NO: 316618
gcaaguuaaaugggugguu

SEQ ID NO: 427198 - RNA, 19 nt, Artificial Sequence
  Description of Artificial Sequence: Synthetic oligonucleotide
  Antisense Strand to SEQ ID NO: 427197
aaccacccauuuaacuugc

SEQ ID NO: 427199 - RNA, 19 nt, Artificial Sequence
  Description of Artificial Sequence: Synthetic oligonucleotide
  Sense strand starting at position 2468 of SEQ ID NO: 316618
guuucuggugaaugggauu

SEQ ID NO: 427200 - RNA, 19 nt, Artificial Sequence
  Description of Artificial Sequence: Synthetic oligonucleotide
  Antisense Strand to SEQ ID NO: 427199
aaucccauucaccagaaac

SEQ ID NO: 427201 - RNA, 19 nt, Artificial Sequence
  Description of Artificial Sequence: Synthetic oligonucleotide
  Sense strand starting at position 2606 of SEQ ID NO: 316618
uuuacacuccugugacuga

SEQ ID NO: 427202 - RNA, 19 nt, Artificial Sequence
  Description of Artificial Sequence: Synthetic oligonucleotide
  Antisense Strand to SEQ ID NO: 427201
ucagucacaggaguguaaa

SEQ ID NO: 427203 - RNA, 19 nt, Artificial Sequence
  Description of Artificial Sequence: Synthetic oligonucleotide
  Sense strand starting at position 2622 of SEQ ID NO: 316618
ugacauacuucugugcaau

SEQ ID NO: 427204 - RNA, 19 nt, Artificial Sequence
  Description of Artificial Sequence: Synthetic oligonucleotide
  Antisense Strand to SEQ ID NO: 427203
auugcacagaaguauguca

SEQ ID NO: 427205 - RNA, 19 nt, Artificial Sequence
  Description of Artificial Sequence: Synthetic oligonucleotide
  Sense strand starting at position 2735 of SEQ ID NO: 316618
cugcaucuacccuaggaaa

SEQ ID NO: 427206 - RNA, 19 nt, Artificial Sequence
  Description of Artificial Sequence: Synthetic oligonucleotide
  Antisense Strand to SEQ ID NO: 427205
uuuccuaggguagaugcag

SEQ ID NO: 427207 - RNA, 19 nt, Artificial Sequence
  Description of Artificial Sequence: Synthetic oligonucleotide
  Sense strand starting at position 2737 of SEQ ID NO: 316618
gcaucuacccuaggaaauu

SEQ ID NO: 427208 - RNA, 19 nt, Artificial Sequence
  Description of Artificial Sequence: Synthetic oligonucleotide
  Antisense Strand to SEQ ID NO: 427207
aauuuccuaggguagaugc

SEQ ID NO: 427209 - RNA, 19 nt, Artificial Sequence
  Description of Artificial Sequence: Synthetic oligonucleotide
  Sense strand starting at position 2749 of SEQ ID NO: 316618
ggaaauuaguaccugcaug

SEQ ID NO: 427210 - RNA, 19 nt, Artificial Sequence
  Description of Artificial Sequence: Synthetic oligonucleotide
  Antisense Strand to SEQ ID NO: 427209
caugcagguacuaauuucc

SEQ ID NO: 427211 - RNA, 19 nt, Artificial Sequence
  Description of Artificial Sequence: Synthetic oligonucleotide
  Sense strand starting at position 2980 of SEQ ID NO: 316618
ucaugaugcgcccaaacau

SEQ ID NO: 427212 - RNA, 19 nt, Artificial Sequence
  Description of Artificial Sequence: Synthetic oligonucleotide
  Antisense Strand to SEQ ID NO: 427211
auguuugggcgcaucauga

SEQ ID NO: 427213 - RNA, 19 nt, Artificial Sequence
  Description of Artificial Sequence: Synthetic oligonucleotide
  Sense strand starting at position 3423 of SEQ ID NO: 316618
ccguuaacgacuguuugca

SEQ ID NO: 427214 - RNA, 19 nt, Artificial Sequence
  Description of Artificial Sequence: Synthetic oligonucleotide
  Antisense Strand to SEQ ID NO: 427213
ugcaaacagucguuaacgg

SEQ ID NO: 427215 - RNA, 19 nt, Artificial Sequence
  Description of Artificial Sequence: Synthetic oligonucleotide
  Sense strand starting at position 3425 of SEQ ID NO: 316618
guuaacgacuguuugcaaa

SEQ ID NO: 427216 - RNA, 19 nt, Artificial Sequence
  Description of Artificial Sequence: Synthetic oligonucleotide
  Antisense Strand to SEQ ID NO: 427215
uuugcaaacagucguuaac

SEQ ID NO: 427217 - RNA, 19 nt, Artificial Sequence
  Description of Artificial Sequence: Synthetic oligonucleotide
  Sense strand starting at position 3488 of SEQ ID NO: 316618
uuagcucacccagauaagu

SEQ ID NO: 427218 - RNA, 19 nt, Artificial Sequence
  Description of Artificial Sequence: Synthetic oligonucleotide
  Antisense Strand to SEQ ID NO: 427217
acuuaucugggugagcuaa

SEQ ID NO: 427219 - RNA, 19 nt, Artificial Sequence
  Description of Artificial Sequence: Synthetic oligonucleotide
  Sense strand starting at position 3554 of SEQ ID NO: 316618
gcaagaucugaaggcacua

SEQ ID NO: 427220 - RNA, 19 nt, Artificial Sequence
  Description of Artificial Sequence: Synthetic oligonucleotide
  Antisense Strand to SEQ ID NO: 427219
uagugccuucagaucuugc

SEQ ID NO: 427221 - RNA, 19 nt, Artificial Sequence
  Description of Artificial Sequence: Synthetic oligonucleotide
  Sense strand starting at position 3606 of SEQ ID NO: 316618
acacgaaacugauaugaag

SEQ ID NO: 427222 - RNA, 19 nt, Artificial Sequence
  Description of Artificial Sequence: Synthetic oligonucleotide
  Antisense Strand to SEQ ID NO: 427221
cuucauaucaguuucgugu

SEQ ID NO: 427223 - RNA, 19 nt, Artificial Sequence
  Description of Artificial Sequence: Synthetic oligonucleotide
  Sense strand starting at position 3637 of SEQ ID NO: 316618
aauggauacuuaguugaau

SEQ ID NO: 427224 - RNA, 19 nt, Artificial Sequence
  Description of Artificial Sequence: Synthetic oligonucleotide
  Antisense Strand to SEQ ID NO: 427223
auucaacuaaguauccauu

SEQ ID NO: 427225 - RNA, 19 nt, Artificial Sequence
  Description of Artificial Sequence: Synthetic oligonucleotide
  Sense strand starting at position 3638 of SEQ ID NO: 316618
auggauacuuaguugaaua

SEQ ID NO: 427226 - RNA, 19 nt, Artificial Sequence
  Description of Artificial Sequence: Synthetic oligonucleotide
  Antisense Strand to SEQ ID NO: 427225
uauucaacuaaguauccau

SEQ ID NO: 427227 - RNA, 19 nt, Artificial Sequence
  Description of Artificial Sequence: Synthetic oligonucleotide
  Sense strand starting at position 3658 of SEQ ID NO: 316618
agcauucuguaauuaugca

SEQ ID NO: 427228 - RNA, 19 nt, Artificial Sequence
  Description of Artificial Sequence: Synthetic oligonucleotide
  Antisense Strand to SEQ ID NO: 427227
ugcauaauuacagaaugcu

SEQ ID NO: 427229 - RNA, 19 nt, Artificial Sequence
  Description of Artificial Sequence: Synthetic oligonucleotide
  Sense strand starting at position 127 of SEQ ID NO: 316619
auugauucagagggucuga

SEQ ID NO: 427230 - RNA, 19 nt, Artificial Sequence
  Description of Artificial Sequence: Synthetic oligonucleotide
  Antisense Strand to SEQ ID NO: 427229
ucagacccucugaaucaau

SEQ ID NO: 427231 - RNA, 19 nt, Artificial Sequence
  Description of Artificial Sequence: Synthetic oligonucleotide
  Sense strand starting at position 410 of SEQ ID NO: 316619
gaggcucucccugaugaca

SEQ ID NO: 427232 - RNA, 19 nt, Artificial Sequence
  Description of Artificial Sequence: Synthetic oligonucleotide
  Antisense Strand to SEQ ID NO: 427231
ugucaucagggagagccuc

SEQ ID NO: 427233 - RNA, 19 nt, Artificial Sequence
  Description of Artificial Sequence: Synthetic oligonucleotide
  Sense strand starting at position 513 of SEQ ID NO: 316619
gauaaaugugucuggaggu

SEQ ID NO: 427234 - RNA, 19 nt, Artificial Sequence
  Description of Artificial Sequence: Synthetic oligonucleotide
  Antisense Strand to SEQ ID NO: 427233
accuccagacacauuuauc

SEQ ID NO: 427235 - RNA, 19 nt, Artificial Sequence
  Description of Artificial Sequence: Synthetic oligonucleotide
  Sense strand starting at position 514 of SEQ ID NO: 316619
auaaaugugucuggagguu

SEQ ID NO: 427236 - RNA, 19 nt, Artificial Sequence
  Description of Artificial Sequence: Synthetic oligonucleotide
  Antisense Strand to SEQ ID NO: 427235
aaccuccagacacauuuau

SEQ ID NO: 427237 - RNA, 19 nt, Artificial Sequence
  Description of Artificial Sequence: Synthetic oligonucleotide
  Sense strand starting at position 779 of SEQ ID NO: 316619
acaggaagcucuuacuaaa

SEQ ID NO: 427238 - RNA, 19 nt, Artificial Sequence
  Description of Artificial Sequence: Synthetic oligonucleotide
  Antisense Strand to SEQ ID NO: 427237
uuuaguaagagcuuccugu

SEQ ID NO: 427239 - RNA, 19 nt, Artificial Sequence
  Description of Artificial Sequence: Synthetic oligonucleotide
  Sense strand starting at position 782 of SEQ ID NO: 316619
ggaagcucuuacuaaauuc

SEQ ID NO: 427240 - RNA, 19 nt, Artificial Sequence
  Description of Artificial Sequence: Synthetic oligonucleotide
  Antisense Strand to SEQ ID NO: 427239
gaauuuaguaagagcuucc

SEQ ID NO: 427241 - RNA, 19 nt, Artificial Sequence
  Description of Artificial Sequence: Synthetic oligonucleotide
  Sense strand starting at position 2148 of SEQ ID NO: 316619
gggcgaucggacuacaagu

SEQ ID NO: 427242 - RNA, 19 nt, Artificial Sequence
  Description of Artificial Sequence: Synthetic oligonucleotide
  Antisense Strand to SEQ ID NO: 427241
acuuguaguccgaucgccc

SEQ ID NO: 427243 - RNA, 19 nt, Artificial Sequence
  Description of Artificial Sequence: Synthetic oligonucleotide
  Sense strand starting at position 2223 of SEQ ID NO: 316619
ucgcaaucguucuuagauc

SEQ ID NO: 427244 - RNA, 19 nt, Artificial Sequence
  Description of Artificial Sequence: Synthetic oligonucleotide
  Antisense Strand to SEQ ID NO: 427243
gaucuaagaacgauugcga

SEQ ID NO: 427245 - RNA, 19 nt, Artificial Sequence
  Description of Artificial Sequence: Synthetic oligonucleotide
  Sense strand starting at position 2224 of SEQ ID NO: 316619
cgcaaucguucuuagaucu

SEQ ID NO: 427246 - RNA, 19 nt, Artificial Sequence
  Description of Artificial Sequence: Synthetic oligonucleotide
  Antisense Strand to SEQ ID NO: 427245
agaucuaagaacgauugcg

SEQ ID NO: 427247 - RNA, 19 nt, Artificial Sequence
  Description of Artificial Sequence: Synthetic oligonucleotide
  Sense strand starting at position 2231 of SEQ ID NO: 316619
guucuuagaucucugcaga

SEQ ID NO: 427248 - RNA, 19 nt, Artificial Sequence
  Description of Artificial Sequence: Synthetic oligonucleotide
  Antisense Strand to SEQ ID NO: 427247
ucugcagagaucuaagaac

SEQ ID NO: 427249 - RNA, 19 nt, Artificial Sequence
  Description of Artificial Sequence: Synthetic oligonucleotide
  Sense strand starting at position 2232 of SEQ ID NO: 316619
uucuuagaucucugcagag

SEQ ID NO: 427250 - RNA, 19 nt, Artificial Sequence
  Description of Artificial Sequence: Synthetic oligonucleotide
  Antisense Strand to SEQ ID NO: 427249
cucugcagagaucuaagaa

SEQ ID NO: 427251 - RNA, 19 nt, Artificial Sequence
  Description of Artificial Sequence: Synthetic oligonucleotide
  Sense strand starting at position 2234 of SEQ ID NO: 316619
cuuagaucucugcagagcu

SEQ ID NO: 427252 - RNA, 19 nt, Artificial Sequence
  Description of Artificial Sequence: Synthetic oligonucleotide
  Antisense Strand to SEQ ID NO: 427251
agcucugcagagaucuaag

SEQ ID NO: 427253 - RNA, 19 nt, Artificial Sequence
  Description of Artificial Sequence: Synthetic oligonucleotide
  Sense strand starting at position 2343 of SEQ ID NO: 316619
gcagcucuucuugaguagu

SEQ ID NO: 427254 - RNA, 19 nt, Artificial Sequence
  Description of Artificial Sequence: Synthetic oligonucleotide
  Antisense Strand to SEQ ID NO: 427253
acuacucaagaagagcugc

SEQ ID NO: 427255 - RNA, 19 nt, Artificial Sequence
  Description of Artificial Sequence: Synthetic oligonucleotide
  Sense strand starting at position 2346 of SEQ ID NO: 316619
gcucuucuugaguagucga

SEQ ID NO: 427256 - RNA, 19 nt, Artificial Sequence
  Description of Artificial Sequence: Synthetic oligonucleotide
  Antisense Strand to SEQ ID NO: 427255
ucgacuacucaagaagagc

SEQ ID NO: 427257 - RNA, 19 nt, Artificial Sequence
  Description of Artificial Sequence: Synthetic oligonucleotide
  Sense strand starting at position 2490 of SEQ ID NO: 316619
gggauucgugcgcagguuu

SEQ ID NO: 427258 - RNA, 19 nt, Artificial Sequence
  Description of Artificial Sequence: Synthetic oligonucleotide
  Antisense Strand to SEQ ID NO: 427257
aaaccugcgcacgaauccc

SEQ ID NO: 427259 - RNA, 19 nt, Artificial Sequence
  Description of Artificial Sequence: Synthetic oligonucleotide
  Sense strand starting at position 3189 of SEQ ID NO: 316619
gggaucuugugccauguaa

SEQ ID NO: 427260 - RNA, 19 nt, Artificial Sequence
  Description of Artificial Sequence: Synthetic oligonucleotide
  Antisense Strand to SEQ ID NO: 427259
uuacauggcacaagauccc

SEQ ID NO: 427261 - RNA, 19 nt, Artificial Sequence
  Description of Artificial Sequence: Synthetic oligonucleotide
  Sense strand starting at position 3191 of SEQ ID NO: 316619
gaucuugugccauguaauu

SEQ ID NO: 427262 - RNA, 19 nt, Artificial Sequence
  Description of Artificial Sequence: Synthetic oligonucleotide
  Antisense Strand to SEQ ID NO: 427261
aauuacauggcacaagauc

SEQ ID NO: 427263 - RNA, 19 nt, Artificial Sequence
  Description of Artificial Sequence: Synthetic oligonucleotide
  Sense strand starting at position 3218 of SEQ ID NO: 316619
gccagaucuaaggaucagu

SEQ ID NO: 427264 - RNA, 19 nt, Artificial Sequence
  Description of Artificial Sequence: Synthetic oligonucleotide
  Antisense Strand to SEQ ID NO: 427263
acugauccuuagaucuggc

SEQ ID NO: 427265 - RNA, 19 nt, Artificial Sequence
  Description of Artificial Sequence: Synthetic oligonucleotide
  Sense strand starting at position 3223 of SEQ ID NO: 316619
aucuaaggaucagugaacu

SEQ ID NO: 427266 - RNA, 19 nt, Artificial Sequence
  Description of Artificial Sequence: Synthetic oligonucleotide
  Antisense Strand to SEQ ID NO: 427265
aguucacugauccuuagau

SEQ ID NO: 427267 - RNA, 19 nt, Artificial Sequence
  Description of Artificial Sequence: Synthetic oligonucleotide
  Sense strand starting at position 3237 of SEQ ID NO: 316619
gaacuaaugugugccauga

SEQ ID NO: 427268 - RNA, 19 nt, Artificial Sequence
  Description of Artificial Sequence: Synthetic oligonucleotide
  Antisense Strand to SEQ ID NO: 427267
ucauggcacacauuaguuc

SEQ ID NO: 427269 - RNA, 19 nt, Artificial Sequence
  Description of Artificial Sequence: Synthetic oligonucleotide
  Sense strand starting at position 3241 of SEQ ID NO: 316619
uaaugugugccaugaccca

SEQ ID NO: 427270 - RNA, 19 nt, Artificial Sequence
  Description of Artificial Sequence: Synthetic oligonucleotide
  Antisense Strand to SEQ ID NO: 427269
ugggucauggcacacauua

SEQ ID NO: 427271 - RNA, 19 nt, Artificial Sequence
  Description of Artificial Sequence: Synthetic oligonucleotide
  Sense strand starting at position 3254 of SEQ ID NO: 316619
gacccagugugaguugaga

SEQ ID NO: 427272 - RNA, 19 nt, Artificial Sequence
  Description of Artificial Sequence: Synthetic oligonucleotide
  Antisense Strand to SEQ ID NO: 427271
ucucaacucacacuggguc

SEQ ID NO: 427273 - RNA, 19 nt, Artificial Sequence
  Description of Artificial Sequence: Synthetic oligonucleotide
  Sense strand starting at position 3256 of SEQ ID NO: 316619
cccagugugaguugagauc

SEQ ID NO: 427274 - RNA, 19 nt, Artificial Sequence
  Description of Artificial Sequence: Synthetic oligonucleotide
  Antisense Strand to SEQ ID NO: 427273
gaucucaacucacacuggg

SEQ ID NO: 427275 - RNA, 19 nt, Artificial Sequence
  Description of Artificial Sequence: Synthetic oligonucleotide
  Sense strand starting at position 3280 of SEQ ID NO: 316619
augucuuugcuuugcuauu

SEQ ID NO: 427276 - RNA, 19 nt, Artificial Sequence
  Description of Artificial Sequence: Synthetic oligonucleotide
  Antisense Strand to SEQ ID NO: 427275
aauagcaaagcaaagacau

SEQ ID NO: 427277 - RNA, 19 nt, Artificial Sequence
  Description of Artificial Sequence: Synthetic oligonucleotide
  Sense strand starting at position 3281 of SEQ ID NO: 316619
ugucuuugcuuugcuauua

SEQ ID NO: 427278 - RNA, 19 nt, Artificial Sequence
  Description of Artificial Sequence: Synthetic oligonucleotide
  Antisense Strand to SEQ ID NO: 427277
uaauagcaaagcaaagaca

SEQ ID NO: 427279 - RNA, 19 nt, Artificial Sequence
  Description of Artificial Sequence: Synthetic oligonucleotide
  Sense strand starting at position 3282 of SEQ ID NO: 316619
gucuuugcuuugcuauuau

SEQ ID NO: 427280 - RNA, 19 nt, Artificial Sequence
  Description of Artificial Sequence: Synthetic oligonucleotide
  Antisense Strand to SEQ ID NO: 427279
auaauagcaaagcaaagac

SEQ ID NO: 427281 - RNA, 19 nt, Artificial Sequence
  Description of Artificial Sequence: Synthetic oligonucleotide
  Sense strand starting at position 3297 of SEQ ID NO: 316619
uuauuauucucuguggcua

SEQ ID NO: 427282 - RNA, 19 nt, Artificial Sequence
  Description of Artificial Sequence: Synthetic oligonucleotide
  Antisense Strand to SEQ ID NO: 427281
uagccacagagaauaauaa

SEQ ID NO: 427283 - RNA, 19 nt, Artificial Sequence
  Description of Artificial Sequence: Synthetic oligonucleotide
  Sense strand starting at position 3302 of SEQ ID NO: 316619
auucucuguggcuaacaua

SEQ ID NO: 427284 - RNA, 19 nt, Artificial Sequence
  Description of Artificial Sequence: Synthetic oligonucleotide
  Antisense Strand to SEQ ID NO: 427283
uauguuagccacagagaau

SEQ ID NO: 427285 - RNA, 19 nt, Artificial Sequence
  Description of Artificial Sequence: Synthetic oligonucleotide
  Sense strand starting at position 3335 of SEQ ID NO: 316619
gcaggcagucugcaaauau

SEQ ID NO: 427286 - RNA, 19 nt, Artificial Sequence
  Description of Artificial Sequence: Synthetic oligonucleotide
  Antisense Strand to SEQ ID NO: 427285
auauuugcagacugccugc

SEQ ID NO: 427287 - RNA, 19 nt, Artificial Sequence
  Description of Artificial Sequence: Synthetic oligonucleotide
  Sense strand starting at position 3344 of SEQ ID NO: 316619
cugcaaauaucuguugaau

SEQ ID NO: 427288 - RNA, 19 nt, Artificial Sequence
  Description of Artificial Sequence: Synthetic oligonucleotide
  Antisense Strand to SEQ ID NO: 427287
auucaacagauauuugcag

SEQ ID NO: 427289 - RNA, 19 nt, Artificial Sequence
  Description of Artificial Sequence: Synthetic oligonucleotide
  Sense strand starting at position 3404 of SEQ ID NO: 316619
cuggcacuccuggaucaua

SEQ ID NO: 427290 - RNA, 19 nt, Artificial Sequence
  Description of Artificial Sequence: Synthetic oligonucleotide
  Antisense Strand to SEQ ID NO: 427289
uaugauccaggagugccag

SEQ ID NO: 427291 - RNA, 19 nt, Artificial Sequence
  Description of Artificial Sequence: Synthetic oligonucleotide
  Sense strand starting at position 3412 of SEQ ID NO: 316619
ccuggaucauagccugaga

SEQ ID NO: 427292 - RNA, 19 nt, Artificial Sequence
  Description of Artificial Sequence: Synthetic oligonucleotide
  Antisense Strand to SEQ ID NO: 427291
ucucaggcuaugauccagg

SEQ ID NO: 427293 - RNA, 19 nt, Artificial Sequence
  Description of Artificial Sequence: Synthetic oligonucleotide
  Sense strand starting at position 3415 of SEQ ID NO: 316619
ggaucauagccugagaggu

SEQ ID NO: 427294 - RNA, 19 nt, Artificial Sequence
  Description of Artificial Sequence: Synthetic oligonucleotide
  Antisense Strand to SEQ ID NO: 427293
accucucaggcuaugaucc

SEQ ID NO: 427295 - RNA, 19 nt, Artificial Sequence
  Description of Artificial Sequence: Synthetic oligonucleotide
  Sense strand starting at position 3534 of SEQ ID NO: 316619
uccaaaggcuccugagaac

SEQ ID NO: 427296 - RNA, 19 nt, Artificial Sequence
  Description of Artificial Sequence: Synthetic oligonucleotide
  Antisense Strand to SEQ ID NO: 427295
guucucaggagccuuugga

SEQ ID NO: 427297 - RNA, 19 nt, Artificial Sequence
  Description of Artificial Sequence: Synthetic oligonucleotide
  Sense strand starting at position 3829 of SEQ ID NO: 316619
gggcuugagccaggucuuu

SEQ ID NO: 427298 - RNA, 19 nt, Artificial Sequence
  Description of Artificial Sequence: Synthetic oligonucleotide
  Antisense Strand to SEQ ID NO: 427297
aaagaccuggcucaagccc

SEQ ID NO: 427299 - RNA, 19 nt, Artificial Sequence
  Description of Artificial Sequence: Synthetic oligonucleotide
  Sense strand starting at position 3886 of SEQ ID NO: 316619
cagcgaaucugcugguuga

SEQ ID NO: 427300 - RNA, 19 nt, Artificial Sequence
  Description of Artificial Sequence: Synthetic oligonucleotide
  Antisense Strand to SEQ ID NO: 427299
ucaaccagcagauucgcug

SEQ ID NO: 427301 - RNA, 19 nt, Artificial Sequence
  Description of Artificial Sequence: Synthetic oligonucleotide
  Sense strand starting at position 3887 of SEQ ID NO: 316619
agcgaaucugcugguugaa

SEQ ID NO: 427302 - RNA, 19 nt, Artificial Sequence
  Description of Artificial Sequence: Synthetic oligonucleotide
  Antisense Strand to SEQ ID NO: 427301
uucaaccagcagauucgcu

SEQ ID NO: 427303 - RNA, 19 nt, Artificial Sequence
  Description of Artificial Sequence: Synthetic oligonucleotide
  Sense strand starting at position 3889 of SEQ ID NO: 316619
cgaaucugcugguugaauu

SEQ ID NO: 427304 - RNA, 19 nt, Artificial Sequence
  Description of Artificial Sequence: Synthetic oligonucleotide
  Antisense Strand to SEQ ID NO: 427303
aauucaaccagcagauucg

SEQ ID NO: 427305 - RNA, 19 nt, Artificial Sequence
  Description of Artificial Sequence: Synthetic oligonucleotide
  Sense strand starting at position 3900 of SEQ ID NO: 316619
guugaauugaaucgauuga

SEQ ID NO: 427306 - RNA, 19 nt, Artificial Sequence
  Description of Artificial Sequence: Synthetic oligonucleotide
  Antisense Strand to SEQ ID NO: 427305
ucaaucgauucaauucaac

SEQ ID NO: 427307 - RNA, 19 nt, Artificial Sequence
  Description of Artificial Sequence: Synthetic oligonucleotide
  Sense strand starting at position 30 of SEQ ID NO: 316620
uauguaucuguguaucuga

SEQ ID NO: 427308 - RNA, 19 nt, Artificial Sequence
  Description of Artificial Sequence: Synthetic oligonucleotide
  Antisense Strand to SEQ ID NO: 427307
ucagauacacagauacaua

SEQ ID NO: 427309 - RNA, 19 nt, Artificial Sequence
  Description of Artificial Sequence: Synthetic oligonucleotide
  Sense strand starting at position 45 of SEQ ID NO: 316620
cugagugugucugugucau

SEQ ID NO: 427310 - RNA, 19 nt, Artificial Sequence
  Description of Artificial Sequence: Synthetic oligonucleotide
  Antisense Strand to SEQ ID NO: 427309
augacacagacacacucag

SEQ ID NO: 427311 - RNA, 19 nt, Artificial Sequence
  Description of Artificial Sequence: Synthetic oligonucleotide
  Sense strand starting at position 47 of SEQ ID NO: 316620
gagugugucugugucaucu

SEQ ID NO: 427312 - RNA, 19 nt, Artificial Sequence
  Description of Artificial Sequence: Synthetic oligonucleotide
  Antisense Strand to SEQ ID NO: 427311
agaugacacagacacacuc

SEQ ID NO: 427313 - RNA, 19 nt, Artificial Sequence
  Description of Artificial Sequence: Synthetic oligonucleotide
  Sense strand starting at position 57 of SEQ ID NO: 316620
gugucaucugugucuuucu

SEQ ID NO: 427314 - RNA, 19 nt, Artificial Sequence
  Description of Artificial Sequence: Synthetic oligonucleotide
  Antisense Strand to SEQ ID NO: 427313
agaaagacacagaugacac

SEQ ID NO: 427315 - RNA, 19 nt, Artificial Sequence
  Description of Artificial Sequence: Synthetic oligonucleotide
  Sense strand starting at position 84 of SEQ ID NO: 316620
gugugucugcaugugucua

SEQ ID NO: 427316 - RNA, 19 nt, Artificial Sequence
  Description of Artificial Sequence: Synthetic oligonucleotide
  Antisense Strand to SEQ ID NO: 427315
uagacacaugcagacacac

SEQ ID NO: 427317 - RNA, 19 nt, Artificial Sequence
  Description of Artificial Sequence: Synthetic oligonucleotide
  Sense strand starting at position 88 of SEQ ID NO: 316620
gucugcaugugucuaugua

SEQ ID NO: 427318 - RNA, 19 nt, Artificial Sequence
  Description of Artificial Sequence: Synthetic oligonucleotide
  Antisense Strand to SEQ ID NO: 427317
uacauagacacaugcagac

SEQ ID NO: 427319 - RNA, 19 nt, Artificial Sequence
  Description of Artificial Sequence: Synthetic oligonucleotide
  Sense strand starting at position 89 of SEQ ID NO: 316620
ucugcaugugucuauguau

SEQ ID NO: 427320 - RNA, 19 nt, Artificial Sequence
  Description of Artificial Sequence: Synthetic oligonucleotide
  Antisense Strand to SEQ ID NO: 427319
auacauagacacaugcaga

SEQ ID NO: 427321 - RNA, 19 nt, Artificial Sequence
  Description of Artificial Sequence: Synthetic oligonucleotide
  Sense strand starting at position 96 of SEQ ID NO: 316620
gugucuauguaugucuaca

SEQ ID NO: 427322 - RNA, 19 nt, Artificial Sequence
  Description of Artificial Sequence: Synthetic oligonucleotide
  Antisense Strand to SEQ ID NO: 427321
uguagacauacauagacac

SEQ ID NO: 427323 - RNA, 19 nt, Artificial Sequence
  Description of Artificial Sequence: Synthetic oligonucleotide
  Sense strand starting at position 98 of SEQ ID NO: 316620
gucuauguaugucuacaau

SEQ ID NO: 427324 - RNA, 19 nt, Artificial Sequence
  Description of Artificial Sequence: Synthetic oligonucleotide
  Antisense Strand to SEQ ID NO: 427323
auuguagacauacauagac

SEQ ID NO: 427325 - RNA, 19 nt, Artificial Sequence
  Description of Artificial Sequence: Synthetic oligonucleotide
  Sense strand starting at position 297 of SEQ ID NO: 316620
guaucugcacgugugcaaa

SEQ ID NO: 427326 - RNA, 19 nt, Artificial Sequence
  Description of Artificial Sequence: Synthetic oligonucleotide
  Antisense Strand to SEQ ID NO: 427325
uuugcacacgugcagauac

SEQ ID NO: 427327 - RNA, 19 nt, Artificial Sequence
  Description of Artificial Sequence: Synthetic oligonucleotide
  Sense strand starting at position 332 of SEQ ID NO: 316620
ucuagaugccagcaguagu

SEQ ID NO: 427328 - RNA, 19 nt, Artificial Sequence
  Description of Artificial Sequence: Synthetic oligonucleotide
  Antisense Strand to SEQ ID NO: 427327
acuacugcuggcaucuaga

SEQ ID NO: 427329 - RNA, 19 nt, Artificial Sequence
  Description of Artificial Sequence: Synthetic oligonucleotide
  Sense strand starting at position 433 of SEQ ID NO: 316620
uugagaagucgcuaucacc

SEQ ID NO: 427330 - RNA, 19 nt, Artificial Sequence
  Description of Artificial Sequence: Synthetic oligonucleotide
  Antisense Strand to SEQ ID NO: 427329
ggugauagcgacuucucaa

SEQ ID NO: 427331 - RNA, 19 nt, Artificial Sequence
  Description of Artificial Sequence: Synthetic oligonucleotide
  Sense strand starting at position 469 of SEQ ID NO: 316620
cuguauuuauuuggaaaca

SEQ ID NO: 427332 - RNA, 19 nt, Artificial Sequence
  Description of Artificial Sequence: Synthetic oligonucleotide
  Antisense Strand to SEQ ID NO: 427331
uguuuccaaauaaauacag

SEQ ID NO: 427333 - RNA, 19 nt, Artificial Sequence
  Description of Artificial Sequence: Synthetic oligonucleotide
  Sense strand starting at position 508 of SEQ ID NO: 316620
acgagagucauccgugcuu

SEQ ID NO: 427334 - RNA, 19 nt, Artificial Sequence
  Description of Artificial Sequence: Synthetic oligonucleotide
  Antisense Strand to SEQ ID NO: 427333
aagcacggaugacucucgu

SEQ ID NO: 427335 - RNA, 19 nt, Artificial Sequence
  Description of Artificial Sequence: Synthetic oligonucleotide
  Sense strand starting at position 568 of SEQ ID NO: 316620
ccgcaauugcaagaaugau

SEQ ID NO: 427336 - RNA, 19 nt, Artificial Sequence
  Description of Artificial Sequence: Synthetic oligonucleotide
  Antisense Strand to SEQ ID NO: 427335
aucauucuugcaauugcgg

SEQ ID NO: 427337 - RNA, 19 nt, Artificial Sequence
  Description of Artificial Sequence: Synthetic oligonucleotide
  Sense strand starting at position 811 of SEQ ID NO: 316620
gaggaauugauucgcagaa

SEQ ID NO: 427338 - RNA, 19 nt, Artificial Sequence
  Description of Artificial Sequence: Synthetic oligonucleotide
  Antisense Strand to SEQ ID NO: 427337
uucugcgaaucaauuccuc

SEQ ID NO: 427339 - RNA, 19 nt, Artificial Sequence
  Description of Artificial Sequence: Synthetic oligonucleotide
  Sense strand starting at position 812 of SEQ ID NO: 316620
aggaauugauucgcagaac

SEQ ID NO: 427340 - RNA, 19 nt, Artificial Sequence
  Description of Artificial Sequence: Synthetic oligonucleotide
  Antisense Strand to SEQ ID NO: 427339
guucugcgaaucaauuccu

SEQ ID NO: 427341 - RNA, 19 nt, Artificial Sequence
  Description of Artificial Sequence: Synthetic oligonucleotide
  Sense strand starting at position 815 of SEQ ID NO: 316620
aauugauucgcagaaccag

SEQ ID NO: 427342 - RNA, 19 nt, Artificial Sequence
  Description of Artificial Sequence: Synthetic oligonucleotide
  Antisense Strand to SEQ ID NO: 427341
cugguucugcgaaucaauu

SEQ ID NO: 427343 - RNA, 19 nt, Artificial Sequence
  Description of Artificial Sequence: Synthetic oligonucleotide
  Sense strand starting at position 2169 of SEQ ID NO: 316620
ugcuccuguuccucgaauu

SEQ ID NO: 427344 - RNA, 19 nt, Artificial Sequence
  Description of Artificial Sequence: Synthetic oligonucleotide
  Antisense Strand to SEQ ID NO: 427343
aauucgaggaacaggagca

SEQ ID NO: 427345 - RNA, 19 nt, Artificial Sequence
  Description of Artificial Sequence: Synthetic oligonucleotide
  Sense strand starting at position 2170 of SEQ ID NO: 316620
gcuccuguuccucgaauua

SEQ ID NO: 427346 - RNA, 19 nt, Artificial Sequence
  Description of Artificial Sequence: Synthetic oligonucleotide
  Antisense Strand to SEQ ID NO: 427345
uaauucgaggaacaggagc

SEQ ID NO: 427347 - RNA, 19 nt, Artificial Sequence
  Description of Artificial Sequence: Synthetic oligonucleotide
  Sense strand starting at position 2190 of SEQ ID NO: 316620
gaugguuccuucccgauga

SEQ ID NO: 427348 - RNA, 19 nt, Artificial Sequence
  Description of Artificial Sequence: Synthetic oligonucleotide
  Antisense Strand to SEQ ID NO: 427347
ucaucgggaaggaaccauc

SEQ ID NO: 427349 - RNA, 19 nt, Artificial Sequence
  Description of Artificial Sequence: Synthetic oligonucleotide
  Sense strand starting at position 2194 of SEQ ID NO: 316620
guuccuucccgaugaacca

SEQ ID NO: 427350 - RNA, 19 nt, Artificial Sequence
  Description of Artificial Sequence: Synthetic oligonucleotide
  Antisense Strand to SEQ ID NO: 427349
ugguucaucgggaaggaac

SEQ ID NO: 427351 - RNA, 19 nt, Artificial Sequence
  Description of Artificial Sequence: Synthetic oligonucleotide
  Sense strand starting at position 2237 of SEQ ID NO: 316620
ggcauuaaauaucagggau

SEQ ID NO: 427352 - RNA, 19 nt, Artificial Sequence
  Description of Artificial Sequence: Synthetic oligonucleotide
  Antisense Strand to SEQ ID NO: 427351
aucccugauauuuaaugcc

SEQ ID NO: 427353 - RNA, 19 nt, Artificial Sequence
  Description of Artificial Sequence: Synthetic oligonucleotide
  Sense strand starting at position 2240 of SEQ ID NO: 316620
auuaaauaucagggaugcu

SEQ ID NO: 427354 - RNA, 19 nt, Artificial Sequence
  Description of Artificial Sequence: Synthetic oligonucleotide
  Antisense Strand to SEQ ID NO: 427353
agcaucccugauauuuaau

SEQ ID NO: 427355 - RNA, 19 nt, Artificial Sequence
  Description of Artificial Sequence: Synthetic oligonucleotide
  Sense strand starting at position 2540 of SEQ ID NO: 316620
caacguggcuaugcuauua

SEQ ID NO: 427356 - RNA, 19 nt, Artificial Sequence
  Description of Artificial Sequence: Synthetic oligonucleotide
  Antisense Strand to SEQ ID NO: 427355
uaauagcauagccacguug

SEQ ID NO: 427357 - RNA, 19 nt, Artificial Sequence
  Description of Artificial Sequence: Synthetic oligonucleotide
  Sense strand starting at position 2577 of SEQ ID NO: 316620
gcaucugugcaccaggaga

SEQ ID NO: 427358 - RNA, 19 nt, Artificial Sequence
  Description of Artificial Sequence: Synthetic oligonucleotide
  Antisense Strand to SEQ ID NO: 427357
ucuccuggugcacagaugc

SEQ ID NO: 427359 - RNA, 19 nt, Artificial Sequence
  Description of Artificial Sequence: Synthetic oligonucleotide
  Sense strand starting at position 2883 of SEQ ID NO: 316620
gcuuaaaggccuuaggguu

SEQ ID NO: 427360 - RNA, 19 nt, Artificial Sequence
  Description of Artificial Sequence: Synthetic oligonucleotide
  Antisense Strand to SEQ ID NO: 427359
aacccuaaggccuuuaagc

SEQ ID NO: 427361 - RNA, 19 nt, Artificial Sequence
  Description of Artificial Sequence: Synthetic oligonucleotide
  Sense strand starting at position 2895 of SEQ ID NO: 316620
uaggguuuccugcacacaa

SEQ ID NO: 427362 - RNA, 19 nt, Artificial Sequence
  Description of Artificial Sequence: Synthetic oligonucleotide
  Antisense Strand to SEQ ID NO: 427361
uugugugcaggaaacccua

SEQ ID NO: 427363 - RNA, 19 nt, Artificial Sequence
  Description of Artificial Sequence: Synthetic oligonucleotide
  Sense strand starting at position 3232 of SEQ ID NO: 316620
gggagagagucaggauaga

SEQ ID NO: 427364 - RNA, 19 nt, Artificial Sequence
  Description of Artificial Sequence: Synthetic oligonucleotide
  Antisense Strand to SEQ ID NO: 427363
ucuauccugacucucuccc

SEQ ID NO: 427365 - RNA, 19 nt, Artificial Sequence
  Description of Artificial Sequence: Synthetic oligonucleotide
  Sense strand starting at position 3302 of SEQ ID NO: 316620
gcugccaacucuuugucaa

SEQ ID NO: 427366 - RNA, 19 nt, Artificial Sequence
  Description of Artificial Sequence: Synthetic oligonucleotide
  Antisense Strand to SEQ ID NO: 427365
uugacaaagaguuggcagc

SEQ ID NO: 427367 - RNA, 19 nt, Artificial Sequence
  Description of Artificial Sequence: Synthetic oligonucleotide
  Sense strand starting at position 3303 of SEQ ID NO: 316620
cugccaacucuuugucaag

SEQ ID NO: 427368 - RNA, 19 nt, Artificial Sequence
  Description of Artificial Sequence: Synthetic oligonucleotide
  Antisense Strand to SEQ ID NO: 427367
cuugacaaagaguuggcag

SEQ ID NO: 427369 - RNA, 19 nt, Artificial Sequence
  Description of Artificial Sequence: Synthetic oligonucleotide
  Sense strand starting at position 3305 of SEQ ID NO: 316620
gccaacucuuugucaagca

SEQ ID NO: 427370 - RNA, 19 nt, Artificial Sequence
  Description of Artificial Sequence: Synthetic oligonucleotide
  Antisense Strand to SEQ ID NO: 427369
ugcuugacaaagaguuggc

SEQ ID NO: 427371 - RNA, 19 nt, Artificial Sequence
  Description of Artificial Sequence: Synthetic oligonucleotide
  Sense strand starting at position 3380 of SEQ ID NO: 316620
gggcuguucuucgcggaga

SEQ ID NO: 427372 - RNA, 19 nt, Artificial Sequence
  Description of Artificial Sequence: Synthetic oligonucleotide
  Antisense Strand to SEQ ID NO: 427371
ucuccgcgaagaacagccc

SEQ ID NO: 427373 - RNA, 19 nt, Artificial Sequence
  Description of Artificial Sequence: Synthetic oligonucleotide
  Sense strand starting at position 3600 of SEQ ID NO: 316620
ggaugcaucacuggcugua

SEQ ID NO: 427374 - RNA, 19 nt, Artificial Sequence
  Description of Artificial Sequence: Synthetic oligonucleotide
  Antisense Strand to SEQ ID NO: 427373
uacagccagugaugcaucc

SEQ ID NO: 427375 - RNA, 19 nt, Artificial Sequence
  Description of Artificial Sequence: Synthetic oligonucleotide
  Sense strand starting at position 3602 of SEQ ID NO: 316620
augcaucacuggcuguaaa

SEQ ID NO: 427376 - RNA, 19 nt, Artificial Sequence
  Description of Artificial Sequence: Synthetic oligonucleotide
  Antisense Strand to SEQ ID NO: 427375
uuuacagccagugaugcau

SEQ ID NO: 427377 - RNA, 19 nt, Artificial Sequence
  Description of Artificial Sequence: Synthetic oligonucleotide
  Sense strand starting at position 3603 of SEQ ID NO: 316620
ugcaucacuggcuguaaau

SEQ ID NO: 427378 - RNA, 19 nt, Artificial Sequence
  Description of Artificial Sequence: Synthetic oligonucleotide
  Antisense Strand to SEQ ID NO: 427377
auuuacagccagugaugca

SEQ ID NO: 427379 - RNA, 19 nt, Artificial Sequence
  Description of Artificial Sequence: Synthetic oligonucleotide
  Sense strand starting at position 3612 of SEQ ID NO: 316620
ggcuguaaauaucagauau

SEQ ID NO: 427380 - RNA, 19 nt, Artificial Sequence
  Description of Artificial Sequence: Synthetic oligonucleotide
  Antisense Strand to SEQ ID NO: 427379
auaucugauauuuacagcc

SEQ ID NO: 427381 - RNA, 19 nt, Artificial Sequence
  Description of Artificial Sequence: Synthetic oligonucleotide
  Sense strand starting at position 3614 of SEQ ID NO: 316620
cuguaaauaucagauauga

SEQ ID NO: 427382 - RNA, 19 nt, Artificial Sequence
  Description of Artificial Sequence: Synthetic oligonucleotide
  Antisense Strand to SEQ ID NO: 427381
ucauaucugauauuuacag

SEQ ID NO: 427383 - RNA, 19 nt, Artificial Sequence
  Description of Artificial Sequence: Synthetic oligonucleotide
  Sense strand starting at position 3624 of SEQ ID NO: 316620
cagauaugaucgccaccca

SEQ ID NO: 427384 - RNA, 19 nt, Artificial Sequence
  Description of Artificial Sequence: Synthetic oligonucleotide
  Antisense Strand to SEQ ID NO: 427383
uggguggcgaucauaucug

SEQ ID NO: 427385 - RNA, 19 nt, Artificial Sequence
  Description of Artificial Sequence: Synthetic oligonucleotide
  Sense strand starting at position 3882 of SEQ ID NO: 316620
ccaacauggugacauucua

SEQ ID NO: 427386 - RNA, 19 nt, Artificial Sequence
  Description of Artificial Sequence: Synthetic oligonucleotide
  Antisense Strand to SEQ ID NO: 427385
uagaaugucaccauguugg

SEQ ID NO: 427387 - RNA, 19 nt, Artificial Sequence
  Description of Artificial Sequence: Synthetic oligonucleotide
  Sense strand starting at position 4 of SEQ ID NO: 316621
ggccuuauacuguaaucuu

SEQ ID NO: 427388 - RNA, 19 nt, Artificial Sequence
  Description of Artificial Sequence: Synthetic oligonucleotide
  Antisense Strand to SEQ ID NO: 427387
aagauuacaguauaaggcc

SEQ ID NO: 427389 - RNA, 19 nt, Artificial Sequence
  Description of Artificial Sequence: Synthetic oligonucleotide
  Sense strand starting at position 140 of SEQ ID NO: 316621
ggcugauucggagacgaga

SEQ ID NO: 427390 - RNA, 19 nt, Artificial Sequence
  Description of Artificial Sequence: Synthetic oligonucleotide
  Antisense Strand to SEQ ID NO: 427389
ucucgucuccgaaucagcc

SEQ ID NO: 427391 - RNA, 19 nt, Artificial Sequence
  Description of Artificial Sequence: Synthetic oligonucleotide
  Sense strand starting at position 420 of SEQ ID NO: 316621
uuguccuugcuggauacaa

SEQ ID NO: 427392 - RNA, 19 nt, Artificial Sequence
  Description of Artificial Sequence: Synthetic oligonucleotide
  Antisense Strand to SEQ ID NO: 427391
uuguauccagcaaggacaa

SEQ ID NO: 427393 - RNA, 19 nt, Artificial Sequence
  Description of Artificial Sequence: Synthetic oligonucleotide
  Sense strand starting at position 422 of SEQ ID NO: 316621
guccuugcuggauacaaau

SEQ ID NO: 427394 - RNA, 19 nt, Artificial Sequence
  Description of Artificial Sequence: Synthetic oligonucleotide
  Antisense Strand to SEQ ID NO: 427393
auuuguauccagcaaggac

SEQ ID NO: 427395 - RNA, 19 nt, Artificial Sequence
  Description of Artificial Sequence: Synthetic oligonucleotide
  Sense strand starting at position 435 of SEQ ID NO: 316621
acaaauaugcuguauauug

SEQ ID NO: 427396 - RNA, 19 nt, Artificial Sequence
  Description of Artificial Sequence: Synthetic oligonucleotide
  Antisense Strand to SEQ ID NO: 427395
caauauacagcauauuugu

SEQ ID NO: 427397 - RNA, 19 nt, Artificial Sequence
  Description of Artificial Sequence: Synthetic oligonucleotide
  Sense strand starting at position 729 of SEQ ID NO: 316621
gaccaauggccuugagaag

SEQ ID NO: 427398 - RNA, 19 nt, Artificial Sequence
  Description of Artificial Sequence: Synthetic oligonucleotide
  Antisense Strand to SEQ ID NO: 427397
cuucucaaggccauugguc

SEQ ID NO: 427399 - RNA, 19 nt, Artificial Sequence
  Description of Artificial Sequence: Synthetic oligonucleotide
  Sense strand starting at position 837 of SEQ ID NO: 316621
aagaaauacuguguugcuu

SEQ ID NO: 427400 - RNA, 19 nt, Artificial Sequence
  Description of Artificial Sequence: Synthetic oligonucleotide
  Antisense Strand to SEQ ID NO: 427399
aagcaacacaguauuucuu

SEQ ID NO: 427401 - RNA, 19 nt, Artificial Sequence
  Description of Artificial Sequence: Synthetic oligonucleotide
  Sense strand starting at position 928 of SEQ ID NO: 316621
ccuguacugguuuaacaca

SEQ ID NO: 427402 - RNA, 19 nt, Artificial Sequence
  Description of Artificial Sequence: Synthetic oligonucleotide
  Antisense Strand to SEQ ID NO: 427401
uguguuaaaccaguacagg

SEQ ID NO: 427403 - RNA, 19 nt, Artificial Sequence
  Description of Artificial Sequence: Synthetic oligonucleotide
  Sense strand starting at position 935 of SEQ ID NO: 316621
ugguuuaacacagguuuga

SEQ ID NO: 427404 - RNA, 19 nt, Artificial Sequence
  Description of Artificial Sequence: Synthetic oligonucleotide
  Antisense Strand to SEQ ID NO: 427403
ucaaaccuguguuaaacca

SEQ ID NO: 427405 - RNA, 19 nt, Artificial Sequence
  Description of Artificial Sequence: Synthetic oligonucleotide
  Sense strand starting at position 948 of SEQ ID NO: 316621
guuugauccuaggucuuua

SEQ ID NO: 427406 - RNA, 19 nt, Artificial Sequence
  Description of Artificial Sequence: Synthetic oligonucleotide
  Antisense Strand to SEQ ID NO: 427405
uaaagaccuaggaucaaac

SEQ ID NO: 427407 - RNA, 19 nt, Artificial Sequence
  Description of Artificial Sequence: Synthetic oligonucleotide
  Sense strand starting at position 977 of SEQ ID NO: 316621
aguuuccagcuauaagaga

SEQ ID NO: 427408 - RNA, 19 nt, Artificial Sequence
  Description of Artificial Sequence: Synthetic oligonucleotide
  Antisense Strand to SEQ ID NO: 427407
ucucuuauagcuggaaacu

SEQ ID NO: 427409 - RNA, 19 nt, Artificial Sequence
  Description of Artificial Sequence: Synthetic oligonucleotide
  Sense strand starting at position 1455 of SEQ ID NO: 316621
gucguaagccuuuaaacag

SEQ ID NO: 427410 - RNA, 19 nt, Artificial Sequence
  Description of Artificial Sequence: Synthetic oligonucleotide
  Antisense Strand to SEQ ID NO: 427409
cuguuuaaaggcuuacgac

SEQ ID NO: 427411 - RNA, 19 nt, Artificial Sequence
  Description of Artificial Sequence: Synthetic oligonucleotide
  Sense strand starting at position 1602 of SEQ ID NO: 316621
guaggugacagaugacuuu

SEQ ID NO: 427412 - RNA, 19 nt, Artificial Sequence
  Description of Artificial Sequence: Synthetic oligonucleotide
  Antisense Strand to SEQ ID NO: 427411
aaagucaucugucaccuac

SEQ ID NO: 427413 - RNA, 19 nt, Artificial Sequence
  Description of Artificial Sequence: Synthetic oligonucleotide
  Sense strand starting at position 1695 of SEQ ID NO: 316621
cuguaaugccagcacuaaa

SEQ ID NO: 427414 - RNA, 19 nt, Artificial Sequence
  Description of Artificial Sequence: Synthetic oligonucleotide
  Antisense Strand to SEQ ID NO: 427413
uuuagugcuggcauuacag

SEQ ID NO: 427415 - RNA, 19 nt, Artificial Sequence
  Description of Artificial Sequence: Synthetic oligonucleotide
  Sense strand starting at position 1850 of SEQ ID NO: 316621
auguuugauucuguaacua

SEQ ID NO: 427416 - RNA, 19 nt, Artificial Sequence
  Description of Artificial Sequence: Synthetic oligonucleotide
  Antisense Strand to SEQ ID NO: 427415
uaguuacagaaucaaacau

SEQ ID NO: 427417 - RNA, 19 nt, Artificial Sequence
  Description of Artificial Sequence: Synthetic oligonucleotide
  Sense strand starting at position 1874 of SEQ ID NO: 316621
cgcccagaauucucucaaa

SEQ ID NO: 427418 - RNA, 19 nt, Artificial Sequence
  Description of Artificial Sequence: Synthetic oligonucleotide
  Antisense Strand to SEQ ID NO: 427417
uuugagagaauucugggcg

SEQ ID NO: 427419 - RNA, 19 nt, Artificial Sequence
  Description of Artificial Sequence: Synthetic oligonucleotide
  Sense strand starting at position 2701 of SEQ ID NO: 316621
gaaauagucgugcaaggua

SEQ ID NO: 427420 - RNA, 19 nt, Artificial Sequence
  Description of Artificial Sequence: Synthetic oligonucleotide
  Antisense Strand to SEQ ID NO: 427419
uaccuugcacgacuauuuc

SEQ ID NO: 427421 - RNA, 19 nt, Artificial Sequence
  Description of Artificial Sequence: Synthetic oligonucleotide
  Sense strand starting at position 2727 of SEQ ID NO: 316621
uuugauaguggacggauau

SEQ ID NO: 427422 - RNA, 19 nt, Artificial Sequence
  Description of Artificial Sequence: Synthetic oligonucleotide
  Antisense Strand to SEQ ID NO: 427421
auauccguccacuaucaaa

SEQ ID NO: 427423 - RNA, 19 nt, Artificial Sequence
  Description of Artificial Sequence: Synthetic oligonucleotide
  Sense strand starting at position 2874 of SEQ ID NO: 316621
guguccuuaguacagaaga

SEQ ID NO: 427424 - RNA, 19 nt, Artificial Sequence
  Description of Artificial Sequence: Synthetic oligonucleotide
  Antisense Strand to SEQ ID NO: 427423
ucuucuguacuaaggacac

SEQ ID NO: 427425 - RNA, 19 nt, Artificial Sequence
  Description of Artificial Sequence: Synthetic oligonucleotide
  Sense strand starting at position 2884 of SEQ ID NO: 316621
uacagaagaugggauaauu

SEQ ID NO: 427426 - RNA, 19 nt, Artificial Sequence
  Description of Artificial Sequence: Synthetic oligonucleotide
  Antisense Strand to SEQ ID NO: 427425
aauuaucccaucuucugua

SEQ ID NO: 427427 - RNA, 19 nt, Artificial Sequence
  Description of Artificial Sequence: Synthetic oligonucleotide
  Sense strand starting at position 2940 of SEQ ID NO: 316621
gaaggacuagcuggauauu

SEQ ID NO: 427428 - RNA, 19 nt, Artificial Sequence
  Description of Artificial Sequence: Synthetic oligonucleotide
  Antisense Strand to SEQ ID NO: 427427
aauauccagcuaguccuuc

SEQ ID NO: 427429 - RNA, 19 nt, Artificial Sequence
  Description of Artificial Sequence: Synthetic oligonucleotide
  Sense strand starting at position 2957 of SEQ ID NO: 316621
uugcguaauaccuaggagu

SEQ ID NO: 427430 - RNA, 19 nt, Artificial Sequence
  Description of Artificial Sequence: Synthetic oligonucleotide
  Antisense Strand to SEQ ID NO: 427429
acuccuagguauuacgcaa

SEQ ID NO: 427431 - RNA, 19 nt, Artificial Sequence
  Description of Artificial Sequence: Synthetic oligonucleotide
  Sense strand starting at position 2970 of SEQ ID NO: 316621
aggaguuuagcagguaaag

SEQ ID NO: 427432 - RNA, 19 nt, Artificial Sequence
  Description of Artificial Sequence: Synthetic oligonucleotide
  Antisense Strand to SEQ ID NO: 427431
cuuuaccugcuaaacuccu

SEQ ID NO: 427433 - RNA, 19 nt, Artificial Sequence
  Description of Artificial Sequence: Synthetic oligonucleotide
  Sense strand starting at position 2972 of SEQ ID NO: 316621
gaguuuagcagguaaagcu

SEQ ID NO: 427434 - RNA, 19 nt, Artificial Sequence
  Description of Artificial Sequence: Synthetic oligonucleotide
  Antisense Strand to SEQ ID NO: 427433
agcuuuaccugcuaaacuc

SEQ ID NO: 427435 - RNA, 19 nt, Artificial Sequence
  Description of Artificial Sequence: Synthetic oligonucleotide
  Sense strand starting at position 3219 of SEQ ID NO: 316621
gagacagugcaucauacau

SEQ ID NO: 427436 - RNA, 19 nt, Artificial Sequence
  Description of Artificial Sequence: Synthetic oligonucleotide
  Antisense Strand to SEQ ID NO: 427435
auguaugaugcacugucuc

SEQ ID NO: 427437 - RNA, 19 nt, Artificial Sequence
  Description of Artificial Sequence: Synthetic oligonucleotide
  Sense strand starting at position 3230 of SEQ ID NO: 316621
ucauacaugucaucuauag

SEQ ID NO: 427438 - RNA, 19 nt, Artificial Sequence
  Description of Artificial Sequence: Synthetic oligonucleotide
  Antisense Strand to SEQ ID NO: 427437
cuauagaugacauguauga

SEQ ID NO: 427439 - RNA, 19 nt, Artificial Sequence
  Description of Artificial Sequence: Synthetic oligonucleotide
  Sense strand starting at position 3234 of SEQ ID NO: 316621
acaugucaucuauagcagu

SEQ ID NO: 427440 - RNA, 19 nt, Artificial Sequence
  Description of Artificial Sequence: Synthetic oligonucleotide
  Antisense Strand to SEQ ID NO: 427439
acugcuauagaugacaugu

SEQ ID NO: 427441 - RNA, 19 nt, Artificial Sequence
  Description of Artificial Sequence: Synthetic oligonucleotide
  Sense strand starting at position 3279 of SEQ ID NO: 316621
cucaaacagcguuaucuuu

SEQ ID NO: 427442 - RNA, 19 nt, Artificial Sequence
  Description of Artificial Sequence: Synthetic oligonucleotide
  Antisense Strand to SEQ ID NO: 427441
aaagauaacgcuguuugag

SEQ ID NO: 427443 - RNA, 19 nt, Artificial Sequence
  Description of Artificial Sequence: Synthetic oligonucleotide
  Sense strand starting at position 3285 of SEQ ID NO: 316621
cagcguuaucuuuaacuug

SEQ ID NO: 427444 - RNA, 19 nt, Artificial Sequence
  Description of Artificial Sequence: Synthetic oligonucleotide
  Antisense Strand to SEQ ID NO: 427443
caaguuaaagauaacgcug

SEQ ID NO: 427445 - RNA, 19 nt, Artificial Sequence
  Description of Artificial Sequence: Synthetic oligonucleotide
  Sense strand starting at position 3292 of SEQ ID NO: 316621
aucuuuaacuugucggaga

SEQ ID NO: 427446 - RNA, 19 nt, Artificial Sequence
  Description of Artificial Sequence: Synthetic oligonucleotide
  Antisense Strand to SEQ ID NO: 427445
ucuccgacaaguuaaagau

SEQ ID NO: 427447 - RNA, 19 nt, Artificial Sequence
  Description of Artificial Sequence: Synthetic oligonucleotide
  Sense strand starting at position 3294 of SEQ ID NO: 316621
cuuuaacuugucggagaau

SEQ ID NO: 427448 - RNA, 19 nt, Artificial Sequence
  Description of Artificial Sequence: Synthetic oligonucleotide
  Antisense Strand to SEQ ID NO: 427447
auucuccgacaaguuaaag

SEQ ID NO: 427449 - RNA, 19 nt, Artificial Sequence
  Description of Artificial Sequence: Synthetic oligonucleotide
  Sense strand starting at position 3396 of SEQ ID NO: 316621
caguguuuauagguaagac

SEQ ID NO: 427450 - RNA, 19 nt, Artificial Sequence
  Description of Artificial Sequence: Synthetic oligonucleotide
  Antisense Strand to SEQ ID NO: 427449
gucuuaccuauaaacacug

SEQ ID NO: 427451 - RNA, 19 nt, Artificial Sequence
  Description of Artificial Sequence: Synthetic oligonucleotide
  Sense strand starting at position 3397 of SEQ ID NO: 316621
aguguuuauagguaagaca

SEQ ID NO: 427452 - RNA, 19 nt, Artificial Sequence
  Description of Artificial Sequence: Synthetic oligonucleotide
  Antisense Strand to SEQ ID NO: 427451
ugucuuaccuauaaacacu

SEQ ID NO: 427453 - RNA, 19 nt, Artificial Sequence
  Description of Artificial Sequence: Synthetic oligonucleotide
  Sense strand starting at position 3437 of SEQ ID NO: 316621
ggaacaucaugacaauaag

SEQ ID NO: 427454 - RNA, 19 nt, Artificial Sequence
  Description of Artificial Sequence: Synthetic oligonucleotide
  Antisense Strand to SEQ ID NO: 427453
cuuauugucaugauguucc

SEQ ID NO: 427455 - RNA, 19 nt, Artificial Sequence
  Description of Artificial Sequence: Synthetic oligonucleotide
  Sense strand starting at position 3581 of SEQ ID NO: 316621
acaaauaacugugaaagag

SEQ ID NO: 427456 - RNA, 19 nt, Artificial Sequence
  Description of Artificial Sequence: Synthetic oligonucleotide
  Antisense Strand to SEQ ID NO: 427455
cucuuucacaguuauuugu

SEQ ID NO: 427457 - RNA, 19 nt, Artificial Sequence
  Description of Artificial Sequence: Synthetic oligonucleotide
  Sense strand starting at position 3629 of SEQ ID NO: 316621
aguccucagcguucguuaa

SEQ ID NO: 427458 - RNA, 19 nt, Artificial Sequence
  Description of Artificial Sequence: Synthetic oligonucleotide
  Antisense Strand to SEQ ID NO: 427457
uuaacgaacgcugaggacu

SEQ ID NO: 427459 - RNA, 19 nt, Artificial Sequence
  Description of Artificial Sequence: Synthetic oligonucleotide
  Sense strand starting at position 3723 of SEQ ID NO: 316621
gcagcauguguuucguauu

SEQ ID NO: 427460 - RNA, 19 nt, Artificial Sequence
  Description of Artificial Sequence: Synthetic oligonucleotide
  Antisense Strand to SEQ ID NO: 427459
aauacgaaacacaugcugc

SEQ ID NO: 427461 - RNA, 19 nt, Artificial Sequence
  Description of Artificial Sequence: Synthetic oligonucleotide
  Sense strand starting at position 3796 of SEQ ID NO: 316621
ucaguucuguagguuagga

SEQ ID NO: 427462 - RNA, 19 nt, Artificial Sequence
  Description of Artificial Sequence: Synthetic oligonucleotide
  Antisense Strand to SEQ ID NO: 427461
uccuaaccuacagaacuga

SEQ ID NO: 427463 - RNA, 19 nt, Artificial Sequence
  Description of Artificial Sequence: Synthetic oligonucleotide
  Sense strand starting at position 3798 of SEQ ID NO: 316621
aguucuguagguuaggaau

SEQ ID NO: 427464 - RNA, 19 nt, Artificial Sequence
  Description of Artificial Sequence: Synthetic oligonucleotide
  Antisense Strand to SEQ ID NO: 427463
auuccuaaccuacagaacu

SEQ ID NO: 427465 - RNA, 19 nt, Artificial Sequence
  Description of Artificial Sequence: Synthetic oligonucleotide
  Sense strand starting at position 3911 of SEQ ID NO: 316621
gaaggaaucuguucucagg

SEQ ID NO: 427466 - RNA, 19 nt, Artificial Sequence
  Description of Artificial Sequence: Synthetic oligonucleotide
  Antisense Strand to SEQ ID NO: 427465
ccugagaacagauuccuuc

SEQ ID NO: 427467 - RNA, 19 nt, Artificial Sequence
  Description of Artificial Sequence: Synthetic oligonucleotide
  Sense strand starting at position 80 of SEQ ID NO: 316622
cugagagcaccucauacua

SEQ ID NO: 427468 - RNA, 19 nt, Artificial Sequence
  Description of Artificial Sequence: Synthetic oligonucleotide
  Antisense Strand to SEQ ID NO: 427467
uaguaugaggugcucucag

SEQ ID NO: 427469 - RNA, 19 nt, Artificial Sequence
  Description of Artificial Sequence: Synthetic oligonucleotide
  Sense strand starting at position 96 of SEQ ID NO: 316622
cuaugacagccuugguaag

SEQ ID NO: 427470 - RNA, 19 nt, Artificial Sequence
  Description of Artificial Sequence: Synthetic oligonucleotide
  Antisense Strand to SEQ ID NO: 427469
cuuaccaaggcugucauag

SEQ ID NO: 427471 - RNA, 19 nt, Artificial Sequence
  Description of Artificial Sequence: Synthetic oligonucleotide
  Sense strand starting at position 97 of SEQ ID NO: 316622
uaugacagccuugguaaga

SEQ ID NO: 427472 - RNA, 19 nt, Artificial Sequence
  Description of Artificial Sequence: Synthetic oligonucleotide
  Antisense Strand to SEQ ID NO: 427471
ucuuaccaaggcugucaua

SEQ ID NO: 427473 - RNA, 19 nt, Artificial Sequence
  Description of Artificial Sequence: Synthetic oligonucleotide
  Sense strand starting at position 175 of SEQ ID NO: 316622
aucuuauauugggcuugga

SEQ ID NO: 427474 - RNA, 19 nt, Artificial Sequence
  Description of Artificial Sequence: Synthetic oligonucleotide
  Antisense Strand to SEQ ID NO: 427473
uccaagcccaauauaagau

SEQ ID NO: 427475 - RNA, 19 nt, Artificial Sequence
  Description of Artificial Sequence: Synthetic oligonucleotide
  Sense strand starting at position 178 of SEQ ID NO: 316622
uuauauugggcuuggaauu

SEQ ID NO: 427476 - RNA, 19 nt, Artificial Sequence
  Description of Artificial Sequence: Synthetic oligonucleotide
  Antisense Strand to SEQ ID NO: 427475
aauuccaagcccaauauaa

SEQ ID NO: 427477 - RNA, 19 nt, Artificial Sequence
  Description of Artificial Sequence: Synthetic oligonucleotide
  Sense strand starting at position 259 of SEQ ID NO: 316622
ugaauucugacagggagca

SEQ ID NO: 427478 - RNA, 19 nt, Artificial Sequence
  Description of Artificial Sequence: Synthetic oligonucleotide
  Antisense Strand to SEQ ID NO: 427477
ugcucccugucagaauuca

SEQ ID NO: 427479 - RNA, 19 nt, Artificial Sequence
  Description of Artificial Sequence: Synthetic oligonucleotide
  Sense strand starting at position 260 of SEQ ID NO: 316622
gaauucugacagggagcau

SEQ ID NO: 427480 - RNA, 19 nt, Artificial Sequence
  Description of Artificial Sequence: Synthetic oligonucleotide
  Antisense Strand to SEQ ID NO: 427479
augcucccugucagaauuc

SEQ ID NO: 427481 - RNA, 19 nt, Artificial Sequence
  Description of Artificial Sequence: Synthetic oligonucleotide
  Sense strand starting at position 288 of SEQ ID NO: 316622
gggaggguugcauggagaa

SEQ ID NO: 427482 - RNA, 19 nt, Artificial Sequence
  Description of Artificial Sequence: Synthetic oligonucleotide
  Antisense Strand to SEQ ID NO: 427481
uucuccaugcaacccuccc

SEQ ID NO: 427483 - RNA, 19 nt, Artificial Sequence
  Description of Artificial Sequence: Synthetic oligonucleotide
  Sense strand starting at position 315 of SEQ ID NO: 316622
ugagcugguccuugacaaa

SEQ ID NO: 427484 - RNA, 19 nt, Artificial Sequence
  Description of Artificial Sequence: Synthetic oligonucleotide
  Antisense Strand to SEQ ID NO: 427483
uuugucaaggaccagcuca

SEQ ID NO: 427485 - RNA, 19 nt, Artificial Sequence
  Description of Artificial Sequence: Synthetic oligonucleotide
  Sense strand starting at position 506 of SEQ ID NO: 316622
gggaaaugggcuuaguuau

SEQ ID NO: 427486 - RNA, 19 nt, Artificial Sequence
  Description of Artificial Sequence: Synthetic oligonucleotide
  Antisense Strand to SEQ ID NO: 427485
auaacuaagcccauuuccc

SEQ ID NO: 427487 - RNA, 19 nt, Artificial Sequence
  Description of Artificial Sequence: Synthetic oligonucleotide
  Sense strand starting at position 519 of SEQ ID NO: 316622
aguuaugaguuuguuagga

SEQ ID NO: 427488 - RNA, 19 nt, Artificial Sequence
  Description of Artificial Sequence: Synthetic oligonucleotide
  Antisense Strand to SEQ ID NO: 427487
uccuaacaaacucauaacu

SEQ ID NO: 427489 - RNA, 19 nt, Artificial Sequence
  Description of Artificial Sequence: Synthetic oligonucleotide
  Sense strand starting at position 597 of SEQ ID NO: 316622
gcuaaaugcguccucguca

SEQ ID NO: 427490 - RNA, 19 nt, Artificial Sequence
  Description of Artificial Sequence: Synthetic oligonucleotide
  Antisense Strand to SEQ ID NO: 427489
ugacgaggacgcauuuagc

SEQ ID NO: 427491 - RNA, 19 nt, Artificial Sequence
  Description of Artificial Sequence: Synthetic oligonucleotide
  Sense strand starting at position 689 of SEQ ID NO: 316622
gcccuaguuccacaugaga

SEQ ID NO: 427492 - RNA, 19 nt, Artificial Sequence
  Description of Artificial Sequence: Synthetic oligonucleotide
  Antisense Strand to SEQ ID NO: 427491
ucucauguggaacuagggc

SEQ ID NO: 427493 - RNA, 19 nt, Artificial Sequence
  Description of Artificial Sequence: Synthetic oligonucleotide
  Sense strand starting at position 1160 of SEQ ID NO: 316622
gcuuuaagagcccaggauu

SEQ ID NO: 427494 - RNA, 19 nt, Artificial Sequence
  Description of Artificial Sequence: Synthetic oligonucleotide
  Antisense Strand to SEQ ID NO: 427493
aauccugggcucuuaaagc

SEQ ID NO: 427495 - RNA, 19 nt, Artificial Sequence
  Description of Artificial Sequence: Synthetic oligonucleotide
  Sense strand starting at position 1267 of SEQ ID NO: 316622
ggauacaugccaugacaug

SEQ ID NO: 427496 - RNA, 19 nt, Artificial Sequence
  Description of Artificial Sequence: Synthetic oligonucleotide
  Antisense Strand to SEQ ID NO: 427495
caugucauggcauguaucc

SEQ ID NO: 427497 - RNA, 19 nt, Artificial Sequence
  Description of Artificial Sequence: Synthetic oligonucleotide
  Sense strand starting at position 1313 of SEQ ID NO: 316622
aucucacuucuaggaggua

SEQ ID NO: 427498 - RNA, 19 nt, Artificial Sequence
  Description of Artificial Sequence: Synthetic oligonucleotide
  Antisense Strand to SEQ ID NO: 427497
uaccuccuagaagugagau

SEQ ID NO: 427499 - RNA, 19 nt, Artificial Sequence
  Description of Artificial Sequence: Synthetic oligonucleotide
  Sense strand starting at position 1434 of SEQ ID NO: 316622
uucaauucgggaugacgaa

SEQ ID NO: 427500 - RNA, 19 nt, Artificial Sequence
  Description of Artificial Sequence: Synthetic oligonucleotide
  Antisense Strand to SEQ ID NO: 427499
uucgucaucccgaauugaa

SEQ ID NO: 427501 - RNA, 19 nt, Artificial Sequence
  Description of Artificial Sequence: Synthetic oligonucleotide
  Sense strand starting at position 1461 of SEQ ID NO: 316622
gaacuagauggugguaaug

SEQ ID NO: 427502 - RNA, 19 nt, Artificial Sequence
  Description of Artificial Sequence: Synthetic oligonucleotide
  Antisense Strand to SEQ ID NO: 427501
cauuaccaccaucuaguuc

SEQ ID NO: 427503 - RNA, 19 nt, Artificial Sequence
  Description of Artificial Sequence: Synthetic oligonucleotide
  Sense strand starting at position 1467 of SEQ ID NO: 316622
gauggugguaaugguuaua

SEQ ID NO: 427504 - RNA, 19 nt, Artificial Sequence
  Description of Artificial Sequence: Synthetic oligonucleotide
  Antisense Strand to SEQ ID NO: 427503
uauaaccauuaccaccauc

SEQ ID NO: 427505 - RNA, 19 nt, Artificial Sequence
  Description of Artificial Sequence: Synthetic oligonucleotide
  Sense strand starting at position 1470 of SEQ ID NO: 316622
ggugguaaugguuauacaa

SEQ ID NO: 427506 - RNA, 19 nt, Artificial Sequence
  Description of Artificial Sequence: Synthetic oligonucleotide
  Antisense Strand to SEQ ID NO: 427505
uuguauaaccauuaccacc

SEQ ID NO: 427507 - RNA, 19 nt, Artificial Sequence
  Description of Artificial Sequence: Synthetic oligonucleotide
  Sense strand starting at position 1513 of SEQ ID NO: 316622
uguguaacuguauacuuaa

SEQ ID NO: 427508 - RNA, 19 nt, Artificial Sequence
  Description of Artificial Sequence: Synthetic oligonucleotide
  Antisense Strand to SEQ ID NO: 427507
uuaaguauacaguuacaca

SEQ ID NO: 427509 - RNA, 19 nt, Artificial Sequence
  Description of Artificial Sequence: Synthetic oligonucleotide
  Sense strand starting at position 1535 of SEQ ID NO: 316622
ugauuagcaugacaaauuu

SEQ ID NO: 427510 - RNA, 19 nt, Artificial Sequence
  Description of Artificial Sequence: Synthetic oligonucleotide
  Antisense Strand to SEQ ID NO: 427509
aaauuugucaugcuaauca

SEQ ID NO: 427511 - RNA, 19 nt, Artificial Sequence
  Description of Artificial Sequence: Synthetic oligonucleotide
  Sense strand starting at position 1604 of SEQ ID NO: 316622
auugcuuaaguggauacaa

SEQ ID NO: 427512 - RNA, 19 nt, Artificial Sequence
  Description of Artificial Sequence: Synthetic oligonucleotide
  Antisense Strand to SEQ ID NO: 427511
uuguauccacuuaagcaau

SEQ ID NO: 427513 - RNA, 19 nt, Artificial Sequence
  Description of Artificial Sequence: Synthetic oligonucleotide
  Sense strand starting at position 1606 of SEQ ID NO: 316622
ugcuuaaguggauacaaau

SEQ ID NO: 427514 - RNA, 19 nt, Artificial Sequence
  Description of Artificial Sequence: Synthetic oligonucleotide
  Antisense Strand to SEQ ID NO: 427513
auuuguauccacuuaagca

SEQ ID NO: 427515 - RNA, 19 nt, Artificial Sequence
  Description of Artificial Sequence: Synthetic oligonucleotide
  Sense strand starting at position 2041 of SEQ ID NO: 316622
gaaugacccucugugauuc

SEQ ID NO: 427516 - RNA, 19 nt, Artificial Sequence
  Description of Artificial Sequence: Synthetic oligonucleotide
  Antisense Strand to SEQ ID NO: 427515
gaaucacagagggucauuc

SEQ ID NO: 427517 - RNA, 19 nt, Artificial Sequence
  Description of Artificial Sequence: Synthetic oligonucleotide
  Sense strand starting at position 2100 of SEQ ID NO: 316622
cagcaagucccuugaggau

SEQ ID NO: 427518 - RNA, 19 nt, Artificial Sequence
  Description of Artificial Sequence: Synthetic oligonucleotide
  Antisense Strand to SEQ ID NO: 427517
auccucaagggacuugcug

SEQ ID NO: 427519 - RNA, 19 nt, Artificial Sequence
  Description of Artificial Sequence: Synthetic oligonucleotide
  Sense strand starting at position 2393 of SEQ ID NO: 316622
aagggcuacugucuuuaga

SEQ ID NO: 427520 - RNA, 19 nt, Artificial Sequence
  Description of Artificial Sequence: Synthetic oligonucleotide
  Antisense Strand to SEQ ID NO: 427519
ucuaaagacaguagcccuu

SEQ ID NO: 427521 - RNA, 19 nt, Artificial Sequence
  Description of Artificial Sequence: Synthetic oligonucleotide
  Sense strand starting at position 2395 of SEQ ID NO: 316622
gggcuacugucuuuagaag

SEQ ID NO: 427522 - RNA, 19 nt, Artificial Sequence
  Description of Artificial Sequence: Synthetic oligonucleotide
  Antisense Strand to SEQ ID NO: 427521
cuucuaaagacaguagccc

SEQ ID NO: 427523 - RNA, 19 nt, Artificial Sequence
  Description of Artificial Sequence: Synthetic oligonucleotide
  Sense strand starting at position 2396 of SEQ ID NO: 316622
ggcuacugucuuuagaaga

SEQ ID NO: 427524 - RNA, 19 nt, Artificial Sequence
  Description of Artificial Sequence: Synthetic oligonucleotide
  Antisense Strand to SEQ ID NO: 427523
ucuucuaaagacaguagcc

SEQ ID NO: 427525 - RNA, 19 nt, Artificial Sequence
  Description of Artificial Sequence: Synthetic oligonucleotide
  Sense strand starting at position 2406 of SEQ ID NO: 316622
uuuagaagacgcugagaua

SEQ ID NO: 427526 - RNA, 19 nt, Artificial Sequence
  Description of Artificial Sequence: Synthetic oligonucleotide
  Antisense Strand to SEQ ID NO: 427525
uaucucagcgucuucuaaa

SEQ ID NO: 427527 - RNA, 19 nt, Artificial Sequence
  Description of Artificial Sequence: Synthetic oligonucleotide
  Sense strand starting at position 2677 of SEQ ID NO: 316622
ugaggagaaugcucccaga

SEQ ID NO: 427528 - RNA, 19 nt, Artificial Sequence
  Description of Artificial Sequence: Synthetic oligonucleotide
  Antisense Strand to SEQ ID NO: 427527
ucugggagcauucuccuca

SEQ ID NO: 427529 - RNA, 19 nt, Artificial Sequence
  Description of Artificial Sequence: Synthetic oligonucleotide
  Sense strand starting at position 2720 of SEQ ID NO: 316622
cugagauguacggaaugcu

SEQ ID NO: 427530 - RNA, 19 nt, Artificial Sequence
  Description of Artificial Sequence: Synthetic oligonucleotide
  Antisense Strand to SEQ ID NO: 427529
agcauuccguacaucucag

SEQ ID NO: 427531 - RNA, 19 nt, Artificial Sequence
  Description of Artificial Sequence: Synthetic oligonucleotide
  Sense strand starting at position 2865 of SEQ ID NO: 316622
ugaugauuauaguuaggac

SEQ ID NO: 427532 - RNA, 19 nt, Artificial Sequence
  Description of Artificial Sequence: Synthetic oligonucleotide
  Antisense Strand to SEQ ID NO: 427531
guccuaacuauaaucauca

SEQ ID NO: 427533 - RNA, 19 nt, Artificial Sequence
  Description of Artificial Sequence: Synthetic oligonucleotide
  Sense strand starting at position 2892 of SEQ ID NO: 316622
ugacgauauccaggucaug

SEQ ID NO: 427534 - RNA, 19 nt, Artificial Sequence
  Description of Artificial Sequence: Synthetic oligonucleotide
  Antisense Strand to SEQ ID NO: 427533
caugaccuggauaucguca

SEQ ID NO: 427535 - RNA, 19 nt, Artificial Sequence
  Description of Artificial Sequence: Synthetic oligonucleotide
  Sense strand starting at position 3072 of SEQ ID NO: 316622
ggcagauaaguuuacugau

SEQ ID NO: 427536 - RNA, 19 nt, Artificial Sequence
  Description of Artificial Sequence: Synthetic oligonucleotide
  Antisense Strand to SEQ ID NO: 427535
aucaguaaacuuaucugcc

SEQ ID NO: 427537 - RNA, 19 nt, Artificial Sequence
  Description of Artificial Sequence: Synthetic oligonucleotide
  Sense strand starting at position 3215 of SEQ ID NO: 316622
aaggcuuguguagacuaaa

SEQ ID NO: 427538 - RNA, 19 nt, Artificial Sequence
  Description of Artificial Sequence: Synthetic oligonucleotide
  Antisense Strand to SEQ ID NO: 427537
uuuagucuacacaagccuu

SEQ ID NO: 427539 - RNA, 19 nt, Artificial Sequence
  Description of Artificial Sequence: Synthetic oligonucleotide
  Sense strand starting at position 3218 of SEQ ID NO: 316622
gcuuguguagacuaaacuu

SEQ ID NO: 427540 - RNA, 19 nt, Artificial Sequence
  Description of Artificial Sequence: Synthetic oligonucleotide
  Antisense Strand to SEQ ID NO: 427539
aaguuuagucuacacaagc

SEQ ID NO: 427541 - RNA, 19 nt, Artificial Sequence
  Description of Artificial Sequence: Synthetic oligonucleotide
  Sense strand starting at position 3251 of SEQ ID NO: 316622
ggaucaauacggcauguua

SEQ ID NO: 427542 - RNA, 19 nt, Artificial Sequence
  Description of Artificial Sequence: Synthetic oligonucleotide
  Antisense Strand to SEQ ID NO: 427541
uaacaugccguauugaucc

SEQ ID NO: 427543 - RNA, 19 nt, Artificial Sequence
  Description of Artificial Sequence: Synthetic oligonucleotide
  Sense strand starting at position 3300 of SEQ ID NO: 316622
ggaauugugucucuaugac

SEQ ID NO: 427544 - RNA, 19 nt, Artificial Sequence
  Description of Artificial Sequence: Synthetic oligonucleotide
  Antisense Strand to SEQ ID NO: 427543
gucauagagacacaauucc

SEQ ID NO: 427545 - RNA, 19 nt, Artificial Sequence
  Description of Artificial Sequence: Synthetic oligonucleotide
  Sense strand starting at position 3708 of SEQ ID NO: 316622
ucccguggugacuauggaa

SEQ ID NO: 427546 - RNA, 19 nt, Artificial Sequence
  Description of Artificial Sequence: Synthetic oligonucleotide
  Antisense Strand to SEQ ID NO: 427545
uuccauagucaccacggga

SEQ ID NO: 427547 - RNA, 19 nt, Artificial Sequence
  Description of Artificial Sequence: Synthetic oligonucleotide
  Sense strand starting at position 135 of SEQ ID NO: 316623
acucgacucucauugucaa

SEQ ID NO: 427548 - RNA, 19 nt, Artificial Sequence
  Description of Artificial Sequence: Synthetic oligonucleotide
  Antisense Strand to SEQ ID NO: 427547
uugacaaugagagucgagu

SEQ ID NO: 427549 - RNA, 19 nt, Artificial Sequence
  Description of Artificial Sequence: Synthetic oligonucleotide
  Sense strand starting at position 142 of SEQ ID NO: 316623
ucucauugucaaggcuaau

SEQ ID NO: 427550 - RNA, 19 nt, Artificial Sequence
  Description of Artificial Sequence: Synthetic oligonucleotide
  Antisense Strand to SEQ ID NO: 427549
auuagccuugacaaugaga

SEQ ID NO: 427551 - RNA, 19 nt, Artificial Sequence
  Description of Artificial Sequence: Synthetic oligonucleotide
  Sense strand starting at position 333 of SEQ ID NO: 316623
auaguuggcuaucugguaa

SEQ ID NO: 427552 - RNA, 19 nt, Artificial Sequence
  Description of Artificial Sequence: Synthetic oligonucleotide
  Antisense Strand to SEQ ID NO: 427551
uuaccagauagccaacuau

SEQ ID NO: 427553 - RNA, 19 nt, Artificial Sequence
  Description of Artificial Sequence: Synthetic oligonucleotide
  Sense strand starting at position 403 of SEQ ID NO: 316623
gauaaauuggugugcauaa

SEQ ID NO: 427554 - RNA, 19 nt, Artificial Sequence
  Description of Artificial Sequence: Synthetic oligonucleotide
  Antisense Strand to SEQ ID NO: 427553
uuaugcacaccaauuuauc

SEQ ID NO: 427555 - RNA, 19 nt, Artificial Sequence
  Description of Artificial Sequence: Synthetic oligonucleotide
  Sense strand starting at position 404 of SEQ ID NO: 316623
auaaauuggugugcauaaa

SEQ ID NO: 427556 - RNA, 19 nt, Artificial Sequence
  Description of Artificial Sequence: Synthetic oligonucleotide
  Antisense Strand to SEQ ID NO: 427555
uuuaugcacaccaauuuau

SEQ ID NO: 427557 - RNA, 19 nt, Artificial Sequence
  Description of Artificial Sequence: Synthetic oligonucleotide
  Sense strand starting at position 405 of SEQ ID NO: 316623
uaaauuggugugcauaaac

SEQ ID NO: 427558 - RNA, 19 nt, Artificial Sequence
  Description of Artificial Sequence: Synthetic oligonucleotide
  Antisense Strand to SEQ ID NO: 427557
guuuaugcacaccaauuua

SEQ ID NO: 427559 - RNA, 19 nt, Artificial Sequence
  Description of Artificial Sequence: Synthetic oligonucleotide
  Sense strand starting at position 479 of SEQ ID NO: 316623
aguacagaauaguauuuga

SEQ ID NO: 427560 - RNA, 19 nt, Artificial Sequence
  Description of Artificial Sequence: Synthetic oligonucleotide
  Antisense Strand to SEQ ID NO: 427559
ucaaauacuauucuguacu

SEQ ID NO: 427561 - RNA, 19 nt, Artificial Sequence
  Description of Artificial Sequence: Synthetic oligonucleotide
  Sense strand starting at position 848 of SEQ ID NO: 316623
uggcauaugagcuguauga

SEQ ID NO: 427562 - RNA, 19 nt, Artificial Sequence
  Description of Artificial Sequence: Synthetic oligonucleotide
  Antisense Strand to SEQ ID NO: 427561
ucauacagcucauaugcca

SEQ ID NO: 427563 - RNA, 19 nt, Artificial Sequence
  Description of Artificial Sequence: Synthetic oligonucleotide
  Sense strand starting at position 850 of SEQ ID NO: 316623
gcauaugagcuguaugauu

SEQ ID NO: 427564 - RNA, 19 nt, Artificial Sequence
  Description of Artificial Sequence: Synthetic oligonucleotide
  Antisense Strand to SEQ ID NO: 427563
aaucauacagcucauaugc

SEQ ID NO: 427565 - RNA, 19 nt, Artificial Sequence
  Description of Artificial Sequence: Synthetic oligonucleotide
  Sense strand starting at position 1402 of SEQ ID NO: 316623
agagaaaugcauugugguu

SEQ ID NO: 427566 - RNA, 19 nt, Artificial Sequence
  Description of Artificial Sequence: Synthetic oligonucleotide
  Antisense Strand to SEQ ID NO: 427565
aaccacaaugcauuucucu

SEQ ID NO: 427567 - RNA, 19 nt, Artificial Sequence
  Description of Artificial Sequence: Synthetic oligonucleotide
  Sense strand starting at position 1549 of SEQ ID NO: 316623
auguauuugcucugcucau

SEQ ID NO: 427568 - RNA, 19 nt, Artificial Sequence
  Description of Artificial Sequence: Synthetic oligonucleotide
  Antisense Strand to SEQ ID NO: 427567
augagcagagcaaauacau

SEQ ID NO: 427569 - RNA, 19 nt, Artificial Sequence
  Description of Artificial Sequence: Synthetic oligonucleotide
  Sense strand starting at position 1550 of SEQ ID NO: 316623
uguauuugcucugcucauu

SEQ ID NO: 427570 - RNA, 19 nt, Artificial Sequence
  Description of Artificial Sequence: Synthetic oligonucleotide
  Antisense Strand to SEQ ID NO: 427569
aaugagcagagcaaauaca

SEQ ID NO: 427571 - RNA, 19 nt, Artificial Sequence
  Description of Artificial Sequence: Synthetic oligonucleotide
  Sense strand starting at position 1591 of SEQ ID NO: 316623
auguaaguguacucacuca

SEQ ID NO: 427572 - RNA, 19 nt, Artificial Sequence
  Description of Artificial Sequence: Synthetic oligonucleotide
  Antisense Strand to SEQ ID NO: 427571
ugagugaguacacuuacau

SEQ ID NO: 427573 - RNA, 19 nt, Artificial Sequence
  Description of Artificial Sequence: Synthetic oligonucleotide
  Sense strand starting at position 1643 of SEQ ID NO: 316623
aagguuuaccaugacagca

SEQ ID NO: 427574 - RNA, 19 nt, Artificial Sequence
  Description of Artificial Sequence: Synthetic oligonucleotide
  Antisense Strand to SEQ ID NO: 427573
ugcugucaugguaaaccuu

SEQ ID NO: 427575 - RNA, 19 nt, Artificial Sequence
  Description of Artificial Sequence: Synthetic oligonucleotide
  Sense strand starting at position 1795 of SEQ ID NO: 316623
gggcaaugagccuggaagu

SEQ ID NO: 427576 - RNA, 19 nt, Artificial Sequence
  Description of Artificial Sequence: Synthetic oligonucleotide
  Antisense Strand to SEQ ID NO: 427575
acuuccaggcucauugccc

SEQ ID NO: 427577 - RNA, 19 nt, Artificial Sequence
  Description of Artificial Sequence: Synthetic oligonucleotide
  Sense strand starting at position 2028 of SEQ ID NO: 316623
acaggcaucagugaguguu

SEQ ID NO: 427578 - RNA, 19 nt, Artificial Sequence
  Description of Artificial Sequence: Synthetic oligonucleotide
  Antisense Strand to SEQ ID NO: 427577
aacacucacugaugccugu

SEQ ID NO: 427579 - RNA, 19 nt, Artificial Sequence
  Description of Artificial Sequence: Synthetic oligonucleotide
  Sense strand starting at position 2160 of SEQ ID NO: 316623
ugguaugucuaaccaaggu

SEQ ID NO: 427580 - RNA, 19 nt, Artificial Sequence
  Description of Artificial Sequence: Synthetic oligonucleotide
  Antisense Strand to SEQ ID NO: 427579
accuugguuagacauacca

SEQ ID NO: 427581 - RNA, 19 nt, Artificial Sequence
  Description of Artificial Sequence: Synthetic oligonucleotide
  Sense strand starting at position 2223 of SEQ ID NO: 316623
gcagauuuauucuagacga

SEQ ID NO: 427582 - RNA, 19 nt, Artificial Sequence
  Description of Artificial Sequence: Synthetic oligonucleotide
  Antisense Strand to SEQ ID NO: 427581
ucgucuagaauaaaucugc

SEQ ID NO: 427583 - RNA, 19 nt, Artificial Sequence
  Description of Artificial Sequence: Synthetic oligonucleotide
  Sense strand starting at position 2270 of SEQ ID NO: 316623
cugcauaucugagcaccua

SEQ ID NO: 427584 - RNA, 19 nt, Artificial Sequence
  Description of Artificial Sequence: Synthetic oligonucleotide
  Antisense Strand to SEQ ID NO: 427583
uaggugcucagauaugcag

SEQ ID NO: 427585 - RNA, 19 nt, Artificial Sequence
  Description of Artificial Sequence: Synthetic oligonucleotide
  Sense strand starting at position 2360 of SEQ ID NO: 316623
accuucuagcagggaagau

SEQ ID NO: 427586 - RNA, 19 nt, Artificial Sequence
  Description of Artificial Sequence: Synthetic oligonucleotide
  Antisense Strand to SEQ ID NO: 427585
aucuucccugcuagaaggu

SEQ ID NO: 427587 - RNA, 19 nt, Artificial Sequence
  Description of Artificial Sequence: Synthetic oligonucleotide
  Sense strand starting at position 2446 of SEQ ID NO: 316623
gcgggauaagcagacaaau

SEQ ID NO: 427588 - RNA, 19 nt, Artificial Sequence
  Description of Artificial Sequence: Synthetic oligonucleotide
  Antisense Strand to SEQ ID NO: 427587
auuugucugcuuaucccgc

SEQ ID NO: 427589 - RNA, 19 nt, Artificial Sequence
  Description of Artificial Sequence: Synthetic oligonucleotide
  Sense strand starting at position 2530 of SEQ ID NO: 316623
caaagcagccuugggaaua

SEQ ID NO: 427590 - RNA, 19 nt, Artificial Sequence
  Description of Artificial Sequence: Synthetic oligonucleotide
  Antisense Strand to SEQ ID NO: 427589
uauucccaaggcugcuuug

SEQ ID NO: 427591 - RNA, 19 nt, Artificial Sequence
  Description of Artificial Sequence: Synthetic oligonucleotide
  Sense strand starting at position 2542 of SEQ ID NO: 316623
gggaauauaaugugcaaac

SEQ ID NO: 427592 - RNA, 19 nt, Artificial Sequence
  Description of Artificial Sequence: Synthetic oligonucleotide
  Antisense Strand to SEQ ID NO: 427591
guuugcacauuauauuccc

SEQ ID NO: 427593 - RNA, 19 nt, Artificial Sequence
  Description of Artificial Sequence: Synthetic oligonucleotide
  Sense strand starting at position 2543 of SEQ ID NO: 316623
ggaauauaaugugcaaacu

SEQ ID NO: 427594 - RNA, 19 nt, Artificial Sequence
  Description of Artificial Sequence: Synthetic oligonucleotide
  Antisense Strand to SEQ ID NO: 427593
aguuugcacauuauauucc

SEQ ID NO: 427595 - RNA, 19 nt, Artificial Sequence
  Description of Artificial Sequence: Synthetic oligonucleotide
  Sense strand starting at position 2705 of SEQ ID NO: 316623
aaccuagauugugugaauu

SEQ ID NO: 427596 - RNA, 19 nt, Artificial Sequence
  Description of Artificial Sequence: Synthetic oligonucleotide
  Antisense Strand to SEQ ID NO: 427595
aauucacacaaucuagguu

SEQ ID NO: 427597 - RNA, 19 nt, Artificial Sequence
  Description of Artificial Sequence: Synthetic oligonucleotide
  Sense strand starting at position 2742 of SEQ ID NO: 316623
ggaucacaucccugaguga

SEQ ID NO: 427598 - RNA, 19 nt, Artificial Sequence
  Description of Artificial Sequence: Synthetic oligonucleotide
  Antisense Strand to SEQ ID NO: 427597
ucacucagggaugugaucc

SEQ ID NO: 427599 - RNA, 19 nt, Artificial Sequence
  Description of Artificial Sequence: Synthetic oligonucleotide
  Sense strand starting at position 2745 of SEQ ID NO: 316623
ucacaucccugagugagaa

SEQ ID NO: 427600 - RNA, 19 nt, Artificial Sequence
  Description of Artificial Sequence: Synthetic oligonucleotide
  Antisense Strand to SEQ ID NO: 427599
uucucacucagggauguga

SEQ ID NO: 427601 - RNA, 19 nt, Artificial Sequence
  Description of Artificial Sequence: Synthetic oligonucleotide
  Sense strand starting at position 2746 of SEQ ID NO: 316623
cacaucccugagugagaau

SEQ ID NO: 427602 - RNA, 19 nt, Artificial Sequence
  Description of Artificial Sequence: Synthetic oligonucleotide
  Antisense Strand to SEQ ID NO: 427601
auucucacucagggaugug

SEQ ID NO: 427603 - RNA, 19 nt, Artificial Sequence
  Description of Artificial Sequence: Synthetic oligonucleotide
  Sense strand starting at position 2844 of SEQ ID NO: 316623
gcuauagacugcuuuacac

SEQ ID NO: 427604 - RNA, 19 nt, Artificial Sequence
  Description of Artificial Sequence: Synthetic oligonucleotide
  Antisense Strand to SEQ ID NO: 427603
guguaaagcagucuauagc

SEQ ID NO: 427605 - RNA, 19 nt, Artificial Sequence
  Description of Artificial Sequence: Synthetic oligonucleotide
  Sense strand starting at position 2854 of SEQ ID NO: 316623
gcuuuacaccaagaaaguu

SEQ ID NO: 427606 - RNA, 19 nt, Artificial Sequence
  Description of Artificial Sequence: Synthetic oligonucleotide
  Antisense Strand to SEQ ID NO: 427605
aacuuucuugguguaaagc

SEQ ID NO: 427607 - RNA, 19 nt, Artificial Sequence
  Description of Artificial Sequence: Synthetic oligonucleotide
  Sense strand starting at position 2929 of SEQ ID NO: 316623
guagcauguguacaagaac

SEQ ID NO: 427608 - RNA, 19 nt, Artificial Sequence
  Description of Artificial Sequence: Synthetic oligonucleotide
  Antisense Strand to SEQ ID NO: 427607
guucuuguacacaugcuac

SEQ ID NO: 427609 - RNA, 19 nt, Artificial Sequence
  Description of Artificial Sequence: Synthetic oligonucleotide
  Sense strand starting at position 2932 of SEQ ID NO: 316623
gcauguguacaagaacauu

SEQ ID NO: 427610 - RNA, 19 nt, Artificial Sequence
  Description of Artificial Sequence: Synthetic oligonucleotide
  Antisense Strand to SEQ ID NO: 427609
aauguucuuguacacaugc

SEQ ID NO: 427611 - RNA, 19 nt, Artificial Sequence
  Description of Artificial Sequence: Synthetic oligonucleotide
  Sense strand starting at position 3161 of SEQ ID NO: 316623
uuuagauaugugugaagaa

SEQ ID NO: 427612 - RNA, 19 nt, Artificial Sequence
  Description of Artificial Sequence: Synthetic oligonucleotide
  Antisense Strand to SEQ ID NO: 427611
uucuucacacauaucuaaa

SEQ ID NO: 427613 - RNA, 19 nt, Artificial Sequence
  Description of Artificial Sequence: Synthetic oligonucleotide
  Sense strand starting at position 3410 of SEQ ID NO: 316623
auuguauucuuauuccagu

SEQ ID NO: 427614 - RNA, 19 nt, Artificial Sequence
  Description of Artificial Sequence: Synthetic oligonucleotide
  Antisense Strand to SEQ ID NO: 427613
acuggaauaagaauacaau

SEQ ID NO: 427615 - RNA, 19 nt, Artificial Sequence
  Description of Artificial Sequence: Synthetic oligonucleotide
  Sense strand starting at position 3416 of SEQ ID NO: 316623
uucuuauuccaguaguguu

SEQ ID NO: 427616 - RNA, 19 nt, Artificial Sequence
  Description of Artificial Sequence: Synthetic oligonucleotide
  Antisense Strand to SEQ ID NO: 427615
aacacuacuggaauaagaa

SEQ ID NO: 427617 - RNA, 19 nt, Artificial Sequence
  Description of Artificial Sequence: Synthetic oligonucleotide
  Sense strand starting at position 3498 of SEQ ID NO: 316623
auagccugggcauguaaau

SEQ ID NO: 427618 - RNA, 19 nt, Artificial Sequence
  Description of Artificial Sequence: Synthetic oligonucleotide
  Antisense Strand to SEQ ID NO: 427617
auuuacaugcccaggcuau

SEQ ID NO: 427619 - RNA, 19 nt, Artificial Sequence
  Description of Artificial Sequence: Synthetic oligonucleotide
  Sense strand starting at position 3511 of SEQ ID NO: 316623
guaaaucaugccgcuguuu

SEQ ID NO: 427620 - RNA, 19 nt, Artificial Sequence
  Description of Artificial Sequence: Synthetic oligonucleotide
  Antisense Strand to SEQ ID NO: 427619
aaacagcggcaugauuuac

SEQ ID NO: 427621 - RNA, 19 nt, Artificial Sequence
  Description of Artificial Sequence: Synthetic oligonucleotide
  Sense strand starting at position 3558 of SEQ ID NO: 316623
ggcuuaaggagccaguauu

SEQ ID NO: 427622 - RNA, 19 nt, Artificial Sequence
  Description of Artificial Sequence: Synthetic oligonucleotide
  Antisense Strand to SEQ ID NO: 427621
aauacuggcuccuuaagcc

SEQ ID NO: 427623 - RNA, 19 nt, Artificial Sequence
  Description of Artificial Sequence: Synthetic oligonucleotide
  Sense strand starting at position 3690 of SEQ ID NO: 316623
ucuguaaaccuggagucua

SEQ ID NO: 427624 - RNA, 19 nt, Artificial Sequence
  Description of Artificial Sequence: Synthetic oligonucleotide
  Antisense Strand to SEQ ID NO: 427623
uagacuccagguuuacaga

SEQ ID NO: 427625 - RNA, 19 nt, Artificial Sequence
  Description of Artificial Sequence: Synthetic oligonucleotide
  Sense strand starting at position 3955 of SEQ ID NO: 316623
uccagugucuuaucugaac

SEQ ID NO: 427626 - RNA, 19 nt, Artificial Sequence
  Description of Artificial Sequence: Synthetic oligonucleotide
  Antisense Strand to SEQ ID NO: 427625
guucagauaagacacugga

SEQ ID NO: 427627 - RNA, 19 nt, Artificial Sequence
  Description of Artificial Sequence: Synthetic oligonucleotide
  Sense strand starting at position 73 of SEQ ID NO: 316624
gggaucucagcucaucaca

SEQ ID NO: 427628 - RNA, 19 nt, Artificial Sequence
  Description of Artificial Sequence: Synthetic oligonucleotide
  Antisense Strand to SEQ ID NO: 427627
ugugaugagcugagauccc

SEQ ID NO: 427629 - RNA, 19 nt, Artificial Sequence
  Description of Artificial Sequence: Synthetic oligonucleotide
  Sense strand starting at position 299 of SEQ ID NO: 316624
cacgccugucuggguaauu

SEQ ID NO: 427630 - RNA, 19 nt, Artificial Sequence
  Description of Artificial Sequence: Synthetic oligonucleotide
  Antisense Strand to SEQ ID NO: 427629
aauuacccagacaggcgug

SEQ ID NO: 427631 - RNA, 19 nt, Artificial Sequence
  Description of Artificial Sequence: Synthetic oligonucleotide
  Sense strand starting at position 300 of SEQ ID NO: 316624
acgccugucuggguaauuu

SEQ ID NO: 427632 - RNA, 19 nt, Artificial Sequence
  Description of Artificial Sequence: Synthetic oligonucleotide
  Antisense Strand to SEQ ID NO: 427631
aaauuacccagacaggcgu

SEQ ID NO: 427633 - RNA, 19 nt, Artificial Sequence
  Description of Artificial Sequence: Synthetic oligonucleotide
  Sense strand starting at position 330 of SEQ ID NO: 316624
uucuguuuacaguaaauuc

SEQ ID NO: 427634 - RNA, 19 nt, Artificial Sequence
  Description of Artificial Sequence: Synthetic oligonucleotide
  Antisense Strand to SEQ ID NO: 427633
gaauuuacuguaaacagaa

SEQ ID NO: 427635 - RNA, 19 nt, Artificial Sequence
  Description of Artificial Sequence: Synthetic oligonucleotide
  Sense strand starting at position 356 of SEQ ID NO: 316624
agaagucuuuaauaugucu

SEQ ID NO: 427636 - RNA, 19 nt, Artificial Sequence
  Description of Artificial Sequence: Synthetic oligonucleotide
  Antisense Strand to SEQ ID NO: 427635
agacauauuaaagacuucu

SEQ ID NO: 427637 - RNA, 19 nt, Artificial Sequence
  Description of Artificial Sequence: Synthetic oligonucleotide
  Sense strand starting at position 517 of SEQ ID NO: 316624
cgaguugagucagaacaag

SEQ ID NO: 427638 - RNA, 19 nt, Artificial Sequence
  Description of Artificial Sequence: Synthetic oligonucleotide
  Antisense Strand to SEQ ID NO: 427637
cuuguucugacucaacucg

SEQ ID NO: 427639 - RNA, 19 nt, Artificial Sequence
  Description of Artificial Sequence: Synthetic oligonucleotide
  Sense strand starting at position 535 of SEQ ID NO: 316624
gaaaguaagucucccaaga

SEQ ID NO: 427640 - RNA, 19 nt, Artificial Sequence
  Description of Artificial Sequence: Synthetic oligonucleotide
  Antisense Strand to SEQ ID NO: 427639
ucuugggagacuuacuuuc

SEQ ID NO: 427641 - RNA, 19 nt, Artificial Sequence
  Description of Artificial Sequence: Synthetic oligonucleotide
  Sense strand starting at position 595 of SEQ ID NO: 316624
caaucugauggcgagcaau

SEQ ID NO: 427642 - RNA, 19 nt, Artificial Sequence
  Description of Artificial Sequence: Synthetic oligonucleotide
  Antisense Strand to SEQ ID NO: 427641
auugcucgccaucagauug

SEQ ID NO: 427643 - RNA, 19 nt, Artificial Sequence
  Description of Artificial Sequence: Synthetic oligonucleotide
  Sense strand starting at position 765 of SEQ ID NO: 316624
gcaagaagccaauaauugu

SEQ ID NO: 427644 - RNA, 19 nt, Artificial Sequence
  Description of Artificial Sequence: Synthetic oligonucleotide
  Antisense Strand to SEQ ID NO: 427643
acaauuauuggcuucuugc

SEQ ID NO: 427645 - RNA, 19 nt, Artificial Sequence
  Description of Artificial Sequence: Synthetic oligonucleotide
  Sense strand starting at position 789 of SEQ ID NO: 316624
uugggacaaucacagguua

SEQ ID NO: 427646 - RNA, 19 nt, Artificial Sequence
  Description of Artificial Sequence: Synthetic oligonucleotide
  Antisense Strand to SEQ ID NO: 427645
uaaccugugauugucccaa

SEQ ID NO: 427647 - RNA, 19 nt, Artificial Sequence
  Description of Artificial Sequence: Synthetic oligonucleotide
  Sense strand starting at position 801 of SEQ ID NO: 316624
cagguuaaguugugaaaug

SEQ ID NO: 427648 - RNA, 19 nt, Artificial Sequence
  Description of Artificial Sequence: Synthetic oligonucleotide
  Antisense Strand to SEQ ID NO: 427647
cauuucacaacuuaaccug

SEQ ID NO: 427649 - RNA, 19 nt, Artificial Sequence
  Description of Artificial Sequence: Synthetic oligonucleotide
  Sense strand starting at position 810 of SEQ ID NO: 316624
uugugaaauggguggcaga

SEQ ID NO: 427650 - RNA, 19 nt, Artificial Sequence
  Description of Artificial Sequence: Synthetic oligonucleotide
  Antisense Strand to SEQ ID NO: 427649
ucugccacccauuucacaa

SEQ ID NO: 427651 - RNA, 19 nt, Artificial Sequence
  Description of Artificial Sequence: Synthetic oligonucleotide
  Sense strand starting at position 811 of SEQ ID NO: 316624
ugugaaauggguggcagaa

SEQ ID NO: 427652 - RNA, 19 nt, Artificial Sequence
  Description of Artificial Sequence: Synthetic oligonucleotide
  Antisense Strand to SEQ ID NO: 427651
uucugccacccauuucaca

SEQ ID NO: 427653 - RNA, 19 nt, Artificial Sequence
  Description of Artificial Sequence: Synthetic oligonucleotide
  Sense strand starting at position 846 of SEQ ID NO: 316624
aguuucucucaacgcuaau

SEQ ID NO: 427654 - RNA, 19 nt, Artificial Sequence
  Description of Artificial Sequence: Synthetic oligonucleotide
  Antisense Strand to SEQ ID NO: 427653
auuagcguugagagaaacu

SEQ ID NO: 427655 - RNA, 19 nt, Artificial Sequence
  Description of Artificial Sequence: Synthetic oligonucleotide
  Sense strand starting at position 894 of SEQ ID NO: 316624
gugagagucgcgggacuuu

SEQ ID NO: 427656 - RNA, 19 nt, Artificial Sequence
  Description of Artificial Sequence: Synthetic oligonucleotide
  Antisense Strand to SEQ ID NO: 427655
aaagucccgcgacucucac

SEQ ID NO: 427657 - RNA, 19 nt, Artificial Sequence
  Description of Artificial Sequence: Synthetic oligonucleotide
  Sense strand starting at position 940 of SEQ ID NO: 316624
agucuuagccagggcacua

SEQ ID NO: 427658 - RNA, 19 nt, Artificial Sequence
  Description of Artificial Sequence: Synthetic oligonucleotide
  Antisense Strand to SEQ ID NO: 427657
uagugcccuggcuaagacu

SEQ ID NO: 427659 - RNA, 19 nt, Artificial Sequence
  Description of Artificial Sequence: Synthetic oligonucleotide
  Sense strand starting at position 969 of SEQ ID NO: 316624
uuagaauggucacucuuaa

SEQ ID NO: 427660 - RNA, 19 nt, Artificial Sequence
  Description of Artificial Sequence: Synthetic oligonucleotide
  Antisense Strand to SEQ ID NO: 427659
uuaagagugaccauucuaa

SEQ ID NO: 427661 - RNA, 19 nt, Artificial Sequence
  Description of Artificial Sequence: Synthetic oligonucleotide
  Sense strand starting at position 1078 of SEQ ID NO: 316624
cucgaauccacguguccau

SEQ ID NO: 427662 - RNA, 19 nt, Artificial Sequence
  Description of Artificial Sequence: Synthetic oligonucleotide
  Antisense Strand to SEQ ID NO: 427661
auggacacguggauucgag

SEQ ID NO: 427663 - RNA, 19 nt, Artificial Sequence
  Description of Artificial Sequence: Synthetic oligonucleotide
  Sense strand starting at position 1173 of SEQ ID NO: 316624
gccagcacuccuuagauca

SEQ ID NO: 427664 - RNA, 19 nt, Artificial Sequence
  Description of Artificial Sequence: Synthetic oligonucleotide
  Antisense Strand to SEQ ID NO: 427663
ugaucuaaggagugcuggc

SEQ ID NO: 427665 - RNA, 19 nt, Artificial Sequence
  Description of Artificial Sequence: Synthetic oligonucleotide
  Sense strand starting at position 1865 of SEQ ID NO: 316624
ggcucuggaugcuauuuaa

SEQ ID NO: 427666 - RNA, 19 nt, Artificial Sequence
  Description of Artificial Sequence: Synthetic oligonucleotide
  Antisense Strand to SEQ ID NO: 427665
uuaaauagcauccagagcc

SEQ ID NO: 427667 - RNA, 19 nt, Artificial Sequence
  Description of Artificial Sequence: Synthetic oligonucleotide
  Sense strand starting at position 2129 of SEQ ID NO: 316624
cccagacugccucggauuu

SEQ ID NO: 427668 - RNA, 19 nt, Artificial Sequence
  Description of Artificial Sequence: Synthetic oligonucleotide
  Antisense Strand to SEQ ID NO: 427667
aaauccgaggcagucuggg

SEQ ID NO: 427669 - RNA, 19 nt, Artificial Sequence
  Description of Artificial Sequence: Synthetic oligonucleotide
  Sense strand starting at position 2148 of SEQ ID NO: 316624
cauaaugaaucugaggaag

SEQ ID NO: 427670 - RNA, 19 nt, Artificial Sequence
  Description of Artificial Sequence: Synthetic oligonucleotide
  Antisense Strand to SEQ ID NO: 427669
cuuccucagauucauuaug

SEQ ID NO: 427671 - RNA, 19 nt, Artificial Sequence
  Description of Artificial Sequence: Synthetic oligonucleotide
  Sense strand starting at position 2727 of SEQ ID NO: 316624
ccguuugaagaaugauugu

SEQ ID NO: 427672 - RNA, 19 nt, Artificial Sequence
  Description of Artificial Sequence: Synthetic oligonucleotide
  Antisense Strand to SEQ ID NO: 427671
acaaucauucuucaaacgg

SEQ ID NO: 427673 - RNA, 19 nt, Artificial Sequence
  Description of Artificial Sequence: Synthetic oligonucleotide
  Sense strand starting at position 2733 of SEQ ID NO: 316624
gaagaaugauuguugucgu

SEQ ID NO: 427674 - RNA, 19 nt, Artificial Sequence
  Description of Artificial Sequence: Synthetic oligonucleotide
  Antisense Strand to SEQ ID NO: 427673
acgacaacaaucauucuuc

SEQ ID NO: 427675 - RNA, 19 nt, Artificial Sequence
  Description of Artificial Sequence: Synthetic oligonucleotide
  Sense strand starting at position 2734 of SEQ ID NO: 316624
aagaaugauuguugucgua

SEQ ID NO: 427676 - RNA, 19 nt, Artificial Sequence
  Description of Artificial Sequence: Synthetic oligonucleotide
  Antisense Strand to SEQ ID NO: 427675
uacgacaacaaucauucuu

SEQ ID NO: 427677 - RNA, 19 nt, Artificial Sequence
  Description of Artificial Sequence: Synthetic oligonucleotide
  Sense strand starting at position 2736 of SEQ ID NO: 316624
gaaugauuguugucguaaa

SEQ ID NO: 427678 - RNA, 19 nt, Artificial Sequence
  Description of Artificial Sequence: Synthetic oligonucleotide
  Antisense Strand to SEQ ID NO: 427677
uuuacgacaacaaucauuc

SEQ ID NO: 427679 - RNA, 19 nt, Artificial Sequence
  Description of Artificial Sequence: Synthetic oligonucleotide
  Sense strand starting at position 2749 of SEQ ID NO: 316624
cguaaaggccuuugauaau

SEQ ID NO: 427680 - RNA, 19 nt, Artificial Sequence
  Description of Artificial Sequence: Synthetic oligonucleotide
  Antisense Strand to SEQ ID NO: 427679
auuaucaaaggccuuuacg

SEQ ID NO: 427681 - RNA, 19 nt, Artificial Sequence
  Description of Artificial Sequence: Synthetic oligonucleotide
  Sense strand starting at position 2755 of SEQ ID NO: 316624
ggccuuugauaauaauaga

SEQ ID NO: 427682 - RNA, 19 nt, Artificial Sequence
  Description of Artificial Sequence: Synthetic oligonucleotide
  Antisense Strand to SEQ ID NO: 427681
ucuauuauuaucaaaggcc

SEQ ID NO: 427683 - RNA, 19 nt, Artificial Sequence
  Description of Artificial Sequence: Synthetic oligonucleotide
  Sense strand starting at position 2776 of SEQ ID NO: 316624
cuguuuacccagugcuuga

SEQ ID NO: 427684 - RNA, 19 nt, Artificial Sequence
  Description of Artificial Sequence: Synthetic oligonucleotide
  Antisense Strand to SEQ ID NO: 427683
ucaagcacuggguaaacag

SEQ ID NO: 427685 - RNA, 19 nt, Artificial Sequence
  Description of Artificial Sequence: Synthetic oligonucleotide
  Sense strand starting at position 2816 of SEQ ID NO: 316624
cugcguacacauuauucua

SEQ ID NO: 427686 - RNA, 19 nt, Artificial Sequence
  Description of Artificial Sequence: Synthetic oligonucleotide
  Antisense Strand to SEQ ID NO: 427685
uagaauaauguguacgcag

SEQ ID NO: 427687 - RNA, 19 nt, Artificial Sequence
  Description of Artificial Sequence: Synthetic oligonucleotide
  Sense strand starting at position 2818 of SEQ ID NO: 316624
gcguacacauuauucuauu

SEQ ID NO: 427688 - RNA, 19 nt, Artificial Sequence
  Description of Artificial Sequence: Synthetic oligonucleotide
  Antisense Strand to SEQ ID NO: 427687
aauagaauaauguguacgc

SEQ ID NO: 427689 - RNA, 19 nt, Artificial Sequence
  Description of Artificial Sequence: Synthetic oligonucleotide
  Sense strand starting at position 2854 of SEQ ID NO: 316624
ugagguagguacugucauu

SEQ ID NO: 427690 - RNA, 19 nt, Artificial Sequence
  Description of Artificial Sequence: Synthetic oligonucleotide
  Antisense Strand to SEQ ID NO: 427689
aaugacaguaccuaccuca

SEQ ID NO: 427691 - RNA, 19 nt, Artificial Sequence
  Description of Artificial Sequence: Synthetic oligonucleotide
  Sense strand starting at position 2859 of SEQ ID NO: 316624
uagguacugucauuacugu

SEQ ID NO: 427692 - RNA, 19 nt, Artificial Sequence
  Description of Artificial Sequence: Synthetic oligonucleotide
  Antisense Strand to SEQ ID NO: 427691
acaguaaugacaguaccua

SEQ ID NO: 427693 - RNA, 19 nt, Artificial Sequence
  Description of Artificial Sequence: Synthetic oligonucleotide
  Sense strand starting at position 3355 of SEQ ID NO: 316624
ucccaaguucuguggucua

SEQ ID NO: 427694 - RNA, 19 nt, Artificial Sequence
  Description of Artificial Sequence: Synthetic oligonucleotide
  Antisense Strand to SEQ ID NO: 427693
uagaccacagaacuuggga

SEQ ID NO: 427695 - RNA, 19 nt, Artificial Sequence
  Description of Artificial Sequence: Synthetic oligonucleotide
  Sense strand starting at position 3360 of SEQ ID NO: 316624
aguucuguggucuauuguu

SEQ ID NO: 427696 - RNA, 19 nt, Artificial Sequence
  Description of Artificial Sequence: Synthetic oligonucleotide
  Antisense Strand to SEQ ID NO: 427695
aacaauagaccacagaacu

SEQ ID NO: 427697 - RNA, 19 nt, Artificial Sequence
  Description of Artificial Sequence: Synthetic oligonucleotide
  Sense strand starting at position 3670 of SEQ ID NO: 316624
cuugaugaccucuguaauc

SEQ ID NO: 427698 - RNA, 19 nt, Artificial Sequence
  Description of Artificial Sequence: Synthetic oligonucleotide
  Antisense Strand to SEQ ID NO: 427697
gauuacagaggucaucaag

SEQ ID NO: 427699 - RNA, 19 nt, Artificial Sequence
  Description of Artificial Sequence: Synthetic oligonucleotide
  Sense strand starting at position 3672 of SEQ ID NO: 316624
ugaugaccucuguaaucau

SEQ ID NO: 427700 - RNA, 19 nt, Artificial Sequence
  Description of Artificial Sequence: Synthetic oligonucleotide
  Antisense Strand to SEQ ID NO: 427699
augauuacagaggucauca

SEQ ID NO: 427701 - RNA, 19 nt, Artificial Sequence
  Description of Artificial Sequence: Synthetic oligonucleotide
  Sense strand starting at position 3679 of SEQ ID NO: 316624
cucuguaaucaugagguaa

SEQ ID NO: 427702 - RNA, 19 nt, Artificial Sequence
  Description of Artificial Sequence: Synthetic oligonucleotide
  Antisense Strand to SEQ ID NO: 427701
uuaccucaugauuacagag

SEQ ID NO: 427703 - RNA, 19 nt, Artificial Sequence
  Description of Artificial Sequence: Synthetic oligonucleotide
  Sense strand starting at position 3681 of SEQ ID NO: 316624
cuguaaucaugagguaaug

SEQ ID NO: 427704 - RNA, 19 nt, Artificial Sequence
  Description of Artificial Sequence: Synthetic oligonucleotide
  Antisense Strand to SEQ ID NO: 427703
cauuaccucaugauuacag

SEQ ID NO: 427705 - RNA, 19 nt, Artificial Sequence
  Description of Artificial Sequence: Synthetic oligonucleotide
  Sense strand starting at position 3690 of SEQ ID NO: 316624
ugagguaauguccaaguaa

SEQ ID NO: 427706 - RNA, 19 nt, Artificial Sequence
  Description of Artificial Sequence: Synthetic oligonucleotide
  Antisense Strand to SEQ ID NO: 427705
uuacuuggacauuaccuca

SEQ ID NO: 427707 - RNA, 19 nt, Artificial Sequence
  Description of Artificial Sequence: Synthetic oligonucleotide
  Sense strand starting at position 31 of SEQ ID NO: 316625
gcuauagacugcuuuacac

SEQ ID NO: 427708 - RNA, 19 nt, Artificial Sequence
  Description of Artificial Sequence: Synthetic oligonucleotide
  Antisense Strand to SEQ ID NO: 427707
guguaaagcagucuauagc

SEQ ID NO: 427709 - RNA, 19 nt, Artificial Sequence
  Description of Artificial Sequence: Synthetic oligonucleotide
  Sense strand starting at position 41 of SEQ ID NO: 316625
gcuuuacaccaagaaaguu

SEQ ID NO: 427710 - RNA, 19 nt, Artificial Sequence
  Description of Artificial Sequence: Synthetic oligonucleotide
  Antisense Strand to SEQ ID NO: 427709
aacuuucuugguguaaagc

SEQ ID NO: 427711 - RNA, 19 nt, Artificial Sequence
  Description of Artificial Sequence: Synthetic oligonucleotide
  Sense strand starting at position 116 of SEQ ID NO: 316625
guagcauguguacaagaac

SEQ ID NO: 427712 - RNA, 19 nt, Artificial Sequence
  Description of Artificial Sequence: Synthetic oligonucleotide
  Antisense Strand to SEQ ID NO: 427711
guucuuguacacaugcuac

SEQ ID NO: 427713 - RNA, 19 nt, Artificial Sequence
  Description of Artificial Sequence: Synthetic oligonucleotide
  Sense strand starting at position 119 of SEQ ID NO: 316625
gcauguguacaagaacauu

SEQ ID NO: 427714 - RNA, 19 nt, Artificial Sequence
  Description of Artificial Sequence: Synthetic oligonucleotide
  Antisense Strand to SEQ ID NO: 427713
aauguucuuguacacaugc

SEQ ID NO: 427715 - RNA, 19 nt, Artificial Sequence
  Description of Artificial Sequence: Synthetic oligonucleotide
  Sense strand starting at position 198 of SEQ ID NO: 316625
gggugauaaugacaaacua

SEQ ID NO: 427716 - RNA, 19 nt, Artificial Sequence
  Description of Artificial Sequence: Synthetic oligonucleotide
  Antisense Strand to SEQ ID NO: 427715
uaguuugucauuaucaccc

SEQ ID NO: 427717 - RNA, 19 nt, Artificial Sequence
  Description of Artificial Sequence: Synthetic oligonucleotide
  Sense strand starting at position 348 of SEQ ID NO: 316625
uuuagauaugugugaagaa

SEQ ID NO: 427718 - RNA, 19 nt, Artificial Sequence
  Description of Artificial Sequence: Synthetic oligonucleotide
  Antisense Strand to SEQ ID NO: 427717
uucuucacacauaucuaaa

SEQ ID NO: 427719 - RNA, 19 nt, Artificial Sequence
  Description of Artificial Sequence: Synthetic oligonucleotide
  Sense strand starting at position 597 of SEQ ID NO: 316625
auuguauucuuauuccagu

SEQ ID NO: 427720 - RNA, 19 nt, Artificial Sequence
  Description of Artificial Sequence: Synthetic oligonucleotide
  Antisense Strand to SEQ ID NO: 427719
acuggaauaagaauacaau

SEQ ID NO: 427721 - RNA, 19 nt, Artificial Sequence
  Description of Artificial Sequence: Synthetic oligonucleotide
  Sense strand starting at position 603 of SEQ ID NO: 316625
uucuuauuccaguaguguu

SEQ ID NO: 427722 - RNA, 19 nt, Artificial Sequence
  Description of Artificial Sequence: Synthetic oligonucleotide
  Antisense Strand to SEQ ID NO: 427721
aacacuacuggaauaagaa

SEQ ID NO: 427723 - RNA, 19 nt, Artificial Sequence
  Description of Artificial Sequence: Synthetic oligonucleotide
  Sense strand starting at position 616 of SEQ ID NO: 316625
aguguucugguuugaauau

SEQ ID NO: 427724 - RNA, 19 nt, Artificial Sequence
  Description of Artificial Sequence: Synthetic oligonucleotide
  Antisense Strand to SEQ ID NO: 427723
auauucaaaccagaacacu

SEQ ID NO: 427725 - RNA, 19 nt, Artificial Sequence
  Description of Artificial Sequence: Synthetic oligonucleotide
  Sense strand starting at position 685 of SEQ ID NO: 316625
auagccugggcauguaaau

SEQ ID NO: 427726 - RNA, 19 nt, Artificial Sequence
  Description of Artificial Sequence: Synthetic oligonucleotide
  Antisense Strand to SEQ ID NO: 427725
auuuacaugcccaggcuau

SEQ ID NO: 427727 - RNA, 19 nt, Artificial Sequence
  Description of Artificial Sequence: Synthetic oligonucleotide
  Sense strand starting at position 698 of SEQ ID NO: 316625
guaaaucaugccgcuguuu

SEQ ID NO: 427728 - RNA, 19 nt, Artificial Sequence
  Description of Artificial Sequence: Synthetic oligonucleotide
  Antisense Strand to SEQ ID NO: 427727
aaacagcggcaugauuuac

SEQ ID NO: 427729 - RNA, 19 nt, Artificial Sequence
  Description of Artificial Sequence: Synthetic oligonucleotide
  Sense strand starting at position 745 of SEQ ID NO: 316625
ggcuuaaggagccaguauu

SEQ ID NO: 427730 - RNA, 19 nt, Artificial Sequence
  Description of Artificial Sequence: Synthetic oligonucleotide
  Antisense Strand to SEQ ID NO: 427729
aauacuggcuccuuaagcc

SEQ ID NO: 427731 - RNA, 19 nt, Artificial Sequence
  Description of Artificial Sequence: Synthetic oligonucleotide
  Sense strand starting at position 877 of SEQ ID NO: 316625
ucuguaaaccuggagucua

SEQ ID NO: 427732 - RNA, 19 nt, Artificial Sequence
  Description of Artificial Sequence: Synthetic oligonucleotide
  Antisense Strand to SEQ ID NO: 427731
uagacuccagguuuacaga

SEQ ID NO: 427733 - RNA, 19 nt, Artificial Sequence
  Description of Artificial Sequence: Synthetic oligonucleotide
  Sense strand starting at position 1075 of SEQ ID NO: 316625
acccaaacuuuggauagaa

SEQ ID NO: 427734 - RNA, 19 nt, Artificial Sequence
  Description of Artificial Sequence: Synthetic oligonucleotide
  Antisense Strand to SEQ ID NO: 427733
uucuauccaaaguuugggu

SEQ ID NO: 427735 - RNA, 19 nt, Artificial Sequence
  Description of Artificial Sequence: Synthetic oligonucleotide
  Sense strand starting at position 1142 of SEQ ID NO: 316625
uccagugucuuaucugaac

SEQ ID NO: 427736 - RNA, 19 nt, Artificial Sequence
  Description of Artificial Sequence: Synthetic oligonucleotide
  Antisense Strand to SEQ ID NO: 427735
guucagauaagacacugga

SEQ ID NO: 427737 - RNA, 19 nt, Artificial Sequence
  Description of Artificial Sequence: Synthetic oligonucleotide
  Sense strand starting at position 1217 of SEQ ID NO: 316625
ccaggauguuagucaagaa

SEQ ID NO: 427738 - RNA, 19 nt, Artificial Sequence
  Description of Artificial Sequence: Synthetic oligonucleotide
  Antisense Strand to SEQ ID NO: 427737
uucuugacuaacauccugg

SEQ ID NO: 427739 - RNA, 19 nt, Artificial Sequence
  Description of Artificial Sequence: Synthetic oligonucleotide
  Sense strand starting at position 1365 of SEQ ID NO: 316625
gaaccaugaggucagguuu

SEQ ID NO: 427740 - RNA, 19 nt, Artificial Sequence
  Description of Artificial Sequence: Synthetic oligonucleotide
  Antisense Strand to SEQ ID NO: 427739
aaaccugaccucaugguuc

SEQ ID NO: 427741 - RNA, 19 nt, Artificial Sequence
  Description of Artificial Sequence: Synthetic oligonucleotide
  Sense strand starting at position 1372 of SEQ ID NO: 316625
gaggucagguuucuaaagu

SEQ ID NO: 427742 - RNA, 19 nt, Artificial Sequence
  Description of Artificial Sequence: Synthetic oligonucleotide
  Antisense Strand to SEQ ID NO: 427741
acuuuagaaaccugaccuc

SEQ ID NO: 427743 - RNA, 19 nt, Artificial Sequence
  Description of Artificial Sequence: Synthetic oligonucleotide
  Sense strand starting at position 1381 of SEQ ID NO: 316625
uuucuaaaguccuuccagu

SEQ ID NO: 427744 - RNA, 19 nt, Artificial Sequence
  Description of Artificial Sequence: Synthetic oligonucleotide
  Antisense Strand to SEQ ID NO: 427743
acuggaaggacuuuagaaa

SEQ ID NO: 427745 - RNA, 19 nt, Artificial Sequence
  Description of Artificial Sequence: Synthetic oligonucleotide
  Sense strand starting at position 1401 of SEQ ID NO: 316625
cucacacucccagguauua

SEQ ID NO: 427746 - RNA, 19 nt, Artificial Sequence
  Description of Artificial Sequence: Synthetic oligonucleotide
  Antisense Strand to SEQ ID NO: 427745
uaauaccugggagugugag

SEQ ID NO: 427747 - RNA, 19 nt, Artificial Sequence
  Description of Artificial Sequence: Synthetic oligonucleotide
  Sense strand starting at position 1603 of SEQ ID NO: 316625
ggacaucauucucuugaag

SEQ ID NO: 427748 - RNA, 19 nt, Artificial Sequence
  Description of Artificial Sequence: Synthetic oligonucleotide
  Antisense Strand to SEQ ID NO: 427747
cuucaagagaaugaugucc

SEQ ID NO: 427749 - RNA, 19 nt, Artificial Sequence
  Description of Artificial Sequence: Synthetic oligonucleotide
  Sense strand starting at position 1732 of SEQ ID NO: 316625
ccggguggucuggauguuu

SEQ ID NO: 427750 - RNA, 19 nt, Artificial Sequence
  Description of Artificial Sequence: Synthetic oligonucleotide
  Antisense Strand to SEQ ID NO: 427749
aaacauccagaccacccgg

SEQ ID NO: 427751 - RNA, 19 nt, Artificial Sequence
  Description of Artificial Sequence: Synthetic oligonucleotide
  Sense strand starting at position 1743 of SEQ ID NO: 316625
ggauguuucucuccuucua

SEQ ID NO: 427752 - RNA, 19 nt, Artificial Sequence
  Description of Artificial Sequence: Synthetic oligonucleotide
  Antisense Strand to SEQ ID NO: 427751
uagaaggagagaaacaucc

SEQ ID NO: 427753 - RNA, 19 nt, Artificial Sequence
  Description of Artificial Sequence: Synthetic oligonucleotide
  Sense strand starting at position 1794 of SEQ ID NO: 316625
ggcaguuugauggaauacu

SEQ ID NO: 427754 - RNA, 19 nt, Artificial Sequence
  Description of Artificial Sequence: Synthetic oligonucleotide
  Antisense Strand to SEQ ID NO: 427753
aguauuccaucaaacugcc

SEQ ID NO: 427755 - RNA, 19 nt, Artificial Sequence
  Description of Artificial Sequence: Synthetic oligonucleotide
  Sense strand starting at position 2504 of SEQ ID NO: 316625
ugaauuuccuaaggaugua

SEQ ID NO: 427756 - RNA, 19 nt, Artificial Sequence
  Description of Artificial Sequence: Synthetic oligonucleotide
  Antisense Strand to SEQ ID NO: 427755
uacauccuuaggaaauuca

SEQ ID NO: 427757 - RNA, 19 nt, Artificial Sequence
  Description of Artificial Sequence: Synthetic oligonucleotide
  Sense strand starting at position 2665 of SEQ ID NO: 316625
uugaacuguuaaccaguaa

SEQ ID NO: 427758 - RNA, 19 nt, Artificial Sequence
  Description of Artificial Sequence: Synthetic oligonucleotide
  Antisense Strand to SEQ ID NO: 427757
uuacugguuaacaguucaa

SEQ ID NO: 427759 - RNA, 19 nt, Artificial Sequence
  Description of Artificial Sequence: Synthetic oligonucleotide
  Sense strand starting at position 3250 of SEQ ID NO: 316625
gaguucuuugaauaugcau

SEQ ID NO: 427760 - RNA, 19 nt, Artificial Sequence
  Description of Artificial Sequence: Synthetic oligonucleotide
  Antisense Strand to SEQ ID NO: 427759
augcauauucaaagaacuc

SEQ ID NO: 427761 - RNA, 19 nt, Artificial Sequence
  Description of Artificial Sequence: Synthetic oligonucleotide
  Sense strand starting at position 3361 of SEQ ID NO: 316625
aguuguugaaauugaagca

SEQ ID NO: 427762 - RNA, 19 nt, Artificial Sequence
  Description of Artificial Sequence: Synthetic oligonucleotide
  Antisense Strand to SEQ ID NO: 427761
ugcuucaauuucaacaacu

SEQ ID NO: 427763 - RNA, 19 nt, Artificial Sequence
  Description of Artificial Sequence: Synthetic oligonucleotide
  Sense strand starting at position 3609 of SEQ ID NO: 316625
gcauuacauuugcuguaga

SEQ ID NO: 427764 - RNA, 19 nt, Artificial Sequence
  Description of Artificial Sequence: Synthetic oligonucleotide
  Antisense Strand to SEQ ID NO: 427763
ucuacagcaaauguaaugc

SEQ ID NO: 427765 - RNA, 19 nt, Artificial Sequence
  Description of Artificial Sequence: Synthetic oligonucleotide
  Sense strand starting at position 3738 of SEQ ID NO: 316625
cugagagcaccucauacua

SEQ ID NO: 427766 - RNA, 19 nt, Artificial Sequence
  Description of Artificial Sequence: Synthetic oligonucleotide
  Antisense Strand to SEQ ID NO: 427765
uaguaugaggugcucucag

SEQ ID NO: 427767 - RNA, 19 nt, Artificial Sequence
  Description of Artificial Sequence: Synthetic oligonucleotide
  Sense strand starting at position 3754 of SEQ ID NO: 316625
cuaugacagccuugguaag

SEQ ID NO: 427768 - RNA, 19 nt, Artificial Sequence
  Description of Artificial Sequence: Synthetic oligonucleotide
  Antisense Strand to SEQ ID NO: 427767
cuuaccaaggcugucauag

SEQ ID NO: 427769 - RNA, 19 nt, Artificial Sequence
  Description of Artificial Sequence: Synthetic oligonucleotide
  Sense strand starting at position 3755 of SEQ ID NO: 316625
uaugacagccuugguaaga

SEQ ID NO: 427770 - RNA, 19 nt, Artificial Sequence
  Description of Artificial Sequence: Synthetic oligonucleotide
  Antisense Strand to SEQ ID NO: 427769
ucuuaccaaggcugucaua

SEQ ID NO: 427771 - RNA, 19 nt, Artificial Sequence
  Description of Artificial Sequence: Synthetic oligonucleotide
  Sense strand starting at position 3833 of SEQ ID NO: 316625
aucuuauauugggcuugga

SEQ ID NO: 427772 - RNA, 19 nt, Artificial Sequence
  Description of Artificial Sequence: Synthetic oligonucleotide
  Antisense Strand to SEQ ID NO: 427771
uccaagcccaauauaagau

SEQ ID NO: 427773 - RNA, 19 nt, Artificial Sequence
  Description of Artificial Sequence: Synthetic oligonucleotide
  Sense strand starting at position 3836 of SEQ ID NO: 316625
uuauauugggcuuggaauu

SEQ ID NO: 427774 - RNA, 19 nt, Artificial Sequence
  Description of Artificial Sequence: Synthetic oligonucleotide
  Antisense Strand to SEQ ID NO: 427773
aauuccaagcccaauauaa

SEQ ID NO: 427775 - RNA, 19 nt, Artificial Sequence
  Description of Artificial Sequence: Synthetic oligonucleotide
  Sense strand starting at position 3915 of SEQ ID NO: 316625
aaugaauucugacagggag

SEQ ID NO: 427776 - RNA, 19 nt, Artificial Sequence
  Description of Artificial Sequence: Synthetic oligonucleotide
  Antisense Strand to SEQ ID NO: 427775
cucccugucagaauucauu

SEQ ID NO: 427777 - RNA, 19 nt, Artificial Sequence
  Description of Artificial Sequence: Synthetic oligonucleotide
  Sense strand starting at position 3917 of SEQ ID NO: 316625
ugaauucugacagggagca

SEQ ID NO: 427778 - RNA, 19 nt, Artificial Sequence
  Description of Artificial Sequence: Synthetic oligonucleotide
  Antisense Strand to SEQ ID NO: 427777
ugcucccugucagaauuca

SEQ ID NO: 427779 - RNA, 19 nt, Artificial Sequence
  Description of Artificial Sequence: Synthetic oligonucleotide
  Sense strand starting at position 3918 of SEQ ID NO: 316625
gaauucugacagggagcau

SEQ ID NO: 427780 - RNA, 19 nt, Artificial Sequence
  Description of Artificial Sequence: Synthetic oligonucleotide
  Antisense Strand to SEQ ID NO: 427779
augcucccugucagaauuc

SEQ ID NO: 427781 - RNA, 19 nt, Artificial Sequence
  Description of Artificial Sequence: Synthetic oligonucleotide
  Sense strand starting at position 3946 of SEQ ID NO: 316625
gggaggguugcauggagaa

SEQ ID NO: 427782 - RNA, 19 nt, Artificial Sequence
  Description of Artificial Sequence: Synthetic oligonucleotide
  Antisense Strand to SEQ ID NO: 427781
uucuccaugcaacccuccc

SEQ ID NO: 427783 - RNA, 19 nt, Artificial Sequence
  Description of Artificial Sequence: Synthetic oligonucleotide
  Sense strand starting at position 3972 of SEQ ID NO: 316625
cugagcugguccuugacaa

SEQ ID NO: 427784 - RNA, 19 nt, Artificial Sequence
  Description of Artificial Sequence: Synthetic oligonucleotide
  Antisense Strand to SEQ ID NO: 427783
uugucaaggaccagcucag

SEQ ID NO: 427785 - RNA, 19 nt, Artificial Sequence
  Description of Artificial Sequence: Synthetic oligonucleotide
  Sense strand starting at position 3973 of SEQ ID NO: 316625
ugagcugguccuugacaaa

SEQ ID NO: 427786 - RNA, 19 nt, Artificial Sequence
  Description of Artificial Sequence: Synthetic oligonucleotide
  Antisense Strand to SEQ ID NO: 427785
uuugucaaggaccagcuca

SEQ ID NO: 427787 - RNA, 19 nt, Artificial Sequence
  Description of Artificial Sequence: Synthetic oligonucleotide
  Sense strand starting at position 107 of SEQ ID NO: 316626
gcuaaagaagugugaacau

SEQ ID NO: 427788 - RNA, 19 nt, Artificial Sequence
  Description of Artificial Sequence: Synthetic oligonucleotide
  Antisense Strand to SEQ ID NO: 427787
auguucacacuucuuuagc

SEQ ID NO: 427789 - RNA, 19 nt, Artificial Sequence
  Description of Artificial Sequence: Synthetic oligonucleotide
  Sense strand starting at position 529 of SEQ ID NO: 316626
aauggaagguugucccaga

SEQ ID NO: 427790 - RNA, 19 nt, Artificial Sequence
  Description of Artificial Sequence: Synthetic oligonucleotide
  Antisense Strand to SEQ ID NO: 427789
ucugggacaaccuuccauu

SEQ ID NO: 427791 - RNA, 19 nt, Artificial Sequence
  Description of Artificial Sequence: Synthetic oligonucleotide
  Sense strand starting at position 530 of SEQ ID NO: 316626
auggaagguugucccagau

SEQ ID NO: 427792 - RNA, 19 nt, Artificial Sequence
  Description of Artificial Sequence: Synthetic oligonucleotide
  Antisense Strand to SEQ ID NO: 427791
aucugggacaaccuuccau

SEQ ID NO: 427793 - RNA, 19 nt, Artificial Sequence
  Description of Artificial Sequence: Synthetic oligonucleotide
  Sense strand starting at position 534 of SEQ ID NO: 316626
aagguugucccagauacac

SEQ ID NO: 427794 - RNA, 19 nt, Artificial Sequence
  Description of Artificial Sequence: Synthetic oligonucleotide
  Antisense Strand to SEQ ID NO: 427793
guguaucugggacaaccuu

SEQ ID NO: 427795 - RNA, 19 nt, Artificial Sequence
  Description of Artificial Sequence: Synthetic oligonucleotide
  Sense strand starting at position 615 of SEQ ID NO: 316626
uguuauugcaucuaucgag

SEQ ID NO: 427796 - RNA, 19 nt, Artificial Sequence
  Description of Artificial Sequence: Synthetic oligonucleotide
  Antisense Strand to SEQ ID NO: 427795
cucgauagaugcaauaaca

SEQ ID NO: 427797 - RNA, 19 nt, Artificial Sequence
  Description of Artificial Sequence: Synthetic oligonucleotide
  Sense strand starting at position 622 of SEQ ID NO: 316626
gcaucuaucgaguacuaag

SEQ ID NO: 427798 - RNA, 19 nt, Artificial Sequence
  Description of Artificial Sequence: Synthetic oligonucleotide
  Antisense Strand to SEQ ID NO: 427797
cuuaguacucgauagaugc

SEQ ID NO: 427799 - RNA, 19 nt, Artificial Sequence
  Description of Artificial Sequence: Synthetic oligonucleotide
  Sense strand starting at position 679 of SEQ ID NO: 316626
aagugauaucaagggucau

SEQ ID NO: 427800 - RNA, 19 nt, Artificial Sequence
  Description of Artificial Sequence: Synthetic oligonucleotide
  Antisense Strand to SEQ ID NO: 427799
augacccuugauaucacuu

SEQ ID NO: 427801 - RNA, 19 nt, Artificial Sequence
  Description of Artificial Sequence: Synthetic oligonucleotide
  Sense strand starting at position 680 of SEQ ID NO: 316626
agugauaucaagggucaug

SEQ ID NO: 427802 - RNA, 19 nt, Artificial Sequence
  Description of Artificial Sequence: Synthetic oligonucleotide
  Antisense Strand to SEQ ID NO: 427801
caugacccuugauaucacu

SEQ ID NO: 427803 - RNA, 19 nt, Artificial Sequence
  Description of Artificial Sequence: Synthetic oligonucleotide
  Sense strand starting at position 710 of SEQ ID NO: 316626
augucagggucuccagaaa

SEQ ID NO: 427804 - RNA, 19 nt, Artificial Sequence
  Description of Artificial Sequence: Synthetic oligonucleotide
  Antisense Strand to SEQ ID NO: 427803
uuucuggagacccugacau

SEQ ID NO: 427805 - RNA, 19 nt, Artificial Sequence
  Description of Artificial Sequence: Synthetic oligonucleotide
  Sense strand starting at position 889 of SEQ ID NO: 316626
aagugcuauguggaauaca

SEQ ID NO: 427806 - RNA, 19 nt, Artificial Sequence
  Description of Artificial Sequence: Synthetic oligonucleotide
  Antisense Strand to SEQ ID NO: 427805
uguauuccacauagcacuu

SEQ ID NO: 427807 - RNA, 19 nt, Artificial Sequence
  Description of Artificial Sequence: Synthetic oligonucleotide
  Sense strand starting at position 902 of SEQ ID NO: 316626
aauacagaccaguguaagu

SEQ ID NO: 427808 - RNA, 19 nt, Artificial Sequence
  Description of Artificial Sequence: Synthetic oligonucleotide
  Antisense Strand to SEQ ID NO: 427807
acuuacacuggucuguauu

SEQ ID NO: 427809 - RNA, 19 nt, Artificial Sequence
  Description of Artificial Sequence: Synthetic oligonucleotide
  Sense strand starting at position 991 of SEQ ID NO: 316626
ggugguaacagaugguuaa

SEQ ID NO: 427810 - RNA, 19 nt, Artificial Sequence
  Description of Artificial Sequence: Synthetic oligonucleotide
  Antisense Strand to SEQ ID NO: 427809
uuaaccaucuguuaccacc

SEQ ID NO: 427811 - RNA, 19 nt, Artificial Sequence
  Description of Artificial Sequence: Synthetic oligonucleotide
  Sense strand starting at position 992 of SEQ ID NO: 316626
gugguaacagaugguuaaa

SEQ ID NO: 427812 - RNA, 19 nt, Artificial Sequence
  Description of Artificial Sequence: Synthetic oligonucleotide
  Antisense Strand to SEQ ID NO: 427811
uuuaaccaucuguuaccac

SEQ ID NO: 427813 - RNA, 19 nt, Artificial Sequence
  Description of Artificial Sequence: Synthetic oligonucleotide
  Sense strand starting at position 1045 of SEQ ID NO: 316626
uccaaauguugagucagau

SEQ ID NO: 427814 - RNA, 19 nt, Artificial Sequence
  Description of Artificial Sequence: Synthetic oligonucleotide
  Antisense Strand to SEQ ID NO: 427813
aucugacucaacauuugga

SEQ ID NO: 427815 - RNA, 19 nt, Artificial Sequence
  Description of Artificial Sequence: Synthetic oligonucleotide
  Sense strand starting at position 1085 of SEQ ID NO: 316626
acggguaaaugucuauaca

SEQ ID NO: 427816 - RNA, 19 nt, Artificial Sequence
  Description of Artificial Sequence: Synthetic oligonucleotide
  Antisense Strand to SEQ ID NO: 427815
uguauagacauuuacccgu

SEQ ID NO: 427817 - RNA, 19 nt, Artificial Sequence
  Description of Artificial Sequence: Synthetic oligonucleotide
  Sense strand starting at position 1086 of SEQ ID NO: 316626
cggguaaaugucuauacaa

SEQ ID NO: 427818 - RNA, 19 nt, Artificial Sequence
  Description of Artificial Sequence: Synthetic oligonucleotide
  Antisense Strand to SEQ ID NO: 427817
uuguauagacauuuacccg

SEQ ID NO: 427819 - RNA, 19 nt, Artificial Sequence
  Description of Artificial Sequence: Synthetic oligonucleotide
  Sense strand starting at position 1088 of SEQ ID NO: 316626
gguaaaugucuauacaacc

SEQ ID NO: 427820 - RNA, 19 nt, Artificial Sequence
  Description of Artificial Sequence: Synthetic oligonucleotide
  Antisense Strand to SEQ ID NO: 427819
gguuguauagacauuuacc

SEQ ID NO: 427821 - RNA, 19 nt, Artificial Sequence
  Description of Artificial Sequence: Synthetic oligonucleotide
  Sense strand starting at position 1142 of SEQ ID NO: 316626
cuggccauccuagaaucuu

SEQ ID NO: 427822 - RNA, 19 nt, Artificial Sequence
  Description of Artificial Sequence: Synthetic oligonucleotide
  Antisense Strand to SEQ ID NO: 427821
aagauucuaggauggccag

SEQ ID NO: 427823 - RNA, 19 nt, Artificial Sequence
  Description of Artificial Sequence: Synthetic oligonucleotide
  Sense strand starting at position 1163 of SEQ ID NO: 316626
agaacugacucauuguuac

SEQ ID NO: 427824 - RNA, 19 nt, Artificial Sequence
  Description of Artificial Sequence: Synthetic oligonucleotide
  Antisense Strand to SEQ ID NO: 427823
guaacaaugagucaguucu

SEQ ID NO: 427825 - RNA, 19 nt, Artificial Sequence
  Description of Artificial Sequence: Synthetic oligonucleotide
  Sense strand starting at position 1376 of SEQ ID NO: 316626
ucaccuagaggucacgaua

SEQ ID NO: 427826 - RNA, 19 nt, Artificial Sequence
  Description of Artificial Sequence: Synthetic oligonucleotide
  Antisense Strand to SEQ ID NO: 427825
uaucgugaccucuagguga

SEQ ID NO: 427827 - RNA, 19 nt, Artificial Sequence
  Description of Artificial Sequence: Synthetic oligonucleotide
  Sense strand starting at position 1502 of SEQ ID NO: 316626
agagucaaaucccucuuga

SEQ ID NO: 427828 - RNA, 19 nt, Artificial Sequence
  Description of Artificial Sequence: Synthetic oligonucleotide
  Antisense Strand to SEQ ID NO: 427827
ucaagagggauuugacucu

SEQ ID NO: 427829 - RNA, 19 nt, Artificial Sequence
  Description of Artificial Sequence: Synthetic oligonucleotide
  Sense strand starting at position 2238 of SEQ ID NO: 316626
gagcacuguagggaugauu

SEQ ID NO: 427830 - RNA, 19 nt, Artificial Sequence
  Description of Artificial Sequence: Synthetic oligonucleotide
  Antisense Strand to SEQ ID NO: 427829
aaucaucccuacagugcuc

SEQ ID NO: 427831 - RNA, 19 nt, Artificial Sequence
  Description of Artificial Sequence: Synthetic oligonucleotide
  Sense strand starting at position 2460 of SEQ ID NO: 316626
uggccagugagcgaacaau

SEQ ID NO: 427832 - RNA, 19 nt, Artificial Sequence
  Description of Artificial Sequence: Synthetic oligonucleotide
  Antisense Strand to SEQ ID NO: 427831
auuguucgcucacuggcca

SEQ ID NO: 427833 - RNA, 19 nt, Artificial Sequence
  Description of Artificial Sequence: Synthetic oligonucleotide
  Sense strand starting at position 2513 of SEQ ID NO: 316626
cucugcuauccggaugaca

SEQ ID NO: 427834 - RNA, 19 nt, Artificial Sequence
  Description of Artificial Sequence: Synthetic oligonucleotide
  Antisense Strand to SEQ ID NO: 427833
ugucauccggauagcagag

SEQ ID NO: 427835 - RNA, 19 nt, Artificial Sequence
  Description of Artificial Sequence: Synthetic oligonucleotide
  Sense strand starting at position 2515 of SEQ ID NO: 316626
cugcuauccggaugacaaa

SEQ ID NO: 427836 - RNA, 19 nt, Artificial Sequence
  Description of Artificial Sequence: Synthetic oligonucleotide
  Antisense Strand to SEQ ID NO: 427835
uuugucauccggauagcag

SEQ ID NO: 427837 - RNA, 19 nt, Artificial Sequence
  Description of Artificial Sequence: Synthetic oligonucleotide
  Sense strand starting at position 2516 of SEQ ID NO: 316626
ugcuauccggaugacaaau

SEQ ID NO: 427838 - RNA, 19 nt, Artificial Sequence
  Description of Artificial Sequence: Synthetic oligonucleotide
  Antisense Strand to SEQ ID NO: 427837
auuugucauccggauagca

SEQ ID NO: 427839 - RNA, 19 nt, Artificial Sequence
  Description of Artificial Sequence: Synthetic oligonucleotide
  Sense strand starting at position 2527 of SEQ ID NO: 316626
ugacaaauccaguguggau

SEQ ID NO: 427840 - RNA, 19 nt, Artificial Sequence
  Description of Artificial Sequence: Synthetic oligonucleotide
  Antisense Strand to SEQ ID NO: 427839
auccacacuggauuuguca

SEQ ID NO: 427841 - RNA, 19 nt, Artificial Sequence
  Description of Artificial Sequence: Synthetic oligonucleotide
  Sense strand starting at position 2599 of SEQ ID NO: 316626
aggugauaguucguggaaa

SEQ ID NO: 427842 - RNA, 19 nt, Artificial Sequence
  Description of Artificial Sequence: Synthetic oligonucleotide
  Antisense Strand to SEQ ID NO: 427841
uuuccacgaacuaucaccu

SEQ ID NO: 427843 - RNA, 19 nt, Artificial Sequence
  Description of Artificial Sequence: Synthetic oligonucleotide
  Sense strand starting at position 2678 of SEQ ID NO: 316626
ggaguaacuuuguuauaac

SEQ ID NO: 427844 - RNA, 19 nt, Artificial Sequence
  Description of Artificial Sequence: Synthetic oligonucleotide
  Antisense Strand to SEQ ID NO: 427843
guuauaacaaaguuacucc

SEQ ID NO: 427845 - RNA, 19 nt, Artificial Sequence
  Description of Artificial Sequence: Synthetic oligonucleotide
  Sense strand starting at position 2739 of SEQ ID NO: 316626
cucaguaauuaagucagau

SEQ ID NO: 427846 - RNA, 19 nt, Artificial Sequence
  Description of Artificial Sequence: Synthetic oligonucleotide
  Antisense Strand to SEQ ID NO: 427845
aucugacuuaauuacugag

SEQ ID NO: 427847 - RNA, 19 nt, Artificial Sequence
  Description of Artificial Sequence: Synthetic oligonucleotide
  Sense strand starting at position 2949 of SEQ ID NO: 316626
guaauuugcauccggaagu

SEQ ID NO: 427848 - RNA, 19 nt, Artificial Sequence
  Description of Artificial Sequence: Synthetic oligonucleotide
  Antisense Strand to SEQ ID NO: 427847
acuuccggaugcaaauuac

SEQ ID NO: 427849 - RNA, 19 nt, Artificial Sequence
  Description of Artificial Sequence: Synthetic oligonucleotide
  Sense strand starting at position 2962 of SEQ ID NO: 316626
ggaaguagaugggcuuauu

SEQ ID NO: 427850 - RNA, 19 nt, Artificial Sequence
  Description of Artificial Sequence: Synthetic oligonucleotide
  Antisense Strand to SEQ ID NO: 427849
aauaagcccaucuacuucc

SEQ ID NO: 427851 - RNA, 19 nt, Artificial Sequence
  Description of Artificial Sequence: Synthetic oligonucleotide
  Sense strand starting at position 2965 of SEQ ID NO: 316626
aguagaugggcuuauugga

SEQ ID NO: 427852 - RNA, 19 nt, Artificial Sequence
  Description of Artificial Sequence: Synthetic oligonucleotide
  Antisense Strand to SEQ ID NO: 427851
uccaauaagcccaucuacu

SEQ ID NO: 427853 - RNA, 19 nt, Artificial Sequence
  Description of Artificial Sequence: Synthetic oligonucleotide
  Sense strand starting at position 3076 of SEQ ID NO: 316626
cgaucaagugcccauuaau

SEQ ID NO: 427854 - RNA, 19 nt, Artificial Sequence
  Description of Artificial Sequence: Synthetic oligonucleotide
  Antisense Strand to SEQ ID NO: 427853
auuaaugggcacuugaucg

SEQ ID NO: 427855 - RNA, 19 nt, Artificial Sequence
  Description of Artificial Sequence: Synthetic oligonucleotide
  Sense strand starting at position 3079 of SEQ ID NO: 316626
ucaagugcccauuaaugau

SEQ ID NO: 427856 - RNA, 19 nt, Artificial Sequence
  Description of Artificial Sequence: Synthetic oligonucleotide
  Antisense Strand to SEQ ID NO: 427855
aucauuaaugggcacuuga

SEQ ID NO: 427857 - RNA, 19 nt, Artificial Sequence
  Description of Artificial Sequence: Synthetic oligonucleotide
  Sense strand starting at position 3539 of SEQ ID NO: 316626
gaucaaauuugaggagaga

SEQ ID NO: 427858 - RNA, 19 nt, Artificial Sequence
  Description of Artificial Sequence: Synthetic oligonucleotide
  Antisense Strand to SEQ ID NO: 427857
ucucuccucaaauuugauc

SEQ ID NO: 427859 - RNA, 19 nt, Artificial Sequence
  Description of Artificial Sequence: Synthetic oligonucleotide
  Sense strand starting at position 3808 of SEQ ID NO: 316626
ccaggagagucuuucagag

SEQ ID NO: 427860 - RNA, 19 nt, Artificial Sequence
  Description of Artificial Sequence: Synthetic oligonucleotide
  Antisense Strand to SEQ ID NO: 427859
cucugaaagacucuccugg

SEQ ID NO: 427861 - RNA, 19 nt, Artificial Sequence
  Description of Artificial Sequence: Synthetic oligonucleotide
  Sense strand starting at position 3901 of SEQ ID NO: 316626
gugcucagaaguuacagua

SEQ ID NO: 427862 - RNA, 19 nt, Artificial Sequence
  Description of Artificial Sequence: Synthetic oligonucleotide
  Antisense Strand to SEQ ID NO: 427861
uacuguaacuucugagcac

SEQ ID NO: 427863 - RNA, 19 nt, Artificial Sequence
  Description of Artificial Sequence: Synthetic oligonucleotide
  Sense strand starting at position 3949 of SEQ ID NO: 316626
agaggaguacauugguuau

SEQ ID NO: 427864 - RNA, 19 nt, Artificial Sequence
  Description of Artificial Sequence: Synthetic oligonucleotide
  Antisense Strand to SEQ ID NO: 427863
auaaccaauguacuccucu

SEQ ID NO: 427865 - RNA, 19 nt, Artificial Sequence
  Description of Artificial Sequence: Synthetic oligonucleotide
  Sense strand starting at position 3952 of SEQ ID NO: 316626
ggaguacauugguuauaga

SEQ ID NO: 427866 - RNA, 19 nt, Artificial Sequence
  Description of Artificial Sequence: Synthetic oligonucleotide
  Antisense Strand to SEQ ID NO: 427865
ucuauaaccaauguacucc

SEQ ID NO: 427867 - RNA, 19 nt, Artificial Sequence
  Description of Artificial Sequence: Synthetic oligonucleotide
  Sense strand starting at position 55 of SEQ ID NO: 316627
aauggaagguugucccaga

SEQ ID NO: 427868 - RNA, 19 nt, Artificial Sequence
  Description of Artificial Sequence: Synthetic oligonucleotide
  Antisense Strand to SEQ ID NO: 427867
ucugggacaaccuuccauu

SEQ ID NO: 427869 - RNA, 19 nt, Artificial Sequence
  Description of Artificial Sequence: Synthetic oligonucleotide
  Sense strand starting at position 56 of SEQ ID NO: 316627
auggaagguugucccagau

SEQ ID NO: 427870 - RNA, 19 nt, Artificial Sequence
  Description of Artificial Sequence: Synthetic oligonucleotide
  Antisense Strand to SEQ ID NO: 427869
aucugggacaaccuuccau

SEQ ID NO: 427871 - RNA, 19 nt, Artificial Sequence
  Description of Artificial Sequence: Synthetic oligonucleotide
  Sense strand starting at position 60 of SEQ ID NO: 316627
aagguugucccagauacac

SEQ ID NO: 427872 - RNA, 19 nt, Artificial Sequence
  Description of Artificial Sequence: Synthetic oligonucleotide
  Antisense Strand to SEQ ID NO: 427871
guguaucugggacaaccuu

SEQ ID NO: 427873 - RNA, 19 nt, Artificial Sequence
  Description of Artificial Sequence: Synthetic oligonucleotide
  Sense strand starting at position 148 of SEQ ID NO: 316627
gcaucuaucgaguacuaag

SEQ ID NO: 427874 - RNA, 19 nt, Artificial Sequence
  Description of Artificial Sequence: Synthetic oligonucleotide
  Antisense Strand to SEQ ID NO: 427873
cuuaguacucgauagaugc

SEQ ID NO: 427875 - RNA, 19 nt, Artificial Sequence
  Description of Artificial Sequence: Synthetic oligonucleotide
  Sense strand starting at position 205 of SEQ ID NO: 316627
aagugauaucaagggucau

SEQ ID NO: 427876 - RNA, 19 nt, Artificial Sequence
  Description of Artificial Sequence: Synthetic oligonucleotide
  Antisense Strand to SEQ ID NO: 427875
augacccuugauaucacuu

SEQ ID NO: 427877 - RNA, 19 nt, Artificial Sequence
  Description of Artificial Sequence: Synthetic oligonucleotide
  Sense strand starting at position 206 of SEQ ID NO: 316627
agugauaucaagggucaug

SEQ ID NO: 427878 - RNA, 19 nt, Artificial Sequence
  Description of Artificial Sequence: Synthetic oligonucleotide
  Antisense Strand to SEQ ID NO: 427877
caugacccuugauaucacu

SEQ ID NO: 427879 - RNA, 19 nt, Artificial Sequence
  Description of Artificial Sequence: Synthetic oligonucleotide
  Sense strand starting at position 236 of SEQ ID NO: 316627
augucagggucuccagaaa

SEQ ID NO: 427880 - RNA, 19 nt, Artificial Sequence
  Description of Artificial Sequence: Synthetic oligonucleotide
  Antisense Strand to SEQ ID NO: 427879
uuucuggagacccugacau

SEQ ID NO: 427881 - RNA, 19 nt, Artificial Sequence
  Description of Artificial Sequence: Synthetic oligonucleotide
  Sense strand starting at position 415 of SEQ ID NO: 316627
aagugcuauguggaauaca

SEQ ID NO: 427882 - RNA, 19 nt, Artificial Sequence
  Description of Artificial Sequence: Synthetic oligonucleotide
  Antisense Strand to SEQ ID NO: 427881
uguauuccacauagcacuu

SEQ ID NO: 427883 - RNA, 19 nt, Artificial Sequence
  Description of Artificial Sequence: Synthetic oligonucleotide
  Sense strand starting at position 428 of SEQ ID NO: 316627
aauacagaccaguguaagu

SEQ ID NO: 427884 - RNA, 19 nt, Artificial Sequence
  Description of Artificial Sequence: Synthetic oligonucleotide
  Antisense Strand to SEQ ID NO: 427883
acuuacacuggucuguauu

SEQ ID NO: 427885 - RNA, 19 nt, Artificial Sequence
  Description of Artificial Sequence: Synthetic oligonucleotide
  Sense strand starting at position 517 of SEQ ID NO: 316627
ggugguaacagaugguuaa

SEQ ID NO: 427886 - RNA, 19 nt, Artificial Sequence
  Description of Artificial Sequence: Synthetic oligonucleotide
  Antisense Strand to SEQ ID NO: 427885
uuaaccaucuguuaccacc

SEQ ID NO: 427887 - RNA, 19 nt, Artificial Sequence
  Description of Artificial Sequence: Synthetic oligonucleotide
  Sense strand starting at position 518 of SEQ ID NO: 316627
gugguaacagaugguuaaa

SEQ ID NO: 427888 - RNA, 19 nt, Artificial Sequence
  Description of Artificial Sequence: Synthetic oligonucleotide
  Antisense Strand to SEQ ID NO: 427887
uuuaaccaucuguuaccac

SEQ ID NO: 427889 - RNA, 19 nt, Artificial Sequence
  Description of Artificial Sequence: Synthetic oligonucleotide
  Sense strand starting at position 571 of SEQ ID NO: 316627
uccaaauguugagucagau

SEQ ID NO: 427890 - RNA, 19 nt, Artificial Sequence
  Description of Artificial Sequence: Synthetic oligonucleotide
  Antisense Strand to SEQ ID NO: 427889
aucugacucaacauuugga

SEQ ID NO: 427891 - RNA, 19 nt, Artificial Sequence
  Description of Artificial Sequence: Synthetic oligonucleotide
  Sense strand starting at position 611 of SEQ ID NO: 316627
acggguaaaugucuauaca

SEQ ID NO: 427892 - RNA, 19 nt, Artificial Sequence
  Description of Artificial Sequence: Synthetic oligonucleotide
  Antisense Strand to SEQ ID NO: 427891
uguauagacauuuacccgu

SEQ ID NO: 427893 - RNA, 19 nt, Artificial Sequence
  Description of Artificial Sequence: Synthetic oligonucleotide
  Sense strand starting at position 612 of SEQ ID NO: 316627
cggguaaaugucuauacaa

SEQ ID NO: 427894 - RNA, 19 nt, Artificial Sequence
  Description of Artificial Sequence: Synthetic oligonucleotide
  Antisense Strand to SEQ ID NO: 427893
uuguauagacauuuacccg

SEQ ID NO: 427895 - RNA, 19 nt, Artificial Sequence
  Description of Artificial Sequence: Synthetic oligonucleotide
  Sense strand starting at position 614 of SEQ ID NO: 316627
gguaaaugucuauacaacc

SEQ ID NO: 427896 - RNA, 19 nt, Artificial Sequence
  Description of Artificial Sequence: Synthetic oligonucleotide
  Antisense Strand to SEQ ID NO: 427895
gguuguauagacauuuacc

SEQ ID NO: 427897 - RNA, 19 nt, Artificial Sequence
  Description of Artificial Sequence: Synthetic oligonucleotide
  Sense strand starting at position 668 of SEQ ID NO: 316627
cuggccauccuagaaucuu

SEQ ID NO: 427898 - RNA, 19 nt, Artificial Sequence
  Description of Artificial Sequence: Synthetic oligonucleotide
  Antisense Strand to SEQ ID NO: 427897
aagauucuaggauggccag

SEQ ID NO: 427899 - RNA, 19 nt, Artificial Sequence
  Description of Artificial Sequence: Synthetic oligonucleotide
  Sense strand starting at position 689 of SEQ ID NO: 316627
agaacugacucauuguuac

SEQ ID NO: 427900 - RNA, 19 nt, Artificial Sequence
  Description of Artificial Sequence: Synthetic oligonucleotide
  Antisense Strand to SEQ ID NO: 427899
guaacaaugagucaguucu

SEQ ID NO: 427901 - RNA, 19 nt, Artificial Sequence
  Description of Artificial Sequence: Synthetic oligonucleotide
  Sense strand starting at position 902 of SEQ ID NO: 316627
ucaccuagaggucacgaua

SEQ ID NO: 427902 - RNA, 19 nt, Artificial Sequence
  Description of Artificial Sequence: Synthetic oligonucleotide
  Antisense Strand to SEQ ID NO: 427901
uaucgugaccucuagguga

SEQ ID NO: 427903 - RNA, 19 nt, Artificial Sequence
  Description of Artificial Sequence: Synthetic oligonucleotide
  Sense strand starting at position 1028 of SEQ ID NO: 316627
agagucaaaucccucuuga

SEQ ID NO: 427904 - RNA, 19 nt, Artificial Sequence
  Description of Artificial Sequence: Synthetic oligonucleotide
  Antisense Strand to SEQ ID NO: 427903
ucaagagggauuugacucu

SEQ ID NO: 427905 - RNA, 19 nt, Artificial Sequence
  Description of Artificial Sequence: Synthetic oligonucleotide
  Sense strand starting at position 1764 of SEQ ID NO: 316627
gagcacuguagggaugauu

SEQ ID NO: 427906 - RNA, 19 nt, Artificial Sequence
  Description of Artificial Sequence: Synthetic oligonucleotide
  Antisense Strand to SEQ ID NO: 427905
aaucaucccuacagugcuc

SEQ ID NO: 427907 - RNA, 19 nt, Artificial Sequence
  Description of Artificial Sequence: Synthetic oligonucleotide
  Sense strand starting at position 2039 of SEQ ID NO: 316627
cucugcuauccggaugaca

SEQ ID NO: 427908 - RNA, 19 nt, Artificial Sequence
  Description of Artificial Sequence: Synthetic oligonucleotide
  Antisense Strand to SEQ ID NO: 427907
ugucauccggauagcagag

SEQ ID NO: 427909 - RNA, 19 nt, Artificial Sequence
  Description of Artificial Sequence: Synthetic oligonucleotide
  Sense strand starting at position 2042 of SEQ ID NO: 316627
ugcuauccggaugacaaau

SEQ ID NO: 427910 - RNA, 19 nt, Artificial Sequence
  Description of Artificial Sequence: Synthetic oligonucleotide
  Antisense Strand to SEQ ID NO: 427909
auuugucauccggauagca

SEQ ID NO: 427911 - RNA, 19 nt, Artificial Sequence
  Description of Artificial Sequence: Synthetic oligonucleotide
  Sense strand starting at position 2053 of SEQ ID NO: 316627
ugacaaauccaguguggau

SEQ ID NO: 427912 - RNA, 19 nt, Artificial Sequence
  Description of Artificial Sequence: Synthetic oligonucleotide
  Antisense Strand to SEQ ID NO: 427911
auccacacuggauuuguca

SEQ ID NO: 427913 - RNA, 19 nt, Artificial Sequence
  Description of Artificial Sequence: Synthetic oligonucleotide
  Sense strand starting at position 2204 of SEQ ID NO: 316627
ggaguaacuuuguuauaac

SEQ ID NO: 427914 - RNA, 19 nt, Artificial Sequence
  Description of Artificial Sequence: Synthetic oligonucleotide
  Antisense Strand to SEQ ID NO: 427913
guuauaacaaaguuacucc

SEQ ID NO: 427915 - RNA, 19 nt, Artificial Sequence
  Description of Artificial Sequence: Synthetic oligonucleotide
  Sense strand starting at position 2265 of SEQ ID NO: 316627
cucaguaauuaagucagau

SEQ ID NO: 427916 - RNA, 19 nt, Artificial Sequence
  Description of Artificial Sequence: Synthetic oligonucleotide
  Antisense Strand to SEQ ID NO: 427915
aucugacuuaauuacugag

SEQ ID NO: 427917 - RNA, 19 nt, Artificial Sequence
  Description of Artificial Sequence: Synthetic oligonucleotide
  Sense strand starting at position 2475 of SEQ ID NO: 316627
guaauuugcauccggaagu

SEQ ID NO: 427918 - RNA, 19 nt, Artificial Sequence
  Description of Artificial Sequence: Synthetic oligonucleotide
  Antisense Strand to SEQ ID NO: 427917
acuuccggaugcaaauuac

SEQ ID NO: 427919 - RNA, 19 nt, Artificial Sequence
  Description of Artificial Sequence: Synthetic oligonucleotide
  Sense strand starting at position 2488 of SEQ ID NO: 316627
ggaaguagaugggcuuauu

SEQ ID NO: 427920 - RNA, 19 nt, Artificial Sequence
  Description of Artificial Sequence: Synthetic oligonucleotide
  Antisense Strand to SEQ ID NO: 427919
aauaagcccaucuacuucc

SEQ ID NO: 427921 - RNA, 19 nt, Artificial Sequence
  Description of Artificial Sequence: Synthetic oligonucleotide
  Sense strand starting at position 2491 of SEQ ID NO: 316627
aguagaugggcuuauugga

SEQ ID NO: 427922 - RNA, 19 nt, Artificial Sequence
  Description of Artificial Sequence: Synthetic oligonucleotide
  Antisense Strand to SEQ ID NO: 427921
uccaauaagcccaucuacu

SEQ ID NO: 427923 - RNA, 19 nt, Artificial Sequence
  Description of Artificial Sequence: Synthetic oligonucleotide
  Sense strand starting at position 2602 of SEQ ID NO: 316627
cgaucaagugcccauuaau

SEQ ID NO: 427924 - RNA, 19 nt, Artificial Sequence
  Description of Artificial Sequence: Synthetic oligonucleotide
  Antisense Strand to SEQ ID NO: 427923
auuaaugggcacuugaucg

SEQ ID NO: 427925 - RNA, 19 nt, Artificial Sequence
  Description of Artificial Sequence: Synthetic oligonucleotide
  Sense strand starting at position 2605 of SEQ ID NO: 316627
ucaagugcccauuaaugau

SEQ ID NO: 427926 - RNA, 19 nt, Artificial Sequence
  Description of Artificial Sequence: Synthetic oligonucleotide
  Antisense Strand to SEQ ID NO: 427925
aucauuaaugggcacuuga

SEQ ID NO: 427927 - RNA, 19 nt, Artificial Sequence
  Description of Artificial Sequence: Synthetic oligonucleotide
  Sense strand starting at position 3065 of SEQ ID NO: 316627
gaucaaauuugaggagaga

SEQ ID NO: 427928 - RNA, 19 nt, Artificial Sequence
  Description of Artificial Sequence: Synthetic oligonucleotide
  Antisense Strand to SEQ ID NO: 427927
ucucuccucaaauuugauc

SEQ ID NO: 427929 - RNA, 19 nt, Artificial Sequence
  Description of Artificial Sequence: Synthetic oligonucleotide
  Sense strand starting at position 3334 of SEQ ID NO: 316627
ccaggagagucuuucagag

SEQ ID NO: 427930 - RNA, 19 nt, Artificial Sequence
  Description of Artificial Sequence: Synthetic oligonucleotide
  Antisense Strand to SEQ ID NO: 427929
cucugaaagacucuccugg

SEQ ID NO: 427931 - RNA, 19 nt, Artificial Sequence
  Description of Artificial Sequence: Synthetic oligonucleotide
  Sense strand starting at position 3475 of SEQ ID NO: 316627
agaggaguacauugguuau

SEQ ID NO: 427932 - RNA, 19 nt, Artificial Sequence
  Description of Artificial Sequence: Synthetic oligonucleotide
  Antisense Strand to SEQ ID NO: 427931
auaaccaauguacuccucu

SEQ ID NO: 427933 - RNA, 19 nt, Artificial Sequence
  Description of Artificial Sequence: Synthetic oligonucleotide
  Sense strand starting at position 3478 of SEQ ID NO: 316627
ggaguacauugguuauaga

SEQ ID NO: 427934 - RNA, 19 nt, Artificial Sequence
  Description of Artificial Sequence: Synthetic oligonucleotide
  Antisense Strand to SEQ ID NO: 427933
ucuauaaccaauguacucc

SEQ ID NO: 427935 - RNA, 19 nt, Artificial Sequence
  Description of Artificial Sequence: Synthetic oligonucleotide
  Sense strand starting at position 3519 of SEQ ID NO: 316627
ccugucagacauuaucuca

SEQ ID NO: 427936 - RNA, 19 nt, Artificial Sequence
  Description of Artificial Sequence: Synthetic oligonucleotide
  Antisense Strand to SEQ ID NO: 427935
ugagauaaugucugacagg

SEQ ID NO: 427937 - RNA, 19 nt, Artificial Sequence
  Description of Artificial Sequence: Synthetic oligonucleotide
  Sense strand starting at position 3555 of SEQ ID NO: 316627
aggcuaggaucauugaacu

SEQ ID NO: 427938 - RNA, 19 nt, Artificial Sequence
  Description of Artificial Sequence: Synthetic oligonucleotide
  Antisense Strand to SEQ ID NO: 427937
aguucaaugauccuagccu

SEQ ID NO: 427939 - RNA, 19 nt, Artificial Sequence
  Description of Artificial Sequence: Synthetic oligonucleotide
  Sense strand starting at position 3609 of SEQ ID NO: 316627
augggaaccuguucucuau

SEQ ID NO: 427940 - RNA, 19 nt, Artificial Sequence
  Description of Artificial Sequence: Synthetic oligonucleotide
  Antisense Strand to SEQ ID NO: 427939
auagagaacagguucccau

SEQ ID NO: 427941 - RNA, 19 nt, Artificial Sequence
  Description of Artificial Sequence: Synthetic oligonucleotide
  Sense strand starting at position 3683 of SEQ ID NO: 316627
gagucagggaguugugaag

SEQ ID NO: 427942 - RNA, 19 nt, Artificial Sequence
  Description of Artificial Sequence: Synthetic oligonucleotide
  Antisense Strand to SEQ ID NO: 427941
cuucacaacucccugacuc

SEQ ID NO: 427943 - RNA, 19 nt, Artificial Sequence
  Description of Artificial Sequence: Synthetic oligonucleotide
  Sense strand starting at position 3795 of SEQ ID NO: 316627
guaacuguggcacauugau

SEQ ID NO: 427944 - RNA, 19 nt, Artificial Sequence
  Description of Artificial Sequence: Synthetic oligonucleotide
  Antisense Strand to SEQ ID NO: 427943
aucaaugugccacaguuac

SEQ ID NO: 427945 - RNA, 19 nt, Artificial Sequence
  Description of Artificial Sequence: Synthetic oligonucleotide
  Sense strand starting at position 3931 of SEQ ID NO: 316627
ugcauuuaguggucauauc

SEQ ID NO: 427946 - RNA, 19 nt, Artificial Sequence
  Description of Artificial Sequence: Synthetic oligonucleotide
  Antisense Strand to SEQ ID NO: 427945
gauaugaccacuaaaugca

SEQ ID NO: 427947 - RNA, 19 nt, Artificial Sequence
  Description of Artificial Sequence: Synthetic oligonucleotide
  Sense strand starting at position 163 of SEQ ID NO: 316628
uugacauuggguuaguaga

SEQ ID NO: 427948 - RNA, 19 nt, Artificial Sequence
  Description of Artificial Sequence: Synthetic oligonucleotide
  Antisense Strand to SEQ ID NO: 427947
ucuacuaacccaaugucaa

SEQ ID NO: 427949 - RNA, 19 nt, Artificial Sequence
  Description of Artificial Sequence: Synthetic oligonucleotide
  Sense strand starting at position 165 of SEQ ID NO: 316628
gacauuggguuaguagaaa

SEQ ID NO: 427950 - RNA, 19 nt, Artificial Sequence
  Description of Artificial Sequence: Synthetic oligonucleotide
  Antisense Strand to SEQ ID NO: 427949
uuucuacuaacccaauguc

SEQ ID NO: 427951 - RNA, 19 nt, Artificial Sequence
  Description of Artificial Sequence: Synthetic oligonucleotide
  Sense strand starting at position 282 of SEQ ID NO: 316628
cucauaaugagagguuguu

SEQ ID NO: 427952 - RNA, 19 nt, Artificial Sequence
  Description of Artificial Sequence: Synthetic oligonucleotide
  Antisense Strand to SEQ ID NO: 427951
aacaaccucucauuaugag

SEQ ID NO: 427953 - RNA, 19 nt, Artificial Sequence
  Description of Artificial Sequence: Synthetic oligonucleotide
  Sense strand starting at position 319 of SEQ ID NO: 316628
gcaugaaaugccuauauau

SEQ ID NO: 427954 - RNA, 19 nt, Artificial Sequence
  Description of Artificial Sequence: Synthetic oligonucleotide
  Antisense Strand to SEQ ID NO: 427953
auauauaggcauuucaugc

SEQ ID NO: 427955 - RNA, 19 nt, Artificial Sequence
  Description of Artificial Sequence: Synthetic oligonucleotide
  Sense strand starting at position 378 of SEQ ID NO: 316628
gguuaagugauacaguauu

SEQ ID NO: 427956 - RNA, 19 nt, Artificial Sequence
  Description of Artificial Sequence: Synthetic oligonucleotide
  Antisense Strand to SEQ ID NO: 427955
aauacuguaucacuuaacc

SEQ ID NO: 427957 - RNA, 19 nt, Artificial Sequence
  Description of Artificial Sequence: Synthetic oligonucleotide
  Sense strand starting at position 486 of SEQ ID NO: 316628
ccuugaauauaaguaggau

SEQ ID NO: 427958 - RNA, 19 nt, Artificial Sequence
  Description of Artificial Sequence: Synthetic oligonucleotide
  Antisense Strand to SEQ ID NO: 427957
auccuacuuauauucaagg

SEQ ID NO: 427959 - RNA, 19 nt, Artificial Sequence
  Description of Artificial Sequence: Synthetic oligonucleotide
  Sense strand starting at position 489 of SEQ ID NO: 316628
ugaauauaaguaggaucuu

SEQ ID NO: 427960 - RNA, 19 nt, Artificial Sequence
  Description of Artificial Sequence: Synthetic oligonucleotide
  Antisense Strand to SEQ ID NO: 427959
aagauccuacuuauauuca

SEQ ID NO: 427961 - RNA, 19 nt, Artificial Sequence
  Description of Artificial Sequence: Synthetic oligonucleotide
  Sense strand starting at position 495 of SEQ ID NO: 316628
uaaguaggaucuuugaaua

SEQ ID NO: 427962 - RNA, 19 nt, Artificial Sequence
  Description of Artificial Sequence: Synthetic oligonucleotide
  Antisense Strand to SEQ ID NO: 427961
uauucaaagauccuacuua

SEQ ID NO: 427963 - RNA, 19 nt, Artificial Sequence
  Description of Artificial Sequence: Synthetic oligonucleotide
  Sense strand starting at position 514 of SEQ ID NO: 316628
ugauaaaugucacuugagu

SEQ ID NO: 427964 - RNA, 19 nt, Artificial Sequence
  Description of Artificial Sequence: Synthetic oligonucleotide
  Antisense Strand to SEQ ID NO: 427963
acucaagugacauuuauca

SEQ ID NO: 427965 - RNA, 19 nt, Artificial Sequence
  Description of Artificial Sequence: Synthetic oligonucleotide
  Sense strand starting at position 521 of SEQ ID NO: 316628
ugucacuugagugauugga

SEQ ID NO: 427966 - RNA, 19 nt, Artificial Sequence
  Description of Artificial Sequence: Synthetic oligonucleotide
  Antisense Strand to SEQ ID NO: 427965
uccaaucacucaagugaca

SEQ ID NO: 427967 - RNA, 19 nt, Artificial Sequence
  Description of Artificial Sequence: Synthetic oligonucleotide
  Sense strand starting at position 523 of SEQ ID NO: 316628
ucacuugagugauuggauu

SEQ ID NO: 427968 - RNA, 19 nt, Artificial Sequence
  Description of Artificial Sequence: Synthetic oligonucleotide
  Antisense Strand to SEQ ID NO: 427967
aauccaaucacucaaguga

SEQ ID NO: 427969 - RNA, 19 nt, Artificial Sequence
  Description of Artificial Sequence: Synthetic oligonucleotide
  Sense strand starting at position 525 of SEQ ID NO: 316628
acuugagugauuggauuau

SEQ ID NO: 427970 - RNA, 19 nt, Artificial Sequence
  Description of Artificial Sequence: Synthetic oligonucleotide
  Antisense Strand to SEQ ID NO: 427969
auaauccaaucacucaagu

SEQ ID NO: 427971 - RNA, 19 nt, Artificial Sequence
  Description of Artificial Sequence: Synthetic oligonucleotide
  Sense strand starting at position 582 of SEQ ID NO: 316628
ugagaucucuaauuaguug

SEQ ID NO: 427972 - RNA, 19 nt, Artificial Sequence
  Description of Artificial Sequence: Synthetic oligonucleotide
  Antisense Strand to SEQ ID NO: 427971
caacuaauuagagaucuca

SEQ ID NO: 427973 - RNA, 19 nt, Artificial Sequence
  Description of Artificial Sequence: Synthetic oligonucleotide
  Sense strand starting at position 593 of SEQ ID NO: 316628
auuaguugacuuugacuca

SEQ ID NO: 427974 - RNA, 19 nt, Artificial Sequence
  Description of Artificial Sequence: Synthetic oligonucleotide
  Antisense Strand to SEQ ID NO: 427973
ugagucaaagucaacuaau

SEQ ID NO: 427975 - RNA, 19 nt, Artificial Sequence
  Description of Artificial Sequence: Synthetic oligonucleotide
  Sense strand starting at position 788 of SEQ ID NO: 316628
cauuaaugagcuuggaaga

SEQ ID NO: 427976 - RNA, 19 nt, Artificial Sequence
  Description of Artificial Sequence: Synthetic oligonucleotide
  Antisense Strand to SEQ ID NO: 427975
ucuuccaagcucauuaaug

SEQ ID NO: 427977 - RNA, 19 nt, Artificial Sequence
  Description of Artificial Sequence: Synthetic oligonucleotide
  Sense strand starting at position 838 of SEQ ID NO: 316628
uggcuaaugccuugauuuc

SEQ ID NO: 427978 - RNA, 19 nt, Artificial Sequence
  Description of Artificial Sequence: Synthetic oligonucleotide
  Antisense Strand to SEQ ID NO: 427977
gaaaucaaggcauuagcca

SEQ ID NO: 427979 - RNA, 19 nt, Artificial Sequence
  Description of Artificial Sequence: Synthetic oligonucleotide
  Sense strand starting at position 849 of SEQ ID NO: 316628
uugauuucggcuugugaga

SEQ ID NO: 427980 - RNA, 19 nt, Artificial Sequence
  Description of Artificial Sequence: Synthetic oligonucleotide
  Antisense Strand to SEQ ID NO: 427979
ucucacaagccgaaaucaa

SEQ ID NO: 427981 - RNA, 19 nt, Artificial Sequence
  Description of Artificial Sequence: Synthetic oligonucleotide
  Sense strand starting at position 1009 of SEQ ID NO: 316628
cauuguuggcuauagugaa

SEQ ID NO: 427982 - RNA, 19 nt, Artificial Sequence
  Description of Artificial Sequence: Synthetic oligonucleotide
  Antisense Strand to SEQ ID NO: 427981
uucacuauagccaacaaug

SEQ ID NO: 427983 - RNA, 19 nt, Artificial Sequence
  Description of Artificial Sequence: Synthetic oligonucleotide
  Sense strand starting at position 1057 of SEQ ID NO: 316628
ccugguuacuaacuagaaa

SEQ ID NO: 427984 - RNA, 19 nt, Artificial Sequence
  Description of Artificial Sequence: Synthetic oligonucleotide
  Antisense Strand to SEQ ID NO: 427983
uuucuaguuaguaaccagg

SEQ ID NO: 427985 - RNA, 19 nt, Artificial Sequence
  Description of Artificial Sequence: Synthetic oligonucleotide
  Sense strand starting at position 1076 of SEQ ID NO: 316628
aauucugaaugguuaugau

SEQ ID NO: 427986 - RNA, 19 nt, Artificial Sequence
  Description of Artificial Sequence: Synthetic oligonucleotide
  Antisense Strand to SEQ ID NO: 427985
aucauaaccauucagaauu

SEQ ID NO: 427987 - RNA, 19 nt, Artificial Sequence
  Description of Artificial Sequence: Synthetic oligonucleotide
  Sense strand starting at position 1255 of SEQ ID NO: 316628
uuuagaaugccacaaagua

SEQ ID NO: 427988 - RNA, 19 nt, Artificial Sequence
  Description of Artificial Sequence: Synthetic oligonucleotide
  Antisense Strand to SEQ ID NO: 427987
uacuuuguggcauucuaaa

SEQ ID NO: 427989 - RNA, 19 nt, Artificial Sequence
  Description of Artificial Sequence: Synthetic oligonucleotide
  Sense strand starting at position 1747 of SEQ ID NO: 316628
gaggguuuagucugaaacu

SEQ ID NO: 427990 - RNA, 19 nt, Artificial Sequence
  Description of Artificial Sequence: Synthetic oligonucleotide
  Antisense Strand to SEQ ID NO: 427989
aguuucagacuaaacccuc

SEQ ID NO: 427991 - RNA, 19 nt, Artificial Sequence
  Description of Artificial Sequence: Synthetic oligonucleotide
  Sense strand starting at position 1801 of SEQ ID NO: 316628
uuaaucuaugcccagaagu

SEQ ID NO: 427992 - RNA, 19 nt, Artificial Sequence
  Description of Artificial Sequence: Synthetic oligonucleotide
  Antisense Strand to SEQ ID NO: 427991
acuucugggcauagauuaa

SEQ ID NO: 427993 - RNA, 19 nt, Artificial Sequence
  Description of Artificial Sequence: Synthetic oligonucleotide
  Sense strand starting at position 2138 of SEQ ID NO: 316628
ugucaagauguaugacaga

SEQ ID NO: 427994 - RNA, 19 nt, Artificial Sequence
  Description of Artificial Sequence: Synthetic oligonucleotide
  Antisense Strand to SEQ ID NO: 427993
ucugucauacaucuugaca

SEQ ID NO: 427995 - RNA, 19 nt, Artificial Sequence
  Description of Artificial Sequence: Synthetic oligonucleotide
  Sense strand starting at position 2157 of SEQ ID NO: 316628
ugucacagggccuaucaau

SEQ ID NO: 427996 - RNA, 19 nt, Artificial Sequence
  Description of Artificial Sequence: Synthetic oligonucleotide
  Antisense Strand to SEQ ID NO: 427995
auugauaggcccugugaca

SEQ ID NO: 427997 - RNA, 19 nt, Artificial Sequence
  Description of Artificial Sequence: Synthetic oligonucleotide
  Sense strand starting at position 2207 of SEQ ID NO: 316628
agagaacuuugccuuuaug

SEQ ID NO: 427998 - RNA, 19 nt, Artificial Sequence
  Description of Artificial Sequence: Synthetic oligonucleotide
  Antisense Strand to SEQ ID NO: 427997
cauaaaggcaaaguucucu

SEQ ID NO: 427999 - RNA, 19 nt, Artificial Sequence
  Description of Artificial Sequence: Synthetic oligonucleotide
  Sense strand starting at position 2310 of SEQ ID NO: 316628
agcuguaagagugaaauua

SEQ ID NO: 428000 - RNA, 19 nt, Artificial Sequence
  Description of Artificial Sequence: Synthetic oligonucleotide
  Antisense Strand to SEQ ID NO: 427999
uaauuucacucuuacagcu

SEQ ID NO: 428001 - RNA, 19 nt, Artificial Sequence
  Description of Artificial Sequence: Synthetic oligonucleotide
  Sense strand starting at position 2374 of SEQ ID NO: 316628
ucaagaguacucuaggguu

SEQ ID NO: 428002 - RNA, 19 nt, Artificial Sequence
  Description of Artificial Sequence: Synthetic oligonucleotide
  Antisense Strand to SEQ ID NO: 428001
aacccuagaguacucuuga

SEQ ID NO: 428003 - RNA, 19 nt, Artificial Sequence
  Description of Artificial Sequence: Synthetic oligonucleotide
  Sense strand starting at position 2376 of SEQ ID NO: 316628
aagaguacucuaggguuua

SEQ ID NO: 428004 - RNA, 19 nt, Artificial Sequence
  Description of Artificial Sequence: Synthetic oligonucleotide
  Antisense Strand to SEQ ID NO: 428003
uaaacccuagaguacucuu

SEQ ID NO: 428005 - RNA, 19 nt, Artificial Sequence
  Description of Artificial Sequence: Synthetic oligonucleotide
  Sense strand starting at position 2390 of SEQ ID NO: 316628
guuuaacaacuauaguguu

SEQ ID NO: 428006 - RNA, 19 nt, Artificial Sequence
  Description of Artificial Sequence: Synthetic oligonucleotide
  Antisense Strand to SEQ ID NO: 428005
aacacuauaguuguuaaac

SEQ ID NO: 428007 - RNA, 19 nt, Artificial Sequence
  Description of Artificial Sequence: Synthetic oligonucleotide
  Sense strand starting at position 2442 of SEQ ID NO: 316628
ugaaauucucaacguauag

SEQ ID NO: 428008 - RNA, 19 nt, Artificial Sequence
  Description of Artificial Sequence: Synthetic oligonucleotide
  Antisense Strand to SEQ ID NO: 428007
cuauacguugagaauuuca

SEQ ID NO: 428009 - RNA, 19 nt, Artificial Sequence
  Description of Artificial Sequence: Synthetic oligonucleotide
  Sense strand starting at position 2827 of SEQ ID NO: 316628
uagaauggcccuugauaug

SEQ ID NO: 428010 - RNA, 19 nt, Artificial Sequence
  Description of Artificial Sequence: Synthetic oligonucleotide
  Antisense Strand to SEQ ID NO: 428009
cauaucaagggccauucua

SEQ ID NO: 428011 - RNA, 19 nt, Artificial Sequence
  Description of Artificial Sequence: Synthetic oligonucleotide
  Sense strand starting at position 2865 of SEQ ID NO: 316628
gugcaacugagguauggau

SEQ ID NO: 428012 - RNA, 19 nt, Artificial Sequence
  Description of Artificial Sequence: Synthetic oligonucleotide
  Antisense Strand to SEQ ID NO: 428011
auccauaccucaguugcac

SEQ ID NO: 428013 - RNA, 19 nt, Artificial Sequence
  Description of Artificial Sequence: Synthetic oligonucleotide
  Sense strand starting at position 2914 of SEQ ID NO: 316628
cuaauaugucagggaaacu

SEQ ID NO: 428014 - RNA, 19 nt, Artificial Sequence
  Description of Artificial Sequence: Synthetic oligonucleotide
  Antisense Strand to SEQ ID NO: 428013
aguuucccugacauauuag

SEQ ID NO: 428015 - RNA, 19 nt, Artificial Sequence
  Description of Artificial Sequence: Synthetic oligonucleotide
  Sense strand starting at position 3295 of SEQ ID NO: 316628
ugaucuaauggauguaauu

SEQ ID NO: 428016 - RNA, 19 nt, Artificial Sequence
  Description of Artificial Sequence: Synthetic oligonucleotide
  Antisense Strand to SEQ ID NO: 428015
aauuacauccauuagauca

SEQ ID NO: 428017 - RNA, 19 nt, Artificial Sequence
  Description of Artificial Sequence: Synthetic oligonucleotide
  Sense strand starting at position 3352 of SEQ ID NO: 316628
uaggguugucuugggagau

SEQ ID NO: 428018 - RNA, 19 nt, Artificial Sequence
  Description of Artificial Sequence: Synthetic oligonucleotide
  Antisense Strand to SEQ ID NO: 428017
aucucccaagacaacccua

SEQ ID NO: 428019 - RNA, 19 nt, Artificial Sequence
  Description of Artificial Sequence: Synthetic oligonucleotide
  Sense strand starting at position 3393 of SEQ ID NO: 316628
cuuggaucacuuugacaug

SEQ ID NO: 428020 - RNA, 19 nt, Artificial Sequence
  Description of Artificial Sequence: Synthetic oligonucleotide
  Antisense Strand to SEQ ID NO: 428019
caugucaaagugauccaag

SEQ ID NO: 428021 - RNA, 19 nt, Artificial Sequence
  Description of Artificial Sequence: Synthetic oligonucleotide
  Sense strand starting at position 3405 of SEQ ID NO: 316628
ugacaugcccuauguauuu

SEQ ID NO: 428022 - RNA, 19 nt, Artificial Sequence
  Description of Artificial Sequence: Synthetic oligonucleotide
  Antisense Strand to SEQ ID NO: 428021
aaauacauagggcauguca

SEQ ID NO: 428023 - RNA, 19 nt, Artificial Sequence
  Description of Artificial Sequence: Synthetic oligonucleotide
  Sense strand starting at position 3553 of SEQ ID NO: 316628
cucuaaauaugauugcaga

SEQ ID NO: 428024 - RNA, 19 nt, Artificial Sequence
  Description of Artificial Sequence: Synthetic oligonucleotide
  Antisense Strand to SEQ ID NO: 428023
ucugcaaucauauuuagag

SEQ ID NO: 428025 - RNA, 19 nt, Artificial Sequence
  Description of Artificial Sequence: Synthetic oligonucleotide
  Sense strand starting at position 3554 of SEQ ID NO: 316628
ucuaaauaugauugcagaa

SEQ ID NO: 428026 - RNA, 19 nt, Artificial Sequence
  Description of Artificial Sequence: Synthetic oligonucleotide
  Antisense Strand to SEQ ID NO: 428025
uucugcaaucauauuuaga

SEQ ID NO: 428027 - RNA, 19 nt, Artificial Sequence
  Description of Artificial Sequence: Synthetic oligonucleotide
  Sense strand starting at position 237 of SEQ ID NO: 316629
gcuacagaaguugaugauu

SEQ ID NO: 428028 - RNA, 19 nt, Artificial Sequence
  Description of Artificial Sequence: Synthetic oligonucleotide
  Antisense Strand to SEQ ID NO: 428027
aaucaucaacuucuguagc

SEQ ID NO: 428029 - RNA, 19 nt, Artificial Sequence
  Description of Artificial Sequence: Synthetic oligonucleotide
  Sense strand starting at position 310 of SEQ ID NO: 316629
auaucaguggcuuguacaa

SEQ ID NO: 428030 - RNA, 19 nt, Artificial Sequence
  Description of Artificial Sequence: Synthetic oligonucleotide
  Antisense Strand to SEQ ID NO: 428029
uuguacaagccacugauau

SEQ ID NO: 428031 - RNA, 19 nt, Artificial Sequence
  Description of Artificial Sequence: Synthetic oligonucleotide
  Sense strand starting at position 355 of SEQ ID NO: 316629
uguccaacugcaggagaau

SEQ ID NO: 428032 - RNA, 19 nt, Artificial Sequence
  Description of Artificial Sequence: Synthetic oligonucleotide
  Antisense Strand to SEQ ID NO: 428031
auucuccugcaguuggaca

SEQ ID NO: 428033 - RNA, 19 nt, Artificial Sequence
  Description of Artificial Sequence: Synthetic oligonucleotide
  Sense strand starting at position 356 of SEQ ID NO: 316629
guccaacugcaggagaauu

SEQ ID NO: 428034 - RNA, 19 nt, Artificial Sequence
  Description of Artificial Sequence: Synthetic oligonucleotide
  Antisense Strand to SEQ ID NO: 428033
aauucuccugcaguuggac

SEQ ID NO: 428035 - RNA, 19 nt, Artificial Sequence
  Description of Artificial Sequence: Synthetic oligonucleotide
  Sense strand starting at position 405 of SEQ ID NO: 316629
gugggaccuuccuccagaa

SEQ ID NO: 428036 - RNA, 19 nt, Artificial Sequence
  Description of Artificial Sequence: Synthetic oligonucleotide
  Antisense Strand to SEQ ID NO: 428035
uucuggaggaaggucccac

SEQ ID NO: 428037 - RNA, 19 nt, Artificial Sequence
  Description of Artificial Sequence: Synthetic oligonucleotide
  Sense strand starting at position 438 of SEQ ID NO: 316629
acagaaauguuuccggacu

SEQ ID NO: 428038 - RNA, 19 nt, Artificial Sequence
  Description of Artificial Sequence: Synthetic oligonucleotide
  Antisense Strand to SEQ ID NO: 428037
aguccggaaacauuucugu

SEQ ID NO: 428039 - RNA, 19 nt, Artificial Sequence
  Description of Artificial Sequence: Synthetic oligonucleotide
  Sense strand starting at position 444 of SEQ ID NO: 316629
auguuuccggacuacagau

SEQ ID NO: 428040 - RNA, 19 nt, Artificial Sequence
  Description of Artificial Sequence: Synthetic oligonucleotide
  Antisense Strand to SEQ ID NO: 428039
aucuguaguccggaaacau

SEQ ID NO: 428041 - RNA, 19 nt, Artificial Sequence
  Description of Artificial Sequence: Synthetic oligonucleotide
  Sense strand starting at position 648 of SEQ ID NO: 316629
aucuuaucaccuugugagu

SEQ ID NO: 428042 - RNA, 19 nt, Artificial Sequence
  Description of Artificial Sequence: Synthetic oligonucleotide
  Antisense Strand to SEQ ID NO: 428041
acucacaaggugauaagau

SEQ ID NO: 428043 - RNA, 19 nt, Artificial Sequence
  Description of Artificial Sequence: Synthetic oligonucleotide
  Sense strand starting at position 678 of SEQ ID NO: 316629
cauuaaugguuuccaagag

SEQ ID NO: 428044 - RNA, 19 nt, Artificial Sequence
  Description of Artificial Sequence: Synthetic oligonucleotide
  Antisense Strand to SEQ ID NO: 428043
cucuuggaaaccauuaaug

SEQ ID NO: 428045 - RNA, 19 nt, Artificial Sequence
  Description of Artificial Sequence: Synthetic oligonucleotide
  Sense strand starting at position 760 of SEQ ID NO: 316629
aagguuccaugagccaauu

SEQ ID NO: 428046 - RNA, 19 nt, Artificial Sequence
  Description of Artificial Sequence: Synthetic oligonucleotide
  Antisense Strand to SEQ ID NO: 428045
aauuggcucauggaaccuu

SEQ ID NO: 428047 - RNA, 19 nt, Artificial Sequence
  Description of Artificial Sequence: Synthetic oligonucleotide
  Sense strand starting at position 913 of SEQ ID NO: 316629
guaugaauuuaacaggcca

SEQ ID NO: 428048 - RNA, 19 nt, Artificial Sequence
  Description of Artificial Sequence: Synthetic oligonucleotide
  Antisense Strand to SEQ ID NO: 428047
uggccuguuaaauucauac

SEQ ID NO: 428049 - RNA, 19 nt, Artificial Sequence
  Description of Artificial Sequence: Synthetic oligonucleotide
  Sense strand starting at position 948 of SEQ ID NO: 316629
gggccugauuaaucagauu

SEQ ID NO: 428050 - RNA, 19 nt, Artificial Sequence
  Description of Artificial Sequence: Synthetic oligonucleotide
  Antisense Strand to SEQ ID NO: 428049
aaucugauuaaucaggccc

SEQ ID NO: 428051 - RNA, 19 nt, Artificial Sequence
  Description of Artificial Sequence: Synthetic oligonucleotide
  Sense strand starting at position 963 of SEQ ID NO: 316629
gauuuaaggucaggaauca

SEQ ID NO: 428052 - RNA, 19 nt, Artificial Sequence
  Description of Artificial Sequence: Synthetic oligonucleotide
  Antisense Strand to SEQ ID NO: 428051
ugauuccugaccuuaaauc

SEQ ID NO: 428053 - RNA, 19 nt, Artificial Sequence
  Description of Artificial Sequence: Synthetic oligonucleotide
  Sense strand starting at position 1451 of SEQ ID NO: 316629
agucaguucggaggagaga

SEQ ID NO: 428054 - RNA, 19 nt, Artificial Sequence
  Description of Artificial Sequence: Synthetic oligonucleotide
  Antisense Strand to SEQ ID NO: 428053
ucucuccuccgaacugacu

SEQ ID NO: 428055 - RNA, 19 nt, Artificial Sequence
  Description of Artificial Sequence: Synthetic oligonucleotide
  Sense strand starting at position 1609 of SEQ ID NO: 316629
gcgguuugucacuaggaau

SEQ ID NO: 428056 - RNA, 19 nt, Artificial Sequence
  Description of Artificial Sequence: Synthetic oligonucleotide
  Antisense Strand to SEQ ID NO: 428055
auuccuagugacaaaccgc

SEQ ID NO: 428057 - RNA, 19 nt, Artificial Sequence
  Description of Artificial Sequence: Synthetic oligonucleotide
  Sense strand starting at position 1848 of SEQ ID NO: 316629
aaagguuggguuugaguuu

SEQ ID NO: 428058 - RNA, 19 nt, Artificial Sequence
  Description of Artificial Sequence: Synthetic oligonucleotide
  Antisense Strand to SEQ ID NO: 428057
aaacucaaacccaaccuuu

SEQ ID NO: 428059 - RNA, 19 nt, Artificial Sequence
  Description of Artificial Sequence: Synthetic oligonucleotide
  Sense strand starting at position 1891 of SEQ ID NO: 316629
uuacuuguccaucagcuga

SEQ ID NO: 428060 - RNA, 19 nt, Artificial Sequence
  Description of Artificial Sequence: Synthetic oligonucleotide
  Antisense Strand to SEQ ID NO: 428059
ucagcugauggacaaguaa

SEQ ID NO: 428061 - RNA, 19 nt, Artificial Sequence
  Description of Artificial Sequence: Synthetic oligonucleotide
  Sense strand starting at position 2319 of SEQ ID NO: 316629
accauuggucccuaagguu

SEQ ID NO: 428062 - RNA, 19 nt, Artificial Sequence
  Description of Artificial Sequence: Synthetic oligonucleotide
  Antisense Strand to SEQ ID NO: 428061
aaccuuagggaccaauggu

SEQ ID NO: 428063 - RNA, 19 nt, Artificial Sequence
  Description of Artificial Sequence: Synthetic oligonucleotide
  Sense strand starting at position 2799 of SEQ ID NO: 316629
acgcgcguugaguuaauua

SEQ ID NO: 428064 - RNA, 19 nt, Artificial Sequence
  Description of Artificial Sequence: Synthetic oligonucleotide
  Antisense Strand to SEQ ID NO: 428063
uaauuaacucaacgcgcgu

SEQ ID NO: 428065 - RNA, 19 nt, Artificial Sequence
  Description of Artificial Sequence: Synthetic oligonucleotide
  Sense strand starting at position 2804 of SEQ ID NO: 316629
cguugaguuaauuauagga

SEQ ID NO: 428066 - RNA, 19 nt, Artificial Sequence
  Description of Artificial Sequence: Synthetic oligonucleotide
  Antisense Strand to SEQ ID NO: 428065
uccuauaauuaacucaacg

SEQ ID NO: 428067 - RNA, 19 nt, Artificial Sequence
  Description of Artificial Sequence: Synthetic oligonucleotide
  Sense strand starting at position 2843 of SEQ ID NO: 316629
gguccugggcuguaggaaa

SEQ ID NO: 428068 - RNA, 19 nt, Artificial Sequence
  Description of Artificial Sequence: Synthetic oligonucleotide
  Antisense Strand to SEQ ID NO: 428067
uuuccuacagcccaggacc

SEQ ID NO: 428069 - RNA, 19 nt, Artificial Sequence
  Description of Artificial Sequence: Synthetic oligonucleotide
  Sense strand starting at position 3086 of SEQ ID NO: 316629
uccguuuaucacuagagua

SEQ ID NO: 428070 - RNA, 19 nt, Artificial Sequence
  Description of Artificial Sequence: Synthetic oligonucleotide
  Antisense Strand to SEQ ID NO: 428069
uacucuagugauaaacgga

SEQ ID NO: 428071 - RNA, 19 nt, Artificial Sequence
  Description of Artificial Sequence: Synthetic oligonucleotide
  Sense strand starting at position 3088 of SEQ ID NO: 316629
cguuuaucacuagaguaca

SEQ ID NO: 428072 - RNA, 19 nt, Artificial Sequence
  Description of Artificial Sequence: Synthetic oligonucleotide
  Antisense Strand to SEQ ID NO: 428071
uguacucuagugauaaacg

SEQ ID NO: 428073 - RNA, 19 nt, Artificial Sequence
  Description of Artificial Sequence: Synthetic oligonucleotide
  Sense strand starting at position 3200 of SEQ ID NO: 316629
accugagaguuugcuggaa

SEQ ID NO: 428074 - RNA, 19 nt, Artificial Sequence
  Description of Artificial Sequence: Synthetic oligonucleotide
  Antisense Strand to SEQ ID NO: 428073
uuccagcaaacucucaggu

SEQ ID NO: 428075 - RNA, 19 nt, Artificial Sequence
  Description of Artificial Sequence: Synthetic oligonucleotide
  Sense strand starting at position 3204 of SEQ ID NO: 316629
gagaguuugcuggaauccu

SEQ ID NO: 428076 - RNA, 19 nt, Artificial Sequence
  Description of Artificial Sequence: Synthetic oligonucleotide
  Antisense Strand to SEQ ID NO: 428075
aggauuccagcaaacucuc

SEQ ID NO: 428077 - RNA, 19 nt, Artificial Sequence
  Description of Artificial Sequence: Synthetic oligonucleotide
  Sense strand starting at position 3257 of SEQ ID NO: 316629
gggugcuuuccagaaagca

SEQ ID NO: 428078 - RNA, 19 nt, Artificial Sequence
  Description of Artificial Sequence: Synthetic oligonucleotide
  Antisense Strand to SEQ ID NO: 428077
ugcuuucuggaaagcaccc

SEQ ID NO: 428079 - RNA, 19 nt, Artificial Sequence
  Description of Artificial Sequence: Synthetic oligonucleotide
  Sense strand starting at position 3422 of SEQ ID NO: 316629
cuuguuaugagaugcaaga

SEQ ID NO: 428080 - RNA, 19 nt, Artificial Sequence
  Description of Artificial Sequence: Synthetic oligonucleotide
  Antisense Strand to SEQ ID NO: 428079
ucuugcaucucauaacaag

SEQ ID NO: 428081 - RNA, 19 nt, Artificial Sequence
  Description of Artificial Sequence: Synthetic oligonucleotide
  Sense strand starting at position 3480 of SEQ ID NO: 316629
uuuggaggguuuccuauaa

SEQ ID NO: 428082 - RNA, 19 nt, Artificial Sequence
  Description of Artificial Sequence: Synthetic oligonucleotide
  Antisense Strand to SEQ ID NO: 428081
uuauaggaaacccuccaaa

SEQ ID NO: 428083 - RNA, 19 nt, Artificial Sequence
  Description of Artificial Sequence: Synthetic oligonucleotide
  Sense strand starting at position 3484 of SEQ ID NO: 316629
gaggguuuccuauaacuuc

SEQ ID NO: 428084 - RNA, 19 nt, Artificial Sequence
  Description of Artificial Sequence: Synthetic oligonucleotide
  Antisense Strand to SEQ ID NO: 428083
gaaguuauaggaaacccuc

SEQ ID NO: 428085 - RNA, 19 nt, Artificial Sequence
  Description of Artificial Sequence: Synthetic oligonucleotide
  Sense strand starting at position 3507 of SEQ ID NO: 316629
cauuguuuauuccuggaga

SEQ ID NO: 428086 - RNA, 19 nt, Artificial Sequence
  Description of Artificial Sequence: Synthetic oligonucleotide
  Antisense Strand to SEQ ID NO: 428085
ucuccaggaauaaacaaug

SEQ ID NO: 428087 - RNA, 19 nt, Artificial Sequence
  Description of Artificial Sequence: Synthetic oligonucleotide
  Sense strand starting at position 3509 of SEQ ID NO: 316629
uuguuuauuccuggagagg

SEQ ID NO: 428088 - RNA, 19 nt, Artificial Sequence
  Description of Artificial Sequence: Synthetic oligonucleotide
  Antisense Strand to SEQ ID NO: 428087
ccucuccaggaauaaacaa

SEQ ID NO: 428089 - RNA, 19 nt, Artificial Sequence
  Description of Artificial Sequence: Synthetic oligonucleotide
  Sense strand starting at position 3510 of SEQ ID NO: 316629
uguuuauuccuggagaggu

SEQ ID NO: 428090 - RNA, 19 nt, Artificial Sequence
  Description of Artificial Sequence: Synthetic oligonucleotide
  Antisense Strand to SEQ ID NO: 428089
accucuccaggaauaaaca

SEQ ID NO: 428091 - RNA, 19 nt, Artificial Sequence
  Description of Artificial Sequence: Synthetic oligonucleotide
  Sense strand starting at position 3608 of SEQ ID NO: 316629
aucauauaucgaggacauu

SEQ ID NO: 428092 - RNA, 19 nt, Artificial Sequence
  Description of Artificial Sequence: Synthetic oligonucleotide
  Antisense Strand to SEQ ID NO: 428091
aauguccucgauauaugau

SEQ ID NO: 428093 - RNA, 19 nt, Artificial Sequence
  Description of Artificial Sequence: Synthetic oligonucleotide
  Sense strand starting at position 3676 of SEQ ID NO: 316629
acaggauauuaggucaauu

SEQ ID NO: 428094 - RNA, 19 nt, Artificial Sequence
  Description of Artificial Sequence: Synthetic oligonucleotide
  Antisense Strand to SEQ ID NO: 428093
aauugaccuaauauccugu

SEQ ID NO: 428095 - RNA, 19 nt, Artificial Sequence
  Description of Artificial Sequence: Synthetic oligonucleotide
  Sense strand starting at position 3781 of SEQ ID NO: 316629
uguaacuugucauuaacua

SEQ ID NO: 428096 - RNA, 19 nt, Artificial Sequence
  Description of Artificial Sequence: Synthetic oligonucleotide
  Antisense Strand to SEQ ID NO: 428095
uaguuaaugacaaguuaca

SEQ ID NO: 428097 - RNA, 19 nt, Artificial Sequence
  Description of Artificial Sequence: Synthetic oligonucleotide
  Sense strand starting at position 3782 of SEQ ID NO: 316629
guaacuugucauuaacuag

SEQ ID NO: 428098 - RNA, 19 nt, Artificial Sequence
  Description of Artificial Sequence: Synthetic oligonucleotide
  Antisense Strand to SEQ ID NO: 428097
cuaguuaaugacaaguuac

SEQ ID NO: 428099 - RNA, 19 nt, Artificial Sequence
  Description of Artificial Sequence: Synthetic oligonucleotide
  Sense strand starting at position 3796 of SEQ ID NO: 316629
acuagcuauccaggaguga

SEQ ID NO: 428100 - RNA, 19 nt, Artificial Sequence
  Description of Artificial Sequence: Synthetic oligonucleotide
  Antisense Strand to SEQ ID NO: 428099
ucacuccuggauagcuagu

SEQ ID NO: 428101 - RNA, 19 nt, Artificial Sequence
  Description of Artificial Sequence: Synthetic oligonucleotide
  Sense strand starting at position 3797 of SEQ ID NO: 316629
cuagcuauccaggagugau

SEQ ID NO: 428102 - RNA, 19 nt, Artificial Sequence
  Description of Artificial Sequence: Synthetic oligonucleotide
  Antisense Strand to SEQ ID NO: 428101
aucacuccuggauagcuag

SEQ ID NO: 428103 - RNA, 19 nt, Artificial Sequence
  Description of Artificial Sequence: Synthetic oligonucleotide
  Sense strand starting at position 3932 of SEQ ID NO: 316629
uuaggagaucuagguucua

SEQ ID NO: 428104 - RNA, 19 nt, Artificial Sequence
  Description of Artificial Sequence: Synthetic oligonucleotide
  Antisense Strand to SEQ ID NO: 428103
uagaaccuagaucuccuaa

SEQ ID NO: 428105 - RNA, 19 nt, Artificial Sequence
  Description of Artificial Sequence: Synthetic oligonucleotide
  Sense strand starting at position 3965 of SEQ ID NO: 316629
cugucuuaccuugacaagu

SEQ ID NO: 428106 - RNA, 19 nt, Artificial Sequence
  Description of Artificial Sequence: Synthetic oligonucleotide
  Antisense Strand to SEQ ID NO: 428105
acuugucaagguaagacag

SEQ ID NO: 428107 - RNA, 19 nt, Artificial Sequence
  Description of Artificial Sequence: Synthetic oligonucleotide
  Sense strand starting at position 201 of SEQ ID NO: 316630
accagcuuguacgaaguau

SEQ ID NO: 428108 - RNA, 19 nt, Artificial Sequence
  Description of Artificial Sequence: Synthetic oligonucleotide
  Antisense Strand to SEQ ID NO: 428107
auacuucguacaagcuggu

SEQ ID NO: 428109 - RNA, 19 nt, Artificial Sequence
  Description of Artificial Sequence: Synthetic oligonucleotide
  Sense strand starting at position 262 of SEQ ID NO: 316630
aguuuagacucacaucacu

SEQ ID NO: 428110 - RNA, 19 nt, Artificial Sequence
  Description of Artificial Sequence: Synthetic oligonucleotide
  Antisense Strand to SEQ ID NO: 428109
agugaugugagucuaaacu

SEQ ID NO: 428111 - RNA, 19 nt, Artificial Sequence
  Description of Artificial Sequence: Synthetic oligonucleotide
  Sense strand starting at position 281 of SEQ ID NO: 316630
cagcgacucuccgaaacuu

SEQ ID NO: 428112 - RNA, 19 nt, Artificial Sequence
  Description of Artificial Sequence: Synthetic oligonucleotide
  Antisense Strand to SEQ ID NO: 428111
aaguuucggagagucgcug

SEQ ID NO: 428113 - RNA, 19 nt, Artificial Sequence
  Description of Artificial Sequence: Synthetic oligonucleotide
  Sense strand starting at position 341 of SEQ ID NO: 316630
accagcuguccauaccauu

SEQ ID NO: 428114 - RNA, 19 nt, Artificial Sequence
  Description of Artificial Sequence: Synthetic oligonucleotide
  Antisense Strand to SEQ ID NO: 428113
aaugguauggacagcuggu

SEQ ID NO: 428115 - RNA, 19 nt, Artificial Sequence
  Description of Artificial Sequence: Synthetic oligonucleotide
  Sense strand starting at position 347 of SEQ ID NO: 316630
uguccauaccauuguaaac

SEQ ID NO: 428116 - RNA, 19 nt, Artificial Sequence
  Description of Artificial Sequence: Synthetic oligonucleotide
  Antisense Strand to SEQ ID NO: 428115
guuuacaaugguauggaca

SEQ ID NO: 428117 - RNA, 19 nt, Artificial Sequence
  Description of Artificial Sequence: Synthetic oligonucleotide
  Sense strand starting at position 777 of SEQ ID NO: 316630
gguaucaucgcgggccuuu

SEQ ID NO: 428118 - RNA, 19 nt, Artificial Sequence
  Description of Artificial Sequence: Synthetic oligonucleotide
  Antisense Strand to SEQ ID NO: 428117
aaaggcccgcgaugauacc

SEQ ID NO: 428119 - RNA, 19 nt, Artificial Sequence
  Description of Artificial Sequence: Synthetic oligonucleotide
  Sense strand starting at position 868 of SEQ ID NO: 316630
cucucuggugccuguugaa

SEQ ID NO: 428120 - RNA, 19 nt, Artificial Sequence
  Description of Artificial Sequence: Synthetic oligonucleotide
  Antisense Strand to SEQ ID NO: 428119
uucaacaggcaccagagag

SEQ ID NO: 428121 - RNA, 19 nt, Artificial Sequence
  Description of Artificial Sequence: Synthetic oligonucleotide
  Sense strand starting at position 944 of SEQ ID NO: 316630
ucgaccuaucagcauucua

SEQ ID NO: 428122 - RNA, 19 nt, Artificial Sequence
  Description of Artificial Sequence: Synthetic oligonucleotide
  Antisense Strand to SEQ ID NO: 428121
uagaaugcugauaggucga

SEQ ID NO: 428123 - RNA, 19 nt, Artificial Sequence
  Description of Artificial Sequence: Synthetic oligonucleotide
  Sense strand starting at position 2281 of SEQ ID NO: 316630
acgguuucauugugauuga

SEQ ID NO: 428124 - RNA, 19 nt, Artificial Sequence
  Description of Artificial Sequence: Synthetic oligonucleotide
  Antisense Strand to SEQ ID NO: 428123
ucaaucacaaugaaaccgu

SEQ ID NO: 428125 - RNA, 19 nt, Artificial Sequence
  Description of Artificial Sequence: Synthetic oligonucleotide
  Sense strand starting at position 2282 of SEQ ID NO: 316630
cgguuucauugugauugac

SEQ ID NO: 428126 - RNA, 19 nt, Artificial Sequence
  Description of Artificial Sequence: Synthetic oligonucleotide
  Antisense Strand to SEQ ID NO: 428125
gucaaucacaaugaaaccg

SEQ ID NO: 428127 - RNA, 19 nt, Artificial Sequence
  Description of Artificial Sequence: Synthetic oligonucleotide
  Sense strand starting at position 2764 of SEQ ID NO: 316630
gcaggagccucugugacau

SEQ ID NO: 428128 - RNA, 19 nt, Artificial Sequence
  Description of Artificial Sequence: Synthetic oligonucleotide
  Antisense Strand to SEQ ID NO: 428127
augucacagaggcuccugc

SEQ ID NO: 428129 - RNA, 19 nt, Artificial Sequence
  Description of Artificial Sequence: Synthetic oligonucleotide
  Sense strand starting at position 2798 of SEQ ID NO: 316630
cagggauacugucuggaug

SEQ ID NO: 428130 - RNA, 19 nt, Artificial Sequence
  Description of Artificial Sequence: Synthetic oligonucleotide
  Antisense Strand to SEQ ID NO: 428129
cauccagacaguaucccug

SEQ ID NO: 428131 - RNA, 19 nt, Artificial Sequence
  Description of Artificial Sequence: Synthetic oligonucleotide
  Sense strand starting at position 2800 of SEQ ID NO: 316630
gggauacugucuggaugga

SEQ ID NO: 428132 - RNA, 19 nt, Artificial Sequence
  Description of Artificial Sequence: Synthetic oligonucleotide
  Antisense Strand to SEQ ID NO: 428131
uccauccagacaguauccc

SEQ ID NO: 428133 - RNA, 19 nt, Artificial Sequence
  Description of Artificial Sequence: Synthetic oligonucleotide
  Sense strand starting at position 2907 of SEQ ID NO: 316630
acuucugcuucccauaguu

SEQ ID NO: 428134 - RNA, 19 nt, Artificial Sequence
  Description of Artificial Sequence: Synthetic oligonucleotide
  Antisense Strand to SEQ ID NO: 428133
aacuaugggaagcagaagu

SEQ ID NO: 428135 - RNA, 19 nt, Artificial Sequence
  Description of Artificial Sequence: Synthetic oligonucleotide
  Sense strand starting at position 2919 of SEQ ID NO: 316630
cauaguuaaucacuaggga

SEQ ID NO: 428136 - RNA, 19 nt, Artificial Sequence
  Description of Artificial Sequence: Synthetic oligonucleotide
  Antisense Strand to SEQ ID NO: 428135
ucccuagugauuaacuaug

SEQ ID NO: 428137 - RNA, 19 nt, Artificial Sequence
  Description of Artificial Sequence: Synthetic oligonucleotide
  Sense strand starting at position 3084 of SEQ ID NO: 316630
ggcagacuugacuggacaa

SEQ ID NO: 428138 - RNA, 19 nt, Artificial Sequence
  Description of Artificial Sequence: Synthetic oligonucleotide
  Antisense Strand to SEQ ID NO: 428137
uuguccagucaagucugcc

SEQ ID NO: 428139 - RNA, 19 nt, Artificial Sequence
  Description of Artificial Sequence: Synthetic oligonucleotide
  Sense strand starting at position 3216 of SEQ ID NO: 316630
auuggaacccuuugugcau

SEQ ID NO: 428140 - RNA, 19 nt, Artificial Sequence
  Description of Artificial Sequence: Synthetic oligonucleotide
  Antisense Strand to SEQ ID NO: 428139
augcacaaaggguuccaau

SEQ ID NO: 428141 - RNA, 19 nt, Artificial Sequence
  Description of Artificial Sequence: Synthetic oligonucleotide
  Sense strand starting at position 3229 of SEQ ID NO: 316630
gugcaucgcugacgggaau

SEQ ID NO: 428142 - RNA, 19 nt, Artificial Sequence
  Description of Artificial Sequence: Synthetic oligonucleotide
  Antisense Strand to SEQ ID NO: 428141
auucccgucagcgaugcac

SEQ ID NO: 428143 - RNA, 19 nt, Artificial Sequence
  Description of Artificial Sequence: Synthetic oligonucleotide
  Sense strand starting at position 3385 of SEQ ID NO: 316630
agcagcauuaugcagagaa

SEQ ID NO: 428144 - RNA, 19 nt, Artificial Sequence
  Description of Artificial Sequence: Synthetic oligonucleotide
  Antisense Strand to SEQ ID NO: 428143
uucucugcauaaugcugcu

SEQ ID NO: 428145 - RNA, 19 nt, Artificial Sequence
  Description of Artificial Sequence: Synthetic oligonucleotide
  Sense strand starting at position 3759 of SEQ ID NO: 316630
aaaggaaauucugacgcau

SEQ ID NO: 428146 - RNA, 19 nt, Artificial Sequence
  Description of Artificial Sequence: Synthetic oligonucleotide
  Antisense Strand to SEQ ID NO: 428145
augcgucagaauuuccuuu

SEQ ID NO: 428147 - RNA, 19 nt, Artificial Sequence
  Description of Artificial Sequence: Synthetic oligonucleotide
  Sense strand starting at position 3799 of SEQ ID NO: 316630
gaagacaugcuaugugaaa

SEQ ID NO: 428148 - RNA, 19 nt, Artificial Sequence
  Description of Artificial Sequence: Synthetic oligonucleotide
  Antisense Strand to SEQ ID NO: 428147
uuucacauagcaugucuuc

SEQ ID NO: 428149 - RNA, 19 nt, Artificial Sequence
  Description of Artificial Sequence: Synthetic oligonucleotide
  Sense strand starting at position 3800 of SEQ ID NO: 316630
aagacaugcuaugugaaau

SEQ ID NO: 428150 - RNA, 19 nt, Artificial Sequence
  Description of Artificial Sequence: Synthetic oligonucleotide
  Antisense Strand to SEQ ID NO: 428149
auuucacauagcaugucuu

SEQ ID NO: 428151 - RNA, 19 nt, Artificial Sequence
  Description of Artificial Sequence: Synthetic oligonucleotide
  Sense strand starting at position 3834 of SEQ ID NO: 316630
agauaaauguaugauucca

SEQ ID NO: 428152 - RNA, 19 nt, Artificial Sequence
  Description of Artificial Sequence: Synthetic oligonucleotide
  Antisense Strand to SEQ ID NO: 428151
uggaaucauacauuuaucu

SEQ ID NO: 428153 - RNA, 19 nt, Artificial Sequence
  Description of Artificial Sequence: Synthetic oligonucleotide
  Sense strand starting at position 3856 of SEQ ID NO: 316630
guaugaggugucuagagua

SEQ ID NO: 428154 - RNA, 19 nt, Artificial Sequence
  Description of Artificial Sequence: Synthetic oligonucleotide
  Antisense Strand to SEQ ID NO: 428153
uacucuagacaccucauac

SEQ ID NO: 428155 - RNA, 19 nt, Artificial Sequence
  Description of Artificial Sequence: Synthetic oligonucleotide
  Sense strand starting at position 16 of SEQ ID NO: 316631
uuaacacuggcuggauauu

SEQ ID NO: 428156 - RNA, 19 nt, Artificial Sequence
  Description of Artificial Sequence: Synthetic oligonucleotide
  Antisense Strand to SEQ ID NO: 428155
aauauccagccaguguuaa

SEQ ID NO: 428157 - RNA, 19 nt, Artificial Sequence
  Description of Artificial Sequence: Synthetic oligonucleotide
  Sense strand starting at position 62 of SEQ ID NO: 316631
cugugauagugguacucau

SEQ ID NO: 428158 - RNA, 19 nt, Artificial Sequence
  Description of Artificial Sequence: Synthetic oligonucleotide
  Antisense Strand to SEQ ID NO: 428157
augaguaccacuaucacag

SEQ ID NO: 428159 - RNA, 19 nt, Artificial Sequence
  Description of Artificial Sequence: Synthetic oligonucleotide
  Sense strand starting at position 117 of SEQ ID NO: 316631
ugaacuauuuaacgguuaa

SEQ ID NO: 428160 - RNA, 19 nt, Artificial Sequence
  Description of Artificial Sequence: Synthetic oligonucleotide
  Antisense Strand to SEQ ID NO: 428159
uuaaccguuaaauaguuca

SEQ ID NO: 428161 - RNA, 19 nt, Artificial Sequence
  Description of Artificial Sequence: Synthetic oligonucleotide
  Sense strand starting at position 165 of SEQ ID NO: 316631
aagcaagauugacuguuga

SEQ ID NO: 428162 - RNA, 19 nt, Artificial Sequence
  Description of Artificial Sequence: Synthetic oligonucleotide
  Antisense Strand to SEQ ID NO: 428161
ucaacagucaaucuugcuu

SEQ ID NO: 428163 - RNA, 19 nt, Artificial Sequence
  Description of Artificial Sequence: Synthetic oligonucleotide
  Sense strand starting at position 169 of SEQ ID NO: 316631
aagauugacuguugaaacu

SEQ ID NO: 428164 - RNA, 19 nt, Artificial Sequence
  Description of Artificial Sequence: Synthetic oligonucleotide
  Antisense Strand to SEQ ID NO: 428163
aguuucaacagucaaucuu

SEQ ID NO: 428165 - RNA, 19 nt, Artificial Sequence
  Description of Artificial Sequence: Synthetic oligonucleotide
  Sense strand starting at position 175 of SEQ ID NO: 316631
gacuguugaaacugguuga

SEQ ID NO: 428166 - RNA, 19 nt, Artificial Sequence
  Description of Artificial Sequence: Synthetic oligonucleotide
  Antisense Strand to SEQ ID NO: 428165
ucaaccaguuucaacaguc

SEQ ID NO: 428167 - RNA, 19 nt, Artificial Sequence
  Description of Artificial Sequence: Synthetic oligonucleotide
  Sense strand starting at position 178 of SEQ ID NO: 316631
uguugaaacugguugagaa

SEQ ID NO: 428168 - RNA, 19 nt, Artificial Sequence
  Description of Artificial Sequence: Synthetic oligonucleotide
  Antisense Strand to SEQ ID NO: 428167
uucucaaccaguuucaaca

SEQ ID NO: 428169 - RNA, 19 nt, Artificial Sequence
  Description of Artificial Sequence: Synthetic oligonucleotide
  Sense strand starting at position 179 of SEQ ID NO: 316631
guugaaacugguugagaaa

SEQ ID NO: 428170 - RNA, 19 nt, Artificial Sequence
  Description of Artificial Sequence: Synthetic oligonucleotide
  Antisense Strand to SEQ ID NO: 428169
uuucucaaccaguuucaac

SEQ ID NO: 428171 - RNA, 19 nt, Artificial Sequence
  Description of Artificial Sequence: Synthetic oligonucleotide
  Sense strand starting at position 201 of SEQ ID NO: 316631
gguuuauacuauucucucu

SEQ ID NO: 428172 - RNA, 19 nt, Artificial Sequence
  Description of Artificial Sequence: Synthetic oligonucleotide
  Antisense Strand to SEQ ID NO: 428171
agagagaauaguauaaacc

SEQ ID NO: 428173 - RNA, 19 nt, Artificial Sequence
  Description of Artificial Sequence: Synthetic oligonucleotide
  Sense strand starting at position 214 of SEQ ID NO: 316631
cucucuacauauguguaua

SEQ ID NO: 428174 - RNA, 19 nt, Artificial Sequence
  Description of Artificial Sequence: Synthetic oligonucleotide
  Antisense Strand to SEQ ID NO: 428173
uauacacauauguagagag

SEQ ID NO: 428175 - RNA, 19 nt, Artificial Sequence
  Description of Artificial Sequence: Synthetic oligonucleotide
  Sense strand starting at position 227 of SEQ ID NO: 316631
uguauauguuaagagguaa

SEQ ID NO: 428176 - RNA, 19 nt, Artificial Sequence
  Description of Artificial Sequence: Synthetic oligonucleotide
  Antisense Strand to SEQ ID NO: 428175
uuaccucuuaacauauaca

SEQ ID NO: 428177 - RNA, 19 nt, Artificial Sequence
  Description of Artificial Sequence: Synthetic oligonucleotide
  Sense strand starting at position 494 of SEQ ID NO: 316631
accagcuuguacgaaguau

SEQ ID NO: 428178 - RNA, 19 nt, Artificial Sequence
  Description of Artificial Sequence: Synthetic oligonucleotide
  Antisense Strand to SEQ ID NO: 428177
auacuucguacaagcuggu

SEQ ID NO: 428179 - RNA, 19 nt, Artificial Sequence
  Description of Artificial Sequence: Synthetic oligonucleotide
  Sense strand starting at position 555 of SEQ ID NO: 316631
aguuuagacucacaucacu

SEQ ID NO: 428180 - RNA, 19 nt, Artificial Sequence
  Description of Artificial Sequence: Synthetic oligonucleotide
  Antisense Strand to SEQ ID NO: 428179
agugaugugagucuaaacu

SEQ ID NO: 428181 - RNA, 19 nt, Artificial Sequence
  Description of Artificial Sequence: Synthetic oligonucleotide
  Sense strand starting at position 574 of SEQ ID NO: 316631
cagcgacucuccgaaacuu

SEQ ID NO: 428182 - RNA, 19 nt, Artificial Sequence
  Description of Artificial Sequence: Synthetic oligonucleotide
  Antisense Strand to SEQ ID NO: 428181
aaguuucggagagucgcug

SEQ ID NO: 428183 - RNA, 19 nt, Artificial Sequence
  Description of Artificial Sequence: Synthetic oligonucleotide
  Sense strand starting at position 634 of SEQ ID NO: 316631
accagcuguccauaccauu

SEQ ID NO: 428184 - RNA, 19 nt, Artificial Sequence
  Description of Artificial Sequence: Synthetic oligonucleotide
  Antisense Strand to SEQ ID NO: 428183
aaugguauggacagcuggu

SEQ ID NO: 428185 - RNA, 19 nt, Artificial Sequence
  Description of Artificial Sequence: Synthetic oligonucleotide
  Sense strand starting at position 640 of SEQ ID NO: 316631
uguccauaccauuguaaac

SEQ ID NO: 428186 - RNA, 19 nt, Artificial Sequence
  Description of Artificial Sequence: Synthetic oligonucleotide
  Antisense Strand to SEQ ID NO: 428185
guuuacaaugguauggaca

SEQ ID NO: 428187 - RNA, 19 nt, Artificial Sequence
  Description of Artificial Sequence: Synthetic oligonucleotide
  Sense strand starting at position 1070 of SEQ ID NO: 316631
gguaucaucgcgggccuuu

SEQ ID NO: 428188 - RNA, 19 nt, Artificial Sequence
  Description of Artificial Sequence: Synthetic oligonucleotide
  Antisense Strand to SEQ ID NO: 428187
aaaggcccgcgaugauacc

SEQ ID NO: 428189 - RNA, 19 nt, Artificial Sequence
  Description of Artificial Sequence: Synthetic oligonucleotide
  Sense strand starting at position 1161 of SEQ ID NO: 316631
cucucuggugccuguugaa

SEQ ID NO: 428190 - RNA, 19 nt, Artificial Sequence
  Description of Artificial Sequence: Synthetic oligonucleotide
  Antisense Strand to SEQ ID NO: 428189
uucaacaggcaccagagag

SEQ ID NO: 428191 - RNA, 19 nt, Artificial Sequence
  Description of Artificial Sequence: Synthetic oligonucleotide
  Sense strand starting at position 1237 of SEQ ID NO: 316631
ucgaccuaucagcauucua

SEQ ID NO: 428192 - RNA, 19 nt, Artificial Sequence
  Description of Artificial Sequence: Synthetic oligonucleotide
  Antisense Strand to SEQ ID NO: 428191
uagaaugcugauaggucga

SEQ ID NO: 428193 - RNA, 19 nt, Artificial Sequence
  Description of Artificial Sequence: Synthetic oligonucleotide
  Sense strand starting at position 2574 of SEQ ID NO: 316631
acgguuucauugugauuga

SEQ ID NO: 428194 - RNA, 19 nt, Artificial Sequence
  Description of Artificial Sequence: Synthetic oligonucleotide
  Antisense Strand to SEQ ID NO: 428193
ucaaucacaaugaaaccgu

SEQ ID NO: 428195 - RNA, 19 nt, Artificial Sequence
  Description of Artificial Sequence: Synthetic oligonucleotide
  Sense strand starting at position 2575 of SEQ ID NO: 316631
cgguuucauugugauugac

SEQ ID NO: 428196 - RNA, 19 nt, Artificial Sequence
  Description of Artificial Sequence: Synthetic oligonucleotide
  Antisense Strand to SEQ ID NO: 428195
gucaaucacaaugaaaccg

SEQ ID NO: 428197 - RNA, 19 nt, Artificial Sequence
  Description of Artificial Sequence: Synthetic oligonucleotide
  Sense strand starting at position 3057 of SEQ ID NO: 316631
gcaggagccucugugacau

SEQ ID NO: 428198 - RNA, 19 nt, Artificial Sequence
  Description of Artificial Sequence: Synthetic oligonucleotide
  Antisense Strand to SEQ ID NO: 428197
augucacagaggcuccugc

SEQ ID NO: 428199 - RNA, 19 nt, Artificial Sequence
  Description of Artificial Sequence: Synthetic oligonucleotide
  Sense strand starting at position 3091 of SEQ ID NO: 316631
cagggauacugucuggaug

SEQ ID NO: 428200 - RNA, 19 nt, Artificial Sequence
  Description of Artificial Sequence: Synthetic oligonucleotide
  Antisense Strand to SEQ ID NO: 428199
cauccagacaguaucccug

SEQ ID NO: 428201 - RNA, 19 nt, Artificial Sequence
  Description of Artificial Sequence: Synthetic oligonucleotide
  Sense strand starting at position 3093 of SEQ ID NO: 316631
gggauacugucuggaugga

SEQ ID NO: 428202 - RNA, 19 nt, Artificial Sequence
  Description of Artificial Sequence: Synthetic oligonucleotide
  Antisense Strand to SEQ ID NO: 428201
uccauccagacaguauccc

SEQ ID NO: 428203 - RNA, 19 nt, Artificial Sequence
  Description of Artificial Sequence: Synthetic oligonucleotide
  Sense strand starting at position 3200 of SEQ ID NO: 316631
acuucugcuucccauaguu

SEQ ID NO: 428204 - RNA, 19 nt, Artificial Sequence
  Description of Artificial Sequence: Synthetic oligonucleotide
  Antisense Strand to SEQ ID NO: 428203
aacuaugggaagcagaagu

SEQ ID NO: 428205 - RNA, 19 nt, Artificial Sequence
  Description of Artificial Sequence: Synthetic oligonucleotide
  Sense strand starting at position 3212 of SEQ ID NO: 316631
cauaguuaaucacuaggga

SEQ ID NO: 428206 - RNA, 19 nt, Artificial Sequence
  Description of Artificial Sequence: Synthetic oligonucleotide
  Antisense Strand to SEQ ID NO: 428205
ucccuagugauuaacuaug

SEQ ID NO: 428207 - RNA, 19 nt, Artificial Sequence
  Description of Artificial Sequence: Synthetic oligonucleotide
  Sense strand starting at position 3377 of SEQ ID NO: 316631
ggcagacuugacuggacaa

SEQ ID NO: 428208 - RNA, 19 nt, Artificial Sequence
  Description of Artificial Sequence: Synthetic oligonucleotide
  Antisense Strand to SEQ ID NO: 428207
uuguccagucaagucugcc

SEQ ID NO: 428209 - RNA, 19 nt, Artificial Sequence
  Description of Artificial Sequence: Synthetic oligonucleotide
  Sense strand starting at position 3509 of SEQ ID NO: 316631
auuggaacccuuugugcau

SEQ ID NO: 428210 - RNA, 19 nt, Artificial Sequence
  Description of Artificial Sequence: Synthetic oligonucleotide
  Antisense Strand to SEQ ID NO: 428209
augcacaaaggguuccaau

SEQ ID NO: 428211 - RNA, 19 nt, Artificial Sequence
  Description of Artificial Sequence: Synthetic oligonucleotide
  Sense strand starting at position 3522 of SEQ ID NO: 316631
gugcaucgcugacgggaau

SEQ ID NO: 428212 - RNA, 19 nt, Artificial Sequence
  Description of Artificial Sequence: Synthetic oligonucleotide
  Antisense Strand to SEQ ID NO: 428211
auucccgucagcgaugcac

SEQ ID NO: 428213 - RNA, 19 nt, Artificial Sequence
  Description of Artificial Sequence: Synthetic oligonucleotide
  Sense strand starting at position 3678 of SEQ ID NO: 316631
agcagcauuaugcagagaa

SEQ ID NO: 428214 - RNA, 19 nt, Artificial Sequence
  Description of Artificial Sequence: Synthetic oligonucleotide
  Antisense Strand to SEQ ID NO: 428213
uucucugcauaaugcugcu

SEQ ID NO: 428215 - RNA, 19 nt, Artificial Sequence
  Description of Artificial Sequence: Synthetic oligonucleotide
  Sense strand starting at position 37 of SEQ ID NO: 316632
gauguuugguucuccauuu

SEQ ID NO: 428216 - RNA, 19 nt, Artificial Sequence
  Description of Artificial Sequence: Synthetic oligonucleotide
  Antisense Strand to SEQ ID NO: 428215
aaauggagaaccaaacauc

SEQ ID NO: 428217 - RNA, 19 nt, Artificial Sequence
  Description of Artificial Sequence: Synthetic oligonucleotide
  Sense strand starting at position 150 of SEQ ID NO: 316632
augguauaugcacaccaua

SEQ ID NO: 428218 - RNA, 19 nt, Artificial Sequence
  Description of Artificial Sequence: Synthetic oligonucleotide
  Antisense Strand to SEQ ID NO: 428217
uauggugugcauauaccau

SEQ ID NO: 428219 - RNA, 19 nt, Artificial Sequence
  Description of Artificial Sequence: Synthetic oligonucleotide
  Sense strand starting at position 181 of SEQ ID NO: 316632
acucguuugucgaugggca

SEQ ID NO: 428220 - RNA, 19 nt, Artificial Sequence
  Description of Artificial Sequence: Synthetic oligonucleotide
  Antisense Strand to SEQ ID NO: 428219
ugcccaucgacaaacgagu

SEQ ID NO: 428221 - RNA, 19 nt, Artificial Sequence
  Description of Artificial Sequence: Synthetic oligonucleotide
  Sense strand starting at position 197 of SEQ ID NO: 316632
gcauuuaggucaguucugu

SEQ ID NO: 428222 - RNA, 19 nt, Artificial Sequence
  Description of Artificial Sequence: Synthetic oligonucleotide
  Antisense Strand to SEQ ID NO: 428221
acagaacugaccuaaaugc

SEQ ID NO: 428223 - RNA, 19 nt, Artificial Sequence
  Description of Artificial Sequence: Synthetic oligonucleotide
  Sense strand starting at position 342 of SEQ ID NO: 316632
uugacucagugauuaacua

SEQ ID NO: 428224 - RNA, 19 nt, Artificial Sequence
  Description of Artificial Sequence: Synthetic oligonucleotide
  Antisense Strand to SEQ ID NO: 428223
uaguuaaucacugagucaa

SEQ ID NO: 428225 - RNA, 19 nt, Artificial Sequence
  Description of Artificial Sequence: Synthetic oligonucleotide
  Sense strand starting at position 380 of SEQ ID NO: 316632
gcuggcuuuccagagaaua

SEQ ID NO: 428226 - RNA, 19 nt, Artificial Sequence
  Description of Artificial Sequence: Synthetic oligonucleotide
  Antisense Strand to SEQ ID NO: 428225
uauucucuggaaagccagc

SEQ ID NO: 428227 - RNA, 19 nt, Artificial Sequence
  Description of Artificial Sequence: Synthetic oligonucleotide
  Sense strand starting at position 400 of SEQ ID NO: 316632
agaugaaucuagccuuaug

SEQ ID NO: 428228 - RNA, 19 nt, Artificial Sequence
  Description of Artificial Sequence: Synthetic oligonucleotide
  Antisense Strand to SEQ ID NO: 428227
cauaaggcuagauucaucu

SEQ ID NO: 428229 - RNA, 19 nt, Artificial Sequence
  Description of Artificial Sequence: Synthetic oligonucleotide
  Sense strand starting at position 472 of SEQ ID NO: 316632
aauaauaguggcuaauagu

SEQ ID NO: 428230 - RNA, 19 nt, Artificial Sequence
  Description of Artificial Sequence: Synthetic oligonucleotide
  Antisense Strand to SEQ ID NO: 428229
acuauuagccacuauuauu

SEQ ID NO: 428231 - RNA, 19 nt, Artificial Sequence
  Description of Artificial Sequence: Synthetic oligonucleotide
  Sense strand starting at position 594 of SEQ ID NO: 316632
gucacuauuuagcauuuga

SEQ ID NO: 428232 - RNA, 19 nt, Artificial Sequence
  Description of Artificial Sequence: Synthetic oligonucleotide
  Antisense Strand to SEQ ID NO: 428231
ucaaaugcuaaauagugac

SEQ ID NO: 428233 - RNA, 19 nt, Artificial Sequence
  Description of Artificial Sequence: Synthetic oligonucleotide
  Sense strand starting at position 616 of SEQ ID NO: 316632
aaauauaaugcaggaugua

SEQ ID NO: 428234 - RNA, 19 nt, Artificial Sequence
  Description of Artificial Sequence: Synthetic oligonucleotide
  Antisense Strand to SEQ ID NO: 428233
uacauccugcauuauauuu

SEQ ID NO: 428235 - RNA, 19 nt, Artificial Sequence
  Description of Artificial Sequence: Synthetic oligonucleotide
  Sense strand starting at position 619 of SEQ ID NO: 316632
uauaaugcaggauguauaa

SEQ ID NO: 428236 - RNA, 19 nt, Artificial Sequence
  Description of Artificial Sequence: Synthetic oligonucleotide
  Antisense Strand to SEQ ID NO: 428235
uuauacauccugcauuaua

SEQ ID NO: 428237 - RNA, 19 nt, Artificial Sequence
  Description of Artificial Sequence: Synthetic oligonucleotide
  Sense strand starting at position 854 of SEQ ID NO: 316632
aguaaagugagguggaaua

SEQ ID NO: 428238 - RNA, 19 nt, Artificial Sequence
  Description of Artificial Sequence: Synthetic oligonucleotide
  Antisense Strand to SEQ ID NO: 428237
uauuccaccucacuuuacu

SEQ ID NO: 428239 - RNA, 19 nt, Artificial Sequence
  Description of Artificial Sequence: Synthetic oligonucleotide
  Sense strand starting at position 1086 of SEQ ID NO: 316632
auuguauuaccacauguau

SEQ ID NO: 428240 - RNA, 19 nt, Artificial Sequence
  Description of Artificial Sequence: Synthetic oligonucleotide
  Antisense Strand to SEQ ID NO: 428239
auacaugugguaauacaau

SEQ ID NO: 428241 - RNA, 19 nt, Artificial Sequence
  Description of Artificial Sequence: Synthetic oligonucleotide
  Sense strand starting at position 1267 of SEQ ID NO: 316632
cuggaaauugccugaauug

SEQ ID NO: 428242 - RNA, 19 nt, Artificial Sequence
  Description of Artificial Sequence: Synthetic oligonucleotide
  Antisense Strand to SEQ ID NO: 428241
caauucaggcaauuuccag

SEQ ID NO: 428243 - RNA, 19 nt, Artificial Sequence
  Description of Artificial Sequence: Synthetic oligonucleotide
  Sense strand starting at position 1323 of SEQ ID NO: 316632
ugauguugucuugauuaac

SEQ ID NO: 428244 - RNA, 19 nt, Artificial Sequence
  Description of Artificial Sequence: Synthetic oligonucleotide
  Antisense Strand to SEQ ID NO: 428243
guuaaucaagacaacauca

SEQ ID NO: 428245 - RNA, 19 nt, Artificial Sequence
  Description of Artificial Sequence: Synthetic oligonucleotide
  Sense strand starting at position 1332 of SEQ ID NO: 316632
cuugauuaaccuugaugau

SEQ ID NO: 428246 - RNA, 19 nt, Artificial Sequence
  Description of Artificial Sequence: Synthetic oligonucleotide
  Antisense Strand to SEQ ID NO: 428245
aucaucaagguuaaucaag

SEQ ID NO: 428247 - RNA, 19 nt, Artificial Sequence
  Description of Artificial Sequence: Synthetic oligonucleotide
  Sense strand starting at position 1358 of SEQ ID NO: 316632
cugugagaccaaugagcau

SEQ ID NO: 428248 - RNA, 19 nt, Artificial Sequence
  Description of Artificial Sequence: Synthetic oligonucleotide
  Antisense Strand to SEQ ID NO: 428247
augcucauuggucucacag

SEQ ID NO: 428249 - RNA, 19 nt, Artificial Sequence
  Description of Artificial Sequence: Synthetic oligonucleotide
  Sense strand starting at position 1620 of SEQ ID NO: 316632
gucuuuaaugugggaaaua

SEQ ID NO: 428250 - RNA, 19 nt, Artificial Sequence
  Description of Artificial Sequence: Synthetic oligonucleotide
  Antisense Strand to SEQ ID NO: 428249
uauuucccacauuaaagac

SEQ ID NO: 428251 - RNA, 19 nt, Artificial Sequence
  Description of Artificial Sequence: Synthetic oligonucleotide
  Sense strand starting at position 1875 of SEQ ID NO: 316632
ugcugugcucauguugauu

SEQ ID NO: 428252 - RNA, 19 nt, Artificial Sequence
  Description of Artificial Sequence: Synthetic oligonucleotide
  Antisense Strand to SEQ ID NO: 428251
aaucaacaugagcacagca

SEQ ID NO: 428253 - RNA, 19 nt, Artificial Sequence
  Description of Artificial Sequence: Synthetic oligonucleotide
  Sense strand starting at position 1932 of SEQ ID NO: 316632
uggauuucuucccugcuca

SEQ ID NO: 428254 - RNA, 19 nt, Artificial Sequence
  Description of Artificial Sequence: Synthetic oligonucleotide
  Antisense Strand to SEQ ID NO: 428253
ugagcagggaagaaaucca

SEQ ID NO: 428255 - RNA, 19 nt, Artificial Sequence
  Description of Artificial Sequence: Synthetic oligonucleotide
  Sense strand starting at position 1965 of SEQ ID NO: 316632
guguauugcauagguauuu

SEQ ID NO: 428256 - RNA, 19 nt, Artificial Sequence
  Description of Artificial Sequence: Synthetic oligonucleotide
  Antisense Strand to SEQ ID NO: 428255
aaauaccuaugcaauacac

SEQ ID NO: 428257 - RNA, 19 nt, Artificial Sequence
  Description of Artificial Sequence: Synthetic oligonucleotide
  Sense strand starting at position 1966 of SEQ ID NO: 316632
uguauugcauagguauuua

SEQ ID NO: 428258 - RNA, 19 nt, Artificial Sequence
  Description of Artificial Sequence: Synthetic oligonucleotide
  Antisense Strand to SEQ ID NO: 428257
uaaauaccuaugcaauaca

SEQ ID NO: 428259 - RNA, 19 nt, Artificial Sequence
  Description of Artificial Sequence: Synthetic oligonucleotide
  Sense strand starting at position 2024 of SEQ ID NO: 316632
acacaugaucuaggucuuu

SEQ ID NO: 428260 - RNA, 19 nt, Artificial Sequence
  Description of Artificial Sequence: Synthetic oligonucleotide
  Antisense Strand to SEQ ID NO: 428259
aaagaccuagaucaugugu

SEQ ID NO: 428261 - RNA, 19 nt, Artificial Sequence
  Description of Artificial Sequence: Synthetic oligonucleotide
  Sense strand starting at position 2030 of SEQ ID NO: 316632
gaucuaggucuuuaagcca

SEQ ID NO: 428262 - RNA, 19 nt, Artificial Sequence
  Description of Artificial Sequence: Synthetic oligonucleotide
  Antisense Strand to SEQ ID NO: 428261
uggcuuaaagaccuagauc

SEQ ID NO: 428263 - RNA, 19 nt, Artificial Sequence
  Description of Artificial Sequence: Synthetic oligonucleotide
  Sense strand starting at position 2173 of SEQ ID NO: 316632
agugauaaagcuuaaucau

SEQ ID NO: 428264 - RNA, 19 nt, Artificial Sequence
  Description of Artificial Sequence: Synthetic oligonucleotide
  Antisense Strand to SEQ ID NO: 428263
augauuaagcuuuaucacu

SEQ ID NO: 428265 - RNA, 19 nt, Artificial Sequence
  Description of Artificial Sequence: Synthetic oligonucleotide
  Sense strand starting at position 2536 of SEQ ID NO: 316632
aguggauggcagugauaaa

SEQ ID NO: 428266 - RNA, 19 nt, Artificial Sequence
  Description of Artificial Sequence: Synthetic oligonucleotide
  Antisense Strand to SEQ ID NO: 428265
uuuaucacugccauccacu

SEQ ID NO: 428267 - RNA, 19 nt, Artificial Sequence
  Description of Artificial Sequence: Synthetic oligonucleotide
  Sense strand starting at position 2537 of SEQ ID NO: 316632
guggauggcagugauaaau

SEQ ID NO: 428268 - RNA, 19 nt, Artificial Sequence
  Description of Artificial Sequence: Synthetic oligonucleotide
  Antisense Strand to SEQ ID NO: 428267
auuuaucacugccauccac

SEQ ID NO: 428269 - RNA, 19 nt, Artificial Sequence
  Description of Artificial Sequence: Synthetic oligonucleotide
  Sense strand starting at position 2557 of SEQ ID NO: 316632
agacauuaccucuaucugu

SEQ ID NO: 428270 - RNA, 19 nt, Artificial Sequence
  Description of Artificial Sequence: Synthetic oligonucleotide
  Antisense Strand to SEQ ID NO: 428269
acagauagagguaaugucu

SEQ ID NO: 428271 - RNA, 19 nt, Artificial Sequence
  Description of Artificial Sequence: Synthetic oligonucleotide
  Sense strand starting at position 2690 of SEQ ID NO: 316632
uuuguuuaccuguaagaug

SEQ ID NO: 428272 - RNA, 19 nt, Artificial Sequence
  Description of Artificial Sequence: Synthetic oligonucleotide
  Antisense Strand to SEQ ID NO: 428271
caucuuacagguaaacaaa

SEQ ID NO: 428273 - RNA, 19 nt, Artificial Sequence
  Description of Artificial Sequence: Synthetic oligonucleotide
  Sense strand starting at position 2727 of SEQ ID NO: 316632
uuaaaugacuguuuaguga

SEQ ID NO: 428274 - RNA, 19 nt, Artificial Sequence
  Description of Artificial Sequence: Synthetic oligonucleotide
  Antisense Strand to SEQ ID NO: 428273
ucacuaaacagucauuuaa

SEQ ID NO: 428275 - RNA, 19 nt, Artificial Sequence
  Description of Artificial Sequence: Synthetic oligonucleotide
  Sense strand starting at position 2843 of SEQ ID NO: 316632
uagaguuuaacagguagga

SEQ ID NO: 428276 - RNA, 19 nt, Artificial Sequence
  Description of Artificial Sequence: Synthetic oligonucleotide
  Antisense Strand to SEQ ID NO: 428275
uccuaccuguuaaacucua

SEQ ID NO: 428277 - RNA, 19 nt, Artificial Sequence
  Description of Artificial Sequence: Synthetic oligonucleotide
  Sense strand starting at position 2856 of SEQ ID NO: 316632
guaggagcacccuacuaaa

SEQ ID NO: 428278 - RNA, 19 nt, Artificial Sequence
  Description of Artificial Sequence: Synthetic oligonucleotide
  Antisense Strand to SEQ ID NO: 428277
uuuaguagggugcuccuac

SEQ ID NO: 428279 - RNA, 19 nt, Artificial Sequence
  Description of Artificial Sequence: Synthetic oligonucleotide
  Sense strand starting at position 3141 of SEQ ID NO: 316632
auguaacuagucuacacau

SEQ ID NO: 428280 - RNA, 19 nt, Artificial Sequence
  Description of Artificial Sequence: Synthetic oligonucleotide
  Antisense Strand to SEQ ID NO: 428279
auguguagacuaguuacau

SEQ ID NO: 428281 - RNA, 19 nt, Artificial Sequence
  Description of Artificial Sequence: Synthetic oligonucleotide
  Sense strand starting at position 3158 of SEQ ID NO: 316632
auggcuguccaagauuaug

SEQ ID NO: 428282 - RNA, 19 nt, Artificial Sequence
  Description of Artificial Sequence: Synthetic oligonucleotide
  Antisense Strand to SEQ ID NO: 428281
cauaaucuuggacagccau

SEQ ID NO: 428283 - RNA, 19 nt, Artificial Sequence
  Description of Artificial Sequence: Synthetic oligonucleotide
  Sense strand starting at position 3166 of SEQ ID NO: 316632
ccaagauuaugaguuuaau

SEQ ID NO: 428284 - RNA, 19 nt, Artificial Sequence
  Description of Artificial Sequence: Synthetic oligonucleotide
  Antisense Strand to SEQ ID NO: 428283
auuaaacucauaaucuugg

SEQ ID NO: 428285 - RNA, 19 nt, Artificial Sequence
  Description of Artificial Sequence: Synthetic oligonucleotide
  Sense strand starting at position 3703 of SEQ ID NO: 316632
gugcuuuaugucucugcau

SEQ ID NO: 428286 - RNA, 19 nt, Artificial Sequence
  Description of Artificial Sequence: Synthetic oligonucleotide
  Antisense Strand to SEQ ID NO: 428285
augcagagacauaaagcac

SEQ ID NO: 428287 - RNA, 19 nt, Artificial Sequence
  Description of Artificial Sequence: Synthetic oligonucleotide
  Sense strand starting at position 3791 of SEQ ID NO: 316632
agagaucagucuccuaauu

SEQ ID NO: 428288 - RNA, 19 nt, Artificial Sequence
  Description of Artificial Sequence: Synthetic oligonucleotide
  Antisense Strand to SEQ ID NO: 428287
aauuaggagacugaucucu

SEQ ID NO: 428289 - RNA, 19 nt, Artificial Sequence
  Description of Artificial Sequence: Synthetic oligonucleotide
  Sense strand starting at position 3813 of SEQ ID NO: 316632
acuggaaauuucuagucag

SEQ ID NO: 428290 - RNA, 19 nt, Artificial Sequence
  Description of Artificial Sequence: Synthetic oligonucleotide
  Antisense Strand to SEQ ID NO: 428289
cugacuagaaauuuccagu

SEQ ID NO: 428291 - RNA, 19 nt, Artificial Sequence
  Description of Artificial Sequence: Synthetic oligonucleotide
  Sense strand starting at position 3893 of SEQ ID NO: 316632
uuuaaugagugauuguuga

SEQ ID NO: 428292 - RNA, 19 nt, Artificial Sequence
  Description of Artificial Sequence: Synthetic oligonucleotide
  Antisense Strand to SEQ ID NO: 428291
ucaacaaucacucauuaaa

SEQ ID NO: 428293 - RNA, 19 nt, Artificial Sequence
  Description of Artificial Sequence: Synthetic oligonucleotide
  Sense strand starting at position 3913 of SEQ ID NO: 316632
uucuuaugcucauuuaugu

SEQ ID NO: 428294 - RNA, 19 nt, Artificial Sequence
  Description of Artificial Sequence: Synthetic oligonucleotide
  Antisense Strand to SEQ ID NO: 428293
acauaaaugagcauaagaa

SEQ ID NO: 428295 - RNA, 19 nt, Artificial Sequence
  Description of Artificial Sequence: Synthetic oligonucleotide
  Sense strand starting at position 187 of SEQ ID NO: 316633
gaaacagugugcuuggauu

SEQ ID NO: 428296 - RNA, 19 nt, Artificial Sequence
  Description of Artificial Sequence: Synthetic oligonucleotide
  Antisense Strand to SEQ ID NO: 428295
aauccaagcacacuguuuc

SEQ ID NO: 428297 - RNA, 19 nt, Artificial Sequence
  Description of Artificial Sequence: Synthetic oligonucleotide
  Sense strand starting at position 195 of SEQ ID NO: 316633
gugcuuggauuucuguuua

SEQ ID NO: 428298 - RNA, 19 nt, Artificial Sequence
  Description of Artificial Sequence: Synthetic oligonucleotide
  Antisense Strand to SEQ ID NO: 428297
uaaacagaaauccaagcac

SEQ ID NO: 428299 - RNA, 19 nt, Artificial Sequence
  Description of Artificial Sequence: Synthetic oligonucleotide
  Sense strand starting at position 213 of SEQ ID NO: 316633
agcagagcuuauccauaga

SEQ ID NO: 428300 - RNA, 19 nt, Artificial Sequence
  Description of Artificial Sequence: Synthetic oligonucleotide
  Antisense Strand to SEQ ID NO: 428299
ucuauggauaagcucugcu

SEQ ID NO: 428301 - RNA, 19 nt, Artificial Sequence
  Description of Artificial Sequence: Synthetic oligonucleotide
  Sense strand starting at position 216 of SEQ ID NO: 316633
agagcuuauccauagaugu

SEQ ID NO: 428302 - RNA, 19 nt, Artificial Sequence
  Description of Artificial Sequence: Synthetic oligonucleotide
  Antisense Strand to SEQ ID NO: 428301
acaucuauggauaagcucu

SEQ ID NO: 428303 - RNA, 19 nt, Artificial Sequence
  Description of Artificial Sequence: Synthetic oligonucleotide
  Sense strand starting at position 494 of SEQ ID NO: 316633
guacuaauaguaggaagau

SEQ ID NO: 428304 - RNA, 19 nt, Artificial Sequence
  Description of Artificial Sequence: Synthetic oligonucleotide
  Antisense Strand to SEQ ID NO: 428303
aucuuccuacuauuaguac

SEQ ID NO: 428305 - RNA, 19 nt, Artificial Sequence
  Description of Artificial Sequence: Synthetic oligonucleotide
  Sense strand starting at position 503 of SEQ ID NO: 316633
guaggaagauucuuauuau

SEQ ID NO: 428306 - RNA, 19 nt, Artificial Sequence
  Description of Artificial Sequence: Synthetic oligonucleotide
  Antisense Strand to SEQ ID NO: 428305
auaauaagaaucuuccuac

SEQ ID NO: 428307 - RNA, 19 nt, Artificial Sequence
  Description of Artificial Sequence: Synthetic oligonucleotide
  Sense strand starting at position 518 of SEQ ID NO: 316633
uuaugaggugcuuaugaug

SEQ ID NO: 428308 - RNA, 19 nt, Artificial Sequence
  Description of Artificial Sequence: Synthetic oligonucleotide
  Antisense Strand to SEQ ID NO: 428307
caucauaagcaccucauaa

SEQ ID NO: 428309 - RNA, 19 nt, Artificial Sequence
  Description of Artificial Sequence: Synthetic oligonucleotide
  Sense strand starting at position 1037 of SEQ ID NO: 316633
gacauaguugcacagguuu

SEQ ID NO: 428310 - RNA, 19 nt, Artificial Sequence
  Description of Artificial Sequence: Synthetic oligonucleotide
  Antisense Strand to SEQ ID NO: 428309
aaaccugugcaacuauguc

SEQ ID NO: 428311 - RNA, 19 nt, Artificial Sequence
  Description of Artificial Sequence: Synthetic oligonucleotide
  Sense strand starting at position 1278 of SEQ ID NO: 316633
uguggaaauucccugaauu

SEQ ID NO: 428312 - RNA, 19 nt, Artificial Sequence
  Description of Artificial Sequence: Synthetic oligonucleotide
  Antisense Strand to SEQ ID NO: 428311
aauucagggaauuuccaca

SEQ ID NO: 428313 - RNA, 19 nt, Artificial Sequence
  Description of Artificial Sequence: Synthetic oligonucleotide
  Sense strand starting at position 1279 of SEQ ID NO: 316633
guggaaauucccugaauug

SEQ ID NO: 428314 - RNA, 19 nt, Artificial Sequence
  Description of Artificial Sequence: Synthetic oligonucleotide
  Antisense Strand to SEQ ID NO: 428313
caauucagggaauuuccac

SEQ ID NO: 428315 - RNA, 19 nt, Artificial Sequence
  Description of Artificial Sequence: Synthetic oligonucleotide
  Sense strand starting at position 1367 of SEQ ID NO: 316633
cugugaaaucaaugaguau

SEQ ID NO: 428316 - RNA, 19 nt, Artificial Sequence
  Description of Artificial Sequence: Synthetic oligonucleotide
  Antisense Strand to SEQ ID NO: 428315
auacucauugauuucacag

SEQ ID NO: 428317 - RNA, 19 nt, Artificial Sequence
  Description of Artificial Sequence: Synthetic oligonucleotide
  Sense strand starting at position 1422 of SEQ ID NO: 316633
ucagucuucugagucaaau

SEQ ID NO: 428318 - RNA, 19 nt, Artificial Sequence
  Description of Artificial Sequence: Synthetic oligonucleotide
  Antisense Strand to SEQ ID NO: 428317
auuugacucagaagacuga

SEQ ID NO: 428319 - RNA, 19 nt, Artificial Sequence
  Description of Artificial Sequence: Synthetic oligonucleotide
  Sense strand starting at position 1674 of SEQ ID NO: 316633
uguuaaagguacuuaagaa

SEQ ID NO: 428320 - RNA, 19 nt, Artificial Sequence
  Description of Artificial Sequence: Synthetic oligonucleotide
  Antisense Strand to SEQ ID NO: 428319
uucuuaaguaccuuuaaca

SEQ ID NO: 428321 - RNA, 19 nt, Artificial Sequence
  Description of Artificial Sequence: Synthetic oligonucleotide
  Sense strand starting at position 1681 of SEQ ID NO: 316633
gguacuuaagaauagcuua

SEQ ID NO: 428322 - RNA, 19 nt, Artificial Sequence
  Description of Artificial Sequence: Synthetic oligonucleotide
  Antisense Strand to SEQ ID NO: 428321
uaagcuauucuuaaguacc

SEQ ID NO: 428323 - RNA, 19 nt, Artificial Sequence
  Description of Artificial Sequence: Synthetic oligonucleotide
  Sense strand starting at position 1695 of SEQ ID NO: 316633
gcuuauuuccacugcaguu

SEQ ID NO: 428324 - RNA, 19 nt, Artificial Sequence
  Description of Artificial Sequence: Synthetic oligonucleotide
  Antisense Strand to SEQ ID NO: 428323
aacugcaguggaaauaagc

SEQ ID NO: 428325 - RNA, 19 nt, Artificial Sequence
  Description of Artificial Sequence: Synthetic oligonucleotide
  Sense strand starting at position 1728 of SEQ ID NO: 316633
uauugagguguauauugca

SEQ ID NO: 428326 - RNA, 19 nt, Artificial Sequence
  Description of Artificial Sequence: Synthetic oligonucleotide
  Antisense Strand to SEQ ID NO: 428325
ugcaauauacaccucaaua

SEQ ID NO: 428327 - RNA, 19 nt, Artificial Sequence
  Description of Artificial Sequence: Synthetic oligonucleotide
  Sense strand starting at position 1735 of SEQ ID NO: 316633
guguauauugcauaucaua

SEQ ID NO: 428328 - RNA, 19 nt, Artificial Sequence
  Description of Artificial Sequence: Synthetic oligonucleotide
  Antisense Strand to SEQ ID NO: 428327
uaugauaugcaauauacac

SEQ ID NO: 428329 - RNA, 19 nt, Artificial Sequence
  Description of Artificial Sequence: Synthetic oligonucleotide
  Sense strand starting at position 1954 of SEQ ID NO: 316633
gugcauaaagcagauauau

SEQ ID NO: 428330 - RNA, 19 nt, Artificial Sequence
  Description of Artificial Sequence: Synthetic oligonucleotide
  Antisense Strand to SEQ ID NO: 428329
auauaucugcuuuaugcac

SEQ ID NO: 428331 - RNA, 19 nt, Artificial Sequence
  Description of Artificial Sequence: Synthetic oligonucleotide
  Sense strand starting at position 2052 of SEQ ID NO: 316633
acuggauuauucccagacu

SEQ ID NO: 428332 - RNA, 19 nt, Artificial Sequence
  Description of Artificial Sequence: Synthetic oligonucleotide
  Antisense Strand to SEQ ID NO: 428331
agucugggaauaauccagu

SEQ ID NO: 428333 - RNA, 19 nt, Artificial Sequence
  Description of Artificial Sequence: Synthetic oligonucleotide
  Sense strand starting at position 2055 of SEQ ID NO: 316633
ggauuauucccagacuguc

SEQ ID NO: 428334 - RNA, 19 nt, Artificial Sequence
  Description of Artificial Sequence: Synthetic oligonucleotide
  Antisense Strand to SEQ ID NO: 428333
gacagucugggaauaaucc

SEQ ID NO: 428335 - RNA, 19 nt, Artificial Sequence
  Description of Artificial Sequence: Synthetic oligonucleotide
  Sense strand starting at position 2260 of SEQ ID NO: 316633
ggucguucugccuuguauu

SEQ ID NO: 428336 - RNA, 19 nt, Artificial Sequence
  Description of Artificial Sequence: Synthetic oligonucleotide
  Antisense Strand to SEQ ID NO: 428335
aauacaaggcagaacgacc

SEQ ID NO: 428337 - RNA, 19 nt, Artificial Sequence
  Description of Artificial Sequence: Synthetic oligonucleotide
  Sense strand starting at position 2385 of SEQ ID NO: 316633
uugucuuuacagcagagaa

SEQ ID NO: 428338 - RNA, 19 nt, Artificial Sequence
  Description of Artificial Sequence: Synthetic oligonucleotide
  Antisense Strand to SEQ ID NO: 428337
uucucugcuguaaagacaa

SEQ ID NO: 428339 - RNA, 19 nt, Artificial Sequence
  Description of Artificial Sequence: Synthetic oligonucleotide
  Sense strand starting at position 2387 of SEQ ID NO: 316633
gucuuuacagcagagaauc

SEQ ID NO: 428340 - RNA, 19 nt, Artificial Sequence
  Description of Artificial Sequence: Synthetic oligonucleotide
  Antisense Strand to SEQ ID NO: 428339
gauucucugcuguaaagac

SEQ ID NO: 428341 - RNA, 19 nt, Artificial Sequence
  Description of Artificial Sequence: Synthetic oligonucleotide
  Sense strand starting at position 2521 of SEQ ID NO: 316633
uggaguagcagugaugaau

SEQ ID NO: 428342 - RNA, 19 nt, Artificial Sequence
  Description of Artificial Sequence: Synthetic oligonucleotide
  Antisense Strand to SEQ ID NO: 428341
auucaucacugcuacucca

SEQ ID NO: 428343 - RNA, 19 nt, Artificial Sequence
  Description of Artificial Sequence: Synthetic oligonucleotide
  Sense strand starting at position 2719 of SEQ ID NO: 316633
aaaggacuguuugugaaua

SEQ ID NO: 428344 - RNA, 19 nt, Artificial Sequence
  Description of Artificial Sequence: Synthetic oligonucleotide
  Antisense Strand to SEQ ID NO: 428343
uauucacaaacaguccuuu

SEQ ID NO: 428345 - RNA, 19 nt, Artificial Sequence
  Description of Artificial Sequence: Synthetic oligonucleotide
  Sense strand starting at position 2757 of SEQ ID NO: 316633
agcacucaucauggaguuu

SEQ ID NO: 428346 - RNA, 19 nt, Artificial Sequence
  Description of Artificial Sequence: Synthetic oligonucleotide
  Antisense Strand to SEQ ID NO: 428345
aaacuccaugaugagugcu

SEQ ID NO: 428347 - RNA, 19 nt, Artificial Sequence
  Description of Artificial Sequence: Synthetic oligonucleotide
  Sense strand starting at position 2888 of SEQ ID NO: 316633
ugggaagugcccuaucaca

SEQ ID NO: 428348 - RNA, 19 nt, Artificial Sequence
  Description of Artificial Sequence: Synthetic oligonucleotide
  Antisense Strand to SEQ ID NO: 428347
ugugauagggcacuuccca

SEQ ID NO: 428349 - RNA, 19 nt, Artificial Sequence
  Description of Artificial Sequence: Synthetic oligonucleotide
  Sense strand starting at position 2912 of SEQ ID NO: 316633
caguuaaugcuuugggaac

SEQ ID NO: 428350 - RNA, 19 nt, Artificial Sequence
  Description of Artificial Sequence: Synthetic oligonucleotide
  Antisense Strand to SEQ ID NO: 428349
guucccaaagcauuaacug

SEQ ID NO: 428351 - RNA, 19 nt, Artificial Sequence
  Description of Artificial Sequence: Synthetic oligonucleotide
  Sense strand starting at position 3084 of SEQ ID NO: 316633
uggcuuuccaagcauagga

SEQ ID NO: 428352 - RNA, 19 nt, Artificial Sequence
  Description of Artificial Sequence: Synthetic oligonucleotide
  Antisense Strand to SEQ ID NO: 428351
uccuaugcuuggaaagcca

SEQ ID NO: 428353 - RNA, 19 nt, Artificial Sequence
  Description of Artificial Sequence: Synthetic oligonucleotide
  Sense strand starting at position 3164 of SEQ ID NO: 316633
uuagauauagucugucaau

SEQ ID NO: 428354 - RNA, 19 nt, Artificial Sequence
  Description of Artificial Sequence: Synthetic oligonucleotide
  Antisense Strand to SEQ ID NO: 428353
auugacagacuauaucuaa

SEQ ID NO: 428355 - RNA, 19 nt, Artificial Sequence
  Description of Artificial Sequence: Synthetic oligonucleotide
  Sense strand starting at position 3170 of SEQ ID NO: 316633
auagucugucaauaugaac

SEQ ID NO: 428356 - RNA, 19 nt, Artificial Sequence
  Description of Artificial Sequence: Synthetic oligonucleotide
  Antisense Strand to SEQ ID NO: 428355
guucauauugacagacuau

SEQ ID NO: 428357 - RNA, 19 nt, Artificial Sequence
  Description of Artificial Sequence: Synthetic oligonucleotide
  Sense strand starting at position 3176 of SEQ ID NO: 316633
ugucaauaugaacauguua

SEQ ID NO: 428358 - RNA, 19 nt, Artificial Sequence
  Description of Artificial Sequence: Synthetic oligonucleotide
  Antisense Strand to SEQ ID NO: 428357
uaacauguucauauugaca

SEQ ID NO: 428359 - RNA, 19 nt, Artificial Sequence
  Description of Artificial Sequence: Synthetic oligonucleotide
  Sense strand starting at position 3183 of SEQ ID NO: 316633
augaacauguuagcauaga

SEQ ID NO: 428360 - RNA, 19 nt, Artificial Sequence
  Description of Artificial Sequence: Synthetic oligonucleotide
  Antisense Strand to SEQ ID NO: 428359
ucuaugcuaacauguucau

SEQ ID NO: 428361 - RNA, 19 nt, Artificial Sequence
  Description of Artificial Sequence: Synthetic oligonucleotide
  Sense strand starting at position 3250 of SEQ ID NO: 316633
uuauguaggcacugagacu

SEQ ID NO: 428362 - RNA, 19 nt, Artificial Sequence
  Description of Artificial Sequence: Synthetic oligonucleotide
  Antisense Strand to SEQ ID NO: 428361
agucucagugccuacauaa

SEQ ID NO: 428363 - RNA, 19 nt, Artificial Sequence
  Description of Artificial Sequence: Synthetic oligonucleotide
  Sense strand starting at position 3334 of SEQ ID NO: 316633
cuaguuuggaaagguauga

SEQ ID NO: 428364 - RNA, 19 nt, Artificial Sequence
  Description of Artificial Sequence: Synthetic oligonucleotide
  Antisense Strand to SEQ ID NO: 428363
ucauaccuuuccaaacuag

SEQ ID NO: 428365 - RNA, 19 nt, Artificial Sequence
  Description of Artificial Sequence: Synthetic oligonucleotide
  Sense strand starting at position 3591 of SEQ ID NO: 316633
auauguuaacgccaucuca

SEQ ID NO: 428366 - RNA, 19 nt, Artificial Sequence
  Description of Artificial Sequence: Synthetic oligonucleotide
  Antisense Strand to SEQ ID NO: 428365
ugagauggcguuaacauau

SEQ ID NO: 428367 - RNA, 19 nt, Artificial Sequence
  Description of Artificial Sequence: Synthetic oligonucleotide
  Sense strand starting at position 3703 of SEQ ID NO: 316633
agagaucagucuccuaagu

SEQ ID NO: 428368 - RNA, 19 nt, Artificial Sequence
  Description of Artificial Sequence: Synthetic oligonucleotide
  Antisense Strand to SEQ ID NO: 428367
acuuaggagacugaucucu

SEQ ID NO: 428369 - RNA, 19 nt, Artificial Sequence
  Description of Artificial Sequence: Synthetic oligonucleotide
  Sense strand starting at position 3794 of SEQ ID NO: 316633
uacaauagguguuuaauga

SEQ ID NO: 428370 - RNA, 19 nt, Artificial Sequence
  Description of Artificial Sequence: Synthetic oligonucleotide
  Antisense Strand to SEQ ID NO: 428369
ucauuaaacaccuauugua

SEQ ID NO: 428371 - RNA, 19 nt, Artificial Sequence
  Description of Artificial Sequence: Synthetic oligonucleotide
  Sense strand starting at position 3826 of SEQ ID NO: 316633
ucuugugcuccuuuauguu

SEQ ID NO: 428372 - RNA, 19 nt, Artificial Sequence
  Description of Artificial Sequence: Synthetic oligonucleotide
  Antisense Strand to SEQ ID NO: 428371
aacauaaaggagcacaaga

SEQ ID NO: 428373 - RNA, 19 nt, Artificial Sequence
  Description of Artificial Sequence: Synthetic oligonucleotide
  Sense strand starting at position 3980 of SEQ ID NO: 316633
uggugagugccaggagaaa

SEQ ID NO: 428374 - RNA, 19 nt, Artificial Sequence
  Description of Artificial Sequence: Synthetic oligonucleotide
  Antisense Strand to SEQ ID NO: 428373
uuucuccuggcacucacca

SEQ ID NO: 428375 - RNA, 19 nt, Artificial Sequence
  Description of Artificial Sequence: Synthetic oligonucleotide
  Sense strand starting at position 143 of SEQ ID NO: 316634
cgugguaguaaauaucaaa

SEQ ID NO: 428376 - RNA, 19 nt, Artificial Sequence
  Description of Artificial Sequence: Synthetic oligonucleotide
  Antisense Strand to SEQ ID NO: 428375
uuugauauuuacuaccacg

SEQ ID NO: 428377 - RNA, 19 nt, Artificial Sequence
  Description of Artificial Sequence: Synthetic oligonucleotide
  Sense strand starting at position 286 of SEQ ID NO: 316634
acauuaguauugucacaau

SEQ ID NO: 428378 - RNA, 19 nt, Artificial Sequence
  Description of Artificial Sequence: Synthetic oligonucleotide
  Antisense Strand to SEQ ID NO: 428377
auugugacaauacuaaugu

SEQ ID NO: 428379 - RNA, 19 nt, Artificial Sequence
  Description of Artificial Sequence: Synthetic oligonucleotide
  Sense strand starting at position 472 of SEQ ID NO: 316634
uuaagucgaguuuaguaaa

SEQ ID NO: 428380 - RNA, 19 nt, Artificial Sequence
  Description of Artificial Sequence: Synthetic oligonucleotide
  Antisense Strand to SEQ ID NO: 428379
uuuacuaaacucgacuuaa

SEQ ID NO: 428381 - RNA, 19 nt, Artificial Sequence
  Description of Artificial Sequence: Synthetic oligonucleotide
  Sense strand starting at position 524 of SEQ ID NO: 316634
uucuaugaggaauguaaau

SEQ ID NO: 428382 - RNA, 19 nt, Artificial Sequence
  Description of Artificial Sequence: Synthetic oligonucleotide
  Antisense Strand to SEQ ID NO: 428381
auuuacauuccucauagaa

SEQ ID NO: 428383 - RNA, 19 nt, Artificial Sequence
  Description of Artificial Sequence: Synthetic oligonucleotide
  Sense strand starting at position 568 of SEQ ID NO: 316634
aguaaagugaaguggugua

SEQ ID NO: 428384 - RNA, 19 nt, Artificial Sequence
  Description of Artificial Sequence: Synthetic oligonucleotide
  Antisense Strand to SEQ ID NO: 428383
uacaccacuucacuuuacu

SEQ ID NO: 428385 - RNA, 19 nt, Artificial Sequence
  Description of Artificial Sequence: Synthetic oligonucleotide
  Sense strand starting at position 573 of SEQ ID NO: 316634
agugaagugguguaagaac

SEQ ID NO: 428386 - RNA, 19 nt, Artificial Sequence
  Description of Artificial Sequence: Synthetic oligonucleotide
  Antisense Strand to SEQ ID NO: 428385
guucuuacaccacuucacu

SEQ ID NO: 428387 - RNA, 19 nt, Artificial Sequence
  Description of Artificial Sequence: Synthetic oligonucleotide
  Sense strand starting at position 582 of SEQ ID NO: 316634
guguaagaacaguaccaau

SEQ ID NO: 428388 - RNA, 19 nt, Artificial Sequence
  Description of Artificial Sequence: Synthetic oligonucleotide
  Antisense Strand to SEQ ID NO: 428387
auugguacuguucuuacac

SEQ ID NO: 428389 - RNA, 19 nt, Artificial Sequence
  Description of Artificial Sequence: Synthetic oligonucleotide
  Sense strand starting at position 958 of SEQ ID NO: 316634
gggagauacuguuccauaa

SEQ ID NO: 428390 - RNA, 19 nt, Artificial Sequence
  Description of Artificial Sequence: Synthetic oligonucleotide
  Antisense Strand to SEQ ID NO: 428389
uuauggaacaguaucuccc

SEQ ID NO: 428391 - RNA, 19 nt, Artificial Sequence
  Description of Artificial Sequence: Synthetic oligonucleotide
  Sense strand starting at position 971 of SEQ ID NO: 316634
ccauaagauuucuguggaa

SEQ ID NO: 428392 - RNA, 19 nt, Artificial Sequence
  Description of Artificial Sequence: Synthetic oligonucleotide
  Antisense Strand to SEQ ID NO: 428391
uuccacagaaaucuuaugg

SEQ ID NO: 428393 - RNA, 19 nt, Artificial Sequence
  Description of Artificial Sequence: Synthetic oligonucleotide
  Sense strand starting at position 974 of SEQ ID NO: 316634
uaagauuucuguggaaauu

SEQ ID NO: 428394 - RNA, 19 nt, Artificial Sequence
  Description of Artificial Sequence: Synthetic oligonucleotide
  Antisense Strand to SEQ ID NO: 428393
aauuuccacagaaaucuua

SEQ ID NO: 428395 - RNA, 19 nt, Artificial Sequence
  Description of Artificial Sequence: Synthetic oligonucleotide
  Sense strand starting at position 983 of SEQ ID NO: 316634
uguggaaauugccugaauu

SEQ ID NO: 428396 - RNA, 19 nt, Artificial Sequence
  Description of Artificial Sequence: Synthetic oligonucleotide
  Antisense Strand to SEQ ID NO: 428395
aauucaggcaauuuccaca

SEQ ID NO: 428397 - RNA, 19 nt, Artificial Sequence
  Description of Artificial Sequence: Synthetic oligonucleotide
  Sense strand starting at position 984 of SEQ ID NO: 316634
guggaaauugccugaauug

SEQ ID NO: 428398 - RNA, 19 nt, Artificial Sequence
  Description of Artificial Sequence: Synthetic oligonucleotide
  Antisense Strand to SEQ ID NO: 428397
caauucaggcaauuuccac

SEQ ID NO: 428399 - RNA, 19 nt, Artificial Sequence
  Description of Artificial Sequence: Synthetic oligonucleotide
  Sense strand starting at position 1062 of SEQ ID NO: 316634
auucuaaugcugugagauc

SEQ ID NO: 428400 - RNA, 19 nt, Artificial Sequence
  Description of Artificial Sequence: Synthetic oligonucleotide
  Antisense Strand to SEQ ID NO: 428399
gaucucacagcauuagaau

SEQ ID NO: 428401 - RNA, 19 nt, Artificial Sequence
  Description of Artificial Sequence: Synthetic oligonucleotide
  Sense strand starting at position 1071 of SEQ ID NO: 316634
cugugagaucaaugaguau

SEQ ID NO: 428402 - RNA, 19 nt, Artificial Sequence
  Description of Artificial Sequence: Synthetic oligonucleotide
  Antisense Strand to SEQ ID NO: 428401
auacucauugaucucacag

SEQ ID NO: 428403 - RNA, 19 nt, Artificial Sequence
  Description of Artificial Sequence: Synthetic oligonucleotide
  Sense strand starting at position 1229 of SEQ ID NO: 316634
auauaaagauagcuucuga

SEQ ID NO: 428404 - RNA, 19 nt, Artificial Sequence
  Description of Artificial Sequence: Synthetic oligonucleotide
  Antisense Strand to SEQ ID NO: 428403
ucagaagcuaucuuuauau

SEQ ID NO: 428405 - RNA, 19 nt, Artificial Sequence
  Description of Artificial Sequence: Synthetic oligonucleotide
  Sense strand starting at position 1270 of SEQ ID NO: 316634
guuuacaaaucagucauga

SEQ ID NO: 428406 - RNA, 19 nt, Artificial Sequence
  Description of Artificial Sequence: Synthetic oligonucleotide
  Antisense Strand to SEQ ID NO: 428405
ucaugacugauuuguaaac

SEQ ID NO: 428407 - RNA, 19 nt, Artificial Sequence
  Description of Artificial Sequence: Synthetic oligonucleotide
  Sense strand starting at position 1707 of SEQ ID NO: 316634
agguauguugcacagguau

SEQ ID NO: 428408 - RNA, 19 nt, Artificial Sequence
  Description of Artificial Sequence: Synthetic oligonucleotide
  Antisense Strand to SEQ ID NO: 428407
auaccugugcaacauaccu

SEQ ID NO: 428409 - RNA, 19 nt, Artificial Sequence
  Description of Artificial Sequence: Synthetic oligonucleotide
  Sense strand starting at position 1709 of SEQ ID NO: 316634
guauguugcacagguauuu

SEQ ID NO: 428410 - RNA, 19 nt, Artificial Sequence
  Description of Artificial Sequence: Synthetic oligonucleotide
  Antisense Strand to SEQ ID NO: 428409
aaauaccugugcaacauac

SEQ ID NO: 428411 - RNA, 19 nt, Artificial Sequence
  Description of Artificial Sequence: Synthetic oligonucleotide
  Sense strand starting at position 1762 of SEQ ID NO: 316634
acacacgugaucuagguuu

SEQ ID NO: 428412 - RNA, 19 nt, Artificial Sequence
  Description of Artificial Sequence: Synthetic oligonucleotide
  Antisense Strand to SEQ ID NO: 428411
aaaccuagaucacgugugu

SEQ ID NO: 428413 - RNA, 19 nt, Artificial Sequence
  Description of Artificial Sequence: Synthetic oligonucleotide
  Sense strand starting at position 1886 of SEQ ID NO: 316634
cuaucauucgguuaaauau

SEQ ID NO: 428414 - RNA, 19 nt, Artificial Sequence
  Description of Artificial Sequence: Synthetic oligonucleotide
  Antisense Strand to SEQ ID NO: 428413
auauuuaaccgaaugauag

SEQ ID NO: 428415 - RNA, 19 nt, Artificial Sequence
  Description of Artificial Sequence: Synthetic oligonucleotide
  Sense strand starting at position 2140 of SEQ ID NO: 316634
agaggaguguguuugauac

SEQ ID NO: 428416 - RNA, 19 nt, Artificial Sequence
  Description of Artificial Sequence: Synthetic oligonucleotide
  Antisense Strand to SEQ ID NO: 428415
guaucaaacacacuccucu

SEQ ID NO: 428417 - RNA, 19 nt, Artificial Sequence
  Description of Artificial Sequence: Synthetic oligonucleotide
  Sense strand starting at position 2252 of SEQ ID NO: 316634
aucagcauugauugagcau

SEQ ID NO: 428418 - RNA, 19 nt, Artificial Sequence
  Description of Artificial Sequence: Synthetic oligonucleotide
  Antisense Strand to SEQ ID NO: 428417
augcucaaucaaugcugau

SEQ ID NO: 428419 - RNA, 19 nt, Artificial Sequence
  Description of Artificial Sequence: Synthetic oligonucleotide
  Sense strand starting at position 2329 of SEQ ID NO: 316634
acucuuaccucugcugaga

SEQ ID NO: 428420 - RNA, 19 nt, Artificial Sequence
  Description of Artificial Sequence: Synthetic oligonucleotide
  Antisense Strand to SEQ ID NO: 428419
ucucagcagagguaagagu

SEQ ID NO: 428421 - RNA, 19 nt, Artificial Sequence
  Description of Artificial Sequence: Synthetic oligonucleotide
  Sense strand starting at position 2355 of SEQ ID NO: 316634
uagggaagcgguuaugaca

SEQ ID NO: 428422 - RNA, 19 nt, Artificial Sequence
  Description of Artificial Sequence: Synthetic oligonucleotide
  Antisense Strand to SEQ ID NO: 428421
ugucauaaccgcuucccua

SEQ ID NO: 428423 - RNA, 19 nt, Artificial Sequence
  Description of Artificial Sequence: Synthetic oligonucleotide
  Sense strand starting at position 2402 of SEQ ID NO: 316634
uuagcagcucuguauacuu

SEQ ID NO: 428424 - RNA, 19 nt, Artificial Sequence
  Description of Artificial Sequence: Synthetic oligonucleotide
  Antisense Strand to SEQ ID NO: 428423
aaguauacagagcugcuaa

SEQ ID NO: 428425 - RNA, 19 nt, Artificial Sequence
  Description of Artificial Sequence: Synthetic oligonucleotide
  Sense strand starting at position 2409 of SEQ ID NO: 316634
cucuguauacuuggacuua

SEQ ID NO: 428426 - RNA, 19 nt, Artificial Sequence
  Description of Artificial Sequence: Synthetic oligonucleotide
  Antisense Strand to SEQ ID NO: 428425
uaaguccaaguauacagag

SEQ ID NO: 428427 - RNA, 19 nt, Artificial Sequence
  Description of Artificial Sequence: Synthetic oligonucleotide
  Sense strand starting at position 2421 of SEQ ID NO: 316634
ggacuuauuaguugacugu

SEQ ID NO: 428428 - RNA, 19 nt, Artificial Sequence
  Description of Artificial Sequence: Synthetic oligonucleotide
  Antisense Strand to SEQ ID NO: 428427
acagucaacuaauaagucc

SEQ ID NO: 428429 - RNA, 19 nt, Artificial Sequence
  Description of Artificial Sequence: Synthetic oligonucleotide
  Sense strand starting at position 2422 of SEQ ID NO: 316634
gacuuauuaguugacuguu

SEQ ID NO: 428430 - RNA, 19 nt, Artificial Sequence
  Description of Artificial Sequence: Synthetic oligonucleotide
  Antisense Strand to SEQ ID NO: 428429
aacagucaacuaauaaguc

SEQ ID NO: 428431 - RNA, 19 nt, Artificial Sequence
  Description of Artificial Sequence: Synthetic oligonucleotide
  Sense strand starting at position 2436 of SEQ ID NO: 316634
cuguucuuugccuuaguuu

SEQ ID NO: 428432 - RNA, 19 nt, Artificial Sequence
  Description of Artificial Sequence: Synthetic oligonucleotide
  Antisense Strand to SEQ ID NO: 428431
aaacuaaggcaaagaacag

SEQ ID NO: 428433 - RNA, 19 nt, Artificial Sequence
  Description of Artificial Sequence: Synthetic oligonucleotide
  Sense strand starting at position 2457 of SEQ ID NO: 316634
ucgucuuuaaggugagaau

SEQ ID NO: 428434 - RNA, 19 nt, Artificial Sequence
  Description of Artificial Sequence: Synthetic oligonucleotide
  Antisense Strand to SEQ ID NO: 428433
auucucaccuuaaagacga

SEQ ID NO: 428435 - RNA, 19 nt, Artificial Sequence
  Description of Artificial Sequence: Synthetic oligonucleotide
  Sense strand starting at position 2458 of SEQ ID NO: 316634
cgucuuuaaggugagaaug

SEQ ID NO: 428436 - RNA, 19 nt, Artificial Sequence
  Description of Artificial Sequence: Synthetic oligonucleotide
  Antisense Strand to SEQ ID NO: 428435
cauucucaccuuaaagacg

SEQ ID NO: 428437 - RNA, 19 nt, Artificial Sequence
  Description of Artificial Sequence: Synthetic oligonucleotide
  Sense strand starting at position 2478 of SEQ ID NO: 316634
auaguauuguguccagaag

SEQ ID NO: 428438 - RNA, 19 nt, Artificial Sequence
  Description of Artificial Sequence: Synthetic oligonucleotide
  Antisense Strand to SEQ ID NO: 428437
cuucuggacacaauacuau

SEQ ID NO: 428439 - RNA, 19 nt, Artificial Sequence
  Description of Artificial Sequence: Synthetic oligonucleotide
  Sense strand starting at position 2532 of SEQ ID NO: 316634
aggugacauguccagaguu

SEQ ID NO: 428440 - RNA, 19 nt, Artificial Sequence
  Description of Artificial Sequence: Synthetic oligonucleotide
  Antisense Strand to SEQ ID NO: 428439
aacucuggacaugucaccu

SEQ ID NO: 428441 - RNA, 19 nt, Artificial Sequence
  Description of Artificial Sequence: Synthetic oligonucleotide
  Sense strand starting at position 2534 of SEQ ID NO: 316634
gugacauguccagaguugu

SEQ ID NO: 428442 - RNA, 19 nt, Artificial Sequence
  Description of Artificial Sequence: Synthetic oligonucleotide
  Antisense Strand to SEQ ID NO: 428441
acaacucuggacaugucac

SEQ ID NO: 428443 - RNA, 19 nt, Artificial Sequence
  Description of Artificial Sequence: Synthetic oligonucleotide
  Sense strand starting at position 3719 of SEQ ID NO: 316634
auguuuccuccagggugau

SEQ ID NO: 428444 - RNA, 19 nt, Artificial Sequence
  Description of Artificial Sequence: Synthetic oligonucleotide
  Antisense Strand to SEQ ID NO: 428443
aucacccuggaggaaacau

SEQ ID NO: 428445 - RNA, 19 nt, Artificial Sequence
  Description of Artificial Sequence: Synthetic oligonucleotide
  Sense strand starting at position 3722 of SEQ ID NO: 316634
uuuccuccagggugauuaa

SEQ ID NO: 428446 - RNA, 19 nt, Artificial Sequence
  Description of Artificial Sequence: Synthetic oligonucleotide
  Antisense Strand to SEQ ID NO: 428445
uuaaucacccuggaggaaa

SEQ ID NO: 428447 - RNA, 19 nt, Artificial Sequence
  Description of Artificial Sequence: Synthetic oligonucleotide
  Sense strand starting at position 3755 of SEQ ID NO: 316634
auggguauucaguagguaa

SEQ ID NO: 428448 - RNA, 19 nt, Artificial Sequence
  Description of Artificial Sequence: Synthetic oligonucleotide
  Antisense Strand to SEQ ID NO: 428447
uuaccuacugaauacccau

SEQ ID NO: 428449 - RNA, 19 nt, Artificial Sequence
  Description of Artificial Sequence: Synthetic oligonucleotide
  Sense strand starting at position 3757 of SEQ ID NO: 316634
ggguauucaguagguaaua

SEQ ID NO: 428450 - RNA, 19 nt, Artificial Sequence
  Description of Artificial Sequence: Synthetic oligonucleotide
  Antisense Strand to SEQ ID NO: 428449
uauuaccuacugaauaccc

SEQ ID NO: 428451 - RNA, 19 nt, Artificial Sequence
  Description of Artificial Sequence: Synthetic oligonucleotide
  Sense strand starting at position 3813 of SEQ ID NO: 316634
uaauaauuggucuguucga

SEQ ID NO: 428452 - RNA, 19 nt, Artificial Sequence
  Description of Artificial Sequence: Synthetic oligonucleotide
  Antisense Strand to SEQ ID NO: 428451
ucgaacagaccaauuauua

SEQ ID NO: 428453 - RNA, 19 nt, Artificial Sequence
  Description of Artificial Sequence: Synthetic oligonucleotide
  Sense strand starting at position 3814 of SEQ ID NO: 316634
aauaauuggucuguucgaa

SEQ ID NO: 428454 - RNA, 19 nt, Artificial Sequence
  Description of Artificial Sequence: Synthetic oligonucleotide
  Antisense Strand to SEQ ID NO: 428453
uucgaacagaccaauuauu

SEQ ID NO: 428455 - RNA, 19 nt, Artificial Sequence
  Description of Artificial Sequence: Synthetic oligonucleotide
  Sense strand starting at position 115 of SEQ ID NO: 316635
agugaauuccuuugucuga

SEQ ID NO: 428456 - RNA, 19 nt, Artificial Sequence
  Description of Artificial Sequence: Synthetic oligonucleotide
  Antisense Strand to SEQ ID NO: 428455
ucagacaaaggaauucacu

SEQ ID NO: 428457 - RNA, 19 nt, Artificial Sequence
  Description of Artificial Sequence: Synthetic oligonucleotide
  Sense strand starting at position 117 of SEQ ID NO: 316635
ugaauuccuuugucugauu

SEQ ID NO: 428458 - RNA, 19 nt, Artificial Sequence
  Description of Artificial Sequence: Synthetic oligonucleotide
  Antisense Strand to SEQ ID NO: 428457
aaucagacaaaggaauuca

SEQ ID NO: 428459 - RNA, 19 nt, Artificial Sequence
  Description of Artificial Sequence: Synthetic oligonucleotide
  Sense strand starting at position 138 of SEQ ID NO: 316635
uaggguaaaugauuaaugu

SEQ ID NO: 428460 - RNA, 19 nt, Artificial Sequence
  Description of Artificial Sequence: Synthetic oligonucleotide
  Antisense Strand to SEQ ID NO: 428459
acauuaaucauuuacccua

SEQ ID NO: 428461 - RNA, 19 nt, Artificial Sequence
  Description of Artificial Sequence: Synthetic oligonucleotide
  Sense strand starting at position 259 of SEQ ID NO: 316635
acagcuucccuguacuaga

SEQ ID NO: 428462 - RNA, 19 nt, Artificial Sequence
  Description of Artificial Sequence: Synthetic oligonucleotide
  Antisense Strand to SEQ ID NO: 428461
ucuaguacagggaagcugu

SEQ ID NO: 428463 - RNA, 19 nt, Artificial Sequence
  Description of Artificial Sequence: Synthetic oligonucleotide
  Sense strand starting at position 459 of SEQ ID NO: 316635
gauggcugcuuugcauuua

SEQ ID NO: 428464 - RNA, 19 nt, Artificial Sequence
  Description of Artificial Sequence: Synthetic oligonucleotide
  Antisense Strand to SEQ ID NO: 428463
uaaaugcaaagcagccauc

SEQ ID NO: 428465 - RNA, 19 nt, Artificial Sequence
  Description of Artificial Sequence: Synthetic oligonucleotide
  Sense strand starting at position 747 of SEQ ID NO: 316635
uugauauaaugucucaagu

SEQ ID NO: 428466 - RNA, 19 nt, Artificial Sequence
  Description of Artificial Sequence: Synthetic oligonucleotide
  Antisense Strand to SEQ ID NO: 428465
acuugagacauuauaucaa

SEQ ID NO: 428467 - RNA, 19 nt, Artificial Sequence
  Description of Artificial Sequence: Synthetic oligonucleotide
  Sense strand starting at position 785 of SEQ ID NO: 316635
agaauagauuuauggaguu

SEQ ID NO: 428468 - RNA, 19 nt, Artificial Sequence
  Description of Artificial Sequence: Synthetic oligonucleotide
  Antisense Strand to SEQ ID NO: 428467
aacuccauaaaucuauucu

SEQ ID NO: 428469 - RNA, 19 nt, Artificial Sequence
  Description of Artificial Sequence: Synthetic oligonucleotide
  Sense strand starting at position 808 of SEQ ID NO: 316635
uaagguagauggccuauaa

SEQ ID NO: 428470 - RNA, 19 nt, Artificial Sequence
  Description of Artificial Sequence: Synthetic oligonucleotide
  Antisense Strand to SEQ ID NO: 428469
uuauaggccaucuaccuua

SEQ ID NO: 428471 - RNA, 19 nt, Artificial Sequence
  Description of Artificial Sequence: Synthetic oligonucleotide
  Sense strand starting at position 827 of SEQ ID NO: 316635
aaaucuauugagugaacug

SEQ ID NO: 428472 - RNA, 19 nt, Artificial Sequence
  Description of Artificial Sequence: Synthetic oligonucleotide
  Antisense Strand to SEQ ID NO: 428471
caguucacucaauagauuu

SEQ ID NO: 428473 - RNA, 19 nt, Artificial Sequence
  Description of Artificial Sequence: Synthetic oligonucleotide
  Sense strand starting at position 836 of SEQ ID NO: 316635
gagugaacuguuugaaauc

SEQ ID NO: 428474 - RNA, 19 nt, Artificial Sequence
  Description of Artificial Sequence: Synthetic oligonucleotide
  Antisense Strand to SEQ ID NO: 428473
gauuucaaacaguucacuc

SEQ ID NO: 428475 - RNA, 19 nt, Artificial Sequence
  Description of Artificial Sequence: Synthetic oligonucleotide
  Sense strand starting at position 860 of SEQ ID NO: 316635
ugaauuaccugagucagau

SEQ ID NO: 428476 - RNA, 19 nt, Artificial Sequence
  Description of Artificial Sequence: Synthetic oligonucleotide
  Antisense Strand to SEQ ID NO: 428475
aucugacucagguaauuca

SEQ ID NO: 428477 - RNA, 19 nt, Artificial Sequence
  Description of Artificial Sequence: Synthetic oligonucleotide
  Sense strand starting at position 872 of SEQ ID NO: 316635
gucagauaauugcuggaga

SEQ ID NO: 428478 - RNA, 19 nt, Artificial Sequence
  Description of Artificial Sequence: Synthetic oligonucleotide
  Antisense Strand to SEQ ID NO: 428477
ucuccagcaauuaucugac

SEQ ID NO: 428479 - RNA, 19 nt, Artificial Sequence
  Description of Artificial Sequence: Synthetic oligonucleotide
  Sense strand starting at position 874 of SEQ ID NO: 316635
cagauaauugcuggagaau

SEQ ID NO: 428480 - RNA, 19 nt, Artificial Sequence
  Description of Artificial Sequence: Synthetic oligonucleotide
  Antisense Strand to SEQ ID NO: 428479
auucuccagcaauuaucug

SEQ ID NO: 428481 - RNA, 19 nt, Artificial Sequence
  Description of Artificial Sequence: Synthetic oligonucleotide
  Sense strand starting at position 956 of SEQ ID NO: 316635
uugggaauuuguuagagau

SEQ ID NO: 428482 - RNA, 19 nt, Artificial Sequence
  Description of Artificial Sequence: Synthetic oligonucleotide
  Antisense Strand to SEQ ID NO: 428481
aucucuaacaaauucccaa

SEQ ID NO: 428483 - RNA, 19 nt, Artificial Sequence
  Description of Artificial Sequence: Synthetic oligonucleotide
  Sense strand starting at position 958 of SEQ ID NO: 316635
gggaauuuguuagagauga

SEQ ID NO: 428484 - RNA, 19 nt, Artificial Sequence
  Description of Artificial Sequence: Synthetic oligonucleotide
  Antisense Strand to SEQ ID NO: 428483
ucaucucuaacaaauuccc

SEQ ID NO: 428485 - RNA, 19 nt, Artificial Sequence
  Description of Artificial Sequence: Synthetic oligonucleotide
  Sense strand starting at position 1055 of SEQ ID NO: 316635
ugaggcuuacaucauuauu

SEQ ID NO: 428486 - RNA, 19 nt, Artificial Sequence
  Description of Artificial Sequence: Synthetic oligonucleotide
  Antisense Strand to SEQ ID NO: 428485
aauaaugauguaagccuca

SEQ ID NO: 428487 - RNA, 19 nt, Artificial Sequence
  Description of Artificial Sequence: Synthetic oligonucleotide
  Sense strand starting at position 1533 of SEQ ID NO: 316635
agauacauuguccauagua

SEQ ID NO: 428488 - RNA, 19 nt, Artificial Sequence
  Description of Artificial Sequence: Synthetic oligonucleotide
  Antisense Strand to SEQ ID NO: 428487
uacuauggacaauguaucu

SEQ ID NO: 428489 - RNA, 19 nt, Artificial Sequence
  Description of Artificial Sequence: Synthetic oligonucleotide
  Sense strand starting at position 1535 of SEQ ID NO: 316635
auacauuguccauaguauu

SEQ ID NO: 428490 - RNA, 19 nt, Artificial Sequence
  Description of Artificial Sequence: Synthetic oligonucleotide
  Antisense Strand to SEQ ID NO: 428489
aauacuauggacaauguau

SEQ ID NO: 428491 - RNA, 19 nt, Artificial Sequence
  Description of Artificial Sequence: Synthetic oligonucleotide
  Sense strand starting at position 1731 of SEQ ID NO: 316635
uuuggcaauccacaguuaa

SEQ ID NO: 428492 - RNA, 19 nt, Artificial Sequence
  Description of Artificial Sequence: Synthetic oligonucleotide
  Antisense Strand to SEQ ID NO: 428491
uuaacuguggauugccaaa

SEQ ID NO: 428493 - RNA, 19 nt, Artificial Sequence
  Description of Artificial Sequence: Synthetic oligonucleotide
  Sense strand starting at position 1793 of SEQ ID NO: 316635
uuugaucaacuguaaguca

SEQ ID NO: 428494 - RNA, 19 nt, Artificial Sequence
  Description of Artificial Sequence: Synthetic oligonucleotide
  Antisense Strand to SEQ ID NO: 428493
ugacuuacaguugaucaaa

SEQ ID NO: 428495 - RNA, 19 nt, Artificial Sequence
  Description of Artificial Sequence: Synthetic oligonucleotide
  Sense strand starting at position 1931 of SEQ ID NO: 316635
uugggaaacuguguuggaa

SEQ ID NO: 428496 - RNA, 19 nt, Artificial Sequence
  Description of Artificial Sequence: Synthetic oligonucleotide
  Antisense Strand to SEQ ID NO: 428495
uuccaacacaguuucccaa

SEQ ID NO: 428497 - RNA, 19 nt, Artificial Sequence
  Description of Artificial Sequence: Synthetic oligonucleotide
  Sense strand starting at position 1934 of SEQ ID NO: 316635
ggaaacuguguuggaaguu

SEQ ID NO: 428498 - RNA, 19 nt, Artificial Sequence
  Description of Artificial Sequence: Synthetic oligonucleotide
  Antisense Strand to SEQ ID NO: 428497
aacuuccaacacaguuucc

SEQ ID NO: 428499 - RNA, 19 nt, Artificial Sequence
  Description of Artificial Sequence: Synthetic oligonucleotide
  Sense strand starting at position 1946 of SEQ ID NO: 316635
ggaaguuucuuucugaguu

SEQ ID NO: 428500 - RNA, 19 nt, Artificial Sequence
  Description of Artificial Sequence: Synthetic oligonucleotide
  Antisense Strand to SEQ ID NO: 428499
aacucagaaagaaacuucc

SEQ ID NO: 428501 - RNA, 19 nt, Artificial Sequence
  Description of Artificial Sequence: Synthetic oligonucleotide
  Sense strand starting at position 1994 of SEQ ID NO: 316635
uuccguguccuauaaugag

SEQ ID NO: 428502 - RNA, 19 nt, Artificial Sequence
  Description of Artificial Sequence: Synthetic oligonucleotide
  Antisense Strand to SEQ ID NO: 428501
cucauuauaggacacggaa

SEQ ID NO: 428503 - RNA, 19 nt, Artificial Sequence
  Description of Artificial Sequence: Synthetic oligonucleotide
  Sense strand starting at position 2008 of SEQ ID NO: 316635
augagcugucuuugaauaa

SEQ ID NO: 428504 - RNA, 19 nt, Artificial Sequence
  Description of Artificial Sequence: Synthetic oligonucleotide
  Antisense Strand to SEQ ID NO: 428503
uuauucaaagacagcucau

SEQ ID NO: 428505 - RNA, 19 nt, Artificial Sequence
  Description of Artificial Sequence: Synthetic oligonucleotide
  Sense strand starting at position 2012 of SEQ ID NO: 316635
gcugucuuugaauaaauac

SEQ ID NO: 428506 - RNA, 19 nt, Artificial Sequence
  Description of Artificial Sequence: Synthetic oligonucleotide
  Antisense Strand to SEQ ID NO: 428505
guauuuauucaaagacagc

SEQ ID NO: 428507 - RNA, 19 nt, Artificial Sequence
  Description of Artificial Sequence: Synthetic oligonucleotide
  Sense strand starting at position 2152 of SEQ ID NO: 316635
cccagugagcuccaagauu

SEQ ID NO: 428508 - RNA, 19 nt, Artificial Sequence
  Description of Artificial Sequence: Synthetic oligonucleotide
  Antisense Strand to SEQ ID NO: 428507
aaucuuggagcucacuggg

SEQ ID NO: 428509 - RNA, 19 nt, Artificial Sequence
  Description of Artificial Sequence: Synthetic oligonucleotide
  Sense strand starting at position 2417 of SEQ ID NO: 316635
ggaaucauaguguauguau

SEQ ID NO: 428510 - RNA, 19 nt, Artificial Sequence
  Description of Artificial Sequence: Synthetic oligonucleotide
  Antisense Strand to SEQ ID NO: 428509
auacauacacuaugauucc

SEQ ID NO: 428511 - RNA, 19 nt, Artificial Sequence
  Description of Artificial Sequence: Synthetic oligonucleotide
  Sense strand starting at position 2456 of SEQ ID NO: 316635
cccucuacucuaugugaga

SEQ ID NO: 428512 - RNA, 19 nt, Artificial Sequence
  Description of Artificial Sequence: Synthetic oligonucleotide
  Antisense Strand to SEQ ID NO: 428511
ucucacauagaguagaggg

SEQ ID NO: 428513 - RNA, 19 nt, Artificial Sequence
  Description of Artificial Sequence: Synthetic oligonucleotide
  Sense strand starting at position 2457 of SEQ ID NO: 316635
ccucuacucuaugugagaa

SEQ ID NO: 428514 - RNA, 19 nt, Artificial Sequence
  Description of Artificial Sequence: Synthetic oligonucleotide
  Antisense Strand to SEQ ID NO: 428513
uucucacauagaguagagg

SEQ ID NO: 428515 - RNA, 19 nt, Artificial Sequence
  Description of Artificial Sequence: Synthetic oligonucleotide
  Sense strand starting at position 2518 of SEQ ID NO: 316635
agaauauuccaguguauga

SEQ ID NO: 428516 - RNA, 19 nt, Artificial Sequence
  Description of Artificial Sequence: Synthetic oligonucleotide
  Antisense Strand to SEQ ID NO: 428515
ucauacacuggaauauucu

SEQ ID NO: 428517 - RNA, 19 nt, Artificial Sequence
  Description of Artificial Sequence: Synthetic oligonucleotide
  Sense strand starting at position 2593 of SEQ ID NO: 316635
uaugaugaauuagugguua

SEQ ID NO: 428518 - RNA, 19 nt, Artificial Sequence
  Description of Artificial Sequence: Synthetic oligonucleotide
  Antisense Strand to SEQ ID NO: 428517
uaaccacuaauucaucaua

SEQ ID NO: 428519 - RNA, 19 nt, Artificial Sequence
  Description of Artificial Sequence: Synthetic oligonucleotide
  Sense strand starting at position 2595 of SEQ ID NO: 316635
ugaugaauuagugguuaca

SEQ ID NO: 428520 - RNA, 19 nt, Artificial Sequence
  Description of Artificial Sequence: Synthetic oligonucleotide
  Antisense Strand to SEQ ID NO: 428519
uguaaccacuaauucauca

SEQ ID NO: 428521 - RNA, 19 nt, Artificial Sequence
  Description of Artificial Sequence: Synthetic oligonucleotide
  Sense strand starting at position 2597 of SEQ ID NO: 316635
augaauuagugguuacaua

SEQ ID NO: 428522 - RNA, 19 nt, Artificial Sequence
  Description of Artificial Sequence: Synthetic oligonucleotide
  Antisense Strand to SEQ ID NO: 428521
uauguaaccacuaauucau

SEQ ID NO: 428523 - RNA, 19 nt, Artificial Sequence
  Description of Artificial Sequence: Synthetic oligonucleotide
  Sense strand starting at position 2598 of SEQ ID NO: 316635
ugaauuagugguuacauac

SEQ ID NO: 428524 - RNA, 19 nt, Artificial Sequence
  Description of Artificial Sequence: Synthetic oligonucleotide
  Antisense Strand to SEQ ID NO: 428523
guauguaaccacuaauuca

SEQ ID NO: 428525 - RNA, 19 nt, Artificial Sequence
  Description of Artificial Sequence: Synthetic oligonucleotide
  Sense strand starting at position 3024 of SEQ ID NO: 316635
ggccauuugugagaaaugg

SEQ ID NO: 428526 - RNA, 19 nt, Artificial Sequence
  Description of Artificial Sequence: Synthetic oligonucleotide
  Antisense Strand to SEQ ID NO: 428525
ccauuucucacaaauggcc

SEQ ID NO: 428527 - RNA, 19 nt, Artificial Sequence
  Description of Artificial Sequence: Synthetic oligonucleotide
  Sense strand starting at position 3075 of SEQ ID NO: 316635
uuugacuaggaguggaauu

SEQ ID NO: 428528 - RNA, 19 nt, Artificial Sequence
  Description of Artificial Sequence: Synthetic oligonucleotide
  Antisense Strand to SEQ ID NO: 428527
aauuccacuccuagucaaa

SEQ ID NO: 428529 - RNA, 19 nt, Artificial Sequence
  Description of Artificial Sequence: Synthetic oligonucleotide
  Sense strand starting at position 3240 of SEQ ID NO: 316635
guguaaagauaucuaauuc

SEQ ID NO: 428530 - RNA, 19 nt, Artificial Sequence
  Description of Artificial Sequence: Synthetic oligonucleotide
  Antisense Strand to SEQ ID NO: 428529
gaauuagauaucuuuacac

SEQ ID NO: 428531 - RNA, 19 nt, Artificial Sequence
  Description of Artificial Sequence: Synthetic oligonucleotide
  Sense strand starting at position 3415 of SEQ ID NO: 316635
uguguacugaaguaucaua

SEQ ID NO: 428532 - RNA, 19 nt, Artificial Sequence
  Description of Artificial Sequence: Synthetic oligonucleotide
  Antisense Strand to SEQ ID NO: 428531
uaugauacuucaguacaca

SEQ ID NO: 428533 - RNA, 19 nt, Artificial Sequence
  Description of Artificial Sequence: Synthetic oligonucleotide
  Sense strand starting at position 3423 of SEQ ID NO: 316635
gaaguaucauagguacuuc

SEQ ID NO: 428534 - RNA, 19 nt, Artificial Sequence
  Description of Artificial Sequence: Synthetic oligonucleotide
  Antisense Strand to SEQ ID NO: 428533
gaaguaccuaugauacuuc

SEQ ID NO: 428535 - RNA, 19 nt, Artificial Sequence
  Description of Artificial Sequence: Synthetic oligonucleotide
  Sense strand starting at position 621 of SEQ ID NO: 316636
ggaaauggccucuguaaau

SEQ ID NO: 428536 - RNA, 19 nt, Artificial Sequence
  Description of Artificial Sequence: Synthetic oligonucleotide
  Antisense Strand to SEQ ID NO: 428535
auuuacagaggccauuucc

SEQ ID NO: 428537 - RNA, 19 nt, Artificial Sequence
  Description of Artificial Sequence: Synthetic oligonucleotide
  Sense strand starting at position 643 of SEQ ID NO: 316636
ugagguuggaaauguggaa

SEQ ID NO: 428538 - RNA, 19 nt, Artificial Sequence
  Description of Artificial Sequence: Synthetic oligonucleotide
  Antisense Strand to SEQ ID NO: 428537
uuccacauuuccaaccuca

SEQ ID NO: 428539 - RNA, 19 nt, Artificial Sequence
  Description of Artificial Sequence: Synthetic oligonucleotide
  Sense strand starting at position 710 of SEQ ID NO: 316636
agaaucagacacugcauua

SEQ ID NO: 428540 - RNA, 19 nt, Artificial Sequence
  Description of Artificial Sequence: Synthetic oligonucleotide
  Antisense Strand to SEQ ID NO: 428539
uaaugcagugucugauucu

SEQ ID NO: 428541 - RNA, 19 nt, Artificial Sequence
  Description of Artificial Sequence: Synthetic oligonucleotide
  Sense strand starting at position 924 of SEQ ID NO: 316636
acucuaaauccgcgggaaa

SEQ ID NO: 428542 - RNA, 19 nt, Artificial Sequence
  Description of Artificial Sequence: Synthetic oligonucleotide
  Antisense Strand to SEQ ID NO: 428541
uuucccgcggauuuagagu

SEQ ID NO: 428543 - RNA, 19 nt, Artificial Sequence
  Description of Artificial Sequence: Synthetic oligonucleotide
  Sense strand starting at position 925 of SEQ ID NO: 316636
cucuaaauccgcgggaaau

SEQ ID NO: 428544 - RNA, 19 nt, Artificial Sequence
  Description of Artificial Sequence: Synthetic oligonucleotide
  Antisense Strand to SEQ ID NO: 428543
auuucccgcggauuuagag

SEQ ID NO: 428545 - RNA, 19 nt, Artificial Sequence
  Description of Artificial Sequence: Synthetic oligonucleotide
  Sense strand starting at position 926 of SEQ ID NO: 316636
ucuaaauccgcgggaaaug

SEQ ID NO: 428546 - RNA, 19 nt, Artificial Sequence
  Description of Artificial Sequence: Synthetic oligonucleotide
  Antisense Strand to SEQ ID NO: 428545
cauuucccgcggauuuaga

SEQ ID NO: 428547 - RNA, 19 nt, Artificial Sequence
  Description of Artificial Sequence: Synthetic oligonucleotide
  Sense strand starting at position 1030 of SEQ ID NO: 316636
cuaccaguuuaagucugaa

SEQ ID NO: 428548 - RNA, 19 nt, Artificial Sequence
  Description of Artificial Sequence: Synthetic oligonucleotide
  Antisense Strand to SEQ ID NO: 428547
uucagacuuaaacugguag

SEQ ID NO: 428549 - RNA, 19 nt, Artificial Sequence
  Description of Artificial Sequence: Synthetic oligonucleotide
  Sense strand starting at position 1033 of SEQ ID NO: 316636
ccaguuuaagucugaaaga

SEQ ID NO: 428550 - RNA, 19 nt, Artificial Sequence
  Description of Artificial Sequence: Synthetic oligonucleotide
  Antisense Strand to SEQ ID NO: 428549
ucuuucagacuuaaacugg

SEQ ID NO: 428551 - RNA, 19 nt, Artificial Sequence
  Description of Artificial Sequence: Synthetic oligonucleotide
  Sense strand starting at position 1044 of SEQ ID NO: 316636
cugaaagacuguuuagagu

SEQ ID NO: 428552 - RNA, 19 nt, Artificial Sequence
  Description of Artificial Sequence: Synthetic oligonucleotide
  Antisense Strand to SEQ ID NO: 428551
acucuaaacagucuuucag

SEQ ID NO: 428553 - RNA, 19 nt, Artificial Sequence
  Description of Artificial Sequence: Synthetic oligonucleotide
  Sense strand starting at position 1145 of SEQ ID NO: 316636
gcaacuuuagacugaguau

SEQ ID NO: 428554 - RNA, 19 nt, Artificial Sequence
  Description of Artificial Sequence: Synthetic oligonucleotide
  Antisense Strand to SEQ ID NO: 428553
auacucagucuaaaguugc

SEQ ID NO: 428555 - RNA, 19 nt, Artificial Sequence
  Description of Artificial Sequence: Synthetic oligonucleotide
  Sense strand starting at position 1148 of SEQ ID NO: 316636
acuuuagacugaguauguu

SEQ ID NO: 428556 - RNA, 19 nt, Artificial Sequence
  Description of Artificial Sequence: Synthetic oligonucleotide
  Antisense Strand to SEQ ID NO: 428555
aacauacucagucuaaagu

SEQ ID NO: 428557 - RNA, 19 nt, Artificial Sequence
  Description of Artificial Sequence: Synthetic oligonucleotide
  Sense strand starting at position 1151 of SEQ ID NO: 316636
uuagacugaguauguuauu

SEQ ID NO: 428558 - RNA, 19 nt, Artificial Sequence
  Description of Artificial Sequence: Synthetic oligonucleotide
  Antisense Strand to SEQ ID NO: 428557
aauaacauacucagucuaa

SEQ ID NO: 428559 - RNA, 19 nt, Artificial Sequence
  Description of Artificial Sequence: Synthetic oligonucleotide
  Sense strand starting at position 1170 of SEQ ID NO: 316636
cguaauuucugccuuucuu

SEQ ID NO: 428560 - RNA, 19 nt, Artificial Sequence
  Description of Artificial Sequence: Synthetic oligonucleotide
  Antisense Strand to SEQ ID NO: 428559
aagaaaggcagaaauuacg

SEQ ID NO: 428561 - RNA, 19 nt, Artificial Sequence
  Description of Artificial Sequence: Synthetic oligonucleotide
  Sense strand starting at position 1207 of SEQ ID NO: 316636
uuaugaauuugucauagag

SEQ ID NO: 428562 - RNA, 19 nt, Artificial Sequence
  Description of Artificial Sequence: Synthetic oligonucleotide
  Antisense Strand to SEQ ID NO: 428561
cucuaugacaaauucauaa

SEQ ID NO: 428563 - RNA, 19 nt, Artificial Sequence
  Description of Artificial Sequence: Synthetic oligonucleotide
  Sense strand starting at position 1209 of SEQ ID NO: 316636
augaauuugucauagagga

SEQ ID NO: 428564 - RNA, 19 nt, Artificial Sequence
  Description of Artificial Sequence: Synthetic oligonucleotide
  Antisense Strand to SEQ ID NO: 428563
uccucuaugacaaauucau

SEQ ID NO: 428565 - RNA, 19 nt, Artificial Sequence
  Description of Artificial Sequence: Synthetic oligonucleotide
  Sense strand starting at position 1334 of SEQ ID NO: 316636
uuguuacgugaggacuaga

SEQ ID NO: 428566 - RNA, 19 nt, Artificial Sequence
  Description of Artificial Sequence: Synthetic oligonucleotide
  Antisense Strand to SEQ ID NO: 428565
ucuaguccucacguaacaa

SEQ ID NO: 428567 - RNA, 19 nt, Artificial Sequence
  Description of Artificial Sequence: Synthetic oligonucleotide
  Sense strand starting at position 1368 of SEQ ID NO: 316636
uugguauuuaagugcucga

SEQ ID NO: 428568 - RNA, 19 nt, Artificial Sequence
  Description of Artificial Sequence: Synthetic oligonucleotide
  Antisense Strand to SEQ ID NO: 428567
ucgagcacuuaaauaccaa

SEQ ID NO: 428569 - RNA, 19 nt, Artificial Sequence
  Description of Artificial Sequence: Synthetic oligonucleotide
  Sense strand starting at position 1473 of SEQ ID NO: 316636
acaagcaaccuaggaguua

SEQ ID NO: 428570 - RNA, 19 nt, Artificial Sequence
  Description of Artificial Sequence: Synthetic oligonucleotide
  Antisense Strand to SEQ ID NO: 428569
uaacuccuagguugcuugu

SEQ ID NO: 428571 - RNA, 19 nt, Artificial Sequence
  Description of Artificial Sequence: Synthetic oligonucleotide
  Sense strand starting at position 1523 of SEQ ID NO: 316636
guaugcaagcugcaagaau

SEQ ID NO: 428572 - RNA, 19 nt, Artificial Sequence
  Description of Artificial Sequence: Synthetic oligonucleotide
  Antisense Strand to SEQ ID NO: 428571
auucuugcagcuugcauac

SEQ ID NO: 428573 - RNA, 19 nt, Artificial Sequence
  Description of Artificial Sequence: Synthetic oligonucleotide
  Sense strand starting at position 1544 of SEQ ID NO: 316636
cccagagcgaguuacuuaa

SEQ ID NO: 428574 - RNA, 19 nt, Artificial Sequence
  Description of Artificial Sequence: Synthetic oligonucleotide
  Antisense Strand to SEQ ID NO: 428573
uuaaguaacucgcucuggg

SEQ ID NO: 428575 - RNA, 19 nt, Artificial Sequence
  Description of Artificial Sequence: Synthetic oligonucleotide
  Sense strand starting at position 1546 of SEQ ID NO: 316636
cagagcgaguuacuuaauu

SEQ ID NO: 428576 - RNA, 19 nt, Artificial Sequence
  Description of Artificial Sequence: Synthetic oligonucleotide
  Antisense Strand to SEQ ID NO: 428575
aauuaaguaacucgcucug

SEQ ID NO: 428577 - RNA, 19 nt, Artificial Sequence
  Description of Artificial Sequence: Synthetic oligonucleotide
  Sense strand starting at position 1555 of SEQ ID NO: 316636
uuacuuaauuucguguaag

SEQ ID NO: 428578 - RNA, 19 nt, Artificial Sequence
  Description of Artificial Sequence: Synthetic oligonucleotide
  Antisense Strand to SEQ ID NO: 428577
cuuacacgaaauuaaguaa

SEQ ID NO: 428579 - RNA, 19 nt, Artificial Sequence
  Description of Artificial Sequence: Synthetic oligonucleotide
  Sense strand starting at position 2595 of SEQ ID NO: 316636
guguuaagagugggccaga

SEQ ID NO: 428580 - RNA, 19 nt, Artificial Sequence
  Description of Artificial Sequence: Synthetic oligonucleotide
  Antisense Strand to SEQ ID NO: 428579
ucuggcccacucuuaacac

SEQ ID NO: 428581 - RNA, 19 nt, Artificial Sequence
  Description of Artificial Sequence: Synthetic oligonucleotide
  Sense strand starting at position 2623 of SEQ ID NO: 316636
gagagaauguaguauuugu

SEQ ID NO: 428582 - RNA, 19 nt, Artificial Sequence
  Description of Artificial Sequence: Synthetic oligonucleotide
  Antisense Strand to SEQ ID NO: 428581
acaaauacuacauucucuc

SEQ ID NO: 428583 - RNA, 19 nt, Artificial Sequence
  Description of Artificial Sequence: Synthetic oligonucleotide
  Sense strand starting at position 2627 of SEQ ID NO: 316636
gaauguaguauuugucggu

SEQ ID NO: 428584 - RNA, 19 nt, Artificial Sequence
  Description of Artificial Sequence: Synthetic oligonucleotide
  Antisense Strand to SEQ ID NO: 428583
accgacaaauacuacauuc

SEQ ID NO: 428585 - RNA, 19 nt, Artificial Sequence
  Description of Artificial Sequence: Synthetic oligonucleotide
  Sense strand starting at position 2631 of SEQ ID NO: 316636
guaguauuugucgguuuac

SEQ ID NO: 428586 - RNA, 19 nt, Artificial Sequence
  Description of Artificial Sequence: Synthetic oligonucleotide
  Antisense Strand to SEQ ID NO: 428585
guaaaccgacaaauacuac

SEQ ID NO: 428587 - RNA, 19 nt, Artificial Sequence
  Description of Artificial Sequence: Synthetic oligonucleotide
  Sense strand starting at position 2632 of SEQ ID NO: 316636
uaguauuugucgguuuacu

SEQ ID NO: 428588 - RNA, 19 nt, Artificial Sequence
  Description of Artificial Sequence: Synthetic oligonucleotide
  Antisense Strand to SEQ ID NO: 428587
aguaaaccgacaaauacua

SEQ ID NO: 428589 - RNA, 19 nt, Artificial Sequence
  Description of Artificial Sequence: Synthetic oligonucleotide
  Sense strand starting at position 2825 of SEQ ID NO: 316636
uuuaguagagauugggagu

SEQ ID NO: 428590 - RNA, 19 nt, Artificial Sequence
  Description of Artificial Sequence: Synthetic oligonucleotide
  Antisense Strand to SEQ ID NO: 428589
acucccaaucucuacuaaa

SEQ ID NO: 428591 - RNA, 19 nt, Artificial Sequence
  Description of Artificial Sequence: Synthetic oligonucleotide
  Sense strand starting at position 2976 of SEQ ID NO: 316636
acucuuaaacucuguugua

SEQ ID NO: 428592 - RNA, 19 nt, Artificial Sequence
  Description of Artificial Sequence: Synthetic oligonucleotide
  Antisense Strand to SEQ ID NO: 428591
uacaacagaguuuaagagu

SEQ ID NO: 428593 - RNA, 19 nt, Artificial Sequence
  Description of Artificial Sequence: Synthetic oligonucleotide
  Sense strand starting at position 2977 of SEQ ID NO: 316636
cucuuaaacucuguuguaa

SEQ ID NO: 428594 - RNA, 19 nt, Artificial Sequence
  Description of Artificial Sequence: Synthetic oligonucleotide
  Antisense Strand to SEQ ID NO: 428593
uuacaacagaguuuaagag

SEQ ID NO: 428595 - RNA, 19 nt, Artificial Sequence
  Description of Artificial Sequence: Synthetic oligonucleotide
  Sense strand starting at position 2988 of SEQ ID NO: 316636
uguuguaaacgcugaauuu

SEQ ID NO: 428596 - RNA, 19 nt, Artificial Sequence
  Description of Artificial Sequence: Synthetic oligonucleotide
  Antisense Strand to SEQ ID NO: 428595
aaauucagcguuuacaaca

SEQ ID NO: 428597 - RNA, 19 nt, Artificial Sequence
  Description of Artificial Sequence: Synthetic oligonucleotide
  Sense strand starting at position 3082 of SEQ ID NO: 316636
augguaagauuguccaaag

SEQ ID NO: 428598 - RNA, 19 nt, Artificial Sequence
  Description of Artificial Sequence: Synthetic oligonucleotide
  Antisense Strand to SEQ ID NO: 428597
cuuuggacaaucuuaccau

SEQ ID NO: 428599 - RNA, 19 nt, Artificial Sequence
  Description of Artificial Sequence: Synthetic oligonucleotide
  Sense strand starting at position 3083 of SEQ ID NO: 316636
ugguaagauuguccaaagu

SEQ ID NO: 428600 - RNA, 19 nt, Artificial Sequence
  Description of Artificial Sequence: Synthetic oligonucleotide
  Antisense Strand to SEQ ID NO: 428599
acuuuggacaaucuuacca

SEQ ID NO: 428601 - RNA, 19 nt, Artificial Sequence
  Description of Artificial Sequence: Synthetic oligonucleotide
  Sense strand starting at position 3243 of SEQ ID NO: 316636
uucugucuccauuaggaua

SEQ ID NO: 428602 - RNA, 19 nt, Artificial Sequence
  Description of Artificial Sequence: Synthetic oligonucleotide
  Antisense Strand to SEQ ID NO: 428601
uauccuaauggagacagaa

SEQ ID NO: 428603 - RNA, 19 nt, Artificial Sequence
  Description of Artificial Sequence: Synthetic oligonucleotide
  Sense strand starting at position 3332 of SEQ ID NO: 316636
uguugacacucuccacaua

SEQ ID NO: 428604 - RNA, 19 nt, Artificial Sequence
  Description of Artificial Sequence: Synthetic oligonucleotide
  Antisense Strand to SEQ ID NO: 428603
uauguggagagugucaaca

SEQ ID NO: 428605 - RNA, 19 nt, Artificial Sequence
  Description of Artificial Sequence: Synthetic oligonucleotide
  Sense strand starting at position 3566 of SEQ ID NO: 316636
aaaggaaugcccuguuagu

SEQ ID NO: 428606 - RNA, 19 nt, Artificial Sequence
  Description of Artificial Sequence: Synthetic oligonucleotide
  Antisense Strand to SEQ ID NO: 428605
acuaacagggcauuccuuu

SEQ ID NO: 428607 - RNA, 19 nt, Artificial Sequence
  Description of Artificial Sequence: Synthetic oligonucleotide
  Sense strand starting at position 3750 of SEQ ID NO: 316636
ccacucaggcucugaauua

SEQ ID NO: 428608 - RNA, 19 nt, Artificial Sequence
  Description of Artificial Sequence: Synthetic oligonucleotide
  Antisense Strand to SEQ ID NO: 428607
uaauucagagccugagugg

SEQ ID NO: 428609 - RNA, 19 nt, Artificial Sequence
  Description of Artificial Sequence: Synthetic oligonucleotide
  Sense strand starting at position 3836 of SEQ ID NO: 316636
gaacauucguaguuccuua

SEQ ID NO: 428610 - RNA, 19 nt, Artificial Sequence
  Description of Artificial Sequence: Synthetic oligonucleotide
  Antisense Strand to SEQ ID NO: 428609
uaaggaacuacgaauguuc

SEQ ID NO: 428611 - RNA, 19 nt, Artificial Sequence
  Description of Artificial Sequence: Synthetic oligonucleotide
  Sense strand starting at position 3888 of SEQ ID NO: 316636
uguguaugucaauacuucu

SEQ ID NO: 428612 - RNA, 19 nt, Artificial Sequence
  Description of Artificial Sequence: Synthetic oligonucleotide
  Antisense Strand to SEQ ID NO: 428611
agaaguauugacauacaca

SEQ ID NO: 428613 - RNA, 19 nt, Artificial Sequence
  Description of Artificial Sequence: Synthetic oligonucleotide
  Sense strand starting at position 3895 of SEQ ID NO: 316636
gucaauacuucugcuugga

SEQ ID NO: 428614 - RNA, 19 nt, Artificial Sequence
  Description of Artificial Sequence: Synthetic oligonucleotide
  Antisense Strand to SEQ ID NO: 428613
uccaagcagaaguauugac

SEQ ID NO: 428615 - RNA, 19 nt, Artificial Sequence
  Description of Artificial Sequence: Synthetic oligonucleotide
  Sense strand starting at position 380 of SEQ ID NO: 316637
auacuuaacguugauucua

SEQ ID NO: 428616 - RNA, 19 nt, Artificial Sequence
  Description of Artificial Sequence: Synthetic oligonucleotide
  Antisense Strand to SEQ ID NO: 428615
uagaaucaacguuaaguau

SEQ ID NO: 428617 - RNA, 19 nt, Artificial Sequence
  Description of Artificial Sequence: Synthetic oligonucleotide
  Sense strand starting at position 382 of SEQ ID NO: 316637
acuuaacguugauucuaua

SEQ ID NO: 428618 - RNA, 19 nt, Artificial Sequence
  Description of Artificial Sequence: Synthetic oligonucleotide
  Antisense Strand to SEQ ID NO: 428617
uauagaaucaacguuaagu

SEQ ID NO: 428619 - RNA, 19 nt, Artificial Sequence
  Description of Artificial Sequence: Synthetic oligonucleotide
  Sense strand starting at position 543 of SEQ ID NO: 316637
gcuguuucaggguaggaau

SEQ ID NO: 428620 - RNA, 19 nt, Artificial Sequence
  Description of Artificial Sequence: Synthetic oligonucleotide
  Antisense Strand to SEQ ID NO: 428619
auuccuacccugaaacagc

SEQ ID NO: 428621 - RNA, 19 nt, Artificial Sequence
  Description of Artificial Sequence: Synthetic oligonucleotide
  Sense strand starting at position 587 of SEQ ID NO: 316637
ugauccuaagcaugggaaa

SEQ ID NO: 428622 - RNA, 19 nt, Artificial Sequence
  Description of Artificial Sequence: Synthetic oligonucleotide
  Antisense Strand to SEQ ID NO: 428621
uuucccaugcuuaggauca

SEQ ID NO: 428623 - RNA, 19 nt, Artificial Sequence
  Description of Artificial Sequence: Synthetic oligonucleotide
  Sense strand starting at position 617 of SEQ ID NO: 316637
ggguggaagggugaguuau

SEQ ID NO: 428624 - RNA, 19 nt, Artificial Sequence
  Description of Artificial Sequence: Synthetic oligonucleotide
  Antisense Strand to SEQ ID NO: 428623
auaacucacccuuccaccc

SEQ ID NO: 428625 - RNA, 19 nt, Artificial Sequence
  Description of Artificial Sequence: Synthetic oligonucleotide
  Sense strand starting at position 625 of SEQ ID NO: 316637
gggugaguuauggagcaac

SEQ ID NO: 428626 - RNA, 19 nt, Artificial Sequence
  Description of Artificial Sequence: Synthetic oligonucleotide
  Antisense Strand to SEQ ID NO: 428625
guugcuccauaacucaccc

SEQ ID NO: 428627 - RNA, 19 nt, Artificial Sequence
  Description of Artificial Sequence: Synthetic oligonucleotide
  Sense strand starting at position 628 of SEQ ID NO: 316637
ugaguuauggagcaacgaa

SEQ ID NO: 428628 - RNA, 19 nt, Artificial Sequence
  Description of Artificial Sequence: Synthetic oligonucleotide
  Antisense Strand to SEQ ID NO: 428627
uucguugcuccauaacuca

SEQ ID NO: 428629 - RNA, 19 nt, Artificial Sequence
  Description of Artificial Sequence: Synthetic oligonucleotide
  Sense strand starting at position 676 of SEQ ID NO: 316637
gcagauugagguuggagaa

SEQ ID NO: 428630 - RNA, 19 nt, Artificial Sequence
  Description of Artificial Sequence: Synthetic oligonucleotide
  Antisense Strand to SEQ ID NO: 428629
uucuccaaccucaaucugc

SEQ ID NO: 428631 - RNA, 19 nt, Artificial Sequence
  Description of Artificial Sequence: Synthetic oligonucleotide
  Sense strand starting at position 804 of SEQ ID NO: 316637
accuuuaugugaguaaacu

SEQ ID NO: 428632 - RNA, 19 nt, Artificial Sequence
  Description of Artificial Sequence: Synthetic oligonucleotide
  Antisense Strand to SEQ ID NO: 428631
aguuuacucacauaaaggu

SEQ ID NO: 428633 - RNA, 19 nt, Artificial Sequence
  Description of Artificial Sequence: Synthetic oligonucleotide
  Sense strand starting at position 805 of SEQ ID NO: 316637
ccuuuaugugaguaaacua

SEQ ID NO: 428634 - RNA, 19 nt, Artificial Sequence
  Description of Artificial Sequence: Synthetic oligonucleotide
  Antisense Strand to SEQ ID NO: 428633
uaguuuacucacauaaagg

SEQ ID NO: 428635 - RNA, 19 nt, Artificial Sequence
  Description of Artificial Sequence: Synthetic oligonucleotide
  Sense strand starting at position 821 of SEQ ID NO: 316637
cuauauuuaugggacauau

SEQ ID NO: 428636 - RNA, 19 nt, Artificial Sequence
  Description of Artificial Sequence: Synthetic oligonucleotide
  Antisense Strand to SEQ ID NO: 428635
auaugucccauaaauauag

SEQ ID NO: 428637 - RNA, 19 nt, Artificial Sequence
  Description of Artificial Sequence: Synthetic oligonucleotide
  Sense strand starting at position 847 of SEQ ID NO: 316637
uaaguuauaggcuaaugua

SEQ ID NO: 428638 - RNA, 19 nt, Artificial Sequence
  Description of Artificial Sequence: Synthetic oligonucleotide
  Antisense Strand to SEQ ID NO: 428637
uacauuagccuauaacuua

SEQ ID NO: 428639 - RNA, 19 nt, Artificial Sequence
  Description of Artificial Sequence: Synthetic oligonucleotide
  Sense strand starting at position 867 of SEQ ID NO: 316637
ucauuugcuguuugaaggu

SEQ ID NO: 428640 - RNA, 19 nt, Artificial Sequence
  Description of Artificial Sequence: Synthetic oligonucleotide
  Antisense Strand to SEQ ID NO: 428639
accuucaaacagcaaauga

SEQ ID NO: 428641 - RNA, 19 nt, Artificial Sequence
  Description of Artificial Sequence: Synthetic oligonucleotide
  Sense strand starting at position 1416 of SEQ ID NO: 316637
uguauuacuccuuauguug

SEQ ID NO: 428642 - RNA, 19 nt, Artificial Sequence
  Description of Artificial Sequence: Synthetic oligonucleotide
  Antisense Strand to SEQ ID NO: 428641
caacauaaggaguaauaca

SEQ ID NO: 428643 - RNA, 19 nt, Artificial Sequence
  Description of Artificial Sequence: Synthetic oligonucleotide
  Sense strand starting at position 1501 of SEQ ID NO: 316637
cgguaucaccucugggaag

SEQ ID NO: 428644 - RNA, 19 nt, Artificial Sequence
  Description of Artificial Sequence: Synthetic oligonucleotide
  Antisense Strand to SEQ ID NO: 428643
cuucccagaggugauaccg

SEQ ID NO: 428645 - RNA, 19 nt, Artificial Sequence
  Description of Artificial Sequence: Synthetic oligonucleotide
  Sense strand starting at position 1621 of SEQ ID NO: 316637
cugugagauccuuggagaa

SEQ ID NO: 428646 - RNA, 19 nt, Artificial Sequence
  Description of Artificial Sequence: Synthetic oligonucleotide
  Antisense Strand to SEQ ID NO: 428645
uucuccaaggaucucacag

SEQ ID NO: 428647 - RNA, 19 nt, Artificial Sequence
  Description of Artificial Sequence: Synthetic oligonucleotide
  Sense strand starting at position 1641 of SEQ ID NO: 316637
gggauauaucuuugacucu

SEQ ID NO: 428648 - RNA, 19 nt, Artificial Sequence
  Description of Artificial Sequence: Synthetic oligonucleotide
  Antisense Strand to SEQ ID NO: 428647
agagucaaagauauauccc

SEQ ID NO: 428649 - RNA, 19 nt, Artificial Sequence
  Description of Artificial Sequence: Synthetic oligonucleotide
  Sense strand starting at position 1668 of SEQ ID NO: 316637
ugauaaagggcuuggacau

SEQ ID NO: 428650 - RNA, 19 nt, Artificial Sequence
  Description of Artificial Sequence: Synthetic oligonucleotide
  Antisense Strand to SEQ ID NO: 428649
auguccaagcccuuuauca

SEQ ID NO: 428651 - RNA, 19 nt, Artificial Sequence
  Description of Artificial Sequence: Synthetic oligonucleotide
  Sense strand starting at position 1669 of SEQ ID NO: 316637
gauaaagggcuuggacauu

SEQ ID NO: 428652 - RNA, 19 nt, Artificial Sequence
  Description of Artificial Sequence: Synthetic oligonucleotide
  Antisense Strand to SEQ ID NO: 428651
aauguccaagcccuuuauc

SEQ ID NO: 428653 - RNA, 19 nt, Artificial Sequence
  Description of Artificial Sequence: Synthetic oligonucleotide
  Sense strand starting at position 1675 of SEQ ID NO: 316637
gggcuuggacauuacuuau

SEQ ID NO: 428654 - RNA, 19 nt, Artificial Sequence
  Description of Artificial Sequence: Synthetic oligonucleotide
  Antisense Strand to SEQ ID NO: 428653
auaaguaauguccaagccc

SEQ ID NO: 428655 - RNA, 19 nt, Artificial Sequence
  Description of Artificial Sequence: Synthetic oligonucleotide
  Sense strand starting at position 1678 of SEQ ID NO: 316637
cuuggacauuacuuauuga

SEQ ID NO: 428656 - RNA, 19 nt, Artificial Sequence
  Description of Artificial Sequence: Synthetic oligonucleotide
  Antisense Strand to SEQ ID NO: 428655
ucaauaaguaauguccaag

SEQ ID NO: 428657 - RNA, 19 nt, Artificial Sequence
  Description of Artificial Sequence: Synthetic oligonucleotide
  Sense strand starting at position 1811 of SEQ ID NO: 316637
ugaugagauguugguaaag

SEQ ID NO: 428658 - RNA, 19 nt, Artificial Sequence
  Description of Artificial Sequence: Synthetic oligonucleotide
  Antisense Strand to SEQ ID NO: 428657
cuuuaccaacaucucauca

SEQ ID NO: 428659 - RNA, 19 nt, Artificial Sequence
  Description of Artificial Sequence: Synthetic oligonucleotide
  Sense strand starting at position 2082 of SEQ ID NO: 316637
ggaaguuccuaaguguaau

SEQ ID NO: 428660 - RNA, 19 nt, Artificial Sequence
  Description of Artificial Sequence: Synthetic oligonucleotide
  Antisense Strand to SEQ ID NO: 428659
auuacacuuaggaacuucc

SEQ ID NO: 428661 - RNA, 19 nt, Artificial Sequence
  Description of Artificial Sequence: Synthetic oligonucleotide
  Sense strand starting at position 2088 of SEQ ID NO: 316637
uccuaaguguaaucugaaa

SEQ ID NO: 428662 - RNA, 19 nt, Artificial Sequence
  Description of Artificial Sequence: Synthetic oligonucleotide
  Antisense Strand to SEQ ID NO: 428661
uuucagauuacacuuagga

SEQ ID NO: 428663 - RNA, 19 nt, Artificial Sequence
  Description of Artificial Sequence: Synthetic oligonucleotide
  Sense strand starting at position 2101 of SEQ ID NO: 316637
cugaaauaggcucaucuca

SEQ ID NO: 428664 - RNA, 19 nt, Artificial Sequence
  Description of Artificial Sequence: Synthetic oligonucleotide
  Antisense Strand to SEQ ID NO: 428663
ugagaugagccuauuucag

SEQ ID NO: 428665 - RNA, 19 nt, Artificial Sequence
  Description of Artificial Sequence: Synthetic oligonucleotide
  Sense strand starting at position 2103 of SEQ ID NO: 316637
gaaauaggcucaucucagu

SEQ ID NO: 428666 - RNA, 19 nt, Artificial Sequence
  Description of Artificial Sequence: Synthetic oligonucleotide
  Antisense Strand to SEQ ID NO: 428665
acugagaugagccuauuuc

SEQ ID NO: 428667 - RNA, 19 nt, Artificial Sequence
  Description of Artificial Sequence: Synthetic oligonucleotide
  Sense strand starting at position 2108 of SEQ ID NO: 316637
aggcucaucucagugaaag

SEQ ID NO: 428668 - RNA, 19 nt, Artificial Sequence
  Description of Artificial Sequence: Synthetic oligonucleotide
  Antisense Strand to SEQ ID NO: 428667
cuuucacugagaugagccu

SEQ ID NO: 428669 - RNA, 19 nt, Artificial Sequence
  Description of Artificial Sequence: Synthetic oligonucleotide
  Sense strand starting at position 2109 of SEQ ID NO: 316637
ggcucaucucagugaaaga

SEQ ID NO: 428670 - RNA, 19 nt, Artificial Sequence
  Description of Artificial Sequence: Synthetic oligonucleotide
  Antisense Strand to SEQ ID NO: 428669
ucuuucacugagaugagcc

SEQ ID NO: 428671 - RNA, 19 nt, Artificial Sequence
  Description of Artificial Sequence: Synthetic oligonucleotide
  Sense strand starting at position 2110 of SEQ ID NO: 316637
gcucaucucagugaaagag

SEQ ID NO: 428672 - RNA, 19 nt, Artificial Sequence
  Description of Artificial Sequence: Synthetic oligonucleotide
  Antisense Strand to SEQ ID NO: 428671
cucuuucacugagaugagc

SEQ ID NO: 428673 - RNA, 19 nt, Artificial Sequence
  Description of Artificial Sequence: Synthetic oligonucleotide
  Sense strand starting at position 2241 of SEQ ID NO: 316637
uuucuaacagaguguacaa

SEQ ID NO: 428674 - RNA, 19 nt, Artificial Sequence
  Description of Artificial Sequence: Synthetic oligonucleotide
  Antisense Strand to SEQ ID NO: 428673
uuguacacucuguuagaaa

SEQ ID NO: 428675 - RNA, 19 nt, Artificial Sequence
  Description of Artificial Sequence: Synthetic oligonucleotide
  Sense strand starting at position 2307 of SEQ ID NO: 316637
gucucuaaacuugaguaau

SEQ ID NO: 428676 - RNA, 19 nt, Artificial Sequence
  Description of Artificial Sequence: Synthetic oligonucleotide
  Antisense Strand to SEQ ID NO: 428675
auuacucaaguuuagagac

SEQ ID NO: 428677 - RNA, 19 nt, Artificial Sequence
  Description of Artificial Sequence: Synthetic oligonucleotide
  Sense strand starting at position 2383 of SEQ ID NO: 316637
ucucuaguaguuuaucaag

SEQ ID NO: 428678 - RNA, 19 nt, Artificial Sequence
  Description of Artificial Sequence: Synthetic oligonucleotide
  Antisense Strand to SEQ ID NO: 428677
cuugauaaacuacuagaga

SEQ ID NO: 428679 - RNA, 19 nt, Artificial Sequence
  Description of Artificial Sequence: Synthetic oligonucleotide
  Sense strand starting at position 2385 of SEQ ID NO: 316637
ucuaguaguuuaucaagag

SEQ ID NO: 428680 - RNA, 19 nt, Artificial Sequence
  Description of Artificial Sequence: Synthetic oligonucleotide
  Antisense Strand to SEQ ID NO: 428679
cucuugauaaacuacuaga

SEQ ID NO: 428681 - RNA, 19 nt, Artificial Sequence
  Description of Artificial Sequence: Synthetic oligonucleotide
  Sense strand starting at position 2429 of SEQ ID NO: 316637
ugguuacucagaggaagug

SEQ ID NO: 428682 - RNA, 19 nt, Artificial Sequence
  Description of Artificial Sequence: Synthetic oligonucleotide
  Antisense Strand to SEQ ID NO: 428681
cacuuccucugaguaacca

SEQ ID NO: 428683 - RNA, 19 nt, Artificial Sequence
  Description of Artificial Sequence: Synthetic oligonucleotide
  Sense strand starting at position 2689 of SEQ ID NO: 316637
gguagauuacauugauuaa

SEQ ID NO: 428684 - RNA, 19 nt, Artificial Sequence
  Description of Artificial Sequence: Synthetic oligonucleotide
  Antisense Strand to SEQ ID NO: 428683
uuaaucaauguaaucuacc

SEQ ID NO: 428685 - RNA, 19 nt, Artificial Sequence
  Description of Artificial Sequence: Synthetic oligonucleotide
  Sense strand starting at position 2774 of SEQ ID NO: 316637
auauaucagucacuggauu

SEQ ID NO: 428686 - RNA, 19 nt, Artificial Sequence
  Description of Artificial Sequence: Synthetic oligonucleotide
  Antisense Strand to SEQ ID NO: 428685
aauccagugacugauauau

SEQ ID NO: 428687 - RNA, 19 nt, Artificial Sequence
  Description of Artificial Sequence: Synthetic oligonucleotide
  Sense strand starting at position 2798 of SEQ ID NO: 316637
ugcuaacauucuguuaaag

SEQ ID NO: 428688 - RNA, 19 nt, Artificial Sequence
  Description of Artificial Sequence: Synthetic oligonucleotide
  Antisense Strand to SEQ ID NO: 428687
cuuuaacagaauguuagca

SEQ ID NO: 428689 - RNA, 19 nt, Artificial Sequence
  Description of Artificial Sequence: Synthetic oligonucleotide
  Sense strand starting at position 2833 of SEQ ID NO: 316637
ucaugagaguuauuaaugu

SEQ ID NO: 428690 - RNA, 19 nt, Artificial Sequence
  Description of Artificial Sequence: Synthetic oligonucleotide
  Antisense Strand to SEQ ID NO: 428689
acauuaauaacucucauga

SEQ ID NO: 428691 - RNA, 19 nt, Artificial Sequence
  Description of Artificial Sequence: Synthetic oligonucleotide
  Sense strand starting at position 2952 of SEQ ID NO: 316637
ggaggagauuguguagaac

SEQ ID NO: 428692 - RNA, 19 nt, Artificial Sequence
  Description of Artificial Sequence: Synthetic oligonucleotide
  Antisense Strand to SEQ ID NO: 428691
guucuacacaaucuccucc

SEQ ID NO: 428693 - RNA, 19 nt, Artificial Sequence
  Description of Artificial Sequence: Synthetic oligonucleotide
  Sense strand starting at position 2955 of SEQ ID NO: 316637
ggagauuguguagaacugu

SEQ ID NO: 428694 - RNA, 19 nt, Artificial Sequence
  Description of Artificial Sequence: Synthetic oligonucleotide
  Antisense Strand to SEQ ID NO: 428693
acaguucuacacaaucucc

SEQ ID NO: 428695 - RNA, 19 nt, Artificial Sequence
  Description of Artificial Sequence: Synthetic oligonucleotide
  Sense strand starting at position 107 of SEQ ID NO: 316638
ugugguaaucaggguggaa

SEQ ID NO: 428696 - RNA, 19 nt, Artificial Sequence
  Description of Artificial Sequence: Synthetic oligonucleotide
  Antisense Strand to SEQ ID NO: 428695
uuccacccugauuaccaca

SEQ ID NO: 428697 - RNA, 19 nt, Artificial Sequence
  Description of Artificial Sequence: Synthetic oligonucleotide
  Sense strand starting at position 616 of SEQ ID NO: 316638
ucagaaauguucuuacagu

SEQ ID NO: 428698 - RNA, 19 nt, Artificial Sequence
  Description of Artificial Sequence: Synthetic oligonucleotide
  Antisense Strand to SEQ ID NO: 428697
acuguaagaacauuucuga

SEQ ID NO: 428699 - RNA, 19 nt, Artificial Sequence
  Description of Artificial Sequence: Synthetic oligonucleotide
  Sense strand starting at position 622 of SEQ ID NO: 316638
auguucuuacaguggauga

SEQ ID NO: 428700 - RNA, 19 nt, Artificial Sequence
  Description of Artificial Sequence: Synthetic oligonucleotide
  Antisense Strand to SEQ ID NO: 428699
ucauccacuguaagaacau

SEQ ID NO: 428701 - RNA, 19 nt, Artificial Sequence
  Description of Artificial Sequence: Synthetic oligonucleotide
  Sense strand starting at position 623 of SEQ ID NO: 316638
uguucuuacaguggaugaa

SEQ ID NO: 428702 - RNA, 19 nt, Artificial Sequence
  Description of Artificial Sequence: Synthetic oligonucleotide
  Antisense Strand to SEQ ID NO: 428701
uucauccacuguaagaaca

SEQ ID NO: 428703 - RNA, 19 nt, Artificial Sequence
  Description of Artificial Sequence: Synthetic oligonucleotide
  Sense strand starting at position 624 of SEQ ID NO: 316638
guucuuacaguggaugaau

SEQ ID NO: 428704 - RNA, 19 nt, Artificial Sequence
  Description of Artificial Sequence: Synthetic oligonucleotide
  Antisense Strand to SEQ ID NO: 428703
auucauccacuguaagaac

SEQ ID NO: 428705 - RNA, 19 nt, Artificial Sequence
  Description of Artificial Sequence: Synthetic oligonucleotide
  Sense strand starting at position 735 of SEQ ID NO: 316638
cauuaauauccauggguag

SEQ ID NO: 428706 - RNA, 19 nt, Artificial Sequence
  Description of Artificial Sequence: Synthetic oligonucleotide
  Antisense Strand to SEQ ID NO: 428705
cuacccauggauauuaaug

SEQ ID NO: 428707 - RNA, 19 nt, Artificial Sequence
  Description of Artificial Sequence: Synthetic oligonucleotide
  Sense strand starting at position 736 of SEQ ID NO: 316638
auuaauauccauggguaga

SEQ ID NO: 428708 - RNA, 19 nt, Artificial Sequence
  Description of Artificial Sequence: Synthetic oligonucleotide
  Antisense Strand to SEQ ID NO: 428707
ucuacccauggauauuaau

SEQ ID NO: 428709 - RNA, 19 nt, Artificial Sequence
  Description of Artificial Sequence: Synthetic oligonucleotide
  Sense strand starting at position 738 of SEQ ID NO: 316638
uaauauccauggguagagu

SEQ ID NO: 428710 - RNA, 19 nt, Artificial Sequence
  Description of Artificial Sequence: Synthetic oligonucleotide
  Antisense Strand to SEQ ID NO: 428709
acucuacccauggauauua

SEQ ID NO: 428711 - RNA, 19 nt, Artificial Sequence
  Description of Artificial Sequence: Synthetic oligonucleotide
  Sense strand starting at position 882 of SEQ ID NO: 316638
aucauagagucuccugacu

SEQ ID NO: 428712 - RNA, 19 nt, Artificial Sequence
  Description of Artificial Sequence: Synthetic oligonucleotide
  Antisense Strand to SEQ ID NO: 428711
agucaggagacucuaugau

SEQ ID NO: 428713 - RNA, 19 nt, Artificial Sequence
  Description of Artificial Sequence: Synthetic oligonucleotide
  Sense strand starting at position 1285 of SEQ ID NO: 316638
aggaacguuucuuccaaca

SEQ ID NO: 428714 - RNA, 19 nt, Artificial Sequence
  Description of Artificial Sequence: Synthetic oligonucleotide
  Antisense Strand to SEQ ID NO: 428713
uguuggaagaaacguuccu

SEQ ID NO: 428715 - RNA, 19 nt, Artificial Sequence
  Description of Artificial Sequence: Synthetic oligonucleotide
  Sense strand starting at position 1319 of SEQ ID NO: 316638
cugguuucccauugaacua

SEQ ID NO: 428716 - RNA, 19 nt, Artificial Sequence
  Description of Artificial Sequence: Synthetic oligonucleotide
  Antisense Strand to SEQ ID NO: 428715
uaguucaaugggaaaccag

SEQ ID NO: 428717 - RNA, 19 nt, Artificial Sequence
  Description of Artificial Sequence: Synthetic oligonucleotide
  Sense strand starting at position 1360 of SEQ ID NO: 316638
uacugagacgauugaagug

SEQ ID NO: 428718 - RNA, 19 nt, Artificial Sequence
  Description of Artificial Sequence: Synthetic oligonucleotide
  Antisense Strand to SEQ ID NO: 428717
cacuucaaucgucucagua

SEQ ID NO: 428719 - RNA, 19 nt, Artificial Sequence
  Description of Artificial Sequence: Synthetic oligonucleotide
  Sense strand starting at position 1375 of SEQ ID NO: 316638
aguguccuuguggaaacau

SEQ ID NO: 428720 - RNA, 19 nt, Artificial Sequence
  Description of Artificial Sequence: Synthetic oligonucleotide
  Antisense Strand to SEQ ID NO: 428719
auguuuccacaaggacacu

SEQ ID NO: 428721 - RNA, 19 nt, Artificial Sequence
  Description of Artificial Sequence: Synthetic oligonucleotide
  Sense strand starting at position 1414 of SEQ ID NO: 316638
cccagcuauccggaaauca

SEQ ID NO: 428722 - RNA, 19 nt, Artificial Sequence
  Description of Artificial Sequence: Synthetic oligonucleotide
  Antisense Strand to SEQ ID NO: 428721
ugauuuccggauagcuggg

SEQ ID NO: 428723 - RNA, 19 nt, Artificial Sequence
  Description of Artificial Sequence: Synthetic oligonucleotide
  Sense strand starting at position 1482 of SEQ ID NO: 316638
ucuugcugacauuggauau

SEQ ID NO: 428724 - RNA, 19 nt, Artificial Sequence
  Description of Artificial Sequence: Synthetic oligonucleotide
  Antisense Strand to SEQ ID NO: 428723
auauccaaugucagcaaga

SEQ ID NO: 428725 - RNA, 19 nt, Artificial Sequence
  Description of Artificial Sequence: Synthetic oligonucleotide
  Sense strand starting at position 2141 of SEQ ID NO: 316638
gcguguguacaucucuacu

SEQ ID NO: 428726 - RNA, 19 nt, Artificial Sequence
  Description of Artificial Sequence: Synthetic oligonucleotide
  Antisense Strand to SEQ ID NO: 428725
aguagagauguacacacgc

SEQ ID NO: 428727 - RNA, 19 nt, Artificial Sequence
  Description of Artificial Sequence: Synthetic oligonucleotide
  Sense strand starting at position 2264 of SEQ ID NO: 316638
aaguuugggcaagagaagu

SEQ ID NO: 428728 - RNA, 19 nt, Artificial Sequence
  Description of Artificial Sequence: Synthetic oligonucleotide
  Antisense Strand to SEQ ID NO: 428727
acuucucuugcccaaacuu

SEQ ID NO: 428729 - RNA, 19 nt, Artificial Sequence
  Description of Artificial Sequence: Synthetic oligonucleotide
  Sense strand starting at position 2307 of SEQ ID NO: 316638
ggaugacuaugguuucuaa

SEQ ID NO: 428730 - RNA, 19 nt, Artificial Sequence
  Description of Artificial Sequence: Synthetic oligonucleotide
  Antisense Strand to SEQ ID NO: 428729
uuagaaaccauagucaucc

SEQ ID NO: 428731 - RNA, 19 nt, Artificial Sequence
  Description of Artificial Sequence: Synthetic oligonucleotide
  Sense strand starting at position 2310 of SEQ ID NO: 316638
ugacuaugguuucuaagua

SEQ ID NO: 428732 - RNA, 19 nt, Artificial Sequence
  Description of Artificial Sequence: Synthetic oligonucleotide
  Antisense Strand to SEQ ID NO: 428731
uacuuagaaaccauaguca

SEQ ID NO: 428733 - RNA, 19 nt, Artificial Sequence
  Description of Artificial Sequence: Synthetic oligonucleotide
  Sense strand starting at position 2334 of SEQ ID NO: 316638
gguguagaaaguuaaguga

SEQ ID NO: 428734 - RNA, 19 nt, Artificial Sequence
  Description of Artificial Sequence: Synthetic oligonucleotide
  Antisense Strand to SEQ ID NO: 428733
ucacuuaacuuucuacacc

SEQ ID NO: 428735 - RNA, 19 nt, Artificial Sequence
  Description of Artificial Sequence: Synthetic oligonucleotide
  Sense strand starting at position 2337 of SEQ ID NO: 316638
guagaaaguuaagugaaac

SEQ ID NO: 428736 - RNA, 19 nt, Artificial Sequence
  Description of Artificial Sequence: Synthetic oligonucleotide
  Antisense Strand to SEQ ID NO: 428735
guuucacuuaacuuucuac

SEQ ID NO: 428737 - RNA, 19 nt, Artificial Sequence
  Description of Artificial Sequence: Synthetic oligonucleotide
  Sense strand starting at position 2360 of SEQ ID NO: 316638
ugugucugcacuuagagaa

SEQ ID NO: 428738 - RNA, 19 nt, Artificial Sequence
  Description of Artificial Sequence: Synthetic oligonucleotide
  Antisense Strand to SEQ ID NO: 428737
uucucuaagugcagacaca

SEQ ID NO: 428739 - RNA, 19 nt, Artificial Sequence
  Description of Artificial Sequence: Synthetic oligonucleotide
  Sense strand starting at position 2506 of SEQ ID NO: 316638
uaucgaaugccagaggguu

SEQ ID NO: 428740 - RNA, 19 nt, Artificial Sequence
  Description of Artificial Sequence: Synthetic oligonucleotide
  Antisense Strand to SEQ ID NO: 428739
aacccucuggcauucgaua

SEQ ID NO: 428741 - RNA, 19 nt, Artificial Sequence
  Description of Artificial Sequence: Synthetic oligonucleotide
  Sense strand starting at position 2626 of SEQ ID NO: 316638
gaucuauuauuugauagga

SEQ ID NO: 428742 - RNA, 19 nt, Artificial Sequence
  Description of Artificial Sequence: Synthetic oligonucleotide
  Antisense Strand to SEQ ID NO: 428741
uccuaucaaauaauagauc

SEQ ID NO: 428743 - RNA, 19 nt, Artificial Sequence
  Description of Artificial Sequence: Synthetic oligonucleotide
  Sense strand starting at position 2628 of SEQ ID NO: 316638
ucuauuauuugauaggaga

SEQ ID NO: 428744 - RNA, 19 nt, Artificial Sequence
  Description of Artificial Sequence: Synthetic oligonucleotide
  Antisense Strand to SEQ ID NO: 428743
ucuccuaucaaauaauaga

SEQ ID NO: 428745 - RNA, 19 nt, Artificial Sequence
  Description of Artificial Sequence: Synthetic oligonucleotide
  Sense strand starting at position 2639 of SEQ ID NO: 316638
auaggagaauguccaguau

SEQ ID NO: 428746 - RNA, 19 nt, Artificial Sequence
  Description of Artificial Sequence: Synthetic oligonucleotide
  Antisense Strand to SEQ ID NO: 428745
auacuggacauucuccuau

SEQ ID NO: 428747 - RNA, 19 nt, Artificial Sequence
  Description of Artificial Sequence: Synthetic oligonucleotide
  Sense strand starting at position 2647 of SEQ ID NO: 316638
auguccaguauagauguua

SEQ ID NO: 428748 - RNA, 19 nt, Artificial Sequence
  Description of Artificial Sequence: Synthetic oligonucleotide
  Antisense Strand to SEQ ID NO: 428747
uaacaucuauacuggacau

SEQ ID NO: 428749 - RNA, 19 nt, Artificial Sequence
  Description of Artificial Sequence: Synthetic oligonucleotide
  Sense strand starting at position 2672 of SEQ ID NO: 316638
acaguagauggucagcaua

SEQ ID NO: 428750 - RNA, 19 nt, Artificial Sequence
  Description of Artificial Sequence: Synthetic oligonucleotide
  Antisense Strand to SEQ ID NO: 428749
uaugcugaccaucuacugu

SEQ ID NO: 428751 - RNA, 19 nt, Artificial Sequence
  Description of Artificial Sequence: Synthetic oligonucleotide
  Sense strand starting at position 2698 of SEQ ID NO: 316638
accagauggucagcauacu

SEQ ID NO: 428752 - RNA, 19 nt, Artificial Sequence
  Description of Artificial Sequence: Synthetic oligonucleotide
  Antisense Strand to SEQ ID NO: 428751
aguaugcugaccaucuggu

SEQ ID NO: 428753 - RNA, 19 nt, Artificial Sequence
  Description of Artificial Sequence: Synthetic oligonucleotide
  Sense strand starting at position 2766 of SEQ ID NO: 316638
uguuaagugauccagugaa

SEQ ID NO: 428754 - RNA, 19 nt, Artificial Sequence
  Description of Artificial Sequence: Synthetic oligonucleotide
  Antisense Strand to SEQ ID NO: 428753
uucacuggaucacuuaaca

SEQ ID NO: 428755 - RNA, 19 nt, Artificial Sequence
  Description of Artificial Sequence: Synthetic oligonucleotide
  Sense strand starting at position 3070 of SEQ ID NO: 316638
guugauuuggcuugugagu

SEQ ID NO: 428756 - RNA, 19 nt, Artificial Sequence
  Description of Artificial Sequence: Synthetic oligonucleotide
  Antisense Strand to SEQ ID NO: 428755
acucacaagccaaaucaac

SEQ ID NO: 428757 - RNA, 19 nt, Artificial Sequence
  Description of Artificial Sequence: Synthetic oligonucleotide
  Sense strand starting at position 3113 of SEQ ID NO: 316638
gcugaagaacuccaguaug

SEQ ID NO: 428758 - RNA, 19 nt, Artificial Sequence
  Description of Artificial Sequence: Synthetic oligonucleotide
  Antisense Strand to SEQ ID NO: 428757
cauacuggaguucuucagc

SEQ ID NO: 428759 - RNA, 19 nt, Artificial Sequence
  Description of Artificial Sequence: Synthetic oligonucleotide
  Sense strand starting at position 3116 of SEQ ID NO: 316638
gaagaacuccaguauguuu

SEQ ID NO: 428760 - RNA, 19 nt, Artificial Sequence
  Description of Artificial Sequence: Synthetic oligonucleotide
  Antisense Strand to SEQ ID NO: 428759
aaacauacuggaguucuuc

SEQ ID NO: 428761 - RNA, 19 nt, Artificial Sequence
  Description of Artificial Sequence: Synthetic oligonucleotide
  Sense strand starting at position 3171 of SEQ ID NO: 316638
aaggacagguauucuuagu

SEQ ID NO: 428762 - RNA, 19 nt, Artificial Sequence
  Description of Artificial Sequence: Synthetic oligonucleotide
  Antisense Strand to SEQ ID NO: 428761
acuaagaauaccuguccuu

SEQ ID NO: 428763 - RNA, 19 nt, Artificial Sequence
  Description of Artificial Sequence: Synthetic oligonucleotide
  Sense strand starting at position 3358 of SEQ ID NO: 316638
ucaugugaggcuuaauauc

SEQ ID NO: 428764 - RNA, 19 nt, Artificial Sequence
  Description of Artificial Sequence: Synthetic oligonucleotide
  Antisense Strand to SEQ ID NO: 428763
gauauuaagccucacauga

SEQ ID NO: 428765 - RNA, 19 nt, Artificial Sequence
  Description of Artificial Sequence: Synthetic oligonucleotide
  Sense strand starting at position 3736 of SEQ ID NO: 316638
gaauaugggcuuuggaauu

SEQ ID NO: 428766 - RNA, 19 nt, Artificial Sequence
  Description of Artificial Sequence: Synthetic oligonucleotide
  Antisense Strand to SEQ ID NO: 428765
aauuccaaagcccauauuc

SEQ ID NO: 428767 - RNA, 19 nt, Artificial Sequence
  Description of Artificial Sequence: Synthetic oligonucleotide
  Sense strand starting at position 3750 of SEQ ID NO: 316638
gaauuagagucacuugguu

SEQ ID NO: 428768 - RNA, 19 nt, Artificial Sequence
  Description of Artificial Sequence: Synthetic oligonucleotide
  Antisense Strand to SEQ ID NO: 428767
aaccaagugacucuaauuc

SEQ ID NO: 428769 - RNA, 19 nt, Artificial Sequence
  Description of Artificial Sequence: Synthetic oligonucleotide
  Sense strand starting at position 3777 of SEQ ID NO: 316638
ggagccuugcuugaauaug

SEQ ID NO: 428770 - RNA, 19 nt, Artificial Sequence
  Description of Artificial Sequence: Synthetic oligonucleotide
  Antisense Strand to SEQ ID NO: 428769
cauauucaagcaaggcucc

SEQ ID NO: 428771 - RNA, 19 nt, Artificial Sequence
  Description of Artificial Sequence: Synthetic oligonucleotide
  Sense strand starting at position 3876 of SEQ ID NO: 316638
gucagaaagcacugaagua

SEQ ID NO: 428772 - RNA, 19 nt, Artificial Sequence
  Description of Artificial Sequence: Synthetic oligonucleotide
  Antisense Strand to SEQ ID NO: 428771
uacuucagugcuuucugac

SEQ ID NO: 428773 - RNA, 19 nt, Artificial Sequence
  Description of Artificial Sequence: Synthetic oligonucleotide
  Sense strand starting at position 3917 of SEQ ID NO: 316638
agcagaugucauuauuauu

SEQ ID NO: 428774 - RNA, 19 nt, Artificial Sequence
  Description of Artificial Sequence: Synthetic oligonucleotide
  Antisense Strand to SEQ ID NO: 428773
aauaauaaugacaucugcu

SEQ ID NO: 428775 - RNA, 19 nt, Artificial Sequence
  Description of Artificial Sequence: Synthetic oligonucleotide
  Sense strand starting at position 12 of SEQ ID NO: 316639
ggcuaccucgaagaaauau

SEQ ID NO: 428776 - RNA, 19 nt, Artificial Sequence
  Description of Artificial Sequence: Synthetic oligonucleotide
  Antisense Strand to SEQ ID NO: 428775
auauuucuucgagguagcc

SEQ ID NO: 428777 - RNA, 19 nt, Artificial Sequence
  Description of Artificial Sequence: Synthetic oligonucleotide
  Sense strand starting at position 48 of SEQ ID NO: 316639
cucuauauagcagauguca

SEQ ID NO: 428778 - RNA, 19 nt, Artificial Sequence
  Description of Artificial Sequence: Synthetic oligonucleotide
  Antisense Strand to SEQ ID NO: 428777
ugacaucugcuauauagag

SEQ ID NO: 428779 - RNA, 19 nt, Artificial Sequence
  Description of Artificial Sequence: Synthetic oligonucleotide
  Sense strand starting at position 56 of SEQ ID NO: 316639
agcagaugucaucacagca

SEQ ID NO: 428780 - RNA, 19 nt, Artificial Sequence
  Description of Artificial Sequence: Synthetic oligonucleotide
  Antisense Strand to SEQ ID NO: 428779
ugcugugaugacaucugcu

SEQ ID NO: 428781 - RNA, 19 nt, Artificial Sequence
  Description of Artificial Sequence: Synthetic oligonucleotide
  Sense strand starting at position 61 of SEQ ID NO: 316639
augucaucacagcacuauu

SEQ ID NO: 428782 - RNA, 19 nt, Artificial Sequence
  Description of Artificial Sequence: Synthetic oligonucleotide
  Antisense Strand to SEQ ID NO: 428781
aauagugcugugaugacau

SEQ ID NO: 428783 - RNA, 19 nt, Artificial Sequence
  Description of Artificial Sequence: Synthetic oligonucleotide
  Sense strand starting at position 128 of SEQ ID NO: 316639
gugcuaaaugcagaaauua

SEQ ID NO: 428784 - RNA, 19 nt, Artificial Sequence
  Description of Artificial Sequence: Synthetic oligonucleotide
  Antisense Strand to SEQ ID NO: 428783
uaauuucugcauuuagcac

SEQ ID NO: 428785 - RNA, 19 nt, Artificial Sequence
  Description of Artificial Sequence: Synthetic oligonucleotide
  Sense strand starting at position 353 of SEQ ID NO: 316639
cuagaauaaucauugguau

SEQ ID NO: 428786 - RNA, 19 nt, Artificial Sequence
  Description of Artificial Sequence: Synthetic oligonucleotide
  Antisense Strand to SEQ ID NO: 428785
auaccaaugauuauucuag

SEQ ID NO: 428787 - RNA, 19 nt, Artificial Sequence
  Description of Artificial Sequence: Synthetic oligonucleotide
  Sense strand starting at position 354 of SEQ ID NO: 316639
uagaauaaucauugguaug

SEQ ID NO: 428788 - RNA, 19 nt, Artificial Sequence
  Description of Artificial Sequence: Synthetic oligonucleotide
  Antisense Strand to SEQ ID NO: 428787
cauaccaaugauuauucua

SEQ ID NO: 428789 - RNA, 19 nt, Artificial Sequence
  Description of Artificial Sequence: Synthetic oligonucleotide
  Sense strand starting at position 359 of SEQ ID NO: 316639
uaaucauugguaugggaug

SEQ ID NO: 428790 - RNA, 19 nt, Artificial Sequence
  Description of Artificial Sequence: Synthetic oligonucleotide
  Antisense Strand to SEQ ID NO: 428789
caucccauaccaaugauua

SEQ ID NO: 428791 - RNA, 19 nt, Artificial Sequence
  Description of Artificial Sequence: Synthetic oligonucleotide
  Sense strand starting at position 364 of SEQ ID NO: 316639
auugguaugggaugaauug

SEQ ID NO: 428792 - RNA, 19 nt, Artificial Sequence
  Description of Artificial Sequence: Synthetic oligonucleotide
  Antisense Strand to SEQ ID NO: 428791
caauucaucccauaccaau

SEQ ID NO: 428793 - RNA, 19 nt, Artificial Sequence
  Description of Artificial Sequence: Synthetic oligonucleotide
  Sense strand starting at position 483 of SEQ ID NO: 316639
ugugguaaucaggguggaa

SEQ ID NO: 428794 - RNA, 19 nt, Artificial Sequence
  Description of Artificial Sequence: Synthetic oligonucleotide
  Antisense Strand to SEQ ID NO: 428793
uuccacccugauuaccaca

SEQ ID NO: 428795 - RNA, 19 nt, Artificial Sequence
  Description of Artificial Sequence: Synthetic oligonucleotide
  Sense strand starting at position 992 of SEQ ID NO: 316639
ucagaaauguucuuacagu

SEQ ID NO: 428796 - RNA, 19 nt, Artificial Sequence
  Description of Artificial Sequence: Synthetic oligonucleotide
  Antisense Strand to SEQ ID NO: 428795
acuguaagaacauuucuga

SEQ ID NO: 428797 - RNA, 19 nt, Artificial Sequence
  Description of Artificial Sequence: Synthetic oligonucleotide
  Sense strand starting at position 998 of SEQ ID NO: 316639
auguucuuacaguggauga

SEQ ID NO: 428798 - RNA, 19 nt, Artificial Sequence
  Description of Artificial Sequence: Synthetic oligonucleotide
  Antisense Strand to SEQ ID NO: 428797
ucauccacuguaagaacau

SEQ ID NO: 428799 - RNA, 19 nt, Artificial Sequence
  Description of Artificial Sequence: Synthetic oligonucleotide
  Sense strand starting at position 999 of SEQ ID NO: 316639
uguucuuacaguggaugaa

SEQ ID NO: 428800 - RNA, 19 nt, Artificial Sequence
  Description of Artificial Sequence: Synthetic oligonucleotide
  Antisense Strand to SEQ ID NO: 428799
uucauccacuguaagaaca

SEQ ID NO: 428801 - RNA, 19 nt, Artificial Sequence
  Description of Artificial Sequence: Synthetic oligonucleotide
  Sense strand starting at position 1000 of SEQ ID NO: 316639
guucuuacaguggaugaau

SEQ ID NO: 428802 - RNA, 19 nt, Artificial Sequence
  Description of Artificial Sequence: Synthetic oligonucleotide
  Antisense Strand to SEQ ID NO: 428801
auucauccacuguaagaac

SEQ ID NO: 428803 - RNA, 19 nt, Artificial Sequence
  Description of Artificial Sequence: Synthetic oligonucleotide
  Sense strand starting at position 1111 of SEQ ID NO: 316639
cauuaauauccauggguag

SEQ ID NO: 428804 - RNA, 19 nt, Artificial Sequence
  Description of Artificial Sequence: Synthetic oligonucleotide
  Antisense Strand to SEQ ID NO: 428803
cuacccauggauauuaaug

SEQ ID NO: 428805 - RNA, 19 nt, Artificial Sequence
  Description of Artificial Sequence: Synthetic oligonucleotide
  Sense strand starting at position 1112 of SEQ ID NO: 316639
auuaauauccauggguaga

SEQ ID NO: 428806 - RNA, 19 nt, Artificial Sequence
  Description of Artificial Sequence: Synthetic oligonucleotide
  Antisense Strand to SEQ ID NO: 428805
ucuacccauggauauuaau

SEQ ID NO: 428807 - RNA, 19 nt, Artificial Sequence
  Description of Artificial Sequence: Synthetic oligonucleotide
  Sense strand starting at position 1114 of SEQ ID NO: 316639
uaauauccauggguagagu

SEQ ID NO: 428808 - RNA, 19 nt, Artificial Sequence
  Description of Artificial Sequence: Synthetic oligonucleotide
  Antisense Strand to SEQ ID NO: 428807
acucuacccauggauauua

SEQ ID NO: 428809 - RNA, 19 nt, Artificial Sequence
  Description of Artificial Sequence: Synthetic oligonucleotide
  Sense strand starting at position 1258 of SEQ ID NO: 316639
aucauagagucuccugacu

SEQ ID NO: 428810 - RNA, 19 nt, Artificial Sequence
  Description of Artificial Sequence: Synthetic oligonucleotide
  Antisense Strand to SEQ ID NO: 428809
agucaggagacucuaugau

SEQ ID NO: 428811 - RNA, 19 nt, Artificial Sequence
  Description of Artificial Sequence: Synthetic oligonucleotide
  Sense strand starting at position 1661 of SEQ ID NO: 316639
aggaacguuucuuccaaca

SEQ ID NO: 428812 - RNA, 19 nt, Artificial Sequence
  Description of Artificial Sequence: Synthetic oligonucleotide
  Antisense Strand to SEQ ID NO: 428811
uguuggaagaaacguuccu

SEQ ID NO: 428813 - RNA, 19 nt, Artificial Sequence
  Description of Artificial Sequence: Synthetic oligonucleotide
  Sense strand starting at position 1736 of SEQ ID NO: 316639
uacugagacgauugaagug

SEQ ID NO: 428814 - RNA, 19 nt, Artificial Sequence
  Description of Artificial Sequence: Synthetic oligonucleotide
  Antisense Strand to SEQ ID NO: 428813
cacuucaaucgucucagua

SEQ ID NO: 428815 - RNA, 19 nt, Artificial Sequence
  Description of Artificial Sequence: Synthetic oligonucleotide
  Sense strand starting at position 1751 of SEQ ID NO: 316639
aguguccuuguggaaacau

SEQ ID NO: 428816 - RNA, 19 nt, Artificial Sequence
  Description of Artificial Sequence: Synthetic oligonucleotide
  Antisense Strand to SEQ ID NO: 428815
auguuuccacaaggacacu

SEQ ID NO: 428817 - RNA, 19 nt, Artificial Sequence
  Description of Artificial Sequence: Synthetic oligonucleotide
  Sense strand starting at position 1790 of SEQ ID NO: 316639
cccagcuauccggaaauca

SEQ ID NO: 428818 - RNA, 19 nt, Artificial Sequence
  Description of Artificial Sequence: Synthetic oligonucleotide
  Antisense Strand to SEQ ID NO: 428817
ugauuuccggauagcuggg

SEQ ID NO: 428819 - RNA, 19 nt, Artificial Sequence
  Description of Artificial Sequence: Synthetic oligonucleotide
  Sense strand starting at position 2517 of SEQ ID NO: 316639
gcguguguacaucucuacu

SEQ ID NO: 428820 - RNA, 19 nt, Artificial Sequence
  Description of Artificial Sequence: Synthetic oligonucleotide
  Antisense Strand to SEQ ID NO: 428819
aguagagauguacacacgc

SEQ ID NO: 428821 - RNA, 19 nt, Artificial Sequence
  Description of Artificial Sequence: Synthetic oligonucleotide
  Sense strand starting at position 2640 of SEQ ID NO: 316639
aaguuugggcaagagaagu

SEQ ID NO: 428822 - RNA, 19 nt, Artificial Sequence
  Description of Artificial Sequence: Synthetic oligonucleotide
  Antisense Strand to SEQ ID NO: 428821
acuucucuugcccaaacuu

SEQ ID NO: 428823 - RNA, 19 nt, Artificial Sequence
  Description of Artificial Sequence: Synthetic oligonucleotide
  Sense strand starting at position 2683 of SEQ ID NO: 316639
ggaugacuaugguuucuaa

SEQ ID NO: 428824 - RNA, 19 nt, Artificial Sequence
  Description of Artificial Sequence: Synthetic oligonucleotide
  Antisense Strand to SEQ ID NO: 428823
uuagaaaccauagucaucc

SEQ ID NO: 428825 - RNA, 19 nt, Artificial Sequence
  Description of Artificial Sequence: Synthetic oligonucleotide
  Sense strand starting at position 2710 of SEQ ID NO: 316639
gguguagaaaguuaaguga

SEQ ID NO: 428826 - RNA, 19 nt, Artificial Sequence
  Description of Artificial Sequence: Synthetic oligonucleotide
  Antisense Strand to SEQ ID NO: 428825
ucacuuaacuuucuacacc

SEQ ID NO: 428827 - RNA, 19 nt, Artificial Sequence
  Description of Artificial Sequence: Synthetic oligonucleotide
  Sense strand starting at position 2713 of SEQ ID NO: 316639
guagaaaguuaagugaaac

SEQ ID NO: 428828 - RNA, 19 nt, Artificial Sequence
  Description of Artificial Sequence: Synthetic oligonucleotide
  Antisense Strand to SEQ ID NO: 428827
guuucacuuaacuuucuac

SEQ ID NO: 428829 - RNA, 19 nt, Artificial Sequence
  Description of Artificial Sequence: Synthetic oligonucleotide
  Sense strand starting at position 2736 of SEQ ID NO: 316639
ugugucugcacuuagagaa

SEQ ID NO: 428830 - RNA, 19 nt, Artificial Sequence
  Description of Artificial Sequence: Synthetic oligonucleotide
  Antisense Strand to SEQ ID NO: 428829
uucucuaagugcagacaca

SEQ ID NO: 428831 - RNA, 19 nt, Artificial Sequence
  Description of Artificial Sequence: Synthetic oligonucleotide
  Sense strand starting at position 2882 of SEQ ID NO: 316639
uaucgaaugccagaggguu

SEQ ID NO: 428832 - RNA, 19 nt, Artificial Sequence
  Description of Artificial Sequence: Synthetic oligonucleotide
  Antisense Strand to SEQ ID NO: 428831
aacccucuggcauucgaua

SEQ ID NO: 428833 - RNA, 19 nt, Artificial Sequence
  Description of Artificial Sequence: Synthetic oligonucleotide
  Sense strand starting at position 3002 of SEQ ID NO: 316639
gaucuauuauuugauagga

SEQ ID NO: 428834 - RNA, 19 nt, Artificial Sequence
  Description of Artificial Sequence: Synthetic oligonucleotide
  Antisense Strand to SEQ ID NO: 428833
uccuaucaaauaauagauc

SEQ ID NO: 428835 - RNA, 19 nt, Artificial Sequence
  Description of Artificial Sequence: Synthetic oligonucleotide
  Sense strand starting at position 3004 of SEQ ID NO: 316639
ucuauuauuugauaggaga

SEQ ID NO: 428836 - RNA, 19 nt, Artificial Sequence
  Description of Artificial Sequence: Synthetic oligonucleotide
  Antisense Strand to SEQ ID NO: 428835
ucuccuaucaaauaauaga

SEQ ID NO: 428837 - RNA, 19 nt, Artificial Sequence
  Description of Artificial Sequence: Synthetic oligonucleotide
  Sense strand starting at position 3015 of SEQ ID NO: 316639
auaggagaauguccaguau

SEQ ID NO: 428838 - RNA, 19 nt, Artificial Sequence
  Description of Artificial Sequence: Synthetic oligonucleotide
  Antisense Strand to SEQ ID NO: 428837
auacuggacauucuccuau

SEQ ID NO: 428839 - RNA, 19 nt, Artificial Sequence
  Description of Artificial Sequence: Synthetic oligonucleotide
  Sense strand starting at position 3023 of SEQ ID NO: 316639
auguccaguauagauguua

SEQ ID NO: 428840 - RNA, 19 nt, Artificial Sequence
  Description of Artificial Sequence: Synthetic oligonucleotide
  Antisense Strand to SEQ ID NO: 428839
uaacaucuauacuggacau

SEQ ID NO: 428841 - RNA, 19 nt, Artificial Sequence
  Description of Artificial Sequence: Synthetic oligonucleotide
  Sense strand starting at position 3048 of SEQ ID NO: 316639
acaguagauggucagcaua

SEQ ID NO: 428842 - RNA, 19 nt, Artificial Sequence
  Description of Artificial Sequence: Synthetic oligonucleotide
  Antisense Strand to SEQ ID NO: 428841
uaugcugaccaucuacugu

SEQ ID NO: 428843 - RNA, 19 nt, Artificial Sequence
  Description of Artificial Sequence: Synthetic oligonucleotide
  Sense strand starting at position 3142 of SEQ ID NO: 316639
uguuaagugauccagugaa

SEQ ID NO: 428844 - RNA, 19 nt, Artificial Sequence
  Description of Artificial Sequence: Synthetic oligonucleotide
  Antisense Strand to SEQ ID NO: 428843
uucacuggaucacuuaaca

SEQ ID NO: 428845 - RNA, 19 nt, Artificial Sequence
  Description of Artificial Sequence: Synthetic oligonucleotide
  Sense strand starting at position 3446 of SEQ ID NO: 316639
guugauuuggcuugugagu

SEQ ID NO: 428846 - RNA, 19 nt, Artificial Sequence
  Description of Artificial Sequence: Synthetic oligonucleotide
  Antisense Strand to SEQ ID NO: 428845
acucacaagccaaaucaac

SEQ ID NO: 428847 - RNA, 19 nt, Artificial Sequence
  Description of Artificial Sequence: Synthetic oligonucleotide
  Sense strand starting at position 3489 of SEQ ID NO: 316639
gcugaagaacuccaguaug

SEQ ID NO: 428848 - RNA, 19 nt, Artificial Sequence
  Description of Artificial Sequence: Synthetic oligonucleotide
  Antisense Strand to SEQ ID NO: 428847
cauacuggaguucuucagc

SEQ ID NO: 428849 - RNA, 19 nt, Artificial Sequence
  Description of Artificial Sequence: Synthetic oligonucleotide
  Sense strand starting at position 3492 of SEQ ID NO: 316639
gaagaacuccaguauguuu

SEQ ID NO: 428850 - RNA, 19 nt, Artificial Sequence
  Description of Artificial Sequence: Synthetic oligonucleotide
  Antisense Strand to SEQ ID NO: 428849
aaacauacuggaguucuuc

SEQ ID NO: 428851 - RNA, 19 nt, Artificial Sequence
  Description of Artificial Sequence: Synthetic oligonucleotide
  Sense strand starting at position 3547 of SEQ ID NO: 316639
aaggacagguauucuuagu

SEQ ID NO: 428852 - RNA, 19 nt, Artificial Sequence
  Description of Artificial Sequence: Synthetic oligonucleotide
  Antisense Strand to SEQ ID NO: 428851
acuaagaauaccuguccuu

SEQ ID NO: 428853 - RNA, 19 nt, Artificial Sequence
  Description of Artificial Sequence: Synthetic oligonucleotide
  Sense strand starting at position 3734 of SEQ ID NO: 316639
ucaugugaggcuuaauauc

SEQ ID NO: 428854 - RNA, 19 nt, Artificial Sequence
  Description of Artificial Sequence: Synthetic oligonucleotide
  Antisense Strand to SEQ ID NO: 428853
gauauuaagccucacauga

SEQ ID NO: 428855 - RNA, 19 nt, Artificial Sequence
  Description of Artificial Sequence: Synthetic oligonucleotide
  Sense strand starting at position 2664 of SEQ ID NO: 316640
cugcgaucggcuuccaacu

SEQ ID NO: 428856 - RNA, 19 nt, Artificial Sequence
  Description of Artificial Sequence: Synthetic oligonucleotide
  Antisense Strand to SEQ ID NO: 428855
aguuggaagccgaucgcag

SEQ ID NO: 428857 - RNA, 19 nt, Artificial Sequence
  Description of Artificial Sequence: Synthetic oligonucleotide
  Sense strand starting at position 2903 of SEQ ID NO: 316640
uggugaguuccagaagcug

SEQ ID NO: 428858 - RNA, 19 nt, Artificial Sequence
  Description of Artificial Sequence: Synthetic oligonucleotide
  Antisense Strand to SEQ ID NO: 428857
cagcuucuggaacucacca

SEQ ID NO: 428859 - RNA, 19 nt, Artificial Sequence
  Description of Artificial Sequence: Synthetic oligonucleotide
  Sense strand starting at position 2917 of SEQ ID NO: 316640
agcugcucuuucuaagacu

SEQ ID NO: 428860 - RNA, 19 nt, Artificial Sequence
  Description of Artificial Sequence: Synthetic oligonucleotide
  Antisense Strand to SEQ ID NO: 428859
agucuuagaaagagcagcu

SEQ ID NO: 428861 - RNA, 19 nt, Artificial Sequence
  Description of Artificial Sequence: Synthetic oligonucleotide
  Sense strand starting at position 2920 of SEQ ID NO: 316640
ugcucuuucuaagacugga

SEQ ID NO: 428862 - RNA, 19 nt, Artificial Sequence
  Description of Artificial Sequence: Synthetic oligonucleotide
  Antisense Strand to SEQ ID NO: 428861
uccagucuuagaaagagca

SEQ ID NO: 428863 - RNA, 19 nt, Artificial Sequence
  Description of Artificial Sequence: Synthetic oligonucleotide
  Sense strand starting at position 3262 of SEQ ID NO: 316640
cacccauguuagcagugau

SEQ ID NO: 428864 - RNA, 19 nt, Artificial Sequence
  Description of Artificial Sequence: Synthetic oligonucleotide
  Antisense Strand to SEQ ID NO: 428863
aucacugcuaacaugggug

SEQ ID NO: 428865 - RNA, 19 nt, Artificial Sequence
  Description of Artificial Sequence: Synthetic oligonucleotide
  Sense strand starting at position 3265 of SEQ ID NO: 316640
ccauguuagcagugauuga

SEQ ID NO: 428866 - RNA, 19 nt, Artificial Sequence
  Description of Artificial Sequence: Synthetic oligonucleotide
  Antisense Strand to SEQ ID NO: 428865
ucaaucacugcuaacaugg

SEQ ID NO: 428867 - RNA, 19 nt, Artificial Sequence
  Description of Artificial Sequence: Synthetic oligonucleotide
  Sense strand starting at position 3269 of SEQ ID NO: 316640
guuagcagugauugaaguu

SEQ ID NO: 428868 - RNA, 19 nt, Artificial Sequence
  Description of Artificial Sequence: Synthetic oligonucleotide
  Antisense Strand to SEQ ID NO: 428867
aacuucaaucacugcuaac

SEQ ID NO: 428869 - RNA, 19 nt, Artificial Sequence
  Description of Artificial Sequence: Synthetic oligonucleotide
  Sense strand starting at position 3270 of SEQ ID NO: 316640
uuagcagugauugaaguuu

SEQ ID NO: 428870 - RNA, 19 nt, Artificial Sequence
  Description of Artificial Sequence: Synthetic oligonucleotide
  Antisense Strand to SEQ ID NO: 428869
aaacuucaaucacugcuaa

SEQ ID NO: 428871 - RNA, 19 nt, Artificial Sequence
  Description of Artificial Sequence: Synthetic oligonucleotide
  Sense strand starting at position 3276 of SEQ ID NO: 316640
gugauugaaguuuaauccu

SEQ ID NO: 428872 - RNA, 19 nt, Artificial Sequence
  Description of Artificial Sequence: Synthetic oligonucleotide
  Antisense Strand to SEQ ID NO: 428871
aggauuaaacuucaaucac

SEQ ID NO: 428873 - RNA, 19 nt, Artificial Sequence
  Description of Artificial Sequence: Synthetic oligonucleotide
  Sense strand starting at position 3282 of SEQ ID NO: 316640
gaaguuuaauccuuaggcu

SEQ ID NO: 428874 - RNA, 19 nt, Artificial Sequence
  Description of Artificial Sequence: Synthetic oligonucleotide
  Antisense Strand to SEQ ID NO: 428873
agccuaaggauuaaacuuc

SEQ ID NO: 428875 - RNA, 19 nt, Artificial Sequence
  Description of Artificial Sequence: Synthetic oligonucleotide
  Sense strand starting at position 3323 of SEQ ID NO: 316640
uggagagguguucaaaguc

SEQ ID NO: 428876 - RNA, 19 nt, Artificial Sequence
  Description of Artificial Sequence: Synthetic oligonucleotide
  Antisense Strand to SEQ ID NO: 428875
gacuuugaacaccucucca

SEQ ID NO: 428877 - RNA, 19 nt, Artificial Sequence
  Description of Artificial Sequence: Synthetic oligonucleotide
  Sense strand starting at position 3609 of SEQ ID NO: 316640
gccugacguuucucugcua

SEQ ID NO: 428878 - RNA, 19 nt, Artificial Sequence
  Description of Artificial Sequence: Synthetic oligonucleotide
  Antisense Strand to SEQ ID NO: 428877
uagcagagaaacgucaggc

SEQ ID NO: 428879 - RNA, 19 nt, Artificial Sequence
  Description of Artificial Sequence: Synthetic oligonucleotide
  Sense strand starting at position 3612 of SEQ ID NO: 316640
ugacguuucucugcuagga

SEQ ID NO: 428880 - RNA, 19 nt, Artificial Sequence
  Description of Artificial Sequence: Synthetic oligonucleotide
  Antisense Strand to SEQ ID NO: 428879
uccuagcagagaaacguca

SEQ ID NO: 428881 - RNA, 19 nt, Artificial Sequence
  Description of Artificial Sequence: Synthetic oligonucleotide
  Sense strand starting at position 3637 of SEQ ID NO: 316640
ggacgacccuucucccaaa

SEQ ID NO: 428882 - RNA, 19 nt, Artificial Sequence
  Description of Artificial Sequence: Synthetic oligonucleotide
  Antisense Strand to SEQ ID NO: 428881
uuugggagaagggucgucc

SEQ ID NO: 428883 - RNA, 19 nt, Artificial Sequence
  Description of Artificial Sequence: Synthetic oligonucleotide
  Sense strand starting at position 3932 of SEQ ID NO: 316640
gcaugucugucuccgcaga

SEQ ID NO: 428884 - RNA, 19 nt, Artificial Sequence
  Description of Artificial Sequence: Synthetic oligonucleotide
  Antisense Strand to SEQ ID NO: 428883
ucugcggagacagacaugc

SEQ ID NO: 428885 - RNA, 19 nt, Artificial Sequence
  Description of Artificial Sequence: Synthetic oligonucleotide
  Sense strand starting at position 3934 of SEQ ID NO: 316640
augucugucuccgcagaga

SEQ ID NO: 428886 - RNA, 19 nt, Artificial Sequence
  Description of Artificial Sequence: Synthetic oligonucleotide
  Antisense Strand to SEQ ID NO: 428885
ucucugcggagacagacau

SEQ ID NO: 428887 - RNA, 19 nt, Artificial Sequence
  Description of Artificial Sequence: Synthetic oligonucleotide
  Sense strand starting at position 67 of SEQ ID NO: 316641
caagcugugcuacaguuaa

SEQ ID NO: 428888 - RNA, 19 nt, Artificial Sequence
  Description of Artificial Sequence: Synthetic oligonucleotide
  Antisense Strand to SEQ ID NO: 428887
uuaacuguagcacagcuug

SEQ ID NO: 428889 - RNA, 19 nt, Artificial Sequence
  Description of Artificial Sequence: Synthetic oligonucleotide
  Sense strand starting at position 103 of SEQ ID NO: 316641
ccaaucuguccuggcagau

SEQ ID NO: 428890 - RNA, 19 nt, Artificial Sequence
  Description of Artificial Sequence: Synthetic oligonucleotide
  Antisense Strand to SEQ ID NO: 428889
aucugccaggacagauugg

SEQ ID NO: 428891 - RNA, 19 nt, Artificial Sequence
  Description of Artificial Sequence: Synthetic oligonucleotide
  Sense strand starting at position 107 of SEQ ID NO: 316641
ucuguccuggcagaucaua

SEQ ID NO: 428892 - RNA, 19 nt, Artificial Sequence
  Description of Artificial Sequence: Synthetic oligonucleotide
  Antisense Strand to SEQ ID NO: 428891
uaugaucugccaggacaga

SEQ ID NO: 428893 - RNA, 19 nt, Artificial Sequence
  Description of Artificial Sequence: Synthetic oligonucleotide
  Sense strand starting at position 115 of SEQ ID NO: 316641
ggcagaucauaagcucuua

SEQ ID NO: 428894 - RNA, 19 nt, Artificial Sequence
  Description of Artificial Sequence: Synthetic oligonucleotide
  Antisense Strand to SEQ ID NO: 428893
uaagagcuuaugaucugcc

SEQ ID NO: 428895 - RNA, 19 nt, Artificial Sequence
  Description of Artificial Sequence: Synthetic oligonucleotide
  Sense strand starting at position 312 of SEQ ID NO: 316641
gccacagcugcgguaauua

SEQ ID NO: 428896 - RNA, 19 nt, Artificial Sequence
  Description of Artificial Sequence: Synthetic oligonucleotide
  Antisense Strand to SEQ ID NO: 428895
uaauuaccgcagcuguggc

SEQ ID NO: 428897 - RNA, 19 nt, Artificial Sequence
  Description of Artificial Sequence: Synthetic oligonucleotide
  Sense strand starting at position 321 of SEQ ID NO: 316641
gcgguaauuagcucaguuu

SEQ ID NO: 428898 - RNA, 19 nt, Artificial Sequence
  Description of Artificial Sequence: Synthetic oligonucleotide
  Antisense Strand to SEQ ID NO: 428897
aaacugagcuaauuaccgc

SEQ ID NO: 428899 - RNA, 19 nt, Artificial Sequence
  Description of Artificial Sequence: Synthetic oligonucleotide
  Sense strand starting at position 339 of SEQ ID NO: 316641
uugucuuguaugccuguua

SEQ ID NO: 428900 - RNA, 19 nt, Artificial Sequence
  Description of Artificial Sequence: Synthetic oligonucleotide
  Antisense Strand to SEQ ID NO: 428899
uaacaggcauacaagacaa

SEQ ID NO: 428901 - RNA, 19 nt, Artificial Sequence
  Description of Artificial Sequence: Synthetic oligonucleotide
  Sense strand starting at position 344 of SEQ ID NO: 316641
uuguaugccuguuacuuaa

SEQ ID NO: 428902 - RNA, 19 nt, Artificial Sequence
  Description of Artificial Sequence: Synthetic oligonucleotide
  Antisense Strand to SEQ ID NO: 428901
uuaaguaacaggcauacaa

SEQ ID NO: 428903 - RNA, 19 nt, Artificial Sequence
  Description of Artificial Sequence: Synthetic oligonucleotide
  Sense strand starting at position 421 of SEQ ID NO: 316641
ugcuguuugucuccgggau

SEQ ID NO: 428904 - RNA, 19 nt, Artificial Sequence
  Description of Artificial Sequence: Synthetic oligonucleotide
  Antisense Strand to SEQ ID NO: 428903
aucccggagacaaacagca

SEQ ID NO: 428905 - RNA, 19 nt, Artificial Sequence
  Description of Artificial Sequence: Synthetic oligonucleotide
  Sense strand starting at position 422 of SEQ ID NO: 316641
gcuguuugucuccgggauc

SEQ ID NO: 428906 - RNA, 19 nt, Artificial Sequence
  Description of Artificial Sequence: Synthetic oligonucleotide
  Antisense Strand to SEQ ID NO: 428905
gaucccggagacaaacagc

SEQ ID NO: 428907 - RNA, 19 nt, Artificial Sequence
  Description of Artificial Sequence: Synthetic oligonucleotide
  Sense strand starting at position 425 of SEQ ID NO: 316641
guuugucuccgggaucuuu

SEQ ID NO: 428908 - RNA, 19 nt, Artificial Sequence
  Description of Artificial Sequence: Synthetic oligonucleotide
  Antisense Strand to SEQ ID NO: 428907
aaagaucccggagacaaac

SEQ ID NO: 428909 - RNA, 19 nt, Artificial Sequence
  Description of Artificial Sequence: Synthetic oligonucleotide
  Sense strand starting at position 479 of SEQ ID NO: 316641
uuugcuuccugggacauaa

SEQ ID NO: 428910 - RNA, 19 nt, Artificial Sequence
  Description of Artificial Sequence: Synthetic oligonucleotide
  Antisense Strand to SEQ ID NO: 428909
uuaugucccaggaagcaaa

SEQ ID NO: 428911 - RNA, 19 nt, Artificial Sequence
  Description of Artificial Sequence: Synthetic oligonucleotide
  Sense strand starting at position 547 of SEQ ID NO: 316641
uuucuuugguggcugagaa

SEQ ID NO: 428912 - RNA, 19 nt, Artificial Sequence
  Description of Artificial Sequence: Synthetic oligonucleotide
  Antisense Strand to SEQ ID NO: 428911
uucucagccaccaaagaaa

SEQ ID NO: 428913 - RNA, 19 nt, Artificial Sequence
  Description of Artificial Sequence: Synthetic oligonucleotide
  Sense strand starting at position 548 of SEQ ID NO: 316641
uucuuugguggcugagaaa

SEQ ID NO: 428914 - RNA, 19 nt, Artificial Sequence
  Description of Artificial Sequence: Synthetic oligonucleotide
  Antisense Strand to SEQ ID NO: 428913
uuucucagccaccaaagaa

SEQ ID NO: 428915 - RNA, 19 nt, Artificial Sequence
  Description of Artificial Sequence: Synthetic oligonucleotide
  Sense strand starting at position 551 of SEQ ID NO: 316641
uuugguggcugagaaauac

SEQ ID NO: 428916 - RNA, 19 nt, Artificial Sequence
  Description of Artificial Sequence: Synthetic oligonucleotide
  Antisense Strand to SEQ ID NO: 428915
guauuucucagccaccaaa

SEQ ID NO: 428917 - RNA, 19 nt, Artificial Sequence
  Description of Artificial Sequence: Synthetic oligonucleotide
  Sense strand starting at position 560 of SEQ ID NO: 316641
ugagaaauacagcgucuga

SEQ ID NO: 428918 - RNA, 19 nt, Artificial Sequence
  Description of Artificial Sequence: Synthetic oligonucleotide
  Antisense Strand to SEQ ID NO: 428917
ucagacgcuguauuucuca

SEQ ID NO: 428919 - RNA, 19 nt, Artificial Sequence
  Description of Artificial Sequence: Synthetic oligonucleotide
  Sense strand starting at position 704 of SEQ ID NO: 316641
ggaugcuccugcuugaaac

SEQ ID NO: 428920 - RNA, 19 nt, Artificial Sequence
  Description of Artificial Sequence: Synthetic oligonucleotide
  Antisense Strand to SEQ ID NO: 428919
guuucaagcaggagcaucc

SEQ ID NO: 428921 - RNA, 19 nt, Artificial Sequence
  Description of Artificial Sequence: Synthetic oligonucleotide
  Sense strand starting at position 735 of SEQ ID NO: 316641
ccgccaaauucuugggaga

SEQ ID NO: 428922 - RNA, 19 nt, Artificial Sequence
  Description of Artificial Sequence: Synthetic oligonucleotide
  Antisense Strand to SEQ ID NO: 428921
ucucccaagaauuuggcgg

SEQ ID NO: 428923 - RNA, 19 nt, Artificial Sequence
  Description of Artificial Sequence: Synthetic oligonucleotide
  Sense strand starting at position 736 of SEQ ID NO: 316641
cgccaaauucuugggagag

SEQ ID NO: 428924 - RNA, 19 nt, Artificial Sequence
  Description of Artificial Sequence: Synthetic oligonucleotide
  Antisense Strand to SEQ ID NO: 428923
cucucccaagaauuuggcg

SEQ ID NO: 428925 - RNA, 19 nt, Artificial Sequence
  Description of Artificial Sequence: Synthetic oligonucleotide
  Sense strand starting at position 737 of SEQ ID NO: 316641
gccaaauucuugggagagu

SEQ ID NO: 428926 - RNA, 19 nt, Artificial Sequence
  Description of Artificial Sequence: Synthetic oligonucleotide
  Antisense Strand to SEQ ID NO: 428925
acucucccaagaauuuggc

SEQ ID NO: 428927 - RNA, 19 nt, Artificial Sequence
  Description of Artificial Sequence: Synthetic oligonucleotide
  Sense strand starting at position 738 of SEQ ID NO: 316641
ccaaauucuugggagaguu

SEQ ID NO: 428928 - RNA, 19 nt, Artificial Sequence
  Description of Artificial Sequence: Synthetic oligonucleotide
  Antisense Strand to SEQ ID NO: 428927
aacucucccaagaauuugg

SEQ ID NO: 428929 - RNA, 19 nt, Artificial Sequence
  Description of Artificial Sequence: Synthetic oligonucleotide
  Sense strand starting at position 748 of SEQ ID NO: 316641
gggagaguuucuuccacuc

SEQ ID NO: 428930 - RNA, 19 nt, Artificial Sequence
  Description of Artificial Sequence: Synthetic oligonucleotide
  Antisense Strand to SEQ ID NO: 428929
gaguggaagaaacucuccc

SEQ ID NO: 428931 - RNA, 19 nt, Artificial Sequence
  Description of Artificial Sequence: Synthetic oligonucleotide
  Sense strand starting at position 773 of SEQ ID NO: 316641
cgcugagagcuacaaaguu

SEQ ID NO: 428932 - RNA, 19 nt, Artificial Sequence
  Description of Artificial Sequence: Synthetic oligonucleotide
  Antisense Strand to SEQ ID NO: 428931
aacuuuguagcucucagcg

SEQ ID NO: 428933 - RNA, 19 nt, Artificial Sequence
  Description of Artificial Sequence: Synthetic oligonucleotide
  Sense strand starting at position 821 of SEQ ID NO: 316641
ucccauuacuaacggaaga

SEQ ID NO: 428934 - RNA, 19 nt, Artificial Sequence
  Description of Artificial Sequence: Synthetic oligonucleotide
  Antisense Strand to SEQ ID NO: 428933
ucuuccguuaguaauggga

SEQ ID NO: 428935 - RNA, 19 nt, Artificial Sequence
  Description of Artificial Sequence: Synthetic oligonucleotide
  Sense strand starting at position 2141 of SEQ ID NO: 316641
aucaucgccuccuagaaua

SEQ ID NO: 428936 - RNA, 19 nt, Artificial Sequence
  Description of Artificial Sequence: Synthetic oligonucleotide
  Antisense Strand to SEQ ID NO: 428935
uauucuaggaggcgaugau

SEQ ID NO: 428937 - RNA, 19 nt, Artificial Sequence
  Description of Artificial Sequence: Synthetic oligonucleotide
  Sense strand starting at position 2242 of SEQ ID NO: 316641
gagagaaaggcuugcuuua

SEQ ID NO: 428938 - RNA, 19 nt, Artificial Sequence
  Description of Artificial Sequence: Synthetic oligonucleotide
  Antisense Strand to SEQ ID NO: 428937
uaaagcaagccuuucucuc

SEQ ID NO: 428939 - RNA, 19 nt, Artificial Sequence
  Description of Artificial Sequence: Synthetic oligonucleotide
  Sense strand starting at position 2244 of SEQ ID NO: 316641
gagaaaggcuugcuuuaca

SEQ ID NO: 428940 - RNA, 19 nt, Artificial Sequence
  Description of Artificial Sequence: Synthetic oligonucleotide
  Antisense Strand to SEQ ID NO: 428939
uguaaagcaagccuuucuc

SEQ ID NO: 428941 - RNA, 19 nt, Artificial Sequence
  Description of Artificial Sequence: Synthetic oligonucleotide
  Sense strand starting at position 2375 of SEQ ID NO: 316641
gggcguuaggagugaagua

SEQ ID NO: 428942 - RNA, 19 nt, Artificial Sequence
  Description of Artificial Sequence: Synthetic oligonucleotide
  Antisense Strand to SEQ ID NO: 428941
uacuucacuccuaacgccc

SEQ ID NO: 428943 - RNA, 19 nt, Artificial Sequence
  Description of Artificial Sequence: Synthetic oligonucleotide
  Sense strand starting at position 2709 of SEQ ID NO: 316641
ugaaguagaagcgaacuua

SEQ ID NO: 428944 - RNA, 19 nt, Artificial Sequence
  Description of Artificial Sequence: Synthetic oligonucleotide
  Antisense Strand to SEQ ID NO: 428943
uaaguucgcuucuacuuca

SEQ ID NO: 428945 - RNA, 19 nt, Artificial Sequence
  Description of Artificial Sequence: Synthetic oligonucleotide
  Sense strand starting at position 2753 of SEQ ID NO: 316641
aggaguaccugagaugucu

SEQ ID NO: 428946 - RNA, 19 nt, Artificial Sequence
  Description of Artificial Sequence: Synthetic oligonucleotide
  Antisense Strand to SEQ ID NO: 428945
agacaucucagguacuccu

SEQ ID NO: 428947 - RNA, 19 nt, Artificial Sequence
  Description of Artificial Sequence: Synthetic oligonucleotide
  Sense strand starting at position 2761 of SEQ ID NO: 316641
cugagaugucucugcaucu

SEQ ID NO: 428948 - RNA, 19 nt, Artificial Sequence
  Description of Artificial Sequence: Synthetic oligonucleotide
  Antisense Strand to SEQ ID NO: 428947
agaugcagagacaucucag

SEQ ID NO: 428949 - RNA, 19 nt, Artificial Sequence
  Description of Artificial Sequence: Synthetic oligonucleotide
  Sense strand starting at position 2778 of SEQ ID NO: 316641
cucuuuaaggccugauaaa

SEQ ID NO: 428950 - RNA, 19 nt, Artificial Sequence
  Description of Artificial Sequence: Synthetic oligonucleotide
  Antisense Strand to SEQ ID NO: 428949
uuuaucaggccuuaaagag

SEQ ID NO: 428951 - RNA, 19 nt, Artificial Sequence
  Description of Artificial Sequence: Synthetic oligonucleotide
  Sense strand starting at position 3056 of SEQ ID NO: 316641
auuugagcuuccugcauca

SEQ ID NO: 428952 - RNA, 19 nt, Artificial Sequence
  Description of Artificial Sequence: Synthetic oligonucleotide
  Antisense Strand to SEQ ID NO: 428951
ugaugcaggaagcucaaau

SEQ ID NO: 428953 - RNA, 19 nt, Artificial Sequence
  Description of Artificial Sequence: Synthetic oligonucleotide
  Sense strand starting at position 3366 of SEQ ID NO: 316641
aacagagugcuuuaucagu

SEQ ID NO: 428954 - RNA, 19 nt, Artificial Sequence
  Description of Artificial Sequence: Synthetic oligonucleotide
  Antisense Strand to SEQ ID NO: 428953
acugauaaagcacucuguu

SEQ ID NO: 428955 - RNA, 19 nt, Artificial Sequence
  Description of Artificial Sequence: Synthetic oligonucleotide
  Sense strand starting at position 3400 of SEQ ID NO: 316641
uccacauucuugugauucu

SEQ ID NO: 428956 - RNA, 19 nt, Artificial Sequence
  Description of Artificial Sequence: Synthetic oligonucleotide
  Antisense Strand to SEQ ID NO: 428955
agaaucacaagaaugugga

SEQ ID NO: 428957 - RNA, 19 nt, Artificial Sequence
  Description of Artificial Sequence: Synthetic oligonucleotide
  Sense strand starting at position 3407 of SEQ ID NO: 316641
ucuugugauucucaguaaa

SEQ ID NO: 428958 - RNA, 19 nt, Artificial Sequence
  Description of Artificial Sequence: Synthetic oligonucleotide
  Antisense Strand to SEQ ID NO: 428957
uuuacugagaaucacaaga

SEQ ID NO: 428959 - RNA, 19 nt, Artificial Sequence
  Description of Artificial Sequence: Synthetic oligonucleotide
  Sense strand starting at position 3409 of SEQ ID NO: 316641
uugugauucucaguaaaca

SEQ ID NO: 428960 - RNA, 19 nt, Artificial Sequence
  Description of Artificial Sequence: Synthetic oligonucleotide
  Antisense Strand to SEQ ID NO: 428959
uguuuacugagaaucacaa

SEQ ID NO: 428961 - RNA, 19 nt, Artificial Sequence
  Description of Artificial Sequence: Synthetic oligonucleotide
  Sense strand starting at position 3410 of SEQ ID NO: 316641
ugugauucucaguaaacag

SEQ ID NO: 428962 - RNA, 19 nt, Artificial Sequence
  Description of Artificial Sequence: Synthetic oligonucleotide
  Antisense Strand to SEQ ID NO: 428961
cuguuuacugagaaucaca

SEQ ID NO: 428963 - RNA, 19 nt, Artificial Sequence
  Description of Artificial Sequence: Synthetic oligonucleotide
  Sense strand starting at position 3860 of SEQ ID NO: 316641
gcgagacucuaucacaagu

SEQ ID NO: 428964 - RNA, 19 nt, Artificial Sequence
  Description of Artificial Sequence: Synthetic oligonucleotide
  Antisense Strand to SEQ ID NO: 428963
acuugugauagagucucgc

SEQ ID NO: 428965 - RNA, 19 nt, Artificial Sequence
  Description of Artificial Sequence: Synthetic oligonucleotide
  Sense strand starting at position 3896 of SEQ ID NO: 316641
gugugaccucucuaaggca

SEQ ID NO: 428966 - RNA, 19 nt, Artificial Sequence
  Description of Artificial Sequence: Synthetic oligonucleotide
  Antisense Strand to SEQ ID NO: 428965
ugccuuagagaggucacac

SEQ ID NO: 428967 - RNA, 19 nt, Artificial Sequence
  Description of Artificial Sequence: Synthetic oligonucleotide
  Sense strand starting at position 425 of SEQ ID NO: 316642
acuagacucuggguccaaa

SEQ ID NO: 428968 - RNA, 19 nt, Artificial Sequence
  Description of Artificial Sequence: Synthetic oligonucleotide
  Antisense Strand to SEQ ID NO: 428967
uuuggacccagagucuagu

SEQ ID NO: 428969 - RNA, 19 nt, Artificial Sequence
  Description of Artificial Sequence: Synthetic oligonucleotide
  Sense strand starting at position 488 of SEQ ID NO: 316642
gcaggucugagagagguaa

SEQ ID NO: 428970 - RNA, 19 nt, Artificial Sequence
  Description of Artificial Sequence: Synthetic oligonucleotide
  Antisense Strand to SEQ ID NO: 428969
uuaccucucucagaccugc

SEQ ID NO: 428971 - RNA, 19 nt, Artificial Sequence
  Description of Artificial Sequence: Synthetic oligonucleotide
  Sense strand starting at position 538 of SEQ ID NO: 316642
acgaccuugcucugaaaua

SEQ ID NO: 428972 - RNA, 19 nt, Artificial Sequence
  Description of Artificial Sequence: Synthetic oligonucleotide
  Antisense Strand to SEQ ID NO: 428971
uauuucagagcaaggucgu

SEQ ID NO: 428973 - RNA, 19 nt, Artificial Sequence
  Description of Artificial Sequence: Synthetic oligonucleotide
  Sense strand starting at position 603 of SEQ ID NO: 316642
cguuucugugcuucaguuu

SEQ ID NO: 428974 - RNA, 19 nt, Artificial Sequence
  Description of Artificial Sequence: Synthetic oligonucleotide
  Antisense Strand to SEQ ID NO: 428973
aaacugaagcacagaaacg

SEQ ID NO: 428975 - RNA, 19 nt, Artificial Sequence
  Description of Artificial Sequence: Synthetic oligonucleotide
  Sense strand starting at position 640 of SEQ ID NO: 316642
gcaacugucccagggaaca

SEQ ID NO: 428976 - RNA, 19 nt, Artificial Sequence
  Description of Artificial Sequence: Synthetic oligonucleotide
  Antisense Strand to SEQ ID NO: 428975
uguucccugggacaguugc

SEQ ID NO: 428977 - RNA, 19 nt, Artificial Sequence
  Description of Artificial Sequence: Synthetic oligonucleotide
  Sense strand starting at position 884 of SEQ ID NO: 316642
ccgggaugaucugcauaac

SEQ ID NO: 428978 - RNA, 19 nt, Artificial Sequence
  Description of Artificial Sequence: Synthetic oligonucleotide
  Antisense Strand to SEQ ID NO: 428977
guuaugcagaucaucccgg

SEQ ID NO: 428979 - RNA, 19 nt, Artificial Sequence
  Description of Artificial Sequence: Synthetic oligonucleotide
  Sense strand starting at position 885 of SEQ ID NO: 316642
cgggaugaucugcauaaca

SEQ ID NO: 428980 - RNA, 19 nt, Artificial Sequence
  Description of Artificial Sequence: Synthetic oligonucleotide
  Antisense Strand to SEQ ID NO: 428979
uguuaugcagaucaucccg

SEQ ID NO: 428981 - RNA, 19 nt, Artificial Sequence
  Description of Artificial Sequence: Synthetic oligonucleotide
  Sense strand starting at position 1180 of SEQ ID NO: 316642
cccucugucccugaaguua

SEQ ID NO: 428982 - RNA, 19 nt, Artificial Sequence
  Description of Artificial Sequence: Synthetic oligonucleotide
  Antisense Strand to SEQ ID NO: 428981
uaacuucagggacagaggg

SEQ ID NO: 428983 - RNA, 19 nt, Artificial Sequence
  Description of Artificial Sequence: Synthetic oligonucleotide
  Sense strand starting at position 2153 of SEQ ID NO: 316642
ccgggauuggugggaggau

SEQ ID NO: 428984 - RNA, 19 nt, Artificial Sequence
  Description of Artificial Sequence: Synthetic oligonucleotide
  Antisense Strand to SEQ ID NO: 428983
auccucccaccaaucccgg

SEQ ID NO: 428985 - RNA, 19 nt, Artificial Sequence
  Description of Artificial Sequence: Synthetic oligonucleotide
  Sense strand starting at position 2269 of SEQ ID NO: 316642
ucacuuuacggcgagauua

SEQ ID NO: 428986 - RNA, 19 nt, Artificial Sequence
  Description of Artificial Sequence: Synthetic oligonucleotide
  Antisense Strand to SEQ ID NO: 428985
uaaucucgccguaaaguga

SEQ ID NO: 428987 - RNA, 19 nt, Artificial Sequence
  Description of Artificial Sequence: Synthetic oligonucleotide
  Sense strand starting at position 2271 of SEQ ID NO: 316642
acuuuacggcgagauuaag

SEQ ID NO: 428988 - RNA, 19 nt, Artificial Sequence
  Description of Artificial Sequence: Synthetic oligonucleotide
  Antisense Strand to SEQ ID NO: 428987
cuuaaucucgccguaaagu

SEQ ID NO: 428989 - RNA, 19 nt, Artificial Sequence
  Description of Artificial Sequence: Synthetic oligonucleotide
  Sense strand starting at position 2359 of SEQ ID NO: 316642
uucugugcccuuuaaagga

SEQ ID NO: 428990 - RNA, 19 nt, Artificial Sequence
  Description of Artificial Sequence: Synthetic oligonucleotide
  Antisense Strand to SEQ ID NO: 428989
uccuuuaaagggcacagaa

SEQ ID NO: 428991 - RNA, 19 nt, Artificial Sequence
  Description of Artificial Sequence: Synthetic oligonucleotide
  Sense strand starting at position 2363 of SEQ ID NO: 316642
gugcccuuuaaaggagaua

SEQ ID NO: 428992 - RNA, 19 nt, Artificial Sequence
  Description of Artificial Sequence: Synthetic oligonucleotide
  Antisense Strand to SEQ ID NO: 428991
uaucuccuuuaaagggcac

SEQ ID NO: 428993 - RNA, 19 nt, Artificial Sequence
  Description of Artificial Sequence: Synthetic oligonucleotide
  Sense strand starting at position 2467 of SEQ ID NO: 316642
acagauauauuguucccau

SEQ ID NO: 428994 - RNA, 19 nt, Artificial Sequence
  Description of Artificial Sequence: Synthetic oligonucleotide
  Antisense Strand to SEQ ID NO: 428993
augggaacaauauaucugu

SEQ ID NO: 428995 - RNA, 19 nt, Artificial Sequence
  Description of Artificial Sequence: Synthetic oligonucleotide
  Sense strand starting at position 2544 of SEQ ID NO: 316642
uacuaaguggcaugggaaa

SEQ ID NO: 428996 - RNA, 19 nt, Artificial Sequence
  Description of Artificial Sequence: Synthetic oligonucleotide
  Antisense Strand to SEQ ID NO: 428995
uuucccaugccacuuagua

SEQ ID NO: 428997 - RNA, 19 nt, Artificial Sequence
  Description of Artificial Sequence: Synthetic oligonucleotide
  Sense strand starting at position 2559 of SEQ ID NO: 316642
gaaaccaggucuccugaau

SEQ ID NO: 428998 - RNA, 19 nt, Artificial Sequence
  Description of Artificial Sequence: Synthetic oligonucleotide
  Antisense Strand to SEQ ID NO: 428997
auucaggagaccugguuuc

SEQ ID NO: 428999 - RNA, 19 nt, Artificial Sequence
  Description of Artificial Sequence: Synthetic oligonucleotide
  Sense strand starting at position 2670 of SEQ ID NO: 316642
ggaaacuuaugucuaguua

SEQ ID NO: 429000 - RNA, 19 nt, Artificial Sequence
  Description of Artificial Sequence: Synthetic oligonucleotide
  Antisense Strand to SEQ ID NO: 428999
uaacuagacauaaguuucc

SEQ ID NO: 429001 - RNA, 19 nt, Artificial Sequence
  Description of Artificial Sequence: Synthetic oligonucleotide
  Sense strand starting at position 2684 of SEQ ID NO: 316642
aguuaagucgcugcccgau

SEQ ID NO: 429002 - RNA, 19 nt, Artificial Sequence
  Description of Artificial Sequence: Synthetic oligonucleotide
  Antisense Strand to SEQ ID NO: 429001
aucgggcagcgacuuaacu

SEQ ID NO: 429003 - RNA, 19 nt, Artificial Sequence
  Description of Artificial Sequence: Synthetic oligonucleotide
  Sense strand starting at position 2755 of SEQ ID NO: 316642
gcaccuuccuuccugaaag

SEQ ID NO: 429004 - RNA, 19 nt, Artificial Sequence
  Description of Artificial Sequence: Synthetic oligonucleotide
  Antisense Strand to SEQ ID NO: 429003
cuuucaggaaggaaggugc

SEQ ID NO: 429005 - RNA, 19 nt, Artificial Sequence
  Description of Artificial Sequence: Synthetic oligonucleotide
  Sense strand starting at position 2805 of SEQ ID NO: 316642
augagauuucgccgacagu

SEQ ID NO: 429006 - RNA, 19 nt, Artificial Sequence
  Description of Artificial Sequence: Synthetic oligonucleotide
  Antisense Strand to SEQ ID NO: 429005
acugucggcgaaaucucau

SEQ ID NO: 429007 - RNA, 19 nt, Artificial Sequence
  Description of Artificial Sequence: Synthetic oligonucleotide
  Sense strand starting at position 2843 of SEQ ID NO: 316642
gugaaauuauuuggaugaa

SEQ ID NO: 429008 - RNA, 19 nt, Artificial Sequence
  Description of Artificial Sequence: Synthetic oligonucleotide
  Antisense Strand to SEQ ID NO: 429007
uucauccaaauaauuucac

SEQ ID NO: 429009 - RNA, 19 nt, Artificial Sequence
  Description of Artificial Sequence: Synthetic oligonucleotide
  Sense strand starting at position 2888 of SEQ ID NO: 316642
ugauguguaauguaaauug

SEQ ID NO: 429010 - RNA, 19 nt, Artificial Sequence
  Description of Artificial Sequence: Synthetic oligonucleotide
  Antisense Strand to SEQ ID NO: 429009
caauuuacauuacacauca

SEQ ID NO: 429011 - RNA, 19 nt, Artificial Sequence
  Description of Artificial Sequence: Synthetic oligonucleotide
  Sense strand starting at position 2903 of SEQ ID NO: 316642
auugguauaaugugugaaa

SEQ ID NO: 429012 - RNA, 19 nt, Artificial Sequence
  Description of Artificial Sequence: Synthetic oligonucleotide
  Antisense Strand to SEQ ID NO: 429011
uuucacacauuauaccaau

SEQ ID NO: 429013 - RNA, 19 nt, Artificial Sequence
  Description of Artificial Sequence: Synthetic oligonucleotide
  Sense strand starting at position 3054 of SEQ ID NO: 316642
uuggcuacuugacuuaauu

SEQ ID NO: 429014 - RNA, 19 nt, Artificial Sequence
  Description of Artificial Sequence: Synthetic oligonucleotide
  Antisense Strand to SEQ ID NO: 429013
aauuaagucaaguagccaa

SEQ ID NO: 429015 - RNA, 19 nt, Artificial Sequence
  Description of Artificial Sequence: Synthetic oligonucleotide
  Sense strand starting at position 3127 of SEQ ID NO: 316642
ucgggagauugguuuaccu

SEQ ID NO: 429016 - RNA, 19 nt, Artificial Sequence
  Description of Artificial Sequence: Synthetic oligonucleotide
  Antisense Strand to SEQ ID NO: 429015
agguaaaccaaucucccga

SEQ ID NO: 429017 - RNA, 19 nt, Artificial Sequence
  Description of Artificial Sequence: Synthetic oligonucleotide
  Sense strand starting at position 3131 of SEQ ID NO: 316642
gagauugguuuaccuagac

SEQ ID NO: 429018 - RNA, 19 nt, Artificial Sequence
  Description of Artificial Sequence: Synthetic oligonucleotide
  Antisense Strand to SEQ ID NO: 429017
gucuagguaaaccaaucuc

SEQ ID NO: 429019 - RNA, 19 nt, Artificial Sequence
  Description of Artificial Sequence: Synthetic oligonucleotide
  Sense strand starting at position 3158 of SEQ ID NO: 316642
uaauuaaggugucccugau

SEQ ID NO: 429020 - RNA, 19 nt, Artificial Sequence
  Description of Artificial Sequence: Synthetic oligonucleotide
  Antisense Strand to SEQ ID NO: 429019
aucagggacaccuuaauua

SEQ ID NO: 429021 - RNA, 19 nt, Artificial Sequence
  Description of Artificial Sequence: Synthetic oligonucleotide
  Sense strand starting at position 3186 of SEQ ID NO: 316642
ugguguaucuaucuaagau

SEQ ID NO: 429022 - RNA, 19 nt, Artificial Sequence
  Description of Artificial Sequence: Synthetic oligonucleotide
  Antisense Strand to SEQ ID NO: 429021
aucuuagauagauacacca

SEQ ID NO: 429023 - RNA, 19 nt, Artificial Sequence
  Description of Artificial Sequence: Synthetic oligonucleotide
  Sense strand starting at position 3187 of SEQ ID NO: 316642
gguguaucuaucuaagaug

SEQ ID NO: 429024 - RNA, 19 nt, Artificial Sequence
  Description of Artificial Sequence: Synthetic oligonucleotide
  Antisense Strand to SEQ ID NO: 429023
caucuuagauagauacacc

SEQ ID NO: 429025 - RNA, 19 nt, Artificial Sequence
  Description of Artificial Sequence: Synthetic oligonucleotide
  Sense strand starting at position 3205 of SEQ ID NO: 316642
gaaaguucuggucaucccu

SEQ ID NO: 429026 - RNA, 19 nt, Artificial Sequence
  Description of Artificial Sequence: Synthetic oligonucleotide
  Antisense Strand to SEQ ID NO: 429025
agggaugaccagaacuuuc

SEQ ID NO: 429027 - RNA, 19 nt, Artificial Sequence
  Description of Artificial Sequence: Synthetic oligonucleotide
  Sense strand starting at position 3214 of SEQ ID NO: 316642
ggucaucccugagcaggau

SEQ ID NO: 429028 - RNA, 19 nt, Artificial Sequence
  Description of Artificial Sequence: Synthetic oligonucleotide
  Antisense Strand to SEQ ID NO: 429027
auccugcucagggaugacc

SEQ ID NO: 429029 - RNA, 19 nt, Artificial Sequence
  Description of Artificial Sequence: Synthetic oligonucleotide
  Sense strand starting at position 3287 of SEQ ID NO: 316642
agagacugaucucuauucu

SEQ ID NO: 429030 - RNA, 19 nt, Artificial Sequence
  Description of Artificial Sequence: Synthetic oligonucleotide
  Antisense Strand to SEQ ID NO: 429029
agaauagagaucagucucu

SEQ ID NO: 429031 - RNA, 19 nt, Artificial Sequence
  Description of Artificial Sequence: Synthetic oligonucleotide
  Sense strand starting at position 3479 of SEQ ID NO: 316642
ucaaacuguggucaacuua

SEQ ID NO: 429032 - RNA, 19 nt, Artificial Sequence
  Description of Artificial Sequence: Synthetic oligonucleotide
  Antisense Strand to SEQ ID NO: 429031
uaaguugaccacaguuuga

SEQ ID NO: 429033 - RNA, 19 nt, Artificial Sequence
  Description of Artificial Sequence: Synthetic oligonucleotide
  Sense strand starting at position 3503 of SEQ ID NO: 316642
ugauguugacaguggaagu

SEQ ID NO: 429034 - RNA, 19 nt, Artificial Sequence
  Description of Artificial Sequence: Synthetic oligonucleotide
  Antisense Strand to SEQ ID NO: 429033
acuuccacugucaacauca

SEQ ID NO: 429035 - RNA, 19 nt, Artificial Sequence
  Description of Artificial Sequence: Synthetic oligonucleotide
  Sense strand starting at position 3591 of SEQ ID NO: 316642
guagcuuugguucagagag

SEQ ID NO: 429036 - RNA, 19 nt, Artificial Sequence
  Description of Artificial Sequence: Synthetic oligonucleotide
  Antisense Strand to SEQ ID NO: 429035
cucucugaaccaaagcuac

SEQ ID NO: 429037 - RNA, 19 nt, Artificial Sequence
  Description of Artificial Sequence: Synthetic oligonucleotide
  Sense strand starting at position 3605 of SEQ ID NO: 316642
gagaguaagucauuccauu

SEQ ID NO: 429038 - RNA, 19 nt, Artificial Sequence
  Description of Artificial Sequence: Synthetic oligonucleotide
  Antisense Strand to SEQ ID NO: 429037
aauggaaugacuuacucuc

SEQ ID NO: 429039 - RNA, 19 nt, Artificial Sequence
  Description of Artificial Sequence: Synthetic oligonucleotide
  Sense strand starting at position 3653 of SEQ ID NO: 316642
ggugacgagccauauugau

SEQ ID NO: 429040 - RNA, 19 nt, Artificial Sequence
  Description of Artificial Sequence: Synthetic oligonucleotide
  Antisense Strand to SEQ ID NO: 429039
aucaauauggcucgucacc

SEQ ID NO: 429041 - RNA, 19 nt, Artificial Sequence
  Description of Artificial Sequence: Synthetic oligonucleotide
  Sense strand starting at position 3725 of SEQ ID NO: 316642
gcaaguaaauaauuccagu

SEQ ID NO: 429042 - RNA, 19 nt, Artificial Sequence
  Description of Artificial Sequence: Synthetic oligonucleotide
  Antisense Strand to SEQ ID NO: 429041
acuggaauuauuuacuugc

SEQ ID NO: 429043 - RNA, 19 nt, Artificial Sequence
  Description of Artificial Sequence: Synthetic oligonucleotide
  Sense strand starting at position 3756 of SEQ ID NO: 316642
ugauuuauuucgugaaugg

SEQ ID NO: 429044 - RNA, 19 nt, Artificial Sequence
  Description of Artificial Sequence: Synthetic oligonucleotide
  Antisense Strand to SEQ ID NO: 429043
ccauucacgaaauaaauca

SEQ ID NO: 429045 - RNA, 19 nt, Artificial Sequence
  Description of Artificial Sequence: Synthetic oligonucleotide
  Sense strand starting at position 3907 of SEQ ID NO: 316642
agucaauaagaaggcuauu

SEQ ID NO: 429046 - RNA, 19 nt, Artificial Sequence
  Description of Artificial Sequence: Synthetic oligonucleotide
  Antisense Strand to SEQ ID NO: 429045
aauagccuucuuauugacu

SEQ ID NO: 429047 - RNA, 19 nt, Artificial Sequence
  Description of Artificial Sequence: Synthetic oligonucleotide
  Sense strand starting at position 4 of SEQ ID NO: 316643
uucuuagaucaagguaucu

SEQ ID NO: 429048 - RNA, 19 nt, Artificial Sequence
  Description of Artificial Sequence: Synthetic oligonucleotide
  Antisense Strand to SEQ ID NO: 429047
agauaccuugaucuaagaa

SEQ ID NO: 429049 - RNA, 19 nt, Artificial Sequence
  Description of Artificial Sequence: Synthetic oligonucleotide
  Sense strand starting at position 9 of SEQ ID NO: 316643
agaucaagguaucuuaauc

SEQ ID NO: 429050 - RNA, 19 nt, Artificial Sequence
  Description of Artificial Sequence: Synthetic oligonucleotide
  Antisense Strand to SEQ ID NO: 429049
gauuaagauaccuugaucu

SEQ ID NO: 429051 - RNA, 19 nt, Artificial Sequence
  Description of Artificial Sequence: Synthetic oligonucleotide
  Sense strand starting at position 225 of SEQ ID NO: 316643
guuccuuaauuuccugagu

SEQ ID NO: 429052 - RNA, 19 nt, Artificial Sequence
  Description of Artificial Sequence: Synthetic oligonucleotide
  Antisense Strand to SEQ ID NO: 429051
acucaggaaauuaaggaac

SEQ ID NO: 429053 - RNA, 19 nt, Artificial Sequence
  Description of Artificial Sequence: Synthetic oligonucleotide
  Sense strand starting at position 547 of SEQ ID NO: 316643
gcacauaggagguacuuua

SEQ ID NO: 429054 - RNA, 19 nt, Artificial Sequence
  Description of Artificial Sequence: Synthetic oligonucleotide
  Antisense Strand to SEQ ID NO: 429053
uaaaguaccuccuaugugc

SEQ ID NO: 429055 - RNA, 19 nt, Artificial Sequence
  Description of Artificial Sequence: Synthetic oligonucleotide
  Sense strand starting at position 794 of SEQ ID NO: 316643
guugaaagagaauguauau

SEQ ID NO: 429056 - RNA, 19 nt, Artificial Sequence
  Description of Artificial Sequence: Synthetic oligonucleotide
  Antisense Strand to SEQ ID NO: 429055
auauacauucucuuucaac

SEQ ID NO: 429057 - RNA, 19 nt, Artificial Sequence
  Description of Artificial Sequence: Synthetic oligonucleotide
  Sense strand starting at position 1093 of SEQ ID NO: 316643
uguggaaucguacauucua

SEQ ID NO: 429058 - RNA, 19 nt, Artificial Sequence
  Description of Artificial Sequence: Synthetic oligonucleotide
  Antisense Strand to SEQ ID NO: 429057
uagaauguacgauuccaca

SEQ ID NO: 429059 - RNA, 19 nt, Artificial Sequence
  Description of Artificial Sequence: Synthetic oligonucleotide
  Sense strand starting at position 1382 of SEQ ID NO: 316643
ugcagaaauuguccagcau

SEQ ID NO: 429060 - RNA, 19 nt, Artificial Sequence
  Description of Artificial Sequence: Synthetic oligonucleotide
  Antisense Strand to SEQ ID NO: 429059
augcuggacaauuucugca

SEQ ID NO: 429061 - RNA, 19 nt, Artificial Sequence
  Description of Artificial Sequence: Synthetic oligonucleotide
  Sense strand starting at position 1383 of SEQ ID NO: 316643
gcagaaauuguccagcaug

SEQ ID NO: 429062 - RNA, 19 nt, Artificial Sequence
  Description of Artificial Sequence: Synthetic oligonucleotide
  Antisense Strand to SEQ ID NO: 429061
caugcuggacaauuucugc

SEQ ID NO: 429063 - RNA, 19 nt, Artificial Sequence
  Description of Artificial Sequence: Synthetic oligonucleotide
  Sense strand starting at position 1386 of SEQ ID NO: 316643
gaaauuguccagcauguuc

SEQ ID NO: 429064 - RNA, 19 nt, Artificial Sequence
  Description of Artificial Sequence: Synthetic oligonucleotide
  Antisense Strand to SEQ ID NO: 429063
gaacaugcuggacaauuuc

SEQ ID NO: 429065 - RNA, 19 nt, Artificial Sequence
  Description of Artificial Sequence: Synthetic oligonucleotide
  Sense strand starting at position 2243 of SEQ ID NO: 316643
gguucuaacuacguacaga

SEQ ID NO: 429066 - RNA, 19 nt, Artificial Sequence
  Description of Artificial Sequence: Synthetic oligonucleotide
  Antisense Strand to SEQ ID NO: 429065
ucuguacguaguuagaacc

SEQ ID NO: 429067 - RNA, 19 nt, Artificial Sequence
  Description of Artificial Sequence: Synthetic oligonucleotide
  Sense strand starting at position 2407 of SEQ ID NO: 316643
agugcuugagcucaagaaa

SEQ ID NO: 429068 - RNA, 19 nt, Artificial Sequence
  Description of Artificial Sequence: Synthetic oligonucleotide
  Antisense Strand to SEQ ID NO: 429067
uuucuugagcucaagcacu

SEQ ID NO: 429069 - RNA, 19 nt, Artificial Sequence
  Description of Artificial Sequence: Synthetic oligonucleotide
  Sense strand starting at position 2418 of SEQ ID NO: 316643
ucaagaaacgggcauacuu

SEQ ID NO: 429070 - RNA, 19 nt, Artificial Sequence
  Description of Artificial Sequence: Synthetic oligonucleotide
  Antisense Strand to SEQ ID NO: 429069
aaguaugcccguuucuuga

SEQ ID NO: 429071 - RNA, 19 nt, Artificial Sequence
  Description of Artificial Sequence: Synthetic oligonucleotide
  Sense strand starting at position 2438 of SEQ ID NO: 316643
guguuacuccgcuuucagu

SEQ ID NO: 429072 - RNA, 19 nt, Artificial Sequence
  Description of Artificial Sequence: Synthetic oligonucleotide
  Antisense Strand to SEQ ID NO: 429071
acugaaagcggaguaacac

SEQ ID NO: 429073 - RNA, 19 nt, Artificial Sequence
  Description of Artificial Sequence: Synthetic oligonucleotide
  Sense strand starting at position 2458 of SEQ ID NO: 316643
uugauuuccuuacauagag

SEQ ID NO: 429074 - RNA, 19 nt, Artificial Sequence
  Description of Artificial Sequence: Synthetic oligonucleotide
  Antisense Strand to SEQ ID NO: 429073
cucuauguaaggaaaucaa

SEQ ID NO: 429075 - RNA, 19 nt, Artificial Sequence
  Description of Artificial Sequence: Synthetic oligonucleotide
  Sense strand starting at position 2506 of SEQ ID NO: 316643
uuggacuacacguagauua

SEQ ID NO: 429076 - RNA, 19 nt, Artificial Sequence
  Description of Artificial Sequence: Synthetic oligonucleotide
  Antisense Strand to SEQ ID NO: 429075
uaaucuacguguaguccaa

SEQ ID NO: 429077 - RNA, 19 nt, Artificial Sequence
  Description of Artificial Sequence: Synthetic oligonucleotide
  Sense strand starting at position 2591 of SEQ ID NO: 316643
uugagcaugcaauauagua

SEQ ID NO: 429078 - RNA, 19 nt, Artificial Sequence
  Description of Artificial Sequence: Synthetic oligonucleotide
  Antisense Strand to SEQ ID NO: 429077
uacuauauugcaugcucaa

SEQ ID NO: 429079 - RNA, 19 nt, Artificial Sequence
  Description of Artificial Sequence: Synthetic oligonucleotide
  Sense strand starting at position 2599 of SEQ ID NO: 316643
gcaauauaguaaguccuau

SEQ ID NO: 429080 - RNA, 19 nt, Artificial Sequence
  Description of Artificial Sequence: Synthetic oligonucleotide
  Antisense Strand to SEQ ID NO: 429079
auaggacuuacuauauugc

SEQ ID NO: 429081 - RNA, 19 nt, Artificial Sequence
  Description of Artificial Sequence: Synthetic oligonucleotide
  Sense strand starting at position 2605 of SEQ ID NO: 316643
uaguaaguccuauacgaag

SEQ ID NO: 429082 - RNA, 19 nt, Artificial Sequence
  Description of Artificial Sequence: Synthetic oligonucleotide
  Antisense Strand to SEQ ID NO: 429081
cuucguauaggacuuacua

SEQ ID NO: 429083 - RNA, 19 nt, Artificial Sequence
  Description of Artificial Sequence: Synthetic oligonucleotide
  Sense strand starting at position 2664 of SEQ ID NO: 316643
cguuuaagccgugccucaa

SEQ ID NO: 429084 - RNA, 19 nt, Artificial Sequence
  Description of Artificial Sequence: Synthetic oligonucleotide
  Antisense Strand to SEQ ID NO: 429083
uugaggcacggcuuaaacg

SEQ ID NO: 429085 - RNA, 19 nt, Artificial Sequence
  Description of Artificial Sequence: Synthetic oligonucleotide
  Sense strand starting at position 2665 of SEQ ID NO: 316643
guuuaagccgugccucaaa

SEQ ID NO: 429086 - RNA, 19 nt, Artificial Sequence
  Description of Artificial Sequence: Synthetic oligonucleotide
  Antisense Strand to SEQ ID NO: 429085
uuugaggcacggcuuaaac

SEQ ID NO: 429087 - RNA, 19 nt, Artificial Sequence
  Description of Artificial Sequence: Synthetic oligonucleotide
  Sense strand starting at position 2812 of SEQ ID NO: 316643
ccguucuucuaccuagaau

SEQ ID NO: 429088 - RNA, 19 nt, Artificial Sequence
  Description of Artificial Sequence: Synthetic oligonucleotide
  Antisense Strand to SEQ ID NO: 429087
auucuagguagaagaacgg

SEQ ID NO: 429089 - RNA, 19 nt, Artificial Sequence
  Description of Artificial Sequence: Synthetic oligonucleotide
  Sense strand starting at position 2859 of SEQ ID NO: 316643
gauaguccagauuguauua

SEQ ID NO: 429090 - RNA, 19 nt, Artificial Sequence
  Description of Artificial Sequence: Synthetic oligonucleotide
  Antisense Strand to SEQ ID NO: 429089
uaauacaaucuggacuauc

SEQ ID NO: 429091 - RNA, 19 nt, Artificial Sequence
  Description of Artificial Sequence: Synthetic oligonucleotide
  Sense strand starting at position 2874 of SEQ ID NO: 316643
auuacuaaaucgucgugaa

SEQ ID NO: 429092 - RNA, 19 nt, Artificial Sequence
  Description of Artificial Sequence: Synthetic oligonucleotide
  Antisense Strand to SEQ ID NO: 429091
uucacgacgauuuaguaau

SEQ ID NO: 429093 - RNA, 19 nt, Artificial Sequence
  Description of Artificial Sequence: Synthetic oligonucleotide
  Sense strand starting at position 2878 of SEQ ID NO: 316643
cuaaaucgucgugaaauac

SEQ ID NO: 429094 - RNA, 19 nt, Artificial Sequence
  Description of Artificial Sequence: Synthetic oligonucleotide
  Antisense Strand to SEQ ID NO: 429093
guauuucacgacgauuuag

SEQ ID NO: 429095 - RNA, 19 nt, Artificial Sequence
  Description of Artificial Sequence: Synthetic oligonucleotide
  Sense strand starting at position 2884 of SEQ ID NO: 316643
cgucgugaaauacaaacau

SEQ ID NO: 429096 - RNA, 19 nt, Artificial Sequence
  Description of Artificial Sequence: Synthetic oligonucleotide
  Antisense Strand to SEQ ID NO: 429095
auguuuguauuucacgacg

SEQ ID NO: 429097 - RNA, 19 nt, Artificial Sequence
  Description of Artificial Sequence: Synthetic oligonucleotide
  Sense strand starting at position 2956 of SEQ ID NO: 316643
uaucaaggguucucaaagu

SEQ ID NO: 429098 - RNA, 19 nt, Artificial Sequence
  Description of Artificial Sequence: Synthetic oligonucleotide
  Antisense Strand to SEQ ID NO: 429097
acuuugagaacccuugaua

SEQ ID NO: 429099 - RNA, 19 nt, Artificial Sequence
  Description of Artificial Sequence: Synthetic oligonucleotide
  Sense strand starting at position 2967 of SEQ ID NO: 316643
cucaaaguguguuuacuag

SEQ ID NO: 429100 - RNA, 19 nt, Artificial Sequence
  Description of Artificial Sequence: Synthetic oligonucleotide
  Antisense Strand to SEQ ID NO: 429099
cuaguaaacacacuuugag

SEQ ID NO: 429101 - RNA, 19 nt, Artificial Sequence
  Description of Artificial Sequence: Synthetic oligonucleotide
  Sense strand starting at position 2973 of SEQ ID NO: 316643
guguguuuacuagauuccu

SEQ ID NO: 429102 - RNA, 19 nt, Artificial Sequence
  Description of Artificial Sequence: Synthetic oligonucleotide
  Antisense Strand to SEQ ID NO: 429101
aggaaucuaguaaacacac

SEQ ID NO: 429103 - RNA, 19 nt, Artificial Sequence
  Description of Artificial Sequence: Synthetic oligonucleotide
  Sense strand starting at position 3195 of SEQ ID NO: 316643
aagcguuuccuuuaugauu

SEQ ID NO: 429104 - RNA, 19 nt, Artificial Sequence
  Description of Artificial Sequence: Synthetic oligonucleotide
  Antisense Strand to SEQ ID NO: 429103
aaucauaaaggaaacgcuu

SEQ ID NO: 429105 - RNA, 19 nt, Artificial Sequence
  Description of Artificial Sequence: Synthetic oligonucleotide
  Sense strand starting at position 3206 of SEQ ID NO: 316643
uuaugauugucguuaauga

SEQ ID NO: 429106 - RNA, 19 nt, Artificial Sequence
  Description of Artificial Sequence: Synthetic oligonucleotide
  Antisense Strand to SEQ ID NO: 429105
ucauuaacgacaaucauaa

SEQ ID NO: 429107 - RNA, 19 nt, Artificial Sequence
  Description of Artificial Sequence: Synthetic oligonucleotide
  Sense strand starting at position 3207 of SEQ ID NO: 316643
uaugauugucguuaaugaa

SEQ ID NO: 429108 - RNA, 19 nt, Artificial Sequence
  Description of Artificial Sequence: Synthetic oligonucleotide
  Antisense Strand to SEQ ID NO: 429107
uucauuaacgacaaucaua

SEQ ID NO: 429109 - RNA, 19 nt, Artificial Sequence
  Description of Artificial Sequence: Synthetic oligonucleotide
  Sense strand starting at position 3231 of SEQ ID NO: 316643
cagucagaauuauuacguu

SEQ ID NO: 429110 - RNA, 19 nt, Artificial Sequence
  Description of Artificial Sequence: Synthetic oligonucleotide
  Antisense Strand to SEQ ID NO: 429109
aacguaauaauucugacug

SEQ ID NO: 429111 - RNA, 19 nt, Artificial Sequence
  Description of Artificial Sequence: Synthetic oligonucleotide
  Sense strand starting at position 3281 of SEQ ID NO: 316643
uuugauguucuuugugaua

SEQ ID NO: 429112 - RNA, 19 nt, Artificial Sequence
  Description of Artificial Sequence: Synthetic oligonucleotide
  Antisense Strand to SEQ ID NO: 429111
uaucacaaagaacaucaaa

SEQ ID NO: 429113 - RNA, 19 nt, Artificial Sequence
  Description of Artificial Sequence: Synthetic oligonucleotide
  Sense strand starting at position 3448 of SEQ ID NO: 316643
uaguuauucugacuugggu

SEQ ID NO: 429114 - RNA, 19 nt, Artificial Sequence
  Description of Artificial Sequence: Synthetic oligonucleotide
  Antisense Strand to SEQ ID NO: 429113
acccaagucagaauaacua

SEQ ID NO: 429115 - RNA, 19 nt, Artificial Sequence
  Description of Artificial Sequence: Synthetic oligonucleotide
  Sense strand starting at position 3463 of SEQ ID NO: 316643
ggguaucuggcagacauua

SEQ ID NO: 429116 - RNA, 19 nt, Artificial Sequence
  Description of Artificial Sequence: Synthetic oligonucleotide
  Antisense Strand to SEQ ID NO: 429115
uaaugucugccagauaccc

SEQ ID NO: 429117 - RNA, 19 nt, Artificial Sequence
  Description of Artificial Sequence: Synthetic oligonucleotide
  Sense strand starting at position 3497 of SEQ ID NO: 316643
gagccuguuucuuugagga

SEQ ID NO: 429118 - RNA, 19 nt, Artificial Sequence
  Description of Artificial Sequence: Synthetic oligonucleotide
  Antisense Strand to SEQ ID NO: 429117
uccucaaagaaacaggcuc

SEQ ID NO: 429119 - RNA, 19 nt, Artificial Sequence
  Description of Artificial Sequence: Synthetic oligonucleotide
  Sense strand starting at position 3530 of SEQ ID NO: 316643
acuuauugccaaugaugaa

SEQ ID NO: 429120 - RNA, 19 nt, Artificial Sequence
  Description of Artificial Sequence: Synthetic oligonucleotide
  Antisense Strand to SEQ ID NO: 429119
uucaucauuggcaauaagu

SEQ ID NO: 429121 - RNA, 19 nt, Artificial Sequence
  Description of Artificial Sequence: Synthetic oligonucleotide
  Sense strand starting at position 3633 of SEQ ID NO: 316643
augagaucagagugacagu

SEQ ID NO: 429122 - RNA, 19 nt, Artificial Sequence
  Description of Artificial Sequence: Synthetic oligonucleotide
  Antisense Strand to SEQ ID NO: 429121
acugucacucugaucucau

SEQ ID NO: 429123 - RNA, 19 nt, Artificial Sequence
  Description of Artificial Sequence: Synthetic oligonucleotide
  Sense strand starting at position 3643 of SEQ ID NO: 316643
agugacagugaugaaaguu

SEQ ID NO: 429124 - RNA, 19 nt, Artificial Sequence
  Description of Artificial Sequence: Synthetic oligonucleotide
  Antisense Strand to SEQ ID NO: 429123
aacuuucaucacugucacu

SEQ ID NO: 429125 - RNA, 19 nt, Artificial Sequence
  Description of Artificial Sequence: Synthetic oligonucleotide
  Sense strand starting at position 3878 of SEQ ID NO: 316643
acgcaucucugaucccaga

SEQ ID NO: 429126 - RNA, 19 nt, Artificial Sequence
  Description of Artificial Sequence: Synthetic oligonucleotide
  Antisense Strand to SEQ ID NO: 429125
ucugggaucagagaugcgu

SEQ ID NO: 429127 - RNA, 19 nt, Artificial Sequence
  Description of Artificial Sequence: Synthetic oligonucleotide
  Sense strand starting at position 185 of SEQ ID NO: 316644
ccugaugagagaugcugua

SEQ ID NO: 429128 - RNA, 19 nt, Artificial Sequence
  Description of Artificial Sequence: Synthetic oligonucleotide
  Antisense Strand to SEQ ID NO: 429127
uacagcaucucucaucagg

SEQ ID NO: 429129 - RNA, 19 nt, Artificial Sequence
  Description of Artificial Sequence: Synthetic oligonucleotide
  Sense strand starting at position 314 of SEQ ID NO: 316644
gagcauauuuauguuuguu

SEQ ID NO: 429130 - RNA, 19 nt, Artificial Sequence
  Description of Artificial Sequence: Synthetic oligonucleotide
  Antisense Strand to SEQ ID NO: 429129
aacaaacauaaauaugcuc

SEQ ID NO: 429131 - RNA, 19 nt, Artificial Sequence
  Description of Artificial Sequence: Synthetic oligonucleotide
  Sense strand starting at position 487 of SEQ ID NO: 316644
uuaaguugggaaugcuuua

SEQ ID NO: 429132 - RNA, 19 nt, Artificial Sequence
  Description of Artificial Sequence: Synthetic oligonucleotide
  Antisense Strand to SEQ ID NO: 429131
uaaagcauucccaacuuaa

SEQ ID NO: 429133 - RNA, 19 nt, Artificial Sequence
  Description of Artificial Sequence: Synthetic oligonucleotide
  Sense strand starting at position 503 of SEQ ID NO: 316644
uuaugaauccugggugaga

SEQ ID NO: 429134 - RNA, 19 nt, Artificial Sequence
  Description of Artificial Sequence: Synthetic oligonucleotide
  Antisense Strand to SEQ ID NO: 429133
ucucacccaggauucauaa

SEQ ID NO: 429135 - RNA, 19 nt, Artificial Sequence
  Description of Artificial Sequence: Synthetic oligonucleotide
  Sense strand starting at position 534 of SEQ ID NO: 316644
aaaggauuauaggaggagu

SEQ ID NO: 429136 - RNA, 19 nt, Artificial Sequence
  Description of Artificial Sequence: Synthetic oligonucleotide
  Antisense Strand to SEQ ID NO: 429135
acuccuccuauaauccuuu

SEQ ID NO: 429137 - RNA, 19 nt, Artificial Sequence
  Description of Artificial Sequence: Synthetic oligonucleotide
  Sense strand starting at position 552 of SEQ ID NO: 316644
ugagauaugaguugagcau

SEQ ID NO: 429138 - RNA, 19 nt, Artificial Sequence
  Description of Artificial Sequence: Synthetic oligonucleotide
  Antisense Strand to SEQ ID NO: 429137
augcucaacucauaucuca

SEQ ID NO: 429139 - RNA, 19 nt, Artificial Sequence
  Description of Artificial Sequence: Synthetic oligonucleotide
  Sense strand starting at position 556 of SEQ ID NO: 316644
auaugaguugagcaugagu

SEQ ID NO: 429140 - RNA, 19 nt, Artificial Sequence
  Description of Artificial Sequence: Synthetic oligonucleotide
  Antisense Strand to SEQ ID NO: 429139
acucaugcucaacucauau

SEQ ID NO: 429141 - RNA, 19 nt, Artificial Sequence
  Description of Artificial Sequence: Synthetic oligonucleotide
  Sense strand starting at position 558 of SEQ ID NO: 316644
augaguugagcaugaguaa

SEQ ID NO: 429142 - RNA, 19 nt, Artificial Sequence
  Description of Artificial Sequence: Synthetic oligonucleotide
  Antisense Strand to SEQ ID NO: 429141
uuacucaugcucaacucau

SEQ ID NO: 429143 - RNA, 19 nt, Artificial Sequence
  Description of Artificial Sequence: Synthetic oligonucleotide
  Sense strand starting at position 559 of SEQ ID NO: 316644
ugaguugagcaugaguaaa

SEQ ID NO: 429144 - RNA, 19 nt, Artificial Sequence
  Description of Artificial Sequence: Synthetic oligonucleotide
  Antisense Strand to SEQ ID NO: 429143
uuuacucaugcucaacuca

SEQ ID NO: 429145 - RNA, 19 nt, Artificial Sequence
  Description of Artificial Sequence: Synthetic oligonucleotide
  Sense strand starting at position 561 of SEQ ID NO: 316644
aguugagcaugaguaaaug

SEQ ID NO: 429146 - RNA, 19 nt, Artificial Sequence
  Description of Artificial Sequence: Synthetic oligonucleotide
  Antisense Strand to SEQ ID NO: 429145
cauuuacucaugcucaacu

SEQ ID NO: 429147 - RNA, 19 nt, Artificial Sequence
  Description of Artificial Sequence: Synthetic oligonucleotide
  Sense strand starting at position 631 of SEQ ID NO: 316644
agagaaugaugugaauaaa

SEQ ID NO: 429148 - RNA, 19 nt, Artificial Sequence
  Description of Artificial Sequence: Synthetic oligonucleotide
  Antisense Strand to SEQ ID NO: 429147
uuuauucacaucauucucu

SEQ ID NO: 429149 - RNA, 19 nt, Artificial Sequence
  Description of Artificial Sequence: Synthetic oligonucleotide
  Sense strand starting at position 667 of SEQ ID NO: 316644
agaaguauuuagggaaagu

SEQ ID NO: 429150 - RNA, 19 nt, Artificial Sequence
  Description of Artificial Sequence: Synthetic oligonucleotide
  Antisense Strand to SEQ ID NO: 429149
acuuucccuaaauacuucu

SEQ ID NO: 429151 - RNA, 19 nt, Artificial Sequence
  Description of Artificial Sequence: Synthetic oligonucleotide
  Sense strand starting at position 837 of SEQ ID NO: 316644
auaggauaguaaucugauc

SEQ ID NO: 429152 - RNA, 19 nt, Artificial Sequence
  Description of Artificial Sequence: Synthetic oligonucleotide
  Antisense Strand to SEQ ID NO: 429151
gaucagauuacuauccuau

SEQ ID NO: 429153 - RNA, 19 nt, Artificial Sequence
  Description of Artificial Sequence: Synthetic oligonucleotide
  Sense strand starting at position 878 of SEQ ID NO: 316644
gagucagguagugguauau

SEQ ID NO: 429154 - RNA, 19 nt, Artificial Sequence
  Description of Artificial Sequence: Synthetic oligonucleotide
  Antisense Strand to SEQ ID NO: 429153
auauaccacuaccugacuc

SEQ ID NO: 429155 - RNA, 19 nt, Artificial Sequence
  Description of Artificial Sequence: Synthetic oligonucleotide
  Sense strand starting at position 882 of SEQ ID NO: 316644
cagguagugguauauguaa

SEQ ID NO: 429156 - RNA, 19 nt, Artificial Sequence
  Description of Artificial Sequence: Synthetic oligonucleotide
  Antisense Strand to SEQ ID NO: 429155
uuacauauaccacuaccug

SEQ ID NO: 429157 - RNA, 19 nt, Artificial Sequence
  Description of Artificial Sequence: Synthetic oligonucleotide
  Sense strand starting at position 895 of SEQ ID NO: 316644
auguaaugucaugggacuu

SEQ ID NO: 429158 - RNA, 19 nt, Artificial Sequence
  Description of Artificial Sequence: Synthetic oligonucleotide
  Antisense Strand to SEQ ID NO: 429157
aagucccaugacauuacau

SEQ ID NO: 429159 - RNA, 19 nt, Artificial Sequence
  Description of Artificial Sequence: Synthetic oligonucleotide
  Sense strand starting at position 896 of SEQ ID NO: 316644
uguaaugucaugggacuuu

SEQ ID NO: 429160 - RNA, 19 nt, Artificial Sequence
  Description of Artificial Sequence: Synthetic oligonucleotide
  Antisense Strand to SEQ ID NO: 429159
aaagucccaugacauuaca

SEQ ID NO: 429161 - RNA, 19 nt, Artificial Sequence
  Description of Artificial Sequence: Synthetic oligonucleotide
  Sense strand starting at position 914 of SEQ ID NO: 316644
uccacagugccagacaaau

SEQ ID NO: 429162 - RNA, 19 nt, Artificial Sequence
  Description of Artificial Sequence: Synthetic oligonucleotide
  Antisense Strand to SEQ ID NO: 429161
auuugucuggcacugugga

SEQ ID NO: 429163 - RNA, 19 nt, Artificial Sequence
  Description of Artificial Sequence: Synthetic oligonucleotide
  Sense strand starting at position 1213 of SEQ ID NO: 316644
uugaguaagacacguaaga

SEQ ID NO: 429164 - RNA, 19 nt, Artificial Sequence
  Description of Artificial Sequence: Synthetic oligonucleotide
  Antisense Strand to SEQ ID NO: 429163
ucuuacgugucuuacucaa

SEQ ID NO: 429165 - RNA, 19 nt, Artificial Sequence
  Description of Artificial Sequence: Synthetic oligonucleotide
  Sense strand starting at position 1389 of SEQ ID NO: 316644
agucaucccuuccuacaga

SEQ ID NO: 429166 - RNA, 19 nt, Artificial Sequence
  Description of Artificial Sequence: Synthetic oligonucleotide
  Antisense Strand to SEQ ID NO: 429165
ucuguaggaagggaugacu

SEQ ID NO: 429167 - RNA, 19 nt, Artificial Sequence
  Description of Artificial Sequence: Synthetic oligonucleotide
  Sense strand starting at position 1551 of SEQ ID NO: 316644
guuccacuguuaccauaaa

SEQ ID NO: 429168 - RNA, 19 nt, Artificial Sequence
  Description of Artificial Sequence: Synthetic oligonucleotide
  Antisense Strand to SEQ ID NO: 429167
uuuaugguaacaguggaac

SEQ ID NO: 429169 - RNA, 19 nt, Artificial Sequence
  Description of Artificial Sequence: Synthetic oligonucleotide
  Sense strand starting at position 1681 of SEQ ID NO: 316644
ucauauagacuugguaaua

SEQ ID NO: 429170 - RNA, 19 nt, Artificial Sequence
  Description of Artificial Sequence: Synthetic oligonucleotide
  Antisense Strand to SEQ ID NO: 429169
uauuaccaagucuauauga

SEQ ID NO: 429171 - RNA, 19 nt, Artificial Sequence
  Description of Artificial Sequence: Synthetic oligonucleotide
  Sense strand starting at position 1742 of SEQ ID NO: 316644
uggauaacugguuagccua

SEQ ID NO: 429172 - RNA, 19 nt, Artificial Sequence
  Description of Artificial Sequence: Synthetic oligonucleotide
  Antisense Strand to SEQ ID NO: 429171
uaggcuaaccaguuaucca

SEQ ID NO: 429173 - RNA, 19 nt, Artificial Sequence
  Description of Artificial Sequence: Synthetic oligonucleotide
  Sense strand starting at position 1997 of SEQ ID NO: 316644
aaaguaauguuguugagga

SEQ ID NO: 429174 - RNA, 19 nt, Artificial Sequence
  Description of Artificial Sequence: Synthetic oligonucleotide
  Antisense Strand to SEQ ID NO: 429173
uccucaacaacauuacuuu

SEQ ID NO: 429175 - RNA, 19 nt, Artificial Sequence
  Description of Artificial Sequence: Synthetic oligonucleotide
  Sense strand starting at position 1999 of SEQ ID NO: 316644
aguaauguuguugaggaaa

SEQ ID NO: 429176 - RNA, 19 nt, Artificial Sequence
  Description of Artificial Sequence: Synthetic oligonucleotide
  Antisense Strand to SEQ ID NO: 429175
uuuccucaacaacauuacu

SEQ ID NO: 429177 - RNA, 19 nt, Artificial Sequence
  Description of Artificial Sequence: Synthetic oligonucleotide
  Sense strand starting at position 2115 of SEQ ID NO: 316644
gcagaauucuugcuaaaua

SEQ ID NO: 429178 - RNA, 19 nt, Artificial Sequence
  Description of Artificial Sequence: Synthetic oligonucleotide
  Antisense Strand to SEQ ID NO: 429177
uauuuagcaagaauucugc

SEQ ID NO: 429179 - RNA, 19 nt, Artificial Sequence
  Description of Artificial Sequence: Synthetic oligonucleotide
  Sense strand starting at position 2422 of SEQ ID NO: 316644
cugcacuucgguguuuauu

SEQ ID NO: 429180 - RNA, 19 nt, Artificial Sequence
  Description of Artificial Sequence: Synthetic oligonucleotide
  Antisense Strand to SEQ ID NO: 429179
aauaaacaccgaagugcag

SEQ ID NO: 429181 - RNA, 19 nt, Artificial Sequence
  Description of Artificial Sequence: Synthetic oligonucleotide
  Sense strand starting at position 2431 of SEQ ID NO: 316644
gguguuuauuaccucauua

SEQ ID NO: 429182 - RNA, 19 nt, Artificial Sequence
  Description of Artificial Sequence: Synthetic oligonucleotide
  Antisense Strand to SEQ ID NO: 429181
uaaugagguaauaaacacc

SEQ ID NO: 429183 - RNA, 19 nt, Artificial Sequence
  Description of Artificial Sequence: Synthetic oligonucleotide
  Sense strand starting at position 2477 of SEQ ID NO: 316644
ccugucagucaacauauaa

SEQ ID NO: 429184 - RNA, 19 nt, Artificial Sequence
  Description of Artificial Sequence: Synthetic oligonucleotide
  Antisense Strand to SEQ ID NO: 429183
uuauauguugacugacagg

SEQ ID NO: 429185 - RNA, 19 nt, Artificial Sequence
  Description of Artificial Sequence: Synthetic oligonucleotide
  Sense strand starting at position 2787 of SEQ ID NO: 316644
aguuacguagaaugaguaa

SEQ ID NO: 429186 - RNA, 19 nt, Artificial Sequence
  Description of Artificial Sequence: Synthetic oligonucleotide
  Antisense Strand to SEQ ID NO: 429185
uuacucauucuacguaacu

SEQ ID NO: 429187 - RNA, 19 nt, Artificial Sequence
  Description of Artificial Sequence: Synthetic oligonucleotide
  Sense strand starting at position 2790 of SEQ ID NO: 316644
uacguagaaugaguaaguu

SEQ ID NO: 429188 - RNA, 19 nt, Artificial Sequence
  Description of Artificial Sequence: Synthetic oligonucleotide
  Antisense Strand to SEQ ID NO: 429187
aacuuacucauucuacgua

SEQ ID NO: 429189 - RNA, 19 nt, Artificial Sequence
  Description of Artificial Sequence: Synthetic oligonucleotide
  Sense strand starting at position 2848 of SEQ ID NO: 316644
guaugcuuagaauaugcua

SEQ ID NO: 429190 - RNA, 19 nt, Artificial Sequence
  Description of Artificial Sequence: Synthetic oligonucleotide
  Antisense Strand to SEQ ID NO: 429189
uagcauauucuaagcauac

SEQ ID NO: 429191 - RNA, 19 nt, Artificial Sequence
  Description of Artificial Sequence: Synthetic oligonucleotide
  Sense strand starting at position 2851 of SEQ ID NO: 316644
ugcuuagaauaugcuaaga

SEQ ID NO: 429192 - RNA, 19 nt, Artificial Sequence
  Description of Artificial Sequence: Synthetic oligonucleotide
  Antisense Strand to SEQ ID NO: 429191
ucuuagcauauucuaagca

SEQ ID NO: 429193 - RNA, 19 nt, Artificial Sequence
  Description of Artificial Sequence: Synthetic oligonucleotide
  Sense strand starting at position 2864 of SEQ ID NO: 316644
cuaagagacuaggucuuaa

SEQ ID NO: 429194 - RNA, 19 nt, Artificial Sequence
  Description of Artificial Sequence: Synthetic oligonucleotide
  Antisense Strand to SEQ ID NO: 429193
uuaagaccuagucucuuag

SEQ ID NO: 429195 - RNA, 19 nt, Artificial Sequence
  Description of Artificial Sequence: Synthetic oligonucleotide
  Sense strand starting at position 3248 of SEQ ID NO: 316644
ggcuguaguacucaaguca

SEQ ID NO: 429196 - RNA, 19 nt, Artificial Sequence
  Description of Artificial Sequence: Synthetic oligonucleotide
  Antisense Strand to SEQ ID NO: 429195
ugacuugaguacuacagcc

SEQ ID NO: 429197 - RNA, 19 nt, Artificial Sequence
  Description of Artificial Sequence: Synthetic oligonucleotide
  Sense strand starting at position 3255 of SEQ ID NO: 316644
guacucaagucacuaugua

SEQ ID NO: 429198 - RNA, 19 nt, Artificial Sequence
  Description of Artificial Sequence: Synthetic oligonucleotide
  Antisense Strand to SEQ ID NO: 429197
uacauagugacuugaguac

SEQ ID NO: 429199 - RNA, 19 nt, Artificial Sequence
  Description of Artificial Sequence: Synthetic oligonucleotide
  Sense strand starting at position 3605 of SEQ ID NO: 316644
acaccaggccuuuaaagua

SEQ ID NO: 429200 - RNA, 19 nt, Artificial Sequence
  Description of Artificial Sequence: Synthetic oligonucleotide
  Antisense Strand to SEQ ID NO: 429199
uacuuuaaaggccuggugu

SEQ ID NO: 429201 - RNA, 19 nt, Artificial Sequence
  Description of Artificial Sequence: Synthetic oligonucleotide
  Sense strand starting at position 3823 of SEQ ID NO: 316644
uuguaaccaccauaguaau

SEQ ID NO: 429202 - RNA, 19 nt, Artificial Sequence
  Description of Artificial Sequence: Synthetic oligonucleotide
  Antisense Strand to SEQ ID NO: 429201
auuacuauggugguuacaa

SEQ ID NO: 429203 - RNA, 19 nt, Artificial Sequence
  Description of Artificial Sequence: Synthetic oligonucleotide
  Sense strand starting at position 3966 of SEQ ID NO: 316644
cacaucuuugcaggugaau

SEQ ID NO: 429204 - RNA, 19 nt, Artificial Sequence
  Description of Artificial Sequence: Synthetic oligonucleotide
  Antisense Strand to SEQ ID NO: 429203
auucaccugcaaagaugug

SEQ ID NO: 429205 - RNA, 19 nt, Artificial Sequence
  Description of Artificial Sequence: Synthetic oligonucleotide
  Sense strand starting at position 3972 of SEQ ID NO: 316644
uuugcaggugaauacauaa

SEQ ID NO: 429206 - RNA, 19 nt, Artificial Sequence
  Description of Artificial Sequence: Synthetic oligonucleotide
  Antisense Strand to SEQ ID NO: 429205
uuauguauucaccugcaaa

SEQ ID NO: 429207 - RNA, 19 nt, Artificial Sequence
  Description of Artificial Sequence: Synthetic oligonucleotide
  Sense strand starting at position 37 of SEQ ID NO: 316645
uaugguagcccugaaacaa

SEQ ID NO: 429208 - RNA, 19 nt, Artificial Sequence
  Description of Artificial Sequence: Synthetic oligonucleotide
  Antisense Strand to SEQ ID NO: 429207
uuguuucagggcuaccaua

SEQ ID NO: 429209 - RNA, 19 nt, Artificial Sequence
  Description of Artificial Sequence: Synthetic oligonucleotide
  Sense strand starting at position 148 of SEQ ID NO: 316645
uuguaaucuguuuagacau

SEQ ID NO: 429210 - RNA, 19 nt, Artificial Sequence
  Description of Artificial Sequence: Synthetic oligonucleotide
  Antisense Strand to SEQ ID NO: 429209
augucuaaacagauuacaa

SEQ ID NO: 429211 - RNA, 19 nt, Artificial Sequence
  Description of Artificial Sequence: Synthetic oligonucleotide
  Sense strand starting at position 319 of SEQ ID NO: 316645
auccaucuacuguaaugua

SEQ ID NO: 429212 - RNA, 19 nt, Artificial Sequence
  Description of Artificial Sequence: Synthetic oligonucleotide
  Antisense Strand to SEQ ID NO: 429211
uacauuacaguagauggau

SEQ ID NO: 429213 - RNA, 19 nt, Artificial Sequence
  Description of Artificial Sequence: Synthetic oligonucleotide
  Sense strand starting at position 338 of SEQ ID NO: 316645
cccauaauugaggguaucu

SEQ ID NO: 429214 - RNA, 19 nt, Artificial Sequence
  Description of Artificial Sequence: Synthetic oligonucleotide
  Antisense Strand to SEQ ID NO: 429213
agauacccucaauuauggg

SEQ ID NO: 429215 - RNA, 19 nt, Artificial Sequence
  Description of Artificial Sequence: Synthetic oligonucleotide
  Sense strand starting at position 343 of SEQ ID NO: 316645
aauugaggguaucuauauu

SEQ ID NO: 429216 - RNA, 19 nt, Artificial Sequence
  Description of Artificial Sequence: Synthetic oligonucleotide
  Antisense Strand to SEQ ID NO: 429215
aauauagauacccucaauu

SEQ ID NO: 429217 - RNA, 19 nt, Artificial Sequence
  Description of Artificial Sequence: Synthetic oligonucleotide
  Sense strand starting at position 433 of SEQ ID NO: 316645
caguaugaucaaggucuaa

SEQ ID NO: 429218 - RNA, 19 nt, Artificial Sequence
  Description of Artificial Sequence: Synthetic oligonucleotide
  Antisense Strand to SEQ ID NO: 429217
uuagaccuugaucauacug

SEQ ID NO: 429219 - RNA, 19 nt, Artificial Sequence
  Description of Artificial Sequence: Synthetic oligonucleotide
  Sense strand starting at position 459 of SEQ ID NO: 316645
gacuacagugcucauggau

SEQ ID NO: 429220 - RNA, 19 nt, Artificial Sequence
  Description of Artificial Sequence: Synthetic oligonucleotide
  Antisense Strand to SEQ ID NO: 429219
auccaugagcacuguaguc

SEQ ID NO: 429221 - RNA, 19 nt, Artificial Sequence
  Description of Artificial Sequence: Synthetic oligonucleotide
  Sense strand starting at position 695 of SEQ ID NO: 316645
ccuguugguacugaugaga

SEQ ID NO: 429222 - RNA, 19 nt, Artificial Sequence
  Description of Artificial Sequence: Synthetic oligonucleotide
  Antisense Strand to SEQ ID NO: 429221
ucucaucaguaccaacagg

SEQ ID NO: 429223 - RNA, 19 nt, Artificial Sequence
  Description of Artificial Sequence: Synthetic oligonucleotide
  Sense strand starting at position 733 of SEQ ID NO: 316645
auggcugucacugaucaga

SEQ ID NO: 429224 - RNA, 19 nt, Artificial Sequence
  Description of Artificial Sequence: Synthetic oligonucleotide
  Antisense Strand to SEQ ID NO: 429223
ucugaucagugacagccau

SEQ ID NO: 429225 - RNA, 19 nt, Artificial Sequence
  Description of Artificial Sequence: Synthetic oligonucleotide
  Sense strand starting at position 815 of SEQ ID NO: 316645
gucaaugucgaagacauua

SEQ ID NO: 429226 - RNA, 19 nt, Artificial Sequence
  Description of Artificial Sequence: Synthetic oligonucleotide
  Antisense Strand to SEQ ID NO: 429225
uaaugucuucgacauugac

SEQ ID NO: 429227 - RNA, 19 nt, Artificial Sequence
  Description of Artificial Sequence: Synthetic oligonucleotide
  Sense strand starting at position 820 of SEQ ID NO: 316645
ugucgaagacauuagucaa

SEQ ID NO: 429228 - RNA, 19 nt, Artificial Sequence
  Description of Artificial Sequence: Synthetic oligonucleotide
  Antisense Strand to SEQ ID NO: 429227
uugacuaaugucuucgaca

SEQ ID NO: 429229 - RNA, 19 nt, Artificial Sequence
  Description of Artificial Sequence: Synthetic oligonucleotide
  Sense strand starting at position 1105 of SEQ ID NO: 316645
ccaagaaaguaaucauugu

SEQ ID NO: 429230 - RNA, 19 nt, Artificial Sequence
  Description of Artificial Sequence: Synthetic oligonucleotide
  Antisense Strand to SEQ ID NO: 429229
acaaugauuacuuucuugg

SEQ ID NO: 429231 - RNA, 19 nt, Artificial Sequence
  Description of Artificial Sequence: Synthetic oligonucleotide
  Sense strand starting at position 1145 of SEQ ID NO: 316645
caguuagaacuguacaguu

SEQ ID NO: 429232 - RNA, 19 nt, Artificial Sequence
  Description of Artificial Sequence: Synthetic oligonucleotide
  Antisense Strand to SEQ ID NO: 429231
aacuguacaguucuaacug

SEQ ID NO: 429233 - RNA, 19 nt, Artificial Sequence
  Description of Artificial Sequence: Synthetic oligonucleotide
  Sense strand starting at position 1184 of SEQ ID NO: 316645
gggauaaccuaagcaucuu

SEQ ID NO: 429234 - RNA, 19 nt, Artificial Sequence
  Description of Artificial Sequence: Synthetic oligonucleotide
  Antisense Strand to SEQ ID NO: 429233
aagaugcuuagguuauccc

SEQ ID NO: 429235 - RNA, 19 nt, Artificial Sequence
  Description of Artificial Sequence: Synthetic oligonucleotide
  Sense strand starting at position 1499 of SEQ ID NO: 316645
acuagucugagggaguuau

SEQ ID NO: 429236 - RNA, 19 nt, Artificial Sequence
  Description of Artificial Sequence: Synthetic oligonucleotide
  Antisense Strand to SEQ ID NO: 429235
auaacucccucagacuagu

SEQ ID NO: 429237 - RNA, 19 nt, Artificial Sequence
  Description of Artificial Sequence: Synthetic oligonucleotide
  Sense strand starting at position 1503 of SEQ ID NO: 316645
gucugagggaguuauguga

SEQ ID NO: 429238 - RNA, 19 nt, Artificial Sequence
  Description of Artificial Sequence: Synthetic oligonucleotide
  Antisense Strand to SEQ ID NO: 429237
ucacauaacucccucagac

SEQ ID NO: 429239 - RNA, 19 nt, Artificial Sequence
  Description of Artificial Sequence: Synthetic oligonucleotide
  Sense strand starting at position 1512 of SEQ ID NO: 316645
aguuaugugaaggagcaua

SEQ ID NO: 429240 - RNA, 19 nt, Artificial Sequence
  Description of Artificial Sequence: Synthetic oligonucleotide
  Antisense Strand to SEQ ID NO: 429239
uaugcuccuucacauaacu

SEQ ID NO: 429241 - RNA, 19 nt, Artificial Sequence
  Description of Artificial Sequence: Synthetic oligonucleotide
  Sense strand starting at position 1758 of SEQ ID NO: 316645
uuucuccauguggaauaau

SEQ ID NO: 429242 - RNA, 19 nt, Artificial Sequence
  Description of Artificial Sequence: Synthetic oligonucleotide
  Antisense Strand to SEQ ID NO: 429241
auuauuccacauggagaaa

SEQ ID NO: 429243 - RNA, 19 nt, Artificial Sequence
  Description of Artificial Sequence: Synthetic oligonucleotide
  Sense strand starting at position 2259 of SEQ ID NO: 316645
agagaugacuugucccuaa

SEQ ID NO: 429244 - RNA, 19 nt, Artificial Sequence
  Description of Artificial Sequence: Synthetic oligonucleotide
  Antisense Strand to SEQ ID NO: 429243
uuagggacaagucaucucu

SEQ ID NO: 429245 - RNA, 19 nt, Artificial Sequence
  Description of Artificial Sequence: Synthetic oligonucleotide
  Sense strand starting at position 2263 of SEQ ID NO: 316645
augacuugucccuaaguug

SEQ ID NO: 429246 - RNA, 19 nt, Artificial Sequence
  Description of Artificial Sequence: Synthetic oligonucleotide
  Antisense Strand to SEQ ID NO: 429245
caacuuagggacaagucau

SEQ ID NO: 429247 - RNA, 19 nt, Artificial Sequence
  Description of Artificial Sequence: Synthetic oligonucleotide
  Sense strand starting at position 2272 of SEQ ID NO: 316645
cccuaaguugcagaauaau

SEQ ID NO: 429248 - RNA, 19 nt, Artificial Sequence
  Description of Artificial Sequence: Synthetic oligonucleotide
  Antisense Strand to SEQ ID NO: 429247
auuauucugcaacuuaggg

SEQ ID NO: 429249 - RNA, 19 nt, Artificial Sequence
  Description of Artificial Sequence: Synthetic oligonucleotide
  Sense strand starting at position 2335 of SEQ ID NO: 316645
gcagauuugguaugcaauu

SEQ ID NO: 429250 - RNA, 19 nt, Artificial Sequence
  Description of Artificial Sequence: Synthetic oligonucleotide
  Antisense Strand to SEQ ID NO: 429249
aauugcauaccaaaucugc

SEQ ID NO: 429251 - RNA, 19 nt, Artificial Sequence
  Description of Artificial Sequence: Synthetic oligonucleotide
  Sense strand starting at position 2409 of SEQ ID NO: 316645
acaagacauugucugacca

SEQ ID NO: 429252 - RNA, 19 nt, Artificial Sequence
  Description of Artificial Sequence: Synthetic oligonucleotide
  Antisense Strand to SEQ ID NO: 429251
uggucagacaaugucuugu

SEQ ID NO: 429253 - RNA, 19 nt, Artificial Sequence
  Description of Artificial Sequence: Synthetic oligonucleotide
  Sense strand starting at position 2589 of SEQ ID NO: 316645
uauguaugucaauaaggua

SEQ ID NO: 429254 - RNA, 19 nt, Artificial Sequence
  Description of Artificial Sequence: Synthetic oligonucleotide
  Antisense Strand to SEQ ID NO: 429253
uaccuuauugacauacaua

SEQ ID NO: 429255 - RNA, 19 nt, Artificial Sequence
  Description of Artificial Sequence: Synthetic oligonucleotide
  Sense strand starting at position 2615 of SEQ ID NO: 316645
aaguauuuaguaugcgaug

SEQ ID NO: 429256 - RNA, 19 nt, Artificial Sequence
  Description of Artificial Sequence: Synthetic oligonucleotide
  Antisense Strand to SEQ ID NO: 429255
caucgcauacuaaauacuu

SEQ ID NO: 429257 - RNA, 19 nt, Artificial Sequence
  Description of Artificial Sequence: Synthetic oligonucleotide
  Sense strand starting at position 2906 of SEQ ID NO: 316645
ucagaaucuguggaguuga

SEQ ID NO: 429258 - RNA, 19 nt, Artificial Sequence
  Description of Artificial Sequence: Synthetic oligonucleotide
  Antisense Strand to SEQ ID NO: 429257
ucaacuccacagauucuga

SEQ ID NO: 429259 - RNA, 19 nt, Artificial Sequence
  Description of Artificial Sequence: Synthetic oligonucleotide
  Sense strand starting at position 3033 of SEQ ID NO: 316645
cauaaaguagggugauaua

SEQ ID NO: 429260 - RNA, 19 nt, Artificial Sequence
  Description of Artificial Sequence: Synthetic oligonucleotide
  Antisense Strand to SEQ ID NO: 429259
uauaucacccuacuuuaug

SEQ ID NO: 429261 - RNA, 19 nt, Artificial Sequence
  Description of Artificial Sequence: Synthetic oligonucleotide
  Sense strand starting at position 3091 of SEQ ID NO: 316645
auggaaauaugcucauaau

SEQ ID NO: 429262 - RNA, 19 nt, Artificial Sequence
  Description of Artificial Sequence: Synthetic oligonucleotide
  Antisense Strand to SEQ ID NO: 429261
auuaugagcauauuuccau

SEQ ID NO: 429263 - RNA, 19 nt, Artificial Sequence
  Description of Artificial Sequence: Synthetic oligonucleotide
  Sense strand starting at position 3153 of SEQ ID NO: 316645
gcucucauuuguguaucau

SEQ ID NO: 429264 - RNA, 19 nt, Artificial Sequence
  Description of Artificial Sequence: Synthetic oligonucleotide
  Antisense Strand to SEQ ID NO: 429263
augauacacaaaugagagc

SEQ ID NO: 429265 - RNA, 19 nt, Artificial Sequence
  Description of Artificial Sequence: Synthetic oligonucleotide
  Sense strand starting at position 3249 of SEQ ID NO: 316645
aacauuggguuucucuaga

SEQ ID NO: 429266 - RNA, 19 nt, Artificial Sequence
  Description of Artificial Sequence: Synthetic oligonucleotide
  Antisense Strand to SEQ ID NO: 429265
ucuagagaaacccaauguu

SEQ ID NO: 429267 - RNA, 19 nt, Artificial Sequence
  Description of Artificial Sequence: Synthetic oligonucleotide
  Sense strand starting at position 3254 of SEQ ID NO: 316645
uggguuucucuagauggua

SEQ ID NO: 429268 - RNA, 19 nt, Artificial Sequence
  Description of Artificial Sequence: Synthetic oligonucleotide
  Antisense Strand to SEQ ID NO: 429267
uaccaucuagagaaaccca

SEQ ID NO: 429269 - RNA, 19 nt, Artificial Sequence
  Description of Artificial Sequence: Synthetic oligonucleotide
  Sense strand starting at position 3267 of SEQ ID NO: 316645
augguaagauaagugaauu

SEQ ID NO: 429270 - RNA, 19 nt, Artificial Sequence
  Description of Artificial Sequence: Synthetic oligonucleotide
  Antisense Strand to SEQ ID NO: 429269
aauucacuuaucuuaccau

SEQ ID NO: 429271 - RNA, 19 nt, Artificial Sequence
  Description of Artificial Sequence: Synthetic oligonucleotide
  Sense strand starting at position 3316 of SEQ ID NO: 316645
augaaagagcaguaugcaa

SEQ ID NO: 429272 - RNA, 19 nt, Artificial Sequence
  Description of Artificial Sequence: Synthetic oligonucleotide
  Antisense Strand to SEQ ID NO: 429271
uugcauacugcucuuucau

SEQ ID NO: 429273 - RNA, 19 nt, Artificial Sequence
  Description of Artificial Sequence: Synthetic oligonucleotide
  Sense strand starting at position 3359 of SEQ ID NO: 316645
agcuaaguacaguacuuaa

SEQ ID NO: 429274 - RNA, 19 nt, Artificial Sequence
  Description of Artificial Sequence: Synthetic oligonucleotide
  Antisense Strand to SEQ ID NO: 429273
uuaaguacuguacuuagcu

SEQ ID NO: 429275 - RNA, 19 nt, Artificial Sequence
  Description of Artificial Sequence: Synthetic oligonucleotide
  Sense strand starting at position 3602 of SEQ ID NO: 316645
ucacguacucuccagaaag

SEQ ID NO: 429276 - RNA, 19 nt, Artificial Sequence
  Description of Artificial Sequence: Synthetic oligonucleotide
  Antisense Strand to SEQ ID NO: 429275
cuuucuggagaguacguga

SEQ ID NO: 429277 - RNA, 19 nt, Artificial Sequence
  Description of Artificial Sequence: Synthetic oligonucleotide
  Sense strand starting at position 3757 of SEQ ID NO: 316645
agcaauagucaugaaguau

SEQ ID NO: 429278 - RNA, 19 nt, Artificial Sequence
  Description of Artificial Sequence: Synthetic oligonucleotide
  Antisense Strand to SEQ ID NO: 429277
auacuucaugacuauugcu

SEQ ID NO: 429279 - RNA, 19 nt, Artificial Sequence
  Description of Artificial Sequence: Synthetic oligonucleotide
  Sense strand starting at position 3761 of SEQ ID NO: 316645
auagucaugaaguauuagu

SEQ ID NO: 429280 - RNA, 19 nt, Artificial Sequence
  Description of Artificial Sequence: Synthetic oligonucleotide
  Antisense Strand to SEQ ID NO: 429279
acuaauacuucaugacuau

SEQ ID NO: 429281 - RNA, 19 nt, Artificial Sequence
  Description of Artificial Sequence: Synthetic oligonucleotide
  Sense strand starting at position 3766 of SEQ ID NO: 316645
caugaaguauuaguuauga

SEQ ID NO: 429282 - RNA, 19 nt, Artificial Sequence
  Description of Artificial Sequence: Synthetic oligonucleotide
  Antisense Strand to SEQ ID NO: 429281
ucauaacuaauacuucaug

SEQ ID NO: 429283 - RNA, 19 nt, Artificial Sequence
  Description of Artificial Sequence: Synthetic oligonucleotide
  Sense strand starting at position 3924 of SEQ ID NO: 316645
ccaacauggguuuaaugua

SEQ ID NO: 429284 - RNA, 19 nt, Artificial Sequence
  Description of Artificial Sequence: Synthetic oligonucleotide
  Antisense Strand to SEQ ID NO: 429283
uacauuaaacccauguugg

SEQ ID NO: 429285 - RNA, 19 nt, Artificial Sequence
  Description of Artificial Sequence: Synthetic oligonucleotide
  Sense strand starting at position 3960 of SEQ ID NO: 316645
uggcaaaucccagauucua

SEQ ID NO: 429286 - RNA, 19 nt, Artificial Sequence
  Description of Artificial Sequence: Synthetic oligonucleotide
  Antisense Strand to SEQ ID NO: 429285
uagaaucugggauuugcca

SEQ ID NO: 429287 - RNA, 19 nt, Artificial Sequence
  Description of Artificial Sequence: Synthetic oligonucleotide
  Sense strand starting at position 95 of SEQ ID NO: 316646
uuuaacuaguuaucagaag

SEQ ID NO: 429288 - RNA, 19 nt, Artificial Sequence
  Description of Artificial Sequence: Synthetic oligonucleotide
  Antisense Strand to SEQ ID NO: 429287
cuucugauaacuaguuaaa

SEQ ID NO: 429289 - RNA, 19 nt, Artificial Sequence
  Description of Artificial Sequence: Synthetic oligonucleotide
  Sense strand starting at position 581 of SEQ ID NO: 316646
agggucuuugauggacaau

SEQ ID NO: 429290 - RNA, 19 nt, Artificial Sequence
  Description of Artificial Sequence: Synthetic oligonucleotide
  Antisense Strand to SEQ ID NO: 429289
auuguccaucaaagacccu

SEQ ID NO: 429291 - RNA, 19 nt, Artificial Sequence
  Description of Artificial Sequence: Synthetic oligonucleotide
  Sense strand starting at position 662 of SEQ ID NO: 316646
caccuacaggcuugaaagu

SEQ ID NO: 429292 - RNA, 19 nt, Artificial Sequence
  Description of Artificial Sequence: Synthetic oligonucleotide
  Antisense Strand to SEQ ID NO: 429291
acuuucaagccuguaggug

SEQ ID NO: 429293 - RNA, 19 nt, Artificial Sequence
  Description of Artificial Sequence: Synthetic oligonucleotide
  Sense strand starting at position 677 of SEQ ID NO: 316646
aaguguauuuacgcaaguu

SEQ ID NO: 429294 - RNA, 19 nt, Artificial Sequence
  Description of Artificial Sequence: Synthetic oligonucleotide
  Antisense Strand to SEQ ID NO: 429293
aacuugcguaaauacacuu

SEQ ID NO: 429295 - RNA, 19 nt, Artificial Sequence
  Description of Artificial Sequence: Synthetic oligonucleotide
  Sense strand starting at position 678 of SEQ ID NO: 316646
aguguauuuacgcaaguuc

SEQ ID NO: 429296 - RNA, 19 nt, Artificial Sequence
  Description of Artificial Sequence: Synthetic oligonucleotide
  Antisense Strand to SEQ ID NO: 429295
gaacuugcguaaauacacu

SEQ ID NO: 429297 - RNA, 19 nt, Artificial Sequence
  Description of Artificial Sequence: Synthetic oligonucleotide
  Sense strand starting at position 764 of SEQ ID NO: 316646
ucucauuauggcugggaau

SEQ ID NO: 429298 - RNA, 19 nt, Artificial Sequence
  Description of Artificial Sequence: Synthetic oligonucleotide
  Antisense Strand to SEQ ID NO: 429297
auucccagccauaaugaga

SEQ ID NO: 429299 - RNA, 19 nt, Artificial Sequence
  Description of Artificial Sequence: Synthetic oligonucleotide
  Sense strand starting at position 765 of SEQ ID NO: 316646
cucauuauggcugggaaua

SEQ ID NO: 429300 - RNA, 19 nt, Artificial Sequence
  Description of Artificial Sequence: Synthetic oligonucleotide
  Antisense Strand to SEQ ID NO: 429299
uauucccagccauaaugag

SEQ ID NO: 429301 - RNA, 19 nt, Artificial Sequence
  Description of Artificial Sequence: Synthetic oligonucleotide
  Sense strand starting at position 766 of SEQ ID NO: 316646
ucauuauggcugggaauau

SEQ ID NO: 429302 - RNA, 19 nt, Artificial Sequence
  Description of Artificial Sequence: Synthetic oligonucleotide
  Antisense Strand to SEQ ID NO: 429301
auauucccagccauaauga

SEQ ID NO: 429303 - RNA, 19 nt, Artificial Sequence
  Description of Artificial Sequence: Synthetic oligonucleotide
  Sense strand starting at position 775 of SEQ ID NO: 316646
cugggaauaucuuucucac

SEQ ID NO: 429304 - RNA, 19 nt, Artificial Sequence
  Description of Artificial Sequence: Synthetic oligonucleotide
  Antisense Strand to SEQ ID NO: 429303
gugagaaagauauucccag

SEQ ID NO: 429305 - RNA, 19 nt, Artificial Sequence
  Description of Artificial Sequence: Synthetic oligonucleotide
  Sense strand starting at position 777 of SEQ ID NO: 316646
gggaauaucuuucucacag

SEQ ID NO: 429306 - RNA, 19 nt, Artificial Sequence
  Description of Artificial Sequence: Synthetic oligonucleotide
  Antisense Strand to SEQ ID NO: 429305
cugugagaaagauauuccc

SEQ ID NO: 429307 - RNA, 19 nt, Artificial Sequence
  Description of Artificial Sequence: Synthetic oligonucleotide
  Sense strand starting at position 778 of SEQ ID NO: 316646
ggaauaucuuucucacagc

SEQ ID NO: 429308 - RNA, 19 nt, Artificial Sequence
  Description of Artificial Sequence: Synthetic oligonucleotide
  Antisense Strand to SEQ ID NO: 429307
gcugugagaaagauauucc

SEQ ID NO: 429309 - RNA, 19 nt, Artificial Sequence
  Description of Artificial Sequence: Synthetic oligonucleotide
  Sense strand starting at position 847 of SEQ ID NO: 316646
ccaauucugcccuagaaag

SEQ ID NO: 429310 - RNA, 19 nt, Artificial Sequence
  Description of Artificial Sequence: Synthetic oligonucleotide
  Antisense Strand to SEQ ID NO: 429309
cuuucuagggcagaauugg

SEQ ID NO: 429311 - RNA, 19 nt, Artificial Sequence
  Description of Artificial Sequence: Synthetic oligonucleotide
  Sense strand starting at position 863 of SEQ ID NO: 316646
aaguuaauacguuagcaac

SEQ ID NO: 429312 - RNA, 19 nt, Artificial Sequence
  Description of Artificial Sequence: Synthetic oligonucleotide
  Antisense Strand to SEQ ID NO: 429311
guugcuaacguauuaacuu

SEQ ID NO: 429313 - RNA, 19 nt, Artificial Sequence
  Description of Artificial Sequence: Synthetic oligonucleotide
  Sense strand starting at position 910 of SEQ ID NO: 316646
ugacucuucuggucauuaa

SEQ ID NO: 429314 - RNA, 19 nt, Artificial Sequence
  Description of Artificial Sequence: Synthetic oligonucleotide
  Antisense Strand to SEQ ID NO: 429313
uuaaugaccagaagaguca

SEQ ID NO: 429315 - RNA, 19 nt, Artificial Sequence
  Description of Artificial Sequence: Synthetic oligonucleotide
  Sense strand starting at position 911 of SEQ ID NO: 316646
gacucuucuggucauuaag

SEQ ID NO: 429316 - RNA, 19 nt, Artificial Sequence
  Description of Artificial Sequence: Synthetic oligonucleotide
  Antisense Strand to SEQ ID NO: 429315
cuuaaugaccagaagaguc

SEQ ID NO: 429317 - RNA, 19 nt, Artificial Sequence
  Description of Artificial Sequence: Synthetic oligonucleotide
  Sense strand starting at position 914 of SEQ ID NO: 316646
ucuucuggucauuaagcaa

SEQ ID NO: 429318 - RNA, 19 nt, Artificial Sequence
  Description of Artificial Sequence: Synthetic oligonucleotide
  Antisense Strand to SEQ ID NO: 429317
uugcuuaaugaccagaaga

SEQ ID NO: 429319 - RNA, 19 nt, Artificial Sequence
  Description of Artificial Sequence: Synthetic oligonucleotide
  Sense strand starting at position 969 of SEQ ID NO: 316646
aagauaaugguacguaaag

SEQ ID NO: 429320 - RNA, 19 nt, Artificial Sequence
  Description of Artificial Sequence: Synthetic oligonucleotide
  Antisense Strand to SEQ ID NO: 429319
cuuuacguaccauuaucuu

SEQ ID NO: 429321 - RNA, 19 nt, Artificial Sequence
  Description of Artificial Sequence: Synthetic oligonucleotide
  Sense strand starting at position 978 of SEQ ID NO: 316646
guacguaaaggcuauuaac

SEQ ID NO: 429322 - RNA, 19 nt, Artificial Sequence
  Description of Artificial Sequence: Synthetic oligonucleotide
  Antisense Strand to SEQ ID NO: 429321
guuaauagccuuuacguac

SEQ ID NO: 429323 - RNA, 19 nt, Artificial Sequence
  Description of Artificial Sequence: Synthetic oligonucleotide
  Sense strand starting at position 1150 of SEQ ID NO: 316646
cccugauuccagcaguuag

SEQ ID NO: 429324 - RNA, 19 nt, Artificial Sequence
  Description of Artificial Sequence: Synthetic oligonucleotide
  Antisense Strand to SEQ ID NO: 429323
cuaacugcuggaaucaggg

SEQ ID NO: 429325 - RNA, 19 nt, Artificial Sequence
  Description of Artificial Sequence: Synthetic oligonucleotide
  Sense strand starting at position 1261 of SEQ ID NO: 316646
cuaaguggcagguaaagua

SEQ ID NO: 429326 - RNA, 19 nt, Artificial Sequence
  Description of Artificial Sequence: Synthetic oligonucleotide
  Antisense Strand to SEQ ID NO: 429325
uacuuuaccugccacuuag

SEQ ID NO: 429327 - RNA, 19 nt, Artificial Sequence
  Description of Artificial Sequence: Synthetic oligonucleotide
  Sense strand starting at position 1434 of SEQ ID NO: 316646
cugcuacuugauuaaagca

SEQ ID NO: 429328 - RNA, 19 nt, Artificial Sequence
  Description of Artificial Sequence: Synthetic oligonucleotide
  Antisense Strand to SEQ ID NO: 429327
ugcuuuaaucaaguagcag

SEQ ID NO: 429329 - RNA, 19 nt, Artificial Sequence
  Description of Artificial Sequence: Synthetic oligonucleotide
  Sense strand starting at position 1450 of SEQ ID NO: 316646
gcacaaaggccauaacuau

SEQ ID NO: 429330 - RNA, 19 nt, Artificial Sequence
  Description of Artificial Sequence: Synthetic oligonucleotide
  Antisense Strand to SEQ ID NO: 429329
auaguuauggccuuugugc

SEQ ID NO: 429331 - RNA, 19 nt, Artificial Sequence
  Description of Artificial Sequence: Synthetic oligonucleotide
  Sense strand starting at position 2228 of SEQ ID NO: 316646
ugcuguguacuauggauuu

SEQ ID NO: 429332 - RNA, 19 nt, Artificial Sequence
  Description of Artificial Sequence: Synthetic oligonucleotide
  Antisense Strand to SEQ ID NO: 429331
aaauccauaguacacagca

SEQ ID NO: 429333 - RNA, 19 nt, Artificial Sequence
  Description of Artificial Sequence: Synthetic oligonucleotide
  Sense strand starting at position 2291 of SEQ ID NO: 316646
uugucaaacucaguauauu

SEQ ID NO: 429334 - RNA, 19 nt, Artificial Sequence
  Description of Artificial Sequence: Synthetic oligonucleotide
  Antisense Strand to SEQ ID NO: 429333
aauauacugaguuugacaa

SEQ ID NO: 429335 - RNA, 19 nt, Artificial Sequence
  Description of Artificial Sequence: Synthetic oligonucleotide
  Sense strand starting at position 2292 of SEQ ID NO: 316646
ugucaaacucaguauauuc

SEQ ID NO: 429336 - RNA, 19 nt, Artificial Sequence
  Description of Artificial Sequence: Synthetic oligonucleotide
  Antisense Strand to SEQ ID NO: 429335
gaauauacugaguuugaca

SEQ ID NO: 429337 - RNA, 19 nt, Artificial Sequence
  Description of Artificial Sequence: Synthetic oligonucleotide
  Sense strand starting at position 2329 of SEQ ID NO: 316646
ggaggucugcaauaguuau

SEQ ID NO: 429338 - RNA, 19 nt, Artificial Sequence
  Description of Artificial Sequence: Synthetic oligonucleotide
  Antisense Strand to SEQ ID NO: 429337
auaacuauugcagaccucc

SEQ ID NO: 429339 - RNA, 19 nt, Artificial Sequence
  Description of Artificial Sequence: Synthetic oligonucleotide
  Sense strand starting at position 2341 of SEQ ID NO: 316646
uaguuaugaguguagguga

SEQ ID NO: 429340 - RNA, 19 nt, Artificial Sequence
  Description of Artificial Sequence: Synthetic oligonucleotide
  Antisense Strand to SEQ ID NO: 429339
ucaccuacacucauaacua

SEQ ID NO: 429341 - RNA, 19 nt, Artificial Sequence
  Description of Artificial Sequence: Synthetic oligonucleotide
  Sense strand starting at position 2354 of SEQ ID NO: 316646
aggugaagcguguuugcuu

SEQ ID NO: 429342 - RNA, 19 nt, Artificial Sequence
  Description of Artificial Sequence: Synthetic oligonucleotide
  Antisense Strand to SEQ ID NO: 429341
aagcaaacacgcuucaccu

SEQ ID NO: 429343 - RNA, 19 nt, Artificial Sequence
  Description of Artificial Sequence: Synthetic oligonucleotide
  Sense strand starting at position 2368 of SEQ ID NO: 316646
ugcuuaggaccggauugau

SEQ ID NO: 429344 - RNA, 19 nt, Artificial Sequence
  Description of Artificial Sequence: Synthetic oligonucleotide
  Antisense Strand to SEQ ID NO: 429343
aucaauccgguccuaagca

SEQ ID NO: 429345 - RNA, 19 nt, Artificial Sequence
  Description of Artificial Sequence: Synthetic oligonucleotide
  Sense strand starting at position 2458 of SEQ ID NO: 316646
auaaaucccugagcuggaa

SEQ ID NO: 429346 - RNA, 19 nt, Artificial Sequence
  Description of Artificial Sequence: Synthetic oligonucleotide
  Antisense Strand to SEQ ID NO: 429345
uuccagcucagggauuuau

SEQ ID NO: 429347 - RNA, 19 nt, Artificial Sequence
  Description of Artificial Sequence: Synthetic oligonucleotide
  Sense strand starting at position 3125 of SEQ ID NO: 316646
cuagguaggaguugugaga

SEQ ID NO: 429348 - RNA, 19 nt, Artificial Sequence
  Description of Artificial Sequence: Synthetic oligonucleotide
  Antisense Strand to SEQ ID NO: 429347
ucucacaacuccuaccuag

SEQ ID NO: 429349 - RNA, 19 nt, Artificial Sequence
  Description of Artificial Sequence: Synthetic oligonucleotide
  Sense strand starting at position 3163 of SEQ ID NO: 316646
ucuuauugauugcuaggaa

SEQ ID NO: 429350 - RNA, 19 nt, Artificial Sequence
  Description of Artificial Sequence: Synthetic oligonucleotide
  Antisense Strand to SEQ ID NO: 429349
uuccuagcaaucaauaaga

SEQ ID NO: 429351 - RNA, 19 nt, Artificial Sequence
  Description of Artificial Sequence: Synthetic oligonucleotide
  Sense strand starting at position 3313 of SEQ ID NO: 316646
ucaucugugcuggaguaau

SEQ ID NO: 429352 - RNA, 19 nt, Artificial Sequence
  Description of Artificial Sequence: Synthetic oligonucleotide
  Antisense Strand to SEQ ID NO: 429351
auuacuccagcacagauga

SEQ ID NO: 429353 - RNA, 19 nt, Artificial Sequence
  Description of Artificial Sequence: Synthetic oligonucleotide
  Sense strand starting at position 3458 of SEQ ID NO: 316646
ggaauuaggacaugccuuu

SEQ ID NO: 429354 - RNA, 19 nt, Artificial Sequence
  Description of Artificial Sequence: Synthetic oligonucleotide
  Antisense Strand to SEQ ID NO: 429353
aaaggcauguccuaauucc

SEQ ID NO: 429355 - RNA, 19 nt, Artificial Sequence
  Description of Artificial Sequence: Synthetic oligonucleotide
  Sense strand starting at position 3464 of SEQ ID NO: 316646
aggacaugccuuuagcaaa

SEQ ID NO: 429356 - RNA, 19 nt, Artificial Sequence
  Description of Artificial Sequence: Synthetic oligonucleotide
  Antisense Strand to SEQ ID NO: 429355
uuugcuaaaggcauguccu

SEQ ID NO: 429357 - RNA, 19 nt, Artificial Sequence
  Description of Artificial Sequence: Synthetic oligonucleotide
  Sense strand starting at position 3566 of SEQ ID NO: 316646
guuucuucugguggaaaga

SEQ ID NO: 429358 - RNA, 19 nt, Artificial Sequence
  Description of Artificial Sequence: Synthetic oligonucleotide
  Antisense Strand to SEQ ID NO: 429357
ucuuuccaccagaagaaac

SEQ ID NO: 429359 - RNA, 19 nt, Artificial Sequence
  Description of Artificial Sequence: Synthetic oligonucleotide
  Sense strand starting at position 3577 of SEQ ID NO: 316646
uggaaagagccugaucugu

SEQ ID NO: 429360 - RNA, 19 nt, Artificial Sequence
  Description of Artificial Sequence: Synthetic oligonucleotide
  Antisense Strand to SEQ ID NO: 429359
acagaucaggcucuuucca

SEQ ID NO: 429361 - RNA, 19 nt, Artificial Sequence
  Description of Artificial Sequence: Synthetic oligonucleotide
  Sense strand starting at position 3579 of SEQ ID NO: 316646
gaaagagccugaucuguua

SEQ ID NO: 429362 - RNA, 19 nt, Artificial Sequence
  Description of Artificial Sequence: Synthetic oligonucleotide
  Antisense Strand to SEQ ID NO: 429361
uaacagaucaggcucuuuc

SEQ ID NO: 429363 - RNA, 19 nt, Artificial Sequence
  Description of Artificial Sequence: Synthetic oligonucleotide
  Sense strand starting at position 3662 of SEQ ID NO: 316646
gcuaaauuacacuauagug

SEQ ID NO: 429364 - RNA, 19 nt, Artificial Sequence
  Description of Artificial Sequence: Synthetic oligonucleotide
  Antisense Strand to SEQ ID NO: 429363
cacuauaguguaauuuagc

SEQ ID NO: 429365 - RNA, 19 nt, Artificial Sequence
  Description of Artificial Sequence: Synthetic oligonucleotide
  Sense strand starting at position 3721 of SEQ ID NO: 316646
uggauauuuguauguaugu

SEQ ID NO: 429366 - RNA, 19 nt, Artificial Sequence
  Description of Artificial Sequence: Synthetic oligonucleotide
  Antisense Strand to SEQ ID NO: 429365
acauacauacaaauaucca

SEQ ID NO: 429367 - RNA, 19 nt, Artificial Sequence
  Description of Artificial Sequence: Synthetic oligonucleotide
  Sense strand starting at position 47 of SEQ ID NO: 316647
gccagaaucucaguaauca

SEQ ID NO: 429368 - RNA, 19 nt, Artificial Sequence
  Description of Artificial Sequence: Synthetic oligonucleotide
  Antisense Strand to SEQ ID NO: 429367
ugauuacugagauucuggc

SEQ ID NO: 429369 - RNA, 19 nt, Artificial Sequence
  Description of Artificial Sequence: Synthetic oligonucleotide
  Sense strand starting at position 169 of SEQ ID NO: 316647
aguuauuguuacuccuauu

SEQ ID NO: 429370 - RNA, 19 nt, Artificial Sequence
  Description of Artificial Sequence: Synthetic oligonucleotide
  Antisense Strand to SEQ ID NO: 429369
aauaggaguaacaauaacu

SEQ ID NO: 429371 - RNA, 19 nt, Artificial Sequence
  Description of Artificial Sequence: Synthetic oligonucleotide
  Sense strand starting at position 324 of SEQ ID NO: 316647
ggccucuucucaguugaga

SEQ ID NO: 429372 - RNA, 19 nt, Artificial Sequence
  Description of Artificial Sequence: Synthetic oligonucleotide
  Antisense Strand to SEQ ID NO: 429371
ucucaacugagaagaggcc

SEQ ID NO: 429373 - RNA, 19 nt, Artificial Sequence
  Description of Artificial Sequence: Synthetic oligonucleotide
  Sense strand starting at position 461 of SEQ ID NO: 316647
ccugucucuuauguuaaau

SEQ ID NO: 429374 - RNA, 19 nt, Artificial Sequence
  Description of Artificial Sequence: Synthetic oligonucleotide
  Antisense Strand to SEQ ID NO: 429373
auuuaacauaagagacagg

SEQ ID NO: 429375 - RNA, 19 nt, Artificial Sequence
  Description of Artificial Sequence: Synthetic oligonucleotide
  Sense strand starting at position 806 of SEQ ID NO: 316647
agugcuguugguuagauaa

SEQ ID NO: 429376 - RNA, 19 nt, Artificial Sequence
  Description of Artificial Sequence: Synthetic oligonucleotide
  Antisense Strand to SEQ ID NO: 429375
uuaucuaaccaacagcacu

SEQ ID NO: 429377 - RNA, 19 nt, Artificial Sequence
  Description of Artificial Sequence: Synthetic oligonucleotide
  Sense strand starting at position 870 of SEQ ID NO: 316647
uccagcaauuggucucuua

SEQ ID NO: 429378 - RNA, 19 nt, Artificial Sequence
  Description of Artificial Sequence: Synthetic oligonucleotide
  Antisense Strand to SEQ ID NO: 429377
uaagagaccaauugcugga

SEQ ID NO: 429379 - RNA, 19 nt, Artificial Sequence
  Description of Artificial Sequence: Synthetic oligonucleotide
  Sense strand starting at position 873 of SEQ ID NO: 316647
agcaauuggucucuuaucu

SEQ ID NO: 429380 - RNA, 19 nt, Artificial Sequence
  Description of Artificial Sequence: Synthetic oligonucleotide
  Antisense Strand to SEQ ID NO: 429379
agauaagagaccaauugcu

SEQ ID NO: 429381 - RNA, 19 nt, Artificial Sequence
  Description of Artificial Sequence: Synthetic oligonucleotide
  Sense strand starting at position 881 of SEQ ID NO: 316647
gucucuuaucuugggcaua

SEQ ID NO: 429382 - RNA, 19 nt, Artificial Sequence
  Description of Artificial Sequence: Synthetic oligonucleotide
  Antisense Strand to SEQ ID NO: 429381
uaugcccaagauaagagac

SEQ ID NO: 429383 - RNA, 19 nt, Artificial Sequence
  Description of Artificial Sequence: Synthetic oligonucleotide
  Sense strand starting at position 883 of SEQ ID NO: 316647
cucuuaucuugggcauaaa

SEQ ID NO: 429384 - RNA, 19 nt, Artificial Sequence
  Description of Artificial Sequence: Synthetic oligonucleotide
  Antisense Strand to SEQ ID NO: 429383
uuuaugcccaagauaagag

SEQ ID NO: 429385 - RNA, 19 nt, Artificial Sequence
  Description of Artificial Sequence: Synthetic oligonucleotide
  Sense strand starting at position 988 of SEQ ID NO: 316647
cggaaacugcacugcauaa

SEQ ID NO: 429386 - RNA, 19 nt, Artificial Sequence
  Description of Artificial Sequence: Synthetic oligonucleotide
  Antisense Strand to SEQ ID NO: 429385
uuaugcagugcaguuuccg

SEQ ID NO: 429387 - RNA, 19 nt, Artificial Sequence
  Description of Artificial Sequence: Synthetic oligonucleotide
  Sense strand starting at position 1037 of SEQ ID NO: 316647
guuggucgcauuguuguua

SEQ ID NO: 429388 - RNA, 19 nt, Artificial Sequence
  Description of Artificial Sequence: Synthetic oligonucleotide
  Antisense Strand to SEQ ID NO: 429387
uaacaacaaugcgaccaac

SEQ ID NO: 429389 - RNA, 19 nt, Artificial Sequence
  Description of Artificial Sequence: Synthetic oligonucleotide
  Sense strand starting at position 1336 of SEQ ID NO: 316647
ggcacucaccucuaaaguu

SEQ ID NO: 429390 - RNA, 19 nt, Artificial Sequence
  Description of Artificial Sequence: Synthetic oligonucleotide
  Antisense Strand to SEQ ID NO: 429389
aacuuuagaggugagugcc

SEQ ID NO: 429391 - RNA, 19 nt, Artificial Sequence
  Description of Artificial Sequence: Synthetic oligonucleotide
  Sense strand starting at position 1870 of SEQ ID NO: 316647
uggcgauugcgacaacuca

SEQ ID NO: 429392 - RNA, 19 nt, Artificial Sequence
  Description of Artificial Sequence: Synthetic oligonucleotide
  Antisense Strand to SEQ ID NO: 429391
ugaguugucgcaaucgcca

SEQ ID NO: 429393 - RNA, 19 nt, Artificial Sequence
  Description of Artificial Sequence: Synthetic oligonucleotide
  Sense strand starting at position 1878 of SEQ ID NO: 316647
gcgacaacucagcagauga

SEQ ID NO: 429394 - RNA, 19 nt, Artificial Sequence
  Description of Artificial Sequence: Synthetic oligonucleotide
  Antisense Strand to SEQ ID NO: 429393
ucaucugcugaguugucgc

SEQ ID NO: 429395 - RNA, 19 nt, Artificial Sequence
  Description of Artificial Sequence: Synthetic oligonucleotide
  Sense strand starting at position 2224 of SEQ ID NO: 316647
gaaugaacugcugacguau

SEQ ID NO: 429396 - RNA, 19 nt, Artificial Sequence
  Description of Artificial Sequence: Synthetic oligonucleotide
  Antisense Strand to SEQ ID NO: 429395
auacgucagcaguucauuc

SEQ ID NO: 429397 - RNA, 19 nt, Artificial Sequence
  Description of Artificial Sequence: Synthetic oligonucleotide
  Sense strand starting at position 2399 of SEQ ID NO: 316647
cuugcuuaucccgagagua

SEQ ID NO: 429398 - RNA, 19 nt, Artificial Sequence
  Description of Artificial Sequence: Synthetic oligonucleotide
  Antisense Strand to SEQ ID NO: 429397
uacucucgggauaagcaag

SEQ ID NO: 429399 - RNA, 19 nt, Artificial Sequence
  Description of Artificial Sequence: Synthetic oligonucleotide
  Sense strand starting at position 2559 of SEQ ID NO: 316647
cgcuuaggcguagcagaaa

SEQ ID NO: 429400 - RNA, 19 nt, Artificial Sequence
  Description of Artificial Sequence: Synthetic oligonucleotide
  Antisense Strand to SEQ ID NO: 429399
uuucugcuacgccuaagcg

SEQ ID NO: 429401 - RNA, 19 nt, Artificial Sequence
  Description of Artificial Sequence: Synthetic oligonucleotide
  Sense strand starting at position 2659 of SEQ ID NO: 316647
cccuuaucagagcaacgaa

SEQ ID NO: 429402 - RNA, 19 nt, Artificial Sequence
  Description of Artificial Sequence: Synthetic oligonucleotide
  Antisense Strand to SEQ ID NO: 429401
uucguugcucugauaaggg

SEQ ID NO: 429403 - RNA, 19 nt, Artificial Sequence
  Description of Artificial Sequence: Synthetic oligonucleotide
  Sense strand starting at position 2957 of SEQ ID NO: 316647
cucuguaaagaauguagau

SEQ ID NO: 429404 - RNA, 19 nt, Artificial Sequence
  Description of Artificial Sequence: Synthetic oligonucleotide
  Antisense Strand to SEQ ID NO: 429403
aucuacauucuuuacagag

SEQ ID NO: 429405 - RNA, 19 nt, Artificial Sequence
  Description of Artificial Sequence: Synthetic oligonucleotide
  Sense strand starting at position 2966 of SEQ ID NO: 316647
gaauguagaugucugccuu

SEQ ID NO: 429406 - RNA, 19 nt, Artificial Sequence
  Description of Artificial Sequence: Synthetic oligonucleotide
  Antisense Strand to SEQ ID NO: 429405
aaggcagacaucuacauuc

SEQ ID NO: 429407 - RNA, 19 nt, Artificial Sequence
  Description of Artificial Sequence: Synthetic oligonucleotide
  Sense strand starting at position 2972 of SEQ ID NO: 316647
agaugucugccuuaaguac

SEQ ID NO: 429408 - RNA, 19 nt, Artificial Sequence
  Description of Artificial Sequence: Synthetic oligonucleotide
  Antisense Strand to SEQ ID NO: 429407
guacuuaaggcagacaucu

SEQ ID NO: 429409 - RNA, 19 nt, Artificial Sequence
  Description of Artificial Sequence: Synthetic oligonucleotide
  Sense strand starting at position 3412 of SEQ ID NO: 316647
auuaaaccucuguaagguu

SEQ ID NO: 429410 - RNA, 19 nt, Artificial Sequence
  Description of Artificial Sequence: Synthetic oligonucleotide
  Antisense Strand to SEQ ID NO: 429409
aaccuuacagagguuuaau

SEQ ID NO: 429411 - RNA, 19 nt, Artificial Sequence
  Description of Artificial Sequence: Synthetic oligonucleotide
  Sense strand starting at position 3425 of SEQ ID NO: 316647
aagguuggcuaguuuagaa

SEQ ID NO: 429412 - RNA, 19 nt, Artificial Sequence
  Description of Artificial Sequence: Synthetic oligonucleotide
  Antisense Strand to SEQ ID NO: 429411
uucuaaacuagccaaccuu

SEQ ID NO: 429413 - RNA, 19 nt, Artificial Sequence
  Description of Artificial Sequence: Synthetic oligonucleotide
  Sense strand starting at position 3608 of SEQ ID NO: 316647
aggcuaaauccuuguacca

SEQ ID NO: 429414 - RNA, 19 nt, Artificial Sequence
  Description of Artificial Sequence: Synthetic oligonucleotide
  Antisense Strand to SEQ ID NO: 429413
ugguacaaggauuuagccu

SEQ ID NO: 429415 - RNA, 19 nt, Artificial Sequence
  Description of Artificial Sequence: Synthetic oligonucleotide
  Sense strand starting at position 3677 of SEQ ID NO: 316647
gcacacacucuccagugau

SEQ ID NO: 429416 - RNA, 19 nt, Artificial Sequence
  Description of Artificial Sequence: Synthetic oligonucleotide
  Antisense Strand to SEQ ID NO: 429415
aucacuggagagugugugc

SEQ ID NO: 429417 - RNA, 19 nt, Artificial Sequence
  Description of Artificial Sequence: Synthetic oligonucleotide
  Sense strand starting at position 3697 of SEQ ID NO: 316647
uuuggugcucaugaacaaa

SEQ ID NO: 429418 - RNA, 19 nt, Artificial Sequence
  Description of Artificial Sequence: Synthetic oligonucleotide
  Antisense Strand to SEQ ID NO: 429417
uuuguucaugagcaccaaa

SEQ ID NO: 429419 - RNA, 19 nt, Artificial Sequence
  Description of Artificial Sequence: Synthetic oligonucleotide
  Sense strand starting at position 3758 of SEQ ID NO: 316647
ggaagaauuauucguccac

SEQ ID NO: 429420 - RNA, 19 nt, Artificial Sequence
  Description of Artificial Sequence: Synthetic oligonucleotide
  Antisense Strand to SEQ ID NO: 429419
guggacgaauaauucuucc

SEQ ID NO: 429421 - RNA, 19 nt, Artificial Sequence
  Description of Artificial Sequence: Synthetic oligonucleotide
  Sense strand starting at position 3759 of SEQ ID NO: 316647
gaagaauuauucguccaca

SEQ ID NO: 429422 - RNA, 19 nt, Artificial Sequence
  Description of Artificial Sequence: Synthetic oligonucleotide
  Antisense Strand to SEQ ID NO: 429421
uguggacgaauaauucuuc

SEQ ID NO: 429423 - RNA, 19 nt, Artificial Sequence
  Description of Artificial Sequence: Synthetic oligonucleotide
  Sense strand starting at position 3760 of SEQ ID NO: 316647
aagaauuauucguccacag

SEQ ID NO: 429424 - RNA, 19 nt, Artificial Sequence
  Description of Artificial Sequence: Synthetic oligonucleotide
  Antisense Strand to SEQ ID NO: 429423
cuguggacgaauaauucuu

SEQ ID NO: 429425 - RNA, 19 nt, Artificial Sequence
  Description of Artificial Sequence: Synthetic oligonucleotide
  Sense strand starting at position 3762 of SEQ ID NO: 316647
gaauuauucguccacagcu

SEQ ID NO: 429426 - RNA, 19 nt, Artificial Sequence
  Description of Artificial Sequence: Synthetic oligonucleotide
  Antisense Strand to SEQ ID NO: 429425
agcuguggacgaauaauuc

SEQ ID NO: 429427 - RNA, 19 nt, Artificial Sequence
  Description of Artificial Sequence: Synthetic oligonucleotide
  Sense strand starting at position 3811 of SEQ ID NO: 316647
ggagucuucgauugagagc

SEQ ID NO: 429428 - RNA, 19 nt, Artificial Sequence
  Description of Artificial Sequence: Synthetic oligonucleotide
  Antisense Strand to SEQ ID NO: 429427
gcucucaaucgaagacucc

SEQ ID NO: 429429 - RNA, 19 nt, Artificial Sequence
  Description of Artificial Sequence: Synthetic oligonucleotide
  Sense strand starting at position 3812 of SEQ ID NO: 316647
gagucuucgauugagagca

SEQ ID NO: 429430 - RNA, 19 nt, Artificial Sequence
  Description of Artificial Sequence: Synthetic oligonucleotide
  Antisense Strand to SEQ ID NO: 429429
ugcucucaaucgaagacuc

SEQ ID NO: 429431 - RNA, 19 nt, Artificial Sequence
  Description of Artificial Sequence: Synthetic oligonucleotide
  Sense strand starting at position 3893 of SEQ ID NO: 316647
gguucuucucaggguugaa

SEQ ID NO: 429432 - RNA, 19 nt, Artificial Sequence
  Description of Artificial Sequence: Synthetic oligonucleotide
  Antisense Strand to SEQ ID NO: 429431
uucaacccugagaagaacc

SEQ ID NO: 429433 - RNA, 19 nt, Artificial Sequence
  Description of Artificial Sequence: Synthetic oligonucleotide
  Sense strand starting at position 3896 of SEQ ID NO: 316647
ucuucucaggguugaaagu

SEQ ID NO: 429434 - RNA, 19 nt, Artificial Sequence
  Description of Artificial Sequence: Synthetic oligonucleotide
  Antisense Strand to SEQ ID NO: 429433
acuuucaacccugagaaga

SEQ ID NO: 429435 - RNA, 19 nt, Artificial Sequence
  Description of Artificial Sequence: Synthetic oligonucleotide
  Sense strand starting at position 3902 of SEQ ID NO: 316647
caggguugaaagugauugu

SEQ ID NO: 429436 - RNA, 19 nt, Artificial Sequence
  Description of Artificial Sequence: Synthetic oligonucleotide
  Antisense Strand to SEQ ID NO: 429435
acaaucacuuucaacccug

SEQ ID NO: 429437 - RNA, 19 nt, Artificial Sequence
  Description of Artificial Sequence: Synthetic oligonucleotide
  Sense strand starting at position 3905 of SEQ ID NO: 316647
gguugaaagugauugugag

SEQ ID NO: 429438 - RNA, 19 nt, Artificial Sequence
  Description of Artificial Sequence: Synthetic oligonucleotide
  Antisense Strand to SEQ ID NO: 429437
cucacaaucacuuucaacc

SEQ ID NO: 429439 - RNA, 19 nt, Artificial Sequence
  Description of Artificial Sequence: Synthetic oligonucleotide
  Sense strand starting at position 3911 of SEQ ID NO: 316647
aagugauugugagcaugaa

SEQ ID NO: 429440 - RNA, 19 nt, Artificial Sequence
  Description of Artificial Sequence: Synthetic oligonucleotide
  Antisense Strand to SEQ ID NO: 429439
uucaugcucacaaucacuu

SEQ ID NO: 429441 - RNA, 19 nt, Artificial Sequence
  Description of Artificial Sequence: Synthetic oligonucleotide
  Sense strand starting at position 3912 of SEQ ID NO: 316647
agugauugugagcaugaaa

SEQ ID NO: 429442 - RNA, 19 nt, Artificial Sequence
  Description of Artificial Sequence: Synthetic oligonucleotide
  Antisense Strand to SEQ ID NO: 429441
uuucaugcucacaaucacu

SEQ ID NO: 429443 - RNA, 19 nt, Artificial Sequence
  Description of Artificial Sequence: Synthetic oligonucleotide
  Sense strand starting at position 3924 of SEQ ID NO: 316647
caugaaacugcaugguaaa

SEQ ID NO: 429444 - RNA, 19 nt, Artificial Sequence
  Description of Artificial Sequence: Synthetic oligonucleotide
  Antisense Strand to SEQ ID NO: 429443
uuuaccaugcaguuucaug

SEQ ID NO: 429445 - RNA, 19 nt, Artificial Sequence
  Description of Artificial Sequence: Synthetic oligonucleotide
  Sense strand starting at position 3925 of SEQ ID NO: 316647
augaaacugcaugguaaau

SEQ ID NO: 429446 - RNA, 19 nt, Artificial Sequence
  Description of Artificial Sequence: Synthetic oligonucleotide
  Antisense Strand to SEQ ID NO: 429445
auuuaccaugcaguuucau

SEQ ID NO: 429447 - RNA, 19 nt, Artificial Sequence
  Description of Artificial Sequence: Synthetic oligonucleotide
  Sense strand starting at position 131 of SEQ ID NO: 316648
ggccucuucucaguugaga

SEQ ID NO: 429448 - RNA, 19 nt, Artificial Sequence
  Description of Artificial Sequence: Synthetic oligonucleotide
  Antisense Strand to SEQ ID NO: 429447
ucucaacugagaagaggcc

SEQ ID NO: 429449 - RNA, 19 nt, Artificial Sequence
  Description of Artificial Sequence: Synthetic oligonucleotide
  Sense strand starting at position 268 of SEQ ID NO: 316648
ccugucucuuauguuaaau

SEQ ID NO: 429450 - RNA, 19 nt, Artificial Sequence
  Description of Artificial Sequence: Synthetic oligonucleotide
  Antisense Strand to SEQ ID NO: 429449
auuuaacauaagagacagg

SEQ ID NO: 429451 - RNA, 19 nt, Artificial Sequence
  Description of Artificial Sequence: Synthetic oligonucleotide
  Sense strand starting at position 613 of SEQ ID NO: 316648
agugcuguugguuagauaa

SEQ ID NO: 429452 - RNA, 19 nt, Artificial Sequence
  Description of Artificial Sequence: Synthetic oligonucleotide
  Antisense Strand to SEQ ID NO: 429451
uuaucuaaccaacagcacu

SEQ ID NO: 429453 - RNA, 19 nt, Artificial Sequence
  Description of Artificial Sequence: Synthetic oligonucleotide
  Sense strand starting at position 677 of SEQ ID NO: 316648
uccagcaauuggucucuua

SEQ ID NO: 429454 - RNA, 19 nt, Artificial Sequence
  Description of Artificial Sequence: Synthetic oligonucleotide
  Antisense Strand to SEQ ID NO: 429453
uaagagaccaauugcugga

SEQ ID NO: 429455 - RNA, 19 nt, Artificial Sequence
  Description of Artificial Sequence: Synthetic oligonucleotide
  Sense strand starting at position 680 of SEQ ID NO: 316648
agcaauuggucucuuaucu

SEQ ID NO: 429456 - RNA, 19 nt, Artificial Sequence
  Description of Artificial Sequence: Synthetic oligonucleotide
  Antisense Strand to SEQ ID NO: 429455
agauaagagaccaauugcu

SEQ ID NO: 429457 - RNA, 19 nt, Artificial Sequence
  Description of Artificial Sequence: Synthetic oligonucleotide
  Sense strand starting at position 688 of SEQ ID NO: 316648
gucucuuaucuugggcaua

SEQ ID NO: 429458 - RNA, 19 nt, Artificial Sequence
  Description of Artificial Sequence: Synthetic oligonucleotide
  Antisense Strand to SEQ ID NO: 429457
uaugcccaagauaagagac

SEQ ID NO: 429459 - RNA, 19 nt, Artificial Sequence
  Description of Artificial Sequence: Synthetic oligonucleotide
  Sense strand starting at position 690 of SEQ ID NO: 316648
cucuuaucuugggcauaaa

SEQ ID NO: 429460 - RNA, 19 nt, Artificial Sequence
  Description of Artificial Sequence: Synthetic oligonucleotide
  Antisense Strand to SEQ ID NO: 429459
uuuaugcccaagauaagag

SEQ ID NO: 429461 - RNA, 19 nt, Artificial Sequence
  Description of Artificial Sequence: Synthetic oligonucleotide
  Sense strand starting at position 795 of SEQ ID NO: 316648
cggaaacugcacugcauaa

SEQ ID NO: 429462 - RNA, 19 nt, Artificial Sequence
  Description of Artificial Sequence: Synthetic oligonucleotide
  Antisense Strand to SEQ ID NO: 429461
uuaugcagugcaguuuccg

SEQ ID NO: 429463 - RNA, 19 nt, Artificial Sequence
  Description of Artificial Sequence: Synthetic oligonucleotide
  Sense strand starting at position 844 of SEQ ID NO: 316648
guuggucgcauuguuguua

SEQ ID NO: 429464 - RNA, 19 nt, Artificial Sequence
  Description of Artificial Sequence: Synthetic oligonucleotide
  Antisense Strand to SEQ ID NO: 429463
uaacaacaaugcgaccaac

SEQ ID NO: 429465 - RNA, 19 nt, Artificial Sequence
  Description of Artificial Sequence: Synthetic oligonucleotide
  Sense strand starting at position 1143 of SEQ ID NO: 316648
ggcacucaccucuaaaguu

SEQ ID NO: 429466 - RNA, 19 nt, Artificial Sequence
  Description of Artificial Sequence: Synthetic oligonucleotide
  Antisense Strand to SEQ ID NO: 429465
aacuuuagaggugagugcc

SEQ ID NO: 429467 - RNA, 19 nt, Artificial Sequence
  Description of Artificial Sequence: Synthetic oligonucleotide
  Sense strand starting at position 1677 of SEQ ID NO: 316648
uggcgauugcgacaacuca

SEQ ID NO: 429468 - RNA, 19 nt, Artificial Sequence
  Description of Artificial Sequence: Synthetic oligonucleotide
  Antisense Strand to SEQ ID NO: 429467
ugaguugucgcaaucgcca

SEQ ID NO: 429469 - RNA, 19 nt, Artificial Sequence
  Description of Artificial Sequence: Synthetic oligonucleotide
  Sense strand starting at position 1685 of SEQ ID NO: 316648
gcgacaacucagcagauga

SEQ ID NO: 429470 - RNA, 19 nt, Artificial Sequence
  Description of Artificial Sequence: Synthetic oligonucleotide
  Antisense Strand to SEQ ID NO: 429469
ucaucugcugaguugucgc

SEQ ID NO: 429471 - RNA, 19 nt, Artificial Sequence
  Description of Artificial Sequence: Synthetic oligonucleotide
  Sense strand starting at position 2031 of SEQ ID NO: 316648
gaaugaacugcugacguau

SEQ ID NO: 429472 - RNA, 19 nt, Artificial Sequence
  Description of Artificial Sequence: Synthetic oligonucleotide
  Antisense Strand to SEQ ID NO: 429471
auacgucagcaguucauuc

SEQ ID NO: 429473 - RNA, 19 nt, Artificial Sequence
  Description of Artificial Sequence: Synthetic oligonucleotide
  Sense strand starting at position 2206 of SEQ ID NO: 316648
cuugcuuaucccgagagua

SEQ ID NO: 429474 - RNA, 19 nt, Artificial Sequence
  Description of Artificial Sequence: Synthetic oligonucleotide
  Antisense Strand to SEQ ID NO: 429473
uacucucgggauaagcaag

SEQ ID NO: 429475 - RNA, 19 nt, Artificial Sequence
  Description of Artificial Sequence: Synthetic oligonucleotide
  Sense strand starting at position 2366 of SEQ ID NO: 316648
cgcuuaggcguagcagaaa

SEQ ID NO: 429476 - RNA, 19 nt, Artificial Sequence
  Description of Artificial Sequence: Synthetic oligonucleotide
  Antisense Strand to SEQ ID NO: 429475
uuucugcuacgccuaagcg

SEQ ID NO: 429477 - RNA, 19 nt, Artificial Sequence
  Description of Artificial Sequence: Synthetic oligonucleotide
  Sense strand starting at position 2466 of SEQ ID NO: 316648
cccuuaucagagcaacgaa

SEQ ID NO: 429478 - RNA, 19 nt, Artificial Sequence
  Description of Artificial Sequence: Synthetic oligonucleotide
  Antisense Strand to SEQ ID NO: 429477
uucguugcucugauaaggg

SEQ ID NO: 429479 - RNA, 19 nt, Artificial Sequence
  Description of Artificial Sequence: Synthetic oligonucleotide
  Sense strand starting at position 2764 of SEQ ID NO: 316648
cucuguaaagaauguagau

SEQ ID NO: 429480 - RNA, 19 nt, Artificial Sequence
  Description of Artificial Sequence: Synthetic oligonucleotide
  Antisense Strand to SEQ ID NO: 429479
aucuacauucuuuacagag

SEQ ID NO: 429481 - RNA, 19 nt, Artificial Sequence
  Description of Artificial Sequence: Synthetic oligonucleotide
  Sense strand starting at position 2773 of SEQ ID NO: 316648
gaauguagaugucugccuu

SEQ ID NO: 429482 - RNA, 19 nt, Artificial Sequence
  Description of Artificial Sequence: Synthetic oligonucleotide
  Antisense Strand to SEQ ID NO: 429481
aaggcagacaucuacauuc

SEQ ID NO: 429483 - RNA, 19 nt, Artificial Sequence
  Description of Artificial Sequence: Synthetic oligonucleotide
  Sense strand starting at position 2779 of SEQ ID NO: 316648
agaugucugccuuaaguac

SEQ ID NO: 429484 - RNA, 19 nt, Artificial Sequence
  Description of Artificial Sequence: Synthetic oligonucleotide
  Antisense Strand to SEQ ID NO: 429483
guacuuaaggcagacaucu

SEQ ID NO: 429485 - RNA, 19 nt, Artificial Sequence
  Description of Artificial Sequence: Synthetic oligonucleotide
  Sense strand starting at position 3219 of SEQ ID NO: 316648
auuaaaccucuguaagguu

SEQ ID NO: 429486 - RNA, 19 nt, Artificial Sequence
  Description of Artificial Sequence: Synthetic oligonucleotide
  Antisense Strand to SEQ ID NO: 429485
aaccuuacagagguuuaau

SEQ ID NO: 429487 - RNA, 19 nt, Artificial Sequence
  Description of Artificial Sequence: Synthetic oligonucleotide
  Sense strand starting at position 3232 of SEQ ID NO: 316648
aagguuggcuaguuuagaa

SEQ ID NO: 429488 - RNA, 19 nt, Artificial Sequence
  Description of Artificial Sequence: Synthetic oligonucleotide
  Antisense Strand to SEQ ID NO: 429487
uucuaaacuagccaaccuu

SEQ ID NO: 429489 - RNA, 19 nt, Artificial Sequence
  Description of Artificial Sequence: Synthetic oligonucleotide
  Sense strand starting at position 3415 of SEQ ID NO: 316648
aggcuaaauccuuguacca

SEQ ID NO: 429490 - RNA, 19 nt, Artificial Sequence
  Description of Artificial Sequence: Synthetic oligonucleotide
  Antisense Strand to SEQ ID NO: 429489
ugguacaaggauuuagccu

SEQ ID NO: 429491 - RNA, 19 nt, Artificial Sequence
  Description of Artificial Sequence: Synthetic oligonucleotide
  Sense strand starting at position 3484 of SEQ ID NO: 316648
gcacacacucuccagugau

SEQ ID NO: 429492 - RNA, 19 nt, Artificial Sequence
  Description of Artificial Sequence: Synthetic oligonucleotide
  Antisense Strand to SEQ ID NO: 429491
aucacuggagagugugugc

SEQ ID NO: 429493 - RNA, 19 nt, Artificial Sequence
  Description of Artificial Sequence: Synthetic oligonucleotide
  Sense strand starting at position 3504 of SEQ ID NO: 316648
uuuggugcucaugaacaaa

SEQ ID NO: 429494 - RNA, 19 nt, Artificial Sequence
  Description of Artificial Sequence: Synthetic oligonucleotide
  Antisense Strand to SEQ ID NO: 429493
uuuguucaugagcaccaaa

SEQ ID NO: 429495 - RNA, 19 nt, Artificial Sequence
  Description of Artificial Sequence: Synthetic oligonucleotide
  Sense strand starting at position 3565 of SEQ ID NO: 316648
ggaagaauuauucguccac

SEQ ID NO: 429496 - RNA, 19 nt, Artificial Sequence
  Description of Artificial Sequence: Synthetic oligonucleotide
  Antisense Strand to SEQ ID NO: 429495
guggacgaauaauucuucc

SEQ ID NO: 429497 - RNA, 19 nt, Artificial Sequence
  Description of Artificial Sequence: Synthetic oligonucleotide
  Sense strand starting at position 3566 of SEQ ID NO: 316648
gaagaauuauucguccaca

SEQ ID NO: 429498 - RNA, 19 nt, Artificial Sequence
  Description of Artificial Sequence: Synthetic oligonucleotide
  Antisense Strand to SEQ ID NO: 429497
uguggacgaauaauucuuc

SEQ ID NO: 429499 - RNA, 19 nt, Artificial Sequence
  Description of Artificial Sequence: Synthetic oligonucleotide
  Sense strand starting at position 3567 of SEQ ID NO: 316648
aagaauuauucguccacag

SEQ ID NO: 429500 - RNA, 19 nt, Artificial Sequence
  Description of Artificial Sequence: Synthetic oligonucleotide
  Antisense Strand to SEQ ID NO: 429499
cuguggacgaauaauucuu

SEQ ID NO: 429501 - RNA, 19 nt, Artificial Sequence
  Description of Artificial Sequence: Synthetic oligonucleotide
  Sense strand starting at position 3569 of SEQ ID NO: 316648
gaauuauucguccacagcu

SEQ ID NO: 429502 - RNA, 19 nt, Artificial Sequence
  Description of Artificial Sequence: Synthetic oligonucleotide
  Antisense Strand to SEQ ID NO: 429501
agcuguggacgaauaauuc

SEQ ID NO: 429503 - RNA, 19 nt, Artificial Sequence
  Description of Artificial Sequence: Synthetic oligonucleotide
  Sense strand starting at position 3618 of SEQ ID NO: 316648
ggagucuucgauugagagc

SEQ ID NO: 429504 - RNA, 19 nt, Artificial Sequence
  Description of Artificial Sequence: Synthetic oligonucleotide
  Antisense Strand to SEQ ID NO: 429503
gcucucaaucgaagacucc

SEQ ID NO: 429505 - RNA, 19 nt, Artificial Sequence
  Description of Artificial Sequence: Synthetic oligonucleotide
  Sense strand starting at position 3619 of SEQ ID NO: 316648
gagucuucgauugagagca

SEQ ID NO: 429506 - RNA, 19 nt, Artificial Sequence
  Description of Artificial Sequence: Synthetic oligonucleotide
  Antisense Strand to SEQ ID NO: 429505
ugcucucaaucgaagacuc

SEQ ID NO: 429507 - RNA, 19 nt, Artificial Sequence
  Description of Artificial Sequence: Synthetic oligonucleotide
  Sense strand starting at position 3700 of SEQ ID NO: 316648
gguucuucucaggguugaa

SEQ ID NO: 429508 - RNA, 19 nt, Artificial Sequence
  Description of Artificial Sequence: Synthetic oligonucleotide
  Antisense Strand to SEQ ID NO: 429507
uucaacccugagaagaacc

SEQ ID NO: 429509 - RNA, 19 nt, Artificial Sequence
  Description of Artificial Sequence: Synthetic oligonucleotide
  Sense strand starting at position 3703 of SEQ ID NO: 316648
ucuucucaggguugaaagu

SEQ ID NO: 429510 - RNA, 19 nt, Artificial Sequence
  Description of Artificial Sequence: Synthetic oligonucleotide
  Antisense Strand to SEQ ID NO: 429509
acuuucaacccugagaaga

SEQ ID NO: 429511 - RNA, 19 nt, Artificial Sequence
  Description of Artificial Sequence: Synthetic oligonucleotide
  Sense strand starting at position 3709 of SEQ ID NO: 316648
caggguugaaagugauugu

SEQ ID NO: 429512 - RNA, 19 nt, Artificial Sequence
  Description of Artificial Sequence: Synthetic oligonucleotide
  Antisense Strand to SEQ ID NO: 429511
acaaucacuuucaacccug

SEQ ID NO: 429513 - RNA, 19 nt, Artificial Sequence
  Description of Artificial Sequence: Synthetic oligonucleotide
  Sense strand starting at position 3712 of SEQ ID NO: 316648
gguugaaagugauugugag

SEQ ID NO: 429514 - RNA, 19 nt, Artificial Sequence
  Description of Artificial Sequence: Synthetic oligonucleotide
  Antisense Strand to SEQ ID NO: 429513
cucacaaucacuuucaacc

SEQ ID NO: 429515 - RNA, 19 nt, Artificial Sequence
  Description of Artificial Sequence: Synthetic oligonucleotide
  Sense strand starting at position 3718 of SEQ ID NO: 316648
aagugauugugagcaugaa

SEQ ID NO: 429516 - RNA, 19 nt, Artificial Sequence
  Description of Artificial Sequence: Synthetic oligonucleotide
  Antisense Strand to SEQ ID NO: 429515
uucaugcucacaaucacuu

SEQ ID NO: 429517 - RNA, 19 nt, Artificial Sequence
  Description of Artificial Sequence: Synthetic oligonucleotide
  Sense strand starting at position 3719 of SEQ ID NO: 316648
agugauugugagcaugaaa

SEQ ID NO: 429518 - RNA, 19 nt, Artificial Sequence
  Description of Artificial Sequence: Synthetic oligonucleotide
  Antisense Strand to SEQ ID NO: 429517
uuucaugcucacaaucacu

SEQ ID NO: 429519 - RNA, 19 nt, Artificial Sequence
  Description of Artificial Sequence: Synthetic oligonucleotide
  Sense strand starting at position 3731 of SEQ ID NO: 316648
caugaaacugcaugguaaa

SEQ ID NO: 429520 - RNA, 19 nt, Artificial Sequence
  Description of Artificial Sequence: Synthetic oligonucleotide
  Antisense Strand to SEQ ID NO: 429519
uuuaccaugcaguuucaug

SEQ ID NO: 429521 - RNA, 19 nt, Artificial Sequence
  Description of Artificial Sequence: Synthetic oligonucleotide
  Sense strand starting at position 3732 of SEQ ID NO: 316648
augaaacugcaugguaaau

SEQ ID NO: 429522 - RNA, 19 nt, Artificial Sequence
  Description of Artificial Sequence: Synthetic oligonucleotide
  Antisense Strand to SEQ ID NO: 429521
auuuaccaugcaguuucau

SEQ ID NO: 429523 - RNA, 19 nt, Artificial Sequence
  Description of Artificial Sequence: Synthetic oligonucleotide
  Sense strand starting at position 3855 of SEQ ID NO: 316648
guaacaaaggcucaucuuu

SEQ ID NO: 429524 - RNA, 19 nt, Artificial Sequence
  Description of Artificial Sequence: Synthetic oligonucleotide
  Antisense Strand to SEQ ID NO: 429523
aaagaugagccuuuguuac

SEQ ID NO: 429525 - RNA, 19 nt, Artificial Sequence
  Description of Artificial Sequence: Synthetic oligonucleotide
  Sense strand starting at position 3866 of SEQ ID NO: 316648
ucaucuuugcagugaugga

SEQ ID NO: 429526 - RNA, 19 nt, Artificial Sequence
  Description of Artificial Sequence: Synthetic oligonucleotide
  Antisense Strand to SEQ ID NO: 429525
uccaucacugcaaagauga

SEQ ID NO: 429527 - RNA, 19 nt, Artificial Sequence
  Description of Artificial Sequence: Synthetic oligonucleotide
  Sense strand starting at position 113 of SEQ ID NO: 316649
gacaauguccaguggguua

SEQ ID NO: 429528 - RNA, 19 nt, Artificial Sequence
  Description of Artificial Sequence: Synthetic oligonucleotide
  Antisense Strand to SEQ ID NO: 429527
uaacccacuggacauuguc

SEQ ID NO: 429529 - RNA, 19 nt, Artificial Sequence
  Description of Artificial Sequence: Synthetic oligonucleotide
  Sense strand starting at position 118 of SEQ ID NO: 316649
uguccaguggguuagagau

SEQ ID NO: 429530 - RNA, 19 nt, Artificial Sequence
  Description of Artificial Sequence: Synthetic oligonucleotide
  Antisense Strand to SEQ ID NO: 429529
aucucuaacccacuggaca

SEQ ID NO: 429531 - RNA, 19 nt, Artificial Sequence
  Description of Artificial Sequence: Synthetic oligonucleotide
  Sense strand starting at position 124 of SEQ ID NO: 316649
guggguuagagauguauac

SEQ ID NO: 429532 - RNA, 19 nt, Artificial Sequence
  Description of Artificial Sequence: Synthetic oligonucleotide
  Antisense Strand to SEQ ID NO: 429531
guauacaucucuaacccac

SEQ ID NO: 429533 - RNA, 19 nt, Artificial Sequence
  Description of Artificial Sequence: Synthetic oligonucleotide
  Sense strand starting at position 126 of SEQ ID NO: 316649
ggguuagagauguauaccu

SEQ ID NO: 429534 - RNA, 19 nt, Artificial Sequence
  Description of Artificial Sequence: Synthetic oligonucleotide
  Antisense Strand to SEQ ID NO: 429533
agguauacaucucuaaccc

SEQ ID NO: 429535 - RNA, 19 nt, Artificial Sequence
  Description of Artificial Sequence: Synthetic oligonucleotide
  Sense strand starting at position 134 of SEQ ID NO: 316649
gauguauaccugggagcca

SEQ ID NO: 429536 - RNA, 19 nt, Artificial Sequence
  Description of Artificial Sequence: Synthetic oligonucleotide
  Antisense Strand to SEQ ID NO: 429535
uggcucccagguauacauc

SEQ ID NO: 429537 - RNA, 19 nt, Artificial Sequence
  Description of Artificial Sequence: Synthetic oligonucleotide
  Sense strand starting at position 154 of SEQ ID NO: 316649
ccaauuagcugagaaagaa

SEQ ID NO: 429538 - RNA, 19 nt, Artificial Sequence
  Description of Artificial Sequence: Synthetic oligonucleotide
  Antisense Strand to SEQ ID NO: 429537
uucuuucucagcuaauugg

SEQ ID NO: 429539 - RNA, 19 nt, Artificial Sequence
  Description of Artificial Sequence: Synthetic oligonucleotide
  Sense strand starting at position 176 of SEQ ID NO: 316649
cagauaaagccacguccua

SEQ ID NO: 429540 - RNA, 19 nt, Artificial Sequence
  Description of Artificial Sequence: Synthetic oligonucleotide
  Antisense Strand to SEQ ID NO: 429539
uaggacguggcuuuaucug

SEQ ID NO: 429541 - RNA, 19 nt, Artificial Sequence
  Description of Artificial Sequence: Synthetic oligonucleotide
  Sense strand starting at position 257 of SEQ ID NO: 316649
gccagaaucucaguaauca

SEQ ID NO: 429542 - RNA, 19 nt, Artificial Sequence
  Description of Artificial Sequence: Synthetic oligonucleotide
  Antisense Strand to SEQ ID NO: 429541
ugauuacugagauucuggc

SEQ ID NO: 429543 - RNA, 19 nt, Artificial Sequence
  Description of Artificial Sequence: Synthetic oligonucleotide
  Sense strand starting at position 379 of SEQ ID NO: 316649
aguuauuguuacuccuauu

SEQ ID NO: 429544 - RNA, 19 nt, Artificial Sequence
  Description of Artificial Sequence: Synthetic oligonucleotide
  Antisense Strand to SEQ ID NO: 429543
aauaggaguaacaauaacu

SEQ ID NO: 429545 - RNA, 19 nt, Artificial Sequence
  Description of Artificial Sequence: Synthetic oligonucleotide
  Sense strand starting at position 534 of SEQ ID NO: 316649
ggccucuucucaguugaga

SEQ ID NO: 429546 - RNA, 19 nt, Artificial Sequence
  Description of Artificial Sequence: Synthetic oligonucleotide
  Antisense Strand to SEQ ID NO: 429545
ucucaacugagaagaggcc

SEQ ID NO: 429547 - RNA, 19 nt, Artificial Sequence
  Description of Artificial Sequence: Synthetic oligonucleotide
  Sense strand starting at position 671 of SEQ ID NO: 316649
ccugucucuuauguuaaau

SEQ ID NO: 429548 - RNA, 19 nt, Artificial Sequence
  Description of Artificial Sequence: Synthetic oligonucleotide
  Antisense Strand to SEQ ID NO: 429547
auuuaacauaagagacagg

SEQ ID NO: 429549 - RNA, 19 nt, Artificial Sequence
  Description of Artificial Sequence: Synthetic oligonucleotide
  Sense strand starting at position 888 of SEQ ID NO: 316649
cuaagaguaagcugcaguu

SEQ ID NO: 429550 - RNA, 19 nt, Artificial Sequence
  Description of Artificial Sequence: Synthetic oligonucleotide
  Antisense Strand to SEQ ID NO: 429549
aacugcagcuuacucuuag

SEQ ID NO: 429551 - RNA, 19 nt, Artificial Sequence
  Description of Artificial Sequence: Synthetic oligonucleotide
  Sense strand starting at position 1015 of SEQ ID NO: 316649
aagugcuguugguuagaua

SEQ ID NO: 429552 - RNA, 19 nt, Artificial Sequence
  Description of Artificial Sequence: Synthetic oligonucleotide
  Antisense Strand to SEQ ID NO: 429551
uaucuaaccaacagcacuu

SEQ ID NO: 429553 - RNA, 19 nt, Artificial Sequence
  Description of Artificial Sequence: Synthetic oligonucleotide
  Sense strand starting at position 1016 of SEQ ID NO: 316649
agugcuguugguuagauaa

SEQ ID NO: 429554 - RNA, 19 nt, Artificial Sequence
  Description of Artificial Sequence: Synthetic oligonucleotide
  Antisense Strand to SEQ ID NO: 429553
uuaucuaaccaacagcacu

SEQ ID NO: 429555 - RNA, 19 nt, Artificial Sequence
  Description of Artificial Sequence: Synthetic oligonucleotide
  Sense strand starting at position 1080 of SEQ ID NO: 316649
uccagcaauuggucucuua

SEQ ID NO: 429556 - RNA, 19 nt, Artificial Sequence
  Description of Artificial Sequence: Synthetic oligonucleotide
  Antisense Strand to SEQ ID NO: 429555
uaagagaccaauugcugga

SEQ ID NO: 429557 - RNA, 19 nt, Artificial Sequence
  Description of Artificial Sequence: Synthetic oligonucleotide
  Sense strand starting at position 1083 of SEQ ID NO: 316649
agcaauuggucucuuaucu

SEQ ID NO: 429558 - RNA, 19 nt, Artificial Sequence
  Description of Artificial Sequence: Synthetic oligonucleotide
  Antisense Strand to SEQ ID NO: 429557
agauaagagaccaauugcu

SEQ ID NO: 429559 - RNA, 19 nt, Artificial Sequence
  Description of Artificial Sequence: Synthetic oligonucleotide
  Sense strand starting at position 1091 of SEQ ID NO: 316649
gucucuuaucuugggcaua

SEQ ID NO: 429560 - RNA, 19 nt, Artificial Sequence
  Description of Artificial Sequence: Synthetic oligonucleotide
  Antisense Strand to SEQ ID NO: 429559
uaugcccaagauaagagac

SEQ ID NO: 429561 - RNA, 19 nt, Artificial Sequence
  Description of Artificial Sequence: Synthetic oligonucleotide
  Sense strand starting at position 1093 of SEQ ID NO: 316649
cucuuaucuugggcauaaa

SEQ ID NO: 429562 - RNA, 19 nt, Artificial Sequence
  Description of Artificial Sequence: Synthetic oligonucleotide
  Antisense Strand to SEQ ID NO: 429561
uuuaugcccaagauaagag

SEQ ID NO: 429563 - RNA, 19 nt, Artificial Sequence
  Description of Artificial Sequence: Synthetic oligonucleotide
  Sense strand starting at position 1198 of SEQ ID NO: 316649
cggaaacugcacugcauaa

SEQ ID NO: 429564 - RNA, 19 nt, Artificial Sequence
  Description of Artificial Sequence: Synthetic oligonucleotide
  Antisense Strand to SEQ ID NO: 429563
uuaugcagugcaguuuccg

SEQ ID NO: 429565 - RNA, 19 nt, Artificial Sequence
  Description of Artificial Sequence: Synthetic oligonucleotide
  Sense strand starting at position 1247 of SEQ ID NO: 316649
guuggucgcauuguuguua

SEQ ID NO: 429566 - RNA, 19 nt, Artificial Sequence
  Description of Artificial Sequence: Synthetic oligonucleotide
  Antisense Strand to SEQ ID NO: 429565
uaacaacaaugcgaccaac

SEQ ID NO: 429567 - RNA, 19 nt, Artificial Sequence
  Description of Artificial Sequence: Synthetic oligonucleotide
  Sense strand starting at position 1546 of SEQ ID NO: 316649
ggcacucaccucuaaaguu

SEQ ID NO: 429568 - RNA, 19 nt, Artificial Sequence
  Description of Artificial Sequence: Synthetic oligonucleotide
  Antisense Strand to SEQ ID NO: 429567
aacuuuagaggugagugcc

SEQ ID NO: 429569 - RNA, 19 nt, Artificial Sequence
  Description of Artificial Sequence: Synthetic oligonucleotide
  Sense strand starting at position 2080 of SEQ ID NO: 316649
uggcgauugcgacaacuca

SEQ ID NO: 429570 - RNA, 19 nt, Artificial Sequence
  Description of Artificial Sequence: Synthetic oligonucleotide
  Antisense Strand to SEQ ID NO: 429569
ugaguugucgcaaucgcca

SEQ ID NO: 429571 - RNA, 19 nt, Artificial Sequence
  Description of Artificial Sequence: Synthetic oligonucleotide
  Sense strand starting at position 2088 of SEQ ID NO: 316649
gcgacaacucagcagauga

SEQ ID NO: 429572 - RNA, 19 nt, Artificial Sequence
  Description of Artificial Sequence: Synthetic oligonucleotide
  Antisense Strand to SEQ ID NO: 429571
ucaucugcugaguugucgc

SEQ ID NO: 429573 - RNA, 19 nt, Artificial Sequence
  Description of Artificial Sequence: Synthetic oligonucleotide
  Sense strand starting at position 2434 of SEQ ID NO: 316649
gaaugaacugcugacguau

SEQ ID NO: 429574 - RNA, 19 nt, Artificial Sequence
  Description of Artificial Sequence: Synthetic oligonucleotide
  Antisense Strand to SEQ ID NO: 429573
auacgucagcaguucauuc

SEQ ID NO: 429575 - RNA, 19 nt, Artificial Sequence
  Description of Artificial Sequence: Synthetic oligonucleotide
  Sense strand starting at position 2609 of SEQ ID NO: 316649
cuugcuuaucccgagagua

SEQ ID NO: 429576 - RNA, 19 nt, Artificial Sequence
  Description of Artificial Sequence: Synthetic oligonucleotide
  Antisense Strand to SEQ ID NO: 429575
uacucucgggauaagcaag

SEQ ID NO: 429577 - RNA, 19 nt, Artificial Sequence
  Description of Artificial Sequence: Synthetic oligonucleotide
  Sense strand starting at position 2768 of SEQ ID NO: 316649
gcgcuuaggcguagcagaa

SEQ ID NO: 429578 - RNA, 19 nt, Artificial Sequence
  Description of Artificial Sequence: Synthetic oligonucleotide
  Antisense Strand to SEQ ID NO: 429577
uucugcuacgccuaagcgc

SEQ ID NO: 429579 - RNA, 19 nt, Artificial Sequence
  Description of Artificial Sequence: Synthetic oligonucleotide
  Sense strand starting at position 2769 of SEQ ID NO: 316649
cgcuuaggcguagcagaaa

SEQ ID NO: 429580 - RNA, 19 nt, Artificial Sequence
  Description of Artificial Sequence: Synthetic oligonucleotide
  Antisense Strand to SEQ ID NO: 429579
uuucugcuacgccuaagcg

SEQ ID NO: 429581 - RNA, 19 nt, Artificial Sequence
  Description of Artificial Sequence: Synthetic oligonucleotide
  Sense strand starting at position 2869 of SEQ ID NO: 316649
cccuuaucagagcaacgaa

SEQ ID NO: 429582 - RNA, 19 nt, Artificial Sequence
  Description of Artificial Sequence: Synthetic oligonucleotide
  Antisense Strand to SEQ ID NO: 429581
uucguugcucugauaaggg

SEQ ID NO: 429583 - RNA, 19 nt, Artificial Sequence
  Description of Artificial Sequence: Synthetic oligonucleotide
  Sense strand starting at position 3167 of SEQ ID NO: 316649
cucuguaaagaauguagau

SEQ ID NO: 429584 - RNA, 19 nt, Artificial Sequence
  Description of Artificial Sequence: Synthetic oligonucleotide
  Antisense Strand to SEQ ID NO: 429583
aucuacauucuuuacagag

SEQ ID NO: 429585 - RNA, 19 nt, Artificial Sequence
  Description of Artificial Sequence: Synthetic oligonucleotide
  Sense strand starting at position 3176 of SEQ ID NO: 316649
gaauguagaugucugccuu

SEQ ID NO: 429586 - RNA, 19 nt, Artificial Sequence
  Description of Artificial Sequence: Synthetic oligonucleotide
  Antisense Strand to SEQ ID NO: 429585
aaggcagacaucuacauuc

SEQ ID NO: 429587 - RNA, 19 nt, Artificial Sequence
  Description of Artificial Sequence: Synthetic oligonucleotide
  Sense strand starting at position 3182 of SEQ ID NO: 316649
agaugucugccuuaaguac

SEQ ID NO: 429588 - RNA, 19 nt, Artificial Sequence
  Description of Artificial Sequence: Synthetic oligonucleotide
  Antisense Strand to SEQ ID NO: 429587
guacuuaaggcagacaucu

SEQ ID NO: 429589 - RNA, 19 nt, Artificial Sequence
  Description of Artificial Sequence: Synthetic oligonucleotide
  Sense strand starting at position 3622 of SEQ ID NO: 316649
auuaaaccucuguaagguu

SEQ ID NO: 429590 - RNA, 19 nt, Artificial Sequence
  Description of Artificial Sequence: Synthetic oligonucleotide
  Antisense Strand to SEQ ID NO: 429589
aaccuuacagagguuuaau

SEQ ID NO: 429591 - RNA, 19 nt, Artificial Sequence
  Description of Artificial Sequence: Synthetic oligonucleotide
  Sense strand starting at position 3635 of SEQ ID NO: 316649
aagguuggcuaguuuagaa

SEQ ID NO: 429592 - RNA, 19 nt, Artificial Sequence
  Description of Artificial Sequence: Synthetic oligonucleotide
  Antisense Strand to SEQ ID NO: 429591
uucuaaacuagccaaccuu

SEQ ID NO: 429593 - RNA, 19 nt, Artificial Sequence
  Description of Artificial Sequence: Synthetic oligonucleotide
  Sense strand starting at position 3818 of SEQ ID NO: 316649
aggcuaaauccuuguacca

SEQ ID NO: 429594 - RNA, 19 nt, Artificial Sequence
  Description of Artificial Sequence: Synthetic oligonucleotide
  Antisense Strand to SEQ ID NO: 429593
ugguacaaggauuuagccu

SEQ ID NO: 429595 - RNA, 19 nt, Artificial Sequence
  Description of Artificial Sequence: Synthetic oligonucleotide
  Sense strand starting at position 3887 of SEQ ID NO: 316649
gcacacacucuccagugau

SEQ ID NO: 429596 - RNA, 19 nt, Artificial Sequence
  Description of Artificial Sequence: Synthetic oligonucleotide
  Antisense Strand to SEQ ID NO: 429595
aucacuggagagugugugc

SEQ ID NO: 429597 - RNA, 19 nt, Artificial Sequence
  Description of Artificial Sequence: Synthetic oligonucleotide
  Sense strand starting at position 3907 of SEQ ID NO: 316649
uuuggugcucaugaacaaa

SEQ ID NO: 429598 - RNA, 19 nt, Artificial Sequence
  Description of Artificial Sequence: Synthetic oligonucleotide
  Antisense Strand to SEQ ID NO: 429597
uuuguucaugagcaccaaa

SEQ ID NO: 429599 - RNA, 19 nt, Artificial Sequence
  Description of Artificial Sequence: Synthetic oligonucleotide
  Sense strand starting at position 3968 of SEQ ID NO: 316649
ggaagaauuauucguccac

SEQ ID NO: 429600 - RNA, 19 nt, Artificial Sequence
  Description of Artificial Sequence: Synthetic oligonucleotide
  Antisense Strand to SEQ ID NO: 429599
guggacgaauaauucuucc

SEQ ID NO: 429601 - RNA, 19 nt, Artificial Sequence
  Description of Artificial Sequence: Synthetic oligonucleotide
  Sense strand starting at position 3969 of SEQ ID NO: 316649
gaagaauuauucguccaca

SEQ ID NO: 429602 - RNA, 19 nt, Artificial Sequence
  Description of Artificial Sequence: Synthetic oligonucleotide
  Antisense Strand to SEQ ID NO: 429601
uguggacgaauaauucuuc

SEQ ID NO: 429603 - RNA, 19 nt, Artificial Sequence
  Description of Artificial Sequence: Synthetic oligonucleotide
  Sense strand starting at position 3970 of SEQ ID NO: 316649
aagaauuauucguccacag

SEQ ID NO: 429604 - RNA, 19 nt, Artificial Sequence
  Description of Artificial Sequence: Synthetic oligonucleotide
  Antisense Strand to SEQ ID NO: 429603
cuguggacgaauaauucuu

SEQ ID NO: 429605 - RNA, 19 nt, Artificial Sequence
  Description of Artificial Sequence: Synthetic oligonucleotide
  Sense strand starting at position 3972 of SEQ ID NO: 316649
gaauuauucguccacagcu

SEQ ID NO: 429606 - RNA, 19 nt, Artificial Sequence
  Description of Artificial Sequence: Synthetic oligonucleotide
  Antisense Strand to SEQ ID NO: 429605
agcuguggacgaauaauuc

SEQ ID NO: 429607 - RNA, 19 nt, Artificial Sequence
  Description of Artificial Sequence: Synthetic oligonucleotide
  Sense strand starting at position 4 of SEQ ID NO: 316650
gugcaucaagaauauaacu

SEQ ID NO: 429608 - RNA, 19 nt, Artificial Sequence
  Description of Artificial Sequence: Synthetic oligonucleotide
  Antisense Strand to SEQ ID NO: 429607
aguuauauucuugaugcac

SEQ ID NO: 429609 - RNA, 19 nt, Artificial Sequence
  Description of Artificial Sequence: Synthetic oligonucleotide
  Sense strand starting at position 53 of SEQ ID NO: 316650
ccauuaugcuuccucugga

SEQ ID NO: 429610 - RNA, 19 nt, Artificial Sequence
  Description of Artificial Sequence: Synthetic oligonucleotide
  Antisense Strand to SEQ ID NO: 429609
uccagaggaagcauaaugg

SEQ ID NO: 429611 - RNA, 19 nt, Artificial Sequence
  Description of Artificial Sequence: Synthetic oligonucleotide
  Sense strand starting at position 58 of SEQ ID NO: 316650
augcuuccucuggauuauu

SEQ ID NO: 429612 - RNA, 19 nt, Artificial Sequence
  Description of Artificial Sequence: Synthetic oligonucleotide
  Antisense Strand to SEQ ID NO: 429611
aauaauccagaggaagcau

SEQ ID NO: 429613 - RNA, 19 nt, Artificial Sequence
  Description of Artificial Sequence: Synthetic oligonucleotide
  Sense strand starting at position 63 of SEQ ID NO: 316650
uccucuggauuauugcaaa

SEQ ID NO: 429614 - RNA, 19 nt, Artificial Sequence
  Description of Artificial Sequence: Synthetic oligonucleotide
  Antisense Strand to SEQ ID NO: 429613
uuugcaauaauccagagga

SEQ ID NO: 429615 - RNA, 19 nt, Artificial Sequence
  Description of Artificial Sequence: Synthetic oligonucleotide
  Sense strand starting at position 219 of SEQ ID NO: 316650
aaaguuagauguccucaag

SEQ ID NO: 429616 - RNA, 19 nt, Artificial Sequence
  Description of Artificial Sequence: Synthetic oligonucleotide
  Antisense Strand to SEQ ID NO: 429615
cuugaggacaucuaacuuu

SEQ ID NO: 429617 - RNA, 19 nt, Artificial Sequence
  Description of Artificial Sequence: Synthetic oligonucleotide
  Sense strand starting at position 222 of SEQ ID NO: 316650
guuagauguccucaagauc

SEQ ID NO: 429618 - RNA, 19 nt, Artificial Sequence
  Description of Artificial Sequence: Synthetic oligonucleotide
  Antisense Strand to SEQ ID NO: 429617
gaucuugaggacaucuaac

SEQ ID NO: 429619 - RNA, 19 nt, Artificial Sequence
  Description of Artificial Sequence: Synthetic oligonucleotide
  Sense strand starting at position 247 of SEQ ID NO: 316650
accugcucgccuugauuua

SEQ ID NO: 429620 - RNA, 19 nt, Artificial Sequence
  Description of Artificial Sequence: Synthetic oligonucleotide
  Antisense Strand to SEQ ID NO: 429619
uaaaucaaggcgagcaggu

SEQ ID NO: 429621 - RNA, 19 nt, Artificial Sequence
  Description of Artificial Sequence: Synthetic oligonucleotide
  Sense strand starting at position 248 of SEQ ID NO: 316650
ccugcucgccuugauuuaa

SEQ ID NO: 429622 - RNA, 19 nt, Artificial Sequence
  Description of Artificial Sequence: Synthetic oligonucleotide
  Antisense Strand to SEQ ID NO: 429621
uuaaaucaaggcgagcagg

SEQ ID NO: 429623 - RNA, 19 nt, Artificial Sequence
  Description of Artificial Sequence: Synthetic oligonucleotide
  Sense strand starting at position 262 of SEQ ID NO: 316650
uuuaaucuccagugaagga

SEQ ID NO: 429624 - RNA, 19 nt, Artificial Sequence
  Description of Artificial Sequence: Synthetic oligonucleotide
  Antisense Strand to SEQ ID NO: 429623
uccuucacuggagauuaaa

SEQ ID NO: 429625 - RNA, 19 nt, Artificial Sequence
  Description of Artificial Sequence: Synthetic oligonucleotide
  Sense strand starting at position 399 of SEQ ID NO: 316650
gugguuaaaucucccacuu

SEQ ID NO: 429626 - RNA, 19 nt, Artificial Sequence
  Description of Artificial Sequence: Synthetic oligonucleotide
  Antisense Strand to SEQ ID NO: 429625
aagugggagauuuaaccac

SEQ ID NO: 429627 - RNA, 19 nt, Artificial Sequence
  Description of Artificial Sequence: Synthetic oligonucleotide
  Sense strand starting at position 636 of SEQ ID NO: 316650
cuagaacggugucuggaau

SEQ ID NO: 429628 - RNA, 19 nt, Artificial Sequence
  Description of Artificial Sequence: Synthetic oligonucleotide
  Antisense Strand to SEQ ID NO: 429627
auuccagacaccguucuag

SEQ ID NO: 429629 - RNA, 19 nt, Artificial Sequence
  Description of Artificial Sequence: Synthetic oligonucleotide
  Sense strand starting at position 637 of SEQ ID NO: 316650
uagaacggugucuggaaua

SEQ ID NO: 429630 - RNA, 19 nt, Artificial Sequence
  Description of Artificial Sequence: Synthetic oligonucleotide
  Antisense Strand to SEQ ID NO: 429629
uauuccagacaccguucua

SEQ ID NO: 429631 - RNA, 19 nt, Artificial Sequence
  Description of Artificial Sequence: Synthetic oligonucleotide
  Sense strand starting at position 673 of SEQ ID NO: 316650
cuauucgcucaaugaauaa

SEQ ID NO: 429632 - RNA, 19 nt, Artificial Sequence
  Description of Artificial Sequence: Synthetic oligonucleotide
  Antisense Strand to SEQ ID NO: 429631
uuauucauugagcgaauag

SEQ ID NO: 429633 - RNA, 19 nt, Artificial Sequence
  Description of Artificial Sequence: Synthetic oligonucleotide
  Sense strand starting at position 722 of SEQ ID NO: 316650
gcaccuaaguccuuugaca

SEQ ID NO: 429634 - RNA, 19 nt, Artificial Sequence
  Description of Artificial Sequence: Synthetic oligonucleotide
  Antisense Strand to SEQ ID NO: 429633
ugucaaaggacuuaggugc

SEQ ID NO: 429635 - RNA, 19 nt, Artificial Sequence
  Description of Artificial Sequence: Synthetic oligonucleotide
  Sense strand starting at position 757 of SEQ ID NO: 316650
aguaaauacgcuuagggau

SEQ ID NO: 429636 - RNA, 19 nt, Artificial Sequence
  Description of Artificial Sequence: Synthetic oligonucleotide
  Antisense Strand to SEQ ID NO: 429635
aucccuaagcguauuuacu

SEQ ID NO: 429637 - RNA, 19 nt, Artificial Sequence
  Description of Artificial Sequence: Synthetic oligonucleotide
  Sense strand starting at position 1130 of SEQ ID NO: 316650
cugaguguucuacagauuc

SEQ ID NO: 429638 - RNA, 19 nt, Artificial Sequence
  Description of Artificial Sequence: Synthetic oligonucleotide
  Antisense Strand to SEQ ID NO: 429637
gaaucuguagaacacucag

SEQ ID NO: 429639 - RNA, 19 nt, Artificial Sequence
  Description of Artificial Sequence: Synthetic oligonucleotide
  Sense strand starting at position 2014 of SEQ ID NO: 316650
cgagguuuagucagucguc

SEQ ID NO: 429640 - RNA, 19 nt, Artificial Sequence
  Description of Artificial Sequence: Synthetic oligonucleotide
  Antisense Strand to SEQ ID NO: 429639
gacgacugacuaaaccucg

SEQ ID NO: 429641 - RNA, 19 nt, Artificial Sequence
  Description of Artificial Sequence: Synthetic oligonucleotide
  Sense strand starting at position 2047 of SEQ ID NO: 316650
ccuugagcaguaggagaaa

SEQ ID NO: 429642 - RNA, 19 nt, Artificial Sequence
  Description of Artificial Sequence: Synthetic oligonucleotide
  Antisense Strand to SEQ ID NO: 429641
uuucuccuacugcucaagg

SEQ ID NO: 429643 - RNA, 19 nt, Artificial Sequence
  Description of Artificial Sequence: Synthetic oligonucleotide
  Sense strand starting at position 2085 of SEQ ID NO: 316650
uuacuugaggauugucagu

SEQ ID NO: 429644 - RNA, 19 nt, Artificial Sequence
  Description of Artificial Sequence: Synthetic oligonucleotide
  Antisense Strand to SEQ ID NO: 429643
acugacaauccucaaguaa

SEQ ID NO: 429645 - RNA, 19 nt, Artificial Sequence
  Description of Artificial Sequence: Synthetic oligonucleotide
  Sense strand starting at position 2202 of SEQ ID NO: 316650
uuuccuguugaagaaaugu

SEQ ID NO: 429646 - RNA, 19 nt, Artificial Sequence
  Description of Artificial Sequence: Synthetic oligonucleotide
  Antisense Strand to SEQ ID NO: 429645
acauuucuucaacaggaaa

SEQ ID NO: 429647 - RNA, 19 nt, Artificial Sequence
  Description of Artificial Sequence: Synthetic oligonucleotide
  Sense strand starting at position 2208 of SEQ ID NO: 316650
guugaagaaaugugaaauu

SEQ ID NO: 429648 - RNA, 19 nt, Artificial Sequence
  Description of Artificial Sequence: Synthetic oligonucleotide
  Antisense Strand to SEQ ID NO: 429647
aauuucacauuucuucaac

SEQ ID NO: 429649 - RNA, 19 nt, Artificial Sequence
  Description of Artificial Sequence: Synthetic oligonucleotide
  Sense strand starting at position 2497 of SEQ ID NO: 316650
cgagguguaagugaaugua

SEQ ID NO: 429650 - RNA, 19 nt, Artificial Sequence
  Description of Artificial Sequence: Synthetic oligonucleotide
  Antisense Strand to SEQ ID NO: 429649
uacauucacuuacaccucg

SEQ ID NO: 429651 - RNA, 19 nt, Artificial Sequence
  Description of Artificial Sequence: Synthetic oligonucleotide
  Sense strand starting at position 2999 of SEQ ID NO: 316650
guaguauagcguaguagga

SEQ ID NO: 429652 - RNA, 19 nt, Artificial Sequence
  Description of Artificial Sequence: Synthetic oligonucleotide
  Antisense Strand to SEQ ID NO: 429651
uccuacuacgcuauacuac

SEQ ID NO: 429653 - RNA, 19 nt, Artificial Sequence
  Description of Artificial Sequence: Synthetic oligonucleotide
  Sense strand starting at position 3008 of SEQ ID NO: 316650
cguaguaggauugaauaau

SEQ ID NO: 429654 - RNA, 19 nt, Artificial Sequence
  Description of Artificial Sequence: Synthetic oligonucleotide
  Antisense Strand to SEQ ID NO: 429653
auuauucaauccuacuacg

SEQ ID NO: 429655 - RNA, 19 nt, Artificial Sequence
  Description of Artificial Sequence: Synthetic oligonucleotide
  Sense strand starting at position 3101 of SEQ ID NO: 316650
uuaggucuguagguuaaau

SEQ ID NO: 429656 - RNA, 19 nt, Artificial Sequence
  Description of Artificial Sequence: Synthetic oligonucleotide
  Antisense Strand to SEQ ID NO: 429655
auuuaaccuacagaccuaa

SEQ ID NO: 429657 - RNA, 19 nt, Artificial Sequence
  Description of Artificial Sequence: Synthetic oligonucleotide
  Sense strand starting at position 3103 of SEQ ID NO: 316650
aggucuguagguuaaauaa

SEQ ID NO: 429658 - RNA, 19 nt, Artificial Sequence
  Description of Artificial Sequence: Synthetic oligonucleotide
  Antisense Strand to SEQ ID NO: 429657
uuauuuaaccuacagaccu

SEQ ID NO: 429659 - RNA, 19 nt, Artificial Sequence
  Description of Artificial Sequence: Synthetic oligonucleotide
  Sense strand starting at position 3155 of SEQ ID NO: 316650
uugagauagcccuaaguug

SEQ ID NO: 429660 - RNA, 19 nt, Artificial Sequence
  Description of Artificial Sequence: Synthetic oligonucleotide
  Antisense Strand to SEQ ID NO: 429659
caacuuagggcuaucucaa

SEQ ID NO: 429661 - RNA, 19 nt, Artificial Sequence
  Description of Artificial Sequence: Synthetic oligonucleotide
  Sense strand starting at position 3192 of SEQ ID NO: 316650
cguugacuucuagaaauag

SEQ ID NO: 429662 - RNA, 19 nt, Artificial Sequence
  Description of Artificial Sequence: Synthetic oligonucleotide
  Antisense Strand to SEQ ID NO: 429661
cuauuucuagaagucaacg

SEQ ID NO: 429663 - RNA, 19 nt, Artificial Sequence
  Description of Artificial Sequence: Synthetic oligonucleotide
  Sense strand starting at position 3345 of SEQ ID NO: 316650
ugacuccuuguuugguaaa

SEQ ID NO: 429664 - RNA, 19 nt, Artificial Sequence
  Description of Artificial Sequence: Synthetic oligonucleotide
  Antisense Strand to SEQ ID NO: 429663
uuuaccaaacaaggaguca

SEQ ID NO: 429665 - RNA, 19 nt, Artificial Sequence
  Description of Artificial Sequence: Synthetic oligonucleotide
  Sense strand starting at position 3443 of SEQ ID NO: 316650
uuacuuguacauugucaaa

SEQ ID NO: 429666 - RNA, 19 nt, Artificial Sequence
  Description of Artificial Sequence: Synthetic oligonucleotide
  Antisense Strand to SEQ ID NO: 429665
uuugacaauguacaaguaa

SEQ ID NO: 429667 - RNA, 19 nt, Artificial Sequence
  Description of Artificial Sequence: Synthetic oligonucleotide
  Sense strand starting at position 3445 of SEQ ID NO: 316650
acuuguacauugucaaagu

SEQ ID NO: 429668 - RNA, 19 nt, Artificial Sequence
  Description of Artificial Sequence: Synthetic oligonucleotide
  Antisense Strand to SEQ ID NO: 429667
acuuugacaauguacaagu

SEQ ID NO: 429669 - RNA, 19 nt, Artificial Sequence
  Description of Artificial Sequence: Synthetic oligonucleotide
  Sense strand starting at position 3539 of SEQ ID NO: 316650
acaguauuauggcuuuaua

SEQ ID NO: 429670 - RNA, 19 nt, Artificial Sequence
  Description of Artificial Sequence: Synthetic oligonucleotide
  Antisense Strand to SEQ ID NO: 429669
uauaaagccauaauacugu

SEQ ID NO: 429671 - RNA, 19 nt, Artificial Sequence
  Description of Artificial Sequence: Synthetic oligonucleotide
  Sense strand starting at position 3542 of SEQ ID NO: 316650
guauuauggcuuuauaguu

SEQ ID NO: 429672 - RNA, 19 nt, Artificial Sequence
  Description of Artificial Sequence: Synthetic oligonucleotide
  Antisense Strand to SEQ ID NO: 429671
aacuauaaagccauaauac

SEQ ID NO: 429673 - RNA, 19 nt, Artificial Sequence
  Description of Artificial Sequence: Synthetic oligonucleotide
  Sense strand starting at position 3645 of SEQ ID NO: 316650
ggagauuauuuaugauauc

SEQ ID NO: 429674 - RNA, 19 nt, Artificial Sequence
  Description of Artificial Sequence: Synthetic oligonucleotide
  Antisense Strand to SEQ ID NO: 429673
gauaucauaaauaaucucc

SEQ ID NO: 429675 - RNA, 19 nt, Artificial Sequence
  Description of Artificial Sequence: Synthetic oligonucleotide
  Sense strand starting at position 3836 of SEQ ID NO: 316650
cuucucauucuuuguauga

SEQ ID NO: 429676 - RNA, 19 nt, Artificial Sequence
  Description of Artificial Sequence: Synthetic oligonucleotide
  Antisense Strand to SEQ ID NO: 429675
ucauacaaagaaugagaag

SEQ ID NO: 429677 - RNA, 19 nt, Artificial Sequence
  Description of Artificial Sequence: Synthetic oligonucleotide
  Sense strand starting at position 3837 of SEQ ID NO: 316650
uucucauucuuuguaugau

SEQ ID NO: 429678 - RNA, 19 nt, Artificial Sequence
  Description of Artificial Sequence: Synthetic oligonucleotide
  Antisense Strand to SEQ ID NO: 429677
aucauacaaagaaugagaa

SEQ ID NO: 429679 - RNA, 19 nt, Artificial Sequence
  Description of Artificial Sequence: Synthetic oligonucleotide
  Sense strand starting at position 3847 of SEQ ID NO: 316650
uuguaugaugcacauagaa

SEQ ID NO: 429680 - RNA, 19 nt, Artificial Sequence
  Description of Artificial Sequence: Synthetic oligonucleotide
  Antisense Strand to SEQ ID NO: 429679
uucuaugugcaucauacaa

SEQ ID NO: 429681 - RNA, 19 nt, Artificial Sequence
  Description of Artificial Sequence: Synthetic oligonucleotide
  Sense strand starting at position 3911 of SEQ ID NO: 316650
auggcuuucuguuuaauuu

SEQ ID NO: 429682 - RNA, 19 nt, Artificial Sequence
  Description of Artificial Sequence: Synthetic oligonucleotide
  Antisense Strand to SEQ ID NO: 429681
aaauuaaacagaaagccau

SEQ ID NO: 429683 - RNA, 19 nt, Artificial Sequence
  Description of Artificial Sequence: Synthetic oligonucleotide
  Sense strand starting at position 3918 of SEQ ID NO: 316650
ucuguuuaauuugaacaga

SEQ ID NO: 429684 - RNA, 19 nt, Artificial Sequence
  Description of Artificial Sequence: Synthetic oligonucleotide
  Antisense Strand to SEQ ID NO: 429683
ucuguucaaauuaaacaga

SEQ ID NO: 429685 - RNA, 19 nt, Artificial Sequence
  Description of Artificial Sequence: Synthetic oligonucleotide
  Sense strand starting at position 3961 of SEQ ID NO: 316650
cuccuauccugggcuuaua

SEQ ID NO: 429686 - RNA, 19 nt, Artificial Sequence
  Description of Artificial Sequence: Synthetic oligonucleotide
  Antisense Strand to SEQ ID NO: 429685
uauaagcccaggauaggag

SEQ ID NO: 429687 - RNA, 19 nt, Artificial Sequence
  Description of Artificial Sequence: Synthetic oligonucleotide
  Sense strand starting at position 110 of SEQ ID NO: 316651
gaaagaccguccuuauuau

SEQ ID NO: 429688 - RNA, 19 nt, Artificial Sequence
  Description of Artificial Sequence: Synthetic oligonucleotide
  Antisense Strand to SEQ ID NO: 429687
auaauaaggacggucuuuc

SEQ ID NO: 429689 - RNA, 19 nt, Artificial Sequence
  Description of Artificial Sequence: Synthetic oligonucleotide
  Sense strand starting at position 121 of SEQ ID NO: 316651
cuuauuauaguguaaagca

SEQ ID NO: 429690 - RNA, 19 nt, Artificial Sequence
  Description of Artificial Sequence: Synthetic oligonucleotide
  Antisense Strand to SEQ ID NO: 429689
ugcuuuacacuauaauaag

SEQ ID NO: 429691 - RNA, 19 nt, Artificial Sequence
  Description of Artificial Sequence: Synthetic oligonucleotide
  Sense strand starting at position 178 of SEQ ID NO: 316651
ggauuuaaaucauaugugu

SEQ ID NO: 429692 - RNA, 19 nt, Artificial Sequence
  Description of Artificial Sequence: Synthetic oligonucleotide
  Antisense Strand to SEQ ID NO: 429691
acacauaugauuuaaaucc

SEQ ID NO: 429693 - RNA, 19 nt, Artificial Sequence
  Description of Artificial Sequence: Synthetic oligonucleotide
  Sense strand starting at position 282 of SEQ ID NO: 316651
gcaguaauucccuaggucu

SEQ ID NO: 429694 - RNA, 19 nt, Artificial Sequence
  Description of Artificial Sequence: Synthetic oligonucleotide
  Antisense Strand to SEQ ID NO: 429693
agaccuagggaauuacugc

SEQ ID NO: 429695 - RNA, 19 nt, Artificial Sequence
  Description of Artificial Sequence: Synthetic oligonucleotide
  Sense strand starting at position 284 of SEQ ID NO: 316651
aguaauucccuaggucuuu

SEQ ID NO: 429696 - RNA, 19 nt, Artificial Sequence
  Description of Artificial Sequence: Synthetic oligonucleotide
  Antisense Strand to SEQ ID NO: 429695
aaagaccuagggaauuacu

SEQ ID NO: 429697 - RNA, 19 nt, Artificial Sequence
  Description of Artificial Sequence: Synthetic oligonucleotide
  Sense strand starting at position 424 of SEQ ID NO: 316651
ggguuuaaaggauggcuau

SEQ ID NO: 429698 - RNA, 19 nt, Artificial Sequence
  Description of Artificial Sequence: Synthetic oligonucleotide
  Antisense Strand to SEQ ID NO: 429697
auagccauccuuuaaaccc

SEQ ID NO: 429699 - RNA, 19 nt, Artificial Sequence
  Description of Artificial Sequence: Synthetic oligonucleotide
  Sense strand starting at position 425 of SEQ ID NO: 316651
gguuuaaaggauggcuaua

SEQ ID NO: 429700 - RNA, 19 nt, Artificial Sequence
  Description of Artificial Sequence: Synthetic oligonucleotide
  Antisense Strand to SEQ ID NO: 429699
uauagccauccuuuaaacc

SEQ ID NO: 429701 - RNA, 19 nt, Artificial Sequence
  Description of Artificial Sequence: Synthetic oligonucleotide
  Sense strand starting at position 437 of SEQ ID NO: 316651
ggcuauaaggaaugacuau

SEQ ID NO: 429702 - RNA, 19 nt, Artificial Sequence
  Description of Artificial Sequence: Synthetic oligonucleotide
  Antisense Strand to SEQ ID NO: 429701
auagucauuccuuauagcc

SEQ ID NO: 429703 - RNA, 19 nt, Artificial Sequence
  Description of Artificial Sequence: Synthetic oligonucleotide
  Sense strand starting at position 473 of SEQ ID NO: 316651
gaggccaguccaugcauuu

SEQ ID NO: 429704 - RNA, 19 nt, Artificial Sequence
  Description of Artificial Sequence: Synthetic oligonucleotide
  Antisense Strand to SEQ ID NO: 429703
aaaugcauggacuggccuc

SEQ ID NO: 429705 - RNA, 19 nt, Artificial Sequence
  Description of Artificial Sequence: Synthetic oligonucleotide
  Sense strand starting at position 615 of SEQ ID NO: 316651
gguuaagauuugcagacua

SEQ ID NO: 429706 - RNA, 19 nt, Artificial Sequence
  Description of Artificial Sequence: Synthetic oligonucleotide
  Antisense Strand to SEQ ID NO: 429705
uagucugcaaaucuuaacc

SEQ ID NO: 429707 - RNA, 19 nt, Artificial Sequence
  Description of Artificial Sequence: Synthetic oligonucleotide
  Sense strand starting at position 680 of SEQ ID NO: 316651
cuuugcaaucuugacagau

SEQ ID NO: 429708 - RNA, 19 nt, Artificial Sequence
  Description of Artificial Sequence: Synthetic oligonucleotide
  Antisense Strand to SEQ ID NO: 429707
aucugucaagauugcaaag

SEQ ID NO: 429709 - RNA, 19 nt, Artificial Sequence
  Description of Artificial Sequence: Synthetic oligonucleotide
  Sense strand starting at position 684 of SEQ ID NO: 316651
gcaaucuugacagauguga

SEQ ID NO: 429710 - RNA, 19 nt, Artificial Sequence
  Description of Artificial Sequence: Synthetic oligonucleotide
  Antisense Strand to SEQ ID NO: 429709
ucacaucugucaagauugc

SEQ ID NO: 429711 - RNA, 19 nt, Artificial Sequence
  Description of Artificial Sequence: Synthetic oligonucleotide
  Sense strand starting at position 901 of SEQ ID NO: 316651
gugcaucaagaauauaacu

SEQ ID NO: 429712 - RNA, 19 nt, Artificial Sequence
  Description of Artificial Sequence: Synthetic oligonucleotide
  Antisense Strand to SEQ ID NO: 429711
aguuauauucuugaugcac

SEQ ID NO: 429713 - RNA, 19 nt, Artificial Sequence
  Description of Artificial Sequence: Synthetic oligonucleotide
  Sense strand starting at position 950 of SEQ ID NO: 316651
ccauuaugcuuccucugga

SEQ ID NO: 429714 - RNA, 19 nt, Artificial Sequence
  Description of Artificial Sequence: Synthetic oligonucleotide
  Antisense Strand to SEQ ID NO: 429713
uccagaggaagcauaaugg

SEQ ID NO: 429715 - RNA, 19 nt, Artificial Sequence
  Description of Artificial Sequence: Synthetic oligonucleotide
  Sense strand starting at position 953 of SEQ ID NO: 316651
uuaugcuuccucuggauua

SEQ ID NO: 429716 - RNA, 19 nt, Artificial Sequence
  Description of Artificial Sequence: Synthetic oligonucleotide
  Antisense Strand to SEQ ID NO: 429715
uaauccagaggaagcauaa

SEQ ID NO: 429717 - RNA, 19 nt, Artificial Sequence
  Description of Artificial Sequence: Synthetic oligonucleotide
  Sense strand starting at position 955 of SEQ ID NO: 316651
augcuuccucuggauuauu

SEQ ID NO: 429718 - RNA, 19 nt, Artificial Sequence
  Description of Artificial Sequence: Synthetic oligonucleotide
  Antisense Strand to SEQ ID NO: 429717
aauaauccagaggaagcau

SEQ ID NO: 429719 - RNA, 19 nt, Artificial Sequence
  Description of Artificial Sequence: Synthetic oligonucleotide
  Sense strand starting at position 960 of SEQ ID NO: 316651
uccucuggauuauugcaaa

SEQ ID NO: 429720 - RNA, 19 nt, Artificial Sequence
  Description of Artificial Sequence: Synthetic oligonucleotide
  Antisense Strand to SEQ ID NO: 429719
uuugcaauaauccagagga

SEQ ID NO: 429721 - RNA, 19 nt, Artificial Sequence
  Description of Artificial Sequence: Synthetic oligonucleotide
  Sense strand starting at position 1010 of SEQ ID NO: 316651
cguccuccucuguguauuu

SEQ ID NO: 429722 - RNA, 19 nt, Artificial Sequence
  Description of Artificial Sequence: Synthetic oligonucleotide
  Antisense Strand to SEQ ID NO: 429721
aaauacacagaggaggacg

SEQ ID NO: 429723 - RNA, 19 nt, Artificial Sequence
  Description of Artificial Sequence: Synthetic oligonucleotide
  Sense strand starting at position 1116 of SEQ ID NO: 316651
aaaguuagauguccucaag

SEQ ID NO: 429724 - RNA, 19 nt, Artificial Sequence
  Description of Artificial Sequence: Synthetic oligonucleotide
  Antisense Strand to SEQ ID NO: 429723
cuugaggacaucuaacuuu

SEQ ID NO: 429725 - RNA, 19 nt, Artificial Sequence
  Description of Artificial Sequence: Synthetic oligonucleotide
  Sense strand starting at position 1119 of SEQ ID NO: 316651
guuagauguccucaagauc

SEQ ID NO: 429726 - RNA, 19 nt, Artificial Sequence
  Description of Artificial Sequence: Synthetic oligonucleotide
  Antisense Strand to SEQ ID NO: 429725
gaucuugaggacaucuaac

SEQ ID NO: 429727 - RNA, 19 nt, Artificial Sequence
  Description of Artificial Sequence: Synthetic oligonucleotide
  Sense strand starting at position 1144 of SEQ ID NO: 316651
accugcucgccuugauuua

SEQ ID NO: 429728 - RNA, 19 nt, Artificial Sequence
  Description of Artificial Sequence: Synthetic oligonucleotide
  Antisense Strand to SEQ ID NO: 429727
uaaaucaaggcgagcaggu

SEQ ID NO: 429729 - RNA, 19 nt, Artificial Sequence
  Description of Artificial Sequence: Synthetic oligonucleotide
  Sense strand starting at position 1145 of SEQ ID NO: 316651
ccugcucgccuugauuuaa

SEQ ID NO: 429730 - RNA, 19 nt, Artificial Sequence
  Description of Artificial Sequence: Synthetic oligonucleotide
  Antisense Strand to SEQ ID NO: 429729
uuaaaucaaggcgagcagg

SEQ ID NO: 429731 - RNA, 19 nt, Artificial Sequence
  Description of Artificial Sequence: Synthetic oligonucleotide
  Sense strand starting at position 1159 of SEQ ID NO: 316651
uuuaaucuccagugaagga

SEQ ID NO: 429732 - RNA, 19 nt, Artificial Sequence
  Description of Artificial Sequence: Synthetic oligonucleotide
  Antisense Strand to SEQ ID NO: 429731
uccuucacuggagauuaaa

SEQ ID NO: 429733 - RNA, 19 nt, Artificial Sequence
  Description of Artificial Sequence: Synthetic oligonucleotide
  Sense strand starting at position 1296 of SEQ ID NO: 316651
gugguuaaaucucccacuu

SEQ ID NO: 429734 - RNA, 19 nt, Artificial Sequence
  Description of Artificial Sequence: Synthetic oligonucleotide
  Antisense Strand to SEQ ID NO: 429733
aagugggagauuuaaccac

SEQ ID NO: 429735 - RNA, 19 nt, Artificial Sequence
  Description of Artificial Sequence: Synthetic oligonucleotide
  Sense strand starting at position 1533 of SEQ ID NO: 316651
cuagaacggugucuggaau

SEQ ID NO: 429736 - RNA, 19 nt, Artificial Sequence
  Description of Artificial Sequence: Synthetic oligonucleotide
  Antisense Strand to SEQ ID NO: 429735
auuccagacaccguucuag

SEQ ID NO: 429737 - RNA, 19 nt, Artificial Sequence
  Description of Artificial Sequence: Synthetic oligonucleotide
  Sense strand starting at position 1534 of SEQ ID NO: 316651
uagaacggugucuggaaua

SEQ ID NO: 429738 - RNA, 19 nt, Artificial Sequence
  Description of Artificial Sequence: Synthetic oligonucleotide
  Antisense Strand to SEQ ID NO: 429737
uauuccagacaccguucua

SEQ ID NO: 429739 - RNA, 19 nt, Artificial Sequence
  Description of Artificial Sequence: Synthetic oligonucleotide
  Sense strand starting at position 1570 of SEQ ID NO: 316651
cuauucgcucaaugaauaa

SEQ ID NO: 429740 - RNA, 19 nt, Artificial Sequence
  Description of Artificial Sequence: Synthetic oligonucleotide
  Antisense Strand to SEQ ID NO: 429739
uuauucauugagcgaauag

SEQ ID NO: 429741 - RNA, 19 nt, Artificial Sequence
  Description of Artificial Sequence: Synthetic oligonucleotide
  Sense strand starting at position 1619 of SEQ ID NO: 316651
gcaccuaaguccuuugaca

SEQ ID NO: 429742 - RNA, 19 nt, Artificial Sequence
  Description of Artificial Sequence: Synthetic oligonucleotide
  Antisense Strand to SEQ ID NO: 429741
ugucaaaggacuuaggugc

SEQ ID NO: 429743 - RNA, 19 nt, Artificial Sequence
  Description of Artificial Sequence: Synthetic oligonucleotide
  Sense strand starting at position 1654 of SEQ ID NO: 316651
aguaaauacgcuuagggau

SEQ ID NO: 429744 - RNA, 19 nt, Artificial Sequence
  Description of Artificial Sequence: Synthetic oligonucleotide
  Antisense Strand to SEQ ID NO: 429743
aucccuaagcguauuuacu

SEQ ID NO: 429745 - RNA, 19 nt, Artificial Sequence
  Description of Artificial Sequence: Synthetic oligonucleotide
  Sense strand starting at position 1661 of SEQ ID NO: 316651
acgcuuagggaucgauauu

SEQ ID NO: 429746 - RNA, 19 nt, Artificial Sequence
  Description of Artificial Sequence: Synthetic oligonucleotide
  Antisense Strand to SEQ ID NO: 429745
aauaucgaucccuaagcgu

SEQ ID NO: 429747 - RNA, 19 nt, Artificial Sequence
  Description of Artificial Sequence: Synthetic oligonucleotide
  Sense strand starting at position 1721 of SEQ ID NO: 316651
aaacguggcuccuuuagaa

SEQ ID NO: 429748 - RNA, 19 nt, Artificial Sequence
  Description of Artificial Sequence: Synthetic oligonucleotide
  Antisense Strand to SEQ ID NO: 429747
uucuaaaggagccacguuu

SEQ ID NO: 429749 - RNA, 19 nt, Artificial Sequence
  Description of Artificial Sequence: Synthetic oligonucleotide
  Sense strand starting at position 2027 of SEQ ID NO: 316651
cugaguguucuacagauuc

SEQ ID NO: 429750 - RNA, 19 nt, Artificial Sequence
  Description of Artificial Sequence: Synthetic oligonucleotide
  Antisense Strand to SEQ ID NO: 429749
gaaucuguagaacacucag

SEQ ID NO: 429751 - RNA, 19 nt, Artificial Sequence
  Description of Artificial Sequence: Synthetic oligonucleotide
  Sense strand starting at position 2911 of SEQ ID NO: 316651
cgagguuuagucagucguc

SEQ ID NO: 429752 - RNA, 19 nt, Artificial Sequence
  Description of Artificial Sequence: Synthetic oligonucleotide
  Antisense Strand to SEQ ID NO: 429751
gacgacugacuaaaccucg

SEQ ID NO: 429753 - RNA, 19 nt, Artificial Sequence
  Description of Artificial Sequence: Synthetic oligonucleotide
  Sense strand starting at position 2944 of SEQ ID NO: 316651
ccuugagcaguaggagaaa

SEQ ID NO: 429754 - RNA, 19 nt, Artificial Sequence
  Description of Artificial Sequence: Synthetic oligonucleotide
  Antisense Strand to SEQ ID NO: 429753
uuucuccuacugcucaagg

SEQ ID NO: 429755 - RNA, 19 nt, Artificial Sequence
  Description of Artificial Sequence: Synthetic oligonucleotide
  Sense strand starting at position 2982 of SEQ ID NO: 316651
uuacuugaggauugucagu

SEQ ID NO: 429756 - RNA, 19 nt, Artificial Sequence
  Description of Artificial Sequence: Synthetic oligonucleotide
  Antisense Strand to SEQ ID NO: 429755
acugacaauccucaaguaa

SEQ ID NO: 429757 - RNA, 19 nt, Artificial Sequence
  Description of Artificial Sequence: Synthetic oligonucleotide
  Sense strand starting at position 3099 of SEQ ID NO: 316651
uuuccuguugaagaaaugu

SEQ ID NO: 429758 - RNA, 19 nt, Artificial Sequence
  Description of Artificial Sequence: Synthetic oligonucleotide
  Antisense Strand to SEQ ID NO: 429757
acauuucuucaacaggaaa

SEQ ID NO: 429759 - RNA, 19 nt, Artificial Sequence
  Description of Artificial Sequence: Synthetic oligonucleotide
  Sense strand starting at position 3105 of SEQ ID NO: 316651
guugaagaaaugugaaauu

SEQ ID NO: 429760 - RNA, 19 nt, Artificial Sequence
  Description of Artificial Sequence: Synthetic oligonucleotide
  Antisense Strand to SEQ ID NO: 429759
aauuucacauuucuucaac

SEQ ID NO: 429761 - RNA, 19 nt, Artificial Sequence
  Description of Artificial Sequence: Synthetic oligonucleotide
  Sense strand starting at position 3394 of SEQ ID NO: 316651
cgagguguaagugaaugua

SEQ ID NO: 429762 - RNA, 19 nt, Artificial Sequence
  Description of Artificial Sequence: Synthetic oligonucleotide
  Antisense Strand to SEQ ID NO: 429761
uacauucacuuacaccucg

SEQ ID NO: 429763 - RNA, 19 nt, Artificial Sequence
  Description of Artificial Sequence: Synthetic oligonucleotide
  Sense strand starting at position 3896 of SEQ ID NO: 316651
guaguauagcguaguagga

SEQ ID NO: 429764 - RNA, 19 nt, Artificial Sequence
  Description of Artificial Sequence: Synthetic oligonucleotide
  Antisense Strand to SEQ ID NO: 429763
uccuacuacgcuauacuac

SEQ ID NO: 429765 - RNA, 19 nt, Artificial Sequence
  Description of Artificial Sequence: Synthetic oligonucleotide
  Sense strand starting at position 3905 of SEQ ID NO: 316651
cguaguaggauugaauaau

SEQ ID NO: 429766 - RNA, 19 nt, Artificial Sequence
  Description of Artificial Sequence: Synthetic oligonucleotide
  Antisense Strand to SEQ ID NO: 429765
auuauucaauccuacuacg

SEQ ID NO: 429767 - RNA, 19 nt, Artificial Sequence
  Description of Artificial Sequence: Synthetic oligonucleotide
  Sense strand starting at position 90 of SEQ ID NO: 316652
gugcaucaagaauauaacu

SEQ ID NO: 429768 - RNA, 19 nt, Artificial Sequence
  Description of Artificial Sequence: Synthetic oligonucleotide
  Antisense Strand to SEQ ID NO: 429767
aguuauauucuugaugcac

SEQ ID NO: 429769 - RNA, 19 nt, Artificial Sequence
  Description of Artificial Sequence: Synthetic oligonucleotide
  Sense strand starting at position 139 of SEQ ID NO: 316652
ccauuaugcuuccucugga

SEQ ID NO: 429770 - RNA, 19 nt, Artificial Sequence
  Description of Artificial Sequence: Synthetic oligonucleotide
  Antisense Strand to SEQ ID NO: 429769
uccagaggaagcauaaugg

SEQ ID NO: 429771 - RNA, 19 nt, Artificial Sequence
  Description of Artificial Sequence: Synthetic oligonucleotide
  Sense strand starting at position 142 of SEQ ID NO: 316652
uuaugcuuccucuggauua

SEQ ID NO: 429772 - RNA, 19 nt, Artificial Sequence
  Description of Artificial Sequence: Synthetic oligonucleotide
  Antisense Strand to SEQ ID NO: 429771
uaauccagaggaagcauaa

SEQ ID NO: 429773 - RNA, 19 nt, Artificial Sequence
  Description of Artificial Sequence: Synthetic oligonucleotide
  Sense strand starting at position 144 of SEQ ID NO: 316652
augcuuccucuggauuauu

SEQ ID NO: 429774 - RNA, 19 nt, Artificial Sequence
  Description of Artificial Sequence: Synthetic oligonucleotide
  Antisense Strand to SEQ ID NO: 429773
aauaauccagaggaagcau

SEQ ID NO: 429775 - RNA, 19 nt, Artificial Sequence
  Description of Artificial Sequence: Synthetic oligonucleotide
  Sense strand starting at position 149 of SEQ ID NO: 316652
uccucuggauuauugcaaa

SEQ ID NO: 429776 - RNA, 19 nt, Artificial Sequence
  Description of Artificial Sequence: Synthetic oligonucleotide
  Antisense Strand to SEQ ID NO: 429775
uuugcaauaauccagagga

SEQ ID NO: 429777 - RNA, 19 nt, Artificial Sequence
  Description of Artificial Sequence: Synthetic oligonucleotide
  Sense strand starting at position 305 of SEQ ID NO: 316652
aaaguuagauguccucaag

SEQ ID NO: 429778 - RNA, 19 nt, Artificial Sequence
  Description of Artificial Sequence: Synthetic oligonucleotide
  Antisense Strand to SEQ ID NO: 429777
cuugaggacaucuaacuuu

SEQ ID NO: 429779 - RNA, 19 nt, Artificial Sequence
  Description of Artificial Sequence: Synthetic oligonucleotide
  Sense strand starting at position 308 of SEQ ID NO: 316652
guuagauguccucaagauc

SEQ ID NO: 429780 - RNA, 19 nt, Artificial Sequence
  Description of Artificial Sequence: Synthetic oligonucleotide
  Antisense Strand to SEQ ID NO: 429779
gaucuugaggacaucuaac

SEQ ID NO: 429781 - RNA, 19 nt, Artificial Sequence
  Description of Artificial Sequence: Synthetic oligonucleotide
  Sense strand starting at position 333 of SEQ ID NO: 316652
accugcucgccuugauuua

SEQ ID NO: 429782 - RNA, 19 nt, Artificial Sequence
  Description of Artificial Sequence: Synthetic oligonucleotide
  Antisense Strand to SEQ ID NO: 429781
uaaaucaaggcgagcaggu

SEQ ID NO: 429783 - RNA, 19 nt, Artificial Sequence
  Description of Artificial Sequence: Synthetic oligonucleotide
  Sense strand starting at position 334 of SEQ ID NO: 316652
ccugcucgccuugauuuaa

SEQ ID NO: 429784 - RNA, 19 nt, Artificial Sequence
  Description of Artificial Sequence: Synthetic oligonucleotide
  Antisense Strand to SEQ ID NO: 429783
uuaaaucaaggcgagcagg

SEQ ID NO: 429785 - RNA, 19 nt, Artificial Sequence
  Description of Artificial Sequence: Synthetic oligonucleotide
  Sense strand starting at position 348 of SEQ ID NO: 316652
uuuaaucuccagugaagga

SEQ ID NO: 429786 - RNA, 19 nt, Artificial Sequence
  Description of Artificial Sequence: Synthetic oligonucleotide
  Antisense Strand to SEQ ID NO: 429785
uccuucacuggagauuaaa

SEQ ID NO: 429787 - RNA, 19 nt, Artificial Sequence
  Description of Artificial Sequence: Synthetic oligonucleotide
  Sense strand starting at position 485 of SEQ ID NO: 316652
gugguuaaaucucccacuu

SEQ ID NO: 429788 - RNA, 19 nt, Artificial Sequence
  Description of Artificial Sequence: Synthetic oligonucleotide
  Antisense Strand to SEQ ID NO: 429787
aagugggagauuuaaccac

SEQ ID NO: 429789 - RNA, 19 nt, Artificial Sequence
  Description of Artificial Sequence: Synthetic oligonucleotide
  Sense strand starting at position 722 of SEQ ID NO: 316652
cuagaacggugucuggaau

SEQ ID NO: 429790 - RNA, 19 nt, Artificial Sequence
  Description of Artificial Sequence: Synthetic oligonucleotide
  Antisense Strand to SEQ ID NO: 429789
auuccagacaccguucuag

SEQ ID NO: 429791 - RNA, 19 nt, Artificial Sequence
  Description of Artificial Sequence: Synthetic oligonucleotide
  Sense strand starting at position 723 of SEQ ID NO: 316652
uagaacggugucuggaaua

SEQ ID NO: 429792 - RNA, 19 nt, Artificial Sequence
  Description of Artificial Sequence: Synthetic oligonucleotide
  Antisense Strand to SEQ ID NO: 429791
uauuccagacaccguucua

SEQ ID NO: 429793 - RNA, 19 nt, Artificial Sequence
  Description of Artificial Sequence: Synthetic oligonucleotide
  Sense strand starting at position 759 of SEQ ID NO: 316652
cuauucgcucaaugaauaa

SEQ ID NO: 429794 - RNA, 19 nt, Artificial Sequence
  Description of Artificial Sequence: Synthetic oligonucleotide
  Antisense Strand to SEQ ID NO: 429793
uuauucauugagcgaauag

SEQ ID NO: 429795 - RNA, 19 nt, Artificial Sequence
  Description of Artificial Sequence: Synthetic oligonucleotide
  Sense strand starting at position 808 of SEQ ID NO: 316652
gcaccuaaguccuuugaca

SEQ ID NO: 429796 - RNA, 19 nt, Artificial Sequence
  Description of Artificial Sequence: Synthetic oligonucleotide
  Antisense Strand to SEQ ID NO: 429795
ugucaaaggacuuaggugc

SEQ ID NO: 429797 - RNA, 19 nt, Artificial Sequence
  Description of Artificial Sequence: Synthetic oligonucleotide
  Sense strand starting at position 843 of SEQ ID NO: 316652
aguaaauacgcuuagggau

SEQ ID NO: 429798 - RNA, 19 nt, Artificial Sequence
  Description of Artificial Sequence: Synthetic oligonucleotide
  Antisense Strand to SEQ ID NO: 429797
aucccuaagcguauuuacu

SEQ ID NO: 429799 - RNA, 19 nt, Artificial Sequence
  Description of Artificial Sequence: Synthetic oligonucleotide
  Sense strand starting at position 850 of SEQ ID NO: 316652
acgcuuagggaucgauauu

SEQ ID NO: 429800 - RNA, 19 nt, Artificial Sequence
  Description of Artificial Sequence: Synthetic oligonucleotide
  Antisense Strand to SEQ ID NO: 429799
aauaucgaucccuaagcgu

SEQ ID NO: 429801 - RNA, 19 nt, Artificial Sequence
  Description of Artificial Sequence: Synthetic oligonucleotide
  Sense strand starting at position 910 of SEQ ID NO: 316652
aaacguggcuccuuuagaa

SEQ ID NO: 429802 - RNA, 19 nt, Artificial Sequence
  Description of Artificial Sequence: Synthetic oligonucleotide
  Antisense Strand to SEQ ID NO: 429801
uucuaaaggagccacguuu

SEQ ID NO: 429803 - RNA, 19 nt, Artificial Sequence
  Description of Artificial Sequence: Synthetic oligonucleotide
  Sense strand starting at position 1216 of SEQ ID NO: 316652
cugaguguucuacagauuc

SEQ ID NO: 429804 - RNA, 19 nt, Artificial Sequence
  Description of Artificial Sequence: Synthetic oligonucleotide
  Antisense Strand to SEQ ID NO: 429803
gaaucuguagaacacucag

SEQ ID NO: 429805 - RNA, 19 nt, Artificial Sequence
  Description of Artificial Sequence: Synthetic oligonucleotide
  Sense strand starting at position 2100 of SEQ ID NO: 316652
cgagguuuagucagucguc

SEQ ID NO: 429806 - RNA, 19 nt, Artificial Sequence
  Description of Artificial Sequence: Synthetic oligonucleotide
  Antisense Strand to SEQ ID NO: 429805
gacgacugacuaaaccucg

SEQ ID NO: 429807 - RNA, 19 nt, Artificial Sequence
  Description of Artificial Sequence: Synthetic oligonucleotide
  Sense strand starting at position 2133 of SEQ ID NO: 316652
ccuugagcaguaggagaaa

SEQ ID NO: 429808 - RNA, 19 nt, Artificial Sequence
  Description of Artificial Sequence: Synthetic oligonucleotide
  Antisense Strand to SEQ ID NO: 429807
uuucuccuacugcucaagg

SEQ ID NO: 429809 - RNA, 19 nt, Artificial Sequence
  Description of Artificial Sequence: Synthetic oligonucleotide
  Sense strand starting at position 2171 of SEQ ID NO: 316652
uuacuugaggauugucagu

SEQ ID NO: 429810 - RNA, 19 nt, Artificial Sequence
  Description of Artificial Sequence: Synthetic oligonucleotide
  Antisense Strand to SEQ ID NO: 429809
acugacaauccucaaguaa

SEQ ID NO: 429811 - RNA, 19 nt, Artificial Sequence
  Description of Artificial Sequence: Synthetic oligonucleotide
  Sense strand starting at position 2288 of SEQ ID NO: 316652
uuuccuguugaagaaaugu

SEQ ID NO: 429812 - RNA, 19 nt, Artificial Sequence
  Description of Artificial Sequence: Synthetic oligonucleotide
  Antisense Strand to SEQ ID NO: 429811
acauuucuucaacaggaaa

SEQ ID NO: 429813 - RNA, 19 nt, Artificial Sequence
  Description of Artificial Sequence: Synthetic oligonucleotide
  Sense strand starting at position 2294 of SEQ ID NO: 316652
guugaagaaaugugaaauu

SEQ ID NO: 429814 - RNA, 19 nt, Artificial Sequence
  Description of Artificial Sequence: Synthetic oligonucleotide
  Antisense Strand to SEQ ID NO: 429813
aauuucacauuucuucaac

SEQ ID NO: 429815 - RNA, 19 nt, Artificial Sequence
  Description of Artificial Sequence: Synthetic oligonucleotide
  Sense strand starting at position 2583 of SEQ ID NO: 316652
cgagguguaagugaaugua

SEQ ID NO: 429816 - RNA, 19 nt, Artificial Sequence
  Description of Artificial Sequence: Synthetic oligonucleotide
  Antisense Strand to SEQ ID NO: 429815
uacauucacuuacaccucg

SEQ ID NO: 429817 - RNA, 19 nt, Artificial Sequence
  Description of Artificial Sequence: Synthetic oligonucleotide
  Sense strand starting at position 3085 of SEQ ID NO: 316652
guaguauagcguaguagga

SEQ ID NO: 429818 - RNA, 19 nt, Artificial Sequence
  Description of Artificial Sequence: Synthetic oligonucleotide
  Antisense Strand to SEQ ID NO: 429817
uccuacuacgcuauacuac

SEQ ID NO: 429819 - RNA, 19 nt, Artificial Sequence
  Description of Artificial Sequence: Synthetic oligonucleotide
  Sense strand starting at position 3094 of SEQ ID NO: 316652
cguaguaggauugaauaau

SEQ ID NO: 429820 - RNA, 19 nt, Artificial Sequence
  Description of Artificial Sequence: Synthetic oligonucleotide
  Antisense Strand to SEQ ID NO: 429819
auuauucaauccuacuacg

SEQ ID NO: 429821 - RNA, 19 nt, Artificial Sequence
  Description of Artificial Sequence: Synthetic oligonucleotide
  Sense strand starting at position 3187 of SEQ ID NO: 316652
uuaggucuguagguuaaau

SEQ ID NO: 429822 - RNA, 19 nt, Artificial Sequence
  Description of Artificial Sequence: Synthetic oligonucleotide
  Antisense Strand to SEQ ID NO: 429821
auuuaaccuacagaccuaa

SEQ ID NO: 429823 - RNA, 19 nt, Artificial Sequence
  Description of Artificial Sequence: Synthetic oligonucleotide
  Sense strand starting at position 3189 of SEQ ID NO: 316652
aggucuguagguuaaauaa

SEQ ID NO: 429824 - RNA, 19 nt, Artificial Sequence
  Description of Artificial Sequence: Synthetic oligonucleotide
  Antisense Strand to SEQ ID NO: 429823
uuauuuaaccuacagaccu

SEQ ID NO: 429825 - RNA, 19 nt, Artificial Sequence
  Description of Artificial Sequence: Synthetic oligonucleotide
  Sense strand starting at position 3241 of SEQ ID NO: 316652
uugagauagcccuaaguug

SEQ ID NO: 429826 - RNA, 19 nt, Artificial Sequence
  Description of Artificial Sequence: Synthetic oligonucleotide
  Antisense Strand to SEQ ID NO: 429825
caacuuagggcuaucucaa

SEQ ID NO: 429827 - RNA, 19 nt, Artificial Sequence
  Description of Artificial Sequence: Synthetic oligonucleotide
  Sense strand starting at position 3278 of SEQ ID NO: 316652
cguugacuucuagaaauag

SEQ ID NO: 429828 - RNA, 19 nt, Artificial Sequence
  Description of Artificial Sequence: Synthetic oligonucleotide
  Antisense Strand to SEQ ID NO: 429827
cuauuucuagaagucaacg

SEQ ID NO: 429829 - RNA, 19 nt, Artificial Sequence
  Description of Artificial Sequence: Synthetic oligonucleotide
  Sense strand starting at position 3431 of SEQ ID NO: 316652
ugacuccuuguuugguaaa

SEQ ID NO: 429830 - RNA, 19 nt, Artificial Sequence
  Description of Artificial Sequence: Synthetic oligonucleotide
  Antisense Strand to SEQ ID NO: 429829
uuuaccaaacaaggaguca

SEQ ID NO: 429831 - RNA, 19 nt, Artificial Sequence
  Description of Artificial Sequence: Synthetic oligonucleotide
  Sense strand starting at position 3529 of SEQ ID NO: 316652
uuacuuguacauugucaaa

SEQ ID NO: 429832 - RNA, 19 nt, Artificial Sequence
  Description of Artificial Sequence: Synthetic oligonucleotide
  Antisense Strand to SEQ ID NO: 429831
uuugacaauguacaaguaa

SEQ ID NO: 429833 - RNA, 19 nt, Artificial Sequence
  Description of Artificial Sequence: Synthetic oligonucleotide
  Sense strand starting at position 3531 of SEQ ID NO: 316652
acuuguacauugucaaagu

SEQ ID NO: 429834 - RNA, 19 nt, Artificial Sequence
  Description of Artificial Sequence: Synthetic oligonucleotide
  Antisense Strand to SEQ ID NO: 429833
acuuugacaauguacaagu

SEQ ID NO: 429835 - RNA, 19 nt, Artificial Sequence
  Description of Artificial Sequence: Synthetic oligonucleotide
  Sense strand starting at position 3625 of SEQ ID NO: 316652
acaguauuauggcuuuaua

SEQ ID NO: 429836 - RNA, 19 nt, Artificial Sequence
  Description of Artificial Sequence: Synthetic oligonucleotide
  Antisense Strand to SEQ ID NO: 429835
uauaaagccauaauacugu

SEQ ID NO: 429837 - RNA, 19 nt, Artificial Sequence
  Description of Artificial Sequence: Synthetic oligonucleotide
  Sense strand starting at position 3628 of SEQ ID NO: 316652
guauuauggcuuuauaguu

SEQ ID NO: 429838 - RNA, 19 nt, Artificial Sequence
  Description of Artificial Sequence: Synthetic oligonucleotide
  Antisense Strand to SEQ ID NO: 429837
aacuauaaagccauaauac

SEQ ID NO: 429839 - RNA, 19 nt, Artificial Sequence
  Description of Artificial Sequence: Synthetic oligonucleotide
  Sense strand starting at position 3731 of SEQ ID NO: 316652
ggagauuauuuaugauauc

SEQ ID NO: 429840 - RNA, 19 nt, Artificial Sequence
  Description of Artificial Sequence: Synthetic oligonucleotide
  Antisense Strand to SEQ ID NO: 429839
gauaucauaaauaaucucc

SEQ ID NO: 429841 - RNA, 19 nt, Artificial Sequence
  Description of Artificial Sequence: Synthetic oligonucleotide
  Sense strand starting at position 3922 of SEQ ID NO: 316652
cuucucauucuuuguauga

SEQ ID NO: 429842 - RNA, 19 nt, Artificial Sequence
  Description of Artificial Sequence: Synthetic oligonucleotide
  Antisense Strand to SEQ ID NO: 429841
ucauacaaagaaugagaag

SEQ ID NO: 429843 - RNA, 19 nt, Artificial Sequence
  Description of Artificial Sequence: Synthetic oligonucleotide
  Sense strand starting at position 3923 of SEQ ID NO: 316652
uucucauucuuuguaugau

SEQ ID NO: 429844 - RNA, 19 nt, Artificial Sequence
  Description of Artificial Sequence: Synthetic oligonucleotide
  Antisense Strand to SEQ ID NO: 429843
aucauacaaagaaugagaa

SEQ ID NO: 429845 - RNA, 19 nt, Artificial Sequence
  Description of Artificial Sequence: Synthetic oligonucleotide
  Sense strand starting at position 3933 of SEQ ID NO: 316652
uuguaugaugcacauagaa

SEQ ID NO: 429846 - RNA, 19 nt, Artificial Sequence
  Description of Artificial Sequence: Synthetic oligonucleotide
  Antisense Strand to SEQ ID NO: 429845
uucuaugugcaucauacaa

SEQ ID NO: 429847 - RNA, 19 nt, Artificial Sequence
  Description of Artificial Sequence: Synthetic oligonucleotide
  Sense strand starting at position 288 of SEQ ID NO: 316653
cuuuaauuagccuguagga

SEQ ID NO: 429848 - RNA, 19 nt, Artificial Sequence
  Description of Artificial Sequence: Synthetic oligonucleotide
  Antisense Strand to SEQ ID NO: 429847
uccuacaggcuaauuaaag

SEQ ID NO: 429849 - RNA, 19 nt, Artificial Sequence
  Description of Artificial Sequence: Synthetic oligonucleotide
  Sense strand starting at position 290 of SEQ ID NO: 316653
uuaauuagccuguaggauu

SEQ ID NO: 429850 - RNA, 19 nt, Artificial Sequence
  Description of Artificial Sequence: Synthetic oligonucleotide
  Antisense Strand to SEQ ID NO: 429849
aauccuacaggcuaauuaa

SEQ ID NO: 429851 - RNA, 19 nt, Artificial Sequence
  Description of Artificial Sequence: Synthetic oligonucleotide
  Sense strand starting at position 687 of SEQ ID NO: 316653
gaaugcuugcuauguaaag

SEQ ID NO: 429852 - RNA, 19 nt, Artificial Sequence
  Description of Artificial Sequence: Synthetic oligonucleotide
  Antisense Strand to SEQ ID NO: 429851
cuuuacauagcaagcauuc

SEQ ID NO: 429853 - RNA, 19 nt, Artificial Sequence
  Description of Artificial Sequence: Synthetic oligonucleotide
  Sense strand starting at position 688 of SEQ ID NO: 316653
aaugcuugcuauguaaaga

SEQ ID NO: 429854 - RNA, 19 nt, Artificial Sequence
  Description of Artificial Sequence: Synthetic oligonucleotide
  Antisense Strand to SEQ ID NO: 429853
ucuuuacauagcaagcauu

SEQ ID NO: 429855 - RNA, 19 nt, Artificial Sequence
  Description of Artificial Sequence: Synthetic oligonucleotide
  Sense strand starting at position 800 of SEQ ID NO: 316653
agccacaugugacuauaua

SEQ ID NO: 429856 - RNA, 19 nt, Artificial Sequence
  Description of Artificial Sequence: Synthetic oligonucleotide
  Antisense Strand to SEQ ID NO: 429855
uauauagucacauguggcu

SEQ ID NO: 429857 - RNA, 19 nt, Artificial Sequence
  Description of Artificial Sequence: Synthetic oligonucleotide
  Sense strand starting at position 801 of SEQ ID NO: 316653
gccacaugugacuauauac

SEQ ID NO: 429858 - RNA, 19 nt, Artificial Sequence
  Description of Artificial Sequence: Synthetic oligonucleotide
  Antisense Strand to SEQ ID NO: 429857
guauauagucacauguggc

SEQ ID NO: 429859 - RNA, 19 nt, Artificial Sequence
  Description of Artificial Sequence: Synthetic oligonucleotide
  Sense strand starting at position 883 of SEQ ID NO: 316653
ugaaguacucaauagccau

SEQ ID NO: 429860 - RNA, 19 nt, Artificial Sequence
  Description of Artificial Sequence: Synthetic oligonucleotide
  Antisense Strand to SEQ ID NO: 429859
auggcuauugaguacuuca

SEQ ID NO: 429861 - RNA, 19 nt, Artificial Sequence
  Description of Artificial Sequence: Synthetic oligonucleotide
  Sense strand starting at position 909 of SEQ ID NO: 316653
gugacuaccuuauuggaua

SEQ ID NO: 429862 - RNA, 19 nt, Artificial Sequence
  Description of Artificial Sequence: Synthetic oligonucleotide
  Antisense Strand to SEQ ID NO: 429861
uauccaauaagguagucac

SEQ ID NO: 429863 - RNA, 19 nt, Artificial Sequence
  Description of Artificial Sequence: Synthetic oligonucleotide
  Sense strand starting at position 1078 of SEQ ID NO: 316653
cuuacaaggcuuugaaauu

SEQ ID NO: 429864 - RNA, 19 nt, Artificial Sequence
  Description of Artificial Sequence: Synthetic oligonucleotide
  Antisense Strand to SEQ ID NO: 429863
aauuucaaagccuuguaag

SEQ ID NO: 429865 - RNA, 19 nt, Artificial Sequence
  Description of Artificial Sequence: Synthetic oligonucleotide
  Sense strand starting at position 1079 of SEQ ID NO: 316653
uuacaaggcuuugaaauuu

SEQ ID NO: 429866 - RNA, 19 nt, Artificial Sequence
  Description of Artificial Sequence: Synthetic oligonucleotide
  Antisense Strand to SEQ ID NO: 429865
aaauuucaaagccuuguaa

SEQ ID NO: 429867 - RNA, 19 nt, Artificial Sequence
  Description of Artificial Sequence: Synthetic oligonucleotide
  Sense strand starting at position 1220 of SEQ ID NO: 316653
ccauuugacuuagauuaug

SEQ ID NO: 429868 - RNA, 19 nt, Artificial Sequence
  Description of Artificial Sequence: Synthetic oligonucleotide
  Antisense Strand to SEQ ID NO: 429867
cauaaucuaagucaaaugg

SEQ ID NO: 429869 - RNA, 19 nt, Artificial Sequence
  Description of Artificial Sequence: Synthetic oligonucleotide
  Sense strand starting at position 1223 of SEQ ID NO: 316653
uuugacuuagauuaugcau

SEQ ID NO: 429870 - RNA, 19 nt, Artificial Sequence
  Description of Artificial Sequence: Synthetic oligonucleotide
  Antisense Strand to SEQ ID NO: 429869
augcauaaucuaagucaaa

SEQ ID NO: 429871 - RNA, 19 nt, Artificial Sequence
  Description of Artificial Sequence: Synthetic oligonucleotide
  Sense strand starting at position 1469 of SEQ ID NO: 316653
aguucuauuuaugagauca

SEQ ID NO: 429872 - RNA, 19 nt, Artificial Sequence
  Description of Artificial Sequence: Synthetic oligonucleotide
  Antisense Strand to SEQ ID NO: 429871
ugaucucauaaauagaacu

SEQ ID NO: 429873 - RNA, 19 nt, Artificial Sequence
  Description of Artificial Sequence: Synthetic oligonucleotide
  Sense strand starting at position 1528 of SEQ ID NO: 316653
auggauaggucuuugggau

SEQ ID NO: 429874 - RNA, 19 nt, Artificial Sequence
  Description of Artificial Sequence: Synthetic oligonucleotide
  Antisense Strand to SEQ ID NO: 429873
aucccaaagaccuauccau

SEQ ID NO: 429875 - RNA, 19 nt, Artificial Sequence
  Description of Artificial Sequence: Synthetic oligonucleotide
  Sense strand starting at position 1529 of SEQ ID NO: 316653
uggauaggucuuugggaua

SEQ ID NO: 429876 - RNA, 19 nt, Artificial Sequence
  Description of Artificial Sequence: Synthetic oligonucleotide
  Antisense Strand to SEQ ID NO: 429875
uaucccaaagaccuaucca

SEQ ID NO: 429877 - RNA, 19 nt, Artificial Sequence
  Description of Artificial Sequence: Synthetic oligonucleotide
  Sense strand starting at position 1534 of SEQ ID NO: 316653
aggucuuugggauaguuau

SEQ ID NO: 429878 - RNA, 19 nt, Artificial Sequence
  Description of Artificial Sequence: Synthetic oligonucleotide
  Antisense Strand to SEQ ID NO: 429877
auaacuaucccaaagaccu

SEQ ID NO: 429879 - RNA, 19 nt, Artificial Sequence
  Description of Artificial Sequence: Synthetic oligonucleotide
  Sense strand starting at position 1670 of SEQ ID NO: 316653
uaccuaggauguuugaauu

SEQ ID NO: 429880 - RNA, 19 nt, Artificial Sequence
  Description of Artificial Sequence: Synthetic oligonucleotide
  Antisense Strand to SEQ ID NO: 429879
aauucaaacauccuaggua

SEQ ID NO: 429881 - RNA, 19 nt, Artificial Sequence
  Description of Artificial Sequence: Synthetic oligonucleotide
  Sense strand starting at position 1767 of SEQ ID NO: 316653
uuuaaagaugcagaguuua

SEQ ID NO: 429882 - RNA, 19 nt, Artificial Sequence
  Description of Artificial Sequence: Synthetic oligonucleotide
  Antisense Strand to SEQ ID NO: 429881
uaaacucugcaucuuuaaa

SEQ ID NO: 429883 - RNA, 19 nt, Artificial Sequence
  Description of Artificial Sequence: Synthetic oligonucleotide
  Sense strand starting at position 1839 of SEQ ID NO: 316653
ggauuucuuacgugcaucu

SEQ ID NO: 429884 - RNA, 19 nt, Artificial Sequence
  Description of Artificial Sequence: Synthetic oligonucleotide
  Antisense Strand to SEQ ID NO: 429883
agaugcacguaagaaaucc

SEQ ID NO: 429885 - RNA, 19 nt, Artificial Sequence
  Description of Artificial Sequence: Synthetic oligonucleotide
  Sense strand starting at position 2018 of SEQ ID NO: 316653
guagauuauuaacuagacu

SEQ ID NO: 429886 - RNA, 19 nt, Artificial Sequence
  Description of Artificial Sequence: Synthetic oligonucleotide
  Antisense Strand to SEQ ID NO: 429885
agucuaguuaauaaucuac

SEQ ID NO: 429887 - RNA, 19 nt, Artificial Sequence
  Description of Artificial Sequence: Synthetic oligonucleotide
  Sense strand starting at position 2030 of SEQ ID NO: 316653
cuagacucaucuuuguauu

SEQ ID NO: 429888 - RNA, 19 nt, Artificial Sequence
  Description of Artificial Sequence: Synthetic oligonucleotide
  Antisense Strand to SEQ ID NO: 429887
aauacaaagaugagucuag

SEQ ID NO: 429889 - RNA, 19 nt, Artificial Sequence
  Description of Artificial Sequence: Synthetic oligonucleotide
  Sense strand starting at position 2152 of SEQ ID NO: 316653
agaccuugucaauguauua

SEQ ID NO: 429890 - RNA, 19 nt, Artificial Sequence
  Description of Artificial Sequence: Synthetic oligonucleotide
  Antisense Strand to SEQ ID NO: 429889
uaauacauugacaaggucu

SEQ ID NO: 429891 - RNA, 19 nt, Artificial Sequence
  Description of Artificial Sequence: Synthetic oligonucleotide
  Sense strand starting at position 2286 of SEQ ID NO: 316653
guuugcaauuuaguucuca

SEQ ID NO: 429892 - RNA, 19 nt, Artificial Sequence
  Description of Artificial Sequence: Synthetic oligonucleotide
  Antisense Strand to SEQ ID NO: 429891
ugagaacuaaauugcaaac

SEQ ID NO: 429893 - RNA, 19 nt, Artificial Sequence
  Description of Artificial Sequence: Synthetic oligonucleotide
  Sense strand starting at position 2290 of SEQ ID NO: 316653
gcaauuuaguucucagugu

SEQ ID NO: 429894 - RNA, 19 nt, Artificial Sequence
  Description of Artificial Sequence: Synthetic oligonucleotide
  Antisense Strand to SEQ ID NO: 429893
acacugagaacuaaauugc

SEQ ID NO: 429895 - RNA, 19 nt, Artificial Sequence
  Description of Artificial Sequence: Synthetic oligonucleotide
  Sense strand starting at position 2675 of SEQ ID NO: 316653
aguauaucucaugggaucu

SEQ ID NO: 429896 - RNA, 19 nt, Artificial Sequence
  Description of Artificial Sequence: Synthetic oligonucleotide
  Antisense Strand to SEQ ID NO: 429895
agaucccaugagauauacu

SEQ ID NO: 429897 - RNA, 19 nt, Artificial Sequence
  Description of Artificial Sequence: Synthetic oligonucleotide
  Sense strand starting at position 2736 of SEQ ID NO: 316653
ugaugauuaucuuugccau

SEQ ID NO: 429898 - RNA, 19 nt, Artificial Sequence
  Description of Artificial Sequence: Synthetic oligonucleotide
  Antisense Strand to SEQ ID NO: 429897
auggcaaagauaaucauca

SEQ ID NO: 429899 - RNA, 19 nt, Artificial Sequence
  Description of Artificial Sequence: Synthetic oligonucleotide
  Sense strand starting at position 2778 of SEQ ID NO: 316653
cccaaauucucuguagguu

SEQ ID NO: 429900 - RNA, 19 nt, Artificial Sequence
  Description of Artificial Sequence: Synthetic oligonucleotide
  Antisense Strand to SEQ ID NO: 429899
aaccuacagagaauuuggg

SEQ ID NO: 429901 - RNA, 19 nt, Artificial Sequence
  Description of Artificial Sequence: Synthetic oligonucleotide
  Sense strand starting at position 2779 of SEQ ID NO: 316653
ccaaauucucuguagguua

SEQ ID NO: 429902 - RNA, 19 nt, Artificial Sequence
  Description of Artificial Sequence: Synthetic oligonucleotide
  Antisense Strand to SEQ ID NO: 429901
uaaccuacagagaauuugg

SEQ ID NO: 429903 - RNA, 19 nt, Artificial Sequence
  Description of Artificial Sequence: Synthetic oligonucleotide
  Sense strand starting at position 2784 of SEQ ID NO: 316653
uucucuguagguuaugaga

SEQ ID NO: 429904 - RNA, 19 nt, Artificial Sequence
  Description of Artificial Sequence: Synthetic oligonucleotide
  Antisense Strand to SEQ ID NO: 429903
ucucauaaccuacagagaa

SEQ ID NO: 429905 - RNA, 19 nt, Artificial Sequence
  Description of Artificial Sequence: Synthetic oligonucleotide
  Sense strand starting at position 2820 of SEQ ID NO: 316653
ggcauaggauucuuuccau

SEQ ID NO: 429906 - RNA, 19 nt, Artificial Sequence
  Description of Artificial Sequence: Synthetic oligonucleotide
  Antisense Strand to SEQ ID NO: 429905
auggaaagaauccuaugcc

SEQ ID NO: 429907 - RNA, 19 nt, Artificial Sequence
  Description of Artificial Sequence: Synthetic oligonucleotide
  Sense strand starting at position 3002 of SEQ ID NO: 316653
gguucuuaucucuaccuca

SEQ ID NO: 429908 - RNA, 19 nt, Artificial Sequence
  Description of Artificial Sequence: Synthetic oligonucleotide
  Antisense Strand to SEQ ID NO: 429907
ugagguagagauaagaacc

SEQ ID NO: 429909 - RNA, 19 nt, Artificial Sequence
  Description of Artificial Sequence: Synthetic oligonucleotide
  Sense strand starting at position 3392 of SEQ ID NO: 316653
auagauagauaggaagauu

SEQ ID NO: 429910 - RNA, 19 nt, Artificial Sequence
  Description of Artificial Sequence: Synthetic oligonucleotide
  Antisense Strand to SEQ ID NO: 429909
aaucuuccuaucuaucuau

SEQ ID NO: 429911 - RNA, 19 nt, Artificial Sequence
  Description of Artificial Sequence: Synthetic oligonucleotide
  Sense strand starting at position 3449 of SEQ ID NO: 316653
agacuugucuuucugacua

SEQ ID NO: 429912 - RNA, 19 nt, Artificial Sequence
  Description of Artificial Sequence: Synthetic oligonucleotide
  Antisense Strand to SEQ ID NO: 429911
uagucagaaagacaagucu

SEQ ID NO: 429913 - RNA, 19 nt, Artificial Sequence
  Description of Artificial Sequence: Synthetic oligonucleotide
  Sense strand starting at position 3453 of SEQ ID NO: 316653
uugucuuucugacuacaga

SEQ ID NO: 429914 - RNA, 19 nt, Artificial Sequence
  Description of Artificial Sequence: Synthetic oligonucleotide
  Antisense Strand to SEQ ID NO: 429913
ucuguagucagaaagacaa

SEQ ID NO: 429915 - RNA, 19 nt, Artificial Sequence
  Description of Artificial Sequence: Synthetic oligonucleotide
  Sense strand starting at position 3454 of SEQ ID NO: 316653
ugucuuucugacuacagau

SEQ ID NO: 429916 - RNA, 19 nt, Artificial Sequence
  Description of Artificial Sequence: Synthetic oligonucleotide
  Antisense Strand to SEQ ID NO: 429915
aucuguagucagaaagaca

SEQ ID NO: 429917 - RNA, 19 nt, Artificial Sequence
  Description of Artificial Sequence: Synthetic oligonucleotide
  Sense strand starting at position 3599 of SEQ ID NO: 316653
uggauaaauuaugucaacu

SEQ ID NO: 429918 - RNA, 19 nt, Artificial Sequence
  Description of Artificial Sequence: Synthetic oligonucleotide
  Antisense Strand to SEQ ID NO: 429917
aguugacauaauuuaucca

SEQ ID NO: 429919 - RNA, 19 nt, Artificial Sequence
  Description of Artificial Sequence: Synthetic oligonucleotide
  Sense strand starting at position 3627 of SEQ ID NO: 316653
cuagaaauuguaggcauua

SEQ ID NO: 429920 - RNA, 19 nt, Artificial Sequence
  Description of Artificial Sequence: Synthetic oligonucleotide
  Antisense Strand to SEQ ID NO: 429919
uaaugccuacaauuucuag

SEQ ID NO: 429921 - RNA, 19 nt, Artificial Sequence
  Description of Artificial Sequence: Synthetic oligonucleotide
  Sense strand starting at position 3628 of SEQ ID NO: 316653
uagaaauuguaggcauuau

SEQ ID NO: 429922 - RNA, 19 nt, Artificial Sequence
  Description of Artificial Sequence: Synthetic oligonucleotide
  Antisense Strand to SEQ ID NO: 429921
auaaugccuacaauuucua

SEQ ID NO: 429923 - RNA, 19 nt, Artificial Sequence
  Description of Artificial Sequence: Synthetic oligonucleotide
  Sense strand starting at position 3683 of SEQ ID NO: 316653
uguagaagucccugggaaa

SEQ ID NO: 429924 - RNA, 19 nt, Artificial Sequence
  Description of Artificial Sequence: Synthetic oligonucleotide
  Antisense Strand to SEQ ID NO: 429923
uuucccagggacuucuaca

SEQ ID NO: 429925 - RNA, 19 nt, Artificial Sequence
  Description of Artificial Sequence: Synthetic oligonucleotide
  Sense strand starting at position 3684 of SEQ ID NO: 316653
guagaagucccugggaaag

SEQ ID NO: 429926 - RNA, 19 nt, Artificial Sequence
  Description of Artificial Sequence: Synthetic oligonucleotide
  Antisense Strand to SEQ ID NO: 429925
cuuucccagggacuucuac

SEQ ID NO: 429927 - RNA, 19 nt, Artificial Sequence
  Description of Artificial Sequence: Synthetic oligonucleotide
  Sense strand starting at position 7 of SEQ ID NO: 316654
gcauguauaccauacuuag

SEQ ID NO: 429928 - RNA, 19 nt, Artificial Sequence
  Description of Artificial Sequence: Synthetic oligonucleotide
  Antisense Strand to SEQ ID NO: 429927
cuaaguaugguauacaugc

SEQ ID NO: 429929 - RNA, 19 nt, Artificial Sequence
  Description of Artificial Sequence: Synthetic oligonucleotide
  Sense strand starting at position 10 of SEQ ID NO: 316654
uguauaccauacuuaggaa

SEQ ID NO: 429930 - RNA, 19 nt, Artificial Sequence
  Description of Artificial Sequence: Synthetic oligonucleotide
  Antisense Strand to SEQ ID NO: 429929
uuccuaaguaugguauaca

SEQ ID NO: 429931 - RNA, 19 nt, Artificial Sequence
  Description of Artificial Sequence: Synthetic oligonucleotide
  Sense strand starting at position 185 of SEQ ID NO: 316654
aguugucaccaucaauaac

SEQ ID NO: 429932 - RNA, 19 nt, Artificial Sequence
  Description of Artificial Sequence: Synthetic oligonucleotide
  Antisense Strand to SEQ ID NO: 429931
guuauugauggugacaacu

SEQ ID NO: 429933 - RNA, 19 nt, Artificial Sequence
  Description of Artificial Sequence: Synthetic oligonucleotide
  Sense strand starting at position 300 of SEQ ID NO: 316654
ugcucauuccuuuaagagu

SEQ ID NO: 429934 - RNA, 19 nt, Artificial Sequence
  Description of Artificial Sequence: Synthetic oligonucleotide
  Antisense Strand to SEQ ID NO: 429933
acucuuaaaggaaugagca

SEQ ID NO: 429935 - RNA, 19 nt, Artificial Sequence
  Description of Artificial Sequence: Synthetic oligonucleotide
  Sense strand starting at position 435 of SEQ ID NO: 316654
ccuuguguucaugggaaag

SEQ ID NO: 429936 - RNA, 19 nt, Artificial Sequence
  Description of Artificial Sequence: Synthetic oligonucleotide
  Antisense Strand to SEQ ID NO: 429935
cuuucccaugaacacaagg

SEQ ID NO: 429937 - RNA, 19 nt, Artificial Sequence
  Description of Artificial Sequence: Synthetic oligonucleotide
  Sense strand starting at position 612 of SEQ ID NO: 316654
agcucaucacaguauuauu

SEQ ID NO: 429938 - RNA, 19 nt, Artificial Sequence
  Description of Artificial Sequence: Synthetic oligonucleotide
  Antisense Strand to SEQ ID NO: 429937
aauaauacugugaugagcu

SEQ ID NO: 429939 - RNA, 19 nt, Artificial Sequence
  Description of Artificial Sequence: Synthetic oligonucleotide
  Sense strand starting at position 734 of SEQ ID NO: 316654
ugcagauagagaugcuaua

SEQ ID NO: 429940 - RNA, 19 nt, Artificial Sequence
  Description of Artificial Sequence: Synthetic oligonucleotide
  Antisense Strand to SEQ ID NO: 429939
uauagcaucucuaucugca

SEQ ID NO: 429941 - RNA, 19 nt, Artificial Sequence
  Description of Artificial Sequence: Synthetic oligonucleotide
  Sense strand starting at position 763 of SEQ ID NO: 316654
gucuucuuggcggaagaaa

SEQ ID NO: 429942 - RNA, 19 nt, Artificial Sequence
  Description of Artificial Sequence: Synthetic oligonucleotide
  Antisense Strand to SEQ ID NO: 429941
uuucuuccgccaagaagac

SEQ ID NO: 429943 - RNA, 19 nt, Artificial Sequence
  Description of Artificial Sequence: Synthetic oligonucleotide
  Sense strand starting at position 942 of SEQ ID NO: 316654
ggacuugacauugguucua

SEQ ID NO: 429944 - RNA, 19 nt, Artificial Sequence
  Description of Artificial Sequence: Synthetic oligonucleotide
  Antisense Strand to SEQ ID NO: 429943
uagaaccaaugucaagucc

SEQ ID NO: 429945 - RNA, 19 nt, Artificial Sequence
  Description of Artificial Sequence: Synthetic oligonucleotide
  Sense strand starting at position 944 of SEQ ID NO: 316654
acuugacauugguucuaga

SEQ ID NO: 429946 - RNA, 19 nt, Artificial Sequence
  Description of Artificial Sequence: Synthetic oligonucleotide
  Antisense Strand to SEQ ID NO: 429945
ucuagaaccaaugucaagu

SEQ ID NO: 429947 - RNA, 19 nt, Artificial Sequence
  Description of Artificial Sequence: Synthetic oligonucleotide
  Sense strand starting at position 1008 of SEQ ID NO: 316654
ggauauuguuucuuauaag

SEQ ID NO: 429948 - RNA, 19 nt, Artificial Sequence
  Description of Artificial Sequence: Synthetic oligonucleotide
  Antisense Strand to SEQ ID NO: 429947
cuuauaagaaacaauaucc

SEQ ID NO: 429949 - RNA, 19 nt, Artificial Sequence
  Description of Artificial Sequence: Synthetic oligonucleotide
  Sense strand starting at position 1028 of SEQ ID NO: 316654
gaauuaguggcacaaagua

SEQ ID NO: 429950 - RNA, 19 nt, Artificial Sequence
  Description of Artificial Sequence: Synthetic oligonucleotide
  Antisense Strand to SEQ ID NO: 429949
uacuuugugccacuaauuc

SEQ ID NO: 429951 - RNA, 19 nt, Artificial Sequence
  Description of Artificial Sequence: Synthetic oligonucleotide
  Sense strand starting at position 1094 of SEQ ID NO: 316654
auauaucgcaagcagagau

SEQ ID NO: 429952 - RNA, 19 nt, Artificial Sequence
  Description of Artificial Sequence: Synthetic oligonucleotide
  Antisense Strand to SEQ ID NO: 429951
aucucugcuugcgauauau

SEQ ID NO: 429953 - RNA, 19 nt, Artificial Sequence
  Description of Artificial Sequence: Synthetic oligonucleotide
  Sense strand starting at position 1118 of SEQ ID NO: 316654
uauauuguggcauaaaguc

SEQ ID NO: 429954 - RNA, 19 nt, Artificial Sequence
  Description of Artificial Sequence: Synthetic oligonucleotide
  Antisense Strand to SEQ ID NO: 429953
gacuuuaugccacaauaua

SEQ ID NO: 429955 - RNA, 19 nt, Artificial Sequence
  Description of Artificial Sequence: Synthetic oligonucleotide
  Sense strand starting at position 1363 of SEQ ID NO: 316654
acccauaugagacgaguaa

SEQ ID NO: 429956 - RNA, 19 nt, Artificial Sequence
  Description of Artificial Sequence: Synthetic oligonucleotide
  Antisense Strand to SEQ ID NO: 429955
uuacucgucucauaugggu

SEQ ID NO: 429957 - RNA, 19 nt, Artificial Sequence
  Description of Artificial Sequence: Synthetic oligonucleotide
  Sense strand starting at position 1367 of SEQ ID NO: 316654
auaugagacgaguaagucu

SEQ ID NO: 429958 - RNA, 19 nt, Artificial Sequence
  Description of Artificial Sequence: Synthetic oligonucleotide
  Antisense Strand to SEQ ID NO: 429957
agacuuacucgucucauau

SEQ ID NO: 429959 - RNA, 19 nt, Artificial Sequence
  Description of Artificial Sequence: Synthetic oligonucleotide
  Sense strand starting at position 1375 of SEQ ID NO: 316654
cgaguaagucucgugccuu

SEQ ID NO: 429960 - RNA, 19 nt, Artificial Sequence
  Description of Artificial Sequence: Synthetic oligonucleotide
  Antisense Strand to SEQ ID NO: 429959
aaggcacgagacuuacucg

SEQ ID NO: 429961 - RNA, 19 nt, Artificial Sequence
  Description of Artificial Sequence: Synthetic oligonucleotide
  Sense strand starting at position 1378 of SEQ ID NO: 316654
guaagucucgugccuuauc

SEQ ID NO: 429962 - RNA, 19 nt, Artificial Sequence
  Description of Artificial Sequence: Synthetic oligonucleotide
  Antisense Strand to SEQ ID NO: 429961
gauaaggcacgagacuuac

SEQ ID NO: 429963 - RNA, 19 nt, Artificial Sequence
  Description of Artificial Sequence: Synthetic oligonucleotide
  Sense strand starting at position 1520 of SEQ ID NO: 316654
uuaaacaucucaguuaagu

SEQ ID NO: 429964 - RNA, 19 nt, Artificial Sequence
  Description of Artificial Sequence: Synthetic oligonucleotide
  Antisense Strand to SEQ ID NO: 429963
acuuaacugagauguuuaa

SEQ ID NO: 429965 - RNA, 19 nt, Artificial Sequence
  Description of Artificial Sequence: Synthetic oligonucleotide
  Sense strand starting at position 1545 of SEQ ID NO: 316654
accagaagcucagugacuu

SEQ ID NO: 429966 - RNA, 19 nt, Artificial Sequence
  Description of Artificial Sequence: Synthetic oligonucleotide
  Antisense Strand to SEQ ID NO: 429965
aagucacugagcuucuggu

SEQ ID NO: 429967 - RNA, 19 nt, Artificial Sequence
  Description of Artificial Sequence: Synthetic oligonucleotide
  Sense strand starting at position 1546 of SEQ ID NO: 316654
ccagaagcucagugacuua

SEQ ID NO: 429968 - RNA, 19 nt, Artificial Sequence
  Description of Artificial Sequence: Synthetic oligonucleotide
  Antisense Strand to SEQ ID NO: 429967
uaagucacugagcuucugg

SEQ ID NO: 429969 - RNA, 19 nt, Artificial Sequence
  Description of Artificial Sequence: Synthetic oligonucleotide
  Sense strand starting at position 1549 of SEQ ID NO: 316654
gaagcucagugacuuaaga

SEQ ID NO: 429970 - RNA, 19 nt, Artificial Sequence
  Description of Artificial Sequence: Synthetic oligonucleotide
  Antisense Strand to SEQ ID NO: 429969
ucuuaagucacugagcuuc

SEQ ID NO: 429971 - RNA, 19 nt, Artificial Sequence
  Description of Artificial Sequence: Synthetic oligonucleotide
  Sense strand starting at position 1712 of SEQ ID NO: 316654
ucuggaaaguuucuauuau

SEQ ID NO: 429972 - RNA, 19 nt, Artificial Sequence
  Description of Artificial Sequence: Synthetic oligonucleotide
  Antisense Strand to SEQ ID NO: 429971
auaauagaaacuuuccaga

SEQ ID NO: 429973 - RNA, 19 nt, Artificial Sequence
  Description of Artificial Sequence: Synthetic oligonucleotide
  Sense strand starting at position 2035 of SEQ ID NO: 316654
ucagaauaugguuguguaa

SEQ ID NO: 429974 - RNA, 19 nt, Artificial Sequence
  Description of Artificial Sequence: Synthetic oligonucleotide
  Antisense Strand to SEQ ID NO: 429973
uuacacaaccauauucuga

SEQ ID NO: 429975 - RNA, 19 nt, Artificial Sequence
  Description of Artificial Sequence: Synthetic oligonucleotide
  Sense strand starting at position 2073 of SEQ ID NO: 316654
gcaaucuugcaccauaaga

SEQ ID NO: 429976 - RNA, 19 nt, Artificial Sequence
  Description of Artificial Sequence: Synthetic oligonucleotide
  Antisense Strand to SEQ ID NO: 429975
ucuuauggugcaagauugc

SEQ ID NO: 429977 - RNA, 19 nt, Artificial Sequence
  Description of Artificial Sequence: Synthetic oligonucleotide
  Sense strand starting at position 2115 of SEQ ID NO: 316654
ggugaaagguauucuggga

SEQ ID NO: 429978 - RNA, 19 nt, Artificial Sequence
  Description of Artificial Sequence: Synthetic oligonucleotide
  Antisense Strand to SEQ ID NO: 429977
ucccagaauaccuuucacc

SEQ ID NO: 429979 - RNA, 19 nt, Artificial Sequence
  Description of Artificial Sequence: Synthetic oligonucleotide
  Sense strand starting at position 2131 of SEQ ID NO: 316654
ggagcuguauuacuacaga

SEQ ID NO: 429980 - RNA, 19 nt, Artificial Sequence
  Description of Artificial Sequence: Synthetic oligonucleotide
  Antisense Strand to SEQ ID NO: 429979
ucuguaguaauacagcucc

SEQ ID NO: 429981 - RNA, 19 nt, Artificial Sequence
  Description of Artificial Sequence: Synthetic oligonucleotide
  Sense strand starting at position 2202 of SEQ ID NO: 316654
aauggagaguccucuuaga

SEQ ID NO: 429982 - RNA, 19 nt, Artificial Sequence
  Description of Artificial Sequence: Synthetic oligonucleotide
  Antisense Strand to SEQ ID NO: 429981
ucuaagaggacucuccauu

SEQ ID NO: 429983 - RNA, 19 nt, Artificial Sequence
  Description of Artificial Sequence: Synthetic oligonucleotide
  Sense strand starting at position 2252 of SEQ ID NO: 316654
ugaauaugacauuguugaa

SEQ ID NO: 429984 - RNA, 19 nt, Artificial Sequence
  Description of Artificial Sequence: Synthetic oligonucleotide
  Antisense Strand to SEQ ID NO: 429983
uucaacaaugucauauuca

SEQ ID NO: 429985 - RNA, 19 nt, Artificial Sequence
  Description of Artificial Sequence: Synthetic oligonucleotide
  Sense strand starting at position 2400 of SEQ ID NO: 316654
ucugauuaggcugacuagu

SEQ ID NO: 429986 - RNA, 19 nt, Artificial Sequence
  Description of Artificial Sequence: Synthetic oligonucleotide
  Antisense Strand to SEQ ID NO: 429985
acuagucagccuaaucaga

SEQ ID NO: 429987 - RNA, 19 nt, Artificial Sequence
  Description of Artificial Sequence: Synthetic oligonucleotide
  Sense strand starting at position 2406 of SEQ ID NO: 316654
uaggcugacuaguuugaca

SEQ ID NO: 429988 - RNA, 19 nt, Artificial Sequence
  Description of Artificial Sequence: Synthetic oligonucleotide
  Antisense Strand to SEQ ID NO: 429987
ugucaaacuagucagccua

SEQ ID NO: 429989 - RNA, 19 nt, Artificial Sequence
  Description of Artificial Sequence: Synthetic oligonucleotide
  Sense strand starting at position 2441 of SEQ ID NO: 316654
ugaguuacacaguggacau

SEQ ID NO: 429990 - RNA, 19 nt, Artificial Sequence
  Description of Artificial Sequence: Synthetic oligonucleotide
  Antisense Strand to SEQ ID NO: 429989
auguccacuguguaacuca

SEQ ID NO: 429991 - RNA, 19 nt, Artificial Sequence
  Description of Artificial Sequence: Synthetic oligonucleotide
  Sense strand starting at position 2458 of SEQ ID NO: 316654
auuguccuuccauggaaca

SEQ ID NO: 429992 - RNA, 19 nt, Artificial Sequence
  Description of Artificial Sequence: Synthetic oligonucleotide
  Antisense Strand to SEQ ID NO: 429991
uguuccauggaaggacaau

SEQ ID NO: 429993 - RNA, 19 nt, Artificial Sequence
  Description of Artificial Sequence: Synthetic oligonucleotide
  Sense strand starting at position 2459 of SEQ ID NO: 316654
uuguccuuccauggaacaa

SEQ ID NO: 429994 - RNA, 19 nt, Artificial Sequence
  Description of Artificial Sequence: Synthetic oligonucleotide
  Antisense Strand to SEQ ID NO: 429993
uuguuccauggaaggacaa

SEQ ID NO: 429995 - RNA, 19 nt, Artificial Sequence
  Description of Artificial Sequence: Synthetic oligonucleotide
  Sense strand starting at position 2617 of SEQ ID NO: 316654
aaagaaguuuccucuagag

SEQ ID NO: 429996 - RNA, 19 nt, Artificial Sequence
  Description of Artificial Sequence: Synthetic oligonucleotide
  Antisense Strand to SEQ ID NO: 429995
cucuagaggaaacuucuuu

SEQ ID NO: 429997 - RNA, 19 nt, Artificial Sequence
  Description of Artificial Sequence: Synthetic oligonucleotide
  Sense strand starting at position 2619 of SEQ ID NO: 316654
agaaguuuccucuagagug

SEQ ID NO: 429998 - RNA, 19 nt, Artificial Sequence
  Description of Artificial Sequence: Synthetic oligonucleotide
  Antisense Strand to SEQ ID NO: 429997
cacucuagaggaaacuucu

SEQ ID NO: 429999 - RNA, 19 nt, Artificial Sequence
  Description of Artificial Sequence: Synthetic oligonucleotide
  Sense strand starting at position 2689 of SEQ ID NO: 316654
uugguauacuuccuagaaa

SEQ ID NO: 430000 - RNA, 19 nt, Artificial Sequence
  Description of Artificial Sequence: Synthetic oligonucleotide
  Antisense Strand to SEQ ID NO: 429999
uuucuaggaaguauaccaa

SEQ ID NO: 430001 - RNA, 19 nt, Artificial Sequence
  Description of Artificial Sequence: Synthetic oligonucleotide
  Sense strand starting at position 2888 of SEQ ID NO: 316654
auggcauugcuauaacaaa

SEQ ID NO: 430002 - RNA, 19 nt, Artificial Sequence
  Description of Artificial Sequence: Synthetic oligonucleotide
  Antisense Strand to SEQ ID NO: 430001
uuuguuauagcaaugccau

SEQ ID NO: 430003 - RNA, 19 nt, Artificial Sequence
  Description of Artificial Sequence: Synthetic oligonucleotide
  Sense strand starting at position 3168 of SEQ ID NO: 316654
uagagucuauggucacaga

SEQ ID NO: 430004 - RNA, 19 nt, Artificial Sequence
  Description of Artificial Sequence: Synthetic oligonucleotide
  Antisense Strand to SEQ ID NO: 430003
ucugugaccauagacucua

SEQ ID NO: 430005 - RNA, 19 nt, Artificial Sequence
  Description of Artificial Sequence: Synthetic oligonucleotide
  Sense strand starting at position 3971 of SEQ ID NO: 316654
auuuguacaugugucuuua

SEQ ID NO: 430006 - RNA, 19 nt, Artificial Sequence
  Description of Artificial Sequence: Synthetic oligonucleotide
  Antisense Strand to SEQ ID NO: 430005
uaaagacacauguacaaau

SEQ ID NO: 430007 - RNA, 19 nt, Artificial Sequence
  Description of Artificial Sequence: Synthetic oligonucleotide
  Sense strand starting at position 73 of SEQ ID NO: 316655
ucauguuuacaagguaaau

SEQ ID NO: 430008 - RNA, 19 nt, Artificial Sequence
  Description of Artificial Sequence: Synthetic oligonucleotide
  Antisense Strand to SEQ ID NO: 430007
auuuaccuuguaaacauga

SEQ ID NO: 430009 - RNA, 19 nt, Artificial Sequence
  Description of Artificial Sequence: Synthetic oligonucleotide
  Sense strand starting at position 118 of SEQ ID NO: 316655
ggaauuaucuagcugaguu

SEQ ID NO: 430010 - RNA, 19 nt, Artificial Sequence
  Description of Artificial Sequence: Synthetic oligonucleotide
  Antisense Strand to SEQ ID NO: 430009
aacucagcuagauaauucc

SEQ ID NO: 430011 - RNA, 19 nt, Artificial Sequence
  Description of Artificial Sequence: Synthetic oligonucleotide
  Sense strand starting at position 260 of SEQ ID NO: 316655
ccaugcauuguggagacua

SEQ ID NO: 430012 - RNA, 19 nt, Artificial Sequence
  Description of Artificial Sequence: Synthetic oligonucleotide
  Antisense Strand to SEQ ID NO: 430011
uagucuccacaaugcaugg

SEQ ID NO: 430013 - RNA, 19 nt, Artificial Sequence
  Description of Artificial Sequence: Synthetic oligonucleotide
  Sense strand starting at position 313 of SEQ ID NO: 316655
ucuagaaauugucuuggga

SEQ ID NO: 430014 - RNA, 19 nt, Artificial Sequence
  Description of Artificial Sequence: Synthetic oligonucleotide
  Antisense Strand to SEQ ID NO: 430013
ucccaagacaauuucuaga

SEQ ID NO: 430015 - RNA, 19 nt, Artificial Sequence
  Description of Artificial Sequence: Synthetic oligonucleotide
  Sense strand starting at position 316 of SEQ ID NO: 316655
agaaauugucuugggacua

SEQ ID NO: 430016 - RNA, 19 nt, Artificial Sequence
  Description of Artificial Sequence: Synthetic oligonucleotide
  Antisense Strand to SEQ ID NO: 430015
uagucccaagacaauuucu

SEQ ID NO: 430017 - RNA, 19 nt, Artificial Sequence
  Description of Artificial Sequence: Synthetic oligonucleotide
  Sense strand starting at position 703 of SEQ ID NO: 316655
acugacaucugagcaacua

SEQ ID NO: 430018 - RNA, 19 nt, Artificial Sequence
  Description of Artificial Sequence: Synthetic oligonucleotide
  Antisense Strand to SEQ ID NO: 430017
uaguugcucagaugucagu

SEQ ID NO: 430019 - RNA, 19 nt, Artificial Sequence
  Description of Artificial Sequence: Synthetic oligonucleotide
  Sense strand starting at position 704 of SEQ ID NO: 316655
cugacaucugagcaacuau

SEQ ID NO: 430020 - RNA, 19 nt, Artificial Sequence
  Description of Artificial Sequence: Synthetic oligonucleotide
  Antisense Strand to SEQ ID NO: 430019
auaguugcucagaugucag

SEQ ID NO: 430021 - RNA, 19 nt, Artificial Sequence
  Description of Artificial Sequence: Synthetic oligonucleotide
  Sense strand starting at position 808 of SEQ ID NO: 316655
uuuggaguucgacaaucaa

SEQ ID NO: 430022 - RNA, 19 nt, Artificial Sequence
  Description of Artificial Sequence: Synthetic oligonucleotide
  Antisense Strand to SEQ ID NO: 430021
uugauugucgaacuccaaa

SEQ ID NO: 430023 - RNA, 19 nt, Artificial Sequence
  Description of Artificial Sequence: Synthetic oligonucleotide
  Sense strand starting at position 1088 of SEQ ID NO: 316655
aaccgauuuguauguagua

SEQ ID NO: 430024 - RNA, 19 nt, Artificial Sequence
  Description of Artificial Sequence: Synthetic oligonucleotide
  Antisense Strand to SEQ ID NO: 430023
uacuacauacaaaucgguu

SEQ ID NO: 430025 - RNA, 19 nt, Artificial Sequence
  Description of Artificial Sequence: Synthetic oligonucleotide
  Sense strand starting at position 1090 of SEQ ID NO: 316655
ccgauuuguauguaguagu

SEQ ID NO: 430026 - RNA, 19 nt, Artificial Sequence
  Description of Artificial Sequence: Synthetic oligonucleotide
  Antisense Strand to SEQ ID NO: 430025
acuacuacauacaaaucgg

SEQ ID NO: 430027 - RNA, 19 nt, Artificial Sequence
  Description of Artificial Sequence: Synthetic oligonucleotide
  Sense strand starting at position 1170 of SEQ ID NO: 316655
ccuaaauaaguauguagga

SEQ ID NO: 430028 - RNA, 19 nt, Artificial Sequence
  Description of Artificial Sequence: Synthetic oligonucleotide
  Antisense Strand to SEQ ID NO: 430027
uccuacauacuuauuuagg

SEQ ID NO: 430029 - RNA, 19 nt, Artificial Sequence
  Description of Artificial Sequence: Synthetic oligonucleotide
  Sense strand starting at position 1333 of SEQ ID NO: 316655
uugaaaugcaugugaaaug

SEQ ID NO: 430030 - RNA, 19 nt, Artificial Sequence
  Description of Artificial Sequence: Synthetic oligonucleotide
  Antisense Strand to SEQ ID NO: 430029
cauuucacaugcauuucaa

SEQ ID NO: 430031 - RNA, 19 nt, Artificial Sequence
  Description of Artificial Sequence: Synthetic oligonucleotide
  Sense strand starting at position 1338 of SEQ ID NO: 316655
augcaugugaaauguaaug

SEQ ID NO: 430032 - RNA, 19 nt, Artificial Sequence
  Description of Artificial Sequence: Synthetic oligonucleotide
  Antisense Strand to SEQ ID NO: 430031
cauuacauuucacaugcau

SEQ ID NO: 430033 - RNA, 19 nt, Artificial Sequence
  Description of Artificial Sequence: Synthetic oligonucleotide
  Sense strand starting at position 1389 of SEQ ID NO: 316655
gcaggaauagaggguacau

SEQ ID NO: 430034 - RNA, 19 nt, Artificial Sequence
  Description of Artificial Sequence: Synthetic oligonucleotide
  Antisense Strand to SEQ ID NO: 430033
auguacccucuauuccugc

SEQ ID NO: 430035 - RNA, 19 nt, Artificial Sequence
  Description of Artificial Sequence: Synthetic oligonucleotide
  Sense strand starting at position 1459 of SEQ ID NO: 316655
augagaguaaauuggcuau

SEQ ID NO: 430036 - RNA, 19 nt, Artificial Sequence
  Description of Artificial Sequence: Synthetic oligonucleotide
  Antisense Strand to SEQ ID NO: 430035
auagccaauuuacucucau

SEQ ID NO: 430037 - RNA, 19 nt, Artificial Sequence
  Description of Artificial Sequence: Synthetic oligonucleotide
  Sense strand starting at position 1461 of SEQ ID NO: 316655
gagaguaaauuggcuaucu

SEQ ID NO: 430038 - RNA, 19 nt, Artificial Sequence
  Description of Artificial Sequence: Synthetic oligonucleotide
  Antisense Strand to SEQ ID NO: 430037
agauagccaauuuacucuc

SEQ ID NO: 430039 - RNA, 19 nt, Artificial Sequence
  Description of Artificial Sequence: Synthetic oligonucleotide
  Sense strand starting at position 1462 of SEQ ID NO: 316655
agaguaaauuggcuaucuu

SEQ ID NO: 430040 - RNA, 19 nt, Artificial Sequence
  Description of Artificial Sequence: Synthetic oligonucleotide
  Antisense Strand to SEQ ID NO: 430039
aagauagccaauuuacucu

SEQ ID NO: 430041 - RNA, 19 nt, Artificial Sequence
  Description of Artificial Sequence: Synthetic oligonucleotide
  Sense strand starting at position 1463 of SEQ ID NO: 316655
gaguaaauuggcuaucuua

SEQ ID NO: 430042 - RNA, 19 nt, Artificial Sequence
  Description of Artificial Sequence: Synthetic oligonucleotide
  Antisense Strand to SEQ ID NO: 430041
uaagauagccaauuuacuc

SEQ ID NO: 430043 - RNA, 19 nt, Artificial Sequence
  Description of Artificial Sequence: Synthetic oligonucleotide
  Sense strand starting at position 1734 of SEQ ID NO: 316655
augucaucucugggacaug

SEQ ID NO: 430044 - RNA, 19 nt, Artificial Sequence
  Description of Artificial Sequence: Synthetic oligonucleotide
  Antisense Strand to SEQ ID NO: 430043
caugucccagagaugacau

SEQ ID NO: 430045 - RNA, 19 nt, Artificial Sequence
  Description of Artificial Sequence: Synthetic oligonucleotide
  Sense strand starting at position 1778 of SEQ ID NO: 316655
ucagcuacuggugacaaau

SEQ ID NO: 430046 - RNA, 19 nt, Artificial Sequence
  Description of Artificial Sequence: Synthetic oligonucleotide
  Antisense Strand to SEQ ID NO: 430045
auuugucaccaguagcuga

SEQ ID NO: 430047 - RNA, 19 nt, Artificial Sequence
  Description of Artificial Sequence: Synthetic oligonucleotide
  Sense strand starting at position 2242 of SEQ ID NO: 316655
ggacauaggcucugaagac

SEQ ID NO: 430048 - RNA, 19 nt, Artificial Sequence
  Description of Artificial Sequence: Synthetic oligonucleotide
  Antisense Strand to SEQ ID NO: 430047
gucuucagagccuaugucc

SEQ ID NO: 430049 - RNA, 19 nt, Artificial Sequence
  Description of Artificial Sequence: Synthetic oligonucleotide
  Sense strand starting at position 2477 of SEQ ID NO: 316655
gugugugauuucuuccuug

SEQ ID NO: 430050 - RNA, 19 nt, Artificial Sequence
  Description of Artificial Sequence: Synthetic oligonucleotide
  Antisense Strand to SEQ ID NO: 430049
caaggaagaaaucacacac

SEQ ID NO: 430051 - RNA, 19 nt, Artificial Sequence
  Description of Artificial Sequence: Synthetic oligonucleotide
  Sense strand starting at position 2565 of SEQ ID NO: 316655
guuggacccuuugcaagaa

SEQ ID NO: 430052 - RNA, 19 nt, Artificial Sequence
  Description of Artificial Sequence: Synthetic oligonucleotide
  Antisense Strand to SEQ ID NO: 430051
uucuugcaaaggguccaac

SEQ ID NO: 430053 - RNA, 19 nt, Artificial Sequence
  Description of Artificial Sequence: Synthetic oligonucleotide
  Sense strand starting at position 2766 of SEQ ID NO: 316655
aaagguuaacgucaacaca

SEQ ID NO: 430054 - RNA, 19 nt, Artificial Sequence
  Description of Artificial Sequence: Synthetic oligonucleotide
  Antisense Strand to SEQ ID NO: 430053
uguguugacguuaaccuuu

SEQ ID NO: 430055 - RNA, 19 nt, Artificial Sequence
  Description of Artificial Sequence: Synthetic oligonucleotide
  Sense strand starting at position 2769 of SEQ ID NO: 316655
gguuaacgucaacacagau

SEQ ID NO: 430056 - RNA, 19 nt, Artificial Sequence
  Description of Artificial Sequence: Synthetic oligonucleotide
  Antisense Strand to SEQ ID NO: 430055
aucuguguugacguuaacc

SEQ ID NO: 430057 - RNA, 19 nt, Artificial Sequence
  Description of Artificial Sequence: Synthetic oligonucleotide
  Sense strand starting at position 2806 of SEQ ID NO: 316655
agauaauaucuuggaugug

SEQ ID NO: 430058 - RNA, 19 nt, Artificial Sequence
  Description of Artificial Sequence: Synthetic oligonucleotide
  Antisense Strand to SEQ ID NO: 430057
cacauccaagauauuaucu

SEQ ID NO: 430059 - RNA, 19 nt, Artificial Sequence
  Description of Artificial Sequence: Synthetic oligonucleotide
  Sense strand starting at position 2809 of SEQ ID NO: 316655
uaauaucuuggauguggau

SEQ ID NO: 430060 - RNA, 19 nt, Artificial Sequence
  Description of Artificial Sequence: Synthetic oligonucleotide
  Antisense Strand to SEQ ID NO: 430059
auccacauccaagauauua

SEQ ID NO: 430061 - RNA, 19 nt, Artificial Sequence
  Description of Artificial Sequence: Synthetic oligonucleotide
  Sense strand starting at position 2816 of SEQ ID NO: 316655
uuggauguggauugaauau

SEQ ID NO: 430062 - RNA, 19 nt, Artificial Sequence
  Description of Artificial Sequence: Synthetic oligonucleotide
  Antisense Strand to SEQ ID NO: 430061
auauucaauccacauccaa

SEQ ID NO: 430063 - RNA, 19 nt, Artificial Sequence
  Description of Artificial Sequence: Synthetic oligonucleotide
  Sense strand starting at position 2929 of SEQ ID NO: 316655
agggaugagucaguacacu

SEQ ID NO: 430064 - RNA, 19 nt, Artificial Sequence
  Description of Artificial Sequence: Synthetic oligonucleotide
  Antisense Strand to SEQ ID NO: 430063
aguguacugacucaucccu

SEQ ID NO: 430065 - RNA, 19 nt, Artificial Sequence
  Description of Artificial Sequence: Synthetic oligonucleotide
  Sense strand starting at position 2938 of SEQ ID NO: 316655
ucaguacacucuuuaggga

SEQ ID NO: 430066 - RNA, 19 nt, Artificial Sequence
  Description of Artificial Sequence: Synthetic oligonucleotide
  Antisense Strand to SEQ ID NO: 430065
ucccuaaagaguguacuga

SEQ ID NO: 430067 - RNA, 19 nt, Artificial Sequence
  Description of Artificial Sequence: Synthetic oligonucleotide
  Sense strand starting at position 2968 of SEQ ID NO: 316655
ugucaauuacagggaacau

SEQ ID NO: 430068 - RNA, 19 nt, Artificial Sequence
  Description of Artificial Sequence: Synthetic oligonucleotide
  Antisense Strand to SEQ ID NO: 430067
auguucccuguaauugaca

SEQ ID NO: 430069 - RNA, 19 nt, Artificial Sequence
  Description of Artificial Sequence: Synthetic oligonucleotide
  Sense strand starting at position 3107 of SEQ ID NO: 316655
uuaucuuuaggaugcaaag

SEQ ID NO: 430070 - RNA, 19 nt, Artificial Sequence
  Description of Artificial Sequence: Synthetic oligonucleotide
  Antisense Strand to SEQ ID NO: 430069
cuuugcauccuaaagauaa

SEQ ID NO: 430071 - RNA, 19 nt, Artificial Sequence
  Description of Artificial Sequence: Synthetic oligonucleotide
  Sense strand starting at position 3130 of SEQ ID NO: 316655
gaagaaugugaauguguuu

SEQ ID NO: 430072 - RNA, 19 nt, Artificial Sequence
  Description of Artificial Sequence: Synthetic oligonucleotide
  Antisense Strand to SEQ ID NO: 430071
aaacacauucacauucuuc

SEQ ID NO: 430073 - RNA, 19 nt, Artificial Sequence
  Description of Artificial Sequence: Synthetic oligonucleotide
  Sense strand starting at position 3595 of SEQ ID NO: 316655
gucuuaaagauuggugaga

SEQ ID NO: 430074 - RNA, 19 nt, Artificial Sequence
  Description of Artificial Sequence: Synthetic oligonucleotide
  Antisense Strand to SEQ ID NO: 430073
ucucaccaaucuuuaagac

SEQ ID NO: 430075 - RNA, 19 nt, Artificial Sequence
  Description of Artificial Sequence: Synthetic oligonucleotide
  Sense strand starting at position 3596 of SEQ ID NO: 316655
ucuuaaagauuggugagau

SEQ ID NO: 430076 - RNA, 19 nt, Artificial Sequence
  Description of Artificial Sequence: Synthetic oligonucleotide
  Antisense Strand to SEQ ID NO: 430075
aucucaccaaucuuuaaga

SEQ ID NO: 430077 - RNA, 19 nt, Artificial Sequence
  Description of Artificial Sequence: Synthetic oligonucleotide
  Sense strand starting at position 3633 of SEQ ID NO: 316655
gccauuuauugggugcuga

SEQ ID NO: 430078 - RNA, 19 nt, Artificial Sequence
  Description of Artificial Sequence: Synthetic oligonucleotide
  Antisense Strand to SEQ ID NO: 430077
ucagcacccaauaaauggc

SEQ ID NO: 430079 - RNA, 19 nt, Artificial Sequence
  Description of Artificial Sequence: Synthetic oligonucleotide
  Sense strand starting at position 3641 of SEQ ID NO: 316655
uugggugcugaaugaauga

SEQ ID NO: 430080 - RNA, 19 nt, Artificial Sequence
  Description of Artificial Sequence: Synthetic oligonucleotide
  Antisense Strand to SEQ ID NO: 430079
ucauucauucagcacccaa

SEQ ID NO: 430081 - RNA, 19 nt, Artificial Sequence
  Description of Artificial Sequence: Synthetic oligonucleotide
  Sense strand starting at position 3648 of SEQ ID NO: 316655
cugaaugaaugaguugauu

SEQ ID NO: 430082 - RNA, 19 nt, Artificial Sequence
  Description of Artificial Sequence: Synthetic oligonucleotide
  Antisense Strand to SEQ ID NO: 430081
aaucaacucauucauucag

SEQ ID NO: 430083 - RNA, 19 nt, Artificial Sequence
  Description of Artificial Sequence: Synthetic oligonucleotide
  Sense strand starting at position 3837 of SEQ ID NO: 316655
gaaguugaugcugaaucca

SEQ ID NO: 430084 - RNA, 19 nt, Artificial Sequence
  Description of Artificial Sequence: Synthetic oligonucleotide
  Antisense Strand to SEQ ID NO: 430083
uggauucagcaucaacuuc

SEQ ID NO: 430085 - RNA, 19 nt, Artificial Sequence
  Description of Artificial Sequence: Synthetic oligonucleotide
  Sense strand starting at position 3846 of SEQ ID NO: 316655
gcugaauccauaggaacga

SEQ ID NO: 430086 - RNA, 19 nt, Artificial Sequence
  Description of Artificial Sequence: Synthetic oligonucleotide
  Antisense Strand to SEQ ID NO: 430085
ucguuccuauggauucagc

SEQ ID NO: 430087 - RNA, 19 nt, Artificial Sequence
  Description of Artificial Sequence: Synthetic oligonucleotide
  Sense strand starting at position 161 of SEQ ID NO: 316656
guuguauguguccacauuu

SEQ ID NO: 430088 - RNA, 19 nt, Artificial Sequence
  Description of Artificial Sequence: Synthetic oligonucleotide
  Antisense Strand to SEQ ID NO: 430087
aaauguggacacauacaac

SEQ ID NO: 430089 - RNA, 19 nt, Artificial Sequence
  Description of Artificial Sequence: Synthetic oligonucleotide
  Sense strand starting at position 248 of SEQ ID NO: 316656
cuugucuaugugucgugau

SEQ ID NO: 430090 - RNA, 19 nt, Artificial Sequence
  Description of Artificial Sequence: Synthetic oligonucleotide
  Antisense Strand to SEQ ID NO: 430089
aucacgacacauagacaag

SEQ ID NO: 430091 - RNA, 19 nt, Artificial Sequence
  Description of Artificial Sequence: Synthetic oligonucleotide
  Sense strand starting at position 250 of SEQ ID NO: 316656
ugucuaugugucgugaugu

SEQ ID NO: 430092 - RNA, 19 nt, Artificial Sequence
  Description of Artificial Sequence: Synthetic oligonucleotide
  Antisense Strand to SEQ ID NO: 430091
acaucacgacacauagaca

SEQ ID NO: 430093 - RNA, 19 nt, Artificial Sequence
  Description of Artificial Sequence: Synthetic oligonucleotide
  Sense strand starting at position 261 of SEQ ID NO: 316656
cgugauguuucauuuggua

SEQ ID NO: 430094 - RNA, 19 nt, Artificial Sequence
  Description of Artificial Sequence: Synthetic oligonucleotide
  Antisense Strand to SEQ ID NO: 430093
uaccaaaugaaacaucacg

SEQ ID NO: 430095 - RNA, 19 nt, Artificial Sequence
  Description of Artificial Sequence: Synthetic oligonucleotide
  Sense strand starting at position 504 of SEQ ID NO: 316656
aagaaucuuucggucaaug

SEQ ID NO: 430096 - RNA, 19 nt, Artificial Sequence
  Description of Artificial Sequence: Synthetic oligonucleotide
  Antisense Strand to SEQ ID NO: 430095
cauugaccgaaagauucuu

SEQ ID NO: 430097 - RNA, 19 nt, Artificial Sequence
  Description of Artificial Sequence: Synthetic oligonucleotide
  Sense strand starting at position 509 of SEQ ID NO: 316656
ucuuucggucaauguauuu

SEQ ID NO: 430098 - RNA, 19 nt, Artificial Sequence
  Description of Artificial Sequence: Synthetic oligonucleotide
  Antisense Strand to SEQ ID NO: 430097
aaauacauugaccgaaaga

SEQ ID NO: 430099 - RNA, 19 nt, Artificial Sequence
  Description of Artificial Sequence: Synthetic oligonucleotide
  Sense strand starting at position 514 of SEQ ID NO: 316656
cggucaauguauuugacga

SEQ ID NO: 430100 - RNA, 19 nt, Artificial Sequence
  Description of Artificial Sequence: Synthetic oligonucleotide
  Antisense Strand to SEQ ID NO: 430099
ucgucaaauacauugaccg

SEQ ID NO: 430101 - RNA, 19 nt, Artificial Sequence
  Description of Artificial Sequence: Synthetic oligonucleotide
  Sense strand starting at position 1012 of SEQ ID NO: 316656
ugcagaaguauugaguaag

SEQ ID NO: 430102 - RNA, 19 nt, Artificial Sequence
  Description of Artificial Sequence: Synthetic oligonucleotide
  Antisense Strand to SEQ ID NO: 430101
cuuacucaauacuucugca

SEQ ID NO: 430103 - RNA, 19 nt, Artificial Sequence
  Description of Artificial Sequence: Synthetic oligonucleotide
  Sense strand starting at position 1015 of SEQ ID NO: 316656
agaaguauugaguaagcuu

SEQ ID NO: 430104 - RNA, 19 nt, Artificial Sequence
  Description of Artificial Sequence: Synthetic oligonucleotide
  Antisense Strand to SEQ ID NO: 430103
aagcuuacucaauacuucu

SEQ ID NO: 430105 - RNA, 19 nt, Artificial Sequence
  Description of Artificial Sequence: Synthetic oligonucleotide
  Sense strand starting at position 1099 of SEQ ID NO: 316656
cuuaauggucuugaaccau

SEQ ID NO: 430106 - RNA, 19 nt, Artificial Sequence
  Description of Artificial Sequence: Synthetic oligonucleotide
  Antisense Strand to SEQ ID NO: 430105
augguucaagaccauuaag

SEQ ID NO: 430107 - RNA, 19 nt, Artificial Sequence
  Description of Artificial Sequence: Synthetic oligonucleotide
  Sense strand starting at position 1184 of SEQ ID NO: 316656
ggaguaaauguuggaguua

SEQ ID NO: 430108 - RNA, 19 nt, Artificial Sequence
  Description of Artificial Sequence: Synthetic oligonucleotide
  Antisense Strand to SEQ ID NO: 430107
uaacuccaacauuuacucc

SEQ ID NO: 430109 - RNA, 19 nt, Artificial Sequence
  Description of Artificial Sequence: Synthetic oligonucleotide
  Sense strand starting at position 1548 of SEQ ID NO: 316656
augcaaguacauugaaaua

SEQ ID NO: 430110 - RNA, 19 nt, Artificial Sequence
  Description of Artificial Sequence: Synthetic oligonucleotide
  Antisense Strand to SEQ ID NO: 430109
uauuucaauguacuugcau

SEQ ID NO: 430111 - RNA, 19 nt, Artificial Sequence
  Description of Artificial Sequence: Synthetic oligonucleotide
  Sense strand starting at position 1829 of SEQ ID NO: 316656
guuacucuuccauguauuu

SEQ ID NO: 430112 - RNA, 19 nt, Artificial Sequence
  Description of Artificial Sequence: Synthetic oligonucleotide
  Antisense Strand to SEQ ID NO: 430111
aaauacauggaagaguaac

SEQ ID NO: 430113 - RNA, 19 nt, Artificial Sequence
  Description of Artificial Sequence: Synthetic oligonucleotide
  Sense strand starting at position 1893 of SEQ ID NO: 316656
cuugaaacauggucaauua

SEQ ID NO: 430114 - RNA, 19 nt, Artificial Sequence
  Description of Artificial Sequence: Synthetic oligonucleotide
  Antisense Strand to SEQ ID NO: 430113
uaauugaccauguuucaag

SEQ ID NO: 430115 - RNA, 19 nt, Artificial Sequence
  Description of Artificial Sequence: Synthetic oligonucleotide
  Sense strand starting at position 2032 of SEQ ID NO: 316656
aacucaguuccaggagauu

SEQ ID NO: 430116 - RNA, 19 nt, Artificial Sequence
  Description of Artificial Sequence: Synthetic oligonucleotide
  Antisense Strand to SEQ ID NO: 430115
aaucuccuggaacugaguu

SEQ ID NO: 430117 - RNA, 19 nt, Artificial Sequence
  Description of Artificial Sequence: Synthetic oligonucleotide
  Sense strand starting at position 2059 of SEQ ID NO: 316656
agagaccaaucaggauuua

SEQ ID NO: 430118 - RNA, 19 nt, Artificial Sequence
  Description of Artificial Sequence: Synthetic oligonucleotide
  Antisense Strand to SEQ ID NO: 430117
uaaauccugauuggucucu

SEQ ID NO: 430119 - RNA, 19 nt, Artificial Sequence
  Description of Artificial Sequence: Synthetic oligonucleotide
  Sense strand starting at position 2068 of SEQ ID NO: 316656
ucaggauuuagcugucugu

SEQ ID NO: 430120 - RNA, 19 nt, Artificial Sequence
  Description of Artificial Sequence: Synthetic oligonucleotide
  Antisense Strand to SEQ ID NO: 430119
acagacagcuaaauccuga

SEQ ID NO: 430121 - RNA, 19 nt, Artificial Sequence
  Description of Artificial Sequence: Synthetic oligonucleotide
  Sense strand starting at position 2071 of SEQ ID NO: 316656
ggauuuagcugucuguuaa

SEQ ID NO: 430122 - RNA, 19 nt, Artificial Sequence
  Description of Artificial Sequence: Synthetic oligonucleotide
  Antisense Strand to SEQ ID NO: 430121
uuaacagacagcuaaaucc

SEQ ID NO: 430123 - RNA, 19 nt, Artificial Sequence
  Description of Artificial Sequence: Synthetic oligonucleotide
  Sense strand starting at position 2072 of SEQ ID NO: 316656
gauuuagcugucuguuaaa

SEQ ID NO: 430124 - RNA, 19 nt, Artificial Sequence
  Description of Artificial Sequence: Synthetic oligonucleotide
  Antisense Strand to SEQ ID NO: 430123
uuuaacagacagcuaaauc

SEQ ID NO: 430125 - RNA, 19 nt, Artificial Sequence
  Description of Artificial Sequence: Synthetic oligonucleotide
  Sense strand starting at position 2133 of SEQ ID NO: 316656
uuauuagcugcagacauua

SEQ ID NO: 430126 - RNA, 19 nt, Artificial Sequence
  Description of Artificial Sequence: Synthetic oligonucleotide
  Antisense Strand to SEQ ID NO: 430125
uaaugucugcagcuaauaa

SEQ ID NO: 430127 - RNA, 19 nt, Artificial Sequence
  Description of Artificial Sequence: Synthetic oligonucleotide
  Sense strand starting at position 2274 of SEQ ID NO: 316656
ugauuucucagauguacgu

SEQ ID NO: 430128 - RNA, 19 nt, Artificial Sequence
  Description of Artificial Sequence: Synthetic oligonucleotide
  Antisense Strand to SEQ ID NO: 430127
acguacaucugagaaauca

SEQ ID NO: 430129 - RNA, 19 nt, Artificial Sequence
  Description of Artificial Sequence: Synthetic oligonucleotide
  Sense strand starting at position 2333 of SEQ ID NO: 316656
aauauagggcucuguacaa

SEQ ID NO: 430130 - RNA, 19 nt, Artificial Sequence
  Description of Artificial Sequence: Synthetic oligonucleotide
  Antisense Strand to SEQ ID NO: 430129
uuguacagagcccuauauu

SEQ ID NO: 430131 - RNA, 19 nt, Artificial Sequence
  Description of Artificial Sequence: Synthetic oligonucleotide
  Sense strand starting at position 2364 of SEQ ID NO: 316656
gaagucuacuauguagauu

SEQ ID NO: 430132 - RNA, 19 nt, Artificial Sequence
  Description of Artificial Sequence: Synthetic oligonucleotide
  Antisense Strand to SEQ ID NO: 430131
aaucuacauaguagacuuc

SEQ ID NO: 430133 - RNA, 19 nt, Artificial Sequence
  Description of Artificial Sequence: Synthetic oligonucleotide
  Sense strand starting at position 2387 of SEQ ID NO: 316656
uggaacuuauguuuacuua

SEQ ID NO: 430134 - RNA, 19 nt, Artificial Sequence
  Description of Artificial Sequence: Synthetic oligonucleotide
  Antisense Strand to SEQ ID NO: 430133
uaaguaaacauaaguucca

SEQ ID NO: 430135 - RNA, 19 nt, Artificial Sequence
  Description of Artificial Sequence: Synthetic oligonucleotide
  Sense strand starting at position 2463 of SEQ ID NO: 316656
ggguacacaucauuauauc

SEQ ID NO: 430136 - RNA, 19 nt, Artificial Sequence
  Description of Artificial Sequence: Synthetic oligonucleotide
  Antisense Strand to SEQ ID NO: 430135
gauauaaugauguguaccc

SEQ ID NO: 430137 - RNA, 19 nt, Artificial Sequence
  Description of Artificial Sequence: Synthetic oligonucleotide
  Sense strand starting at position 2615 of SEQ ID NO: 316656
aucagaggauauguacauu

SEQ ID NO: 430138 - RNA, 19 nt, Artificial Sequence
  Description of Artificial Sequence: Synthetic oligonucleotide
  Antisense Strand to SEQ ID NO: 430137
aauguacauauccucugau

SEQ ID NO: 430139 - RNA, 19 nt, Artificial Sequence
  Description of Artificial Sequence: Synthetic oligonucleotide
  Sense strand starting at position 2667 of SEQ ID NO: 316656
uaauguaucagaggguaug

SEQ ID NO: 430140 - RNA, 19 nt, Artificial Sequence
  Description of Artificial Sequence: Synthetic oligonucleotide
  Antisense Strand to SEQ ID NO: 430139
cauacccucugauacauua

SEQ ID NO: 430141 - RNA, 19 nt, Artificial Sequence
  Description of Artificial Sequence: Synthetic oligonucleotide
  Sense strand starting at position 2822 of SEQ ID NO: 316656
ggaaucaacugagauuucu

SEQ ID NO: 430142 - RNA, 19 nt, Artificial Sequence
  Description of Artificial Sequence: Synthetic oligonucleotide
  Antisense Strand to SEQ ID NO: 430141
agaaaucucaguugauucc

SEQ ID NO: 430143 - RNA, 19 nt, Artificial Sequence
  Description of Artificial Sequence: Synthetic oligonucleotide
  Sense strand starting at position 3132 of SEQ ID NO: 316656
cucugauacucuguuagga

SEQ ID NO: 430144 - RNA, 19 nt, Artificial Sequence
  Description of Artificial Sequence: Synthetic oligonucleotide
  Antisense Strand to SEQ ID NO: 430143
uccuaacagaguaucagag

SEQ ID NO: 430145 - RNA, 19 nt, Artificial Sequence
  Description of Artificial Sequence: Synthetic oligonucleotide
  Sense strand starting at position 3277 of SEQ ID NO: 316656
aggagaucauccuugaguu

SEQ ID NO: 430146 - RNA, 19 nt, Artificial Sequence
  Description of Artificial Sequence: Synthetic oligonucleotide
  Antisense Strand to SEQ ID NO: 430145
aacucaaggaugaucuccu

SEQ ID NO: 430147 - RNA, 19 nt, Artificial Sequence
  Description of Artificial Sequence: Synthetic oligonucleotide
  Sense strand starting at position 3278 of SEQ ID NO: 316656
ggagaucauccuugaguuu

SEQ ID NO: 430148 - RNA, 19 nt, Artificial Sequence
  Description of Artificial Sequence: Synthetic oligonucleotide
  Antisense Strand to SEQ ID NO: 430147
aaacucaaggaugaucucc

SEQ ID NO: 430149 - RNA, 19 nt, Artificial Sequence
  Description of Artificial Sequence: Synthetic oligonucleotide
  Sense strand starting at position 3281 of SEQ ID NO: 316656
gaucauccuugaguuugga

SEQ ID NO: 430150 - RNA, 19 nt, Artificial Sequence
  Description of Artificial Sequence: Synthetic oligonucleotide
  Antisense Strand to SEQ ID NO: 430149
uccaaacucaaggaugauc

SEQ ID NO: 430151 - RNA, 19 nt, Artificial Sequence
  Description of Artificial Sequence: Synthetic oligonucleotide
  Sense strand starting at position 3291 of SEQ ID NO: 316656
gaguuuggauuugaagaau

SEQ ID NO: 430152 - RNA, 19 nt, Artificial Sequence
  Description of Artificial Sequence: Synthetic oligonucleotide
  Antisense Strand to SEQ ID NO: 430151
auucuucaaauccaaacuc

SEQ ID NO: 430153 - RNA, 19 nt, Artificial Sequence
  Description of Artificial Sequence: Synthetic oligonucleotide
  Sense strand starting at position 3411 of SEQ ID NO: 316656
ugaggauagcaguggaaga

SEQ ID NO: 430154 - RNA, 19 nt, Artificial Sequence
  Description of Artificial Sequence: Synthetic oligonucleotide
  Antisense Strand to SEQ ID NO: 430153
ucuuccacugcuauccuca

SEQ ID NO: 430155 - RNA, 19 nt, Artificial Sequence
  Description of Artificial Sequence: Synthetic oligonucleotide
  Sense strand starting at position 3430 of SEQ ID NO: 316656
caggguuggagaugauauc

SEQ ID NO: 430156 - RNA, 19 nt, Artificial Sequence
  Description of Artificial Sequence: Synthetic oligonucleotide
  Antisense Strand to SEQ ID NO: 430155
gauaucaucuccaacccug

SEQ ID NO: 430157 - RNA, 19 nt, Artificial Sequence
  Description of Artificial Sequence: Synthetic oligonucleotide
  Sense strand starting at position 3497 of SEQ ID NO: 316656
uuggcacuuggucagauau

SEQ ID NO: 430158 - RNA, 19 nt, Artificial Sequence
  Description of Artificial Sequence: Synthetic oligonucleotide
  Antisense Strand to SEQ ID NO: 430157
auaucugaccaagugccaa

SEQ ID NO: 430159 - RNA, 19 nt, Artificial Sequence
  Description of Artificial Sequence: Synthetic oligonucleotide
  Sense strand starting at position 3632 of SEQ ID NO: 316656
aucauauggucaucgaaug

SEQ ID NO: 430160 - RNA, 19 nt, Artificial Sequence
  Description of Artificial Sequence: Synthetic oligonucleotide
  Antisense Strand to SEQ ID NO: 430159
cauucgaugaccauaugau

SEQ ID NO: 430161 - RNA, 19 nt, Artificial Sequence
  Description of Artificial Sequence: Synthetic oligonucleotide
  Sense strand starting at position 3644 of SEQ ID NO: 316656
ucgaauguugacgaauaaa

SEQ ID NO: 430162 - RNA, 19 nt, Artificial Sequence
  Description of Artificial Sequence: Synthetic oligonucleotide
  Antisense Strand to SEQ ID NO: 430161
uuuauucgucaacauucga

SEQ ID NO: 430163 - RNA, 19 nt, Artificial Sequence
  Description of Artificial Sequence: Synthetic oligonucleotide
  Sense strand starting at position 3693 of SEQ ID NO: 316656
gcaagauugaguugaggga

SEQ ID NO: 430164 - RNA, 19 nt, Artificial Sequence
  Description of Artificial Sequence: Synthetic oligonucleotide
  Antisense Strand to SEQ ID NO: 430163
ucccucaacucaaucuugc

SEQ ID NO: 430165 - RNA, 19 nt, Artificial Sequence
  Description of Artificial Sequence: Synthetic oligonucleotide
  Sense strand starting at position 3770 of SEQ ID NO: 316656
gacagacuagcauguuaaa

SEQ ID NO: 430166 - RNA, 19 nt, Artificial Sequence
  Description of Artificial Sequence: Synthetic oligonucleotide
  Antisense Strand to SEQ ID NO: 430165
uuuaacaugcuagucuguc

SEQ ID NO: 430167 - RNA, 19 nt, Artificial Sequence
  Description of Artificial Sequence: Synthetic oligonucleotide
  Sense strand starting at position 235 of SEQ ID NO: 316657
agcagugagcuauaguagu

SEQ ID NO: 430168 - RNA, 19 nt, Artificial Sequence
  Description of Artificial Sequence: Synthetic oligonucleotide
  Antisense Strand to SEQ ID NO: 430167
acuacuauagcucacugcu

SEQ ID NO: 430169 - RNA, 19 nt, Artificial Sequence
  Description of Artificial Sequence: Synthetic oligonucleotide
  Sense strand starting at position 390 of SEQ ID NO: 316657
ucuauaauucugugccuga

SEQ ID NO: 430170 - RNA, 19 nt, Artificial Sequence
  Description of Artificial Sequence: Synthetic oligonucleotide
  Antisense Strand to SEQ ID NO: 430169
ucaggcacagaauuauaga

SEQ ID NO: 430171 - RNA, 19 nt, Artificial Sequence
  Description of Artificial Sequence: Synthetic oligonucleotide
  Sense strand starting at position 391 of SEQ ID NO: 316657
cuauaauucugugccugaa

SEQ ID NO: 430172 - RNA, 19 nt, Artificial Sequence
  Description of Artificial Sequence: Synthetic oligonucleotide
  Antisense Strand to SEQ ID NO: 430171
uucaggcacagaauuauag

SEQ ID NO: 430173 - RNA, 19 nt, Artificial Sequence
  Description of Artificial Sequence: Synthetic oligonucleotide
  Sense strand starting at position 788 of SEQ ID NO: 316657
ucgagaccagccuggaaua

SEQ ID NO: 430174 - RNA, 19 nt, Artificial Sequence
  Description of Artificial Sequence: Synthetic oligonucleotide
  Antisense Strand to SEQ ID NO: 430173
uauuccaggcuggucucga

SEQ ID NO: 430175 - RNA, 19 nt, Artificial Sequence
  Description of Artificial Sequence: Synthetic oligonucleotide
  Sense strand starting at position 1169 of SEQ ID NO: 316657
ucaauacuggaucgugaac

SEQ ID NO: 430176 - RNA, 19 nt, Artificial Sequence
  Description of Artificial Sequence: Synthetic oligonucleotide
  Antisense Strand to SEQ ID NO: 430175
guucacgauccaguauuga

SEQ ID NO: 430177 - RNA, 19 nt, Artificial Sequence
  Description of Artificial Sequence: Synthetic oligonucleotide
  Sense strand starting at position 1178 of SEQ ID NO: 316657
gaucgugaacaauauguaa

SEQ ID NO: 430178 - RNA, 19 nt, Artificial Sequence
  Description of Artificial Sequence: Synthetic oligonucleotide
  Antisense Strand to SEQ ID NO: 430177
uuacauauuguucacgauc

SEQ ID NO: 430179 - RNA, 19 nt, Artificial Sequence
  Description of Artificial Sequence: Synthetic oligonucleotide
  Sense strand starting at position 1221 of SEQ ID NO: 316657
gcuacugaacauuguuaua

SEQ ID NO: 430180 - RNA, 19 nt, Artificial Sequence
  Description of Artificial Sequence: Synthetic oligonucleotide
  Antisense Strand to SEQ ID NO: 430179
uauaacaauguucaguagc

SEQ ID NO: 430181 - RNA, 19 nt, Artificial Sequence
  Description of Artificial Sequence: Synthetic oligonucleotide
  Sense strand starting at position 1300 of SEQ ID NO: 316657
auccgaaguuguucuuuaa

SEQ ID NO: 430182 - RNA, 19 nt, Artificial Sequence
  Description of Artificial Sequence: Synthetic oligonucleotide
  Antisense Strand to SEQ ID NO: 430181
uuaaagaacaacuucggau

SEQ ID NO: 430183 - RNA, 19 nt, Artificial Sequence
  Description of Artificial Sequence: Synthetic oligonucleotide
  Sense strand starting at position 1311 of SEQ ID NO: 316657
uucuuuaaucggcacacaa

SEQ ID NO: 430184 - RNA, 19 nt, Artificial Sequence
  Description of Artificial Sequence: Synthetic oligonucleotide
  Antisense Strand to SEQ ID NO: 430183
uugugugccgauuaaagaa

SEQ ID NO: 430185 - RNA, 19 nt, Artificial Sequence
  Description of Artificial Sequence: Synthetic oligonucleotide
  Sense strand starting at position 1391 of SEQ ID NO: 316657
ggcuuaaacgcucaauaag

SEQ ID NO: 430186 - RNA, 19 nt, Artificial Sequence
  Description of Artificial Sequence: Synthetic oligonucleotide
  Antisense Strand to SEQ ID NO: 430185
cuuauugagcguuuaagcc

SEQ ID NO: 430187 - RNA, 19 nt, Artificial Sequence
  Description of Artificial Sequence: Synthetic oligonucleotide
  Sense strand starting at position 1394 of SEQ ID NO: 316657
uuaaacgcucaauaaguaa

SEQ ID NO: 430188 - RNA, 19 nt, Artificial Sequence
  Description of Artificial Sequence: Synthetic oligonucleotide
  Antisense Strand to SEQ ID NO: 430187
uuacuuauugagcguuuaa

SEQ ID NO: 430189 - RNA, 19 nt, Artificial Sequence
  Description of Artificial Sequence: Synthetic oligonucleotide
  Sense strand starting at position 1443 of SEQ ID NO: 316657
ucaguuaugaacuaguugu

SEQ ID NO: 430190 - RNA, 19 nt, Artificial Sequence
  Description of Artificial Sequence: Synthetic oligonucleotide
  Antisense Strand to SEQ ID NO: 430189
acaacuaguucauaacuga

SEQ ID NO: 430191 - RNA, 19 nt, Artificial Sequence
  Description of Artificial Sequence: Synthetic oligonucleotide
  Sense strand starting at position 1468 of SEQ ID NO: 316657
ccugcaaguuaggugagau

SEQ ID NO: 430192 - RNA, 19 nt, Artificial Sequence
  Description of Artificial Sequence: Synthetic oligonucleotide
  Antisense Strand to SEQ ID NO: 430191
aucucaccuaacuugcagg

SEQ ID NO: 430193 - RNA, 19 nt, Artificial Sequence
  Description of Artificial Sequence: Synthetic oligonucleotide
  Sense strand starting at position 1469 of SEQ ID NO: 316657
cugcaaguuaggugagauc

SEQ ID NO: 430194 - RNA, 19 nt, Artificial Sequence
  Description of Artificial Sequence: Synthetic oligonucleotide
  Antisense Strand to SEQ ID NO: 430193
gaucucaccuaacuugcag

SEQ ID NO: 430195 - RNA, 19 nt, Artificial Sequence
  Description of Artificial Sequence: Synthetic oligonucleotide
  Sense strand starting at position 1484 of SEQ ID NO: 316657
gaucuagggcgagacuauu

SEQ ID NO: 430196 - RNA, 19 nt, Artificial Sequence
  Description of Artificial Sequence: Synthetic oligonucleotide
  Antisense Strand to SEQ ID NO: 430195
aauagucucgcccuagauc

SEQ ID NO: 430197 - RNA, 19 nt, Artificial Sequence
  Description of Artificial Sequence: Synthetic oligonucleotide
  Sense strand starting at position 1565 of SEQ ID NO: 316657
ccaucuuuagggcagaauu

SEQ ID NO: 430198 - RNA, 19 nt, Artificial Sequence
  Description of Artificial Sequence: Synthetic oligonucleotide
  Antisense Strand to SEQ ID NO: 430197
aauucugcccuaaagaugg

SEQ ID NO: 430199 - RNA, 19 nt, Artificial Sequence
  Description of Artificial Sequence: Synthetic oligonucleotide
  Sense strand starting at position 2205 of SEQ ID NO: 316657
gugaauagcccggagaggu

SEQ ID NO: 430200 - RNA, 19 nt, Artificial Sequence
  Description of Artificial Sequence: Synthetic oligonucleotide
  Antisense Strand to SEQ ID NO: 430199
accucuccgggcuauucac

SEQ ID NO: 430201 - RNA, 19 nt, Artificial Sequence
  Description of Artificial Sequence: Synthetic oligonucleotide
  Sense strand starting at position 2261 of SEQ ID NO: 316657
guagggacguucuccgaga

SEQ ID NO: 430202 - RNA, 19 nt, Artificial Sequence
  Description of Artificial Sequence: Synthetic oligonucleotide
  Antisense Strand to SEQ ID NO: 430201
ucucggagaacgucccuac

SEQ ID NO: 430203 - RNA, 19 nt, Artificial Sequence
  Description of Artificial Sequence: Synthetic oligonucleotide
  Sense strand starting at position 2265 of SEQ ID NO: 316657
ggacguucuccgagagccu

SEQ ID NO: 430204 - RNA, 19 nt, Artificial Sequence
  Description of Artificial Sequence: Synthetic oligonucleotide
  Antisense Strand to SEQ ID NO: 430203
aggcucucggagaacgucc

SEQ ID NO: 430205 - RNA, 19 nt, Artificial Sequence
  Description of Artificial Sequence: Synthetic oligonucleotide
  Sense strand starting at position 2610 of SEQ ID NO: 316657
ugcauauuugguuguggga

SEQ ID NO: 430206 - RNA, 19 nt, Artificial Sequence
  Description of Artificial Sequence: Synthetic oligonucleotide
  Antisense Strand to SEQ ID NO: 430205
ucccacaaccaaauaugca

SEQ ID NO: 430207 - RNA, 19 nt, Artificial Sequence
  Description of Artificial Sequence: Synthetic oligonucleotide
  Sense strand starting at position 2705 of SEQ ID NO: 316657
acucccaggcuuuauagaa

SEQ ID NO: 430208 - RNA, 19 nt, Artificial Sequence
  Description of Artificial Sequence: Synthetic oligonucleotide
  Antisense Strand to SEQ ID NO: 430207
uucuauaaagccugggagu

SEQ ID NO: 430209 - RNA, 19 nt, Artificial Sequence
  Description of Artificial Sequence: Synthetic oligonucleotide
  Sense strand starting at position 2720 of SEQ ID NO: 316657
agaaaugaugcccacaugu

SEQ ID NO: 430210 - RNA, 19 nt, Artificial Sequence
  Description of Artificial Sequence: Synthetic oligonucleotide
  Antisense Strand to SEQ ID NO: 430209
acaugugggcaucauuucu

SEQ ID NO: 430211 - RNA, 19 nt, Artificial Sequence
  Description of Artificial Sequence: Synthetic oligonucleotide
  Sense strand starting at position 2793 of SEQ ID NO: 316657
guaguuucccaguagaaau

SEQ ID NO: 430212 - RNA, 19 nt, Artificial Sequence
  Description of Artificial Sequence: Synthetic oligonucleotide
  Antisense Strand to SEQ ID NO: 430211
auuucuacugggaaacuac

SEQ ID NO: 430213 - RNA, 19 nt, Artificial Sequence
  Description of Artificial Sequence: Synthetic oligonucleotide
  Sense strand starting at position 2893 of SEQ ID NO: 316657
cauugagaucaagguugau

SEQ ID NO: 430214 - RNA, 19 nt, Artificial Sequence
  Description of Artificial Sequence: Synthetic oligonucleotide
  Antisense Strand to SEQ ID NO: 430213
aucaaccuugaucucaaug

SEQ ID NO: 430215 - RNA, 19 nt, Artificial Sequence
  Description of Artificial Sequence: Synthetic oligonucleotide
  Sense strand starting at position 2902 of SEQ ID NO: 316657
caagguugaugucuuuacu

SEQ ID NO: 430216 - RNA, 19 nt, Artificial Sequence
  Description of Artificial Sequence: Synthetic oligonucleotide
  Antisense Strand to SEQ ID NO: 430215
aguaaagacaucaaccuug

SEQ ID NO: 430217 - RNA, 19 nt, Artificial Sequence
  Description of Artificial Sequence: Synthetic oligonucleotide
  Sense strand starting at position 2908 of SEQ ID NO: 316657
ugaugucuuuacucagaau

SEQ ID NO: 430218 - RNA, 19 nt, Artificial Sequence
  Description of Artificial Sequence: Synthetic oligonucleotide
  Antisense Strand to SEQ ID NO: 430217
auucugaguaaagacauca

SEQ ID NO: 430219 - RNA, 19 nt, Artificial Sequence
  Description of Artificial Sequence: Synthetic oligonucleotide
  Sense strand starting at position 2943 of SEQ ID NO: 316657
cagggcuucguacauugua

SEQ ID NO: 430220 - RNA, 19 nt, Artificial Sequence
  Description of Artificial Sequence: Synthetic oligonucleotide
  Antisense Strand to SEQ ID NO: 430219
uacaauguacgaagcccug

SEQ ID NO: 430221 - RNA, 19 nt, Artificial Sequence
  Description of Artificial Sequence: Synthetic oligonucleotide
  Sense strand starting at position 2951 of SEQ ID NO: 316657
cguacauuguaggcauuua

SEQ ID NO: 430222 - RNA, 19 nt, Artificial Sequence
  Description of Artificial Sequence: Synthetic oligonucleotide
  Antisense Strand to SEQ ID NO: 430221
uaaaugccuacaauguacg

SEQ ID NO: 430223 - RNA, 19 nt, Artificial Sequence
  Description of Artificial Sequence: Synthetic oligonucleotide
  Sense strand starting at position 2962 of SEQ ID NO: 316657
ggcauuuaauacguauugu

SEQ ID NO: 430224 - RNA, 19 nt, Artificial Sequence
  Description of Artificial Sequence: Synthetic oligonucleotide
  Antisense Strand to SEQ ID NO: 430223
acaauacguauuaaaugcc

SEQ ID NO: 430225 - RNA, 19 nt, Artificial Sequence
  Description of Artificial Sequence: Synthetic oligonucleotide
  Sense strand starting at position 2973 of SEQ ID NO: 316657
cguauugugaaugaaugac

SEQ ID NO: 430226 - RNA, 19 nt, Artificial Sequence
  Description of Artificial Sequence: Synthetic oligonucleotide
  Antisense Strand to SEQ ID NO: 430225
gucauucauucacaauacg

SEQ ID NO: 430227 - RNA, 19 nt, Artificial Sequence
  Description of Artificial Sequence: Synthetic oligonucleotide
  Sense strand starting at position 3208 of SEQ ID NO: 316657
acacuaauacuuuguuagu

SEQ ID NO: 430228 - RNA, 19 nt, Artificial Sequence
  Description of Artificial Sequence: Synthetic oligonucleotide
  Antisense Strand to SEQ ID NO: 430227
acuaacaaaguauuagugu

SEQ ID NO: 430229 - RNA, 19 nt, Artificial Sequence
  Description of Artificial Sequence: Synthetic oligonucleotide
  Sense strand starting at position 3210 of SEQ ID NO: 316657
acuaauacuuuguuagugu

SEQ ID NO: 430230 - RNA, 19 nt, Artificial Sequence
  Description of Artificial Sequence: Synthetic oligonucleotide
  Antisense Strand to SEQ ID NO: 430229
acacuaacaaaguauuagu

SEQ ID NO: 430231 - RNA, 19 nt, Artificial Sequence
  Description of Artificial Sequence: Synthetic oligonucleotide
  Sense strand starting at position 3486 of SEQ ID NO: 316657
cuacaauaagcauggguua

SEQ ID NO: 430232 - RNA, 19 nt, Artificial Sequence
  Description of Artificial Sequence: Synthetic oligonucleotide
  Antisense Strand to SEQ ID NO: 430231
uaacccaugcuuauuguag

SEQ ID NO: 430233 - RNA, 19 nt, Artificial Sequence
  Description of Artificial Sequence: Synthetic oligonucleotide
  Sense strand starting at position 3488 of SEQ ID NO: 316657
acaauaagcauggguuaga

SEQ ID NO: 430234 - RNA, 19 nt, Artificial Sequence
  Description of Artificial Sequence: Synthetic oligonucleotide
  Antisense Strand to SEQ ID NO: 430233
ucuaacccaugcuuauugu

SEQ ID NO: 430235 - RNA, 19 nt, Artificial Sequence
  Description of Artificial Sequence: Synthetic oligonucleotide
  Sense strand starting at position 3538 of SEQ ID NO: 316657
aacagcagucuuugaaaug

SEQ ID NO: 430236 - RNA, 19 nt, Artificial Sequence
  Description of Artificial Sequence: Synthetic oligonucleotide
  Antisense Strand to SEQ ID NO: 430235
cauuucaaagacugcuguu

SEQ ID NO: 430237 - RNA, 19 nt, Artificial Sequence
  Description of Artificial Sequence: Synthetic oligonucleotide
  Sense strand starting at position 3559 of SEQ ID NO: 316657
uuuacacagcguuacaauu

SEQ ID NO: 430238 - RNA, 19 nt, Artificial Sequence
  Description of Artificial Sequence: Synthetic oligonucleotide
  Antisense Strand to SEQ ID NO: 430237
aauuguaacgcuguguaaa

SEQ ID NO: 430239 - RNA, 19 nt, Artificial Sequence
  Description of Artificial Sequence: Synthetic oligonucleotide
  Sense strand starting at position 3590 of SEQ ID NO: 316657
gacuguaaaugcuucuaag

SEQ ID NO: 430240 - RNA, 19 nt, Artificial Sequence
  Description of Artificial Sequence: Synthetic oligonucleotide
  Antisense Strand to SEQ ID NO: 430239
cuuagaagcauuuacaguc

SEQ ID NO: 430241 - RNA, 19 nt, Artificial Sequence
  Description of Artificial Sequence: Synthetic oligonucleotide
  Sense strand starting at position 3628 of SEQ ID NO: 316657
uccucucagcuguaagaau

SEQ ID NO: 430242 - RNA, 19 nt, Artificial Sequence
  Description of Artificial Sequence: Synthetic oligonucleotide
  Antisense Strand to SEQ ID NO: 430241
auucuuacagcugagagga

SEQ ID NO: 430243 - RNA, 19 nt, Artificial Sequence
  Description of Artificial Sequence: Synthetic oligonucleotide
  Sense strand starting at position 3699 of SEQ ID NO: 316657
ucugaaauauccgcaaauc

SEQ ID NO: 430244 - RNA, 19 nt, Artificial Sequence
  Description of Artificial Sequence: Synthetic oligonucleotide
  Antisense Strand to SEQ ID NO: 430243
gauuugcggauauuucaga

SEQ ID NO: 430245 - RNA, 19 nt, Artificial Sequence
  Description of Artificial Sequence: Synthetic oligonucleotide
  Sense strand starting at position 3732 of SEQ ID NO: 316657
ggagccuguuaacuauaau

SEQ ID NO: 430246 - RNA, 19 nt, Artificial Sequence
  Description of Artificial Sequence: Synthetic oligonucleotide
  Antisense Strand to SEQ ID NO: 430245
auuauaguuaacaggcucc

SEQ ID NO: 430247 - RNA, 19 nt, Artificial Sequence
  Description of Artificial Sequence: Synthetic oligonucleotide
  Sense strand starting at position 69 of SEQ ID NO: 316658
cuauaauucugugccugaa

SEQ ID NO: 430248 - RNA, 19 nt, Artificial Sequence
  Description of Artificial Sequence: Synthetic oligonucleotide
  Antisense Strand to SEQ ID NO: 430247
uucaggcacagaauuauag

SEQ ID NO: 430249 - RNA, 19 nt, Artificial Sequence
  Description of Artificial Sequence: Synthetic oligonucleotide
  Sense strand starting at position 466 of SEQ ID NO: 316658
ucgagaccagccuggaaua

SEQ ID NO: 430250 - RNA, 19 nt, Artificial Sequence
  Description of Artificial Sequence: Synthetic oligonucleotide
  Antisense Strand to SEQ ID NO: 430249
uauuccaggcuggucucga

SEQ ID NO: 430251 - RNA, 19 nt, Artificial Sequence
  Description of Artificial Sequence: Synthetic oligonucleotide
  Sense strand starting at position 847 of SEQ ID NO: 316658
ucaauacuggaucgugaac

SEQ ID NO: 430252 - RNA, 19 nt, Artificial Sequence
  Description of Artificial Sequence: Synthetic oligonucleotide
  Antisense Strand to SEQ ID NO: 430251
guucacgauccaguauuga

SEQ ID NO: 430253 - RNA, 19 nt, Artificial Sequence
  Description of Artificial Sequence: Synthetic oligonucleotide
  Sense strand starting at position 856 of SEQ ID NO: 316658
gaucgugaacaauauguaa

SEQ ID NO: 430254 - RNA, 19 nt, Artificial Sequence
  Description of Artificial Sequence: Synthetic oligonucleotide
  Antisense Strand to SEQ ID NO: 430253
uuacauauuguucacgauc

SEQ ID NO: 430255 - RNA, 19 nt, Artificial Sequence
  Description of Artificial Sequence: Synthetic oligonucleotide
  Sense strand starting at position 899 of SEQ ID NO: 316658
gcuacugaacauuguuaua

SEQ ID NO: 430256 - RNA, 19 nt, Artificial Sequence
  Description of Artificial Sequence: Synthetic oligonucleotide
  Antisense Strand to SEQ ID NO: 430255
uauaacaauguucaguagc

SEQ ID NO: 430257 - RNA, 19 nt, Artificial Sequence
  Description of Artificial Sequence: Synthetic oligonucleotide
  Sense strand starting at position 978 of SEQ ID NO: 316658
auccgaaguuguucuuuaa

SEQ ID NO: 430258 - RNA, 19 nt, Artificial Sequence
  Description of Artificial Sequence: Synthetic oligonucleotide
  Antisense Strand to SEQ ID NO: 430257
uuaaagaacaacuucggau

SEQ ID NO: 430259 - RNA, 19 nt, Artificial Sequence
  Description of Artificial Sequence: Synthetic oligonucleotide
  Sense strand starting at position 989 of SEQ ID NO: 316658
uucuuuaaucggcacacaa

SEQ ID NO: 430260 - RNA, 19 nt, Artificial Sequence
  Description of Artificial Sequence: Synthetic oligonucleotide
  Antisense Strand to SEQ ID NO: 430259
uugugugccgauuaaagaa

SEQ ID NO: 430261 - RNA, 19 nt, Artificial Sequence
  Description of Artificial Sequence: Synthetic oligonucleotide
  Sense strand starting at position 1069 of SEQ ID NO: 316658
ggcuuaaacgcucaauaag

SEQ ID NO: 430262 - RNA, 19 nt, Artificial Sequence
  Description of Artificial Sequence: Synthetic oligonucleotide
  Antisense Strand to SEQ ID NO: 430261
cuuauugagcguuuaagcc

SEQ ID NO: 430263 - RNA, 19 nt, Artificial Sequence
  Description of Artificial Sequence: Synthetic oligonucleotide
  Sense strand starting at position 1072 of SEQ ID NO: 316658
uuaaacgcucaauaaguaa

SEQ ID NO: 430264 - RNA, 19 nt, Artificial Sequence
  Description of Artificial Sequence: Synthetic oligonucleotide
  Antisense Strand to SEQ ID NO: 430263
uuacuuauugagcguuuaa

SEQ ID NO: 430265 - RNA, 19 nt, Artificial Sequence
  Description of Artificial Sequence: Synthetic oligonucleotide
  Sense strand starting at position 1121 of SEQ ID NO: 316658
ucaguuaugaacuaguugu

SEQ ID NO: 430266 - RNA, 19 nt, Artificial Sequence
  Description of Artificial Sequence: Synthetic oligonucleotide
  Antisense Strand to SEQ ID NO: 430265
acaacuaguucauaacuga

SEQ ID NO: 430267 - RNA, 19 nt, Artificial Sequence
  Description of Artificial Sequence: Synthetic oligonucleotide
  Sense strand starting at position 1146 of SEQ ID NO: 316658
ccugcaaguuaggugagau

SEQ ID NO: 430268 - RNA, 19 nt, Artificial Sequence
  Description of Artificial Sequence: Synthetic oligonucleotide
  Antisense Strand to SEQ ID NO: 430267
aucucaccuaacuugcagg

SEQ ID NO: 430269 - RNA, 19 nt, Artificial Sequence
  Description of Artificial Sequence: Synthetic oligonucleotide
  Sense strand starting at position 1147 of SEQ ID NO: 316658
cugcaaguuaggugagauc

SEQ ID NO: 430270 - RNA, 19 nt, Artificial Sequence
  Description of Artificial Sequence: Synthetic oligonucleotide
  Antisense Strand to SEQ ID NO: 430269
gaucucaccuaacuugcag

SEQ ID NO: 430271 - RNA, 19 nt, Artificial Sequence
  Description of Artificial Sequence: Synthetic oligonucleotide
  Sense strand starting at position 1162 of SEQ ID NO: 316658
gaucuagggcgagacuauu

SEQ ID NO: 430272 - RNA, 19 nt, Artificial Sequence
  Description of Artificial Sequence: Synthetic oligonucleotide
  Antisense Strand to SEQ ID NO: 430271
aauagucucgcccuagauc

SEQ ID NO: 430273 - RNA, 19 nt, Artificial Sequence
  Description of Artificial Sequence: Synthetic oligonucleotide
  Sense strand starting at position 1243 of SEQ ID NO: 316658
ccaucuuuagggcagaauu

SEQ ID NO: 430274 - RNA, 19 nt, Artificial Sequence
  Description of Artificial Sequence: Synthetic oligonucleotide
  Antisense Strand to SEQ ID NO: 430273
aauucugcccuaaagaugg

SEQ ID NO: 430275 - RNA, 19 nt, Artificial Sequence
  Description of Artificial Sequence: Synthetic oligonucleotide
  Sense strand starting at position 1883 of SEQ ID NO: 316658
gugaauagcccggagaggu

SEQ ID NO: 430276 - RNA, 19 nt, Artificial Sequence
  Description of Artificial Sequence: Synthetic oligonucleotide
  Antisense Strand to SEQ ID NO: 430275
accucuccgggcuauucac

SEQ ID NO: 430277 - RNA, 19 nt, Artificial Sequence
  Description of Artificial Sequence: Synthetic oligonucleotide
  Sense strand starting at position 1943 of SEQ ID NO: 316658
ggacguucuccgagagccu

SEQ ID NO: 430278 - RNA, 19 nt, Artificial Sequence
  Description of Artificial Sequence: Synthetic oligonucleotide
  Antisense Strand to SEQ ID NO: 430277
aggcucucggagaacgucc

SEQ ID NO: 430279 - RNA, 19 nt, Artificial Sequence
  Description of Artificial Sequence: Synthetic oligonucleotide
  Sense strand starting at position 2288 of SEQ ID NO: 316658
ugcauauuugguuguggga

SEQ ID NO: 430280 - RNA, 19 nt, Artificial Sequence
  Description of Artificial Sequence: Synthetic oligonucleotide
  Antisense Strand to SEQ ID NO: 430279
ucccacaaccaaauaugca

SEQ ID NO: 430281 - RNA, 19 nt, Artificial Sequence
  Description of Artificial Sequence: Synthetic oligonucleotide
  Sense strand starting at position 2383 of SEQ ID NO: 316658
acucccaggcuuuauagaa

SEQ ID NO: 430282 - RNA, 19 nt, Artificial Sequence
  Description of Artificial Sequence: Synthetic oligonucleotide
  Antisense Strand to SEQ ID NO: 430281
uucuauaaagccugggagu

SEQ ID NO: 430283 - RNA, 19 nt, Artificial Sequence
  Description of Artificial Sequence: Synthetic oligonucleotide
  Sense strand starting at position 2398 of SEQ ID NO: 316658
agaaaugaugcccacaugu

SEQ ID NO: 430284 - RNA, 19 nt, Artificial Sequence
  Description of Artificial Sequence: Synthetic oligonucleotide
  Antisense Strand to SEQ ID NO: 430283
acaugugggcaucauuucu

SEQ ID NO: 430285 - RNA, 19 nt, Artificial Sequence
  Description of Artificial Sequence: Synthetic oligonucleotide
  Sense strand starting at position 2471 of SEQ ID NO: 316658
guaguuucccaguagaaau

SEQ ID NO: 430286 - RNA, 19 nt, Artificial Sequence
  Description of Artificial Sequence: Synthetic oligonucleotide
  Antisense Strand to SEQ ID NO: 430285
auuucuacugggaaacuac

SEQ ID NO: 430287 - RNA, 19 nt, Artificial Sequence
  Description of Artificial Sequence: Synthetic oligonucleotide
  Sense strand starting at position 2571 of SEQ ID NO: 316658
cauugagaucaagguugau

SEQ ID NO: 430288 - RNA, 19 nt, Artificial Sequence
  Description of Artificial Sequence: Synthetic oligonucleotide
  Antisense Strand to SEQ ID NO: 430287
aucaaccuugaucucaaug

SEQ ID NO: 430289 - RNA, 19 nt, Artificial Sequence
  Description of Artificial Sequence: Synthetic oligonucleotide
  Sense strand starting at position 2580 of SEQ ID NO: 316658
caagguugaugucuuuacu

SEQ ID NO: 430290 - RNA, 19 nt, Artificial Sequence
  Description of Artificial Sequence: Synthetic oligonucleotide
  Antisense Strand to SEQ ID NO: 430289
aguaaagacaucaaccuug

SEQ ID NO: 430291 - RNA, 19 nt, Artificial Sequence
  Description of Artificial Sequence: Synthetic oligonucleotide
  Sense strand starting at position 2586 of SEQ ID NO: 316658
ugaugucuuuacucagaau

SEQ ID NO: 430292 - RNA, 19 nt, Artificial Sequence
  Description of Artificial Sequence: Synthetic oligonucleotide
  Antisense Strand to SEQ ID NO: 430291
auucugaguaaagacauca

SEQ ID NO: 430293 - RNA, 19 nt, Artificial Sequence
  Description of Artificial Sequence: Synthetic oligonucleotide
  Sense strand starting at position 2621 of SEQ ID NO: 316658
cagggcuucguacauugua

SEQ ID NO: 430294 - RNA, 19 nt, Artificial Sequence
  Description of Artificial Sequence: Synthetic oligonucleotide
  Antisense Strand to SEQ ID NO: 430293
uacaauguacgaagcccug

SEQ ID NO: 430295 - RNA, 19 nt, Artificial Sequence
  Description of Artificial Sequence: Synthetic oligonucleotide
  Sense strand starting at position 2629 of SEQ ID NO: 316658
cguacauuguaggcauuua

SEQ ID NO: 430296 - RNA, 19 nt, Artificial Sequence
  Description of Artificial Sequence: Synthetic oligonucleotide
  Antisense Strand to SEQ ID NO: 430295
uaaaugccuacaauguacg

SEQ ID NO: 430297 - RNA, 19 nt, Artificial Sequence
  Description of Artificial Sequence: Synthetic oligonucleotide
  Sense strand starting at position 2640 of SEQ ID NO: 316658
ggcauuuaauacguauugu

SEQ ID NO: 430298 - RNA, 19 nt, Artificial Sequence
  Description of Artificial Sequence: Synthetic oligonucleotide
  Antisense Strand to SEQ ID NO: 430297
acaauacguauuaaaugcc

SEQ ID NO: 430299 - RNA, 19 nt, Artificial Sequence
  Description of Artificial Sequence: Synthetic oligonucleotide
  Sense strand starting at position 2651 of SEQ ID NO: 316658
cguauugugaaugaaugac

SEQ ID NO: 430300 - RNA, 19 nt, Artificial Sequence
  Description of Artificial Sequence: Synthetic oligonucleotide
  Antisense Strand to SEQ ID NO: 430299
gucauucauucacaauacg

SEQ ID NO: 430301 - RNA, 19 nt, Artificial Sequence
  Description of Artificial Sequence: Synthetic oligonucleotide
  Sense strand starting at position 2886 of SEQ ID NO: 316658
acacuaauacuuuguuagu

SEQ ID NO: 430302 - RNA, 19 nt, Artificial Sequence
  Description of Artificial Sequence: Synthetic oligonucleotide
  Antisense Strand to SEQ ID NO: 430301
acuaacaaaguauuagugu

SEQ ID NO: 430303 - RNA, 19 nt, Artificial Sequence
  Description of Artificial Sequence: Synthetic oligonucleotide
  Sense strand starting at position 2888 of SEQ ID NO: 316658
acuaauacuuuguuagugu

SEQ ID NO: 430304 - RNA, 19 nt, Artificial Sequence
  Description of Artificial Sequence: Synthetic oligonucleotide
  Antisense Strand to SEQ ID NO: 430303
acacuaacaaaguauuagu

SEQ ID NO: 430305 - RNA, 19 nt, Artificial Sequence
  Description of Artificial Sequence: Synthetic oligonucleotide
  Sense strand starting at position 3164 of SEQ ID NO: 316658
cuacaauaagcauggguua

SEQ ID NO: 430306 - RNA, 19 nt, Artificial Sequence
  Description of Artificial Sequence: Synthetic oligonucleotide
  Antisense Strand to SEQ ID NO: 430305
uaacccaugcuuauuguag

SEQ ID NO: 430307 - RNA, 19 nt, Artificial Sequence
  Description of Artificial Sequence: Synthetic oligonucleotide
  Sense strand starting at position 3166 of SEQ ID NO: 316658
acaauaagcauggguuaga

SEQ ID NO: 430308 - RNA, 19 nt, Artificial Sequence
  Description of Artificial Sequence: Synthetic oligonucleotide
  Antisense Strand to SEQ ID NO: 430307
ucuaacccaugcuuauugu

SEQ ID NO: 430309 - RNA, 19 nt, Artificial Sequence
  Description of Artificial Sequence: Synthetic oligonucleotide
  Sense strand starting at position 3216 of SEQ ID NO: 316658
aacagcagucuuugaaaug

SEQ ID NO: 430310 - RNA, 19 nt, Artificial Sequence
  Description of Artificial Sequence: Synthetic oligonucleotide
  Antisense Strand to SEQ ID NO: 430309
cauuucaaagacugcuguu

SEQ ID NO: 430311 - RNA, 19 nt, Artificial Sequence
  Description of Artificial Sequence: Synthetic oligonucleotide
  Sense strand starting at position 3237 of SEQ ID NO: 316658
uuuacacagcguuacaauu

SEQ ID NO: 430312 - RNA, 19 nt, Artificial Sequence
  Description of Artificial Sequence: Synthetic oligonucleotide
  Antisense Strand to SEQ ID NO: 430311
aauuguaacgcuguguaaa

SEQ ID NO: 430313 - RNA, 19 nt, Artificial Sequence
  Description of Artificial Sequence: Synthetic oligonucleotide
  Sense strand starting at position 3268 of SEQ ID NO: 316658
gacuguaaaugcuucuaag

SEQ ID NO: 430314 - RNA, 19 nt, Artificial Sequence
  Description of Artificial Sequence: Synthetic oligonucleotide
  Antisense Strand to SEQ ID NO: 430313
cuuagaagcauuuacaguc

SEQ ID NO: 430315 - RNA, 19 nt, Artificial Sequence
  Description of Artificial Sequence: Synthetic oligonucleotide
  Sense strand starting at position 3306 of SEQ ID NO: 316658
uccucucagcuguaagaau

SEQ ID NO: 430316 - RNA, 19 nt, Artificial Sequence
  Description of Artificial Sequence: Synthetic oligonucleotide
  Antisense Strand to SEQ ID NO: 430315
auucuuacagcugagagga

SEQ ID NO: 430317 - RNA, 19 nt, Artificial Sequence
  Description of Artificial Sequence: Synthetic oligonucleotide
  Sense strand starting at position 3377 of SEQ ID NO: 316658
ucugaaauauccgcaaauc

SEQ ID NO: 430318 - RNA, 19 nt, Artificial Sequence
  Description of Artificial Sequence: Synthetic oligonucleotide
  Antisense Strand to SEQ ID NO: 430317
gauuugcggauauuucaga

SEQ ID NO: 430319 - RNA, 19 nt, Artificial Sequence
  Description of Artificial Sequence: Synthetic oligonucleotide
  Sense strand starting at position 3410 of SEQ ID NO: 316658
ggagccuguuaacuauaau

SEQ ID NO: 430320 - RNA, 19 nt, Artificial Sequence
  Description of Artificial Sequence: Synthetic oligonucleotide
  Antisense Strand to SEQ ID NO: 430319
auuauaguuaacaggcucc

SEQ ID NO: 430321 - RNA, 19 nt, Artificial Sequence
  Description of Artificial Sequence: Synthetic oligonucleotide
  Sense strand starting at position 3673 of SEQ ID NO: 316658
gguagugacaugcaccuau

SEQ ID NO: 430322 - RNA, 19 nt, Artificial Sequence
  Description of Artificial Sequence: Synthetic oligonucleotide
  Antisense Strand to SEQ ID NO: 430321
auaggugcaugucacuacc

SEQ ID NO: 430323 - RNA, 19 nt, Artificial Sequence
  Description of Artificial Sequence: Synthetic oligonucleotide
  Sense strand starting at position 3748 of SEQ ID NO: 316658
gucuguaguguccugugau

SEQ ID NO: 430324 - RNA, 19 nt, Artificial Sequence
  Description of Artificial Sequence: Synthetic oligonucleotide
  Antisense Strand to SEQ ID NO: 430323
aucacaggacacuacagac

SEQ ID NO: 430325 - RNA, 19 nt, Artificial Sequence
  Description of Artificial Sequence: Synthetic oligonucleotide
  Sense strand starting at position 3896 of SEQ ID NO: 316658
aagcaauuucguggugauu

SEQ ID NO: 430326 - RNA, 19 nt, Artificial Sequence
  Description of Artificial Sequence: Synthetic oligonucleotide
  Antisense Strand to SEQ ID NO: 430325
aaucaccacgaaauugcuu

SEQ ID NO: 430327 - RNA, 19 nt, Artificial Sequence
  Description of Artificial Sequence: Synthetic oligonucleotide
  Sense strand starting at position 349 of SEQ ID NO: 316659
cgacaauccugguuaaacc

SEQ ID NO: 430328 - RNA, 19 nt, Artificial Sequence
  Description of Artificial Sequence: Synthetic oligonucleotide
  Antisense Strand to SEQ ID NO: 430327
gguuuaaccaggauugucg

SEQ ID NO: 430329 - RNA, 19 nt, Artificial Sequence
  Description of Artificial Sequence: Synthetic oligonucleotide
  Sense strand starting at position 454 of SEQ ID NO: 316659
cgaucucaugugggucuua

SEQ ID NO: 430330 - RNA, 19 nt, Artificial Sequence
  Description of Artificial Sequence: Synthetic oligonucleotide
  Antisense Strand to SEQ ID NO: 430329
uaagacccacaugagaucg

SEQ ID NO: 430331 - RNA, 19 nt, Artificial Sequence
  Description of Artificial Sequence: Synthetic oligonucleotide
  Sense strand starting at position 455 of SEQ ID NO: 316659
gaucucaugugggucuuaa

SEQ ID NO: 430332 - RNA, 19 nt, Artificial Sequence
  Description of Artificial Sequence: Synthetic oligonucleotide
  Antisense Strand to SEQ ID NO: 430331
uuaagacccacaugagauc

SEQ ID NO: 430333 - RNA, 19 nt, Artificial Sequence
  Description of Artificial Sequence: Synthetic oligonucleotide
  Sense strand starting at position 488 of SEQ ID NO: 316659
ccuauuagguuucccaagu

SEQ ID NO: 430334 - RNA, 19 nt, Artificial Sequence
  Description of Artificial Sequence: Synthetic oligonucleotide
  Antisense Strand to SEQ ID NO: 430333
acuugggaaaccuaauagg

SEQ ID NO: 430335 - RNA, 19 nt, Artificial Sequence
  Description of Artificial Sequence: Synthetic oligonucleotide
  Sense strand starting at position 820 of SEQ ID NO: 316659
acuggaucaugguagauaa

SEQ ID NO: 430336 - RNA, 19 nt, Artificial Sequence
  Description of Artificial Sequence: Synthetic oligonucleotide
  Antisense Strand to SEQ ID NO: 430335
uuaucuaccaugauccagu

SEQ ID NO: 430337 - RNA, 19 nt, Artificial Sequence
  Description of Artificial Sequence: Synthetic oligonucleotide
  Sense strand starting at position 864 of SEQ ID NO: 316659
gugcuaagauuuccuuauc

SEQ ID NO: 430338 - RNA, 19 nt, Artificial Sequence
  Description of Artificial Sequence: Synthetic oligonucleotide
  Antisense Strand to SEQ ID NO: 430337
gauaaggaaaucuuagcac

SEQ ID NO: 430339 - RNA, 19 nt, Artificial Sequence
  Description of Artificial Sequence: Synthetic oligonucleotide
  Sense strand starting at position 914 of SEQ ID NO: 316659
cucacauggccagauaacu

SEQ ID NO: 430340 - RNA, 19 nt, Artificial Sequence
  Description of Artificial Sequence: Synthetic oligonucleotide
  Antisense Strand to SEQ ID NO: 430339
aguuaucuggccaugugag

SEQ ID NO: 430341 - RNA, 19 nt, Artificial Sequence
  Description of Artificial Sequence: Synthetic oligonucleotide
  Sense strand starting at position 959 of SEQ ID NO: 316659
aggugaagguuuccuuaca

SEQ ID NO: 430342 - RNA, 19 nt, Artificial Sequence
  Description of Artificial Sequence: Synthetic oligonucleotide
  Antisense Strand to SEQ ID NO: 430341
uguaaggaaaccuucaccu

SEQ ID NO: 430343 - RNA, 19 nt, Artificial Sequence
  Description of Artificial Sequence: Synthetic oligonucleotide
  Sense strand starting at position 960 of SEQ ID NO: 316659
ggugaagguuuccuuacaa

SEQ ID NO: 430344 - RNA, 19 nt, Artificial Sequence
  Description of Artificial Sequence: Synthetic oligonucleotide
  Antisense Strand to SEQ ID NO: 430343
uuguaaggaaaccuucacc

SEQ ID NO: 430345 - RNA, 19 nt, Artificial Sequence
  Description of Artificial Sequence: Synthetic oligonucleotide
  Sense strand starting at position 1021 of SEQ ID NO: 316659
acugguuuauacucgauga

SEQ ID NO: 430346 - RNA, 19 nt, Artificial Sequence
  Description of Artificial Sequence: Synthetic oligonucleotide
  Antisense Strand to SEQ ID NO: 430345
ucaucgaguauaaaccagu

SEQ ID NO: 430347 - RNA, 19 nt, Artificial Sequence
  Description of Artificial Sequence: Synthetic oligonucleotide
  Sense strand starting at position 1022 of SEQ ID NO: 316659
cugguuuauacucgaugaa

SEQ ID NO: 430348 - RNA, 19 nt, Artificial Sequence
  Description of Artificial Sequence: Synthetic oligonucleotide
  Antisense Strand to SEQ ID NO: 430347
uucaucgaguauaaaccag

SEQ ID NO: 430349 - RNA, 19 nt, Artificial Sequence
  Description of Artificial Sequence: Synthetic oligonucleotide
  Sense strand starting at position 1023 of SEQ ID NO: 316659
ugguuuauacucgaugaag

SEQ ID NO: 430350 - RNA, 19 nt, Artificial Sequence
  Description of Artificial Sequence: Synthetic oligonucleotide
  Antisense Strand to SEQ ID NO: 430349
cuucaucgaguauaaacca

SEQ ID NO: 430351 - RNA, 19 nt, Artificial Sequence
  Description of Artificial Sequence: Synthetic oligonucleotide
  Sense strand starting at position 1025 of SEQ ID NO: 316659
guuuauacucgaugaaguu

SEQ ID NO: 430352 - RNA, 19 nt, Artificial Sequence
  Description of Artificial Sequence: Synthetic oligonucleotide
  Antisense Strand to SEQ ID NO: 430351
aacuucaucgaguauaaac

SEQ ID NO: 430353 - RNA, 19 nt, Artificial Sequence
  Description of Artificial Sequence: Synthetic oligonucleotide
  Sense strand starting at position 1026 of SEQ ID NO: 316659
uuuauacucgaugaaguuu

SEQ ID NO: 430354 - RNA, 19 nt, Artificial Sequence
  Description of Artificial Sequence: Synthetic oligonucleotide
  Antisense Strand to SEQ ID NO: 430353
aaacuucaucgaguauaaa

SEQ ID NO: 430355 - RNA, 19 nt, Artificial Sequence
  Description of Artificial Sequence: Synthetic oligonucleotide
  Sense strand starting at position 1110 of SEQ ID NO: 316659
uuguccaauuuagagguau

SEQ ID NO: 430356 - RNA, 19 nt, Artificial Sequence
  Description of Artificial Sequence: Synthetic oligonucleotide
  Antisense Strand to SEQ ID NO: 430355
auaccucuaaauuggacaa

SEQ ID NO: 430357 - RNA, 19 nt, Artificial Sequence
  Description of Artificial Sequence: Synthetic oligonucleotide
  Sense strand starting at position 1178 of SEQ ID NO: 316659
gaagccagguucuuaaaua

SEQ ID NO: 430358 - RNA, 19 nt, Artificial Sequence
  Description of Artificial Sequence: Synthetic oligonucleotide
  Antisense Strand to SEQ ID NO: 430357
uauuuaagaaccuggcuuc

SEQ ID NO: 430359 - RNA, 19 nt, Artificial Sequence
  Description of Artificial Sequence: Synthetic oligonucleotide
  Sense strand starting at position 1192 of SEQ ID NO: 316659
aaauauauccuguguggca

SEQ ID NO: 430360 - RNA, 19 nt, Artificial Sequence
  Description of Artificial Sequence: Synthetic oligonucleotide
  Antisense Strand to SEQ ID NO: 430359
ugccacacaggauauauuu

SEQ ID NO: 430361 - RNA, 19 nt, Artificial Sequence
  Description of Artificial Sequence: Synthetic oligonucleotide
  Sense strand starting at position 1230 of SEQ ID NO: 316659
gcagcugaaguuugacaau

SEQ ID NO: 430362 - RNA, 19 nt, Artificial Sequence
  Description of Artificial Sequence: Synthetic oligonucleotide
  Antisense Strand to SEQ ID NO: 430361
auugucaaacuucagcugc

SEQ ID NO: 430363 - RNA, 19 nt, Artificial Sequence
  Description of Artificial Sequence: Synthetic oligonucleotide
  Sense strand starting at position 1402 of SEQ ID NO: 316659
gauugcgugacgguguuaa

SEQ ID NO: 430364 - RNA, 19 nt, Artificial Sequence
  Description of Artificial Sequence: Synthetic oligonucleotide
  Antisense Strand to SEQ ID NO: 430363
uuaacaccgucacgcaauc

SEQ ID NO: 430365 - RNA, 19 nt, Artificial Sequence
  Description of Artificial Sequence: Synthetic oligonucleotide
  Sense strand starting at position 1412 of SEQ ID NO: 316659
cgguguuaagcugugugaa

SEQ ID NO: 430366 - RNA, 19 nt, Artificial Sequence
  Description of Artificial Sequence: Synthetic oligonucleotide
  Antisense Strand to SEQ ID NO: 430365
uucacacagcuuaacaccg

SEQ ID NO: 430367 - RNA, 19 nt, Artificial Sequence
  Description of Artificial Sequence: Synthetic oligonucleotide
  Sense strand starting at position 1481 of SEQ ID NO: 316659
ucgcauauauacuuaaagu

SEQ ID NO: 430368 - RNA, 19 nt, Artificial Sequence
  Description of Artificial Sequence: Synthetic oligonucleotide
  Antisense Strand to SEQ ID NO: 430367
acuuuaaguauauaugcga

SEQ ID NO: 430369 - RNA, 19 nt, Artificial Sequence
  Description of Artificial Sequence: Synthetic oligonucleotide
  Sense strand starting at position 2409 of SEQ ID NO: 316659
ccggaaauucucugcugug

SEQ ID NO: 430370 - RNA, 19 nt, Artificial Sequence
  Description of Artificial Sequence: Synthetic oligonucleotide
  Antisense Strand to SEQ ID NO: 430369
cacagcagagaauuuccgg

SEQ ID NO: 430371 - RNA, 19 nt, Artificial Sequence
  Description of Artificial Sequence: Synthetic oligonucleotide
  Sense strand starting at position 2527 of SEQ ID NO: 316659
aacaguuacuaagcgagua

SEQ ID NO: 430372 - RNA, 19 nt, Artificial Sequence
  Description of Artificial Sequence: Synthetic oligonucleotide
  Antisense Strand to SEQ ID NO: 430371
uacucgcuuaguaacuguu

SEQ ID NO: 430373 - RNA, 19 nt, Artificial Sequence
  Description of Artificial Sequence: Synthetic oligonucleotide
  Sense strand starting at position 2529 of SEQ ID NO: 316659
caguuacuaagcgaguagu

SEQ ID NO: 430374 - RNA, 19 nt, Artificial Sequence
  Description of Artificial Sequence: Synthetic oligonucleotide
  Antisense Strand to SEQ ID NO: 430373
acuacucgcuuaguaacug

SEQ ID NO: 430375 - RNA, 19 nt, Artificial Sequence
  Description of Artificial Sequence: Synthetic oligonucleotide
  Sense strand starting at position 2532 of SEQ ID NO: 316659
uuacuaagcgaguaguucu

SEQ ID NO: 430376 - RNA, 19 nt, Artificial Sequence
  Description of Artificial Sequence: Synthetic oligonucleotide
  Antisense Strand to SEQ ID NO: 430375
agaacuacucgcuuaguaa

SEQ ID NO: 430377 - RNA, 19 nt, Artificial Sequence
  Description of Artificial Sequence: Synthetic oligonucleotide
  Sense strand starting at position 2560 of SEQ ID NO: 316659
ccuggugggucaguauaga

SEQ ID NO: 430378 - RNA, 19 nt, Artificial Sequence
  Description of Artificial Sequence: Synthetic oligonucleotide
  Antisense Strand to SEQ ID NO: 430377
ucuauacugacccaccagg

SEQ ID NO: 430379 - RNA, 19 nt, Artificial Sequence
  Description of Artificial Sequence: Synthetic oligonucleotide
  Sense strand starting at position 2635 of SEQ ID NO: 316659
ccuggaugggcccaguauu

SEQ ID NO: 430380 - RNA, 19 nt, Artificial Sequence
  Description of Artificial Sequence: Synthetic oligonucleotide
  Antisense Strand to SEQ ID NO: 430379
aauacugggcccauccagg

SEQ ID NO: 430381 - RNA, 19 nt, Artificial Sequence
  Description of Artificial Sequence: Synthetic oligonucleotide
  Sense strand starting at position 2732 of SEQ ID NO: 316659
ugugacaucucaucccauu

SEQ ID NO: 430382 - RNA, 19 nt, Artificial Sequence
  Description of Artificial Sequence: Synthetic oligonucleotide
  Antisense Strand to SEQ ID NO: 430381
aaugggaugagaugucaca

SEQ ID NO: 430383 - RNA, 19 nt, Artificial Sequence
  Description of Artificial Sequence: Synthetic oligonucleotide
  Sense strand starting at position 3176 of SEQ ID NO: 316659
cacgauuucuucuauaggu

SEQ ID NO: 430384 - RNA, 19 nt, Artificial Sequence
  Description of Artificial Sequence: Synthetic oligonucleotide
  Antisense Strand to SEQ ID NO: 430383
accuauagaagaaaucgug

SEQ ID NO: 430385 - RNA, 19 nt, Artificial Sequence
  Description of Artificial Sequence: Synthetic oligonucleotide
  Sense strand starting at position 3202 of SEQ ID NO: 316659
cauuuacuauguggaggaa

SEQ ID NO: 430386 - RNA, 19 nt, Artificial Sequence
  Description of Artificial Sequence: Synthetic oligonucleotide
  Antisense Strand to SEQ ID NO: 430385
uuccuccacauaguaaaug

SEQ ID NO: 430387 - RNA, 19 nt, Artificial Sequence
  Description of Artificial Sequence: Synthetic oligonucleotide
  Sense strand starting at position 3302 of SEQ ID NO: 316659
aucugauguugcuuuaugu

SEQ ID NO: 430388 - RNA, 19 nt, Artificial Sequence
  Description of Artificial Sequence: Synthetic oligonucleotide
  Antisense Strand to SEQ ID NO: 430387
acauaaagcaacaucagau

SEQ ID NO: 430389 - RNA, 19 nt, Artificial Sequence
  Description of Artificial Sequence: Synthetic oligonucleotide
  Sense strand starting at position 3308 of SEQ ID NO: 316659
uguugcuuuauguaggaca

SEQ ID NO: 430390 - RNA, 19 nt, Artificial Sequence
  Description of Artificial Sequence: Synthetic oligonucleotide
  Antisense Strand to SEQ ID NO: 430389
uguccuacauaaagcaaca

SEQ ID NO: 430391 - RNA, 19 nt, Artificial Sequence
  Description of Artificial Sequence: Synthetic oligonucleotide
  Sense strand starting at position 3310 of SEQ ID NO: 316659
uugcuuuauguaggacaca

SEQ ID NO: 430392 - RNA, 19 nt, Artificial Sequence
  Description of Artificial Sequence: Synthetic oligonucleotide
  Antisense Strand to SEQ ID NO: 430391
uguguccuacauaaagcaa

SEQ ID NO: 430393 - RNA, 19 nt, Artificial Sequence
  Description of Artificial Sequence: Synthetic oligonucleotide
  Sense strand starting at position 3371 of SEQ ID NO: 316659
ucccuaagagaaugugaca

SEQ ID NO: 430394 - RNA, 19 nt, Artificial Sequence
  Description of Artificial Sequence: Synthetic oligonucleotide
  Antisense Strand to SEQ ID NO: 430393
ugucacauucucuuaggga

SEQ ID NO: 430395 - RNA, 19 nt, Artificial Sequence
  Description of Artificial Sequence: Synthetic oligonucleotide
  Sense strand starting at position 3395 of SEQ ID NO: 316659
auccuaggguucuuaaacu

SEQ ID NO: 430396 - RNA, 19 nt, Artificial Sequence
  Description of Artificial Sequence: Synthetic oligonucleotide
  Antisense Strand to SEQ ID NO: 430395
aguuuaagaacccuaggau

SEQ ID NO: 430397 - RNA, 19 nt, Artificial Sequence
  Description of Artificial Sequence: Synthetic oligonucleotide
  Sense strand starting at position 3476 of SEQ ID NO: 316659
gacggcagguccuuuaacu

SEQ ID NO: 430398 - RNA, 19 nt, Artificial Sequence
  Description of Artificial Sequence: Synthetic oligonucleotide
  Antisense Strand to SEQ ID NO: 430397
aguuaaaggaccugccguc

SEQ ID NO: 430399 - RNA, 19 nt, Artificial Sequence
  Description of Artificial Sequence: Synthetic oligonucleotide
  Sense strand starting at position 3811 of SEQ ID NO: 316659
ucuaguaucuaugcacauu

SEQ ID NO: 430400 - RNA, 19 nt, Artificial Sequence
  Description of Artificial Sequence: Synthetic oligonucleotide
  Antisense Strand to SEQ ID NO: 430399
aaugugcauagauacuaga

SEQ ID NO: 430401 - RNA, 19 nt, Artificial Sequence
  Description of Artificial Sequence: Synthetic oligonucleotide
  Sense strand starting at position 3825 of SEQ ID NO: 316659
acauuaaccuucuuacgga

SEQ ID NO: 430402 - RNA, 19 nt, Artificial Sequence
  Description of Artificial Sequence: Synthetic oligonucleotide
  Antisense Strand to SEQ ID NO: 430401
uccguaagaagguuaaugu

SEQ ID NO: 430403 - RNA, 19 nt, Artificial Sequence
  Description of Artificial Sequence: Synthetic oligonucleotide
  Sense strand starting at position 3839 of SEQ ID NO: 316659
acggaaauugaauguccau

SEQ ID NO: 430404 - RNA, 19 nt, Artificial Sequence
  Description of Artificial Sequence: Synthetic oligonucleotide
  Antisense Strand to SEQ ID NO: 430403
auggacauucaauuuccgu

SEQ ID NO: 430405 - RNA, 19 nt, Artificial Sequence
  Description of Artificial Sequence: Synthetic oligonucleotide
  Sense strand starting at position 3885 of SEQ ID NO: 316659
acccauacagcacgugaaa

SEQ ID NO: 430406 - RNA, 19 nt, Artificial Sequence
  Description of Artificial Sequence: Synthetic oligonucleotide
  Antisense Strand to SEQ ID NO: 430405
uuucacgugcuguaugggu

SEQ ID NO: 430407 - RNA, 19 nt, Artificial Sequence
  Description of Artificial Sequence: Synthetic oligonucleotide
  Sense strand starting at position 31 of SEQ ID NO: 316660
ggaaaugugugucugcaga

SEQ ID NO: 430408 - RNA, 19 nt, Artificial Sequence
  Description of Artificial Sequence: Synthetic oligonucleotide
  Antisense Strand to SEQ ID NO: 430407
ucugcagacacacauuucc

SEQ ID NO: 430409 - RNA, 19 nt, Artificial Sequence
  Description of Artificial Sequence: Synthetic oligonucleotide
  Sense strand starting at position 33 of SEQ ID NO: 316660
aaaugugugucugcagaga

SEQ ID NO: 430410 - RNA, 19 nt, Artificial Sequence
  Description of Artificial Sequence: Synthetic oligonucleotide
  Antisense Strand to SEQ ID NO: 430409
ucucugcagacacacauuu

SEQ ID NO: 430411 - RNA, 19 nt, Artificial Sequence
  Description of Artificial Sequence: Synthetic oligonucleotide
  Sense strand starting at position 38 of SEQ ID NO: 316660
ugugucugcagagaaauca

SEQ ID NO: 430412 - RNA, 19 nt, Artificial Sequence
  Description of Artificial Sequence: Synthetic oligonucleotide
  Antisense Strand to SEQ ID NO: 430411
ugauuucucugcagacaca

SEQ ID NO: 430413 - RNA, 19 nt, Artificial Sequence
  Description of Artificial Sequence: Synthetic oligonucleotide
  Sense strand starting at position 82 of SEQ ID NO: 316660
aauccaugugcccaaggau

SEQ ID NO: 430414 - RNA, 19 nt, Artificial Sequence
  Description of Artificial Sequence: Synthetic oligonucleotide
  Antisense Strand to SEQ ID NO: 430413
auccuugggcacauggauu

SEQ ID NO: 430415 - RNA, 19 nt, Artificial Sequence
  Description of Artificial Sequence: Synthetic oligonucleotide
  Sense strand starting at position 159 of SEQ ID NO: 316660
gguguggucuaggcagaga

SEQ ID NO: 430416 - RNA, 19 nt, Artificial Sequence
  Description of Artificial Sequence: Synthetic oligonucleotide
  Antisense Strand to SEQ ID NO: 430415
ucucugccuagaccacacc

SEQ ID NO: 430417 - RNA, 19 nt, Artificial Sequence
  Description of Artificial Sequence: Synthetic oligonucleotide
  Sense strand starting at position 264 of SEQ ID NO: 316660
ugcagacccuuuccaagau

SEQ ID NO: 430418 - RNA, 19 nt, Artificial Sequence
  Description of Artificial Sequence: Synthetic oligonucleotide
  Antisense Strand to SEQ ID NO: 430417
aucuuggaaagggucugca

SEQ ID NO: 430419 - RNA, 19 nt, Artificial Sequence
  Description of Artificial Sequence: Synthetic oligonucleotide
  Sense strand starting at position 416 of SEQ ID NO: 316660
gucucugugcuaguguuua

SEQ ID NO: 430420 - RNA, 19 nt, Artificial Sequence
  Description of Artificial Sequence: Synthetic oligonucleotide
  Antisense Strand to SEQ ID NO: 430419
uaaacacuagcacagagac

SEQ ID NO: 430421 - RNA, 19 nt, Artificial Sequence
  Description of Artificial Sequence: Synthetic oligonucleotide
  Sense strand starting at position 435 of SEQ ID NO: 316660
ugcaguucaguggaauaga

SEQ ID NO: 430422 - RNA, 19 nt, Artificial Sequence
  Description of Artificial Sequence: Synthetic oligonucleotide
  Antisense Strand to SEQ ID NO: 430421
ucuauuccacugaacugca

SEQ ID NO: 430423 - RNA, 19 nt, Artificial Sequence
  Description of Artificial Sequence: Synthetic oligonucleotide
  Sense strand starting at position 514 of SEQ ID NO: 316660
guuguucugugacuuaaac

SEQ ID NO: 430424 - RNA, 19 nt, Artificial Sequence
  Description of Artificial Sequence: Synthetic oligonucleotide
  Antisense Strand to SEQ ID NO: 430423
guuuaagucacagaacaac

SEQ ID NO: 430425 - RNA, 19 nt, Artificial Sequence
  Description of Artificial Sequence: Synthetic oligonucleotide
  Sense strand starting at position 672 of SEQ ID NO: 316660
cugguuugugcagagauuc

SEQ ID NO: 430426 - RNA, 19 nt, Artificial Sequence
  Description of Artificial Sequence: Synthetic oligonucleotide
  Antisense Strand to SEQ ID NO: 430425
gaaucucugcacaaaccag

SEQ ID NO: 430427 - RNA, 19 nt, Artificial Sequence
  Description of Artificial Sequence: Synthetic oligonucleotide
  Sense strand starting at position 944 of SEQ ID NO: 316660
agagaaagauguuauugaa

SEQ ID NO: 430428 - RNA, 19 nt, Artificial Sequence
  Description of Artificial Sequence: Synthetic oligonucleotide
  Antisense Strand to SEQ ID NO: 430427
uucaauaacaucuuucucu

SEQ ID NO: 430429 - RNA, 19 nt, Artificial Sequence
  Description of Artificial Sequence: Synthetic oligonucleotide
  Sense strand starting at position 997 of SEQ ID NO: 316660
agacaucgucgaggugaga

SEQ ID NO: 430430 - RNA, 19 nt, Artificial Sequence
  Description of Artificial Sequence: Synthetic oligonucleotide
  Antisense Strand to SEQ ID NO: 430429
ucucaccucgacgaugucu

SEQ ID NO: 430431 - RNA, 19 nt, Artificial Sequence
  Description of Artificial Sequence: Synthetic oligonucleotide
  Sense strand starting at position 1008 of SEQ ID NO: 316660
aggugagaaucauuccuga

SEQ ID NO: 430432 - RNA, 19 nt, Artificial Sequence
  Description of Artificial Sequence: Synthetic oligonucleotide
  Antisense Strand to SEQ ID NO: 430431
ucaggaaugauucucaccu

SEQ ID NO: 430433 - RNA, 19 nt, Artificial Sequence
  Description of Artificial Sequence: Synthetic oligonucleotide
  Sense strand starting at position 1013 of SEQ ID NO: 316660
agaaucauuccugaugcau

SEQ ID NO: 430434 - RNA, 19 nt, Artificial Sequence
  Description of Artificial Sequence: Synthetic oligonucleotide
  Antisense Strand to SEQ ID NO: 430433
augcaucaggaaugauucu

SEQ ID NO: 430435 - RNA, 19 nt, Artificial Sequence
  Description of Artificial Sequence: Synthetic oligonucleotide
  Sense strand starting at position 1025 of SEQ ID NO: 316660
gaugcaugagugugggaau

SEQ ID NO: 430436 - RNA, 19 nt, Artificial Sequence
  Description of Artificial Sequence: Synthetic oligonucleotide
  Antisense Strand to SEQ ID NO: 430435
auucccacacucaugcauc

SEQ ID NO: 430437 - RNA, 19 nt, Artificial Sequence
  Description of Artificial Sequence: Synthetic oligonucleotide
  Sense strand starting at position 1112 of SEQ ID NO: 316660
cucagaaaucuguaucugu

SEQ ID NO: 430438 - RNA, 19 nt, Artificial Sequence
  Description of Artificial Sequence: Synthetic oligonucleotide
  Antisense Strand to SEQ ID NO: 430437
acagauacagauuucugag

SEQ ID NO: 430439 - RNA, 19 nt, Artificial Sequence
  Description of Artificial Sequence: Synthetic oligonucleotide
  Sense strand starting at position 1155 of SEQ ID NO: 316660
gggcuuucgaugcaggaaa

SEQ ID NO: 430440 - RNA, 19 nt, Artificial Sequence
  Description of Artificial Sequence: Synthetic oligonucleotide
  Antisense Strand to SEQ ID NO: 430439
uuuccugcaucgaaagccc

SEQ ID NO: 430441 - RNA, 19 nt, Artificial Sequence
  Description of Artificial Sequence: Synthetic oligonucleotide
  Sense strand starting at position 1157 of SEQ ID NO: 316660
gcuuucgaugcaggaaaga

SEQ ID NO: 430442 - RNA, 19 nt, Artificial Sequence
  Description of Artificial Sequence: Synthetic oligonucleotide
  Antisense Strand to SEQ ID NO: 430441
ucuuuccugcaucgaaagc

SEQ ID NO: 430443 - RNA, 19 nt, Artificial Sequence
  Description of Artificial Sequence: Synthetic oligonucleotide
  Sense strand starting at position 1295 of SEQ ID NO: 316660
agcacugcuguuuaccaaa

SEQ ID NO: 430444 - RNA, 19 nt, Artificial Sequence
  Description of Artificial Sequence: Synthetic oligonucleotide
  Antisense Strand to SEQ ID NO: 430443
uuugguaaacagcagugcu

SEQ ID NO: 430445 - RNA, 19 nt, Artificial Sequence
  Description of Artificial Sequence: Synthetic oligonucleotide
  Sense strand starting at position 1413 of SEQ ID NO: 316660
agacacagccagugucuua

SEQ ID NO: 430446 - RNA, 19 nt, Artificial Sequence
  Description of Artificial Sequence: Synthetic oligonucleotide
  Antisense Strand to SEQ ID NO: 430445
uaagacacuggcugugucu

SEQ ID NO: 430447 - RNA, 19 nt, Artificial Sequence
  Description of Artificial Sequence: Synthetic oligonucleotide
  Sense strand starting at position 1667 of SEQ ID NO: 316660
gccuuugaacuccagaaug

SEQ ID NO: 430448 - RNA, 19 nt, Artificial Sequence
  Description of Artificial Sequence: Synthetic oligonucleotide
  Antisense Strand to SEQ ID NO: 430447
cauucuggaguucaaaggc

SEQ ID NO: 430449 - RNA, 19 nt, Artificial Sequence
  Description of Artificial Sequence: Synthetic oligonucleotide
  Sense strand starting at position 2090 of SEQ ID NO: 316660
uggguugcaucauuugagu

SEQ ID NO: 430450 - RNA, 19 nt, Artificial Sequence
  Description of Artificial Sequence: Synthetic oligonucleotide
  Antisense Strand to SEQ ID NO: 430449
acucaaaugaugcaaccca

SEQ ID NO: 430451 - RNA, 19 nt, Artificial Sequence
  Description of Artificial Sequence: Synthetic oligonucleotide
  Sense strand starting at position 2096 of SEQ ID NO: 316660
gcaucauuugagugccuuu

SEQ ID NO: 430452 - RNA, 19 nt, Artificial Sequence
  Description of Artificial Sequence: Synthetic oligonucleotide
  Antisense Strand to SEQ ID NO: 430451
aaaggcacucaaaugaugc

SEQ ID NO: 430453 - RNA, 19 nt, Artificial Sequence
  Description of Artificial Sequence: Synthetic oligonucleotide
  Sense strand starting at position 2119 of SEQ ID NO: 316660
ugcauuuaagcagguggua

SEQ ID NO: 430454 - RNA, 19 nt, Artificial Sequence
  Description of Artificial Sequence: Synthetic oligonucleotide
  Antisense Strand to SEQ ID NO: 430453
uaccaccugcuuaaaugca

SEQ ID NO: 430455 - RNA, 19 nt, Artificial Sequence
  Description of Artificial Sequence: Synthetic oligonucleotide
  Sense strand starting at position 2139 of SEQ ID NO: 316660
agaguaaggaacuguuguu

SEQ ID NO: 430456 - RNA, 19 nt, Artificial Sequence
  Description of Artificial Sequence: Synthetic oligonucleotide
  Antisense Strand to SEQ ID NO: 430455
aacaacaguuccuuacucu

SEQ ID NO: 430457 - RNA, 19 nt, Artificial Sequence
  Description of Artificial Sequence: Synthetic oligonucleotide
  Sense strand starting at position 2521 of SEQ ID NO: 316660
ugggcaaucucagugaggu

SEQ ID NO: 430458 - RNA, 19 nt, Artificial Sequence
  Description of Artificial Sequence: Synthetic oligonucleotide
  Antisense Strand to SEQ ID NO: 430457
accucacugagauugccca

SEQ ID NO: 430459 - RNA, 19 nt, Artificial Sequence
  Description of Artificial Sequence: Synthetic oligonucleotide
  Sense strand starting at position 2522 of SEQ ID NO: 316660
gggcaaucucagugaggua

SEQ ID NO: 430460 - RNA, 19 nt, Artificial Sequence
  Description of Artificial Sequence: Synthetic oligonucleotide
  Antisense Strand to SEQ ID NO: 430459
uaccucacugagauugccc

SEQ ID NO: 430461 - RNA, 19 nt, Artificial Sequence
  Description of Artificial Sequence: Synthetic oligonucleotide
  Sense strand starting at position 2523 of SEQ ID NO: 316660
ggcaaucucagugagguaa

SEQ ID NO: 430462 - RNA, 19 nt, Artificial Sequence
  Description of Artificial Sequence: Synthetic oligonucleotide
  Antisense Strand to SEQ ID NO: 430461
uuaccucacugagauugcc

SEQ ID NO: 430463 - RNA, 19 nt, Artificial Sequence
  Description of Artificial Sequence: Synthetic oligonucleotide
  Sense strand starting at position 2542 of SEQ ID NO: 316660
ccaugagacucagugcaau

SEQ ID NO: 430464 - RNA, 19 nt, Artificial Sequence
  Description of Artificial Sequence: Synthetic oligonucleotide
  Antisense Strand to SEQ ID NO: 430463
auugcacugagucucaugg

SEQ ID NO: 430465 - RNA, 19 nt, Artificial Sequence
  Description of Artificial Sequence: Synthetic oligonucleotide
  Sense strand starting at position 2756 of SEQ ID NO: 316660
uuggauauuuguuacagag

SEQ ID NO: 430466 - RNA, 19 nt, Artificial Sequence
  Description of Artificial Sequence: Synthetic oligonucleotide
  Antisense Strand to SEQ ID NO: 430465
cucuguaacaaauauccaa

SEQ ID NO: 430467 - RNA, 19 nt, Artificial Sequence
  Description of Artificial Sequence: Synthetic oligonucleotide
  Sense strand starting at position 2758 of SEQ ID NO: 316660
ggauauuuguuacagagcu

SEQ ID NO: 430468 - RNA, 19 nt, Artificial Sequence
  Description of Artificial Sequence: Synthetic oligonucleotide
  Antisense Strand to SEQ ID NO: 430467
agcucuguaacaaauaucc

SEQ ID NO: 430469 - RNA, 19 nt, Artificial Sequence
  Description of Artificial Sequence: Synthetic oligonucleotide
  Sense strand starting at position 2781 of SEQ ID NO: 316660
auucuacuucugugauaag

SEQ ID NO: 430470 - RNA, 19 nt, Artificial Sequence
  Description of Artificial Sequence: Synthetic oligonucleotide
  Antisense Strand to SEQ ID NO: 430469
cuuaucacagaaguagaau

SEQ ID NO: 430471 - RNA, 19 nt, Artificial Sequence
  Description of Artificial Sequence: Synthetic oligonucleotide
  Sense strand starting at position 2808 of SEQ ID NO: 316660
guaagagccuuaucaagga

SEQ ID NO: 430472 - RNA, 19 nt, Artificial Sequence
  Description of Artificial Sequence: Synthetic oligonucleotide
  Antisense Strand to SEQ ID NO: 430471
uccuugauaaggcucuuac

SEQ ID NO: 430473 - RNA, 19 nt, Artificial Sequence
  Description of Artificial Sequence: Synthetic oligonucleotide
  Sense strand starting at position 2837 of SEQ ID NO: 316660
auguucugugucuaauacu

SEQ ID NO: 430474 - RNA, 19 nt, Artificial Sequence
  Description of Artificial Sequence: Synthetic oligonucleotide
  Antisense Strand to SEQ ID NO: 430473
aguauuagacacagaacau

SEQ ID NO: 430475 - RNA, 19 nt, Artificial Sequence
  Description of Artificial Sequence: Synthetic oligonucleotide
  Sense strand starting at position 2856 of SEQ ID NO: 316660
gaaucuaaaggcugguaaa

SEQ ID NO: 430476 - RNA, 19 nt, Artificial Sequence
  Description of Artificial Sequence: Synthetic oligonucleotide
  Antisense Strand to SEQ ID NO: 430475
uuuaccagccuuuagauuc

SEQ ID NO: 430477 - RNA, 19 nt, Artificial Sequence
  Description of Artificial Sequence: Synthetic oligonucleotide
  Sense strand starting at position 2918 of SEQ ID NO: 316660
acauguaaucuuuaaggua

SEQ ID NO: 430478 - RNA, 19 nt, Artificial Sequence
  Description of Artificial Sequence: Synthetic oligonucleotide
  Antisense Strand to SEQ ID NO: 430477
uaccuuaaagauuacaugu

SEQ ID NO: 430479 - RNA, 19 nt, Artificial Sequence
  Description of Artificial Sequence: Synthetic oligonucleotide
  Sense strand starting at position 3661 of SEQ ID NO: 316660
aucuauuugcuuuguacca

SEQ ID NO: 430480 - RNA, 19 nt, Artificial Sequence
  Description of Artificial Sequence: Synthetic oligonucleotide
  Antisense Strand to SEQ ID NO: 430479
ugguacaaagcaaauagau

SEQ ID NO: 430481 - RNA, 19 nt, Artificial Sequence
  Description of Artificial Sequence: Synthetic oligonucleotide
  Sense strand starting at position 3699 of SEQ ID NO: 316660
ugaguugaccaggaugcuu

SEQ ID NO: 430482 - RNA, 19 nt, Artificial Sequence
  Description of Artificial Sequence: Synthetic oligonucleotide
  Antisense Strand to SEQ ID NO: 430481
aagcauccuggucaacuca

SEQ ID NO: 430483 - RNA, 19 nt, Artificial Sequence
  Description of Artificial Sequence: Synthetic oligonucleotide
  Sense strand starting at position 3711 of SEQ ID NO: 316660
gaugcuugugacuguggaa

SEQ ID NO: 430484 - RNA, 19 nt, Artificial Sequence
  Description of Artificial Sequence: Synthetic oligonucleotide
  Antisense Strand to SEQ ID NO: 430483
uuccacagucacaagcauc

SEQ ID NO: 430485 - RNA, 19 nt, Artificial Sequence
  Description of Artificial Sequence: Synthetic oligonucleotide
  Sense strand starting at position 3756 of SEQ ID NO: 316660
guuuccauuuguucucuau

SEQ ID NO: 430486 - RNA, 19 nt, Artificial Sequence
  Description of Artificial Sequence: Synthetic oligonucleotide
  Antisense Strand to SEQ ID NO: 430485
auagagaacaaauggaaac

SEQ ID NO: 430487 - RNA, 19 nt, Artificial Sequence
  Description of Artificial Sequence: Synthetic oligonucleotide
  Sense strand starting at position 192 of SEQ ID NO: 316661
ggaugauuucguugucucu

SEQ ID NO: 430488 - RNA, 19 nt, Artificial Sequence
  Description of Artificial Sequence: Synthetic oligonucleotide
  Antisense Strand to SEQ ID NO: 430487
agagacaacgaaaucaucc

SEQ ID NO: 430489 - RNA, 19 nt, Artificial Sequence
  Description of Artificial Sequence: Synthetic oligonucleotide
  Sense strand starting at position 230 of SEQ ID NO: 316661
aauggcuuuggucauguga

SEQ ID NO: 430490 - RNA, 19 nt, Artificial Sequence
  Description of Artificial Sequence: Synthetic oligonucleotide
  Antisense Strand to SEQ ID NO: 430489
ucacaugaccaaagccauu

SEQ ID NO: 430491 - RNA, 19 nt, Artificial Sequence
  Description of Artificial Sequence: Synthetic oligonucleotide
  Sense strand starting at position 301 of SEQ ID NO: 316661
uuuaauaguccugaguaua

SEQ ID NO: 430492 - RNA, 19 nt, Artificial Sequence
  Description of Artificial Sequence: Synthetic oligonucleotide
  Antisense Strand to SEQ ID NO: 430491
uauacucaggacuauuaaa

SEQ ID NO: 430493 - RNA, 19 nt, Artificial Sequence
  Description of Artificial Sequence: Synthetic oligonucleotide
  Sense strand starting at position 311 of SEQ ID NO: 316661
cugaguauauuguuucuaa

SEQ ID NO: 430494 - RNA, 19 nt, Artificial Sequence
  Description of Artificial Sequence: Synthetic oligonucleotide
  Antisense Strand to SEQ ID NO: 430493
uuagaaacaauauacucag

SEQ ID NO: 430495 - RNA, 19 nt, Artificial Sequence
  Description of Artificial Sequence: Synthetic oligonucleotide
  Sense strand starting at position 510 of SEQ ID NO: 316661
ggucuagaucuggaaugcu

SEQ ID NO: 430496 - RNA, 19 nt, Artificial Sequence
  Description of Artificial Sequence: Synthetic oligonucleotide
  Antisense Strand to SEQ ID NO: 430495
agcauuccagaucuagacc

SEQ ID NO: 430497 - RNA, 19 nt, Artificial Sequence
  Description of Artificial Sequence: Synthetic oligonucleotide
  Sense strand starting at position 520 of SEQ ID NO: 316661
uggaaugcuuagguacaaa

SEQ ID NO: 430498 - RNA, 19 nt, Artificial Sequence
  Description of Artificial Sequence: Synthetic oligonucleotide
  Antisense Strand to SEQ ID NO: 430497
uuuguaccuaagcauucca

SEQ ID NO: 430499 - RNA, 19 nt, Artificial Sequence
  Description of Artificial Sequence: Synthetic oligonucleotide
  Sense strand starting at position 610 of SEQ ID NO: 316661
cuaucucuacgcuaugauu

SEQ ID NO: 430500 - RNA, 19 nt, Artificial Sequence
  Description of Artificial Sequence: Synthetic oligonucleotide
  Antisense Strand to SEQ ID NO: 430499
aaucauagcguagagauag

SEQ ID NO: 430501 - RNA, 19 nt, Artificial Sequence
  Description of Artificial Sequence: Synthetic oligonucleotide
  Sense strand starting at position 716 of SEQ ID NO: 316661
aauaucagagguugcaaau

SEQ ID NO: 430502 - RNA, 19 nt, Artificial Sequence
  Description of Artificial Sequence: Synthetic oligonucleotide
  Antisense Strand to SEQ ID NO: 430501
auuugcaaccucugauauu

SEQ ID NO: 430503 - RNA, 19 nt, Artificial Sequence
  Description of Artificial Sequence: Synthetic oligonucleotide
  Sense strand starting at position 929 of SEQ ID NO: 316661
ccauauuauugcuccagga

SEQ ID NO: 430504 - RNA, 19 nt, Artificial Sequence
  Description of Artificial Sequence: Synthetic oligonucleotide
  Antisense Strand to SEQ ID NO: 430503
uccuggagcaauaauaugg

SEQ ID NO: 430505 - RNA, 19 nt, Artificial Sequence
  Description of Artificial Sequence: Synthetic oligonucleotide
  Sense strand starting at position 933 of SEQ ID NO: 316661
auuauugcuccaggaaaua

SEQ ID NO: 430506 - RNA, 19 nt, Artificial Sequence
  Description of Artificial Sequence: Synthetic oligonucleotide
  Antisense Strand to SEQ ID NO: 430505
uauuuccuggagcaauaau

SEQ ID NO: 430507 - RNA, 19 nt, Artificial Sequence
  Description of Artificial Sequence: Synthetic oligonucleotide
  Sense strand starting at position 1108 of SEQ ID NO: 316661
uguuucucgcugcuaucau

SEQ ID NO: 430508 - RNA, 19 nt, Artificial Sequence
  Description of Artificial Sequence: Synthetic oligonucleotide
  Antisense Strand to SEQ ID NO: 430507
augauagcagcgagaaaca

SEQ ID NO: 430509 - RNA, 19 nt, Artificial Sequence
  Description of Artificial Sequence: Synthetic oligonucleotide
  Sense strand starting at position 1150 of SEQ ID NO: 316661
gaauguaugccacaguaag

SEQ ID NO: 430510 - RNA, 19 nt, Artificial Sequence
  Description of Artificial Sequence: Synthetic oligonucleotide
  Antisense Strand to SEQ ID NO: 430509
cuuacuguggcauacauuc

SEQ ID NO: 430511 - RNA, 19 nt, Artificial Sequence
  Description of Artificial Sequence: Synthetic oligonucleotide
  Sense strand starting at position 1252 of SEQ ID NO: 316661
cacacuaaugucugggaaa

SEQ ID NO: 430512 - RNA, 19 nt, Artificial Sequence
  Description of Artificial Sequence: Synthetic oligonucleotide
  Antisense Strand to SEQ ID NO: 430511
uuucccagacauuagugug

SEQ ID NO: 430513 - RNA, 19 nt, Artificial Sequence
  Description of Artificial Sequence: Synthetic oligonucleotide
  Sense strand starting at position 1545 of SEQ ID NO: 316661
cacgguccucaguaaucca

SEQ ID NO: 430514 - RNA, 19 nt, Artificial Sequence
  Description of Artificial Sequence: Synthetic oligonucleotide
  Antisense Strand to SEQ ID NO: 430513
uggauuacugaggaccgug

SEQ ID NO: 430515 - RNA, 19 nt, Artificial Sequence
  Description of Artificial Sequence: Synthetic oligonucleotide
  Sense strand starting at position 1548 of SEQ ID NO: 316661
gguccucaguaauccacau

SEQ ID NO: 430516 - RNA, 19 nt, Artificial Sequence
  Description of Artificial Sequence: Synthetic oligonucleotide
  Antisense Strand to SEQ ID NO: 430515
auguggauuacugaggacc

SEQ ID NO: 430517 - RNA, 19 nt, Artificial Sequence
  Description of Artificial Sequence: Synthetic oligonucleotide
  Sense strand starting at position 1609 of SEQ ID NO: 316661
caguguauccauuaugagc

SEQ ID NO: 430518 - RNA, 19 nt, Artificial Sequence
  Description of Artificial Sequence: Synthetic oligonucleotide
  Antisense Strand to SEQ ID NO: 430517
gcucauaauggauacacug

SEQ ID NO: 430519 - RNA, 19 nt, Artificial Sequence
  Description of Artificial Sequence: Synthetic oligonucleotide
  Sense strand starting at position 1704 of SEQ ID NO: 316661
gucuacaguuacucauaau

SEQ ID NO: 430520 - RNA, 19 nt, Artificial Sequence
  Description of Artificial Sequence: Synthetic oligonucleotide
  Antisense Strand to SEQ ID NO: 430519
auuaugaguaacuguagac

SEQ ID NO: 430521 - RNA, 19 nt, Artificial Sequence
  Description of Artificial Sequence: Synthetic oligonucleotide
  Sense strand starting at position 1798 of SEQ ID NO: 316661
uccuaauuccggcgauuua

SEQ ID NO: 430522 - RNA, 19 nt, Artificial Sequence
  Description of Artificial Sequence: Synthetic oligonucleotide
  Antisense Strand to SEQ ID NO: 430521
uaaaucgccggaauuagga

SEQ ID NO: 430523 - RNA, 19 nt, Artificial Sequence
  Description of Artificial Sequence: Synthetic oligonucleotide
  Sense strand starting at position 2065 of SEQ ID NO: 316661
gccacaacuguuuaucuga

SEQ ID NO: 430524 - RNA, 19 nt, Artificial Sequence
  Description of Artificial Sequence: Synthetic oligonucleotide
  Antisense Strand to SEQ ID NO: 430523
ucagauaaacaguuguggc

SEQ ID NO: 430525 - RNA, 19 nt, Artificial Sequence
  Description of Artificial Sequence: Synthetic oligonucleotide
  Sense strand starting at position 2078 of SEQ ID NO: 316661
aucugacugcauuguuaaa

SEQ ID NO: 430526 - RNA, 19 nt, Artificial Sequence
  Description of Artificial Sequence: Synthetic oligonucleotide
  Antisense Strand to SEQ ID NO: 430525
uuuaacaaugcagucagau

SEQ ID NO: 430527 - RNA, 19 nt, Artificial Sequence
  Description of Artificial Sequence: Synthetic oligonucleotide
  Sense strand starting at position 2317 of SEQ ID NO: 316661
ucuagaaugugucucugaa

SEQ ID NO: 430528 - RNA, 19 nt, Artificial Sequence
  Description of Artificial Sequence: Synthetic oligonucleotide
  Antisense Strand to SEQ ID NO: 430527
uucagagacacauucuaga

SEQ ID NO: 430529 - RNA, 19 nt, Artificial Sequence
  Description of Artificial Sequence: Synthetic oligonucleotide
  Sense strand starting at position 2356 of SEQ ID NO: 316661
cagucaagaggcuacuuaa

SEQ ID NO: 430530 - RNA, 19 nt, Artificial Sequence
  Description of Artificial Sequence: Synthetic oligonucleotide
  Antisense Strand to SEQ ID NO: 430529
uuaaguagccucuugacug

SEQ ID NO: 430531 - RNA, 19 nt, Artificial Sequence
  Description of Artificial Sequence: Synthetic oligonucleotide
  Sense strand starting at position 2386 of SEQ ID NO: 316661
gguuauuaauauccuaaag

SEQ ID NO: 430532 - RNA, 19 nt, Artificial Sequence
  Description of Artificial Sequence: Synthetic oligonucleotide
  Antisense Strand to SEQ ID NO: 430531
cuuuaggauauuaauaacc

SEQ ID NO: 430533 - RNA, 19 nt, Artificial Sequence
  Description of Artificial Sequence: Synthetic oligonucleotide
  Sense strand starting at position 2490 of SEQ ID NO: 316661
gucauaaagccuugagaac

SEQ ID NO: 430534 - RNA, 19 nt, Artificial Sequence
  Description of Artificial Sequence: Synthetic oligonucleotide
  Antisense Strand to SEQ ID NO: 430533
guucucaaggcuuuaugac

SEQ ID NO: 430535 - RNA, 19 nt, Artificial Sequence
  Description of Artificial Sequence: Synthetic oligonucleotide
  Sense strand starting at position 2581 of SEQ ID NO: 316661
acaguauaccugugacaau

SEQ ID NO: 430536 - RNA, 19 nt, Artificial Sequence
  Description of Artificial Sequence: Synthetic oligonucleotide
  Antisense Strand to SEQ ID NO: 430535
auugucacagguauacugu

SEQ ID NO: 430537 - RNA, 19 nt, Artificial Sequence
  Description of Artificial Sequence: Synthetic oligonucleotide
  Sense strand starting at position 2643 of SEQ ID NO: 316661
ggccaagagcuuuagauca

SEQ ID NO: 430538 - RNA, 19 nt, Artificial Sequence
  Description of Artificial Sequence: Synthetic oligonucleotide
  Antisense Strand to SEQ ID NO: 430537
ugaucuaaagcucuuggcc

SEQ ID NO: 430539 - RNA, 19 nt, Artificial Sequence
  Description of Artificial Sequence: Synthetic oligonucleotide
  Sense strand starting at position 2651 of SEQ ID NO: 316661
gcuuuagaucaggagugug

SEQ ID NO: 430540 - RNA, 19 nt, Artificial Sequence
  Description of Artificial Sequence: Synthetic oligonucleotide
  Antisense Strand to SEQ ID NO: 430539
cacacuccugaucuaaagc

SEQ ID NO: 430541 - RNA, 19 nt, Artificial Sequence
  Description of Artificial Sequence: Synthetic oligonucleotide
  Sense strand starting at position 2747 of SEQ ID NO: 316661
agcauaauccauggcacau

SEQ ID NO: 430542 - RNA, 19 nt, Artificial Sequence
  Description of Artificial Sequence: Synthetic oligonucleotide
  Antisense Strand to SEQ ID NO: 430541
augugccauggauuaugcu

SEQ ID NO: 430543 - RNA, 19 nt, Artificial Sequence
  Description of Artificial Sequence: Synthetic oligonucleotide
  Sense strand starting at position 2775 of SEQ ID NO: 316661
uuaaucaaggcuuguuaaa

SEQ ID NO: 430544 - RNA, 19 nt, Artificial Sequence
  Description of Artificial Sequence: Synthetic oligonucleotide
  Antisense Strand to SEQ ID NO: 430543
uuuaacaagccuugauuaa

SEQ ID NO: 430545 - RNA, 19 nt, Artificial Sequence
  Description of Artificial Sequence: Synthetic oligonucleotide
  Sense strand starting at position 2876 of SEQ ID NO: 316661
accuaauugugucuauuga

SEQ ID NO: 430546 - RNA, 19 nt, Artificial Sequence
  Description of Artificial Sequence: Synthetic oligonucleotide
  Antisense Strand to SEQ ID NO: 430545
ucaauagacacaauuaggu

SEQ ID NO: 430547 - RNA, 19 nt, Artificial Sequence
  Description of Artificial Sequence: Synthetic oligonucleotide
  Sense strand starting at position 2877 of SEQ ID NO: 316661
ccuaauugugucuauugac

SEQ ID NO: 430548 - RNA, 19 nt, Artificial Sequence
  Description of Artificial Sequence: Synthetic oligonucleotide
  Antisense Strand to SEQ ID NO: 430547
gucaauagacacaauuagg

SEQ ID NO: 430549 - RNA, 19 nt, Artificial Sequence
  Description of Artificial Sequence: Synthetic oligonucleotide
  Sense strand starting at position 2883 of SEQ ID NO: 316661
ugugucuauugacugauga

SEQ ID NO: 430550 - RNA, 19 nt, Artificial Sequence
  Description of Artificial Sequence: Synthetic oligonucleotide
  Antisense Strand to SEQ ID NO: 430549
ucaucagucaauagacaca

SEQ ID NO: 430551 - RNA, 19 nt, Artificial Sequence
  Description of Artificial Sequence: Synthetic oligonucleotide
  Sense strand starting at position 2884 of SEQ ID NO: 316661
gugucuauugacugaugaa

SEQ ID NO: 430552 - RNA, 19 nt, Artificial Sequence
  Description of Artificial Sequence: Synthetic oligonucleotide
  Antisense Strand to SEQ ID NO: 430551
uucaucagucaauagacac

SEQ ID NO: 430553 - RNA, 19 nt, Artificial Sequence
  Description of Artificial Sequence: Synthetic oligonucleotide
  Sense strand starting at position 2927 of SEQ ID NO: 316661
ggguguauacuauaaaguu

SEQ ID NO: 430554 - RNA, 19 nt, Artificial Sequence
  Description of Artificial Sequence: Synthetic oligonucleotide
  Antisense Strand to SEQ ID NO: 430553
aacuuuauaguauacaccc

SEQ ID NO: 430555 - RNA, 19 nt, Artificial Sequence
  Description of Artificial Sequence: Synthetic oligonucleotide
  Sense strand starting at position 3014 of SEQ ID NO: 316661
gauuaagguggccauacuu

SEQ ID NO: 430556 - RNA, 19 nt, Artificial Sequence
  Description of Artificial Sequence: Synthetic oligonucleotide
  Antisense Strand to SEQ ID NO: 430555
aaguauggccaccuuaauc

SEQ ID NO: 430557 - RNA, 19 nt, Artificial Sequence
  Description of Artificial Sequence: Synthetic oligonucleotide
  Sense strand starting at position 3530 of SEQ ID NO: 316661
cgagauaguguauauaaau

SEQ ID NO: 430558 - RNA, 19 nt, Artificial Sequence
  Description of Artificial Sequence: Synthetic oligonucleotide
  Antisense Strand to SEQ ID NO: 430557
auuuauauacacuaucucg

SEQ ID NO: 430559 - RNA, 19 nt, Artificial Sequence
  Description of Artificial Sequence: Synthetic oligonucleotide
  Sense strand starting at position 3560 of SEQ ID NO: 316661
uuggaaggugccuauguaa

SEQ ID NO: 430560 - RNA, 19 nt, Artificial Sequence
  Description of Artificial Sequence: Synthetic oligonucleotide
  Antisense Strand to SEQ ID NO: 430559
uuacauaggcaccuuccaa

SEQ ID NO: 430561 - RNA, 19 nt, Artificial Sequence
  Description of Artificial Sequence: Synthetic oligonucleotide
  Sense strand starting at position 3563 of SEQ ID NO: 316661
gaaggugccuauguaaaug

SEQ ID NO: 430562 - RNA, 19 nt, Artificial Sequence
  Description of Artificial Sequence: Synthetic oligonucleotide
  Antisense Strand to SEQ ID NO: 430561
cauuuacauaggcaccuuc

SEQ ID NO: 430563 - RNA, 19 nt, Artificial Sequence
  Description of Artificial Sequence: Synthetic oligonucleotide
  Sense strand starting at position 3633 of SEQ ID NO: 316661
cugaaaguguaccuuaaga

SEQ ID NO: 430564 - RNA, 19 nt, Artificial Sequence
  Description of Artificial Sequence: Synthetic oligonucleotide
  Antisense Strand to SEQ ID NO: 430563
ucuuaagguacacuuucag

SEQ ID NO: 430565 - RNA, 19 nt, Artificial Sequence
  Description of Artificial Sequence: Synthetic oligonucleotide
  Sense strand starting at position 3788 of SEQ ID NO: 316661
cgucaucaucuggagucaa

SEQ ID NO: 430566 - RNA, 19 nt, Artificial Sequence
  Description of Artificial Sequence: Synthetic oligonucleotide
  Antisense Strand to SEQ ID NO: 430565
uugacuccagaugaugacg

SEQ ID NO: 430567 - RNA, 19 nt, Artificial Sequence
  Description of Artificial Sequence: Synthetic oligonucleotide
  Sense strand starting at position 57 of SEQ ID NO: 316662
cuuauuuaguaugauagga

SEQ ID NO: 430568 - RNA, 19 nt, Artificial Sequence
  Description of Artificial Sequence: Synthetic oligonucleotide
  Antisense Strand to SEQ ID NO: 430567
uccuaucauacuaaauaag

SEQ ID NO: 430569 - RNA, 19 nt, Artificial Sequence
  Description of Artificial Sequence: Synthetic oligonucleotide
  Sense strand starting at position 59 of SEQ ID NO: 316662
uauuuaguaugauaggaug

SEQ ID NO: 430570 - RNA, 19 nt, Artificial Sequence
  Description of Artificial Sequence: Synthetic oligonucleotide
  Antisense Strand to SEQ ID NO: 430569
cauccuaucauacuaaaua

SEQ ID NO: 430571 - RNA, 19 nt, Artificial Sequence
  Description of Artificial Sequence: Synthetic oligonucleotide
  Sense strand starting at position 61 of SEQ ID NO: 316662
uuuaguaugauaggaugca

SEQ ID NO: 430572 - RNA, 19 nt, Artificial Sequence
  Description of Artificial Sequence: Synthetic oligonucleotide
  Antisense Strand to SEQ ID NO: 430571
ugcauccuaucauacuaaa

SEQ ID NO: 430573 - RNA, 19 nt, Artificial Sequence
  Description of Artificial Sequence: Synthetic oligonucleotide
  Sense strand starting at position 282 of SEQ ID NO: 316662
aggauuuccucagaacaua

SEQ ID NO: 430574 - RNA, 19 nt, Artificial Sequence
  Description of Artificial Sequence: Synthetic oligonucleotide
  Antisense Strand to SEQ ID NO: 430573
uauguucugaggaaauccu

SEQ ID NO: 430575 - RNA, 19 nt, Artificial Sequence
  Description of Artificial Sequence: Synthetic oligonucleotide
  Sense strand starting at position 496 of SEQ ID NO: 316662
ggccacuuguaauuacuaa

SEQ ID NO: 430576 - RNA, 19 nt, Artificial Sequence
  Description of Artificial Sequence: Synthetic oligonucleotide
  Antisense Strand to SEQ ID NO: 430575
uuaguaauuacaaguggcc

SEQ ID NO: 430577 - RNA, 19 nt, Artificial Sequence
  Description of Artificial Sequence: Synthetic oligonucleotide
  Sense strand starting at position 736 of SEQ ID NO: 316662
gcagaacaaccaugagacu

SEQ ID NO: 430578 - RNA, 19 nt, Artificial Sequence
  Description of Artificial Sequence: Synthetic oligonucleotide
  Antisense Strand to SEQ ID NO: 430577
agucucaugguuguucugc

SEQ ID NO: 430579 - RNA, 19 nt, Artificial Sequence
  Description of Artificial Sequence: Synthetic oligonucleotide
  Sense strand starting at position 946 of SEQ ID NO: 316662
aucucaacagucuaaguau

SEQ ID NO: 430580 - RNA, 19 nt, Artificial Sequence
  Description of Artificial Sequence: Synthetic oligonucleotide
  Antisense Strand to SEQ ID NO: 430579
auacuuagacuguugagau

SEQ ID NO: 430581 - RNA, 19 nt, Artificial Sequence
  Description of Artificial Sequence: Synthetic oligonucleotide
  Sense strand starting at position 1168 of SEQ ID NO: 316662
uggacugauuuauacucaa

SEQ ID NO: 430582 - RNA, 19 nt, Artificial Sequence
  Description of Artificial Sequence: Synthetic oligonucleotide
  Antisense Strand to SEQ ID NO: 430581
uugaguauaaaucagucca

SEQ ID NO: 430583 - RNA, 19 nt, Artificial Sequence
  Description of Artificial Sequence: Synthetic oligonucleotide
  Sense strand starting at position 1470 of SEQ ID NO: 316662
aggcuuagauauguaaaug

SEQ ID NO: 430584 - RNA, 19 nt, Artificial Sequence
  Description of Artificial Sequence: Synthetic oligonucleotide
  Antisense Strand to SEQ ID NO: 430583
cauuuacauaucuaagccu

SEQ ID NO: 430585 - RNA, 19 nt, Artificial Sequence
  Description of Artificial Sequence: Synthetic oligonucleotide
  Sense strand starting at position 1665 of SEQ ID NO: 316662
auuauagacgucuauagua

SEQ ID NO: 430586 - RNA, 19 nt, Artificial Sequence
  Description of Artificial Sequence: Synthetic oligonucleotide
  Antisense Strand to SEQ ID NO: 430585
uacuauagacgucuauaau

SEQ ID NO: 430587 - RNA, 19 nt, Artificial Sequence
  Description of Artificial Sequence: Synthetic oligonucleotide
  Sense strand starting at position 1667 of SEQ ID NO: 316662
uauagacgucuauaguaau

SEQ ID NO: 430588 - RNA, 19 nt, Artificial Sequence
  Description of Artificial Sequence: Synthetic oligonucleotide
  Antisense Strand to SEQ ID NO: 430587
auuacuauagacgucuaua

SEQ ID NO: 430589 - RNA, 19 nt, Artificial Sequence
  Description of Artificial Sequence: Synthetic oligonucleotide
  Sense strand starting at position 1674 of SEQ ID NO: 316662
gucuauaguaaucauguga

SEQ ID NO: 430590 - RNA, 19 nt, Artificial Sequence
  Description of Artificial Sequence: Synthetic oligonucleotide
  Antisense Strand to SEQ ID NO: 430589
ucacaugauuacuauagac

SEQ ID NO: 430591 - RNA, 19 nt, Artificial Sequence
  Description of Artificial Sequence: Synthetic oligonucleotide
  Sense strand starting at position 1688 of SEQ ID NO: 316662
ugugaaccagucugaaaca

SEQ ID NO: 430592 - RNA, 19 nt, Artificial Sequence
  Description of Artificial Sequence: Synthetic oligonucleotide
  Antisense Strand to SEQ ID NO: 430591
uguuucagacugguucaca

SEQ ID NO: 430593 - RNA, 19 nt, Artificial Sequence
  Description of Artificial Sequence: Synthetic oligonucleotide
  Sense strand starting at position 1861 of SEQ ID NO: 316662
ucaagaaugucuucuagaa

SEQ ID NO: 430594 - RNA, 19 nt, Artificial Sequence
  Description of Artificial Sequence: Synthetic oligonucleotide
  Antisense Strand to SEQ ID NO: 430593
uucuagaagacauucuuga

SEQ ID NO: 430595 - RNA, 19 nt, Artificial Sequence
  Description of Artificial Sequence: Synthetic oligonucleotide
  Sense strand starting at position 1940 of SEQ ID NO: 316662
cugcacuaugauuagauca

SEQ ID NO: 430596 - RNA, 19 nt, Artificial Sequence
  Description of Artificial Sequence: Synthetic oligonucleotide
  Antisense Strand to SEQ ID NO: 430595
ugaucuaaucauagugcag

SEQ ID NO: 430597 - RNA, 19 nt, Artificial Sequence
  Description of Artificial Sequence: Synthetic oligonucleotide
  Sense strand starting at position 2073 of SEQ ID NO: 316662
ggugacucacuguguauuu

SEQ ID NO: 430598 - RNA, 19 nt, Artificial Sequence
  Description of Artificial Sequence: Synthetic oligonucleotide
  Antisense Strand to SEQ ID NO: 430597
aaauacacagugagucacc

SEQ ID NO: 430599 - RNA, 19 nt, Artificial Sequence
  Description of Artificial Sequence: Synthetic oligonucleotide
  Sense strand starting at position 2245 of SEQ ID NO: 316662
ggcuuccugguugaacaaa

SEQ ID NO: 430600 - RNA, 19 nt, Artificial Sequence
  Description of Artificial Sequence: Synthetic oligonucleotide
  Antisense Strand to SEQ ID NO: 430599
uuuguucaaccaggaagcc

SEQ ID NO: 430601 - RNA, 19 nt, Artificial Sequence
  Description of Artificial Sequence: Synthetic oligonucleotide
  Sense strand starting at position 2283 of SEQ ID NO: 316662
gcagcaauuuauccuuagu

SEQ ID NO: 430602 - RNA, 19 nt, Artificial Sequence
  Description of Artificial Sequence: Synthetic oligonucleotide
  Antisense Strand to SEQ ID NO: 430601
acuaaggauaaauugcugc

SEQ ID NO: 430603 - RNA, 19 nt, Artificial Sequence
  Description of Artificial Sequence: Synthetic oligonucleotide
  Sense strand starting at position 2324 of SEQ ID NO: 316662
gguuguauuaaagacgcaa

SEQ ID NO: 430604 - RNA, 19 nt, Artificial Sequence
  Description of Artificial Sequence: Synthetic oligonucleotide
  Antisense Strand to SEQ ID NO: 430603
uugcgucuuuaauacaacc

SEQ ID NO: 430605 - RNA, 19 nt, Artificial Sequence
  Description of Artificial Sequence: Synthetic oligonucleotide
  Sense strand starting at position 2505 of SEQ ID NO: 316662
uuaugagaaccagguuaac

SEQ ID NO: 430606 - RNA, 19 nt, Artificial Sequence
  Description of Artificial Sequence: Synthetic oligonucleotide
  Antisense Strand to SEQ ID NO: 430605
guuaaccugguucucauaa

SEQ ID NO: 430607 - RNA, 19 nt, Artificial Sequence
  Description of Artificial Sequence: Synthetic oligonucleotide
  Sense strand starting at position 2545 of SEQ ID NO: 316662
ugaagcaagcuauaauauu

SEQ ID NO: 430608 - RNA, 19 nt, Artificial Sequence
  Description of Artificial Sequence: Synthetic oligonucleotide
  Antisense Strand to SEQ ID NO: 430607
aauauuauagcuugcuuca

SEQ ID NO: 430609 - RNA, 19 nt, Artificial Sequence
  Description of Artificial Sequence: Synthetic oligonucleotide
  Sense strand starting at position 2709 of SEQ ID NO: 316662
aaauaaagugagugaguga

SEQ ID NO: 430610 - RNA, 19 nt, Artificial Sequence
  Description of Artificial Sequence: Synthetic oligonucleotide
  Antisense Strand to SEQ ID NO: 430609
ucacucacucacuuuauuu

SEQ ID NO: 430611 - RNA, 19 nt, Artificial Sequence
  Description of Artificial Sequence: Synthetic oligonucleotide
  Sense strand starting at position 2785 of SEQ ID NO: 316662
cuuguuagauugucaaauu

SEQ ID NO: 430612 - RNA, 19 nt, Artificial Sequence
  Description of Artificial Sequence: Synthetic oligonucleotide
  Antisense Strand to SEQ ID NO: 430611
aauuugacaaucuaacaag

SEQ ID NO: 430613 - RNA, 19 nt, Artificial Sequence
  Description of Artificial Sequence: Synthetic oligonucleotide
  Sense strand starting at position 2923 of SEQ ID NO: 316662
aggccaggaguucgaucaa

SEQ ID NO: 430614 - RNA, 19 nt, Artificial Sequence
  Description of Artificial Sequence: Synthetic oligonucleotide
  Antisense Strand to SEQ ID NO: 430613
uugaucgaacuccuggccu

SEQ ID NO: 430615 - RNA, 19 nt, Artificial Sequence
  Description of Artificial Sequence: Synthetic oligonucleotide
  Sense strand starting at position 3176 of SEQ ID NO: 316662
ugugaugaugugcaugaca

SEQ ID NO: 430616 - RNA, 19 nt, Artificial Sequence
  Description of Artificial Sequence: Synthetic oligonucleotide
  Antisense Strand to SEQ ID NO: 430615
ugucaugcacaucaucaca

SEQ ID NO: 430617 - RNA, 19 nt, Artificial Sequence
  Description of Artificial Sequence: Synthetic oligonucleotide
  Sense strand starting at position 3201 of SEQ ID NO: 316662
guacuaucuccucaaagug

SEQ ID NO: 430618 - RNA, 19 nt, Artificial Sequence
  Description of Artificial Sequence: Synthetic oligonucleotide
  Antisense Strand to SEQ ID NO: 430617
cacuuugaggagauaguac

SEQ ID NO: 430619 - RNA, 19 nt, Artificial Sequence
  Description of Artificial Sequence: Synthetic oligonucleotide
  Sense strand starting at position 3307 of SEQ ID NO: 316662
aucagaaacugcucuaggu

SEQ ID NO: 430620 - RNA, 19 nt, Artificial Sequence
  Description of Artificial Sequence: Synthetic oligonucleotide
  Antisense Strand to SEQ ID NO: 430619
accuagagcaguuucugau

SEQ ID NO: 430621 - RNA, 19 nt, Artificial Sequence
  Description of Artificial Sequence: Synthetic oligonucleotide
  Sense strand starting at position 3325 of SEQ ID NO: 316662
ugcagucaacuagacagau

SEQ ID NO: 430622 - RNA, 19 nt, Artificial Sequence
  Description of Artificial Sequence: Synthetic oligonucleotide
  Antisense Strand to SEQ ID NO: 430621
aucugucuaguugacugca

SEQ ID NO: 430623 - RNA, 19 nt, Artificial Sequence
  Description of Artificial Sequence: Synthetic oligonucleotide
  Sense strand starting at position 3337 of SEQ ID NO: 316662
gacagauuaugguuucuua

SEQ ID NO: 430624 - RNA, 19 nt, Artificial Sequence
  Description of Artificial Sequence: Synthetic oligonucleotide
  Antisense Strand to SEQ ID NO: 430623
uaagaaaccauaaucuguc

SEQ ID NO: 430625 - RNA, 19 nt, Artificial Sequence
  Description of Artificial Sequence: Synthetic oligonucleotide
  Sense strand starting at position 3340 of SEQ ID NO: 316662
agauuaugguuucuuaaca

SEQ ID NO: 430626 - RNA, 19 nt, Artificial Sequence
  Description of Artificial Sequence: Synthetic oligonucleotide
  Antisense Strand to SEQ ID NO: 430625
uguuaagaaaccauaaucu

SEQ ID NO: 430627 - RNA, 19 nt, Artificial Sequence
  Description of Artificial Sequence: Synthetic oligonucleotide
  Sense strand starting at position 3341 of SEQ ID NO: 316662
gauuaugguuucuuaacag

SEQ ID NO: 430628 - RNA, 19 nt, Artificial Sequence
  Description of Artificial Sequence: Synthetic oligonucleotide
  Antisense Strand to SEQ ID NO: 430627
cuguuaagaaaccauaauc

SEQ ID NO: 430629 - RNA, 19 nt, Artificial Sequence
  Description of Artificial Sequence: Synthetic oligonucleotide
  Sense strand starting at position 3428 of SEQ ID NO: 316662
ugugucaagcaauauauga

SEQ ID NO: 430630 - RNA, 19 nt, Artificial Sequence
  Description of Artificial Sequence: Synthetic oligonucleotide
  Antisense Strand to SEQ ID NO: 430629
ucauauauugcuugacaca

SEQ ID NO: 430631 - RNA, 19 nt, Artificial Sequence
  Description of Artificial Sequence: Synthetic oligonucleotide
  Sense strand starting at position 3673 of SEQ ID NO: 316662
agcuaauuaaguugaagag

SEQ ID NO: 430632 - RNA, 19 nt, Artificial Sequence
  Description of Artificial Sequence: Synthetic oligonucleotide
  Antisense Strand to SEQ ID NO: 430631
cucuucaacuuaauuagcu

SEQ ID NO: 430633 - RNA, 19 nt, Artificial Sequence
  Description of Artificial Sequence: Synthetic oligonucleotide
  Sense strand starting at position 3674 of SEQ ID NO: 316662
gcuaauuaaguugaagagu

SEQ ID NO: 430634 - RNA, 19 nt, Artificial Sequence
  Description of Artificial Sequence: Synthetic oligonucleotide
  Antisense Strand to SEQ ID NO: 430633
acucuucaacuuaauuagc

SEQ ID NO: 430635 - RNA, 19 nt, Artificial Sequence
  Description of Artificial Sequence: Synthetic oligonucleotide
  Sense strand starting at position 3688 of SEQ ID NO: 316662
agaguugagaucugaauuc

SEQ ID NO: 430636 - RNA, 19 nt, Artificial Sequence
  Description of Artificial Sequence: Synthetic oligonucleotide
  Antisense Strand to SEQ ID NO: 430635
gaauucagaucucaacucu

SEQ ID NO: 430637 - RNA, 19 nt, Artificial Sequence
  Description of Artificial Sequence: Synthetic oligonucleotide
  Sense strand starting at position 3725 of SEQ ID NO: 316662
uggaguccauauccagaau

SEQ ID NO: 430638 - RNA, 19 nt, Artificial Sequence
  Description of Artificial Sequence: Synthetic oligonucleotide
  Antisense Strand to SEQ ID NO: 430637
auucuggauauggacucca

SEQ ID NO: 430639 - RNA, 19 nt, Artificial Sequence
  Description of Artificial Sequence: Synthetic oligonucleotide
  Sense strand starting at position 3815 of SEQ ID NO: 316662
caguuauaugcagagucaa

SEQ ID NO: 430640 - RNA, 19 nt, Artificial Sequence
  Description of Artificial Sequence: Synthetic oligonucleotide
  Antisense Strand to SEQ ID NO: 430639
uugacucugcauauaacug

SEQ ID NO: 430641 - RNA, 19 nt, Artificial Sequence
  Description of Artificial Sequence: Synthetic oligonucleotide
  Sense strand starting at position 3847 of SEQ ID NO: 316662
uccagaacugauugcaaag

SEQ ID NO: 430642 - RNA, 19 nt, Artificial Sequence
  Description of Artificial Sequence: Synthetic oligonucleotide
  Antisense Strand to SEQ ID NO: 430641
cuuugcaaucaguucugga

SEQ ID NO: 430643 - RNA, 19 nt, Artificial Sequence
  Description of Artificial Sequence: Synthetic oligonucleotide
  Sense strand starting at position 3939 of SEQ ID NO: 316662
auggguaugccuggcauuu

SEQ ID NO: 430644 - RNA, 19 nt, Artificial Sequence
  Description of Artificial Sequence: Synthetic oligonucleotide
  Antisense Strand to SEQ ID NO: 430643
aaaugccaggcauacccau

SEQ ID NO: 430645 - RNA, 19 nt, Artificial Sequence
  Description of Artificial Sequence: Synthetic oligonucleotide
  Sense strand starting at position 3952 of SEQ ID NO: 316662
gcauuuaaaggcugcucaa

SEQ ID NO: 430646 - RNA, 19 nt, Artificial Sequence
  Description of Artificial Sequence: Synthetic oligonucleotide
  Antisense Strand to SEQ ID NO: 430645
uugagcagccuuuaaaugc

SEQ ID NO: 430647 - RNA, 19 nt, Artificial Sequence
  Description of Artificial Sequence: Synthetic oligonucleotide
  Sense strand starting at position 147 of SEQ ID NO: 316663
aagagaaucuggucuucua

SEQ ID NO: 430648 - RNA, 19 nt, Artificial Sequence
  Description of Artificial Sequence: Synthetic oligonucleotide
  Antisense Strand to SEQ ID NO: 430647
uagaagaccagauucucuu

SEQ ID NO: 430649 - RNA, 19 nt, Artificial Sequence
  Description of Artificial Sequence: Synthetic oligonucleotide
  Sense strand starting at position 150 of SEQ ID NO: 316663
agaaucuggucuucuacaa

SEQ ID NO: 430650 - RNA, 19 nt, Artificial Sequence
  Description of Artificial Sequence: Synthetic oligonucleotide
  Antisense Strand to SEQ ID NO: 430649
uuguagaagaccagauucu

SEQ ID NO: 430651 - RNA, 19 nt, Artificial Sequence
  Description of Artificial Sequence: Synthetic oligonucleotide
  Sense strand starting at position 268 of SEQ ID NO: 316663
aaguuccauguuuguggaa

SEQ ID NO: 430652 - RNA, 19 nt, Artificial Sequence
  Description of Artificial Sequence: Synthetic oligonucleotide
  Antisense Strand to SEQ ID NO: 430651
uuccacaaacauggaacuu

SEQ ID NO: 430653 - RNA, 19 nt, Artificial Sequence
  Description of Artificial Sequence: Synthetic oligonucleotide
  Sense strand starting at position 530 of SEQ ID NO: 316663
ggcuucugugaggaauaag

SEQ ID NO: 430654 - RNA, 19 nt, Artificial Sequence
  Description of Artificial Sequence: Synthetic oligonucleotide
  Antisense Strand to SEQ ID NO: 430653
cuuauuccucacagaagcc

SEQ ID NO: 430655 - RNA, 19 nt, Artificial Sequence
  Description of Artificial Sequence: Synthetic oligonucleotide
  Sense strand starting at position 736 of SEQ ID NO: 316663
gaaacauucgaaggcaugu

SEQ ID NO: 430656 - RNA, 19 nt, Artificial Sequence
  Description of Artificial Sequence: Synthetic oligonucleotide
  Antisense Strand to SEQ ID NO: 430655
acaugccuucgaauguuuc

SEQ ID NO: 430657 - RNA, 19 nt, Artificial Sequence
  Description of Artificial Sequence: Synthetic oligonucleotide
  Sense strand starting at position 742 of SEQ ID NO: 316663
uucgaaggcauguauguau

SEQ ID NO: 430658 - RNA, 19 nt, Artificial Sequence
  Description of Artificial Sequence: Synthetic oligonucleotide
  Antisense Strand to SEQ ID NO: 430657
auacauacaugccuucgaa

SEQ ID NO: 430659 - RNA, 19 nt, Artificial Sequence
  Description of Artificial Sequence: Synthetic oligonucleotide
  Sense strand starting at position 763 of SEQ ID NO: 316663
acguguaaggaucaaauau

SEQ ID NO: 430660 - RNA, 19 nt, Artificial Sequence
  Description of Artificial Sequence: Synthetic oligonucleotide
  Antisense Strand to SEQ ID NO: 430659
auauuugauccuuacacgu

SEQ ID NO: 430661 - RNA, 19 nt, Artificial Sequence
  Description of Artificial Sequence: Synthetic oligonucleotide
  Sense strand starting at position 1237 of SEQ ID NO: 316663
ugagccaucccaugauaac

SEQ ID NO: 430662 - RNA, 19 nt, Artificial Sequence
  Description of Artificial Sequence: Synthetic oligonucleotide
  Antisense Strand to SEQ ID NO: 430661
guuaucaugggauggcuca

SEQ ID NO: 430663 - RNA, 19 nt, Artificial Sequence
  Description of Artificial Sequence: Synthetic oligonucleotide
  Sense strand starting at position 2344 of SEQ ID NO: 316663
ccuggcuugugauuagaac

SEQ ID NO: 430664 - RNA, 19 nt, Artificial Sequence
  Description of Artificial Sequence: Synthetic oligonucleotide
  Antisense Strand to SEQ ID NO: 430663
guucuaaucacaagccagg

SEQ ID NO: 430665 - RNA, 19 nt, Artificial Sequence
  Description of Artificial Sequence: Synthetic oligonucleotide
  Sense strand starting at position 2431 of SEQ ID NO: 316663
aggcgaaagugagauuuca

SEQ ID NO: 430666 - RNA, 19 nt, Artificial Sequence
  Description of Artificial Sequence: Synthetic oligonucleotide
  Antisense Strand to SEQ ID NO: 430665
ugaaaucucacuuucgccu

SEQ ID NO: 430667 - RNA, 19 nt, Artificial Sequence
  Description of Artificial Sequence: Synthetic oligonucleotide
  Sense strand starting at position 2669 of SEQ ID NO: 316663
gagauagagcuuuggauca

SEQ ID NO: 430668 - RNA, 19 nt, Artificial Sequence
  Description of Artificial Sequence: Synthetic oligonucleotide
  Antisense Strand to SEQ ID NO: 430667
ugauccaaagcucuaucuc

SEQ ID NO: 430669 - RNA, 19 nt, Artificial Sequence
  Description of Artificial Sequence: Synthetic oligonucleotide
  Sense strand starting at position 2688 of SEQ ID NO: 316663
ugagagauggcgucguguu

SEQ ID NO: 430670 - RNA, 19 nt, Artificial Sequence
  Description of Artificial Sequence: Synthetic oligonucleotide
  Antisense Strand to SEQ ID NO: 430669
aacacgacgccaucucuca

SEQ ID NO: 430671 - RNA, 19 nt, Artificial Sequence
  Description of Artificial Sequence: Synthetic oligonucleotide
  Sense strand starting at position 2717 of SEQ ID NO: 316663
ccuucuuuaccugaguuua

SEQ ID NO: 430672 - RNA, 19 nt, Artificial Sequence
  Description of Artificial Sequence: Synthetic oligonucleotide
  Antisense Strand to SEQ ID NO: 430671
uaaacucagguaaagaagg

SEQ ID NO: 430673 - RNA, 19 nt, Artificial Sequence
  Description of Artificial Sequence: Synthetic oligonucleotide
  Sense strand starting at position 2719 of SEQ ID NO: 316663
uucuuuaccugaguuuaag

SEQ ID NO: 430674 - RNA, 19 nt, Artificial Sequence
  Description of Artificial Sequence: Synthetic oligonucleotide
  Antisense Strand to SEQ ID NO: 430673
cuuaaacucagguaaagaa

SEQ ID NO: 430675 - RNA, 19 nt, Artificial Sequence
  Description of Artificial Sequence: Synthetic oligonucleotide
  Sense strand starting at position 2753 of SEQ ID NO: 316663
uccucuaccugaguuuaca

SEQ ID NO: 430676 - RNA, 19 nt, Artificial Sequence
  Description of Artificial Sequence: Synthetic oligonucleotide
  Antisense Strand to SEQ ID NO: 430675
uguaaacucagguagagga

SEQ ID NO: 430677 - RNA, 19 nt, Artificial Sequence
  Description of Artificial Sequence: Synthetic oligonucleotide
  Sense strand starting at position 2790 of SEQ ID NO: 316663
agucgauuaggagaugucu

SEQ ID NO: 430678 - RNA, 19 nt, Artificial Sequence
  Description of Artificial Sequence: Synthetic oligonucleotide
  Antisense Strand to SEQ ID NO: 430677
agacaucuccuaaucgacu

SEQ ID NO: 430679 - RNA, 19 nt, Artificial Sequence
  Description of Artificial Sequence: Synthetic oligonucleotide
  Sense strand starting at position 2792 of SEQ ID NO: 316663
ucgauuaggagaugucuaa

SEQ ID NO: 430680 - RNA, 19 nt, Artificial Sequence
  Description of Artificial Sequence: Synthetic oligonucleotide
  Antisense Strand to SEQ ID NO: 430679
uuagacaucuccuaaucga

SEQ ID NO: 430681 - RNA, 19 nt, Artificial Sequence
  Description of Artificial Sequence: Synthetic oligonucleotide
  Sense strand starting at position 2874 of SEQ ID NO: 316663
ccagacuuuguagacgauu

SEQ ID NO: 430682 - RNA, 19 nt, Artificial Sequence
  Description of Artificial Sequence: Synthetic oligonucleotide
  Antisense Strand to SEQ ID NO: 430681
aaucgucuacaaagucugg

SEQ ID NO: 430683 - RNA, 19 nt, Artificial Sequence
  Description of Artificial Sequence: Synthetic oligonucleotide
  Sense strand starting at position 2950 of SEQ ID NO: 316663
cauaaauagugauuguugu

SEQ ID NO: 430684 - RNA, 19 nt, Artificial Sequence
  Description of Artificial Sequence: Synthetic oligonucleotide
  Antisense Strand to SEQ ID NO: 430683
acaacaaucacuauuuaug

SEQ ID NO: 430685 - RNA, 19 nt, Artificial Sequence
  Description of Artificial Sequence: Synthetic oligonucleotide
  Sense strand starting at position 2960 of SEQ ID NO: 316663
gauuguugucuguauacuu

SEQ ID NO: 430686 - RNA, 19 nt, Artificial Sequence
  Description of Artificial Sequence: Synthetic oligonucleotide
  Antisense Strand to SEQ ID NO: 430685
aaguauacagacaacaauc

SEQ ID NO: 430687 - RNA, 19 nt, Artificial Sequence
  Description of Artificial Sequence: Synthetic oligonucleotide
  Sense strand starting at position 2969 of SEQ ID NO: 316663
cuguauacuucucucggaa

SEQ ID NO: 430688 - RNA, 19 nt, Artificial Sequence
  Description of Artificial Sequence: Synthetic oligonucleotide
  Antisense Strand to SEQ ID NO: 430687
uuccgagagaaguauacag

SEQ ID NO: 430689 - RNA, 19 nt, Artificial Sequence
  Description of Artificial Sequence: Synthetic oligonucleotide
  Sense strand starting at position 2972 of SEQ ID NO: 316663
uauacuucucucggaagga

SEQ ID NO: 430690 - RNA, 19 nt, Artificial Sequence
  Description of Artificial Sequence: Synthetic oligonucleotide
  Antisense Strand to SEQ ID NO: 430689
uccuuccgagagaaguaua

SEQ ID NO: 430691 - RNA, 19 nt, Artificial Sequence
  Description of Artificial Sequence: Synthetic oligonucleotide
  Sense strand starting at position 2999 of SEQ ID NO: 316663
augggaguuguggguucau

SEQ ID NO: 430692 - RNA, 19 nt, Artificial Sequence
  Description of Artificial Sequence: Synthetic oligonucleotide
  Antisense Strand to SEQ ID NO: 430691
augaacccacaacucccau

SEQ ID NO: 430693 - RNA, 19 nt, Artificial Sequence
  Description of Artificial Sequence: Synthetic oligonucleotide
  Sense strand starting at position 3083 of SEQ ID NO: 316663
aucccuuucuggucuagua

SEQ ID NO: 430694 - RNA, 19 nt, Artificial Sequence
  Description of Artificial Sequence: Synthetic oligonucleotide
  Antisense Strand to SEQ ID NO: 430693
uacuagaccagaaagggau

SEQ ID NO: 430695 - RNA, 19 nt, Artificial Sequence
  Description of Artificial Sequence: Synthetic oligonucleotide
  Sense strand starting at position 3090 of SEQ ID NO: 316663
ucuggucuaguaggaguau

SEQ ID NO: 430696 - RNA, 19 nt, Artificial Sequence
  Description of Artificial Sequence: Synthetic oligonucleotide
  Antisense Strand to SEQ ID NO: 430695
auacuccuacuagaccaga

SEQ ID NO: 430697 - RNA, 19 nt, Artificial Sequence
  Description of Artificial Sequence: Synthetic oligonucleotide
  Sense strand starting at position 3104 of SEQ ID NO: 316663
aguauaguggcauacggaa

SEQ ID NO: 430698 - RNA, 19 nt, Artificial Sequence
  Description of Artificial Sequence: Synthetic oligonucleotide
  Antisense Strand to SEQ ID NO: 430697
uuccguaugccacuauacu

SEQ ID NO: 430699 - RNA, 19 nt, Artificial Sequence
  Description of Artificial Sequence: Synthetic oligonucleotide
  Sense strand starting at position 3145 of SEQ ID NO: 316663
gauguacuggcacaagauu

SEQ ID NO: 430700 - RNA, 19 nt, Artificial Sequence
  Description of Artificial Sequence: Synthetic oligonucleotide
  Antisense Strand to SEQ ID NO: 430699
aaucuugugccaguacauc

SEQ ID NO: 430701 - RNA, 19 nt, Artificial Sequence
  Description of Artificial Sequence: Synthetic oligonucleotide
  Sense strand starting at position 3166 of SEQ ID NO: 316663
aaguaugucucagcugaca

SEQ ID NO: 430702 - RNA, 19 nt, Artificial Sequence
  Description of Artificial Sequence: Synthetic oligonucleotide
  Antisense Strand to SEQ ID NO: 430701
ugucagcugagacauacuu

SEQ ID NO: 430703 - RNA, 19 nt, Artificial Sequence
  Description of Artificial Sequence: Synthetic oligonucleotide
  Sense strand starting at position 3213 of SEQ ID NO: 316663
agcugaauaugccuggauu

SEQ ID NO: 430704 - RNA, 19 nt, Artificial Sequence
  Description of Artificial Sequence: Synthetic oligonucleotide
  Antisense Strand to SEQ ID NO: 430703
aauccaggcauauucagcu

SEQ ID NO: 430705 - RNA, 19 nt, Artificial Sequence
  Description of Artificial Sequence: Synthetic oligonucleotide
  Sense strand starting at position 3260 of SEQ ID NO: 316663
uuagcauuggcauaccaua

SEQ ID NO: 430706 - RNA, 19 nt, Artificial Sequence
  Description of Artificial Sequence: Synthetic oligonucleotide
  Antisense Strand to SEQ ID NO: 430705
uaugguaugccaaugcuaa

SEQ ID NO: 430707 - RNA, 19 nt, Artificial Sequence
  Description of Artificial Sequence: Synthetic oligonucleotide
  Sense strand starting at position 3276 of SEQ ID NO: 316663
auaugaaaugugggcaguu

SEQ ID NO: 430708 - RNA, 19 nt, Artificial Sequence
  Description of Artificial Sequence: Synthetic oligonucleotide
  Antisense Strand to SEQ ID NO: 430707
aacugcccacauuucauau

SEQ ID NO: 430709 - RNA, 19 nt, Artificial Sequence
  Description of Artificial Sequence: Synthetic oligonucleotide
  Sense strand starting at position 3295 of SEQ ID NO: 316663
gccaguacucuacagagua

SEQ ID NO: 430710 - RNA, 19 nt, Artificial Sequence
  Description of Artificial Sequence: Synthetic oligonucleotide
  Antisense Strand to SEQ ID NO: 430709
uacucuguagaguacuggc

SEQ ID NO: 430711 - RNA, 19 nt, Artificial Sequence
  Description of Artificial Sequence: Synthetic oligonucleotide
  Sense strand starting at position 3377 of SEQ ID NO: 316663
gugcgcauaauuuguggaa

SEQ ID NO: 430712 - RNA, 19 nt, Artificial Sequence
  Description of Artificial Sequence: Synthetic oligonucleotide
  Antisense Strand to SEQ ID NO: 430711
uuccacaaauuaugcgcac

SEQ ID NO: 430713 - RNA, 19 nt, Artificial Sequence
  Description of Artificial Sequence: Synthetic oligonucleotide
  Sense strand starting at position 3378 of SEQ ID NO: 316663
ugcgcauaauuuguggaau

SEQ ID NO: 430714 - RNA, 19 nt, Artificial Sequence
  Description of Artificial Sequence: Synthetic oligonucleotide
  Antisense Strand to SEQ ID NO: 430713
auuccacaaauuaugcgca

SEQ ID NO: 430715 - RNA, 19 nt, Artificial Sequence
  Description of Artificial Sequence: Synthetic oligonucleotide
  Sense strand starting at position 3417 of SEQ ID NO: 316663
ggcuuuacaguguaauaag

SEQ ID NO: 430716 - RNA, 19 nt, Artificial Sequence
  Description of Artificial Sequence: Synthetic oligonucleotide
  Antisense Strand to SEQ ID NO: 430715
cuuauuacacuguaaagcc

SEQ ID NO: 430717 - RNA, 19 nt, Artificial Sequence
  Description of Artificial Sequence: Synthetic oligonucleotide
  Sense strand starting at position 3461 of SEQ ID NO: 316663
ugguaaccaucugccuauu

SEQ ID NO: 430718 - RNA, 19 nt, Artificial Sequence
  Description of Artificial Sequence: Synthetic oligonucleotide
  Antisense Strand to SEQ ID NO: 430717
aauaggcagaugguuacca

SEQ ID NO: 430719 - RNA, 19 nt, Artificial Sequence
  Description of Artificial Sequence: Synthetic oligonucleotide
  Sense strand starting at position 3499 of SEQ ID NO: 316663
ugaguuccaguguagaaca

SEQ ID NO: 430720 - RNA, 19 nt, Artificial Sequence
  Description of Artificial Sequence: Synthetic oligonucleotide
  Antisense Strand to SEQ ID NO: 430719
uguucuacacuggaacuca

SEQ ID NO: 430721 - RNA, 19 nt, Artificial Sequence
  Description of Artificial Sequence: Synthetic oligonucleotide
  Sense strand starting at position 3529 of SEQ ID NO: 316663
uguguaucucaccacuacu

SEQ ID NO: 430722 - RNA, 19 nt, Artificial Sequence
  Description of Artificial Sequence: Synthetic oligonucleotide
  Antisense Strand to SEQ ID NO: 430721
aguaguggugagauacaca

SEQ ID NO: 430723 - RNA, 19 nt, Artificial Sequence
  Description of Artificial Sequence: Synthetic oligonucleotide
  Sense strand starting at position 3532 of SEQ ID NO: 316663
guaucucaccacuacugau

SEQ ID NO: 430724 - RNA, 19 nt, Artificial Sequence
  Description of Artificial Sequence: Synthetic oligonucleotide
  Antisense Strand to SEQ ID NO: 430723
aucaguaguggugagauac

SEQ ID NO: 430725 - RNA, 19 nt, Artificial Sequence
  Description of Artificial Sequence: Synthetic oligonucleotide
  Sense strand starting at position 3706 of SEQ ID NO: 316663
cuagaaauuuccugagauu

SEQ ID NO: 430726 - RNA, 19 nt, Artificial Sequence
  Description of Artificial Sequence: Synthetic oligonucleotide
  Antisense Strand to SEQ ID NO: 430725
aaucucaggaaauuucuag

SEQ ID NO: 430727 - RNA, 19 nt, Artificial Sequence
  Description of Artificial Sequence: Synthetic oligonucleotide
  Sense strand starting at position 64 of SEQ ID NO: 316664
uacugauaaucguuugcaa

SEQ ID NO: 430728 - RNA, 19 nt, Artificial Sequence
  Description of Artificial Sequence: Synthetic oligonucleotide
  Antisense Strand to SEQ ID NO: 430727
uugcaaacgauuaucagua

SEQ ID NO: 430729 - RNA, 19 nt, Artificial Sequence
  Description of Artificial Sequence: Synthetic oligonucleotide
  Sense strand starting at position 224 of SEQ ID NO: 316664
augggcuaauuugaaacau

SEQ ID NO: 430730 - RNA, 19 nt, Artificial Sequence
  Description of Artificial Sequence: Synthetic oligonucleotide
  Antisense Strand to SEQ ID NO: 430729
auguuucaaauuagcccau

SEQ ID NO: 430731 - RNA, 19 nt, Artificial Sequence
  Description of Artificial Sequence: Synthetic oligonucleotide
  Sense strand starting at position 856 of SEQ ID NO: 316664
aggaaauuagaaugcuugu

SEQ ID NO: 430732 - RNA, 19 nt, Artificial Sequence
  Description of Artificial Sequence: Synthetic oligonucleotide
  Antisense Strand to SEQ ID NO: 430731
acaagcauucuaauuuccu

SEQ ID NO: 430733 - RNA, 19 nt, Artificial Sequence
  Description of Artificial Sequence: Synthetic oligonucleotide
  Sense strand starting at position 859 of SEQ ID NO: 316664
aaauuagaaugcuugugga

SEQ ID NO: 430734 - RNA, 19 nt, Artificial Sequence
  Description of Artificial Sequence: Synthetic oligonucleotide
  Antisense Strand to SEQ ID NO: 430733
uccacaagcauucuaauuu

SEQ ID NO: 430735 - RNA, 19 nt, Artificial Sequence
  Description of Artificial Sequence: Synthetic oligonucleotide
  Sense strand starting at position 983 of SEQ ID NO: 316664
gccacuuaaggcuagagua

SEQ ID NO: 430736 - RNA, 19 nt, Artificial Sequence
  Description of Artificial Sequence: Synthetic oligonucleotide
  Antisense Strand to SEQ ID NO: 430735
uacucuagccuuaaguggc

SEQ ID NO: 430737 - RNA, 19 nt, Artificial Sequence
  Description of Artificial Sequence: Synthetic oligonucleotide
  Sense strand starting at position 985 of SEQ ID NO: 316664
cacuuaaggcuagaguauu

SEQ ID NO: 430738 - RNA, 19 nt, Artificial Sequence
  Description of Artificial Sequence: Synthetic oligonucleotide
  Antisense Strand to SEQ ID NO: 430737
aauacucuagccuuaagug

SEQ ID NO: 430739 - RNA, 19 nt, Artificial Sequence
  Description of Artificial Sequence: Synthetic oligonucleotide
  Sense strand starting at position 1006 of SEQ ID NO: 316664
aaauguggcuagucugauu

SEQ ID NO: 430740 - RNA, 19 nt, Artificial Sequence
  Description of Artificial Sequence: Synthetic oligonucleotide
  Antisense Strand to SEQ ID NO: 430739
aaucagacuagccacauuu

SEQ ID NO: 430741 - RNA, 19 nt, Artificial Sequence
  Description of Artificial Sequence: Synthetic oligonucleotide
  Sense strand starting at position 1084 of SEQ ID NO: 316664
aucagcaauugcuuugauu

SEQ ID NO: 430742 - RNA, 19 nt, Artificial Sequence
  Description of Artificial Sequence: Synthetic oligonucleotide
  Antisense Strand to SEQ ID NO: 430741
aaucaaagcaauugcugau

SEQ ID NO: 430743 - RNA, 19 nt, Artificial Sequence
  Description of Artificial Sequence: Synthetic oligonucleotide
  Sense strand starting at position 1164 of SEQ ID NO: 316664
uuauuaauguggcuacuua

SEQ ID NO: 430744 - RNA, 19 nt, Artificial Sequence
  Description of Artificial Sequence: Synthetic oligonucleotide
  Antisense Strand to SEQ ID NO: 430743
uaaguagccacauuaauaa

SEQ ID NO: 430745 - RNA, 19 nt, Artificial Sequence
  Description of Artificial Sequence: Synthetic oligonucleotide
  Sense strand starting at position 1307 of SEQ ID NO: 316664
acucuuggcgucugagaaa

SEQ ID NO: 430746 - RNA, 19 nt, Artificial Sequence
  Description of Artificial Sequence: Synthetic oligonucleotide
  Antisense Strand to SEQ ID NO: 430745
uuucucagacgccaagagu

SEQ ID NO: 430747 - RNA, 19 nt, Artificial Sequence
  Description of Artificial Sequence: Synthetic oligonucleotide
  Sense strand starting at position 1365 of SEQ ID NO: 316664
agcaacaguuaccuaguua

SEQ ID NO: 430748 - RNA, 19 nt, Artificial Sequence
  Description of Artificial Sequence: Synthetic oligonucleotide
  Antisense Strand to SEQ ID NO: 430747
uaacuagguaacuguugcu

SEQ ID NO: 430749 - RNA, 19 nt, Artificial Sequence
  Description of Artificial Sequence: Synthetic oligonucleotide
  Sense strand starting at position 2247 of SEQ ID NO: 316664
gcccuuuaauccuuacgga

SEQ ID NO: 430750 - RNA, 19 nt, Artificial Sequence
  Description of Artificial Sequence: Synthetic oligonucleotide
  Antisense Strand to SEQ ID NO: 430749
uccguaaggauuaaagggc

SEQ ID NO: 430751 - RNA, 19 nt, Artificial Sequence
  Description of Artificial Sequence: Synthetic oligonucleotide
  Sense strand starting at position 2775 of SEQ ID NO: 316664
agcgucuuuccagaaggau

SEQ ID NO: 430752 - RNA, 19 nt, Artificial Sequence
  Description of Artificial Sequence: Synthetic oligonucleotide
  Antisense Strand to SEQ ID NO: 430751
auccuucuggaaagacgcu

SEQ ID NO: 430753 - RNA, 19 nt, Artificial Sequence
  Description of Artificial Sequence: Synthetic oligonucleotide
  Sense strand starting at position 2784 of SEQ ID NO: 316664
ccagaaggaucugcuuaga

SEQ ID NO: 430754 - RNA, 19 nt, Artificial Sequence
  Description of Artificial Sequence: Synthetic oligonucleotide
  Antisense Strand to SEQ ID NO: 430753
ucuaagcagauccuucugg

SEQ ID NO: 430755 - RNA, 19 nt, Artificial Sequence
  Description of Artificial Sequence: Synthetic oligonucleotide
  Sense strand starting at position 2867 of SEQ ID NO: 316664
cuuugaaagcucggagaaa

SEQ ID NO: 430756 - RNA, 19 nt, Artificial Sequence
  Description of Artificial Sequence: Synthetic oligonucleotide
  Antisense Strand to SEQ ID NO: 430755
uuucuccgagcuuucaaag

SEQ ID NO: 430757 - RNA, 19 nt, Artificial Sequence
  Description of Artificial Sequence: Synthetic oligonucleotide
  Sense strand starting at position 2878 of SEQ ID NO: 316664
cggagaaauaaauacguuu

SEQ ID NO: 430758 - RNA, 19 nt, Artificial Sequence
  Description of Artificial Sequence: Synthetic oligonucleotide
  Antisense Strand to SEQ ID NO: 430757
aaacguauuuauuucuccg

SEQ ID NO: 430759 - RNA, 19 nt, Artificial Sequence
  Description of Artificial Sequence: Synthetic oligonucleotide
  Sense strand starting at position 2922 of SEQ ID NO: 316664
ucaugcuuguccucuaaag

SEQ ID NO: 430760 - RNA, 19 nt, Artificial Sequence
  Description of Artificial Sequence: Synthetic oligonucleotide
  Antisense Strand to SEQ ID NO: 430759
cuuuagaggacaagcauga

SEQ ID NO: 430761 - RNA, 19 nt, Artificial Sequence
  Description of Artificial Sequence: Synthetic oligonucleotide
  Sense strand starting at position 2924 of SEQ ID NO: 316664
augcuuguccucuaaagau

SEQ ID NO: 430762 - RNA, 19 nt, Artificial Sequence
  Description of Artificial Sequence: Synthetic oligonucleotide
  Antisense Strand to SEQ ID NO: 430761
aucuuuagaggacaagcau

SEQ ID NO: 430763 - RNA, 19 nt, Artificial Sequence
  Description of Artificial Sequence: Synthetic oligonucleotide
  Sense strand starting at position 2993 of SEQ ID NO: 316664
ugcaaucgcaaguuuaugu

SEQ ID NO: 430764 - RNA, 19 nt, Artificial Sequence
  Description of Artificial Sequence: Synthetic oligonucleotide
  Antisense Strand to SEQ ID NO: 430763
acauaaacuugcgauugca

SEQ ID NO: 430765 - RNA, 19 nt, Artificial Sequence
  Description of Artificial Sequence: Synthetic oligonucleotide
  Sense strand starting at position 3012 of SEQ ID NO: 316664
uguuauacuuaguuaccca

SEQ ID NO: 430766 - RNA, 19 nt, Artificial Sequence
  Description of Artificial Sequence: Synthetic oligonucleotide
  Antisense Strand to SEQ ID NO: 430765
uggguaacuaaguauaaca

SEQ ID NO: 430767 - RNA, 19 nt, Artificial Sequence
  Description of Artificial Sequence: Synthetic oligonucleotide
  Sense strand starting at position 3176 of SEQ ID NO: 316664
gagauacuguugucagauu

SEQ ID NO: 430768 - RNA, 19 nt, Artificial Sequence
  Description of Artificial Sequence: Synthetic oligonucleotide
  Antisense Strand to SEQ ID NO: 430767
aaucugacaacaguaucuc

SEQ ID NO: 430769 - RNA, 19 nt, Artificial Sequence
  Description of Artificial Sequence: Synthetic oligonucleotide
  Sense strand starting at position 3177 of SEQ ID NO: 316664
agauacuguugucagauuu

SEQ ID NO: 430770 - RNA, 19 nt, Artificial Sequence
  Description of Artificial Sequence: Synthetic oligonucleotide
  Antisense Strand to SEQ ID NO: 430769
aaaucugacaacaguaucu

SEQ ID NO: 430771 - RNA, 19 nt, Artificial Sequence
  Description of Artificial Sequence: Synthetic oligonucleotide
  Sense strand starting at position 3374 of SEQ ID NO: 316664
agcauauguagugggauau

SEQ ID NO: 430772 - RNA, 19 nt, Artificial Sequence
  Description of Artificial Sequence: Synthetic oligonucleotide
  Antisense Strand to SEQ ID NO: 430771
auaucccacuacauaugcu

SEQ ID NO: 430773 - RNA, 19 nt, Artificial Sequence
  Description of Artificial Sequence: Synthetic oligonucleotide
  Sense strand starting at position 3375 of SEQ ID NO: 316664
gcauauguagugggauauu

SEQ ID NO: 430774 - RNA, 19 nt, Artificial Sequence
  Description of Artificial Sequence: Synthetic oligonucleotide
  Antisense Strand to SEQ ID NO: 430773
aauaucccacuacauaugc

SEQ ID NO: 430775 - RNA, 19 nt, Artificial Sequence
  Description of Artificial Sequence: Synthetic oligonucleotide
  Sense strand starting at position 3398 of SEQ ID NO: 316664
uggugaaagugccuccaua

SEQ ID NO: 430776 - RNA, 19 nt, Artificial Sequence
  Description of Artificial Sequence: Synthetic oligonucleotide
  Antisense Strand to SEQ ID NO: 430775
uauggaggcacuuucacca

SEQ ID NO: 430777 - RNA, 19 nt, Artificial Sequence
  Description of Artificial Sequence: Synthetic oligonucleotide
  Sense strand starting at position 3484 of SEQ ID NO: 316664
ccuguuacauacguaaauu

SEQ ID NO: 430778 - RNA, 19 nt, Artificial Sequence
  Description of Artificial Sequence: Synthetic oligonucleotide
  Antisense Strand to SEQ ID NO: 430777
aauuuacguauguaacagg

SEQ ID NO: 430779 - RNA, 19 nt, Artificial Sequence
  Description of Artificial Sequence: Synthetic oligonucleotide
  Sense strand starting at position 3600 of SEQ ID NO: 316664
guaucucagcuggauaucu

SEQ ID NO: 430780 - RNA, 19 nt, Artificial Sequence
  Description of Artificial Sequence: Synthetic oligonucleotide
  Antisense Strand to SEQ ID NO: 430779
agauauccagcugagauac

SEQ ID NO: 430781 - RNA, 19 nt, Artificial Sequence
  Description of Artificial Sequence: Synthetic oligonucleotide
  Sense strand starting at position 3609 of SEQ ID NO: 316664
cuggauaucugacuugacu

SEQ ID NO: 430782 - RNA, 19 nt, Artificial Sequence
  Description of Artificial Sequence: Synthetic oligonucleotide
  Antisense Strand to SEQ ID NO: 430781
agucaagucagauauccag

SEQ ID NO: 430783 - RNA, 19 nt, Artificial Sequence
  Description of Artificial Sequence: Synthetic oligonucleotide
  Sense strand starting at position 3617 of SEQ ID NO: 316664
cugacuugacuuuaguaau

SEQ ID NO: 430784 - RNA, 19 nt, Artificial Sequence
  Description of Artificial Sequence: Synthetic oligonucleotide
  Antisense Strand to SEQ ID NO: 430783
auuacuaaagucaagucag

SEQ ID NO: 430785 - RNA, 19 nt, Artificial Sequence
  Description of Artificial Sequence: Synthetic oligonucleotide
  Sense strand starting at position 3714 of SEQ ID NO: 316664
uggcaaguaacuggaguuu

SEQ ID NO: 430786 - RNA, 19 nt, Artificial Sequence
  Description of Artificial Sequence: Synthetic oligonucleotide
  Antisense Strand to SEQ ID NO: 430785
aaacuccaguuacuugcca

SEQ ID NO: 430787 - RNA, 19 nt, Artificial Sequence
  Description of Artificial Sequence: Synthetic oligonucleotide
  Sense strand starting at position 3816 of SEQ ID NO: 316664
gugcuaauucuacauguuu

SEQ ID NO: 430788 - RNA, 19 nt, Artificial Sequence
  Description of Artificial Sequence: Synthetic oligonucleotide
  Antisense Strand to SEQ ID NO: 430787
aaacauguagaauuagcac

SEQ ID NO: 430789 - RNA, 19 nt, Artificial Sequence
  Description of Artificial Sequence: Synthetic oligonucleotide
  Sense strand starting at position 3869 of SEQ ID NO: 316664
gccauuuacagcgaguguu

SEQ ID NO: 430790 - RNA, 19 nt, Artificial Sequence
  Description of Artificial Sequence: Synthetic oligonucleotide
  Antisense Strand to SEQ ID NO: 430789
aacacucgcuguaaauggc

SEQ ID NO: 430791 - RNA, 19 nt, Artificial Sequence
  Description of Artificial Sequence: Synthetic oligonucleotide
  Sense strand starting at position 3872 of SEQ ID NO: 316664
auuuacagcgaguguuaaa

SEQ ID NO: 430792 - RNA, 19 nt, Artificial Sequence
  Description of Artificial Sequence: Synthetic oligonucleotide
  Antisense Strand to SEQ ID NO: 430791
uuuaacacucgcuguaaau

SEQ ID NO: 430793 - RNA, 19 nt, Artificial Sequence
  Description of Artificial Sequence: Synthetic oligonucleotide
  Sense strand starting at position 3903 of SEQ ID NO: 316664
ugaugaguaagugaccgaa

SEQ ID NO: 430794 - RNA, 19 nt, Artificial Sequence
  Description of Artificial Sequence: Synthetic oligonucleotide
  Antisense Strand to SEQ ID NO: 430793
uucggucacuuacucauca

SEQ ID NO: 430795 - RNA, 19 nt, Artificial Sequence
  Description of Artificial Sequence: Synthetic oligonucleotide
  Sense strand starting at position 3905 of SEQ ID NO: 316664
augaguaagugaccgaaua

SEQ ID NO: 430796 - RNA, 19 nt, Artificial Sequence
  Description of Artificial Sequence: Synthetic oligonucleotide
  Antisense Strand to SEQ ID NO: 430795
uauucggucacuuacucau

SEQ ID NO: 430797 - RNA, 19 nt, Artificial Sequence
  Description of Artificial Sequence: Synthetic oligonucleotide
  Sense strand starting at position 3906 of SEQ ID NO: 316664
ugaguaagugaccgaauag

SEQ ID NO: 430798 - RNA, 19 nt, Artificial Sequence
  Description of Artificial Sequence: Synthetic oligonucleotide
  Antisense Strand to SEQ ID NO: 430797
cuauucggucacuuacuca

SEQ ID NO: 430799 - RNA, 19 nt, Artificial Sequence
  Description of Artificial Sequence: Synthetic oligonucleotide
  Sense strand starting at position 3927 of SEQ ID NO: 316664
gagagaugugugggcugaa

SEQ ID NO: 430800 - RNA, 19 nt, Artificial Sequence
  Description of Artificial Sequence: Synthetic oligonucleotide
  Antisense Strand to SEQ ID NO: 430799
uucagcccacacaucucuc

SEQ ID NO: 430801 - RNA, 19 nt, Artificial Sequence
  Description of Artificial Sequence: Synthetic oligonucleotide
  Sense strand starting at position 3928 of SEQ ID NO: 316664
agagaugugugggcugaau

SEQ ID NO: 430802 - RNA, 19 nt, Artificial Sequence
  Description of Artificial Sequence: Synthetic oligonucleotide
  Antisense Strand to SEQ ID NO: 430801
auucagcccacacaucucu

SEQ ID NO: 430803 - RNA, 19 nt, Artificial Sequence
  Description of Artificial Sequence: Synthetic oligonucleotide
  Sense strand starting at position 3930 of SEQ ID NO: 316664
agaugugugggcugaaucu

SEQ ID NO: 430804 - RNA, 19 nt, Artificial Sequence
  Description of Artificial Sequence: Synthetic oligonucleotide
  Antisense Strand to SEQ ID NO: 430803
agauucagcccacacaucu

SEQ ID NO: 430805 - RNA, 19 nt, Artificial Sequence
  Description of Artificial Sequence: Synthetic oligonucleotide
  Sense strand starting at position 3940 of SEQ ID NO: 316664
gcugaaucuugaguaguaa

SEQ ID NO: 430806 - RNA, 19 nt, Artificial Sequence
  Description of Artificial Sequence: Synthetic oligonucleotide
  Antisense Strand to SEQ ID NO: 430805
uuacuacucaagauucagc

SEQ ID NO: 430807 - RNA, 19 nt, Artificial Sequence
  Description of Artificial Sequence: Synthetic oligonucleotide
  Sense strand starting at position 51 of SEQ ID NO: 316665
gucacauaacuccaugguu

SEQ ID NO: 430808 - RNA, 19 nt, Artificial Sequence
  Description of Artificial Sequence: Synthetic oligonucleotide
  Antisense Strand to SEQ ID NO: 430807
aaccauggaguuaugugac

SEQ ID NO: 430809 - RNA, 19 nt, Artificial Sequence
  Description of Artificial Sequence: Synthetic oligonucleotide
  Sense strand starting at position 64 of SEQ ID NO: 316665
augguuauaacuggaguuu

SEQ ID NO: 430810 - RNA, 19 nt, Artificial Sequence
  Description of Artificial Sequence: Synthetic oligonucleotide
  Antisense Strand to SEQ ID NO: 430809
aaacuccaguuauaaccau

SEQ ID NO: 430811 - RNA, 19 nt, Artificial Sequence
  Description of Artificial Sequence: Synthetic oligonucleotide
  Sense strand starting at position 65 of SEQ ID NO: 316665
ugguuauaacuggaguuua

SEQ ID NO: 430812 - RNA, 19 nt, Artificial Sequence
  Description of Artificial Sequence: Synthetic oligonucleotide
  Antisense Strand to SEQ ID NO: 430811
uaaacuccaguuauaacca

SEQ ID NO: 430813 - RNA, 19 nt, Artificial Sequence
  Description of Artificial Sequence: Synthetic oligonucleotide
  Sense strand starting at position 77 of SEQ ID NO: 316665
gaguuuaugugauugugga

SEQ ID NO: 430814 - RNA, 19 nt, Artificial Sequence
  Description of Artificial Sequence: Synthetic oligonucleotide
  Antisense Strand to SEQ ID NO: 430813
uccacaaucacauaaacuc

SEQ ID NO: 430815 - RNA, 19 nt, Artificial Sequence
  Description of Artificial Sequence: Synthetic oligonucleotide
  Sense strand starting at position 78 of SEQ ID NO: 316665
aguuuaugugauuguggau

SEQ ID NO: 430816 - RNA, 19 nt, Artificial Sequence
  Description of Artificial Sequence: Synthetic oligonucleotide
  Antisense Strand to SEQ ID NO: 430815
auccacaaucacauaaacu

SEQ ID NO: 430817 - RNA, 19 nt, Artificial Sequence
  Description of Artificial Sequence: Synthetic oligonucleotide
  Sense strand starting at position 188 of SEQ ID NO: 316665
guguuaauucugcaucuga

SEQ ID NO: 430818 - RNA, 19 nt, Artificial Sequence
  Description of Artificial Sequence: Synthetic oligonucleotide
  Antisense Strand to SEQ ID NO: 430817
ucagaugcagaauuaacac

SEQ ID NO: 430819 - RNA, 19 nt, Artificial Sequence
  Description of Artificial Sequence: Synthetic oligonucleotide
  Sense strand starting at position 223 of SEQ ID NO: 316665
agagguccacugcauuaaa

SEQ ID NO: 430820 - RNA, 19 nt, Artificial Sequence
  Description of Artificial Sequence: Synthetic oligonucleotide
  Antisense Strand to SEQ ID NO: 430819
uuuaaugcaguggaccucu

SEQ ID NO: 430821 - RNA, 19 nt, Artificial Sequence
  Description of Artificial Sequence: Synthetic oligonucleotide
  Sense strand starting at position 253 of SEQ ID NO: 316665
agauuacauuuauacggua

SEQ ID NO: 430822 - RNA, 19 nt, Artificial Sequence
  Description of Artificial Sequence: Synthetic oligonucleotide
  Antisense Strand to SEQ ID NO: 430821
uaccguauaaauguaaucu

SEQ ID NO: 430823 - RNA, 19 nt, Artificial Sequence
  Description of Artificial Sequence: Synthetic oligonucleotide
  Sense strand starting at position 265 of SEQ ID NO: 316665
uacgguaugagguacagua

SEQ ID NO: 430824 - RNA, 19 nt, Artificial Sequence
  Description of Artificial Sequence: Synthetic oligonucleotide
  Antisense Strand to SEQ ID NO: 430823
uacuguaccucauaccgua

SEQ ID NO: 430825 - RNA, 19 nt, Artificial Sequence
  Description of Artificial Sequence: Synthetic oligonucleotide
  Sense strand starting at position 272 of SEQ ID NO: 316665
ugagguacaguauguaagu

SEQ ID NO: 430826 - RNA, 19 nt, Artificial Sequence
  Description of Artificial Sequence: Synthetic oligonucleotide
  Antisense Strand to SEQ ID NO: 430825
acuuacauacuguaccuca

SEQ ID NO: 430827 - RNA, 19 nt, Artificial Sequence
  Description of Artificial Sequence: Synthetic oligonucleotide
  Sense strand starting at position 273 of SEQ ID NO: 316665
gagguacaguauguaagua

SEQ ID NO: 430828 - RNA, 19 nt, Artificial Sequence
  Description of Artificial Sequence: Synthetic oligonucleotide
  Antisense Strand to SEQ ID NO: 430827
uacuuacauacuguaccuc

SEQ ID NO: 430829 - RNA, 19 nt, Artificial Sequence
  Description of Artificial Sequence: Synthetic oligonucleotide
  Sense strand starting at position 285 of SEQ ID NO: 316665
guaaguagcucuguauuuc

SEQ ID NO: 430830 - RNA, 19 nt, Artificial Sequence
  Description of Artificial Sequence: Synthetic oligonucleotide
  Antisense Strand to SEQ ID NO: 430829
gaaauacagagcuacuuac

SEQ ID NO: 430831 - RNA, 19 nt, Artificial Sequence
  Description of Artificial Sequence: Synthetic oligonucleotide
  Sense strand starting at position 295 of SEQ ID NO: 316665
cuguauuucucguugaagg

SEQ ID NO: 430832 - RNA, 19 nt, Artificial Sequence
  Description of Artificial Sequence: Synthetic oligonucleotide
  Antisense Strand to SEQ ID NO: 430831
ccuucaacgagaaauacag

SEQ ID NO: 430833 - RNA, 19 nt, Artificial Sequence
  Description of Artificial Sequence: Synthetic oligonucleotide
  Sense strand starting at position 380 of SEQ ID NO: 316665
agauuauagucucuuaugu

SEQ ID NO: 430834 - RNA, 19 nt, Artificial Sequence
  Description of Artificial Sequence: Synthetic oligonucleotide
  Antisense Strand to SEQ ID NO: 430833
acauaagagacuauaaucu

SEQ ID NO: 430835 - RNA, 19 nt, Artificial Sequence
  Description of Artificial Sequence: Synthetic oligonucleotide
  Sense strand starting at position 391 of SEQ ID NO: 316665
ucuuauguggcagaaauga

SEQ ID NO: 430836 - RNA, 19 nt, Artificial Sequence
  Description of Artificial Sequence: Synthetic oligonucleotide
  Antisense Strand to SEQ ID NO: 430835
ucauuucugccacauaaga

SEQ ID NO: 430837 - RNA, 19 nt, Artificial Sequence
  Description of Artificial Sequence: Synthetic oligonucleotide
  Sense strand starting at position 954 of SEQ ID NO: 316665
ccacacuucuuuguugaua

SEQ ID NO: 430838 - RNA, 19 nt, Artificial Sequence
  Description of Artificial Sequence: Synthetic oligonucleotide
  Antisense Strand to SEQ ID NO: 430837
uaucaacaaagaagugugg

SEQ ID NO: 430839 - RNA, 19 nt, Artificial Sequence
  Description of Artificial Sequence: Synthetic oligonucleotide
  Sense strand starting at position 991 of SEQ ID NO: 316665
gaagauuaccaggguugca

SEQ ID NO: 430840 - RNA, 19 nt, Artificial Sequence
  Description of Artificial Sequence: Synthetic oligonucleotide
  Antisense Strand to SEQ ID NO: 430839
ugcaacccugguaaucuuc

SEQ ID NO: 430841 - RNA, 19 nt, Artificial Sequence
  Description of Artificial Sequence: Synthetic oligonucleotide
  Sense strand starting at position 1054 of SEQ ID NO: 316665
ggaugacuguucuuauaag

SEQ ID NO: 430842 - RNA, 19 nt, Artificial Sequence
  Description of Artificial Sequence: Synthetic oligonucleotide
  Antisense Strand to SEQ ID NO: 430841
cuuauaagaacagucaucc

SEQ ID NO: 430843 - RNA, 19 nt, Artificial Sequence
  Description of Artificial Sequence: Synthetic oligonucleotide
  Sense strand starting at position 1149 of SEQ ID NO: 316665
accagucuggccggagaaa

SEQ ID NO: 430844 - RNA, 19 nt, Artificial Sequence
  Description of Artificial Sequence: Synthetic oligonucleotide
  Antisense Strand to SEQ ID NO: 430843
uuucuccggccagacuggu

SEQ ID NO: 430845 - RNA, 19 nt, Artificial Sequence
  Description of Artificial Sequence: Synthetic oligonucleotide
  Sense strand starting at position 1479 of SEQ ID NO: 316665
gacugagguccuugccaau

SEQ ID NO: 430846 - RNA, 19 nt, Artificial Sequence
  Description of Artificial Sequence: Synthetic oligonucleotide
  Antisense Strand to SEQ ID NO: 430845
auuggcaaggaccucaguc

SEQ ID NO: 430847 - RNA, 19 nt, Artificial Sequence
  Description of Artificial Sequence: Synthetic oligonucleotide
  Sense strand starting at position 2538 of SEQ ID NO: 316665
auuaaauuccagggaugcu

SEQ ID NO: 430848 - RNA, 19 nt, Artificial Sequence
  Description of Artificial Sequence: Synthetic oligonucleotide
  Antisense Strand to SEQ ID NO: 430847
agcaucccuggaauuuaau

SEQ ID NO: 430849 - RNA, 19 nt, Artificial Sequence
  Description of Artificial Sequence: Synthetic oligonucleotide
  Sense strand starting at position 2558 of SEQ ID NO: 316665
uuacuuuggcugggacgaa

SEQ ID NO: 430850 - RNA, 19 nt, Artificial Sequence
  Description of Artificial Sequence: Synthetic oligonucleotide
  Antisense Strand to SEQ ID NO: 430849
uucgucccagccaaaguaa

SEQ ID NO: 430851 - RNA, 19 nt, Artificial Sequence
  Description of Artificial Sequence: Synthetic oligonucleotide
  Sense strand starting at position 2663 of SEQ ID NO: 316665
ggacguggccuccaucaga

SEQ ID NO: 430852 - RNA, 19 nt, Artificial Sequence
  Description of Artificial Sequence: Synthetic oligonucleotide
  Antisense Strand to SEQ ID NO: 430851
ucugauggaggccacgucc

SEQ ID NO: 430853 - RNA, 19 nt, Artificial Sequence
  Description of Artificial Sequence: Synthetic oligonucleotide
  Sense strand starting at position 2856 of SEQ ID NO: 316665
ggaccugaguugcuuagau

SEQ ID NO: 430854 - RNA, 19 nt, Artificial Sequence
  Description of Artificial Sequence: Synthetic oligonucleotide
  Antisense Strand to SEQ ID NO: 430853
aucuaagcaacucaggucc

SEQ ID NO: 430855 - RNA, 19 nt, Artificial Sequence
  Description of Artificial Sequence: Synthetic oligonucleotide
  Sense strand starting at position 2858 of SEQ ID NO: 316665
accugaguugcuuagauuc

SEQ ID NO: 430856 - RNA, 19 nt, Artificial Sequence
  Description of Artificial Sequence: Synthetic oligonucleotide
  Antisense Strand to SEQ ID NO: 430855
gaaucuaagcaacucaggu

SEQ ID NO: 430857 - RNA, 19 nt, Artificial Sequence
  Description of Artificial Sequence: Synthetic oligonucleotide
  Sense strand starting at position 2896 of SEQ ID NO: 316665
uaaguauaccgucaacuga

SEQ ID NO: 430858 - RNA, 19 nt, Artificial Sequence
  Description of Artificial Sequence: Synthetic oligonucleotide
  Antisense Strand to SEQ ID NO: 430857
ucaguugacgguauacuua

SEQ ID NO: 430859 - RNA, 19 nt, Artificial Sequence
  Description of Artificial Sequence: Synthetic oligonucleotide
  Sense strand starting at position 2997 of SEQ ID NO: 316665
gcaugugguuauuugccaa

SEQ ID NO: 430860 - RNA, 19 nt, Artificial Sequence
  Description of Artificial Sequence: Synthetic oligonucleotide
  Antisense Strand to SEQ ID NO: 430859
uuggcaaauaaccacaugc

SEQ ID NO: 430861 - RNA, 19 nt, Artificial Sequence
  Description of Artificial Sequence: Synthetic oligonucleotide
  Sense strand starting at position 3086 of SEQ ID NO: 316665
aaacaaauagaucguguuu

SEQ ID NO: 430862 - RNA, 19 nt, Artificial Sequence
  Description of Artificial Sequence: Synthetic oligonucleotide
  Antisense Strand to SEQ ID NO: 430861
aaacacgaucuauuuguuu

SEQ ID NO: 430863 - RNA, 19 nt, Artificial Sequence
  Description of Artificial Sequence: Synthetic oligonucleotide
  Sense strand starting at position 3141 of SEQ ID NO: 316665
gagguuuacugaucuuagu

SEQ ID NO: 430864 - RNA, 19 nt, Artificial Sequence
  Description of Artificial Sequence: Synthetic oligonucleotide
  Antisense Strand to SEQ ID NO: 430863
acuaagaucaguaaaccuc

SEQ ID NO: 430865 - RNA, 19 nt, Artificial Sequence
  Description of Artificial Sequence: Synthetic oligonucleotide
  Sense strand starting at position 3338 of SEQ ID NO: 316665
cuuuauagucauugaacag

SEQ ID NO: 430866 - RNA, 19 nt, Artificial Sequence
  Description of Artificial Sequence: Synthetic oligonucleotide
  Antisense Strand to SEQ ID NO: 430865
cuguucaaugacuauaaag

SEQ ID NO: 430867 - RNA, 19 nt, Artificial Sequence
  Description of Artificial Sequence: Synthetic oligonucleotide
  Sense strand starting at position 3540 of SEQ ID NO: 316665
agcaguaucauggaaugcu

SEQ ID NO: 430868 - RNA, 19 nt, Artificial Sequence
  Description of Artificial Sequence: Synthetic oligonucleotide
  Antisense Strand to SEQ ID NO: 430867
agcauuccaugauacugcu

SEQ ID NO: 430869 - RNA, 19 nt, Artificial Sequence
  Description of Artificial Sequence: Synthetic oligonucleotide
  Sense strand starting at position 3578 of SEQ ID NO: 316665
guaacuaagcuguaauuaa

SEQ ID NO: 430870 - RNA, 19 nt, Artificial Sequence
  Description of Artificial Sequence: Synthetic oligonucleotide
  Antisense Strand to SEQ ID NO: 430869
uuaauuacagcuuaguuac

SEQ ID NO: 430871 - RNA, 19 nt, Artificial Sequence
  Description of Artificial Sequence: Synthetic oligonucleotide
  Sense strand starting at position 3683 of SEQ ID NO: 316665
aacccuuaacagugacgua

SEQ ID NO: 430872 - RNA, 19 nt, Artificial Sequence
  Description of Artificial Sequence: Synthetic oligonucleotide
  Antisense Strand to SEQ ID NO: 430871
uacgucacuguuaaggguu

SEQ ID NO: 430873 - RNA, 19 nt, Artificial Sequence
  Description of Artificial Sequence: Synthetic oligonucleotide
  Sense strand starting at position 3688 of SEQ ID NO: 316665
uuaacagugacguauaugu

SEQ ID NO: 430874 - RNA, 19 nt, Artificial Sequence
  Description of Artificial Sequence: Synthetic oligonucleotide
  Antisense Strand to SEQ ID NO: 430873
acauauacgucacuguuaa

SEQ ID NO: 430875 - RNA, 19 nt, Artificial Sequence
  Description of Artificial Sequence: Synthetic oligonucleotide
  Sense strand starting at position 3690 of SEQ ID NO: 316665
aacagugacguauauguau

SEQ ID NO: 430876 - RNA, 19 nt, Artificial Sequence
  Description of Artificial Sequence: Synthetic oligonucleotide
  Antisense Strand to SEQ ID NO: 430875
auacauauacgucacuguu

SEQ ID NO: 430877 - RNA, 19 nt, Artificial Sequence
  Description of Artificial Sequence: Synthetic oligonucleotide
  Sense strand starting at position 3768 of SEQ ID NO: 316665
guggcauaagcagaauacu

SEQ ID NO: 430878 - RNA, 19 nt, Artificial Sequence
  Description of Artificial Sequence: Synthetic oligonucleotide
  Antisense Strand to SEQ ID NO: 430877
aguauucugcuuaugccac

SEQ ID NO: 430879 - RNA, 19 nt, Artificial Sequence
  Description of Artificial Sequence: Synthetic oligonucleotide
  Sense strand starting at position 3782 of SEQ ID NO: 316665
auacuuacucuugguacau

SEQ ID NO: 430880 - RNA, 19 nt, Artificial Sequence
  Description of Artificial Sequence: Synthetic oligonucleotide
  Antisense Strand to SEQ ID NO: 430879
auguaccaagaguaaguau

SEQ ID NO: 430881 - RNA, 19 nt, Artificial Sequence
  Description of Artificial Sequence: Synthetic oligonucleotide
  Sense strand starting at position 3971 of SEQ ID NO: 316665
aacgaaugcuucucugaag

SEQ ID NO: 430882 - RNA, 19 nt, Artificial Sequence
  Description of Artificial Sequence: Synthetic oligonucleotide
  Antisense Strand to SEQ ID NO: 430881
cuucagagaagcauucguu

SEQ ID NO: 430883 - RNA, 19 nt, Artificial Sequence
  Description of Artificial Sequence: Synthetic oligonucleotide
  Sense strand starting at position 3972 of SEQ ID NO: 316665
acgaaugcuucucugaaga

SEQ ID NO: 430884 - RNA, 19 nt, Artificial Sequence
  Description of Artificial Sequence: Synthetic oligonucleotide
  Antisense Strand to SEQ ID NO: 430883
ucuucagagaagcauucgu

SEQ ID NO: 430885 - RNA, 19 nt, Artificial Sequence
  Description of Artificial Sequence: Synthetic oligonucleotide
  Sense strand starting at position 3977 of SEQ ID NO: 316665
ugcuucucugaagacuaua

SEQ ID NO: 430886 - RNA, 19 nt, Artificial Sequence
  Description of Artificial Sequence: Synthetic oligonucleotide
  Antisense Strand to SEQ ID NO: 430885
uauagucuucagagaagca

SEQ ID NO: 430887 - RNA, 19 nt, Artificial Sequence
  Description of Artificial Sequence: Synthetic oligonucleotide
  Sense strand starting at position 54 of SEQ ID NO: 316666
cuuagaguuuacucuuacu

SEQ ID NO: 430888 - RNA, 19 nt, Artificial Sequence
  Description of Artificial Sequence: Synthetic oligonucleotide
  Antisense Strand to SEQ ID NO: 430887
aguaagaguaaacucuaag

SEQ ID NO: 430889 - RNA, 19 nt, Artificial Sequence
  Description of Artificial Sequence: Synthetic oligonucleotide
  Sense strand starting at position 147 of SEQ ID NO: 316666
acaugauauuaguuaagug

SEQ ID NO: 430890 - RNA, 19 nt, Artificial Sequence
  Description of Artificial Sequence: Synthetic oligonucleotide
  Antisense Strand to SEQ ID NO: 430889
cacuuaacuaauaucaugu

SEQ ID NO: 430891 - RNA, 19 nt, Artificial Sequence
  Description of Artificial Sequence: Synthetic oligonucleotide
  Sense strand starting at position 151 of SEQ ID NO: 316666
gauauuaguuaagugaguu

SEQ ID NO: 430892 - RNA, 19 nt, Artificial Sequence
  Description of Artificial Sequence: Synthetic oligonucleotide
  Antisense Strand to SEQ ID NO: 430891
aacucacuuaacuaauauc

SEQ ID NO: 430893 - RNA, 19 nt, Artificial Sequence
  Description of Artificial Sequence: Synthetic oligonucleotide
  Sense strand starting at position 161 of SEQ ID NO: 316666
aagugaguuauugggacuu

SEQ ID NO: 430894 - RNA, 19 nt, Artificial Sequence
  Description of Artificial Sequence: Synthetic oligonucleotide
  Antisense Strand to SEQ ID NO: 430893
aagucccaauaacucacuu

SEQ ID NO: 430895 - RNA, 19 nt, Artificial Sequence
  Description of Artificial Sequence: Synthetic oligonucleotide
  Sense strand starting at position 315 of SEQ ID NO: 316666
ucaugaaugccuugacuga

SEQ ID NO: 430896 - RNA, 19 nt, Artificial Sequence
  Description of Artificial Sequence: Synthetic oligonucleotide
  Antisense Strand to SEQ ID NO: 430895
ucagucaaggcauucauga

SEQ ID NO: 430897 - RNA, 19 nt, Artificial Sequence
  Description of Artificial Sequence: Synthetic oligonucleotide
  Sense strand starting at position 507 of SEQ ID NO: 316666
augcacagucucuaaggua

SEQ ID NO: 430898 - RNA, 19 nt, Artificial Sequence
  Description of Artificial Sequence: Synthetic oligonucleotide
  Antisense Strand to SEQ ID NO: 430897
uaccuuagagacugugcau

SEQ ID NO: 430899 - RNA, 19 nt, Artificial Sequence
  Description of Artificial Sequence: Synthetic oligonucleotide
  Sense strand starting at position 514 of SEQ ID NO: 316666
gucucuaagguacaauaua

SEQ ID NO: 430900 - RNA, 19 nt, Artificial Sequence
  Description of Artificial Sequence: Synthetic oligonucleotide
  Antisense Strand to SEQ ID NO: 430899
uauauuguaccuuagagac

SEQ ID NO: 430901 - RNA, 19 nt, Artificial Sequence
  Description of Artificial Sequence: Synthetic oligonucleotide
  Sense strand starting at position 579 of SEQ ID NO: 316666
ccagguaugcuuuauuauu

SEQ ID NO: 430902 - RNA, 19 nt, Artificial Sequence
  Description of Artificial Sequence: Synthetic oligonucleotide
  Antisense Strand to SEQ ID NO: 430901
aauaauaaagcauaccugg

SEQ ID NO: 430903 - RNA, 19 nt, Artificial Sequence
  Description of Artificial Sequence: Synthetic oligonucleotide
  Sense strand starting at position 862 of SEQ ID NO: 316666
uguuaaauccuggagcuua

SEQ ID NO: 430904 - RNA, 19 nt, Artificial Sequence
  Description of Artificial Sequence: Synthetic oligonucleotide
  Antisense Strand to SEQ ID NO: 430903
uaagcuccaggauuuaaca

SEQ ID NO: 430905 - RNA, 19 nt, Artificial Sequence
  Description of Artificial Sequence: Synthetic oligonucleotide
  Sense strand starting at position 1523 of SEQ ID NO: 316666
cgugguccucaauaucuga

SEQ ID NO: 430906 - RNA, 19 nt, Artificial Sequence
  Description of Artificial Sequence: Synthetic oligonucleotide
  Antisense Strand to SEQ ID NO: 430905
ucagauauugaggaccacg

SEQ ID NO: 430907 - RNA, 19 nt, Artificial Sequence
  Description of Artificial Sequence: Synthetic oligonucleotide
  Sense strand starting at position 1526 of SEQ ID NO: 316666
gguccucaauaucugagua

SEQ ID NO: 430908 - RNA, 19 nt, Artificial Sequence
  Description of Artificial Sequence: Synthetic oligonucleotide
  Antisense Strand to SEQ ID NO: 430907
uacucagauauugaggacc

SEQ ID NO: 430909 - RNA, 19 nt, Artificial Sequence
  Description of Artificial Sequence: Synthetic oligonucleotide
  Sense strand starting at position 1579 of SEQ ID NO: 316666
agauaugugaguugcagga

SEQ ID NO: 430910 - RNA, 19 nt, Artificial Sequence
  Description of Artificial Sequence: Synthetic oligonucleotide
  Antisense Strand to SEQ ID NO: 430909
uccugcaacucacauaucu

SEQ ID NO: 430911 - RNA, 19 nt, Artificial Sequence
  Description of Artificial Sequence: Synthetic oligonucleotide
  Sense strand starting at position 1583 of SEQ ID NO: 316666
augugaguugcaggagaag

SEQ ID NO: 430912 - RNA, 19 nt, Artificial Sequence
  Description of Artificial Sequence: Synthetic oligonucleotide
  Antisense Strand to SEQ ID NO: 430911
cuucuccugcaacucacau

SEQ ID NO: 430913 - RNA, 19 nt, Artificial Sequence
  Description of Artificial Sequence: Synthetic oligonucleotide
  Sense strand starting at position 1616 of SEQ ID NO: 316666
cuccguagucguucagguu

SEQ ID NO: 430914 - RNA, 19 nt, Artificial Sequence
  Description of Artificial Sequence: Synthetic oligonucleotide
  Antisense Strand to SEQ ID NO: 430913
aaccugaacgacuacggag

SEQ ID NO: 430915 - RNA, 19 nt, Artificial Sequence
  Description of Artificial Sequence: Synthetic oligonucleotide
  Sense strand starting at position 2154 of SEQ ID NO: 316666
ugauaaguaaccuggguca

SEQ ID NO: 430916 - RNA, 19 nt, Artificial Sequence
  Description of Artificial Sequence: Synthetic oligonucleotide
  Antisense Strand to SEQ ID NO: 430915
ugacccagguuacuuauca

SEQ ID NO: 430917 - RNA, 19 nt, Artificial Sequence
  Description of Artificial Sequence: Synthetic oligonucleotide
  Sense strand starting at position 2248 of SEQ ID NO: 316666
gaugcucacguugauaauu

SEQ ID NO: 430918 - RNA, 19 nt, Artificial Sequence
  Description of Artificial Sequence: Synthetic oligonucleotide
  Antisense Strand to SEQ ID NO: 430917
aauuaucaacgugagcauc

SEQ ID NO: 430919 - RNA, 19 nt, Artificial Sequence
  Description of Artificial Sequence: Synthetic oligonucleotide
  Sense strand starting at position 2358 of SEQ ID NO: 316666
acgggauaucuuugaaucu

SEQ ID NO: 430920 - RNA, 19 nt, Artificial Sequence
  Description of Artificial Sequence: Synthetic oligonucleotide
  Antisense Strand to SEQ ID NO: 430919
agauucaaagauaucccgu

SEQ ID NO: 430921 - RNA, 19 nt, Artificial Sequence
  Description of Artificial Sequence: Synthetic oligonucleotide
  Sense strand starting at position 2373 of SEQ ID NO: 316666
aucuauagacuagguuuaa

SEQ ID NO: 430922 - RNA, 19 nt, Artificial Sequence
  Description of Artificial Sequence: Synthetic oligonucleotide
  Antisense Strand to SEQ ID NO: 430921
uuaaaccuagucuauagau

SEQ ID NO: 430923 - RNA, 19 nt, Artificial Sequence
  Description of Artificial Sequence: Synthetic oligonucleotide
  Sense strand starting at position 2374 of SEQ ID NO: 316666
ucuauagacuagguuuaaa

SEQ ID NO: 430924 - RNA, 19 nt, Artificial Sequence
  Description of Artificial Sequence: Synthetic oligonucleotide
  Antisense Strand to SEQ ID NO: 430923
uuuaaaccuagucuauaga

SEQ ID NO: 430925 - RNA, 19 nt, Artificial Sequence
  Description of Artificial Sequence: Synthetic oligonucleotide
  Sense strand starting at position 2385 of SEQ ID NO: 316666
gguuuaaaguaaccugaga

SEQ ID NO: 430926 - RNA, 19 nt, Artificial Sequence
  Description of Artificial Sequence: Synthetic oligonucleotide
  Antisense Strand to SEQ ID NO: 430925
ucucagguuacuuuaaacc

SEQ ID NO: 430927 - RNA, 19 nt, Artificial Sequence
  Description of Artificial Sequence: Synthetic oligonucleotide
  Sense strand starting at position 2393 of SEQ ID NO: 316666
guaaccugagaauaugcau

SEQ ID NO: 430928 - RNA, 19 nt, Artificial Sequence
  Description of Artificial Sequence: Synthetic oligonucleotide
  Antisense Strand to SEQ ID NO: 430927
augcauauucucagguuac

SEQ ID NO: 430929 - RNA, 19 nt, Artificial Sequence
  Description of Artificial Sequence: Synthetic oligonucleotide
  Sense strand starting at position 2617 of SEQ ID NO: 316666
guaucuaacuagguuuaga

SEQ ID NO: 430930 - RNA, 19 nt, Artificial Sequence
  Description of Artificial Sequence: Synthetic oligonucleotide
  Antisense Strand to SEQ ID NO: 430929
ucuaaaccuaguuagauac

SEQ ID NO: 430931 - RNA, 19 nt, Artificial Sequence
  Description of Artificial Sequence: Synthetic oligonucleotide
  Sense strand starting at position 2638 of SEQ ID NO: 316666
cggcaagugguagaggaau

SEQ ID NO: 430932 - RNA, 19 nt, Artificial Sequence
  Description of Artificial Sequence: Synthetic oligonucleotide
  Antisense Strand to SEQ ID NO: 430931
auuccucuaccacuugccg

SEQ ID NO: 430933 - RNA, 19 nt, Artificial Sequence
  Description of Artificial Sequence: Synthetic oligonucleotide
  Sense strand starting at position 2640 of SEQ ID NO: 316666
gcaagugguagaggaauaa

SEQ ID NO: 430934 - RNA, 19 nt, Artificial Sequence
  Description of Artificial Sequence: Synthetic oligonucleotide
  Antisense Strand to SEQ ID NO: 430933
uuauuccucuaccacuugc

SEQ ID NO: 430935 - RNA, 19 nt, Artificial Sequence
  Description of Artificial Sequence: Synthetic oligonucleotide
  Sense strand starting at position 2660 of SEQ ID NO: 316666
auuugaguggcauguaugu

SEQ ID NO: 430936 - RNA, 19 nt, Artificial Sequence
  Description of Artificial Sequence: Synthetic oligonucleotide
  Antisense Strand to SEQ ID NO: 430935
acauacaugccacucaaau

SEQ ID NO: 430937 - RNA, 19 nt, Artificial Sequence
  Description of Artificial Sequence: Synthetic oligonucleotide
  Sense strand starting at position 2667 of SEQ ID NO: 316666
uggcauguauguuuauuua

SEQ ID NO: 430938 - RNA, 19 nt, Artificial Sequence
  Description of Artificial Sequence: Synthetic oligonucleotide
  Antisense Strand to SEQ ID NO: 430937
uaaauaaacauacaugcca

SEQ ID NO: 430939 - RNA, 19 nt, Artificial Sequence
  Description of Artificial Sequence: Synthetic oligonucleotide
  Sense strand starting at position 2674 of SEQ ID NO: 316666
uauguuuauuuagagagga

SEQ ID NO: 430940 - RNA, 19 nt, Artificial Sequence
  Description of Artificial Sequence: Synthetic oligonucleotide
  Antisense Strand to SEQ ID NO: 430939
uccucucuaaauaaacaua

SEQ ID NO: 430941 - RNA, 19 nt, Artificial Sequence
  Description of Artificial Sequence: Synthetic oligonucleotide
  Sense strand starting at position 2755 of SEQ ID NO: 316666
gugaauuaguucuuacaca

SEQ ID NO: 430942 - RNA, 19 nt, Artificial Sequence
  Description of Artificial Sequence: Synthetic oligonucleotide
  Antisense Strand to SEQ ID NO: 430941
uguguaagaacuaauucac

SEQ ID NO: 430943 - RNA, 19 nt, Artificial Sequence
  Description of Artificial Sequence: Synthetic oligonucleotide
  Sense strand starting at position 2763 of SEQ ID NO: 316666
guucuuacacaaggaucau

SEQ ID NO: 430944 - RNA, 19 nt, Artificial Sequence
  Description of Artificial Sequence: Synthetic oligonucleotide
  Antisense Strand to SEQ ID NO: 430943
augauccuuguguaagaac

SEQ ID NO: 430945 - RNA, 19 nt, Artificial Sequence
  Description of Artificial Sequence: Synthetic oligonucleotide
  Sense strand starting at position 2961 of SEQ ID NO: 316666
auuugugucugagccguaa

SEQ ID NO: 430946 - RNA, 19 nt, Artificial Sequence
  Description of Artificial Sequence: Synthetic oligonucleotide
  Antisense Strand to SEQ ID NO: 430945
uuacggcucagacacaaau

SEQ ID NO: 430947 - RNA, 19 nt, Artificial Sequence
  Description of Artificial Sequence: Synthetic oligonucleotide
  Sense strand starting at position 2974 of SEQ ID NO: 316666
ccguaauuccaccaggaaa

SEQ ID NO: 430948 - RNA, 19 nt, Artificial Sequence
  Description of Artificial Sequence: Synthetic oligonucleotide
  Antisense Strand to SEQ ID NO: 430947
uuuccugguggaauuacgg

SEQ ID NO: 430949 - RNA, 19 nt, Artificial Sequence
  Description of Artificial Sequence: Synthetic oligonucleotide
  Sense strand starting at position 2996 of SEQ ID NO: 316666
ggcagaagccuugagugaa

SEQ ID NO: 430950 - RNA, 19 nt, Artificial Sequence
  Description of Artificial Sequence: Synthetic oligonucleotide
  Antisense Strand to SEQ ID NO: 430949
uucacucaaggcuucugcc

SEQ ID NO: 430951 - RNA, 19 nt, Artificial Sequence
  Description of Artificial Sequence: Synthetic oligonucleotide
  Sense strand starting at position 2999 of SEQ ID NO: 316666
agaagccuugagugaauaa

SEQ ID NO: 430952 - RNA, 19 nt, Artificial Sequence
  Description of Artificial Sequence: Synthetic oligonucleotide
  Antisense Strand to SEQ ID NO: 430951
uuauucacucaaggcuucu

SEQ ID NO: 430953 - RNA, 19 nt, Artificial Sequence
  Description of Artificial Sequence: Synthetic oligonucleotide
  Sense strand starting at position 3038 of SEQ ID NO: 316666
ccaucagugaauugggaau

SEQ ID NO: 430954 - RNA, 19 nt, Artificial Sequence
  Description of Artificial Sequence: Synthetic oligonucleotide
  Antisense Strand to SEQ ID NO: 430953
auucccaauucacugaugg

SEQ ID NO: 430955 - RNA, 19 nt, Artificial Sequence
  Description of Artificial Sequence: Synthetic oligonucleotide
  Sense strand starting at position 3284 of SEQ ID NO: 316666
aagcaagaguagcuagaaa

SEQ ID NO: 430956 - RNA, 19 nt, Artificial Sequence
  Description of Artificial Sequence: Synthetic oligonucleotide
  Antisense Strand to SEQ ID NO: 430955
uuucuagcuacucuugcuu

SEQ ID NO: 430957 - RNA, 19 nt, Artificial Sequence
  Description of Artificial Sequence: Synthetic oligonucleotide
  Sense strand starting at position 3368 of SEQ ID NO: 316666
ugcucagauugaucacaug

SEQ ID NO: 430958 - RNA, 19 nt, Artificial Sequence
  Description of Artificial Sequence: Synthetic oligonucleotide
  Antisense Strand to SEQ ID NO: 430957
caugugaucaaucugagca

SEQ ID NO: 430959 - RNA, 19 nt, Artificial Sequence
  Description of Artificial Sequence: Synthetic oligonucleotide
  Sense strand starting at position 3423 of SEQ ID NO: 316666
gagacaauugaaugagcuu

SEQ ID NO: 430960 - RNA, 19 nt, Artificial Sequence
  Description of Artificial Sequence: Synthetic oligonucleotide
  Antisense Strand to SEQ ID NO: 430959
aagcucauucaauugucuc

SEQ ID NO: 430961 - RNA, 19 nt, Artificial Sequence
  Description of Artificial Sequence: Synthetic oligonucleotide
  Sense strand starting at position 3426 of SEQ ID NO: 316666
acaauugaaugagcuuaca

SEQ ID NO: 430962 - RNA, 19 nt, Artificial Sequence
  Description of Artificial Sequence: Synthetic oligonucleotide
  Antisense Strand to SEQ ID NO: 430961
uguaagcucauucaauugu

SEQ ID NO: 430963 - RNA, 19 nt, Artificial Sequence
  Description of Artificial Sequence: Synthetic oligonucleotide
  Sense strand starting at position 3444 of SEQ ID NO: 316666
auaaacugccuugaaagua

SEQ ID NO: 430964 - RNA, 19 nt, Artificial Sequence
  Description of Artificial Sequence: Synthetic oligonucleotide
  Antisense Strand to SEQ ID NO: 430963
uacuuucaaggcaguuuau

SEQ ID NO: 430965 - RNA, 19 nt, Artificial Sequence
  Description of Artificial Sequence: Synthetic oligonucleotide
  Sense strand starting at position 3795 of SEQ ID NO: 316666
uguagagcccgccuguaau

SEQ ID NO: 430966 - RNA, 19 nt, Artificial Sequence
  Description of Artificial Sequence: Synthetic oligonucleotide
  Antisense Strand to SEQ ID NO: 430965
auuacaggcgggcucuaca

SEQ ID NO: 430967 - RNA, 19 nt, Artificial Sequence
  Description of Artificial Sequence: Synthetic oligonucleotide
  Sense strand starting at position 24 of SEQ ID NO: 316667
ggaauaguauuugaagaug

SEQ ID NO: 430968 - RNA, 19 nt, Artificial Sequence
  Description of Artificial Sequence: Synthetic oligonucleotide
  Antisense Strand to SEQ ID NO: 430967
caucuucaaauacuauucc

SEQ ID NO: 430969 - RNA, 19 nt, Artificial Sequence
  Description of Artificial Sequence: Synthetic oligonucleotide
  Sense strand starting at position 273 of SEQ ID NO: 316667
ccgcaaguugcuguacgaa

SEQ ID NO: 430970 - RNA, 19 nt, Artificial Sequence
  Description of Artificial Sequence: Synthetic oligonucleotide
  Antisense Strand to SEQ ID NO: 430969
uucguacagcaacuugcgg

SEQ ID NO: 430971 - RNA, 19 nt, Artificial Sequence
  Description of Artificial Sequence: Synthetic oligonucleotide
  Sense strand starting at position 306 of SEQ ID NO: 316667
uccaguuauuugccacacu

SEQ ID NO: 430972 - RNA, 19 nt, Artificial Sequence
  Description of Artificial Sequence: Synthetic oligonucleotide
  Antisense Strand to SEQ ID NO: 430971
aguguggcaaauaacugga

SEQ ID NO: 430973 - RNA, 19 nt, Artificial Sequence
  Description of Artificial Sequence: Synthetic oligonucleotide
  Sense strand starting at position 459 of SEQ ID NO: 316667
guaucuguagcugaaacuu

SEQ ID NO: 430974 - RNA, 19 nt, Artificial Sequence
  Description of Artificial Sequence: Synthetic oligonucleotide
  Antisense Strand to SEQ ID NO: 430973
aaguuucagcuacagauac

SEQ ID NO: 430975 - RNA, 19 nt, Artificial Sequence
  Description of Artificial Sequence: Synthetic oligonucleotide
  Sense strand starting at position 571 of SEQ ID NO: 316667
guaaauaccugccuaauug

SEQ ID NO: 430976 - RNA, 19 nt, Artificial Sequence
  Description of Artificial Sequence: Synthetic oligonucleotide
  Antisense Strand to SEQ ID NO: 430975
caauuaggcagguauuuac

SEQ ID NO: 430977 - RNA, 19 nt, Artificial Sequence
  Description of Artificial Sequence: Synthetic oligonucleotide
  Sense strand starting at position 580 of SEQ ID NO: 316667
ugccuaauuguuuagagug

SEQ ID NO: 430978 - RNA, 19 nt, Artificial Sequence
  Description of Artificial Sequence: Synthetic oligonucleotide
  Antisense Strand to SEQ ID NO: 430977
cacucuaaacaauuaggca

SEQ ID NO: 430979 - RNA, 19 nt, Artificial Sequence
  Description of Artificial Sequence: Synthetic oligonucleotide
  Sense strand starting at position 690 of SEQ ID NO: 316667
caaugaaagcgcuaugauu

SEQ ID NO: 430980 - RNA, 19 nt, Artificial Sequence
  Description of Artificial Sequence: Synthetic oligonucleotide
  Antisense Strand to SEQ ID NO: 430979
aaucauagcgcuuucauug

SEQ ID NO: 430981 - RNA, 19 nt, Artificial Sequence
  Description of Artificial Sequence: Synthetic oligonucleotide
  Sense strand starting at position 696 of SEQ ID NO: 316667
aagcgcuaugauuaggaua

SEQ ID NO: 430982 - RNA, 19 nt, Artificial Sequence
  Description of Artificial Sequence: Synthetic oligonucleotide
  Antisense Strand to SEQ ID NO: 430981
uauccuaaucauagcgcuu

SEQ ID NO: 430983 - RNA, 19 nt, Artificial Sequence
  Description of Artificial Sequence: Synthetic oligonucleotide
  Sense strand starting at position 722 of SEQ ID NO: 316667
gcaaacuuuagccugcgua

SEQ ID NO: 430984 - RNA, 19 nt, Artificial Sequence
  Description of Artificial Sequence: Synthetic oligonucleotide
  Antisense Strand to SEQ ID NO: 430983
uacgcaggcuaaaguuugc

SEQ ID NO: 430985 - RNA, 19 nt, Artificial Sequence
  Description of Artificial Sequence: Synthetic oligonucleotide
  Sense strand starting at position 932 of SEQ ID NO: 316667
acgcgcuugcccuuugaaa

SEQ ID NO: 430986 - RNA, 19 nt, Artificial Sequence
  Description of Artificial Sequence: Synthetic oligonucleotide
  Antisense Strand to SEQ ID NO: 430985
uuucaaagggcaagcgcgu

SEQ ID NO: 430987 - RNA, 19 nt, Artificial Sequence
  Description of Artificial Sequence: Synthetic oligonucleotide
  Sense strand starting at position 933 of SEQ ID NO: 316667
cgcgcuugcccuuugaaag

SEQ ID NO: 430988 - RNA, 19 nt, Artificial Sequence
  Description of Artificial Sequence: Synthetic oligonucleotide
  Antisense Strand to SEQ ID NO: 430987
cuuucaaagggcaagcgcg

SEQ ID NO: 430989 - RNA, 19 nt, Artificial Sequence
  Description of Artificial Sequence: Synthetic oligonucleotide
  Sense strand starting at position 1081 of SEQ ID NO: 316667
cucacuuguccaggacgaa

SEQ ID NO: 430990 - RNA, 19 nt, Artificial Sequence
  Description of Artificial Sequence: Synthetic oligonucleotide
  Antisense Strand to SEQ ID NO: 430989
uucguccuggacaagugag

SEQ ID NO: 430991 - RNA, 19 nt, Artificial Sequence
  Description of Artificial Sequence: Synthetic oligonucleotide
  Sense strand starting at position 1456 of SEQ ID NO: 316667
gccggaacucuugacgaau

SEQ ID NO: 430992 - RNA, 19 nt, Artificial Sequence
  Description of Artificial Sequence: Synthetic oligonucleotide
  Antisense Strand to SEQ ID NO: 430991
auucgucaagaguuccggc

SEQ ID NO: 430993 - RNA, 19 nt, Artificial Sequence
  Description of Artificial Sequence: Synthetic oligonucleotide
  Sense strand starting at position 1975 of SEQ ID NO: 316667
ggguuccugccgaguugaa

SEQ ID NO: 430994 - RNA, 19 nt, Artificial Sequence
  Description of Artificial Sequence: Synthetic oligonucleotide
  Antisense Strand to SEQ ID NO: 430993
uucaacucggcaggaaccc

SEQ ID NO: 430995 - RNA, 19 nt, Artificial Sequence
  Description of Artificial Sequence: Synthetic oligonucleotide
  Sense strand starting at position 1984 of SEQ ID NO: 316667
ccgaguugaagaugacuaa

SEQ ID NO: 430996 - RNA, 19 nt, Artificial Sequence
  Description of Artificial Sequence: Synthetic oligonucleotide
  Antisense Strand to SEQ ID NO: 430995
uuagucaucuucaacucgg

SEQ ID NO: 430997 - RNA, 19 nt, Artificial Sequence
  Description of Artificial Sequence: Synthetic oligonucleotide
  Sense strand starting at position 2149 of SEQ ID NO: 316667
uaaggauuccaugggaggu

SEQ ID NO: 430998 - RNA, 19 nt, Artificial Sequence
  Description of Artificial Sequence: Synthetic oligonucleotide
  Antisense Strand to SEQ ID NO: 430997
accucccauggaauccuua

SEQ ID NO: 430999 - RNA, 19 nt, Artificial Sequence
  Description of Artificial Sequence: Synthetic oligonucleotide
  Sense strand starting at position 2689 of SEQ ID NO: 316667
uaugucagcucuuugaaga

SEQ ID NO: 431000 - RNA, 19 nt, Artificial Sequence
  Description of Artificial Sequence: Synthetic oligonucleotide
  Antisense Strand to SEQ ID NO: 430999
ucuucaaagagcugacaua

SEQ ID NO: 431001 - RNA, 19 nt, Artificial Sequence
  Description of Artificial Sequence: Synthetic oligonucleotide
  Sense strand starting at position 2739 of SEQ ID NO: 316667
gagugccuauuauuugcua

SEQ ID NO: 431002 - RNA, 19 nt, Artificial Sequence
  Description of Artificial Sequence: Synthetic oligonucleotide
  Antisense Strand to SEQ ID NO: 431001
uagcaaauaauaggcacuc

SEQ ID NO: 431003 - RNA, 19 nt, Artificial Sequence
  Description of Artificial Sequence: Synthetic oligonucleotide
  Sense strand starting at position 2743 of SEQ ID NO: 316667
gccuauuauuugcuaggca

SEQ ID NO: 431004 - RNA, 19 nt, Artificial Sequence
  Description of Artificial Sequence: Synthetic oligonucleotide
  Antisense Strand to SEQ ID NO: 431003
ugccuagcaaauaauaggc

SEQ ID NO: 431005 - RNA, 19 nt, Artificial Sequence
  Description of Artificial Sequence: Synthetic oligonucleotide
  Sense strand starting at position 2766 of SEQ ID NO: 316667
uccagaaguggagguuagu

SEQ ID NO: 431006 - RNA, 19 nt, Artificial Sequence
  Description of Artificial Sequence: Synthetic oligonucleotide
  Antisense Strand to SEQ ID NO: 431005
acuaaccuccacuucugga

SEQ ID NO: 431007 - RNA, 19 nt, Artificial Sequence
  Description of Artificial Sequence: Synthetic oligonucleotide
  Sense strand starting at position 2776 of SEQ ID NO: 316667
gagguuagugcacagaaca

SEQ ID NO: 431008 - RNA, 19 nt, Artificial Sequence
  Description of Artificial Sequence: Synthetic oligonucleotide
  Antisense Strand to SEQ ID NO: 431007
uguucugugcacuaaccuc

SEQ ID NO: 431009 - RNA, 19 nt, Artificial Sequence
  Description of Artificial Sequence: Synthetic oligonucleotide
  Sense strand starting at position 2822 of SEQ ID NO: 316667
cugacagucuggcugaaga

SEQ ID NO: 431010 - RNA, 19 nt, Artificial Sequence
  Description of Artificial Sequence: Synthetic oligonucleotide
  Antisense Strand to SEQ ID NO: 431009
ucuucagccagacugucag

SEQ ID NO: 431011 - RNA, 19 nt, Artificial Sequence
  Description of Artificial Sequence: Synthetic oligonucleotide
  Sense strand starting at position 2824 of SEQ ID NO: 316667
gacagucuggcugaagagu

SEQ ID NO: 431012 - RNA, 19 nt, Artificial Sequence
  Description of Artificial Sequence: Synthetic oligonucleotide
  Antisense Strand to SEQ ID NO: 431011
acucuucagccagacuguc

SEQ ID NO: 431013 - RNA, 19 nt, Artificial Sequence
  Description of Artificial Sequence: Synthetic oligonucleotide
  Sense strand starting at position 2941 of SEQ ID NO: 316667
augacagacucagugacua

SEQ ID NO: 431014 - RNA, 19 nt, Artificial Sequence
  Description of Artificial Sequence: Synthetic oligonucleotide
  Antisense Strand to SEQ ID NO: 431013
uagucacugagucugucau

SEQ ID NO: 431015 - RNA, 19 nt, Artificial Sequence
  Description of Artificial Sequence: Synthetic oligonucleotide
  Sense strand starting at position 3013 of SEQ ID NO: 316667
ugcaaagguccauagacau

SEQ ID NO: 431016 - RNA, 19 nt, Artificial Sequence
  Description of Artificial Sequence: Synthetic oligonucleotide
  Antisense Strand to SEQ ID NO: 431015
augucuauggaccuuugca

SEQ ID NO: 431017 - RNA, 19 nt, Artificial Sequence
  Description of Artificial Sequence: Synthetic oligonucleotide
  Sense strand starting at position 3020 of SEQ ID NO: 316667
guccauagacauuagcuua

SEQ ID NO: 431018 - RNA, 19 nt, Artificial Sequence
  Description of Artificial Sequence: Synthetic oligonucleotide
  Antisense Strand to SEQ ID NO: 431017
uaagcuaaugucuauggac

SEQ ID NO: 431019 - RNA, 19 nt, Artificial Sequence
  Description of Artificial Sequence: Synthetic oligonucleotide
  Sense strand starting at position 3077 of SEQ ID NO: 316667
gagcuuugcagguaagaug

SEQ ID NO: 431020 - RNA, 19 nt, Artificial Sequence
  Description of Artificial Sequence: Synthetic oligonucleotide
  Antisense Strand to SEQ ID NO: 431019
caucuuaccugcaaagcuc

SEQ ID NO: 431021 - RNA, 19 nt, Artificial Sequence
  Description of Artificial Sequence: Synthetic oligonucleotide
  Sense strand starting at position 3211 of SEQ ID NO: 316667
aguggaguggcagaugaau

SEQ ID NO: 431022 - RNA, 19 nt, Artificial Sequence
  Description of Artificial Sequence: Synthetic oligonucleotide
  Antisense Strand to SEQ ID NO: 431021
auucaucugccacuccacu

SEQ ID NO: 431023 - RNA, 19 nt, Artificial Sequence
  Description of Artificial Sequence: Synthetic oligonucleotide
  Sense strand starting at position 3273 of SEQ ID NO: 316667
gacaaugaauuuggaguua

SEQ ID NO: 431024 - RNA, 19 nt, Artificial Sequence
  Description of Artificial Sequence: Synthetic oligonucleotide
  Antisense Strand to SEQ ID NO: 431023
uaacuccaaauucauuguc

SEQ ID NO: 431025 - RNA, 19 nt, Artificial Sequence
  Description of Artificial Sequence: Synthetic oligonucleotide
  Sense strand starting at position 3322 of SEQ ID NO: 316667
agacuauugcaguagcaac

SEQ ID NO: 431026 - RNA, 19 nt, Artificial Sequence
  Description of Artificial Sequence: Synthetic oligonucleotide
  Antisense Strand to SEQ ID NO: 431025
guugcuacugcaauagucu

SEQ ID NO: 431027 - RNA, 19 nt, Artificial Sequence
  Description of Artificial Sequence: Synthetic oligonucleotide
  Sense strand starting at position 3497 of SEQ ID NO: 316667
aggaauuuaugcuaaauga

SEQ ID NO: 431028 - RNA, 19 nt, Artificial Sequence
  Description of Artificial Sequence: Synthetic oligonucleotide
  Antisense Strand to SEQ ID NO: 431027
ucauuuagcauaaauuccu

SEQ ID NO: 431029 - RNA, 19 nt, Artificial Sequence
  Description of Artificial Sequence: Synthetic oligonucleotide
  Sense strand starting at position 3508 of SEQ ID NO: 316667
cuaaaugaguuggccaagu

SEQ ID NO: 431030 - RNA, 19 nt, Artificial Sequence
  Description of Artificial Sequence: Synthetic oligonucleotide
  Antisense Strand to SEQ ID NO: 431029
acuuggccaacucauuuag

SEQ ID NO: 431031 - RNA, 19 nt, Artificial Sequence
  Description of Artificial Sequence: Synthetic oligonucleotide
  Sense strand starting at position 3510 of SEQ ID NO: 316667
aaaugaguuggccaaguau

SEQ ID NO: 431032 - RNA, 19 nt, Artificial Sequence
  Description of Artificial Sequence: Synthetic oligonucleotide
  Antisense Strand to SEQ ID NO: 431031
auacuuggccaacucauuu

SEQ ID NO: 431033 - RNA, 19 nt, Artificial Sequence
  Description of Artificial Sequence: Synthetic oligonucleotide
  Sense strand starting at position 3577 of SEQ ID NO: 316667
ggguacaugaacuaugcau

SEQ ID NO: 431034 - RNA, 19 nt, Artificial Sequence
  Description of Artificial Sequence: Synthetic oligonucleotide
  Antisense Strand to SEQ ID NO: 431033
augcauaguucauguaccc

SEQ ID NO: 431035 - RNA, 19 nt, Artificial Sequence
  Description of Artificial Sequence: Synthetic oligonucleotide
  Sense strand starting at position 3579 of SEQ ID NO: 316667
guacaugaacuaugcauau

SEQ ID NO: 431036 - RNA, 19 nt, Artificial Sequence
  Description of Artificial Sequence: Synthetic oligonucleotide
  Antisense Strand to SEQ ID NO: 431035
auaugcauaguucauguac

SEQ ID NO: 431037 - RNA, 19 nt, Artificial Sequence
  Description of Artificial Sequence: Synthetic oligonucleotide
  Sense strand starting at position 3641 of SEQ ID NO: 316667
ggacauaugcaacaugcau

SEQ ID NO: 431038 - RNA, 19 nt, Artificial Sequence
  Description of Artificial Sequence: Synthetic oligonucleotide
  Antisense Strand to SEQ ID NO: 431037
augcauguugcauaugucc

SEQ ID NO: 431039 - RNA, 19 nt, Artificial Sequence
  Description of Artificial Sequence: Synthetic oligonucleotide
  Sense strand starting at position 3934 of SEQ ID NO: 316667
aggauuaauuaguuagugu

SEQ ID NO: 431040 - RNA, 19 nt, Artificial Sequence
  Description of Artificial Sequence: Synthetic oligonucleotide
  Antisense Strand to SEQ ID NO: 431039
acacuaacuaauuaauccu

SEQ ID NO: 431041 - RNA, 19 nt, Artificial Sequence
  Description of Artificial Sequence: Synthetic oligonucleotide
  Sense strand starting at position 3935 of SEQ ID NO: 316667
ggauuaauuaguuaguguc

SEQ ID NO: 431042 - RNA, 19 nt, Artificial Sequence
  Description of Artificial Sequence: Synthetic oligonucleotide
  Antisense Strand to SEQ ID NO: 431041
gacacuaacuaauuaaucc

SEQ ID NO: 431043 - RNA, 19 nt, Artificial Sequence
  Description of Artificial Sequence: Synthetic oligonucleotide
  Sense strand starting at position 3942 of SEQ ID NO: 316667
uuaguuagugucuugcagu

SEQ ID NO: 431044 - RNA, 19 nt, Artificial Sequence
  Description of Artificial Sequence: Synthetic oligonucleotide
  Antisense Strand to SEQ ID NO: 431043
acugcaagacacuaacuaa

SEQ ID NO: 431045 - RNA, 19 nt, Artificial Sequence
  Description of Artificial Sequence: Synthetic oligonucleotide
  Sense strand starting at position 3959 of SEQ ID NO: 316667
gucaguaagaugcaauugu

SEQ ID NO: 431046 - RNA, 19 nt, Artificial Sequence
  Description of Artificial Sequence: Synthetic oligonucleotide
  Antisense Strand to SEQ ID NO: 431045
acaauugcaucuuacugac

SEQ ID NO: 431047 - RNA, 19 nt, Artificial Sequence
  Description of Artificial Sequence: Synthetic oligonucleotide
  Sense strand starting at position 124 of SEQ ID NO: 316668
ccgcaaguugcuguacgaa

SEQ ID NO: 431048 - RNA, 19 nt, Artificial Sequence
  Description of Artificial Sequence: Synthetic oligonucleotide
  Antisense Strand to SEQ ID NO: 431047
uucguacagcaacuugcgg

SEQ ID NO: 431049 - RNA, 19 nt, Artificial Sequence
  Description of Artificial Sequence: Synthetic oligonucleotide
  Sense strand starting at position 157 of SEQ ID NO: 316668
uccaguuauuugccacacu

SEQ ID NO: 431050 - RNA, 19 nt, Artificial Sequence
  Description of Artificial Sequence: Synthetic oligonucleotide
  Antisense Strand to SEQ ID NO: 431049
aguguggcaaauaacugga

SEQ ID NO: 431051 - RNA, 19 nt, Artificial Sequence
  Description of Artificial Sequence: Synthetic oligonucleotide
  Sense strand starting at position 310 of SEQ ID NO: 316668
guaucuguagcugaaacuu

SEQ ID NO: 431052 - RNA, 19 nt, Artificial Sequence
  Description of Artificial Sequence: Synthetic oligonucleotide
  Antisense Strand to SEQ ID NO: 431051
aaguuucagcuacagauac

SEQ ID NO: 431053 - RNA, 19 nt, Artificial Sequence
  Description of Artificial Sequence: Synthetic oligonucleotide
  Sense strand starting at position 422 of SEQ ID NO: 316668
guaaauaccugccuaauug

SEQ ID NO: 431054 - RNA, 19 nt, Artificial Sequence
  Description of Artificial Sequence: Synthetic oligonucleotide
  Antisense Strand to SEQ ID NO: 431053
caauuaggcagguauuuac

SEQ ID NO: 431055 - RNA, 19 nt, Artificial Sequence
  Description of Artificial Sequence: Synthetic oligonucleotide
  Sense strand starting at position 431 of SEQ ID NO: 316668
ugccuaauuguuuagagug

SEQ ID NO: 431056 - RNA, 19 nt, Artificial Sequence
  Description of Artificial Sequence: Synthetic oligonucleotide
  Antisense Strand to SEQ ID NO: 431055
cacucuaaacaauuaggca

SEQ ID NO: 431057 - RNA, 19 nt, Artificial Sequence
  Description of Artificial Sequence: Synthetic oligonucleotide
  Sense strand starting at position 541 of SEQ ID NO: 316668
caaugaaagcgcuaugauu

SEQ ID NO: 431058 - RNA, 19 nt, Artificial Sequence
  Description of Artificial Sequence: Synthetic oligonucleotide
  Antisense Strand to SEQ ID NO: 431057
aaucauagcgcuuucauug

SEQ ID NO: 431059 - RNA, 19 nt, Artificial Sequence
  Description of Artificial Sequence: Synthetic oligonucleotide
  Sense strand starting at position 547 of SEQ ID NO: 316668
aagcgcuaugauuaggaua

SEQ ID NO: 431060 - RNA, 19 nt, Artificial Sequence
  Description of Artificial Sequence: Synthetic oligonucleotide
  Antisense Strand to SEQ ID NO: 431059
uauccuaaucauagcgcuu

SEQ ID NO: 431061 - RNA, 19 nt, Artificial Sequence
  Description of Artificial Sequence: Synthetic oligonucleotide
  Sense strand starting at position 573 of SEQ ID NO: 316668
gcaaacuuuagccugcgua

SEQ ID NO: 431062 - RNA, 19 nt, Artificial Sequence
  Description of Artificial Sequence: Synthetic oligonucleotide
  Antisense Strand to SEQ ID NO: 431061
uacgcaggcuaaaguuugc

SEQ ID NO: 431063 - RNA, 19 nt, Artificial Sequence
  Description of Artificial Sequence: Synthetic oligonucleotide
  Sense strand starting at position 783 of SEQ ID NO: 316668
acgcgcuugcccuuugaaa

SEQ ID NO: 431064 - RNA, 19 nt, Artificial Sequence
  Description of Artificial Sequence: Synthetic oligonucleotide
  Antisense Strand to SEQ ID NO: 431063
uuucaaagggcaagcgcgu

SEQ ID NO: 431065 - RNA, 19 nt, Artificial Sequence
  Description of Artificial Sequence: Synthetic oligonucleotide
  Sense strand starting at position 784 of SEQ ID NO: 316668
cgcgcuugcccuuugaaag

SEQ ID NO: 431066 - RNA, 19 nt, Artificial Sequence
  Description of Artificial Sequence: Synthetic oligonucleotide
  Antisense Strand to SEQ ID NO: 431065
cuuucaaagggcaagcgcg

SEQ ID NO: 431067 - RNA, 19 nt, Artificial Sequence
  Description of Artificial Sequence: Synthetic oligonucleotide
  Sense strand starting at position 932 of SEQ ID NO: 316668
cucacuuguccaggacgaa

SEQ ID NO: 431068 - RNA, 19 nt, Artificial Sequence
  Description of Artificial Sequence: Synthetic oligonucleotide
  Antisense Strand to SEQ ID NO: 431067
uucguccuggacaagugag

SEQ ID NO: 431069 - RNA, 19 nt, Artificial Sequence
  Description of Artificial Sequence: Synthetic oligonucleotide
  Sense strand starting at position 1307 of SEQ ID NO: 316668
gccggaacucuugacgaau

SEQ ID NO: 431070 - RNA, 19 nt, Artificial Sequence
  Description of Artificial Sequence: Synthetic oligonucleotide
  Antisense Strand to SEQ ID NO: 431069
auucgucaagaguuccggc

SEQ ID NO: 431071 - RNA, 19 nt, Artificial Sequence
  Description of Artificial Sequence: Synthetic oligonucleotide
  Sense strand starting at position 1826 of SEQ ID NO: 316668
ggguuccugccgaguugaa

SEQ ID NO: 431072 - RNA, 19 nt, Artificial Sequence
  Description of Artificial Sequence: Synthetic oligonucleotide
  Antisense Strand to SEQ ID NO: 431071
uucaacucggcaggaaccc

SEQ ID NO: 431073 - RNA, 19 nt, Artificial Sequence
  Description of Artificial Sequence: Synthetic oligonucleotide
  Sense strand starting at position 1835 of SEQ ID NO: 316668
ccgaguugaagaugacuaa

SEQ ID NO: 431074 - RNA, 19 nt, Artificial Sequence
  Description of Artificial Sequence: Synthetic oligonucleotide
  Antisense Strand to SEQ ID NO: 431073
uuagucaucuucaacucgg

SEQ ID NO: 431075 - RNA, 19 nt, Artificial Sequence
  Description of Artificial Sequence: Synthetic oligonucleotide
  Sense strand starting at position 2000 of SEQ ID NO: 316668
uaaggauuccaugggaggu

SEQ ID NO: 431076 - RNA, 19 nt, Artificial Sequence
  Description of Artificial Sequence: Synthetic oligonucleotide
  Antisense Strand to SEQ ID NO: 431075
accucccauggaauccuua

SEQ ID NO: 431077 - RNA, 19 nt, Artificial Sequence
  Description of Artificial Sequence: Synthetic oligonucleotide
  Sense strand starting at position 2540 of SEQ ID NO: 316668
uaugucagcucuuugaaga

SEQ ID NO: 431078 - RNA, 19 nt, Artificial Sequence
  Description of Artificial Sequence: Synthetic oligonucleotide
  Antisense Strand to SEQ ID NO: 431077
ucuucaaagagcugacaua

SEQ ID NO: 431079 - RNA, 19 nt, Artificial Sequence
  Description of Artificial Sequence: Synthetic oligonucleotide
  Sense strand starting at position 2541 of SEQ ID NO: 316668
augucagcucuuugaagau

SEQ ID NO: 431080 - RNA, 19 nt, Artificial Sequence
  Description of Artificial Sequence: Synthetic oligonucleotide
  Antisense Strand to SEQ ID NO: 431079
aucuucaaagagcugacau

SEQ ID NO: 431081 - RNA, 19 nt, Artificial Sequence
  Description of Artificial Sequence: Synthetic oligonucleotide
  Sense strand starting at position 2590 of SEQ ID NO: 316668
gagugccuauuauuugcua

SEQ ID NO: 431082 - RNA, 19 nt, Artificial Sequence
  Description of Artificial Sequence: Synthetic oligonucleotide
  Antisense Strand to SEQ ID NO: 431081
uagcaaauaauaggcacuc

SEQ ID NO: 431083 - RNA, 19 nt, Artificial Sequence
  Description of Artificial Sequence: Synthetic oligonucleotide
  Sense strand starting at position 2594 of SEQ ID NO: 316668
gccuauuauuugcuaggca

SEQ ID NO: 431084 - RNA, 19 nt, Artificial Sequence
  Description of Artificial Sequence: Synthetic oligonucleotide
  Antisense Strand to SEQ ID NO: 431083
ugccuagcaaauaauaggc

SEQ ID NO: 431085 - RNA, 19 nt, Artificial Sequence
  Description of Artificial Sequence: Synthetic oligonucleotide
  Sense strand starting at position 2617 of SEQ ID NO: 316668
uccagaaguggagguuagu

SEQ ID NO: 431086 - RNA, 19 nt, Artificial Sequence
  Description of Artificial Sequence: Synthetic oligonucleotide
  Antisense Strand to SEQ ID NO: 431085
acuaaccuccacuucugga

SEQ ID NO: 431087 - RNA, 19 nt, Artificial Sequence
  Description of Artificial Sequence: Synthetic oligonucleotide
  Sense strand starting at position 2627 of SEQ ID NO: 316668
gagguuagugcacagaaca

SEQ ID NO: 431088 - RNA, 19 nt, Artificial Sequence
  Description of Artificial Sequence: Synthetic oligonucleotide
  Antisense Strand to SEQ ID NO: 431087
uguucugugcacuaaccuc

SEQ ID NO: 431089 - RNA, 19 nt, Artificial Sequence
  Description of Artificial Sequence: Synthetic oligonucleotide
  Sense strand starting at position 2673 of SEQ ID NO: 316668
cugacagucuggcugaaga

SEQ ID NO: 431090 - RNA, 19 nt, Artificial Sequence
  Description of Artificial Sequence: Synthetic oligonucleotide
  Antisense Strand to SEQ ID NO: 431089
ucuucagccagacugucag

SEQ ID NO: 431091 - RNA, 19 nt, Artificial Sequence
  Description of Artificial Sequence: Synthetic oligonucleotide
  Sense strand starting at position 2675 of SEQ ID NO: 316668
gacagucuggcugaagagu

SEQ ID NO: 431092 - RNA, 19 nt, Artificial Sequence
  Description of Artificial Sequence: Synthetic oligonucleotide
  Antisense Strand to SEQ ID NO: 431091
acucuucagccagacuguc

SEQ ID NO: 431093 - RNA, 19 nt, Artificial Sequence
  Description of Artificial Sequence: Synthetic oligonucleotide
  Sense strand starting at position 2792 of SEQ ID NO: 316668
augacagacucagugacua

SEQ ID NO: 431094 - RNA, 19 nt, Artificial Sequence
  Description of Artificial Sequence: Synthetic oligonucleotide
  Antisense Strand to SEQ ID NO: 431093
uagucacugagucugucau

SEQ ID NO: 431095 - RNA, 19 nt, Artificial Sequence
  Description of Artificial Sequence: Synthetic oligonucleotide
  Sense strand starting at position 2864 of SEQ ID NO: 316668
ugcaaagguccauagacau

SEQ ID NO: 431096 - RNA, 19 nt, Artificial Sequence
  Description of Artificial Sequence: Synthetic oligonucleotide
  Antisense Strand to SEQ ID NO: 431095
augucuauggaccuuugca

SEQ ID NO: 431097 - RNA, 19 nt, Artificial Sequence
  Description of Artificial Sequence: Synthetic oligonucleotide
  Sense strand starting at position 2871 of SEQ ID NO: 316668
guccauagacauuagcuua

SEQ ID NO: 431098 - RNA, 19 nt, Artificial Sequence
  Description of Artificial Sequence: Synthetic oligonucleotide
  Antisense Strand to SEQ ID NO: 431097
uaagcuaaugucuauggac

SEQ ID NO: 431099 - RNA, 19 nt, Artificial Sequence
  Description of Artificial Sequence: Synthetic oligonucleotide
  Sense strand starting at position 2928 of SEQ ID NO: 316668
gagcuuugcagguaagaug

SEQ ID NO: 431100 - RNA, 19 nt, Artificial Sequence
  Description of Artificial Sequence: Synthetic oligonucleotide
  Antisense Strand to SEQ ID NO: 431099
caucuuaccugcaaagcuc

SEQ ID NO: 431101 - RNA, 19 nt, Artificial Sequence
  Description of Artificial Sequence: Synthetic oligonucleotide
  Sense strand starting at position 3062 of SEQ ID NO: 316668
aguggaguggcagaugaau

SEQ ID NO: 431102 - RNA, 19 nt, Artificial Sequence
  Description of Artificial Sequence: Synthetic oligonucleotide
  Antisense Strand to SEQ ID NO: 431101
auucaucugccacuccacu

SEQ ID NO: 431103 - RNA, 19 nt, Artificial Sequence
  Description of Artificial Sequence: Synthetic oligonucleotide
  Sense strand starting at position 3124 of SEQ ID NO: 316668
gacaaugaauuuggaguua

SEQ ID NO: 431104 - RNA, 19 nt, Artificial Sequence
  Description of Artificial Sequence: Synthetic oligonucleotide
  Antisense Strand to SEQ ID NO: 431103
uaacuccaaauucauuguc

SEQ ID NO: 431105 - RNA, 19 nt, Artificial Sequence
  Description of Artificial Sequence: Synthetic oligonucleotide
  Sense strand starting at position 3173 of SEQ ID NO: 316668
agacuauugcaguagcaac

SEQ ID NO: 431106 - RNA, 19 nt, Artificial Sequence
  Description of Artificial Sequence: Synthetic oligonucleotide
  Antisense Strand to SEQ ID NO: 431105
guugcuacugcaauagucu

SEQ ID NO: 431107 - RNA, 19 nt, Artificial Sequence
  Description of Artificial Sequence: Synthetic oligonucleotide
  Sense strand starting at position 3348 of SEQ ID NO: 316668
aggaauuuaugcuaaauga

SEQ ID NO: 431108 - RNA, 19 nt, Artificial Sequence
  Description of Artificial Sequence: Synthetic oligonucleotide
  Antisense Strand to SEQ ID NO: 431107
ucauuuagcauaaauuccu

SEQ ID NO: 431109 - RNA, 19 nt, Artificial Sequence
  Description of Artificial Sequence: Synthetic oligonucleotide
  Sense strand starting at position 3359 of SEQ ID NO: 316668
cuaaaugaguuggccaagu

SEQ ID NO: 431110 - RNA, 19 nt, Artificial Sequence
  Description of Artificial Sequence: Synthetic oligonucleotide
  Antisense Strand to SEQ ID NO: 431109
acuuggccaacucauuuag

SEQ ID NO: 431111 - RNA, 19 nt, Artificial Sequence
  Description of Artificial Sequence: Synthetic oligonucleotide
  Sense strand starting at position 3361 of SEQ ID NO: 316668
aaaugaguuggccaaguau

SEQ ID NO: 431112 - RNA, 19 nt, Artificial Sequence
  Description of Artificial Sequence: Synthetic oligonucleotide
  Antisense Strand to SEQ ID NO: 431111
auacuuggccaacucauuu

SEQ ID NO: 431113 - RNA, 19 nt, Artificial Sequence
  Description of Artificial Sequence: Synthetic oligonucleotide
  Sense strand starting at position 3428 of SEQ ID NO: 316668
ggguacaugaacuaugcau

SEQ ID NO: 431114 - RNA, 19 nt, Artificial Sequence
  Description of Artificial Sequence: Synthetic oligonucleotide
  Antisense Strand to SEQ ID NO: 431113
augcauaguucauguaccc

SEQ ID NO: 431115 - RNA, 19 nt, Artificial Sequence
  Description of Artificial Sequence: Synthetic oligonucleotide
  Sense strand starting at position 3430 of SEQ ID NO: 316668
guacaugaacuaugcauau

SEQ ID NO: 431116 - RNA, 19 nt, Artificial Sequence
  Description of Artificial Sequence: Synthetic oligonucleotide
  Antisense Strand to SEQ ID NO: 431115
auaugcauaguucauguac

SEQ ID NO: 431117 - RNA, 19 nt, Artificial Sequence
  Description of Artificial Sequence: Synthetic oligonucleotide
  Sense strand starting at position 3492 of SEQ ID NO: 316668
ggacauaugcaacaugcau

SEQ ID NO: 431118 - RNA, 19 nt, Artificial Sequence
  Description of Artificial Sequence: Synthetic oligonucleotide
  Antisense Strand to SEQ ID NO: 431117
augcauguugcauaugucc

SEQ ID NO: 431119 - RNA, 19 nt, Artificial Sequence
  Description of Artificial Sequence: Synthetic oligonucleotide
  Sense strand starting at position 3785 of SEQ ID NO: 316668
aggauuaauuaguuagugu

SEQ ID NO: 431120 - RNA, 19 nt, Artificial Sequence
  Description of Artificial Sequence: Synthetic oligonucleotide
  Antisense Strand to SEQ ID NO: 431119
acacuaacuaauuaauccu

SEQ ID NO: 431121 - RNA, 19 nt, Artificial Sequence
  Description of Artificial Sequence: Synthetic oligonucleotide
  Sense strand starting at position 3786 of SEQ ID NO: 316668
ggauuaauuaguuaguguc

SEQ ID NO: 431122 - RNA, 19 nt, Artificial Sequence
  Description of Artificial Sequence: Synthetic oligonucleotide
  Antisense Strand to SEQ ID NO: 431121
gacacuaacuaauuaaucc

SEQ ID NO: 431123 - RNA, 19 nt, Artificial Sequence
  Description of Artificial Sequence: Synthetic oligonucleotide
  Sense strand starting at position 3793 of SEQ ID NO: 316668
uuaguuagugucuugcagu

SEQ ID NO: 431124 - RNA, 19 nt, Artificial Sequence
  Description of Artificial Sequence: Synthetic oligonucleotide
  Antisense Strand to SEQ ID NO: 431123
acugcaagacacuaacuaa

SEQ ID NO: 431125 - RNA, 19 nt, Artificial Sequence
  Description of Artificial Sequence: Synthetic oligonucleotide
  Sense strand starting at position 3810 of SEQ ID NO: 316668
gucaguaagaugcaauugu

SEQ ID NO: 431126 - RNA, 19 nt, Artificial Sequence
  Description of Artificial Sequence: Synthetic oligonucleotide
  Antisense Strand to SEQ ID NO: 431125
acaauugcaucuuacugac

SEQ ID NO: 431127 - RNA, 19 nt, Artificial Sequence
  Description of Artificial Sequence: Synthetic oligonucleotide
  Sense strand starting at position 8 of SEQ ID NO: 316669
ccagucucuugcuugagaa

SEQ ID NO: 431128 - RNA, 19 nt, Artificial Sequence
  Description of Artificial Sequence: Synthetic oligonucleotide
  Antisense Strand to SEQ ID NO: 431127
uucucaagcaagagacugg

SEQ ID NO: 431129 - RNA, 19 nt, Artificial Sequence
  Description of Artificial Sequence: Synthetic oligonucleotide
  Sense strand starting at position 9 of SEQ ID NO: 316669
cagucucuugcuugagaac

SEQ ID NO: 431130 - RNA, 19 nt, Artificial Sequence
  Description of Artificial Sequence: Synthetic oligonucleotide
  Antisense Strand to SEQ ID NO: 431129
guucucaagcaagagacug

SEQ ID NO: 431131 - RNA, 19 nt, Artificial Sequence
  Description of Artificial Sequence: Synthetic oligonucleotide
  Sense strand starting at position 10 of SEQ ID NO: 316669
agucucuugcuugagaaca

SEQ ID NO: 431132 - RNA, 19 nt, Artificial Sequence
  Description of Artificial Sequence: Synthetic oligonucleotide
  Antisense Strand to SEQ ID NO: 431131
uguucucaagcaagagacu

SEQ ID NO: 431133 - RNA, 19 nt, Artificial Sequence
  Description of Artificial Sequence: Synthetic oligonucleotide
  Sense strand starting at position 38 of SEQ ID NO: 316669
agagauaagcuuggccuca

SEQ ID NO: 431134 - RNA, 19 nt, Artificial Sequence
  Description of Artificial Sequence: Synthetic oligonucleotide
  Antisense Strand to SEQ ID NO: 431133
ugaggccaagcuuaucucu

SEQ ID NO: 431135 - RNA, 19 nt, Artificial Sequence
  Description of Artificial Sequence: Synthetic oligonucleotide
  Sense strand starting at position 39 of SEQ ID NO: 316669
gagauaagcuuggccucaa

SEQ ID NO: 431136 - RNA, 19 nt, Artificial Sequence
  Description of Artificial Sequence: Synthetic oligonucleotide
  Antisense Strand to SEQ ID NO: 431135
uugaggccaagcuuaucuc

SEQ ID NO: 431137 - RNA, 19 nt, Artificial Sequence
  Description of Artificial Sequence: Synthetic oligonucleotide
  Sense strand starting at position 40 of SEQ ID NO: 316669
agauaagcuuggccucaaa

SEQ ID NO: 431138 - RNA, 19 nt, Artificial Sequence
  Description of Artificial Sequence: Synthetic oligonucleotide
  Antisense Strand to SEQ ID NO: 431137
uuugaggccaagcuuaucu

SEQ ID NO: 431139 - RNA, 19 nt, Artificial Sequence
  Description of Artificial Sequence: Synthetic oligonucleotide
  Sense strand starting at position 162 of SEQ ID NO: 316669
cauccaggcuugcugagau

SEQ ID NO: 431140 - RNA, 19 nt, Artificial Sequence
  Description of Artificial Sequence: Synthetic oligonucleotide
  Antisense Strand to SEQ ID NO: 431139
aucucagcaagccuggaug

SEQ ID NO: 431141 - RNA, 19 nt, Artificial Sequence
  Description of Artificial Sequence: Synthetic oligonucleotide
  Sense strand starting at position 336 of SEQ ID NO: 316669
ccugguaauguuuaauaau

SEQ ID NO: 431142 - RNA, 19 nt, Artificial Sequence
  Description of Artificial Sequence: Synthetic oligonucleotide
  Antisense Strand to SEQ ID NO: 431141
auuauuaaacauuaccagg

SEQ ID NO: 431143 - RNA, 19 nt, Artificial Sequence
  Description of Artificial Sequence: Synthetic oligonucleotide
  Sense strand starting at position 533 of SEQ ID NO: 316669
cuggccuaauuacuugaua

SEQ ID NO: 431144 - RNA, 19 nt, Artificial Sequence
  Description of Artificial Sequence: Synthetic oligonucleotide
  Antisense Strand to SEQ ID NO: 431143
uaucaaguaauuaggccag

SEQ ID NO: 431145 - RNA, 19 nt, Artificial Sequence
  Description of Artificial Sequence: Synthetic oligonucleotide
  Sense strand starting at position 755 of SEQ ID NO: 316669
gauuacuuuguaugaguaa

SEQ ID NO: 431146 - RNA, 19 nt, Artificial Sequence
  Description of Artificial Sequence: Synthetic oligonucleotide
  Antisense Strand to SEQ ID NO: 431145
uuacucauacaaaguaauc

SEQ ID NO: 431147 - RNA, 19 nt, Artificial Sequence
  Description of Artificial Sequence: Synthetic oligonucleotide
  Sense strand starting at position 785 of SEQ ID NO: 316669
ugugccaaaguuuaacaaa

SEQ ID NO: 431148 - RNA, 19 nt, Artificial Sequence
  Description of Artificial Sequence: Synthetic oligonucleotide
  Antisense Strand to SEQ ID NO: 431147
uuuguuaaacuuuggcaca

SEQ ID NO: 431149 - RNA, 19 nt, Artificial Sequence
  Description of Artificial Sequence: Synthetic oligonucleotide
  Sense strand starting at position 1405 of SEQ ID NO: 316669
uaacuugccucugugggau

SEQ ID NO: 431150 - RNA, 19 nt, Artificial Sequence
  Description of Artificial Sequence: Synthetic oligonucleotide
  Antisense Strand to SEQ ID NO: 431149
aucccacagaggcaaguua

SEQ ID NO: 431151 - RNA, 19 nt, Artificial Sequence
  Description of Artificial Sequence: Synthetic oligonucleotide
  Sense strand starting at position 1419 of SEQ ID NO: 316669
gggauaauacguuguuuca

SEQ ID NO: 431152 - RNA, 19 nt, Artificial Sequence
  Description of Artificial Sequence: Synthetic oligonucleotide
  Antisense Strand to SEQ ID NO: 431151
ugaaacaacguauuauccc

SEQ ID NO: 431153 - RNA, 19 nt, Artificial Sequence
  Description of Artificial Sequence: Synthetic oligonucleotide
  Sense strand starting at position 1505 of SEQ ID NO: 316669
uuaaauggauucuuaggua

SEQ ID NO: 431154 - RNA, 19 nt, Artificial Sequence
  Description of Artificial Sequence: Synthetic oligonucleotide
  Antisense Strand to SEQ ID NO: 431153
uaccuaagaauccauuuaa

SEQ ID NO: 431155 - RNA, 19 nt, Artificial Sequence
  Description of Artificial Sequence: Synthetic oligonucleotide
  Sense strand starting at position 1512 of SEQ ID NO: 316669
gauucuuagguaugcucaa

SEQ ID NO: 431156 - RNA, 19 nt, Artificial Sequence
  Description of Artificial Sequence: Synthetic oligonucleotide
  Antisense Strand to SEQ ID NO: 431155
uugagcauaccuaagaauc

SEQ ID NO: 431157 - RNA, 19 nt, Artificial Sequence
  Description of Artificial Sequence: Synthetic oligonucleotide
  Sense strand starting at position 1513 of SEQ ID NO: 316669
auucuuagguaugcucaaa

SEQ ID NO: 431158 - RNA, 19 nt, Artificial Sequence
  Description of Artificial Sequence: Synthetic oligonucleotide
  Antisense Strand to SEQ ID NO: 431157
uuugagcauaccuaagaau

SEQ ID NO: 431159 - RNA, 19 nt, Artificial Sequence
  Description of Artificial Sequence: Synthetic oligonucleotide
  Sense strand starting at position 2032 of SEQ ID NO: 316669
uuaguuaucagucauaggu

SEQ ID NO: 431160 - RNA, 19 nt, Artificial Sequence
  Description of Artificial Sequence: Synthetic oligonucleotide
  Antisense Strand to SEQ ID NO: 431159
accuaugacugauaacuaa

SEQ ID NO: 431161 - RNA, 19 nt, Artificial Sequence
  Description of Artificial Sequence: Synthetic oligonucleotide
  Sense strand starting at position 2036 of SEQ ID NO: 316669
uuaucagucauaggugagu

SEQ ID NO: 431162 - RNA, 19 nt, Artificial Sequence
  Description of Artificial Sequence: Synthetic oligonucleotide
  Antisense Strand to SEQ ID NO: 431161
acucaccuaugacugauaa

SEQ ID NO: 431163 - RNA, 19 nt, Artificial Sequence
  Description of Artificial Sequence: Synthetic oligonucleotide
  Sense strand starting at position 2045 of SEQ ID NO: 316669
auaggugaguaggcagaau

SEQ ID NO: 431164 - RNA, 19 nt, Artificial Sequence
  Description of Artificial Sequence: Synthetic oligonucleotide
  Antisense Strand to SEQ ID NO: 431163
auucugccuacucaccuau

SEQ ID NO: 431165 - RNA, 19 nt, Artificial Sequence
  Description of Artificial Sequence: Synthetic oligonucleotide
  Sense strand starting at position 2179 of SEQ ID NO: 316669
auggaaagcuaaguugauu

SEQ ID NO: 431166 - RNA, 19 nt, Artificial Sequence
  Description of Artificial Sequence: Synthetic oligonucleotide
  Antisense Strand to SEQ ID NO: 431165
aaucaacuuagcuuuccau

SEQ ID NO: 431167 - RNA, 19 nt, Artificial Sequence
  Description of Artificial Sequence: Synthetic oligonucleotide
  Sense strand starting at position 2191 of SEQ ID NO: 316669
guugauuacccauaaaguu

SEQ ID NO: 431168 - RNA, 19 nt, Artificial Sequence
  Description of Artificial Sequence: Synthetic oligonucleotide
  Antisense Strand to SEQ ID NO: 431167
aacuuuauggguaaucaac

SEQ ID NO: 431169 - RNA, 19 nt, Artificial Sequence
  Description of Artificial Sequence: Synthetic oligonucleotide
  Sense strand starting at position 2232 of SEQ ID NO: 316669
uguuguuaacauggaaacu

SEQ ID NO: 431170 - RNA, 19 nt, Artificial Sequence
  Description of Artificial Sequence: Synthetic oligonucleotide
  Antisense Strand to SEQ ID NO: 431169
aguuuccauguuaacaaca

SEQ ID NO: 431171 - RNA, 19 nt, Artificial Sequence
  Description of Artificial Sequence: Synthetic oligonucleotide
  Sense strand starting at position 2281 of SEQ ID NO: 316669
cuuaaauugcuagguucua

SEQ ID NO: 431172 - RNA, 19 nt, Artificial Sequence
  Description of Artificial Sequence: Synthetic oligonucleotide
  Antisense Strand to SEQ ID NO: 431171
uagaaccuagcaauuuaag

SEQ ID NO: 431173 - RNA, 19 nt, Artificial Sequence
  Description of Artificial Sequence: Synthetic oligonucleotide
  Sense strand starting at position 2282 of SEQ ID NO: 316669
uuaaauugcuagguucuau

SEQ ID NO: 431174 - RNA, 19 nt, Artificial Sequence
  Description of Artificial Sequence: Synthetic oligonucleotide
  Antisense Strand to SEQ ID NO: 431173
auagaaccuagcaauuuaa

SEQ ID NO: 431175 - RNA, 19 nt, Artificial Sequence
  Description of Artificial Sequence: Synthetic oligonucleotide
  Sense strand starting at position 2292 of SEQ ID NO: 316669
agguucuauguguauccau

SEQ ID NO: 431176 - RNA, 19 nt, Artificial Sequence
  Description of Artificial Sequence: Synthetic oligonucleotide
  Antisense Strand to SEQ ID NO: 431175
auggauacacauagaaccu

SEQ ID NO: 431177 - RNA, 19 nt, Artificial Sequence
  Description of Artificial Sequence: Synthetic oligonucleotide
  Sense strand starting at position 2295 of SEQ ID NO: 316669
uucuauguguauccauaca

SEQ ID NO: 431178 - RNA, 19 nt, Artificial Sequence
  Description of Artificial Sequence: Synthetic oligonucleotide
  Antisense Strand to SEQ ID NO: 431177
uguauggauacacauagaa

SEQ ID NO: 431179 - RNA, 19 nt, Artificial Sequence
  Description of Artificial Sequence: Synthetic oligonucleotide
  Sense strand starting at position 2689 of SEQ ID NO: 316669
caauauaguguuggaaacu

SEQ ID NO: 431180 - RNA, 19 nt, Artificial Sequence
  Description of Artificial Sequence: Synthetic oligonucleotide
  Antisense Strand to SEQ ID NO: 431179
aguuuccaacacuauauug

SEQ ID NO: 431181 - RNA, 19 nt, Artificial Sequence
  Description of Artificial Sequence: Synthetic oligonucleotide
  Sense strand starting at position 2698 of SEQ ID NO: 316669
guuggaaacuaucuagaua

SEQ ID NO: 431182 - RNA, 19 nt, Artificial Sequence
  Description of Artificial Sequence: Synthetic oligonucleotide
  Antisense Strand to SEQ ID NO: 431181
uaucuagauaguuuccaac

SEQ ID NO: 431183 - RNA, 19 nt, Artificial Sequence
  Description of Artificial Sequence: Synthetic oligonucleotide
  Sense strand starting at position 2772 of SEQ ID NO: 316669
gcuacuugcuauuuauuga

SEQ ID NO: 431184 - RNA, 19 nt, Artificial Sequence
  Description of Artificial Sequence: Synthetic oligonucleotide
  Antisense Strand to SEQ ID NO: 431183
ucaauaaauagcaaguagc

SEQ ID NO: 431185 - RNA, 19 nt, Artificial Sequence
  Description of Artificial Sequence: Synthetic oligonucleotide
  Sense strand starting at position 2887 of SEQ ID NO: 316669
agugucaacugaucagcau

SEQ ID NO: 431186 - RNA, 19 nt, Artificial Sequence
  Description of Artificial Sequence: Synthetic oligonucleotide
  Antisense Strand to SEQ ID NO: 431185
augcugaucaguugacacu

SEQ ID NO: 431187 - RNA, 19 nt, Artificial Sequence
  Description of Artificial Sequence: Synthetic oligonucleotide
  Sense strand starting at position 2965 of SEQ ID NO: 316669
agcaguauguauuuaugua

SEQ ID NO: 431188 - RNA, 19 nt, Artificial Sequence
  Description of Artificial Sequence: Synthetic oligonucleotide
  Antisense Strand to SEQ ID NO: 431187
uacauaaauacauacugcu

SEQ ID NO: 431189 - RNA, 19 nt, Artificial Sequence
  Description of Artificial Sequence: Synthetic oligonucleotide
  Sense strand starting at position 2973 of SEQ ID NO: 316669
guauuuauguaauacacac

SEQ ID NO: 431190 - RNA, 19 nt, Artificial Sequence
  Description of Artificial Sequence: Synthetic oligonucleotide
  Antisense Strand to SEQ ID NO: 431189
guguguauuacauaaauac

SEQ ID NO: 431191 - RNA, 19 nt, Artificial Sequence
  Description of Artificial Sequence: Synthetic oligonucleotide
  Sense strand starting at position 3076 of SEQ ID NO: 316669
aucugauuaccuuaccagu

SEQ ID NO: 431192 - RNA, 19 nt, Artificial Sequence
  Description of Artificial Sequence: Synthetic oligonucleotide
  Antisense Strand to SEQ ID NO: 431191
acugguaagguaaucagau

SEQ ID NO: 431193 - RNA, 19 nt, Artificial Sequence
  Description of Artificial Sequence: Synthetic oligonucleotide
  Sense strand starting at position 3078 of SEQ ID NO: 316669
cugauuaccuuaccaguau

SEQ ID NO: 431194 - RNA, 19 nt, Artificial Sequence
  Description of Artificial Sequence: Synthetic oligonucleotide
  Antisense Strand to SEQ ID NO: 431193
auacugguaagguaaucag

SEQ ID NO: 431195 - RNA, 19 nt, Artificial Sequence
  Description of Artificial Sequence: Synthetic oligonucleotide
  Sense strand starting at position 3089 of SEQ ID NO: 316669
accaguauaccugguacua

SEQ ID NO: 431196 - RNA, 19 nt, Artificial Sequence
  Description of Artificial Sequence: Synthetic oligonucleotide
  Antisense Strand to SEQ ID NO: 431195
uaguaccagguauacuggu

SEQ ID NO: 431197 - RNA, 19 nt, Artificial Sequence
  Description of Artificial Sequence: Synthetic oligonucleotide
  Sense strand starting at position 3292 of SEQ ID NO: 316669
guauaauugcuauauguag

SEQ ID NO: 431198 - RNA, 19 nt, Artificial Sequence
  Description of Artificial Sequence: Synthetic oligonucleotide
  Antisense Strand to SEQ ID NO: 431197
cuacauauagcaauuauac

SEQ ID NO: 431199 - RNA, 19 nt, Artificial Sequence
  Description of Artificial Sequence: Synthetic oligonucleotide
  Sense strand starting at position 3609 of SEQ ID NO: 316669
cccagauaauagguacuua

SEQ ID NO: 431200 - RNA, 19 nt, Artificial Sequence
  Description of Artificial Sequence: Synthetic oligonucleotide
  Antisense Strand to SEQ ID NO: 431199
uaaguaccuauuaucuggg

SEQ ID NO: 431201 - RNA, 19 nt, Artificial Sequence
  Description of Artificial Sequence: Synthetic oligonucleotide
  Sense strand starting at position 3613 of SEQ ID NO: 316669
gauaauagguacuuaaugu

SEQ ID NO: 431202 - RNA, 19 nt, Artificial Sequence
  Description of Artificial Sequence: Synthetic oligonucleotide
  Antisense Strand to SEQ ID NO: 431201
acauuaaguaccuauuauc

SEQ ID NO: 431203 - RNA, 19 nt, Artificial Sequence
  Description of Artificial Sequence: Synthetic oligonucleotide
  Sense strand starting at position 3710 of SEQ ID NO: 316669
ggcuuauaauauuccauag

SEQ ID NO: 431204 - RNA, 19 nt, Artificial Sequence
  Description of Artificial Sequence: Synthetic oligonucleotide
  Antisense Strand to SEQ ID NO: 431203
cuauggaauauuauaagcc

SEQ ID NO: 431205 - RNA, 19 nt, Artificial Sequence
  Description of Artificial Sequence: Synthetic oligonucleotide
  Sense strand starting at position 3788 of SEQ ID NO: 316669
gaaagaugguaguuaauua

SEQ ID NO: 431206 - RNA, 19 nt, Artificial Sequence
  Description of Artificial Sequence: Synthetic oligonucleotide
  Antisense Strand to SEQ ID NO: 431205
uaauuaacuaccaucuuuc

SEQ ID NO: 431207 - RNA, 19 nt, Artificial Sequence
  Description of Artificial Sequence: Synthetic oligonucleotide
  Sense strand starting at position 157 of SEQ ID NO: 316670
ggguguugccagcauugaa

SEQ ID NO: 431208 - RNA, 19 nt, Artificial Sequence
  Description of Artificial Sequence: Synthetic oligonucleotide
  Antisense Strand to SEQ ID NO: 431207
uucaaugcuggcaacaccc

SEQ ID NO: 431209 - RNA, 19 nt, Artificial Sequence
  Description of Artificial Sequence: Synthetic oligonucleotide
  Sense strand starting at position 194 of SEQ ID NO: 316670
gcuggagauucuucuuauc

SEQ ID NO: 431210 - RNA, 19 nt, Artificial Sequence
  Description of Artificial Sequence: Synthetic oligonucleotide
  Antisense Strand to SEQ ID NO: 431209
gauaagaagaaucuccagc

SEQ ID NO: 431211 - RNA, 19 nt, Artificial Sequence
  Description of Artificial Sequence: Synthetic oligonucleotide
  Sense strand starting at position 196 of SEQ ID NO: 316670
uggagauucuucuuaucug

SEQ ID NO: 431212 - RNA, 19 nt, Artificial Sequence
  Description of Artificial Sequence: Synthetic oligonucleotide
  Antisense Strand to SEQ ID NO: 431211
cagauaagaagaaucucca

SEQ ID NO: 431213 - RNA, 19 nt, Artificial Sequence
  Description of Artificial Sequence: Synthetic oligonucleotide
  Sense strand starting at position 220 of SEQ ID NO: 316670
acuggugcacgguagauau

SEQ ID NO: 431214 - RNA, 19 nt, Artificial Sequence
  Description of Artificial Sequence: Synthetic oligonucleotide
  Antisense Strand to SEQ ID NO: 431213
auaucuaccgugcaccagu

SEQ ID NO: 431215 - RNA, 19 nt, Artificial Sequence
  Description of Artificial Sequence: Synthetic oligonucleotide
  Sense strand starting at position 341 of SEQ ID NO: 316670
agcccagagagguauggua

SEQ ID NO: 431216 - RNA, 19 nt, Artificial Sequence
  Description of Artificial Sequence: Synthetic oligonucleotide
  Antisense Strand to SEQ ID NO: 431215
uaccauaccucucugggcu

SEQ ID NO: 431217 - RNA, 19 nt, Artificial Sequence
  Description of Artificial Sequence: Synthetic oligonucleotide
  Sense strand starting at position 343 of SEQ ID NO: 316670
cccagagagguaugguaau

SEQ ID NO: 431218 - RNA, 19 nt, Artificial Sequence
  Description of Artificial Sequence: Synthetic oligonucleotide
  Antisense Strand to SEQ ID NO: 431217
auuaccauaccucucuggg

SEQ ID NO: 431219 - RNA, 19 nt, Artificial Sequence
  Description of Artificial Sequence: Synthetic oligonucleotide
  Sense strand starting at position 356 of SEQ ID NO: 316670
gguaaugucccacagucac

SEQ ID NO: 431220 - RNA, 19 nt, Artificial Sequence
  Description of Artificial Sequence: Synthetic oligonucleotide
  Antisense Strand to SEQ ID NO: 431219
gugacugugggacauuacc

SEQ ID NO: 431221 - RNA, 19 nt, Artificial Sequence
  Description of Artificial Sequence: Synthetic oligonucleotide
  Sense strand starting at position 407 of SEQ ID NO: 316670
gcagcuagacucuaaaggu

SEQ ID NO: 431222 - RNA, 19 nt, Artificial Sequence
  Description of Artificial Sequence: Synthetic oligonucleotide
  Antisense Strand to SEQ ID NO: 431221
accuuuagagucuagcugc

SEQ ID NO: 431223 - RNA, 19 nt, Artificial Sequence
  Description of Artificial Sequence: Synthetic oligonucleotide
  Sense strand starting at position 570 of SEQ ID NO: 316670
agaauuacuccacagcgaa

SEQ ID NO: 431224 - RNA, 19 nt, Artificial Sequence
  Description of Artificial Sequence: Synthetic oligonucleotide
  Antisense Strand to SEQ ID NO: 431223
uucgcuguggaguaauucu

SEQ ID NO: 431225 - RNA, 19 nt, Artificial Sequence
  Description of Artificial Sequence: Synthetic oligonucleotide
  Sense strand starting at position 748 of SEQ ID NO: 316670
ccuuucuggucagucugaa

SEQ ID NO: 431226 - RNA, 19 nt, Artificial Sequence
  Description of Artificial Sequence: Synthetic oligonucleotide
  Antisense Strand to SEQ ID NO: 431225
uucagacugaccagaaagg

SEQ ID NO: 431227 - RNA, 19 nt, Artificial Sequence
  Description of Artificial Sequence: Synthetic oligonucleotide
  Sense strand starting at position 841 of SEQ ID NO: 316670
gauguuggugaacauagua

SEQ ID NO: 431228 - RNA, 19 nt, Artificial Sequence
  Description of Artificial Sequence: Synthetic oligonucleotide
  Antisense Strand to SEQ ID NO: 431227
uacuauguucaccaacauc

SEQ ID NO: 431229 - RNA, 19 nt, Artificial Sequence
  Description of Artificial Sequence: Synthetic oligonucleotide
  Sense strand starting at position 863 of SEQ ID NO: 316670
guaucuuucccggagggca

SEQ ID NO: 431230 - RNA, 19 nt, Artificial Sequence
  Description of Artificial Sequence: Synthetic oligonucleotide
  Antisense Strand to SEQ ID NO: 431229
ugcccuccgggaaagauac

SEQ ID NO: 431231 - RNA, 19 nt, Artificial Sequence
  Description of Artificial Sequence: Synthetic oligonucleotide
  Sense strand starting at position 892 of SEQ ID NO: 316670
gucagugcugaacacaaau

SEQ ID NO: 431232 - RNA, 19 nt, Artificial Sequence
  Description of Artificial Sequence: Synthetic oligonucleotide
  Antisense Strand to SEQ ID NO: 431231
auuuguguucagcacugac

SEQ ID NO: 431233 - RNA, 19 nt, Artificial Sequence
  Description of Artificial Sequence: Synthetic oligonucleotide
  Sense strand starting at position 2102 of SEQ ID NO: 316670
agauuagacugucccuaua

SEQ ID NO: 431234 - RNA, 19 nt, Artificial Sequence
  Description of Artificial Sequence: Synthetic oligonucleotide
  Antisense Strand to SEQ ID NO: 431233
uauagggacagucuaaucu

SEQ ID NO: 431235 - RNA, 19 nt, Artificial Sequence
  Description of Artificial Sequence: Synthetic oligonucleotide
  Sense strand starting at position 2217 of SEQ ID NO: 316670
uaagaauaugcgcggauuu

SEQ ID NO: 431236 - RNA, 19 nt, Artificial Sequence
  Description of Artificial Sequence: Synthetic oligonucleotide
  Antisense Strand to SEQ ID NO: 431235
aaauccgcgcauauucuua

SEQ ID NO: 431237 - RNA, 19 nt, Artificial Sequence
  Description of Artificial Sequence: Synthetic oligonucleotide
  Sense strand starting at position 2218 of SEQ ID NO: 316670
aagaauaugcgcggauuua

SEQ ID NO: 431238 - RNA, 19 nt, Artificial Sequence
  Description of Artificial Sequence: Synthetic oligonucleotide
  Antisense Strand to SEQ ID NO: 431237
uaaauccgcgcauauucuu

SEQ ID NO: 431239 - RNA, 19 nt, Artificial Sequence
  Description of Artificial Sequence: Synthetic oligonucleotide
  Sense strand starting at position 2446 of SEQ ID NO: 316670
gacccucugguaugaggau

SEQ ID NO: 431240 - RNA, 19 nt, Artificial Sequence
  Description of Artificial Sequence: Synthetic oligonucleotide
  Antisense Strand to SEQ ID NO: 431239
auccucauaccagaggguc

SEQ ID NO: 431241 - RNA, 19 nt, Artificial Sequence
  Description of Artificial Sequence: Synthetic oligonucleotide
  Sense strand starting at position 2528 of SEQ ID NO: 316670
acaaaucaucgaggcuaaa

SEQ ID NO: 431242 - RNA, 19 nt, Artificial Sequence
  Description of Artificial Sequence: Synthetic oligonucleotide
  Antisense Strand to SEQ ID NO: 431241
uuuagccucgaugauuugu

SEQ ID NO: 431243 - RNA, 19 nt, Artificial Sequence
  Description of Artificial Sequence: Synthetic oligonucleotide
  Sense strand starting at position 2570 of SEQ ID NO: 316670
gggaauuaugagcaguugu

SEQ ID NO: 431244 - RNA, 19 nt, Artificial Sequence
  Description of Artificial Sequence: Synthetic oligonucleotide
  Antisense Strand to SEQ ID NO: 431243
acaacugcucauaauuccc

SEQ ID NO: 431245 - RNA, 19 nt, Artificial Sequence
  Description of Artificial Sequence: Synthetic oligonucleotide
  Sense strand starting at position 2588 of SEQ ID NO: 316670
ugugcugaaggauguagaa

SEQ ID NO: 431246 - RNA, 19 nt, Artificial Sequence
  Description of Artificial Sequence: Synthetic oligonucleotide
  Antisense Strand to SEQ ID NO: 431245
uucuacauccuucagcaca

SEQ ID NO: 431247 - RNA, 19 nt, Artificial Sequence
  Description of Artificial Sequence: Synthetic oligonucleotide
  Sense strand starting at position 2621 of SEQ ID NO: 316670
uugaguaucaggcauugaa

SEQ ID NO: 431248 - RNA, 19 nt, Artificial Sequence
  Description of Artificial Sequence: Synthetic oligonucleotide
  Antisense Strand to SEQ ID NO: 431247
uucaaugccugauacucaa

SEQ ID NO: 431249 - RNA, 19 nt, Artificial Sequence
  Description of Artificial Sequence: Synthetic oligonucleotide
  Sense strand starting at position 2633 of SEQ ID NO: 316670
cauugaagugcuugaauac

SEQ ID NO: 431250 - RNA, 19 nt, Artificial Sequence
  Description of Artificial Sequence: Synthetic oligonucleotide
  Antisense Strand to SEQ ID NO: 431249
guauucaagcacuucaaug

SEQ ID NO: 431251 - RNA, 19 nt, Artificial Sequence
  Description of Artificial Sequence: Synthetic oligonucleotide
  Sense strand starting at position 2739 of SEQ ID NO: 316670
agugauuuauccgagacca

SEQ ID NO: 431252 - RNA, 19 nt, Artificial Sequence
  Description of Artificial Sequence: Synthetic oligonucleotide
  Antisense Strand to SEQ ID NO: 431251
uggucucggauaaaucacu

SEQ ID NO: 431253 - RNA, 19 nt, Artificial Sequence
  Description of Artificial Sequence: Synthetic oligonucleotide
  Sense strand starting at position 3213 of SEQ ID NO: 316670
uugagugugaguugaagag

SEQ ID NO: 431254 - RNA, 19 nt, Artificial Sequence
  Description of Artificial Sequence: Synthetic oligonucleotide
  Antisense Strand to SEQ ID NO: 431253
cucuucaacucacacucaa

SEQ ID NO: 431255 - RNA, 19 nt, Artificial Sequence
  Description of Artificial Sequence: Synthetic oligonucleotide
  Sense strand starting at position 3217 of SEQ ID NO: 316670
gugugaguugaagagauua

SEQ ID NO: 431256 - RNA, 19 nt, Artificial Sequence
  Description of Artificial Sequence: Synthetic oligonucleotide
  Antisense Strand to SEQ ID NO: 431255
uaaucucuucaacucacac

SEQ ID NO: 431257 - RNA, 19 nt, Artificial Sequence
  Description of Artificial Sequence: Synthetic oligonucleotide
  Sense strand starting at position 3252 of SEQ ID NO: 316670
ggcugaguccugggaccua

SEQ ID NO: 431258 - RNA, 19 nt, Artificial Sequence
  Description of Artificial Sequence: Synthetic oligonucleotide
  Antisense Strand to SEQ ID NO: 431257
uaggucccaggacucagcc

SEQ ID NO: 431259 - RNA, 19 nt, Artificial Sequence
  Description of Artificial Sequence: Synthetic oligonucleotide
  Sense strand starting at position 3348 of SEQ ID NO: 316670
acugguuuaagaggagcua

SEQ ID NO: 431260 - RNA, 19 nt, Artificial Sequence
  Description of Artificial Sequence: Synthetic oligonucleotide
  Antisense Strand to SEQ ID NO: 431259
uagcuccucuuaaaccagu

SEQ ID NO: 431261 - RNA, 19 nt, Artificial Sequence
  Description of Artificial Sequence: Synthetic oligonucleotide
  Sense strand starting at position 3377 of SEQ ID NO: 316670
ggcagaaguggucaugcuu

SEQ ID NO: 431262 - RNA, 19 nt, Artificial Sequence
  Description of Artificial Sequence: Synthetic oligonucleotide
  Antisense Strand to SEQ ID NO: 431261
aagcaugaccacuucugcc

SEQ ID NO: 431263 - RNA, 19 nt, Artificial Sequence
  Description of Artificial Sequence: Synthetic oligonucleotide
  Sense strand starting at position 3444 of SEQ ID NO: 316670
augggcuuucugcaagaga

SEQ ID NO: 431264 - RNA, 19 nt, Artificial Sequence
  Description of Artificial Sequence: Synthetic oligonucleotide
  Antisense Strand to SEQ ID NO: 431263
ucucuugcagaaagcccau

SEQ ID NO: 431265 - RNA, 19 nt, Artificial Sequence
  Description of Artificial Sequence: Synthetic oligonucleotide
  Sense strand starting at position 3447 of SEQ ID NO: 316670
ggcuuucugcaagagagaa

SEQ ID NO: 431266 - RNA, 19 nt, Artificial Sequence
  Description of Artificial Sequence: Synthetic oligonucleotide
  Antisense Strand to SEQ ID NO: 431265
uucucucuugcagaaagcc

SEQ ID NO: 431267 - RNA, 19 nt, Artificial Sequence
  Description of Artificial Sequence: Synthetic oligonucleotide
  Sense strand starting at position 3485 of SEQ ID NO: 316670
uucuguucugcauaguaau

SEQ ID NO: 431268 - RNA, 19 nt, Artificial Sequence
  Description of Artificial Sequence: Synthetic oligonucleotide
  Antisense Strand to SEQ ID NO: 431267
auuacuaugcagaacagaa

SEQ ID NO: 431269 - RNA, 19 nt, Artificial Sequence
  Description of Artificial Sequence: Synthetic oligonucleotide
  Sense strand starting at position 3538 of SEQ ID NO: 316670
uguuaaaucccauguuacc

SEQ ID NO: 431270 - RNA, 19 nt, Artificial Sequence
  Description of Artificial Sequence: Synthetic oligonucleotide
  Antisense Strand to SEQ ID NO: 431269
gguaacaugggauuuaaca

SEQ ID NO: 431271 - RNA, 19 nt, Artificial Sequence
  Description of Artificial Sequence: Synthetic oligonucleotide
  Sense strand starting at position 3567 of SEQ ID NO: 316670
cugagauuagcaugaaaug

SEQ ID NO: 431272 - RNA, 19 nt, Artificial Sequence
  Description of Artificial Sequence: Synthetic oligonucleotide
  Antisense Strand to SEQ ID NO: 431271
cauuucaugcuaaucucag

SEQ ID NO: 431273 - RNA, 19 nt, Artificial Sequence
  Description of Artificial Sequence: Synthetic oligonucleotide
  Sense strand starting at position 3609 of SEQ ID NO: 316670
gugccagacacuggguaau

SEQ ID NO: 431274 - RNA, 19 nt, Artificial Sequence
  Description of Artificial Sequence: Synthetic oligonucleotide
  Antisense Strand to SEQ ID NO: 431273
auuacccagugucuggcac

SEQ ID NO: 431275 - RNA, 19 nt, Artificial Sequence
  Description of Artificial Sequence: Synthetic oligonucleotide
  Sense strand starting at position 3667 of SEQ ID NO: 316670
gcuguaaauuagguaugau

SEQ ID NO: 431276 - RNA, 19 nt, Artificial Sequence
  Description of Artificial Sequence: Synthetic oligonucleotide
  Antisense Strand to SEQ ID NO: 431275
aucauaccuaauuuacagc

SEQ ID NO: 431277 - RNA, 19 nt, Artificial Sequence
  Description of Artificial Sequence: Synthetic oligonucleotide
  Sense strand starting at position 3676 of SEQ ID NO: 316670
uagguaugauugccucuau

SEQ ID NO: 431278 - RNA, 19 nt, Artificial Sequence
  Description of Artificial Sequence: Synthetic oligonucleotide
  Antisense Strand to SEQ ID NO: 431277
auagaggcaaucauaccua

SEQ ID NO: 431279 - RNA, 19 nt, Artificial Sequence
  Description of Artificial Sequence: Synthetic oligonucleotide
  Sense strand starting at position 3677 of SEQ ID NO: 316670
agguaugauugccucuauu

SEQ ID NO: 431280 - RNA, 19 nt, Artificial Sequence
  Description of Artificial Sequence: Synthetic oligonucleotide
  Antisense Strand to SEQ ID NO: 431279
aauagaggcaaucauaccu

SEQ ID NO: 431281 - RNA, 19 nt, Artificial Sequence
  Description of Artificial Sequence: Synthetic oligonucleotide
  Sense strand starting at position 3796 of SEQ ID NO: 316670
augaguaacaggugauguu

SEQ ID NO: 431282 - RNA, 19 nt, Artificial Sequence
  Description of Artificial Sequence: Synthetic oligonucleotide
  Antisense Strand to SEQ ID NO: 431281
aacaucaccuguuacucau

SEQ ID NO: 431283 - RNA, 19 nt, Artificial Sequence
  Description of Artificial Sequence: Synthetic oligonucleotide
  Sense strand starting at position 3797 of SEQ ID NO: 316670
ugaguaacaggugauguuu

SEQ ID NO: 431284 - RNA, 19 nt, Artificial Sequence
  Description of Artificial Sequence: Synthetic oligonucleotide
  Antisense Strand to SEQ ID NO: 431283
aaacaucaccuguuacuca

SEQ ID NO: 431285 - RNA, 19 nt, Artificial Sequence
  Description of Artificial Sequence: Synthetic oligonucleotide
  Sense strand starting at position 3959 of SEQ ID NO: 316670
agaaacaugcuauggcaua

SEQ ID NO: 431286 - RNA, 19 nt, Artificial Sequence
  Description of Artificial Sequence: Synthetic oligonucleotide
  Antisense Strand to SEQ ID NO: 431285
uaugccauagcauguuucu

SEQ ID NO: 431287 - RNA, 19 nt, Artificial Sequence
  Description of Artificial Sequence: Synthetic oligonucleotide
  Sense strand starting at position 78 of SEQ ID NO: 316671
cugcuaaaugagcaaagau

SEQ ID NO: 431288 - RNA, 19 nt, Artificial Sequence
  Description of Artificial Sequence: Synthetic oligonucleotide
  Antisense Strand to SEQ ID NO: 431287
aucuuugcucauuuagcag

SEQ ID NO: 431289 - RNA, 19 nt, Artificial Sequence
  Description of Artificial Sequence: Synthetic oligonucleotide
  Sense strand starting at position 99 of SEQ ID NO: 316671
agggaauuauuauucgaug

SEQ ID NO: 431290 - RNA, 19 nt, Artificial Sequence
  Description of Artificial Sequence: Synthetic oligonucleotide
  Antisense Strand to SEQ ID NO: 431289
caucgaauaauaauucccu

SEQ ID NO: 431291 - RNA, 19 nt, Artificial Sequence
  Description of Artificial Sequence: Synthetic oligonucleotide
  Sense strand starting at position 201 of SEQ ID NO: 316671
guauccuuucuauggagaa

SEQ ID NO: 431292 - RNA, 19 nt, Artificial Sequence
  Description of Artificial Sequence: Synthetic oligonucleotide
  Antisense Strand to SEQ ID NO: 431291
uucuccauagaaaggauac

SEQ ID NO: 431293 - RNA, 19 nt, Artificial Sequence
  Description of Artificial Sequence: Synthetic oligonucleotide
  Sense strand starting at position 250 of SEQ ID NO: 316671
auaugagaauugguuuacu

SEQ ID NO: 431294 - RNA, 19 nt, Artificial Sequence
  Description of Artificial Sequence: Synthetic oligonucleotide
  Antisense Strand to SEQ ID NO: 431293
aguaaaccaauucucauau

SEQ ID NO: 431295 - RNA, 19 nt, Artificial Sequence
  Description of Artificial Sequence: Synthetic oligonucleotide
  Sense strand starting at position 253 of SEQ ID NO: 316671
ugagaauugguuuacugua

SEQ ID NO: 431296 - RNA, 19 nt, Artificial Sequence
  Description of Artificial Sequence: Synthetic oligonucleotide
  Antisense Strand to SEQ ID NO: 431295
uacaguaaaccaauucuca

SEQ ID NO: 431297 - RNA, 19 nt, Artificial Sequence
  Description of Artificial Sequence: Synthetic oligonucleotide
  Sense strand starting at position 258 of SEQ ID NO: 316671
auugguuuacuguaacauu

SEQ ID NO: 431298 - RNA, 19 nt, Artificial Sequence
  Description of Artificial Sequence: Synthetic oligonucleotide
  Antisense Strand to SEQ ID NO: 431297
aauguuacaguaaaccaau

SEQ ID NO: 431299 - RNA, 19 nt, Artificial Sequence
  Description of Artificial Sequence: Synthetic oligonucleotide
  Sense strand starting at position 302 of SEQ ID NO: 316671
gggaucacuguguaaguuu

SEQ ID NO: 431300 - RNA, 19 nt, Artificial Sequence
  Description of Artificial Sequence: Synthetic oligonucleotide
  Antisense Strand to SEQ ID NO: 431299
aaacuuacacagugauccc

SEQ ID NO: 431301 - RNA, 19 nt, Artificial Sequence
  Description of Artificial Sequence: Synthetic oligonucleotide
  Sense strand starting at position 490 of SEQ ID NO: 316671
gccgguuagauugacaaga

SEQ ID NO: 431302 - RNA, 19 nt, Artificial Sequence
  Description of Artificial Sequence: Synthetic oligonucleotide
  Antisense Strand to SEQ ID NO: 431301
ucuugucaaucuaaccggc

SEQ ID NO: 431303 - RNA, 19 nt, Artificial Sequence
  Description of Artificial Sequence: Synthetic oligonucleotide
  Sense strand starting at position 500 of SEQ ID NO: 316671
uugacaagaucugugaaau

SEQ ID NO: 431304 - RNA, 19 nt, Artificial Sequence
  Description of Artificial Sequence: Synthetic oligonucleotide
  Antisense Strand to SEQ ID NO: 431303
auuucacagaucuugucaa

SEQ ID NO: 431305 - RNA, 19 nt, Artificial Sequence
  Description of Artificial Sequence: Synthetic oligonucleotide
  Sense strand starting at position 501 of SEQ ID NO: 316671
ugacaagaucugugaaauc

SEQ ID NO: 431306 - RNA, 19 nt, Artificial Sequence
  Description of Artificial Sequence: Synthetic oligonucleotide
  Antisense Strand to SEQ ID NO: 431305
gauuucacagaucuuguca

SEQ ID NO: 431307 - RNA, 19 nt, Artificial Sequence
  Description of Artificial Sequence: Synthetic oligonucleotide
  Sense strand starting at position 561 of SEQ ID NO: 316671
acuguauaacauggucaau

SEQ ID NO: 431308 - RNA, 19 nt, Artificial Sequence
  Description of Artificial Sequence: Synthetic oligonucleotide
  Antisense Strand to SEQ ID NO: 431307
auugaccauguuauacagu

SEQ ID NO: 431309 - RNA, 19 nt, Artificial Sequence
  Description of Artificial Sequence: Synthetic oligonucleotide
  Sense strand starting at position 563 of SEQ ID NO: 316671
uguauaacauggucaauau

SEQ ID NO: 431310 - RNA, 19 nt, Artificial Sequence
  Description of Artificial Sequence: Synthetic oligonucleotide
  Antisense Strand to SEQ ID NO: 431309
auauugaccauguuauaca

SEQ ID NO: 431311 - RNA, 19 nt, Artificial Sequence
  Description of Artificial Sequence: Synthetic oligonucleotide
  Sense strand starting at position 564 of SEQ ID NO: 316671
guauaacauggucaauauu

SEQ ID NO: 431312 - RNA, 19 nt, Artificial Sequence
  Description of Artificial Sequence: Synthetic oligonucleotide
  Antisense Strand to SEQ ID NO: 431311
aauauugaccauguuauac

SEQ ID NO: 431313 - RNA, 19 nt, Artificial Sequence
  Description of Artificial Sequence: Synthetic oligonucleotide
  Sense strand starting at position 945 of SEQ ID NO: 316671
ccuguaguagauuaucaau

SEQ ID NO: 431314 - RNA, 19 nt, Artificial Sequence
  Description of Artificial Sequence: Synthetic oligonucleotide
  Antisense Strand to SEQ ID NO: 431313
auugauaaucuacuacagg

SEQ ID NO: 431315 - RNA, 19 nt, Artificial Sequence
  Description of Artificial Sequence: Synthetic oligonucleotide
  Sense strand starting at position 1201 of SEQ ID NO: 316671
gaaugcguucgccucacau

SEQ ID NO: 431316 - RNA, 19 nt, Artificial Sequence
  Description of Artificial Sequence: Synthetic oligonucleotide
  Antisense Strand to SEQ ID NO: 431315
augugaggcgaacgcauuc

SEQ ID NO: 431317 - RNA, 19 nt, Artificial Sequence
  Description of Artificial Sequence: Synthetic oligonucleotide
  Sense strand starting at position 1234 of SEQ ID NO: 316671
guucuugcuccgguucuaa

SEQ ID NO: 431318 - RNA, 19 nt, Artificial Sequence
  Description of Artificial Sequence: Synthetic oligonucleotide
  Antisense Strand to SEQ ID NO: 431317
uuagaaccggagcaagaac

SEQ ID NO: 431319 - RNA, 19 nt, Artificial Sequence
  Description of Artificial Sequence: Synthetic oligonucleotide
  Sense strand starting at position 1243 of SEQ ID NO: 316671
ccgguucuaauuugagcua

SEQ ID NO: 431320 - RNA, 19 nt, Artificial Sequence
  Description of Artificial Sequence: Synthetic oligonucleotide
  Antisense Strand to SEQ ID NO: 431319
uagcucaaauuagaaccgg

SEQ ID NO: 431321 - RNA, 19 nt, Artificial Sequence
  Description of Artificial Sequence: Synthetic oligonucleotide
  Sense strand starting at position 1541 of SEQ ID NO: 316671
uacaaaguuguggguaaau

SEQ ID NO: 431322 - RNA, 19 nt, Artificial Sequence
  Description of Artificial Sequence: Synthetic oligonucleotide
  Antisense Strand to SEQ ID NO: 431321
auuuacccacaacuuugua

SEQ ID NO: 431323 - RNA, 19 nt, Artificial Sequence
  Description of Artificial Sequence: Synthetic oligonucleotide
  Sense strand starting at position 1642 of SEQ ID NO: 316671
agaagaaaccucgggcuua

SEQ ID NO: 431324 - RNA, 19 nt, Artificial Sequence
  Description of Artificial Sequence: Synthetic oligonucleotide
  Antisense Strand to SEQ ID NO: 431323
uaagcccgagguuucuucu

SEQ ID NO: 431325 - RNA, 19 nt, Artificial Sequence
  Description of Artificial Sequence: Synthetic oligonucleotide
  Sense strand starting at position 2473 of SEQ ID NO: 316671
gccguuucccaaguuguuu

SEQ ID NO: 431326 - RNA, 19 nt, Artificial Sequence
  Description of Artificial Sequence: Synthetic oligonucleotide
  Antisense Strand to SEQ ID NO: 431325
aaacaacuugggaaacggc

SEQ ID NO: 431327 - RNA, 19 nt, Artificial Sequence
  Description of Artificial Sequence: Synthetic oligonucleotide
  Sense strand starting at position 2584 of SEQ ID NO: 316671
gcguaugugggcuauuuga

SEQ ID NO: 431328 - RNA, 19 nt, Artificial Sequence
  Description of Artificial Sequence: Synthetic oligonucleotide
  Antisense Strand to SEQ ID NO: 431327
ucaaauagcccacauacgc

SEQ ID NO: 431329 - RNA, 19 nt, Artificial Sequence
  Description of Artificial Sequence: Synthetic oligonucleotide
  Sense strand starting at position 2657 of SEQ ID NO: 316671
ugacuuaaauuugagcaau

SEQ ID NO: 431330 - RNA, 19 nt, Artificial Sequence
  Description of Artificial Sequence: Synthetic oligonucleotide
  Antisense Strand to SEQ ID NO: 431329
auugcucaaauuuaaguca

SEQ ID NO: 431331 - RNA, 19 nt, Artificial Sequence
  Description of Artificial Sequence: Synthetic oligonucleotide
  Sense strand starting at position 2668 of SEQ ID NO: 316671
ugagcaaugccucauauug

SEQ ID NO: 431332 - RNA, 19 nt, Artificial Sequence
  Description of Artificial Sequence: Synthetic oligonucleotide
  Antisense Strand to SEQ ID NO: 431331
caauaugaggcauugcuca

SEQ ID NO: 431333 - RNA, 19 nt, Artificial Sequence
  Description of Artificial Sequence: Synthetic oligonucleotide
  Sense strand starting at position 2742 of SEQ ID NO: 316671
cagcguauuguacuagcau

SEQ ID NO: 431334 - RNA, 19 nt, Artificial Sequence
  Description of Artificial Sequence: Synthetic oligonucleotide
  Antisense Strand to SEQ ID NO: 431333
augcuaguacaauacgcug

SEQ ID NO: 431335 - RNA, 19 nt, Artificial Sequence
  Description of Artificial Sequence: Synthetic oligonucleotide
  Sense strand starting at position 2780 of SEQ ID NO: 316671
gggcuuuauaugcaaagca

SEQ ID NO: 431336 - RNA, 19 nt, Artificial Sequence
  Description of Artificial Sequence: Synthetic oligonucleotide
  Antisense Strand to SEQ ID NO: 431335
ugcuuugcauauaaagccc

SEQ ID NO: 431337 - RNA, 19 nt, Artificial Sequence
  Description of Artificial Sequence: Synthetic oligonucleotide
  Sense strand starting at position 2807 of SEQ ID NO: 316671
acgcgaaggagucaagaaa

SEQ ID NO: 431338 - RNA, 19 nt, Artificial Sequence
  Description of Artificial Sequence: Synthetic oligonucleotide
  Antisense Strand to SEQ ID NO: 431337
uuucuugacuccuucgcgu

SEQ ID NO: 431339 - RNA, 19 nt, Artificial Sequence
  Description of Artificial Sequence: Synthetic oligonucleotide
  Sense strand starting at position 2956 of SEQ ID NO: 316671
ccuuauauaccguaaggaa

SEQ ID NO: 431340 - RNA, 19 nt, Artificial Sequence
  Description of Artificial Sequence: Synthetic oligonucleotide
  Antisense Strand to SEQ ID NO: 431339
uuccuuacgguauauaagg

SEQ ID NO: 431341 - RNA, 19 nt, Artificial Sequence
  Description of Artificial Sequence: Synthetic oligonucleotide
  Sense strand starting at position 3058 of SEQ ID NO: 316671
gggcaauagcaucaagguu

SEQ ID NO: 431342 - RNA, 19 nt, Artificial Sequence
  Description of Artificial Sequence: Synthetic oligonucleotide
  Antisense Strand to SEQ ID NO: 431341
aaccuugaugcuauugccc

SEQ ID NO: 431343 - RNA, 19 nt, Artificial Sequence
  Description of Artificial Sequence: Synthetic oligonucleotide
  Sense strand starting at position 3126 of SEQ ID NO: 316671
ggagguauucaugggacug

SEQ ID NO: 431344 - RNA, 19 nt, Artificial Sequence
  Description of Artificial Sequence: Synthetic oligonucleotide
  Antisense Strand to SEQ ID NO: 431343
cagucccaugaauaccucc

SEQ ID NO: 431345 - RNA, 19 nt, Artificial Sequence
  Description of Artificial Sequence: Synthetic oligonucleotide
  Sense strand starting at position 3170 of SEQ ID NO: 316671
auuagcauccgggauauaa

SEQ ID NO: 431346 - RNA, 19 nt, Artificial Sequence
  Description of Artificial Sequence: Synthetic oligonucleotide
  Antisense Strand to SEQ ID NO: 431345
uuauaucccggaugcuaau

SEQ ID NO: 431347 - RNA, 19 nt, Artificial Sequence
  Description of Artificial Sequence: Synthetic oligonucleotide
  Sense strand starting at position 3172 of SEQ ID NO: 316671
uagcauccgggauauaauc

SEQ ID NO: 431348 - RNA, 19 nt, Artificial Sequence
  Description of Artificial Sequence: Synthetic oligonucleotide
  Antisense Strand to SEQ ID NO: 431347
gauuauaucccggaugcua

SEQ ID NO: 431349 - RNA, 19 nt, Artificial Sequence
  Description of Artificial Sequence: Synthetic oligonucleotide
  Sense strand starting at position 3295 of SEQ ID NO: 316671
acaaguuugcgacacuaga

SEQ ID NO: 431350 - RNA, 19 nt, Artificial Sequence
  Description of Artificial Sequence: Synthetic oligonucleotide
  Antisense Strand to SEQ ID NO: 431349
ucuagugucgcaaacuugu

SEQ ID NO: 431351 - RNA, 19 nt, Artificial Sequence
  Description of Artificial Sequence: Synthetic oligonucleotide
  Sense strand starting at position 3388 of SEQ ID NO: 316671
aggaucuagucuucuuuga

SEQ ID NO: 431352 - RNA, 19 nt, Artificial Sequence
  Description of Artificial Sequence: Synthetic oligonucleotide
  Antisense Strand to SEQ ID NO: 431351
ucaaagaagacuagauccu

SEQ ID NO: 431353 - RNA, 19 nt, Artificial Sequence
  Description of Artificial Sequence: Synthetic oligonucleotide
  Sense strand starting at position 3390 of SEQ ID NO: 316671
gaucuagucuucuuugaga

SEQ ID NO: 431354 - RNA, 19 nt, Artificial Sequence
  Description of Artificial Sequence: Synthetic oligonucleotide
  Antisense Strand to SEQ ID NO: 431353
ucucaaagaagacuagauc

SEQ ID NO: 431355 - RNA, 19 nt, Artificial Sequence
  Description of Artificial Sequence: Synthetic oligonucleotide
  Sense strand starting at position 3392 of SEQ ID NO: 316671
ucuagucuucuuugagaau

SEQ ID NO: 431356 - RNA, 19 nt, Artificial Sequence
  Description of Artificial Sequence: Synthetic oligonucleotide
  Antisense Strand to SEQ ID NO: 431355
auucucaaagaagacuaga

SEQ ID NO: 431357 - RNA, 19 nt, Artificial Sequence
  Description of Artificial Sequence: Synthetic oligonucleotide
  Sense strand starting at position 3442 of SEQ ID NO: 316671
ugguucuuuguauagaacu

SEQ ID NO: 431358 - RNA, 19 nt, Artificial Sequence
  Description of Artificial Sequence: Synthetic oligonucleotide
  Antisense Strand to SEQ ID NO: 431357
aguucuauacaaagaacca

SEQ ID NO: 431359 - RNA, 19 nt, Artificial Sequence
  Description of Artificial Sequence: Synthetic oligonucleotide
  Sense strand starting at position 3465 of SEQ ID NO: 316671
auucgcuuucacgugugaa

SEQ ID NO: 431360 - RNA, 19 nt, Artificial Sequence
  Description of Artificial Sequence: Synthetic oligonucleotide
  Antisense Strand to SEQ ID NO: 431359
uucacacgugaaagcgaau

SEQ ID NO: 431361 - RNA, 19 nt, Artificial Sequence
  Description of Artificial Sequence: Synthetic oligonucleotide
  Sense strand starting at position 3524 of SEQ ID NO: 316671
gguuguucucugggaaagg

SEQ ID NO: 431362 - RNA, 19 nt, Artificial Sequence
  Description of Artificial Sequence: Synthetic oligonucleotide
  Antisense Strand to SEQ ID NO: 431361
ccuuucccagagaacaacc

SEQ ID NO: 431363 - RNA, 19 nt, Artificial Sequence
  Description of Artificial Sequence: Synthetic oligonucleotide
  Sense strand starting at position 3941 of SEQ ID NO: 316671
agacucaucauggguuagu

SEQ ID NO: 431364 - RNA, 19 nt, Artificial Sequence
  Description of Artificial Sequence: Synthetic oligonucleotide
  Antisense Strand to SEQ ID NO: 431363
acuaacccaugaugagucu

SEQ ID NO: 431365 - RNA, 19 nt, Artificial Sequence
  Description of Artificial Sequence: Synthetic oligonucleotide
  Sense strand starting at position 3965 of SEQ ID NO: 316671
gcucuauguccugcagcua

SEQ ID NO: 431366 - RNA, 19 nt, Artificial Sequence
  Description of Artificial Sequence: Synthetic oligonucleotide
  Antisense Strand to SEQ ID NO: 431365
uagcugcaggacauagagc

SEQ ID NO: 431367 - RNA, 19 nt, Artificial Sequence
  Description of Artificial Sequence: Synthetic oligonucleotide
  Sense strand starting at position 140 of SEQ ID NO: 316672
accaacuuucuuggaguua

SEQ ID NO: 431368 - RNA, 19 nt, Artificial Sequence
  Description of Artificial Sequence: Synthetic oligonucleotide
  Antisense Strand to SEQ ID NO: 431367
uaacuccaagaaaguuggu

SEQ ID NO: 431369 - RNA, 19 nt, Artificial Sequence
  Description of Artificial Sequence: Synthetic oligonucleotide
  Sense strand starting at position 333 of SEQ ID NO: 316672
ugucccacucaagaguaau

SEQ ID NO: 431370 - RNA, 19 nt, Artificial Sequence
  Description of Artificial Sequence: Synthetic oligonucleotide
  Antisense Strand to SEQ ID NO: 431369
auuacucuugagugggaca

SEQ ID NO: 431371 - RNA, 19 nt, Artificial Sequence
  Description of Artificial Sequence: Synthetic oligonucleotide
  Sense strand starting at position 419 of SEQ ID NO: 316672
uagggauacuuaguguaaa

SEQ ID NO: 431372 - RNA, 19 nt, Artificial Sequence
  Description of Artificial Sequence: Synthetic oligonucleotide
  Antisense Strand to SEQ ID NO: 431371
uuuacacuaaguaucccua

SEQ ID NO: 431373 - RNA, 19 nt, Artificial Sequence
  Description of Artificial Sequence: Synthetic oligonucleotide
  Sense strand starting at position 450 of SEQ ID NO: 316672
uuguaucagagaggugaca

SEQ ID NO: 431374 - RNA, 19 nt, Artificial Sequence
  Description of Artificial Sequence: Synthetic oligonucleotide
  Antisense Strand to SEQ ID NO: 431373
ugucaccucucugauacaa

SEQ ID NO: 431375 - RNA, 19 nt, Artificial Sequence
  Description of Artificial Sequence: Synthetic oligonucleotide
  Sense strand starting at position 452 of SEQ ID NO: 316672
guaucagagaggugacaca

SEQ ID NO: 431376 - RNA, 19 nt, Artificial Sequence
  Description of Artificial Sequence: Synthetic oligonucleotide
  Antisense Strand to SEQ ID NO: 431375
ugugucaccucucugauac

SEQ ID NO: 431377 - RNA, 19 nt, Artificial Sequence
  Description of Artificial Sequence: Synthetic oligonucleotide
  Sense strand starting at position 463 of SEQ ID NO: 316672
gugacacaaugccuaauua

SEQ ID NO: 431378 - RNA, 19 nt, Artificial Sequence
  Description of Artificial Sequence: Synthetic oligonucleotide
  Antisense Strand to SEQ ID NO: 431377
uaauuaggcauugugucac

SEQ ID NO: 431379 - RNA, 19 nt, Artificial Sequence
  Description of Artificial Sequence: Synthetic oligonucleotide
  Sense strand starting at position 643 of SEQ ID NO: 316672
agucuuaguccuuacacaa

SEQ ID NO: 431380 - RNA, 19 nt, Artificial Sequence
  Description of Artificial Sequence: Synthetic oligonucleotide
  Antisense Strand to SEQ ID NO: 431379
uuguguaaggacuaagacu

SEQ ID NO: 431381 - RNA, 19 nt, Artificial Sequence
  Description of Artificial Sequence: Synthetic oligonucleotide
  Sense strand starting at position 691 of SEQ ID NO: 316672
guuugaauuccggagggac

SEQ ID NO: 431382 - RNA, 19 nt, Artificial Sequence
  Description of Artificial Sequence: Synthetic oligonucleotide
  Antisense Strand to SEQ ID NO: 431381
gucccuccggaauucaaac

SEQ ID NO: 431383 - RNA, 19 nt, Artificial Sequence
  Description of Artificial Sequence: Synthetic oligonucleotide
  Sense strand starting at position 693 of SEQ ID NO: 316672
uugaauuccggagggacau

SEQ ID NO: 431384 - RNA, 19 nt, Artificial Sequence
  Description of Artificial Sequence: Synthetic oligonucleotide
  Antisense Strand to SEQ ID NO: 431383
augucccuccggaauucaa

SEQ ID NO: 431385 - RNA, 19 nt, Artificial Sequence
  Description of Artificial Sequence: Synthetic oligonucleotide
  Sense strand starting at position 694 of SEQ ID NO: 316672
ugaauuccggagggacauu

SEQ ID NO: 431386 - RNA, 19 nt, Artificial Sequence
  Description of Artificial Sequence: Synthetic oligonucleotide
  Antisense Strand to SEQ ID NO: 431385
aaugucccuccggaauuca

SEQ ID NO: 431387 - RNA, 19 nt, Artificial Sequence
  Description of Artificial Sequence: Synthetic oligonucleotide
  Sense strand starting at position 811 of SEQ ID NO: 316672
guggauggugcauauacaa

SEQ ID NO: 431388 - RNA, 19 nt, Artificial Sequence
  Description of Artificial Sequence: Synthetic oligonucleotide
  Antisense Strand to SEQ ID NO: 431387
uuguauaugcaccauccac

SEQ ID NO: 431389 - RNA, 19 nt, Artificial Sequence
  Description of Artificial Sequence: Synthetic oligonucleotide
  Sense strand starting at position 853 of SEQ ID NO: 316672
acucaagagaagugaaguu

SEQ ID NO: 431390 - RNA, 19 nt, Artificial Sequence
  Description of Artificial Sequence: Synthetic oligonucleotide
  Antisense Strand to SEQ ID NO: 431389
aacuucacuucucuugagu

SEQ ID NO: 431391 - RNA, 19 nt, Artificial Sequence
  Description of Artificial Sequence: Synthetic oligonucleotide
  Sense strand starting at position 1279 of SEQ ID NO: 316672
ccuuguuuccuggagauga

SEQ ID NO: 431392 - RNA, 19 nt, Artificial Sequence
  Description of Artificial Sequence: Synthetic oligonucleotide
  Antisense Strand to SEQ ID NO: 431391
ucaucuccaggaaacaagg

SEQ ID NO: 431393 - RNA, 19 nt, Artificial Sequence
  Description of Artificial Sequence: Synthetic oligonucleotide
  Sense strand starting at position 1281 of SEQ ID NO: 316672
uuguuuccuggagaugaug

SEQ ID NO: 431394 - RNA, 19 nt, Artificial Sequence
  Description of Artificial Sequence: Synthetic oligonucleotide
  Antisense Strand to SEQ ID NO: 431393
caucaucuccaggaaacaa

SEQ ID NO: 431395 - RNA, 19 nt, Artificial Sequence
  Description of Artificial Sequence: Synthetic oligonucleotide
  Sense strand starting at position 2213 of SEQ ID NO: 316672
ugaccugacuaggaaauuu

SEQ ID NO: 431396 - RNA, 19 nt, Artificial Sequence
  Description of Artificial Sequence: Synthetic oligonucleotide
  Antisense Strand to SEQ ID NO: 431395
aaauuuccuagucagguca

SEQ ID NO: 431397 - RNA, 19 nt, Artificial Sequence
  Description of Artificial Sequence: Synthetic oligonucleotide
  Sense strand starting at position 2430 of SEQ ID NO: 316672
ucgggaacugauugagguu

SEQ ID NO: 431398 - RNA, 19 nt, Artificial Sequence
  Description of Artificial Sequence: Synthetic oligonucleotide
  Antisense Strand to SEQ ID NO: 431397
aaccucaaucaguucccga

SEQ ID NO: 431399 - RNA, 19 nt, Artificial Sequence
  Description of Artificial Sequence: Synthetic oligonucleotide
  Sense strand starting at position 2439 of SEQ ID NO: 316672
gauugagguuacuuugaac

SEQ ID NO: 431400 - RNA, 19 nt, Artificial Sequence
  Description of Artificial Sequence: Synthetic oligonucleotide
  Antisense Strand to SEQ ID NO: 431399
guucaaaguaaccucaauc

SEQ ID NO: 431401 - RNA, 19 nt, Artificial Sequence
  Description of Artificial Sequence: Synthetic oligonucleotide
  Sense strand starting at position 2450 of SEQ ID NO: 316672
cuuugaacgcaccaagauu

SEQ ID NO: 431402 - RNA, 19 nt, Artificial Sequence
  Description of Artificial Sequence: Synthetic oligonucleotide
  Antisense Strand to SEQ ID NO: 431401
aaucuuggugcguucaaag

SEQ ID NO: 431403 - RNA, 19 nt, Artificial Sequence
  Description of Artificial Sequence: Synthetic oligonucleotide
  Sense strand starting at position 2526 of SEQ ID NO: 316672
guaauaauggugcauuauu

SEQ ID NO: 431404 - RNA, 19 nt, Artificial Sequence
  Description of Artificial Sequence: Synthetic oligonucleotide
  Antisense Strand to SEQ ID NO: 431403
aauaaugcaccauuauuac

SEQ ID NO: 431405 - RNA, 19 nt, Artificial Sequence
  Description of Artificial Sequence: Synthetic oligonucleotide
  Sense strand starting at position 2536 of SEQ ID NO: 316672
ugcauuauuguccucguuu

SEQ ID NO: 431406 - RNA, 19 nt, Artificial Sequence
  Description of Artificial Sequence: Synthetic oligonucleotide
  Antisense Strand to SEQ ID NO: 431405
aaacgaggacaauaaugca

SEQ ID NO: 431407 - RNA, 19 nt, Artificial Sequence
  Description of Artificial Sequence: Synthetic oligonucleotide
  Sense strand starting at position 2689 of SEQ ID NO: 316672
ggaagagaaagcugcucua

SEQ ID NO: 431408 - RNA, 19 nt, Artificial Sequence
  Description of Artificial Sequence: Synthetic oligonucleotide
  Antisense Strand to SEQ ID NO: 431407
uagagcagcuuucucuucc

SEQ ID NO: 431409 - RNA, 19 nt, Artificial Sequence
  Description of Artificial Sequence: Synthetic oligonucleotide
  Sense strand starting at position 2692 of SEQ ID NO: 316672
agagaaagcugcucuaaug

SEQ ID NO: 431410 - RNA, 19 nt, Artificial Sequence
  Description of Artificial Sequence: Synthetic oligonucleotide
  Antisense Strand to SEQ ID NO: 431409
cauuagagcagcuuucucu

SEQ ID NO: 431411 - RNA, 19 nt, Artificial Sequence
  Description of Artificial Sequence: Synthetic oligonucleotide
  Sense strand starting at position 2736 of SEQ ID NO: 316672
cauauaauucgcgucuugu

SEQ ID NO: 431412 - RNA, 19 nt, Artificial Sequence
  Description of Artificial Sequence: Synthetic oligonucleotide
  Antisense Strand to SEQ ID NO: 431411
acaagacgcgaauuauaug

SEQ ID NO: 431413 - RNA, 19 nt, Artificial Sequence
  Description of Artificial Sequence: Synthetic oligonucleotide
  Sense strand starting at position 2737 of SEQ ID NO: 316672
auauaauucgcgucuuguu

SEQ ID NO: 431414 - RNA, 19 nt, Artificial Sequence
  Description of Artificial Sequence: Synthetic oligonucleotide
  Antisense Strand to SEQ ID NO: 431413
aacaagacgcgaauuauau

SEQ ID NO: 431415 - RNA, 19 nt, Artificial Sequence
  Description of Artificial Sequence: Synthetic oligonucleotide
  Sense strand starting at position 2738 of SEQ ID NO: 316672
uauaauucgcgucuuguuu

SEQ ID NO: 431416 - RNA, 19 nt, Artificial Sequence
  Description of Artificial Sequence: Synthetic oligonucleotide
  Antisense Strand to SEQ ID NO: 431415
aaacaagacgcgaauuaua

SEQ ID NO: 431417 - RNA, 19 nt, Artificial Sequence
  Description of Artificial Sequence: Synthetic oligonucleotide
  Sense strand starting at position 2750 of SEQ ID NO: 316672
cuuguuuggccucaagaca

SEQ ID NO: 431418 - RNA, 19 nt, Artificial Sequence
  Description of Artificial Sequence: Synthetic oligonucleotide
  Antisense Strand to SEQ ID NO: 431417
ugucuugaggccaaacaag

SEQ ID NO: 431419 - RNA, 19 nt, Artificial Sequence
  Description of Artificial Sequence: Synthetic oligonucleotide
  Sense strand starting at position 2765 of SEQ ID NO: 316672
gacaguuggccucacaaua

SEQ ID NO: 431420 - RNA, 19 nt, Artificial Sequence
  Description of Artificial Sequence: Synthetic oligonucleotide
  Antisense Strand to SEQ ID NO: 431419
uauugugaggccaacuguc

SEQ ID NO: 431421 - RNA, 19 nt, Artificial Sequence
  Description of Artificial Sequence: Synthetic oligonucleotide
  Sense strand starting at position 2770 of SEQ ID NO: 316672
uuggccucacaauagauau

SEQ ID NO: 431422 - RNA, 19 nt, Artificial Sequence
  Description of Artificial Sequence: Synthetic oligonucleotide
  Antisense Strand to SEQ ID NO: 431421
auaucuauugugaggccaa

SEQ ID NO: 431423 - RNA, 19 nt, Artificial Sequence
  Description of Artificial Sequence: Synthetic oligonucleotide
  Sense strand starting at position 2781 of SEQ ID NO: 316672
auagauauaagaugugguu

SEQ ID NO: 431424 - RNA, 19 nt, Artificial Sequence
  Description of Artificial Sequence: Synthetic oligonucleotide
  Antisense Strand to SEQ ID NO: 431423
aaccacaucuuauaucuau

SEQ ID NO: 431425 - RNA, 19 nt, Artificial Sequence
  Description of Artificial Sequence: Synthetic oligonucleotide
  Sense strand starting at position 2783 of SEQ ID NO: 316672
agauauaagaugugguuua

SEQ ID NO: 431426 - RNA, 19 nt, Artificial Sequence
  Description of Artificial Sequence: Synthetic oligonucleotide
  Antisense Strand to SEQ ID NO: 431425
uaaaccacaucuuauaucu

SEQ ID NO: 431427 - RNA, 19 nt, Artificial Sequence
  Description of Artificial Sequence: Synthetic oligonucleotide
  Sense strand starting at position 2788 of SEQ ID NO: 316672
uaagaugugguuuaguaga

SEQ ID NO: 431428 - RNA, 19 nt, Artificial Sequence
  Description of Artificial Sequence: Synthetic oligonucleotide
  Antisense Strand to SEQ ID NO: 431427
ucuacuaaaccacaucuua

SEQ ID NO: 431429 - RNA, 19 nt, Artificial Sequence
  Description of Artificial Sequence: Synthetic oligonucleotide
  Sense strand starting at position 2790 of SEQ ID NO: 316672
agaugugguuuaguagaca

SEQ ID NO: 431430 - RNA, 19 nt, Artificial Sequence
  Description of Artificial Sequence: Synthetic oligonucleotide
  Antisense Strand to SEQ ID NO: 431429
ugucuacuaaaccacaucu

SEQ ID NO: 431431 - RNA, 19 nt, Artificial Sequence
  Description of Artificial Sequence: Synthetic oligonucleotide
  Sense strand starting at position 3088 of SEQ ID NO: 316672
ccgaaugacuuccuaguga

SEQ ID NO: 431432 - RNA, 19 nt, Artificial Sequence
  Description of Artificial Sequence: Synthetic oligonucleotide
  Antisense Strand to SEQ ID NO: 431431
ucacuaggaagucauucgg

SEQ ID NO: 431433 - RNA, 19 nt, Artificial Sequence
  Description of Artificial Sequence: Synthetic oligonucleotide
  Sense strand starting at position 3323 of SEQ ID NO: 316672
guguaauuccauuauguaa

SEQ ID NO: 431434 - RNA, 19 nt, Artificial Sequence
  Description of Artificial Sequence: Synthetic oligonucleotide
  Antisense Strand to SEQ ID NO: 431433
uuacauaauggaauuacac

SEQ ID NO: 431435 - RNA, 19 nt, Artificial Sequence
  Description of Artificial Sequence: Synthetic oligonucleotide
  Sense strand starting at position 3378 of SEQ ID NO: 316672
agaauaauugauugccaug

SEQ ID NO: 431436 - RNA, 19 nt, Artificial Sequence
  Description of Artificial Sequence: Synthetic oligonucleotide
  Antisense Strand to SEQ ID NO: 431435
cauggcaaucaauuauucu

SEQ ID NO: 431437 - RNA, 19 nt, Artificial Sequence
  Description of Artificial Sequence: Synthetic oligonucleotide
  Sense strand starting at position 3406 of SEQ ID NO: 316672
auggaaauccugcaucuug

SEQ ID NO: 431438 - RNA, 19 nt, Artificial Sequence
  Description of Artificial Sequence: Synthetic oligonucleotide
  Antisense Strand to SEQ ID NO: 431437
caagaugcaggauuuccau

SEQ ID NO: 431439 - RNA, 19 nt, Artificial Sequence
  Description of Artificial Sequence: Synthetic oligonucleotide
  Sense strand starting at position 3545 of SEQ ID NO: 316672
gugacacaauugucucaau

SEQ ID NO: 431440 - RNA, 19 nt, Artificial Sequence
  Description of Artificial Sequence: Synthetic oligonucleotide
  Antisense Strand to SEQ ID NO: 431439
auugagacaauugugucac

SEQ ID NO: 431441 - RNA, 19 nt, Artificial Sequence
  Description of Artificial Sequence: Synthetic oligonucleotide
  Sense strand starting at position 3875 of SEQ ID NO: 316672
ucuaaacugcugcagauaa

SEQ ID NO: 431442 - RNA, 19 nt, Artificial Sequence
  Description of Artificial Sequence: Synthetic oligonucleotide
  Antisense Strand to SEQ ID NO: 431441
uuaucugcagcaguuuaga

SEQ ID NO: 431443 - RNA, 19 nt, Artificial Sequence
  Description of Artificial Sequence: Synthetic oligonucleotide
  Sense strand starting at position 3967 of SEQ ID NO: 316672
ugauuaaauuugcuggugu

SEQ ID NO: 431444 - RNA, 19 nt, Artificial Sequence
  Description of Artificial Sequence: Synthetic oligonucleotide
  Antisense Strand to SEQ ID NO: 431443
acaccagcaaauuuaauca

SEQ ID NO: 431445 - RNA, 19 nt, Artificial Sequence
  Description of Artificial Sequence: Synthetic oligonucleotide
  Sense strand starting at position 3969 of SEQ ID NO: 316672
auuaaauuugcugguguau

SEQ ID NO: 431446 - RNA, 19 nt, Artificial Sequence
  Description of Artificial Sequence: Synthetic oligonucleotide
  Antisense Strand to SEQ ID NO: 431445
auacaccagcaaauuuaau

SEQ ID NO: 431447 - RNA, 19 nt, Artificial Sequence
  Description of Artificial Sequence: Synthetic oligonucleotide
  Sense strand starting at position 17 of SEQ ID NO: 316673
agcaaauaucuagagacgu

SEQ ID NO: 431448 - RNA, 19 nt, Artificial Sequence
  Description of Artificial Sequence: Synthetic oligonucleotide
  Antisense Strand to SEQ ID NO: 431447
acgucucuagauauuugcu

SEQ ID NO: 431449 - RNA, 19 nt, Artificial Sequence
  Description of Artificial Sequence: Synthetic oligonucleotide
  Sense strand starting at position 23 of SEQ ID NO: 316673
uaucuagagacgugguuac

SEQ ID NO: 431450 - RNA, 19 nt, Artificial Sequence
  Description of Artificial Sequence: Synthetic oligonucleotide
  Antisense Strand to SEQ ID NO: 431449
guaaccacgucucuagaua

SEQ ID NO: 431451 - RNA, 19 nt, Artificial Sequence
  Description of Artificial Sequence: Synthetic oligonucleotide
  Sense strand starting at position 33 of SEQ ID NO: 316673
cgugguuacauccaguuua

SEQ ID NO: 431452 - RNA, 19 nt, Artificial Sequence
  Description of Artificial Sequence: Synthetic oligonucleotide
  Antisense Strand to SEQ ID NO: 431451
uaaacuggauguaaccacg

SEQ ID NO: 431453 - RNA, 19 nt, Artificial Sequence
  Description of Artificial Sequence: Synthetic oligonucleotide
  Sense strand starting at position 52 of SEQ ID NO: 316673
cgaagacugucggugacuu

SEQ ID NO: 431454 - RNA, 19 nt, Artificial Sequence
  Description of Artificial Sequence: Synthetic oligonucleotide
  Antisense Strand to SEQ ID NO: 431453
aagucaccgacagucuucg

SEQ ID NO: 431455 - RNA, 19 nt, Artificial Sequence
  Description of Artificial Sequence: Synthetic oligonucleotide
  Sense strand starting at position 174 of SEQ ID NO: 316673
accuguguucucucggcau

SEQ ID NO: 431456 - RNA, 19 nt, Artificial Sequence
  Description of Artificial Sequence: Synthetic oligonucleotide
  Antisense Strand to SEQ ID NO: 431455
augccgagagaacacaggu

SEQ ID NO: 431457 - RNA, 19 nt, Artificial Sequence
  Description of Artificial Sequence: Synthetic oligonucleotide
  Sense strand starting at position 176 of SEQ ID NO: 316673
cuguguucucucggcauuu

SEQ ID NO: 431458 - RNA, 19 nt, Artificial Sequence
  Description of Artificial Sequence: Synthetic oligonucleotide
  Antisense Strand to SEQ ID NO: 431457
aaaugccgagagaacacag

SEQ ID NO: 431459 - RNA, 19 nt, Artificial Sequence
  Description of Artificial Sequence: Synthetic oligonucleotide
  Sense strand starting at position 323 of SEQ ID NO: 316673
acgagaagguugcuaccua

SEQ ID NO: 431460 - RNA, 19 nt, Artificial Sequence
  Description of Artificial Sequence: Synthetic oligonucleotide
  Antisense Strand to SEQ ID NO: 431459
uagguagcaaccuucucgu

SEQ ID NO: 431461 - RNA, 19 nt, Artificial Sequence
  Description of Artificial Sequence: Synthetic oligonucleotide
  Sense strand starting at position 327 of SEQ ID NO: 316673
gaagguugcuaccuaaguu

SEQ ID NO: 431462 - RNA, 19 nt, Artificial Sequence
  Description of Artificial Sequence: Synthetic oligonucleotide
  Antisense Strand to SEQ ID NO: 431461
aacuuagguagcaaccuuc

SEQ ID NO: 431463 - RNA, 19 nt, Artificial Sequence
  Description of Artificial Sequence: Synthetic oligonucleotide
  Sense strand starting at position 366 of SEQ ID NO: 316673
aggauuccaucuguuccua

SEQ ID NO: 431464 - RNA, 19 nt, Artificial Sequence
  Description of Artificial Sequence: Synthetic oligonucleotide
  Antisense Strand to SEQ ID NO: 431463
uaggaacagauggaauccu

SEQ ID NO: 431465 - RNA, 19 nt, Artificial Sequence
  Description of Artificial Sequence: Synthetic oligonucleotide
  Sense strand starting at position 415 of SEQ ID NO: 316673
gcauuauuauggccauuug

SEQ ID NO: 431466 - RNA, 19 nt, Artificial Sequence
  Description of Artificial Sequence: Synthetic oligonucleotide
  Antisense Strand to SEQ ID NO: 431465
caaauggccauaauaaugc

SEQ ID NO: 431467 - RNA, 19 nt, Artificial Sequence
  Description of Artificial Sequence: Synthetic oligonucleotide
  Sense strand starting at position 451 of SEQ ID NO: 316673
cugaaaccaugacaagaaa

SEQ ID NO: 431468 - RNA, 19 nt, Artificial Sequence
  Description of Artificial Sequence: Synthetic oligonucleotide
  Antisense Strand to SEQ ID NO: 431467
uuucuugucaugguuucag

SEQ ID NO: 431469 - RNA, 19 nt, Artificial Sequence
  Description of Artificial Sequence: Synthetic oligonucleotide
  Sense strand starting at position 594 of SEQ ID NO: 316673
guuuccucauuccuuggaa

SEQ ID NO: 431470 - RNA, 19 nt, Artificial Sequence
  Description of Artificial Sequence: Synthetic oligonucleotide
  Antisense Strand to SEQ ID NO: 431469
uuccaaggaaugaggaaac

SEQ ID NO: 431471 - RNA, 19 nt, Artificial Sequence
  Description of Artificial Sequence: Synthetic oligonucleotide
  Sense strand starting at position 638 of SEQ ID NO: 316673
uuaugauaauccuuugggu

SEQ ID NO: 431472 - RNA, 19 nt, Artificial Sequence
  Description of Artificial Sequence: Synthetic oligonucleotide
  Antisense Strand to SEQ ID NO: 431471
acccaaaggauuaucauaa

SEQ ID NO: 431473 - RNA, 19 nt, Artificial Sequence
  Description of Artificial Sequence: Synthetic oligonucleotide
  Sense strand starting at position 660 of SEQ ID NO: 316673
ucacguaaguaauuagaca

SEQ ID NO: 431474 - RNA, 19 nt, Artificial Sequence
  Description of Artificial Sequence: Synthetic oligonucleotide
  Antisense Strand to SEQ ID NO: 431473
ugucuaauuacuuacguga

SEQ ID NO: 431475 - RNA, 19 nt, Artificial Sequence
  Description of Artificial Sequence: Synthetic oligonucleotide
  Sense strand starting at position 681 of SEQ ID NO: 316673
auguaaagccagugacuga

SEQ ID NO: 431476 - RNA, 19 nt, Artificial Sequence
  Description of Artificial Sequence: Synthetic oligonucleotide
  Antisense Strand to SEQ ID NO: 431475
ucagucacuggcuuuacau

SEQ ID NO: 431477 - RNA, 19 nt, Artificial Sequence
  Description of Artificial Sequence: Synthetic oligonucleotide
  Sense strand starting at position 836 of SEQ ID NO: 316673
cgcagaacuugacuacaga

SEQ ID NO: 431478 - RNA, 19 nt, Artificial Sequence
  Description of Artificial Sequence: Synthetic oligonucleotide
  Antisense Strand to SEQ ID NO: 431477
ucuguagucaaguucugcg

SEQ ID NO: 431479 - RNA, 19 nt, Artificial Sequence
  Description of Artificial Sequence: Synthetic oligonucleotide
  Sense strand starting at position 860 of SEQ ID NO: 316673
cggugacaacuccacauau

SEQ ID NO: 431480 - RNA, 19 nt, Artificial Sequence
  Description of Artificial Sequence: Synthetic oligonucleotide
  Antisense Strand to SEQ ID NO: 431479
auauguggaguugucaccg

SEQ ID NO: 431481 - RNA, 19 nt, Artificial Sequence
  Description of Artificial Sequence: Synthetic oligonucleotide
  Sense strand starting at position 903 of SEQ ID NO: 316673
uuugaauucuagucccaug

SEQ ID NO: 431482 - RNA, 19 nt, Artificial Sequence
  Description of Artificial Sequence: Synthetic oligonucleotide
  Antisense Strand to SEQ ID NO: 431481
caugggacuagaauucaaa

SEQ ID NO: 431483 - RNA, 19 nt, Artificial Sequence
  Description of Artificial Sequence: Synthetic oligonucleotide
  Sense strand starting at position 1027 of SEQ ID NO: 316673
ucuguucucgccgcacaaa

SEQ ID NO: 431484 - RNA, 19 nt, Artificial Sequence
  Description of Artificial Sequence: Synthetic oligonucleotide
  Antisense Strand to SEQ ID NO: 431483
uuugugcggcgagaacaga

SEQ ID NO: 431485 - RNA, 19 nt, Artificial Sequence
  Description of Artificial Sequence: Synthetic oligonucleotide
  Sense strand starting at position 2256 of SEQ ID NO: 316673
ggugucugucugcaccaaa

SEQ ID NO: 431486 - RNA, 19 nt, Artificial Sequence
  Description of Artificial Sequence: Synthetic oligonucleotide
  Antisense Strand to SEQ ID NO: 431485
uuuggugcagacagacacc

SEQ ID NO: 431487 - RNA, 19 nt, Artificial Sequence
  Description of Artificial Sequence: Synthetic oligonucleotide
  Sense strand starting at position 2453 of SEQ ID NO: 316673
acucuucuuugauccggaa

SEQ ID NO: 431488 - RNA, 19 nt, Artificial Sequence
  Description of Artificial Sequence: Synthetic oligonucleotide
  Antisense Strand to SEQ ID NO: 431487
uuccggaucaaagaagagu

SEQ ID NO: 431489 - RNA, 19 nt, Artificial Sequence
  Description of Artificial Sequence: Synthetic oligonucleotide
  Sense strand starting at position 2457 of SEQ ID NO: 316673
uucuuugauccggaaauca

SEQ ID NO: 431490 - RNA, 19 nt, Artificial Sequence
  Description of Artificial Sequence: Synthetic oligonucleotide
  Antisense Strand to SEQ ID NO: 431489
ugauuuccggaucaaagaa

SEQ ID NO: 431491 - RNA, 19 nt, Artificial Sequence
  Description of Artificial Sequence: Synthetic oligonucleotide
  Sense strand starting at position 2563 of SEQ ID NO: 316673
auuguaagcgugcaaacaa

SEQ ID NO: 431492 - RNA, 19 nt, Artificial Sequence
  Description of Artificial Sequence: Synthetic oligonucleotide
  Antisense Strand to SEQ ID NO: 431491
uuguuugcacgcuuacaau

SEQ ID NO: 431493 - RNA, 19 nt, Artificial Sequence
  Description of Artificial Sequence: Synthetic oligonucleotide
  Sense strand starting at position 2599 of SEQ ID NO: 316673
agucucaguaaacgguaaa

SEQ ID NO: 431494 - RNA, 19 nt, Artificial Sequence
  Description of Artificial Sequence: Synthetic oligonucleotide
  Antisense Strand to SEQ ID NO: 431493
uuuaccguuuacugagacu

SEQ ID NO: 431495 - RNA, 19 nt, Artificial Sequence
  Description of Artificial Sequence: Synthetic oligonucleotide
  Sense strand starting at position 2651 of SEQ ID NO: 316673
cccaaaguauccuuaggau

SEQ ID NO: 431496 - RNA, 19 nt, Artificial Sequence
  Description of Artificial Sequence: Synthetic oligonucleotide
  Antisense Strand to SEQ ID NO: 431495
auccuaaggauacuuuggg

SEQ ID NO: 431497 - RNA, 19 nt, Artificial Sequence
  Description of Artificial Sequence: Synthetic oligonucleotide
  Sense strand starting at position 2754 of SEQ ID NO: 316673
cccaaucugugucucugaa

SEQ ID NO: 431498 - RNA, 19 nt, Artificial Sequence
  Description of Artificial Sequence: Synthetic oligonucleotide
  Antisense Strand to SEQ ID NO: 431497
uucagagacacagauuggg

SEQ ID NO: 431499 - RNA, 19 nt, Artificial Sequence
  Description of Artificial Sequence: Synthetic oligonucleotide
  Sense strand starting at position 2756 of SEQ ID NO: 316673
caaucugugucucugaaug

SEQ ID NO: 431500 - RNA, 19 nt, Artificial Sequence
  Description of Artificial Sequence: Synthetic oligonucleotide
  Antisense Strand to SEQ ID NO: 431499
cauucagagacacagauug

SEQ ID NO: 431501 - RNA, 19 nt, Artificial Sequence
  Description of Artificial Sequence: Synthetic oligonucleotide
  Sense strand starting at position 2762 of SEQ ID NO: 316673
gugucucugaauggguaga

SEQ ID NO: 431502 - RNA, 19 nt, Artificial Sequence
  Description of Artificial Sequence: Synthetic oligonucleotide
  Antisense Strand to SEQ ID NO: 431501
ucuacccauucagagacac

SEQ ID NO: 431503 - RNA, 19 nt, Artificial Sequence
  Description of Artificial Sequence: Synthetic oligonucleotide
  Sense strand starting at position 2764 of SEQ ID NO: 316673
gucucugaauggguagaua

SEQ ID NO: 431504 - RNA, 19 nt, Artificial Sequence
  Description of Artificial Sequence: Synthetic oligonucleotide
  Antisense Strand to SEQ ID NO: 431503
uaucuacccauucagagac

SEQ ID NO: 431505 - RNA, 19 nt, Artificial Sequence
  Description of Artificial Sequence: Synthetic oligonucleotide
  Sense strand starting at position 2843 of SEQ ID NO: 316673
gugugaggacuauacacuu

SEQ ID NO: 431506 - RNA, 19 nt, Artificial Sequence
  Description of Artificial Sequence: Synthetic oligonucleotide
  Antisense Strand to SEQ ID NO: 431505
aaguguauaguccucacac

SEQ ID NO: 431507 - RNA, 19 nt, Artificial Sequence
  Description of Artificial Sequence: Synthetic oligonucleotide
  Sense strand starting at position 2924 of SEQ ID NO: 316673
ucacgugauucuuccuaug

SEQ ID NO: 431508 - RNA, 19 nt, Artificial Sequence
  Description of Artificial Sequence: Synthetic oligonucleotide
  Antisense Strand to SEQ ID NO: 431507
cauaggaagaaucacguga

SEQ ID NO: 431509 - RNA, 19 nt, Artificial Sequence
  Description of Artificial Sequence: Synthetic oligonucleotide
  Sense strand starting at position 2926 of SEQ ID NO: 316673
acgugauucuuccuaugag

SEQ ID NO: 431510 - RNA, 19 nt, Artificial Sequence
  Description of Artificial Sequence: Synthetic oligonucleotide
  Antisense Strand to SEQ ID NO: 431509
cucauaggaagaaucacgu

SEQ ID NO: 431511 - RNA, 19 nt, Artificial Sequence
  Description of Artificial Sequence: Synthetic oligonucleotide
  Sense strand starting at position 2929 of SEQ ID NO: 316673
ugauucuuccuaugaggac

SEQ ID NO: 431512 - RNA, 19 nt, Artificial Sequence
  Description of Artificial Sequence: Synthetic oligonucleotide
  Antisense Strand to SEQ ID NO: 431511
guccucauaggaagaauca

SEQ ID NO: 431513 - RNA, 19 nt, Artificial Sequence
  Description of Artificial Sequence: Synthetic oligonucleotide
  Sense strand starting at position 2977 of SEQ ID NO: 316673
ucuuuccuacaugaguuua

SEQ ID NO: 431514 - RNA, 19 nt, Artificial Sequence
  Description of Artificial Sequence: Synthetic oligonucleotide
  Antisense Strand to SEQ ID NO: 431513
uaaacucauguaggaaaga

SEQ ID NO: 431515 - RNA, 19 nt, Artificial Sequence
  Description of Artificial Sequence: Synthetic oligonucleotide
  Sense strand starting at position 3014 of SEQ ID NO: 316673
uuguacuaggccugaggau

SEQ ID NO: 431516 - RNA, 19 nt, Artificial Sequence
  Description of Artificial Sequence: Synthetic oligonucleotide
  Antisense Strand to SEQ ID NO: 431515
auccucaggccuaguacaa

SEQ ID NO: 431517 - RNA, 19 nt, Artificial Sequence
  Description of Artificial Sequence: Synthetic oligonucleotide
  Sense strand starting at position 3015 of SEQ ID NO: 316673
uguacuaggccugaggaua

SEQ ID NO: 431518 - RNA, 19 nt, Artificial Sequence
  Description of Artificial Sequence: Synthetic oligonucleotide
  Antisense Strand to SEQ ID NO: 431517
uauccucaggccuaguaca

SEQ ID NO: 431519 - RNA, 19 nt, Artificial Sequence
  Description of Artificial Sequence: Synthetic oligonucleotide
  Sense strand starting at position 3165 of SEQ ID NO: 316673
gugcgaauagaguguauag

SEQ ID NO: 431520 - RNA, 19 nt, Artificial Sequence
  Description of Artificial Sequence: Synthetic oligonucleotide
  Antisense Strand to SEQ ID NO: 431519
cuauacacucuauucgcac

SEQ ID NO: 431521 - RNA, 19 nt, Artificial Sequence
  Description of Artificial Sequence: Synthetic oligonucleotide
  Sense strand starting at position 3242 of SEQ ID NO: 316673
uguggaaggugguuucuga

SEQ ID NO: 431522 - RNA, 19 nt, Artificial Sequence
  Description of Artificial Sequence: Synthetic oligonucleotide
  Antisense Strand to SEQ ID NO: 431521
ucagaaaccaccuuccaca

SEQ ID NO: 431523 - RNA, 19 nt, Artificial Sequence
  Description of Artificial Sequence: Synthetic oligonucleotide
  Sense strand starting at position 3312 of SEQ ID NO: 316673
gcuggaggccagcaaucau

SEQ ID NO: 431524 - RNA, 19 nt, Artificial Sequence
  Description of Artificial Sequence: Synthetic oligonucleotide
  Antisense Strand to SEQ ID NO: 431523
augauugcuggccuccagc

SEQ ID NO: 431525 - RNA, 19 nt, Artificial Sequence
  Description of Artificial Sequence: Synthetic oligonucleotide
  Sense strand starting at position 3355 of SEQ ID NO: 316673
acaauacugucacagagaa

SEQ ID NO: 431526 - RNA, 19 nt, Artificial Sequence
  Description of Artificial Sequence: Synthetic oligonucleotide
  Antisense Strand to SEQ ID NO: 431525
uucucugugacaguauugu

SEQ ID NO: 431527 - RNA, 19 nt, Artificial Sequence
  Description of Artificial Sequence: Synthetic oligonucleotide
  Sense strand starting at position 91 of SEQ ID NO: 316674
uagugugagcuccaagaaa

SEQ ID NO: 431528 - RNA, 19 nt, Artificial Sequence
  Description of Artificial Sequence: Synthetic oligonucleotide
  Antisense Strand to SEQ ID NO: 431527
uuucuuggagcucacacua

SEQ ID NO: 431529 - RNA, 19 nt, Artificial Sequence
  Description of Artificial Sequence: Synthetic oligonucleotide
  Sense strand starting at position 169 of SEQ ID NO: 316674
cauggcaaguguccaauaa

SEQ ID NO: 431530 - RNA, 19 nt, Artificial Sequence
  Description of Artificial Sequence: Synthetic oligonucleotide
  Antisense Strand to SEQ ID NO: 431529
uuauuggacacuugccaug

SEQ ID NO: 431531 - RNA, 19 nt, Artificial Sequence
  Description of Artificial Sequence: Synthetic oligonucleotide
  Sense strand starting at position 170 of SEQ ID NO: 316674
auggcaaguguccaauaaa

SEQ ID NO: 431532 - RNA, 19 nt, Artificial Sequence
  Description of Artificial Sequence: Synthetic oligonucleotide
  Antisense Strand to SEQ ID NO: 431531
uuuauuggacacuugccau

SEQ ID NO: 431533 - RNA, 19 nt, Artificial Sequence
  Description of Artificial Sequence: Synthetic oligonucleotide
  Sense strand starting at position 173 of SEQ ID NO: 316674
gcaaguguccaauaaauac

SEQ ID NO: 431534 - RNA, 19 nt, Artificial Sequence
  Description of Artificial Sequence: Synthetic oligonucleotide
  Antisense Strand to SEQ ID NO: 431533
guauuuauuggacacuugc

SEQ ID NO: 431535 - RNA, 19 nt, Artificial Sequence
  Description of Artificial Sequence: Synthetic oligonucleotide
  Sense strand starting at position 614 of SEQ ID NO: 316674
aaaguaggguucuuacuga

SEQ ID NO: 431536 - RNA, 19 nt, Artificial Sequence
  Description of Artificial Sequence: Synthetic oligonucleotide
  Antisense Strand to SEQ ID NO: 431535
ucaguaagaacccuacuuu

SEQ ID NO: 431537 - RNA, 19 nt, Artificial Sequence
  Description of Artificial Sequence: Synthetic oligonucleotide
  Sense strand starting at position 621 of SEQ ID NO: 316674
gguucuuacugagcuacaa

SEQ ID NO: 431538 - RNA, 19 nt, Artificial Sequence
  Description of Artificial Sequence: Synthetic oligonucleotide
  Antisense Strand to SEQ ID NO: 431537
uuguagcucaguaagaacc

SEQ ID NO: 431539 - RNA, 19 nt, Artificial Sequence
  Description of Artificial Sequence: Synthetic oligonucleotide
  Sense strand starting at position 771 of SEQ ID NO: 316674
gcuucuaacuucuuaggaa

SEQ ID NO: 431540 - RNA, 19 nt, Artificial Sequence
  Description of Artificial Sequence: Synthetic oligonucleotide
  Antisense Strand to SEQ ID NO: 431539
uuccuaagaaguuagaagc

SEQ ID NO: 431541 - RNA, 19 nt, Artificial Sequence
  Description of Artificial Sequence: Synthetic oligonucleotide
  Sense strand starting at position 851 of SEQ ID NO: 316674
aucugaacuuuagagagaa

SEQ ID NO: 431542 - RNA, 19 nt, Artificial Sequence
  Description of Artificial Sequence: Synthetic oligonucleotide
  Antisense Strand to SEQ ID NO: 431541
uucucucuaaaguucagau

SEQ ID NO: 431543 - RNA, 19 nt, Artificial Sequence
  Description of Artificial Sequence: Synthetic oligonucleotide
  Sense strand starting at position 918 of SEQ ID NO: 316674
ugcucaauggccuaagaaa

SEQ ID NO: 431544 - RNA, 19 nt, Artificial Sequence
  Description of Artificial Sequence: Synthetic oligonucleotide
  Antisense Strand to SEQ ID NO: 431543
uuucuuaggccauugagca

SEQ ID NO: 431545 - RNA, 19 nt, Artificial Sequence
  Description of Artificial Sequence: Synthetic oligonucleotide
  Sense strand starting at position 1002 of SEQ ID NO: 316674
gcugcagcugcaguuauaa

SEQ ID NO: 431546 - RNA, 19 nt, Artificial Sequence
  Description of Artificial Sequence: Synthetic oligonucleotide
  Antisense Strand to SEQ ID NO: 431545
uuauaacugcagcugcagc

SEQ ID NO: 431547 - RNA, 19 nt, Artificial Sequence
  Description of Artificial Sequence: Synthetic oligonucleotide
  Sense strand starting at position 1096 of SEQ ID NO: 316674
gcuacacauuaauuaggaa

SEQ ID NO: 431548 - RNA, 19 nt, Artificial Sequence
  Description of Artificial Sequence: Synthetic oligonucleotide
  Antisense Strand to SEQ ID NO: 431547
uuccuaauuaauguguagc

SEQ ID NO: 431549 - RNA, 19 nt, Artificial Sequence
  Description of Artificial Sequence: Synthetic oligonucleotide
  Sense strand starting at position 1185 of SEQ ID NO: 316674
aagcuaauagaguguugua

SEQ ID NO: 431550 - RNA, 19 nt, Artificial Sequence
  Description of Artificial Sequence: Synthetic oligonucleotide
  Antisense Strand to SEQ ID NO: 431549
uacaacacucuauuagcuu

SEQ ID NO: 431551 - RNA, 19 nt, Artificial Sequence
  Description of Artificial Sequence: Synthetic oligonucleotide
  Sense strand starting at position 1329 of SEQ ID NO: 316674
uccuaaaucguguaacuaa

SEQ ID NO: 431552 - RNA, 19 nt, Artificial Sequence
  Description of Artificial Sequence: Synthetic oligonucleotide
  Antisense Strand to SEQ ID NO: 431551
uuaguuacacgauuuagga

SEQ ID NO: 431553 - RNA, 19 nt, Artificial Sequence
  Description of Artificial Sequence: Synthetic oligonucleotide
  Sense strand starting at position 2107 of SEQ ID NO: 316674
ccgugaagugcucccgcua

SEQ ID NO: 431554 - RNA, 19 nt, Artificial Sequence
  Description of Artificial Sequence: Synthetic oligonucleotide
  Antisense Strand to SEQ ID NO: 431553
uagcgggagcacuucacgg

SEQ ID NO: 431555 - RNA, 19 nt, Artificial Sequence
  Description of Artificial Sequence: Synthetic oligonucleotide
  Sense strand starting at position 2200 of SEQ ID NO: 316674
acucccuuccuguaacgaa

SEQ ID NO: 431556 - RNA, 19 nt, Artificial Sequence
  Description of Artificial Sequence: Synthetic oligonucleotide
  Antisense Strand to SEQ ID NO: 431555
uucguuacaggaagggagu

SEQ ID NO: 431557 - RNA, 19 nt, Artificial Sequence
  Description of Artificial Sequence: Synthetic oligonucleotide
  Sense strand starting at position 2485 of SEQ ID NO: 316674
uuuccuauuuaguagagau

SEQ ID NO: 431558 - RNA, 19 nt, Artificial Sequence
  Description of Artificial Sequence: Synthetic oligonucleotide
  Antisense Strand to SEQ ID NO: 431557
aucucuacuaaauaggaaa

SEQ ID NO: 431559 - RNA, 19 nt, Artificial Sequence
  Description of Artificial Sequence: Synthetic oligonucleotide
  Sense strand starting at position 2785 of SEQ ID NO: 316674
ucugaaucgagcuggaaag

SEQ ID NO: 431560 - RNA, 19 nt, Artificial Sequence
  Description of Artificial Sequence: Synthetic oligonucleotide
  Antisense Strand to SEQ ID NO: 431559
cuuuccagcucgauucaga

SEQ ID NO: 431561 - RNA, 19 nt, Artificial Sequence
  Description of Artificial Sequence: Synthetic oligonucleotide
  Sense strand starting at position 2786 of SEQ ID NO: 316674
cugaaucgagcuggaaagu

SEQ ID NO: 431562 - RNA, 19 nt, Artificial Sequence
  Description of Artificial Sequence: Synthetic oligonucleotide
  Antisense Strand to SEQ ID NO: 431561
acuuuccagcucgauucag

SEQ ID NO: 431563 - RNA, 19 nt, Artificial Sequence
  Description of Artificial Sequence: Synthetic oligonucleotide
  Sense strand starting at position 2795 of SEQ ID NO: 316674
gcuggaaaguguuuacaga

SEQ ID NO: 431564 - RNA, 19 nt, Artificial Sequence
  Description of Artificial Sequence: Synthetic oligonucleotide
  Antisense Strand to SEQ ID NO: 431563
ucuguaaacacuuuccagc

SEQ ID NO: 431565 - RNA, 19 nt, Artificial Sequence
  Description of Artificial Sequence: Synthetic oligonucleotide
  Sense strand starting at position 2893 of SEQ ID NO: 316674
uuguuuauagcugacuuga

SEQ ID NO: 431566 - RNA, 19 nt, Artificial Sequence
  Description of Artificial Sequence: Synthetic oligonucleotide
  Antisense Strand to SEQ ID NO: 431565
ucaagucagcuauaaacaa

SEQ ID NO: 431567 - RNA, 19 nt, Artificial Sequence
  Description of Artificial Sequence: Synthetic oligonucleotide
  Sense strand starting at position 2895 of SEQ ID NO: 316674
guuuauagcugacuugaag

SEQ ID NO: 431568 - RNA, 19 nt, Artificial Sequence
  Description of Artificial Sequence: Synthetic oligonucleotide
  Antisense Strand to SEQ ID NO: 431567
cuucaagucagcuauaaac

SEQ ID NO: 431569 - RNA, 19 nt, Artificial Sequence
  Description of Artificial Sequence: Synthetic oligonucleotide
  Sense strand starting at position 2990 of SEQ ID NO: 316674
uguccaauuggcuaaguga

SEQ ID NO: 431570 - RNA, 19 nt, Artificial Sequence
  Description of Artificial Sequence: Synthetic oligonucleotide
  Antisense Strand to SEQ ID NO: 431569
ucacuuagccaauuggaca

SEQ ID NO: 431571 - RNA, 19 nt, Artificial Sequence
  Description of Artificial Sequence: Synthetic oligonucleotide
  Sense strand starting at position 3061 of SEQ ID NO: 316674
auauaugaguuggaaagga

SEQ ID NO: 431572 - RNA, 19 nt, Artificial Sequence
  Description of Artificial Sequence: Synthetic oligonucleotide
  Antisense Strand to SEQ ID NO: 431571
uccuuuccaacucauauau

SEQ ID NO: 431573 - RNA, 19 nt, Artificial Sequence
  Description of Artificial Sequence: Synthetic oligonucleotide
  Sense strand starting at position 3089 of SEQ ID NO: 316674
gucucucacugacuguauu

SEQ ID NO: 431574 - RNA, 19 nt, Artificial Sequence
  Description of Artificial Sequence: Synthetic oligonucleotide
  Antisense Strand to SEQ ID NO: 431573
aauacagucagugagagac

SEQ ID NO: 431575 - RNA, 19 nt, Artificial Sequence
  Description of Artificial Sequence: Synthetic oligonucleotide
  Sense strand starting at position 3103 of SEQ ID NO: 316674
guauucugugagcacugaa

SEQ ID NO: 431576 - RNA, 19 nt, Artificial Sequence
  Description of Artificial Sequence: Synthetic oligonucleotide
  Antisense Strand to SEQ ID NO: 431575
uucagugcucacagaauac

SEQ ID NO: 431577 - RNA, 19 nt, Artificial Sequence
  Description of Artificial Sequence: Synthetic oligonucleotide
  Sense strand starting at position 3106 of SEQ ID NO: 316674
uucugugagcacugaaagu

SEQ ID NO: 431578 - RNA, 19 nt, Artificial Sequence
  Description of Artificial Sequence: Synthetic oligonucleotide
  Antisense Strand to SEQ ID NO: 431577
acuuucagugcucacagaa

SEQ ID NO: 431579 - RNA, 19 nt, Artificial Sequence
  Description of Artificial Sequence: Synthetic oligonucleotide
  Sense strand starting at position 3148 of SEQ ID NO: 316674
gggcaagcguaaguuauuu

SEQ ID NO: 431580 - RNA, 19 nt, Artificial Sequence
  Description of Artificial Sequence: Synthetic oligonucleotide
  Antisense Strand to SEQ ID NO: 431579
aaauaacuuacgcuugccc

SEQ ID NO: 431581 - RNA, 19 nt, Artificial Sequence
  Description of Artificial Sequence: Synthetic oligonucleotide
  Sense strand starting at position 3150 of SEQ ID NO: 316674
gcaagcguaaguuauuuga

SEQ ID NO: 431582 - RNA, 19 nt, Artificial Sequence
  Description of Artificial Sequence: Synthetic oligonucleotide
  Antisense Strand to SEQ ID NO: 431581
ucaaauaacuuacgcuugc

SEQ ID NO: 431583 - RNA, 19 nt, Artificial Sequence
  Description of Artificial Sequence: Synthetic oligonucleotide
  Sense strand starting at position 3152 of SEQ ID NO: 316674
aagcguaaguuauuugauu

SEQ ID NO: 431584 - RNA, 19 nt, Artificial Sequence
  Description of Artificial Sequence: Synthetic oligonucleotide
  Antisense Strand to SEQ ID NO: 431583
aaucaaauaacuuacgcuu

SEQ ID NO: 431585 - RNA, 19 nt, Artificial Sequence
  Description of Artificial Sequence: Synthetic oligonucleotide
  Sense strand starting at position 3153 of SEQ ID NO: 316674
agcguaaguuauuugauua

SEQ ID NO: 431586 - RNA, 19 nt, Artificial Sequence
  Description of Artificial Sequence: Synthetic oligonucleotide
  Antisense Strand to SEQ ID NO: 431585
uaaucaaauaacuuacgcu

SEQ ID NO: 431587 - RNA, 19 nt, Artificial Sequence
  Description of Artificial Sequence: Synthetic oligonucleotide
  Sense strand starting at position 3154 of SEQ ID NO: 316674
gcguaaguuauuugauuag

SEQ ID NO: 431588 - RNA, 19 nt, Artificial Sequence
  Description of Artificial Sequence: Synthetic oligonucleotide
  Antisense Strand to SEQ ID NO: 431587
cuaaucaaauaacuuacgc

SEQ ID NO: 431589 - RNA, 19 nt, Artificial Sequence
  Description of Artificial Sequence: Synthetic oligonucleotide
  Sense strand starting at position 3613 of SEQ ID NO: 316674
acaguugucuuucuaggga

SEQ ID NO: 431590 - RNA, 19 nt, Artificial Sequence
  Description of Artificial Sequence: Synthetic oligonucleotide
  Antisense Strand to SEQ ID NO: 431589
ucccuagaaagacaacugu

SEQ ID NO: 431591 - RNA, 19 nt, Artificial Sequence
  Description of Artificial Sequence: Synthetic oligonucleotide
  Sense strand starting at position 3703 of SEQ ID NO: 316674
acaguaaacugcuuuggca

SEQ ID NO: 431592 - RNA, 19 nt, Artificial Sequence
  Description of Artificial Sequence: Synthetic oligonucleotide
  Antisense Strand to SEQ ID NO: 431591
ugccaaagcaguuuacugu

SEQ ID NO: 431593 - RNA, 19 nt, Artificial Sequence
  Description of Artificial Sequence: Synthetic oligonucleotide
  Sense strand starting at position 3722 of SEQ ID NO: 316674
accacaacugucuggaaca

SEQ ID NO: 431594 - RNA, 19 nt, Artificial Sequence
  Description of Artificial Sequence: Synthetic oligonucleotide
  Antisense Strand to SEQ ID NO: 431593
uguuccagacaguuguggu

SEQ ID NO: 431595 - RNA, 19 nt, Artificial Sequence
  Description of Artificial Sequence: Synthetic oligonucleotide
  Sense strand starting at position 3885 of SEQ ID NO: 316674
acaucauuccagugaguuu

SEQ ID NO: 431596 - RNA, 19 nt, Artificial Sequence
  Description of Artificial Sequence: Synthetic oligonucleotide
  Antisense Strand to SEQ ID NO: 431595
aaacucacuggaaugaugu

SEQ ID NO: 431597 - RNA, 19 nt, Artificial Sequence
  Description of Artificial Sequence: Synthetic oligonucleotide
  Sense strand starting at position 3908 of SEQ ID NO: 316674
gucugauucucugucuaua

SEQ ID NO: 431598 - RNA, 19 nt, Artificial Sequence
  Description of Artificial Sequence: Synthetic oligonucleotide
  Antisense Strand to SEQ ID NO: 431597
uauagacagagaaucagac

SEQ ID NO: 431599 - RNA, 19 nt, Artificial Sequence
  Description of Artificial Sequence: Synthetic oligonucleotide
  Sense strand starting at position 3911 of SEQ ID NO: 316674
ugauucucugucuauagca

SEQ ID NO: 431600 - RNA, 19 nt, Artificial Sequence
  Description of Artificial Sequence: Synthetic oligonucleotide
  Antisense Strand to SEQ ID NO: 431599
ugcuauagacagagaauca

SEQ ID NO: 431601 - RNA, 19 nt, Artificial Sequence
  Description of Artificial Sequence: Synthetic oligonucleotide
  Sense strand starting at position 3944 of SEQ ID NO: 316674
aauagaugggucugccaga

SEQ ID NO: 431602 - RNA, 19 nt, Artificial Sequence
  Description of Artificial Sequence: Synthetic oligonucleotide
  Antisense Strand to SEQ ID NO: 431601
ucuggcagacccaucuauu

SEQ ID NO: 431603 - RNA, 19 nt, Artificial Sequence
  Description of Artificial Sequence: Synthetic oligonucleotide
  Sense strand starting at position 3945 of SEQ ID NO: 316674
auagaugggucugccagau

SEQ ID NO: 431604 - RNA, 19 nt, Artificial Sequence
  Description of Artificial Sequence: Synthetic oligonucleotide
  Antisense Strand to SEQ ID NO: 431603
aucuggcagacccaucuau

SEQ ID NO: 431605 - RNA, 19 nt, Artificial Sequence
  Description of Artificial Sequence: Synthetic oligonucleotide
  Sense strand starting at position 3957 of SEQ ID NO: 316674
gccagauguccacagggua

SEQ ID NO: 431606 - RNA, 19 nt, Artificial Sequence
  Description of Artificial Sequence: Synthetic oligonucleotide
  Antisense Strand to SEQ ID NO: 431605
uacccuguggacaucuggc

SEQ ID NO: 431607 - RNA, 19 nt, Artificial Sequence
  Description of Artificial Sequence: Synthetic oligonucleotide
  Sense strand starting at position 54 of SEQ ID NO: 316675
uagugugagcuccaagaaa

SEQ ID NO: 431608 - RNA, 19 nt, Artificial Sequence
  Description of Artificial Sequence: Synthetic oligonucleotide
  Antisense Strand to SEQ ID NO: 431607
uuucuuggagcucacacua

SEQ ID NO: 431609 - RNA, 19 nt, Artificial Sequence
  Description of Artificial Sequence: Synthetic oligonucleotide
  Sense strand starting at position 132 of SEQ ID NO: 316675
cauggcaaguguccaauaa

SEQ ID NO: 431610 - RNA, 19 nt, Artificial Sequence
  Description of Artificial Sequence: Synthetic oligonucleotide
  Antisense Strand to SEQ ID NO: 431609
uuauuggacacuugccaug

SEQ ID NO: 431611 - RNA, 19 nt, Artificial Sequence
  Description of Artificial Sequence: Synthetic oligonucleotide
  Sense strand starting at position 133 of SEQ ID NO: 316675
auggcaaguguccaauaaa

SEQ ID NO: 431612 - RNA, 19 nt, Artificial Sequence
  Description of Artificial Sequence: Synthetic oligonucleotide
  Antisense Strand to SEQ ID NO: 431611
uuuauuggacacuugccau

SEQ ID NO: 431613 - RNA, 19 nt, Artificial Sequence
  Description of Artificial Sequence: Synthetic oligonucleotide
  Sense strand starting at position 136 of SEQ ID NO: 316675
gcaaguguccaauaaauac

SEQ ID NO: 431614 - RNA, 19 nt, Artificial Sequence
  Description of Artificial Sequence: Synthetic oligonucleotide
  Antisense Strand to SEQ ID NO: 431613
guauuuauuggacacuugc

SEQ ID NO: 431615 - RNA, 19 nt, Artificial Sequence
  Description of Artificial Sequence: Synthetic oligonucleotide
  Sense strand starting at position 577 of SEQ ID NO: 316675
aaaguaggguucuuacuga

SEQ ID NO: 431616 - RNA, 19 nt, Artificial Sequence
  Description of Artificial Sequence: Synthetic oligonucleotide
  Antisense Strand to SEQ ID NO: 431615
ucaguaagaacccuacuuu

SEQ ID NO: 431617 - RNA, 19 nt, Artificial Sequence
  Description of Artificial Sequence: Synthetic oligonucleotide
  Sense strand starting at position 584 of SEQ ID NO: 316675
gguucuuacugagcuacaa

SEQ ID NO: 431618 - RNA, 19 nt, Artificial Sequence
  Description of Artificial Sequence: Synthetic oligonucleotide
  Antisense Strand to SEQ ID NO: 431617
uuguagcucaguaagaacc

SEQ ID NO: 431619 - RNA, 19 nt, Artificial Sequence
  Description of Artificial Sequence: Synthetic oligonucleotide
  Sense strand starting at position 734 of SEQ ID NO: 316675
gcuucuaacuucuuaggaa

SEQ ID NO: 431620 - RNA, 19 nt, Artificial Sequence
  Description of Artificial Sequence: Synthetic oligonucleotide
  Antisense Strand to SEQ ID NO: 431619
uuccuaagaaguuagaagc

SEQ ID NO: 431621 - RNA, 19 nt, Artificial Sequence
  Description of Artificial Sequence: Synthetic oligonucleotide
  Sense strand starting at position 814 of SEQ ID NO: 316675
aucugaacuuuagagagaa

SEQ ID NO: 431622 - RNA, 19 nt, Artificial Sequence
  Description of Artificial Sequence: Synthetic oligonucleotide
  Antisense Strand to SEQ ID NO: 431621
uucucucuaaaguucagau

SEQ ID NO: 431623 - RNA, 19 nt, Artificial Sequence
  Description of Artificial Sequence: Synthetic oligonucleotide
  Sense strand starting at position 881 of SEQ ID NO: 316675
ugcucaauggccuaagaaa

SEQ ID NO: 431624 - RNA, 19 nt, Artificial Sequence
  Description of Artificial Sequence: Synthetic oligonucleotide
  Antisense Strand to SEQ ID NO: 431623
uuucuuaggccauugagca

SEQ ID NO: 431625 - RNA, 19 nt, Artificial Sequence
  Description of Artificial Sequence: Synthetic oligonucleotide
  Sense strand starting at position 965 of SEQ ID NO: 316675
gcugcagcugcaguuauaa

SEQ ID NO: 431626 - RNA, 19 nt, Artificial Sequence
  Description of Artificial Sequence: Synthetic oligonucleotide
  Antisense Strand to SEQ ID NO: 431625
uuauaacugcagcugcagc

SEQ ID NO: 431627 - RNA, 19 nt, Artificial Sequence
  Description of Artificial Sequence: Synthetic oligonucleotide
  Sense strand starting at position 1059 of SEQ ID NO: 316675
gcuacacauuaauuaggaa

SEQ ID NO: 431628 - RNA, 19 nt, Artificial Sequence
  Description of Artificial Sequence: Synthetic oligonucleotide
  Antisense Strand to SEQ ID NO: 431627
uuccuaauuaauguguagc

SEQ ID NO: 431629 - RNA, 19 nt, Artificial Sequence
  Description of Artificial Sequence: Synthetic oligonucleotide
  Sense strand starting at position 1148 of SEQ ID NO: 316675
aagcuaauagaguguugua

SEQ ID NO: 431630 - RNA, 19 nt, Artificial Sequence
  Description of Artificial Sequence: Synthetic oligonucleotide
  Antisense Strand to SEQ ID NO: 431629
uacaacacucuauuagcuu

SEQ ID NO: 431631 - RNA, 19 nt, Artificial Sequence
  Description of Artificial Sequence: Synthetic oligonucleotide
  Sense strand starting at position 1292 of SEQ ID NO: 316675
uccuaaaucguguaacuaa

SEQ ID NO: 431632 - RNA, 19 nt, Artificial Sequence
  Description of Artificial Sequence: Synthetic oligonucleotide
  Antisense Strand to SEQ ID NO: 431631
uuaguuacacgauuuagga

SEQ ID NO: 431633 - RNA, 19 nt, Artificial Sequence
  Description of Artificial Sequence: Synthetic oligonucleotide
  Sense strand starting at position 2070 of SEQ ID NO: 316675
ccgugaagugcucccgcua

SEQ ID NO: 431634 - RNA, 19 nt, Artificial Sequence
  Description of Artificial Sequence: Synthetic oligonucleotide
  Antisense Strand to SEQ ID NO: 431633
uagcgggagcacuucacgg

SEQ ID NO: 431635 - RNA, 19 nt, Artificial Sequence
  Description of Artificial Sequence: Synthetic oligonucleotide
  Sense strand starting at position 2163 of SEQ ID NO: 316675
acucccuuccuguaacgaa

SEQ ID NO: 431636 - RNA, 19 nt, Artificial Sequence
  Description of Artificial Sequence: Synthetic oligonucleotide
  Antisense Strand to SEQ ID NO: 431635
uucguuacaggaagggagu

SEQ ID NO: 431637 - RNA, 19 nt, Artificial Sequence
  Description of Artificial Sequence: Synthetic oligonucleotide
  Sense strand starting at position 2448 of SEQ ID NO: 316675
uuuccuauuuaguagagau

SEQ ID NO: 431638 - RNA, 19 nt, Artificial Sequence
  Description of Artificial Sequence: Synthetic oligonucleotide
  Antisense Strand to SEQ ID NO: 431637
aucucuacuaaauaggaaa

SEQ ID NO: 431639 - RNA, 19 nt, Artificial Sequence
  Description of Artificial Sequence: Synthetic oligonucleotide
  Sense strand starting at position 2748 of SEQ ID NO: 316675
ucugaaucgagcuggaaag

SEQ ID NO: 431640 - RNA, 19 nt, Artificial Sequence
  Description of Artificial Sequence: Synthetic oligonucleotide
  Antisense Strand to SEQ ID NO: 431639
cuuuccagcucgauucaga

SEQ ID NO: 431641 - RNA, 19 nt, Artificial Sequence
  Description of Artificial Sequence: Synthetic oligonucleotide
  Sense strand starting at position 2749 of SEQ ID NO: 316675
cugaaucgagcuggaaagu

SEQ ID NO: 431642 - RNA, 19 nt, Artificial Sequence
  Description of Artificial Sequence: Synthetic oligonucleotide
  Antisense Strand to SEQ ID NO: 431641
acuuuccagcucgauucag

SEQ ID NO: 431643 - RNA, 19 nt, Artificial Sequence
  Description of Artificial Sequence: Synthetic oligonucleotide
  Sense strand starting at position 2758 of SEQ ID NO: 316675
gcuggaaaguguuuacaga

SEQ ID NO: 431644 - RNA, 19 nt, Artificial Sequence
  Description of Artificial Sequence: Synthetic oligonucleotide
  Antisense Strand to SEQ ID NO: 431643
ucuguaaacacuuuccagc

SEQ ID NO: 431645 - RNA, 19 nt, Artificial Sequence
  Description of Artificial Sequence: Synthetic oligonucleotide
  Sense strand starting at position 2856 of SEQ ID NO: 316675
uuguuuauagcugacuuga

SEQ ID NO: 431646 - RNA, 19 nt, Artificial Sequence
  Description of Artificial Sequence: Synthetic oligonucleotide
  Antisense Strand to SEQ ID NO: 431645
ucaagucagcuauaaacaa

SEQ ID NO: 431647 - RNA, 19 nt, Artificial Sequence
  Description of Artificial Sequence: Synthetic oligonucleotide
  Sense strand starting at position 2858 of SEQ ID NO: 316675
guuuauagcugacuugaag

SEQ ID NO: 431648 - RNA, 19 nt, Artificial Sequence
  Description of Artificial Sequence: Synthetic oligonucleotide
  Antisense Strand to SEQ ID NO: 431647
cuucaagucagcuauaaac

SEQ ID NO: 431649 - RNA, 19 nt, Artificial Sequence
  Description of Artificial Sequence: Synthetic oligonucleotide
  Sense strand starting at position 2953 of SEQ ID NO: 316675
uguccaauuggcuaaguga

SEQ ID NO: 431650 - RNA, 19 nt, Artificial Sequence
  Description of Artificial Sequence: Synthetic oligonucleotide
  Antisense Strand to SEQ ID NO: 431649
ucacuuagccaauuggaca

SEQ ID NO: 431651 - RNA, 19 nt, Artificial Sequence
  Description of Artificial Sequence: Synthetic oligonucleotide
  Sense strand starting at position 3024 of SEQ ID NO: 316675
auauaugaguuggaaagga

SEQ ID NO: 431652 - RNA, 19 nt, Artificial Sequence
  Description of Artificial Sequence: Synthetic oligonucleotide
  Antisense Strand to SEQ ID NO: 431651
uccuuuccaacucauauau

SEQ ID NO: 431653 - RNA, 19 nt, Artificial Sequence
  Description of Artificial Sequence: Synthetic oligonucleotide
  Sense strand starting at position 3066 of SEQ ID NO: 316675
guauucugugagcacugaa

SEQ ID NO: 431654 - RNA, 19 nt, Artificial Sequence
  Description of Artificial Sequence: Synthetic oligonucleotide
  Antisense Strand to SEQ ID NO: 431653
uucagugcucacagaauac

SEQ ID NO: 431655 - RNA, 19 nt, Artificial Sequence
  Description of Artificial Sequence: Synthetic oligonucleotide
  Sense strand starting at position 3069 of SEQ ID NO: 316675
uucugugagcacugaaagu

SEQ ID NO: 431656 - RNA, 19 nt, Artificial Sequence
  Description of Artificial Sequence: Synthetic oligonucleotide
  Antisense Strand to SEQ ID NO: 431655
acuuucagugcucacagaa

SEQ ID NO: 431657 - RNA, 19 nt, Artificial Sequence
  Description of Artificial Sequence: Synthetic oligonucleotide
  Sense strand starting at position 3111 of SEQ ID NO: 316675
gggcaagcguaaguuauuu

SEQ ID NO: 431658 - RNA, 19 nt, Artificial Sequence
  Description of Artificial Sequence: Synthetic oligonucleotide
  Antisense Strand to SEQ ID NO: 431657
aaauaacuuacgcuugccc

SEQ ID NO: 431659 - RNA, 19 nt, Artificial Sequence
  Description of Artificial Sequence: Synthetic oligonucleotide
  Sense strand starting at position 3113 of SEQ ID NO: 316675
gcaagcguaaguuauuuga

SEQ ID NO: 431660 - RNA, 19 nt, Artificial Sequence
  Description of Artificial Sequence: Synthetic oligonucleotide
  Antisense Strand to SEQ ID NO: 431659
ucaaauaacuuacgcuugc

SEQ ID NO: 431661 - RNA, 19 nt, Artificial Sequence
  Description of Artificial Sequence: Synthetic oligonucleotide
  Sense strand starting at position 3115 of SEQ ID NO: 316675
aagcguaaguuauuugauu

SEQ ID NO: 431662 - RNA, 19 nt, Artificial Sequence
  Description of Artificial Sequence: Synthetic oligonucleotide
  Antisense Strand to SEQ ID NO: 431661
aaucaaauaacuuacgcuu

SEQ ID NO: 431663 - RNA, 19 nt, Artificial Sequence
  Description of Artificial Sequence: Synthetic oligonucleotide
  Sense strand starting at position 3116 of SEQ ID NO: 316675
agcguaaguuauuugauua

SEQ ID NO: 431664 - RNA, 19 nt, Artificial Sequence
  Description of Artificial Sequence: Synthetic oligonucleotide
  Antisense Strand to SEQ ID NO: 431663
uaaucaaauaacuuacgcu

SEQ ID NO: 431665 - RNA, 19 nt, Artificial Sequence
  Description of Artificial Sequence: Synthetic oligonucleotide
  Sense strand starting at position 3117 of SEQ ID NO: 316675
gcguaaguuauuugauuag

SEQ ID NO: 431666 - RNA, 19 nt, Artificial Sequence
  Description of Artificial Sequence: Synthetic oligonucleotide
  Antisense Strand to SEQ ID NO: 431665
cuaaucaaauaacuuacgc

SEQ ID NO: 431667 - RNA, 19 nt, Artificial Sequence
  Description of Artificial Sequence: Synthetic oligonucleotide
  Sense strand starting at position 3576 of SEQ ID NO: 316675
acaguugucuuucuaggga

SEQ ID NO: 431668 - RNA, 19 nt, Artificial Sequence
  Description of Artificial Sequence: Synthetic oligonucleotide
  Antisense Strand to SEQ ID NO: 431667
ucccuagaaagacaacugu

SEQ ID NO: 431669 - RNA, 19 nt, Artificial Sequence
  Description of Artificial Sequence: Synthetic oligonucleotide
  Sense strand starting at position 3666 of SEQ ID NO: 316675
acaguaaacugcuuuggca

SEQ ID NO: 431670 - RNA, 19 nt, Artificial Sequence
  Description of Artificial Sequence: Synthetic oligonucleotide
  Antisense Strand to SEQ ID NO: 431669
ugccaaagcaguuuacugu

SEQ ID NO: 431671 - RNA, 19 nt, Artificial Sequence
  Description of Artificial Sequence: Synthetic oligonucleotide
  Sense strand starting at position 3685 of SEQ ID NO: 316675
accacaacugucuggaaca

SEQ ID NO: 431672 - RNA, 19 nt, Artificial Sequence
  Description of Artificial Sequence: Synthetic oligonucleotide
  Antisense Strand to SEQ ID NO: 431671
uguuccagacaguuguggu

SEQ ID NO: 431673 - RNA, 19 nt, Artificial Sequence
  Description of Artificial Sequence: Synthetic oligonucleotide
  Sense strand starting at position 3848 of SEQ ID NO: 316675
acaucauuccagugaguuu

SEQ ID NO: 431674 - RNA, 19 nt, Artificial Sequence
  Description of Artificial Sequence: Synthetic oligonucleotide
  Antisense Strand to SEQ ID NO: 431673
aaacucacuggaaugaugu

SEQ ID NO: 431675 - RNA, 19 nt, Artificial Sequence
  Description of Artificial Sequence: Synthetic oligonucleotide
  Sense strand starting at position 3874 of SEQ ID NO: 316675
ugauucucugucuauagca

SEQ ID NO: 431676 - RNA, 19 nt, Artificial Sequence
  Description of Artificial Sequence: Synthetic oligonucleotide
  Antisense Strand to SEQ ID NO: 431675
ugcuauagacagagaauca

SEQ ID NO: 431677 - RNA, 19 nt, Artificial Sequence
  Description of Artificial Sequence: Synthetic oligonucleotide
  Sense strand starting at position 3907 of SEQ ID NO: 316675
aauagaugggucugccaga

SEQ ID NO: 431678 - RNA, 19 nt, Artificial Sequence
  Description of Artificial Sequence: Synthetic oligonucleotide
  Antisense Strand to SEQ ID NO: 431677
ucuggcagacccaucuauu

SEQ ID NO: 431679 - RNA, 19 nt, Artificial Sequence
  Description of Artificial Sequence: Synthetic oligonucleotide
  Sense strand starting at position 3908 of SEQ ID NO: 316675
auagaugggucugccagau

SEQ ID NO: 431680 - RNA, 19 nt, Artificial Sequence
  Description of Artificial Sequence: Synthetic oligonucleotide
  Antisense Strand to SEQ ID NO: 431679
aucuggcagacccaucuau

SEQ ID NO: 431681 - RNA, 19 nt, Artificial Sequence
  Description of Artificial Sequence: Synthetic oligonucleotide
  Sense strand starting at position 3920 of SEQ ID NO: 316675
gccagauguccacagggua

SEQ ID NO: 431682 - RNA, 19 nt, Artificial Sequence
  Description of Artificial Sequence: Synthetic oligonucleotide
  Antisense Strand to SEQ ID NO: 431681
uacccuguggacaucuggc

SEQ ID NO: 431683 - RNA, 19 nt, Artificial Sequence
  Description of Artificial Sequence: Synthetic oligonucleotide
  Sense strand starting at position 3969 of SEQ ID NO: 316675
caggaagucaugugugaca

SEQ ID NO: 431684 - RNA, 19 nt, Artificial Sequence
  Description of Artificial Sequence: Synthetic oligonucleotide
  Antisense Strand to SEQ ID NO: 431683
ugucacacaugacuuccug

SEQ ID NO: 431685 - RNA, 19 nt, Artificial Sequence
  Description of Artificial Sequence: Synthetic oligonucleotide
  Sense strand starting at position 3971 of SEQ ID NO: 316675
ggaagucaugugugacaag

SEQ ID NO: 431686 - RNA, 19 nt, Artificial Sequence
  Description of Artificial Sequence: Synthetic oligonucleotide
  Antisense Strand to SEQ ID NO: 431685
cuugucacacaugacuucc

SEQ ID NO: 431687 - RNA, 19 nt, Artificial Sequence
  Description of Artificial Sequence: Synthetic oligonucleotide
  Sense strand starting at position 253 of SEQ ID NO: 316676
uguuaauagcaagaucuuc

SEQ ID NO: 431688 - RNA, 19 nt, Artificial Sequence
  Description of Artificial Sequence: Synthetic oligonucleotide
  Antisense Strand to SEQ ID NO: 431687
gaagaucuugcuauuaaca

SEQ ID NO: 431689 - RNA, 19 nt, Artificial Sequence
  Description of Artificial Sequence: Synthetic oligonucleotide
  Sense strand starting at position 293 of SEQ ID NO: 316676
uccaucguugagcaacaua

SEQ ID NO: 431690 - RNA, 19 nt, Artificial Sequence
  Description of Artificial Sequence: Synthetic oligonucleotide
  Antisense Strand to SEQ ID NO: 431689
uauguugcucaacgaugga

SEQ ID NO: 431691 - RNA, 19 nt, Artificial Sequence
  Description of Artificial Sequence: Synthetic oligonucleotide
  Sense strand starting at position 409 of SEQ ID NO: 316676
uuguaagaacauugucaaa

SEQ ID NO: 431692 - RNA, 19 nt, Artificial Sequence
  Description of Artificial Sequence: Synthetic oligonucleotide
  Antisense Strand to SEQ ID NO: 431691
uuugacaauguucuuacaa

SEQ ID NO: 431693 - RNA, 19 nt, Artificial Sequence
  Description of Artificial Sequence: Synthetic oligonucleotide
  Sense strand starting at position 428 of SEQ ID NO: 316676
gcuacuguguauuucugaa

SEQ ID NO: 431694 - RNA, 19 nt, Artificial Sequence
  Description of Artificial Sequence: Synthetic oligonucleotide
  Antisense Strand to SEQ ID NO: 431693
uucagaaauacacaguagc

SEQ ID NO: 431695 - RNA, 19 nt, Artificial Sequence
  Description of Artificial Sequence: Synthetic oligonucleotide
  Sense strand starting at position 449 of SEQ ID NO: 316676
guauaaaugguuugaauag

SEQ ID NO: 431696 - RNA, 19 nt, Artificial Sequence
  Description of Artificial Sequence: Synthetic oligonucleotide
  Antisense Strand to SEQ ID NO: 431695
cuauucaaaccauuuauac

SEQ ID NO: 431697 - RNA, 19 nt, Artificial Sequence
  Description of Artificial Sequence: Synthetic oligonucleotide
  Sense strand starting at position 465 of SEQ ID NO: 316676
uagugacugcuguaaacaa

SEQ ID NO: 431698 - RNA, 19 nt, Artificial Sequence
  Description of Artificial Sequence: Synthetic oligonucleotide
  Antisense Strand to SEQ ID NO: 431697
uuguuuacagcagucacua

SEQ ID NO: 431699 - RNA, 19 nt, Artificial Sequence
  Description of Artificial Sequence: Synthetic oligonucleotide
  Sense strand starting at position 472 of SEQ ID NO: 316676
ugcuguaaacaaugagaag

SEQ ID NO: 431700 - RNA, 19 nt, Artificial Sequence
  Description of Artificial Sequence: Synthetic oligonucleotide
  Antisense Strand to SEQ ID NO: 431699
cuucucauuguuuacagca

SEQ ID NO: 431701 - RNA, 19 nt, Artificial Sequence
  Description of Artificial Sequence: Synthetic oligonucleotide
  Sense strand starting at position 663 of SEQ ID NO: 316676
agaaguauauuaucaagug

SEQ ID NO: 431702 - RNA, 19 nt, Artificial Sequence
  Description of Artificial Sequence: Synthetic oligonucleotide
  Antisense Strand to SEQ ID NO: 431701
cacuugauaauauacuucu

SEQ ID NO: 431703 - RNA, 19 nt, Artificial Sequence
  Description of Artificial Sequence: Synthetic oligonucleotide
  Sense strand starting at position 857 of SEQ ID NO: 316676
acuuacugguucuuugaaa

SEQ ID NO: 431704 - RNA, 19 nt, Artificial Sequence
  Description of Artificial Sequence: Synthetic oligonucleotide
  Antisense Strand to SEQ ID NO: 431703
uuucaaagaaccaguaagu

SEQ ID NO: 431705 - RNA, 19 nt, Artificial Sequence
  Description of Artificial Sequence: Synthetic oligonucleotide
  Sense strand starting at position 858 of SEQ ID NO: 316676
cuuacugguucuuugaaau

SEQ ID NO: 431706 - RNA, 19 nt, Artificial Sequence
  Description of Artificial Sequence: Synthetic oligonucleotide
  Antisense Strand to SEQ ID NO: 431705
auuucaaagaaccaguaag

SEQ ID NO: 431707 - RNA, 19 nt, Artificial Sequence
  Description of Artificial Sequence: Synthetic oligonucleotide
  Sense strand starting at position 936 of SEQ ID NO: 316676
guugguuaaguacaauaua

SEQ ID NO: 431708 - RNA, 19 nt, Artificial Sequence
  Description of Artificial Sequence: Synthetic oligonucleotide
  Antisense Strand to SEQ ID NO: 431707
uauauuguacuuaaccaac

SEQ ID NO: 431709 - RNA, 19 nt, Artificial Sequence
  Description of Artificial Sequence: Synthetic oligonucleotide
  Sense strand starting at position 939 of SEQ ID NO: 316676
gguuaaguacaauauacuu

SEQ ID NO: 431710 - RNA, 19 nt, Artificial Sequence
  Description of Artificial Sequence: Synthetic oligonucleotide
  Antisense Strand to SEQ ID NO: 431709
aaguauauuguacuuaacc

SEQ ID NO: 431711 - RNA, 19 nt, Artificial Sequence
  Description of Artificial Sequence: Synthetic oligonucleotide
  Sense strand starting at position 1032 of SEQ ID NO: 316676
gcuguauaagcauaauaau

SEQ ID NO: 431712 - RNA, 19 nt, Artificial Sequence
  Description of Artificial Sequence: Synthetic oligonucleotide
  Antisense Strand to SEQ ID NO: 431711
auuauuaugcuuauacagc

SEQ ID NO: 431713 - RNA, 19 nt, Artificial Sequence
  Description of Artificial Sequence: Synthetic oligonucleotide
  Sense strand starting at position 1073 of SEQ ID NO: 316676
aagugacaugccuaguuac

SEQ ID NO: 431714 - RNA, 19 nt, Artificial Sequence
  Description of Artificial Sequence: Synthetic oligonucleotide
  Antisense Strand to SEQ ID NO: 431713
guaacuaggcaugucacuu

SEQ ID NO: 431715 - RNA, 19 nt, Artificial Sequence
  Description of Artificial Sequence: Synthetic oligonucleotide
  Sense strand starting at position 1204 of SEQ ID NO: 316676
aauaaacugcuuuggaguu

SEQ ID NO: 431716 - RNA, 19 nt, Artificial Sequence
  Description of Artificial Sequence: Synthetic oligonucleotide
  Antisense Strand to SEQ ID NO: 431715
aacuccaaagcaguuuauu

SEQ ID NO: 431717 - RNA, 19 nt, Artificial Sequence
  Description of Artificial Sequence: Synthetic oligonucleotide
  Sense strand starting at position 1313 of SEQ ID NO: 316676
ucugcaauagcuuagagau

SEQ ID NO: 431718 - RNA, 19 nt, Artificial Sequence
  Description of Artificial Sequence: Synthetic oligonucleotide
  Antisense Strand to SEQ ID NO: 431717
aucucuaagcuauugcaga

SEQ ID NO: 431719 - RNA, 19 nt, Artificial Sequence
  Description of Artificial Sequence: Synthetic oligonucleotide
  Sense strand starting at position 1507 of SEQ ID NO: 316676
acacaaucaugcucagaga

SEQ ID NO: 431720 - RNA, 19 nt, Artificial Sequence
  Description of Artificial Sequence: Synthetic oligonucleotide
  Antisense Strand to SEQ ID NO: 431719
ucucugagcaugauugugu

SEQ ID NO: 431721 - RNA, 19 nt, Artificial Sequence
  Description of Artificial Sequence: Synthetic oligonucleotide
  Sense strand starting at position 2408 of SEQ ID NO: 316676
ucugcaaauguccaggauu

SEQ ID NO: 431722 - RNA, 19 nt, Artificial Sequence
  Description of Artificial Sequence: Synthetic oligonucleotide
  Antisense Strand to SEQ ID NO: 431721
aauccuggacauuugcaga

SEQ ID NO: 431723 - RNA, 19 nt, Artificial Sequence
  Description of Artificial Sequence: Synthetic oligonucleotide
  Sense strand starting at position 2484 of SEQ ID NO: 316676
uuuauaugugguggaauac

SEQ ID NO: 431724 - RNA, 19 nt, Artificial Sequence
  Description of Artificial Sequence: Synthetic oligonucleotide
  Antisense Strand to SEQ ID NO: 431723
guauuccaccacauauaaa

SEQ ID NO: 431725 - RNA, 19 nt, Artificial Sequence
  Description of Artificial Sequence: Synthetic oligonucleotide
  Sense strand starting at position 2775 of SEQ ID NO: 316676
auagguaugccuugaaaca

SEQ ID NO: 431726 - RNA, 19 nt, Artificial Sequence
  Description of Artificial Sequence: Synthetic oligonucleotide
  Antisense Strand to SEQ ID NO: 431725
uguuucaaggcauaccuau

SEQ ID NO: 431727 - RNA, 19 nt, Artificial Sequence
  Description of Artificial Sequence: Synthetic oligonucleotide
  Sense strand starting at position 2776 of SEQ ID NO: 316676
uagguaugccuugaaacac

SEQ ID NO: 431728 - RNA, 19 nt, Artificial Sequence
  Description of Artificial Sequence: Synthetic oligonucleotide
  Antisense Strand to SEQ ID NO: 431727
guguuucaaggcauaccua

SEQ ID NO: 431729 - RNA, 19 nt, Artificial Sequence
  Description of Artificial Sequence: Synthetic oligonucleotide
  Sense strand starting at position 2820 of SEQ ID NO: 316676
aagcauguguaauuuguuu

SEQ ID NO: 431730 - RNA, 19 nt, Artificial Sequence
  Description of Artificial Sequence: Synthetic oligonucleotide
  Antisense Strand to SEQ ID NO: 431729
aaacaaauuacacaugcuu

SEQ ID NO: 431731 - RNA, 19 nt, Artificial Sequence
  Description of Artificial Sequence: Synthetic oligonucleotide
  Sense strand starting at position 2860 of SEQ ID NO: 316676
guauuuggcuucuuuagac

SEQ ID NO: 431732 - RNA, 19 nt, Artificial Sequence
  Description of Artificial Sequence: Synthetic oligonucleotide
  Antisense Strand to SEQ ID NO: 431731
gucuaaagaagccaaauac

SEQ ID NO: 431733 - RNA, 19 nt, Artificial Sequence
  Description of Artificial Sequence: Synthetic oligonucleotide
  Sense strand starting at position 2927 of SEQ ID NO: 316676
ugcacaauuugucuugauu

SEQ ID NO: 431734 - RNA, 19 nt, Artificial Sequence
  Description of Artificial Sequence: Synthetic oligonucleotide
  Antisense Strand to SEQ ID NO: 431733
aaucaagacaaauugugca

SEQ ID NO: 431735 - RNA, 19 nt, Artificial Sequence
  Description of Artificial Sequence: Synthetic oligonucleotide
  Sense strand starting at position 2959 of SEQ ID NO: 316676
uguaaauuucccugccugu

SEQ ID NO: 431736 - RNA, 19 nt, Artificial Sequence
  Description of Artificial Sequence: Synthetic oligonucleotide
  Antisense Strand to SEQ ID NO: 431735
acaggcagggaaauuuaca

SEQ ID NO: 431737 - RNA, 19 nt, Artificial Sequence
  Description of Artificial Sequence: Synthetic oligonucleotide
  Sense strand starting at position 2975 of SEQ ID NO: 316676
ugucuaguuaggcaugaag

SEQ ID NO: 431738 - RNA, 19 nt, Artificial Sequence
  Description of Artificial Sequence: Synthetic oligonucleotide
  Antisense Strand to SEQ ID NO: 431737
cuucaugccuaacuagaca

SEQ ID NO: 431739 - RNA, 19 nt, Artificial Sequence
  Description of Artificial Sequence: Synthetic oligonucleotide
  Sense strand starting at position 2978 of SEQ ID NO: 316676
cuaguuaggcaugaaguuu

SEQ ID NO: 431740 - RNA, 19 nt, Artificial Sequence
  Description of Artificial Sequence: Synthetic oligonucleotide
  Antisense Strand to SEQ ID NO: 431739
aaacuucaugccuaacuag

SEQ ID NO: 431741 - RNA, 19 nt, Artificial Sequence
  Description of Artificial Sequence: Synthetic oligonucleotide
  Sense strand starting at position 3049 of SEQ ID NO: 316676
agaauauauugaccuguuu

SEQ ID NO: 431742 - RNA, 19 nt, Artificial Sequence
  Description of Artificial Sequence: Synthetic oligonucleotide
  Antisense Strand to SEQ ID NO: 431741
aaacaggucaauauauucu

SEQ ID NO: 431743 - RNA, 19 nt, Artificial Sequence
  Description of Artificial Sequence: Synthetic oligonucleotide
  Sense strand starting at position 3169 of SEQ ID NO: 316676
gugacuuaagaauggcaaa

SEQ ID NO: 431744 - RNA, 19 nt, Artificial Sequence
  Description of Artificial Sequence: Synthetic oligonucleotide
  Antisense Strand to SEQ ID NO: 431743
uuugccauucuuaagucac

SEQ ID NO: 431745 - RNA, 19 nt, Artificial Sequence
  Description of Artificial Sequence: Synthetic oligonucleotide
  Sense strand starting at position 3434 of SEQ ID NO: 316676
ggugaucaacaaugaauuc

SEQ ID NO: 431746 - RNA, 19 nt, Artificial Sequence
  Description of Artificial Sequence: Synthetic oligonucleotide
  Antisense Strand to SEQ ID NO: 431745
gaauucauuguugaucacc

SEQ ID NO: 431747 - RNA, 19 nt, Artificial Sequence
  Description of Artificial Sequence: Synthetic oligonucleotide
  Sense strand starting at position 3473 of SEQ ID NO: 316676
accagugcuguggaagaua

SEQ ID NO: 431748 - RNA, 19 nt, Artificial Sequence
  Description of Artificial Sequence: Synthetic oligonucleotide
  Antisense Strand to SEQ ID NO: 431747
uaucuuccacagcacuggu

SEQ ID NO: 431749 - RNA, 19 nt, Artificial Sequence
  Description of Artificial Sequence: Synthetic oligonucleotide
  Sense strand starting at position 3476 of SEQ ID NO: 316676
agugcuguggaagauacau

SEQ ID NO: 431750 - RNA, 19 nt, Artificial Sequence
  Description of Artificial Sequence: Synthetic oligonucleotide
  Antisense Strand to SEQ ID NO: 431749
auguaucuuccacagcacu

SEQ ID NO: 431751 - RNA, 19 nt, Artificial Sequence
  Description of Artificial Sequence: Synthetic oligonucleotide
  Sense strand starting at position 3478 of SEQ ID NO: 316676
ugcuguggaagauacauau

SEQ ID NO: 431752 - RNA, 19 nt, Artificial Sequence
  Description of Artificial Sequence: Synthetic oligonucleotide
  Antisense Strand to SEQ ID NO: 431751
auauguaucuuccacagca

SEQ ID NO: 431753 - RNA, 19 nt, Artificial Sequence
  Description of Artificial Sequence: Synthetic oligonucleotide
  Sense strand starting at position 3607 of SEQ ID NO: 316676
cugaaagagugauuaugua

SEQ ID NO: 431754 - RNA, 19 nt, Artificial Sequence
  Description of Artificial Sequence: Synthetic oligonucleotide
  Antisense Strand to SEQ ID NO: 431753
uacauaaucacucuuucag

SEQ ID NO: 431755 - RNA, 19 nt, Artificial Sequence
  Description of Artificial Sequence: Synthetic oligonucleotide
  Sense strand starting at position 3744 of SEQ ID NO: 316676
uuauacagucaaugagcaa

SEQ ID NO: 431756 - RNA, 19 nt, Artificial Sequence
  Description of Artificial Sequence: Synthetic oligonucleotide
  Antisense Strand to SEQ ID NO: 431755
uugcucauugacuguauaa

SEQ ID NO: 431757 - RNA, 19 nt, Artificial Sequence
  Description of Artificial Sequence: Synthetic oligonucleotide
  Sense strand starting at position 3766 of SEQ ID NO: 316676
aaauguuagacauggaggu

SEQ ID NO: 431758 - RNA, 19 nt, Artificial Sequence
  Description of Artificial Sequence: Synthetic oligonucleotide
  Antisense Strand to SEQ ID NO: 431757
accuccaugucuaacauuu

SEQ ID NO: 431759 - RNA, 19 nt, Artificial Sequence
  Description of Artificial Sequence: Synthetic oligonucleotide
  Sense strand starting at position 3767 of SEQ ID NO: 316676
aauguuagacauggaggua

SEQ ID NO: 431760 - RNA, 19 nt, Artificial Sequence
  Description of Artificial Sequence: Synthetic oligonucleotide
  Antisense Strand to SEQ ID NO: 431759
uaccuccaugucuaacauu

SEQ ID NO: 431761 - RNA, 19 nt, Artificial Sequence
  Description of Artificial Sequence: Synthetic oligonucleotide
  Sense strand starting at position 3770 of SEQ ID NO: 316676
guuagacauggagguacaa

SEQ ID NO: 431762 - RNA, 19 nt, Artificial Sequence
  Description of Artificial Sequence: Synthetic oligonucleotide
  Antisense Strand to SEQ ID NO: 431761
uuguaccuccaugucuaac

SEQ ID NO: 431763 - RNA, 19 nt, Artificial Sequence
  Description of Artificial Sequence: Synthetic oligonucleotide
  Sense strand starting at position 3810 of SEQ ID NO: 316676
uguggaaugugagucaaca

SEQ ID NO: 431764 - RNA, 19 nt, Artificial Sequence
  Description of Artificial Sequence: Synthetic oligonucleotide
  Antisense Strand to SEQ ID NO: 431763
uguugacucacauuccaca

SEQ ID NO: 431765 - RNA, 19 nt, Artificial Sequence
  Description of Artificial Sequence: Synthetic oligonucleotide
  Sense strand starting at position 3818 of SEQ ID NO: 316676
gugagucaacaauagcaau

SEQ ID NO: 431766 - RNA, 19 nt, Artificial Sequence
  Description of Artificial Sequence: Synthetic oligonucleotide
  Antisense Strand to SEQ ID NO: 431765
auugcuauuguugacucac

SEQ ID NO: 431767 - RNA, 19 nt, Artificial Sequence
  Description of Artificial Sequence: Synthetic oligonucleotide
  Sense strand starting at position 153 of SEQ ID NO: 316677
cccagaauucuacguagac

SEQ ID NO: 431768 - RNA, 19 nt, Artificial Sequence
  Description of Artificial Sequence: Synthetic oligonucleotide
  Antisense Strand to SEQ ID NO: 431767
gucuacguagaauucuggg

SEQ ID NO: 431769 - RNA, 19 nt, Artificial Sequence
  Description of Artificial Sequence: Synthetic oligonucleotide
  Sense strand starting at position 154 of SEQ ID NO: 316677
ccagaauucuacguagacu

SEQ ID NO: 431770 - RNA, 19 nt, Artificial Sequence
  Description of Artificial Sequence: Synthetic oligonucleotide
  Antisense Strand to SEQ ID NO: 431769
agucuacguagaauucugg

SEQ ID NO: 431771 - RNA, 19 nt, Artificial Sequence
  Description of Artificial Sequence: Synthetic oligonucleotide
  Sense strand starting at position 157 of SEQ ID NO: 316677
gaauucuacguagacuuua

SEQ ID NO: 431772 - RNA, 19 nt, Artificial Sequence
  Description of Artificial Sequence: Synthetic oligonucleotide
  Antisense Strand to SEQ ID NO: 431771
uaaagucuacguagaauuc

SEQ ID NO: 431773 - RNA, 19 nt, Artificial Sequence
  Description of Artificial Sequence: Synthetic oligonucleotide
  Sense strand starting at position 230 of SEQ ID NO: 316677
aucugaguucuauacuucu

SEQ ID NO: 431774 - RNA, 19 nt, Artificial Sequence
  Description of Artificial Sequence: Synthetic oligonucleotide
  Antisense Strand to SEQ ID NO: 431773
agaaguauagaacucagau

SEQ ID NO: 431775 - RNA, 19 nt, Artificial Sequence
  Description of Artificial Sequence: Synthetic oligonucleotide
  Sense strand starting at position 233 of SEQ ID NO: 316677
ugaguucuauacuucucca

SEQ ID NO: 431776 - RNA, 19 nt, Artificial Sequence
  Description of Artificial Sequence: Synthetic oligonucleotide
  Antisense Strand to SEQ ID NO: 431775
uggagaaguauagaacuca

SEQ ID NO: 431777 - RNA, 19 nt, Artificial Sequence
  Description of Artificial Sequence: Synthetic oligonucleotide
  Sense strand starting at position 236 of SEQ ID NO: 316677
guucuauacuucuccacag

SEQ ID NO: 431778 - RNA, 19 nt, Artificial Sequence
  Description of Artificial Sequence: Synthetic oligonucleotide
  Antisense Strand to SEQ ID NO: 431777
cuguggagaaguauagaac

SEQ ID NO: 431779 - RNA, 19 nt, Artificial Sequence
  Description of Artificial Sequence: Synthetic oligonucleotide
  Sense strand starting at position 283 of SEQ ID NO: 316677
uugcauauccaugagccuu

SEQ ID NO: 431780 - RNA, 19 nt, Artificial Sequence
  Description of Artificial Sequence: Synthetic oligonucleotide
  Antisense Strand to SEQ ID NO: 431779
aaggcucauggauaugcaa

SEQ ID NO: 431781 - RNA, 19 nt, Artificial Sequence
  Description of Artificial Sequence: Synthetic oligonucleotide
  Sense strand starting at position 311 of SEQ ID NO: 316677
ggagcuugcagugauauua

SEQ ID NO: 431782 - RNA, 19 nt, Artificial Sequence
  Description of Artificial Sequence: Synthetic oligonucleotide
  Antisense Strand to SEQ ID NO: 431781
uaauaucacugcaagcucc

SEQ ID NO: 431783 - RNA, 19 nt, Artificial Sequence
  Description of Artificial Sequence: Synthetic oligonucleotide
  Sense strand starting at position 400 of SEQ ID NO: 316677
cagguuuacagacgaagga

SEQ ID NO: 431784 - RNA, 19 nt, Artificial Sequence
  Description of Artificial Sequence: Synthetic oligonucleotide
  Antisense Strand to SEQ ID NO: 431783
uccuucgucuguaaaccug

SEQ ID NO: 431785 - RNA, 19 nt, Artificial Sequence
  Description of Artificial Sequence: Synthetic oligonucleotide
  Sense strand starting at position 556 of SEQ ID NO: 316677
accuuaaauguguaugugu

SEQ ID NO: 431786 - RNA, 19 nt, Artificial Sequence
  Description of Artificial Sequence: Synthetic oligonucleotide
  Antisense Strand to SEQ ID NO: 431785
acacauacacauuuaaggu

SEQ ID NO: 431787 - RNA, 19 nt, Artificial Sequence
  Description of Artificial Sequence: Synthetic oligonucleotide
  Sense strand starting at position 598 of SEQ ID NO: 316677
ggaagauauuugcacuuaa

SEQ ID NO: 431788 - RNA, 19 nt, Artificial Sequence
  Description of Artificial Sequence: Synthetic oligonucleotide
  Antisense Strand to SEQ ID NO: 431787
uuaagugcaaauaucuucc

SEQ ID NO: 431789 - RNA, 19 nt, Artificial Sequence
  Description of Artificial Sequence: Synthetic oligonucleotide
  Sense strand starting at position 652 of SEQ ID NO: 316677
cuuuaaacguuguuggaca

SEQ ID NO: 431790 - RNA, 19 nt, Artificial Sequence
  Description of Artificial Sequence: Synthetic oligonucleotide
  Antisense Strand to SEQ ID NO: 431789
uguccaacaacguuuaaag

SEQ ID NO: 431791 - RNA, 19 nt, Artificial Sequence
  Description of Artificial Sequence: Synthetic oligonucleotide
  Sense strand starting at position 654 of SEQ ID NO: 316677
uuaaacguuguuggacaaa

SEQ ID NO: 431792 - RNA, 19 nt, Artificial Sequence
  Description of Artificial Sequence: Synthetic oligonucleotide
  Antisense Strand to SEQ ID NO: 431791
uuuguccaacaacguuuaa

SEQ ID NO: 431793 - RNA, 19 nt, Artificial Sequence
  Description of Artificial Sequence: Synthetic oligonucleotide
  Sense strand starting at position 712 of SEQ ID NO: 316677
guguauggaagucauaaau

SEQ ID NO: 431794 - RNA, 19 nt, Artificial Sequence
  Description of Artificial Sequence: Synthetic oligonucleotide
  Antisense Strand to SEQ ID NO: 431793
auuuaugacuuccauacac

SEQ ID NO: 431795 - RNA, 19 nt, Artificial Sequence
  Description of Artificial Sequence: Synthetic oligonucleotide
  Sense strand starting at position 808 of SEQ ID NO: 316677
auuacuuacgggcaaaguu

SEQ ID NO: 431796 - RNA, 19 nt, Artificial Sequence
  Description of Artificial Sequence: Synthetic oligonucleotide
  Antisense Strand to SEQ ID NO: 431795
aacuuugcccguaaguaau

SEQ ID NO: 431797 - RNA, 19 nt, Artificial Sequence
  Description of Artificial Sequence: Synthetic oligonucleotide
  Sense strand starting at position 849 of SEQ ID NO: 316677
agugcuuaagugcagauaa

SEQ ID NO: 431798 - RNA, 19 nt, Artificial Sequence
  Description of Artificial Sequence: Synthetic oligonucleotide
  Antisense Strand to SEQ ID NO: 431797
uuaucugcacuuaagcacu

SEQ ID NO: 431799 - RNA, 19 nt, Artificial Sequence
  Description of Artificial Sequence: Synthetic oligonucleotide
  Sense strand starting at position 851 of SEQ ID NO: 316677
ugcuuaagugcagauaaau

SEQ ID NO: 431800 - RNA, 19 nt, Artificial Sequence
  Description of Artificial Sequence: Synthetic oligonucleotide
  Antisense Strand to SEQ ID NO: 431799
auuuaucugcacuuaagca

SEQ ID NO: 431801 - RNA, 19 nt, Artificial Sequence
  Description of Artificial Sequence: Synthetic oligonucleotide
  Sense strand starting at position 875 of SEQ ID NO: 316677
cugagcuuguaaguacaau

SEQ ID NO: 431802 - RNA, 19 nt, Artificial Sequence
  Description of Artificial Sequence: Synthetic oligonucleotide
  Antisense Strand to SEQ ID NO: 431801
auuguacuuacaagcucag

SEQ ID NO: 431803 - RNA, 19 nt, Artificial Sequence
  Description of Artificial Sequence: Synthetic oligonucleotide
  Sense strand starting at position 978 of SEQ ID NO: 316677
aaccgaaggcuguauucua

SEQ ID NO: 431804 - RNA, 19 nt, Artificial Sequence
  Description of Artificial Sequence: Synthetic oligonucleotide
  Antisense Strand to SEQ ID NO: 431803
uagaauacagccuucgguu

SEQ ID NO: 431805 - RNA, 19 nt, Artificial Sequence
  Description of Artificial Sequence: Synthetic oligonucleotide
  Sense strand starting at position 1049 of SEQ ID NO: 316677
agaauuugcuaucaggaua

SEQ ID NO: 431806 - RNA, 19 nt, Artificial Sequence
  Description of Artificial Sequence: Synthetic oligonucleotide
  Antisense Strand to SEQ ID NO: 431805
uauccugauagcaaauucu

SEQ ID NO: 431807 - RNA, 19 nt, Artificial Sequence
  Description of Artificial Sequence: Synthetic oligonucleotide
  Sense strand starting at position 1198 of SEQ ID NO: 316677
caagguaggagguguuuaa

SEQ ID NO: 431808 - RNA, 19 nt, Artificial Sequence
  Description of Artificial Sequence: Synthetic oligonucleotide
  Antisense Strand to SEQ ID NO: 431807
uuaaacaccuccuaccuug

SEQ ID NO: 431809 - RNA, 19 nt, Artificial Sequence
  Description of Artificial Sequence: Synthetic oligonucleotide
  Sense strand starting at position 1376 of SEQ ID NO: 316677
gaagccaaaugaucguaau

SEQ ID NO: 431810 - RNA, 19 nt, Artificial Sequence
  Description of Artificial Sequence: Synthetic oligonucleotide
  Antisense Strand to SEQ ID NO: 431809
auuacgaucauuuggcuuc

SEQ ID NO: 431811 - RNA, 19 nt, Artificial Sequence
  Description of Artificial Sequence: Synthetic oligonucleotide
  Sense strand starting at position 1409 of SEQ ID NO: 316677
aggccagucgucuuaacgu

SEQ ID NO: 431812 - RNA, 19 nt, Artificial Sequence
  Description of Artificial Sequence: Synthetic oligonucleotide
  Antisense Strand to SEQ ID NO: 431811
acguuaagacgacuggccu

SEQ ID NO: 431813 - RNA, 19 nt, Artificial Sequence
  Description of Artificial Sequence: Synthetic oligonucleotide
  Sense strand starting at position 1414 of SEQ ID NO: 316677
agucgucuuaacgugguua

SEQ ID NO: 431814 - RNA, 19 nt, Artificial Sequence
  Description of Artificial Sequence: Synthetic oligonucleotide
  Antisense Strand to SEQ ID NO: 431813
uaaccacguuaagacgacu

SEQ ID NO: 431815 - RNA, 19 nt, Artificial Sequence
  Description of Artificial Sequence: Synthetic oligonucleotide
  Sense strand starting at position 1493 of SEQ ID NO: 316677
uaacuuggugccugaaacu

SEQ ID NO: 431816 - RNA, 19 nt, Artificial Sequence
  Description of Artificial Sequence: Synthetic oligonucleotide
  Antisense Strand to SEQ ID NO: 431815
aguuucaggcaccaaguua

SEQ ID NO: 431817 - RNA, 19 nt, Artificial Sequence
  Description of Artificial Sequence: Synthetic oligonucleotide
  Sense strand starting at position 1608 of SEQ ID NO: 316677
aguggaguucuuggaucac

SEQ ID NO: 431818 - RNA, 19 nt, Artificial Sequence
  Description of Artificial Sequence: Synthetic oligonucleotide
  Antisense Strand to SEQ ID NO: 431817
gugauccaagaacuccacu

SEQ ID NO: 431819 - RNA, 19 nt, Artificial Sequence
  Description of Artificial Sequence: Synthetic oligonucleotide
  Sense strand starting at position 2248 of SEQ ID NO: 316677
agcauaguugggugacuga

SEQ ID NO: 431820 - RNA, 19 nt, Artificial Sequence
  Description of Artificial Sequence: Synthetic oligonucleotide
  Antisense Strand to SEQ ID NO: 431819
ucagucacccaacuaugcu

SEQ ID NO: 431821 - RNA, 19 nt, Artificial Sequence
  Description of Artificial Sequence: Synthetic oligonucleotide
  Sense strand starting at position 2505 of SEQ ID NO: 316677
cacgacugauuauuaguau

SEQ ID NO: 431822 - RNA, 19 nt, Artificial Sequence
  Description of Artificial Sequence: Synthetic oligonucleotide
  Antisense Strand to SEQ ID NO: 431821
auacuaauaaucagucgug

SEQ ID NO: 431823 - RNA, 19 nt, Artificial Sequence
  Description of Artificial Sequence: Synthetic oligonucleotide
  Sense strand starting at position 2540 of SEQ ID NO: 316677
uaaaguguuagcucagcgu

SEQ ID NO: 431824 - RNA, 19 nt, Artificial Sequence
  Description of Artificial Sequence: Synthetic oligonucleotide
  Antisense Strand to SEQ ID NO: 431823
acgcugagcuaacacuuua

SEQ ID NO: 431825 - RNA, 19 nt, Artificial Sequence
  Description of Artificial Sequence: Synthetic oligonucleotide
  Sense strand starting at position 2669 of SEQ ID NO: 316677
ugaguuggacucugacaaa

SEQ ID NO: 431826 - RNA, 19 nt, Artificial Sequence
  Description of Artificial Sequence: Synthetic oligonucleotide
  Antisense Strand to SEQ ID NO: 431825
uuugucagaguccaacuca

SEQ ID NO: 431827 - RNA, 19 nt, Artificial Sequence
  Description of Artificial Sequence: Synthetic oligonucleotide
  Sense strand starting at position 2764 of SEQ ID NO: 316677
guuauuugcaagugaguuc

SEQ ID NO: 431828 - RNA, 19 nt, Artificial Sequence
  Description of Artificial Sequence: Synthetic oligonucleotide
  Antisense Strand to SEQ ID NO: 431827
gaacucacuugcaaauaac

SEQ ID NO: 431829 - RNA, 19 nt, Artificial Sequence
  Description of Artificial Sequence: Synthetic oligonucleotide
  Sense strand starting at position 2941 of SEQ ID NO: 316677
accaucagccaagguaauu

SEQ ID NO: 431830 - RNA, 19 nt, Artificial Sequence
  Description of Artificial Sequence: Synthetic oligonucleotide
  Antisense Strand to SEQ ID NO: 431829
aauuaccuuggcugauggu

SEQ ID NO: 431831 - RNA, 19 nt, Artificial Sequence
  Description of Artificial Sequence: Synthetic oligonucleotide
  Sense strand starting at position 3213 of SEQ ID NO: 316677
aagcgcagaccuuaugaaa

SEQ ID NO: 431832 - RNA, 19 nt, Artificial Sequence
  Description of Artificial Sequence: Synthetic oligonucleotide
  Antisense Strand to SEQ ID NO: 431831
uuucauaaggucugcgcuu

SEQ ID NO: 431833 - RNA, 19 nt, Artificial Sequence
  Description of Artificial Sequence: Synthetic oligonucleotide
  Sense strand starting at position 3232 of SEQ ID NO: 316677
augagauaauuggugaagu

SEQ ID NO: 431834 - RNA, 19 nt, Artificial Sequence
  Description of Artificial Sequence: Synthetic oligonucleotide
  Antisense Strand to SEQ ID NO: 431833
acuucaccaauuaucucau

SEQ ID NO: 431835 - RNA, 19 nt, Artificial Sequence
  Description of Artificial Sequence: Synthetic oligonucleotide
  Sense strand starting at position 3258 of SEQ ID NO: 316677
gagagaggcuucccacaag

SEQ ID NO: 431836 - RNA, 19 nt, Artificial Sequence
  Description of Artificial Sequence: Synthetic oligonucleotide
  Antisense Strand to SEQ ID NO: 431835
cuugugggaagccucucuc

SEQ ID NO: 431837 - RNA, 19 nt, Artificial Sequence
  Description of Artificial Sequence: Synthetic oligonucleotide
  Sense strand starting at position 3366 of SEQ ID NO: 316677
agcucugucuuacuagaga

SEQ ID NO: 431838 - RNA, 19 nt, Artificial Sequence
  Description of Artificial Sequence: Synthetic oligonucleotide
  Antisense Strand to SEQ ID NO: 431837
ucucuaguaagacagagcu

SEQ ID NO: 431839 - RNA, 19 nt, Artificial Sequence
  Description of Artificial Sequence: Synthetic oligonucleotide
  Sense strand starting at position 3485 of SEQ ID NO: 316677
ucuggauuccuauagcauu

SEQ ID NO: 431840 - RNA, 19 nt, Artificial Sequence
  Description of Artificial Sequence: Synthetic oligonucleotide
  Antisense Strand to SEQ ID NO: 431839
aaugcuauaggaauccaga

SEQ ID NO: 431841 - RNA, 19 nt, Artificial Sequence
  Description of Artificial Sequence: Synthetic oligonucleotide
  Sense strand starting at position 3497 of SEQ ID NO: 316677
uagcauuuauaggaggaau

SEQ ID NO: 431842 - RNA, 19 nt, Artificial Sequence
  Description of Artificial Sequence: Synthetic oligonucleotide
  Antisense Strand to SEQ ID NO: 431841
auuccuccuauaaaugcua

SEQ ID NO: 431843 - RNA, 19 nt, Artificial Sequence
  Description of Artificial Sequence: Synthetic oligonucleotide
  Sense strand starting at position 3969 of SEQ ID NO: 316677
ucgguccuucucuaaacaa

SEQ ID NO: 431844 - RNA, 19 nt, Artificial Sequence
  Description of Artificial Sequence: Synthetic oligonucleotide
  Antisense Strand to SEQ ID NO: 431843
uuguuuagagaaggaccga

SEQ ID NO: 431845 - RNA, 19 nt, Artificial Sequence
  Description of Artificial Sequence: Synthetic oligonucleotide
  Sense strand starting at position 3981 of SEQ ID NO: 316677
uaaacaagguggguuauaa

SEQ ID NO: 431846 - RNA, 19 nt, Artificial Sequence
  Description of Artificial Sequence: Synthetic oligonucleotide
  Antisense Strand to SEQ ID NO: 431845
uuauaacccaccuuguuua

SEQ ID NO: 431847 - RNA, 19 nt, Artificial Sequence
  Description of Artificial Sequence: Synthetic oligonucleotide
  Sense strand starting at position 79 of SEQ ID NO: 316678
acuuaaagucauugugaag

SEQ ID NO: 431848 - RNA, 19 nt, Artificial Sequence
  Description of Artificial Sequence: Synthetic oligonucleotide
  Antisense Strand to SEQ ID NO: 431847
cuucacaaugacuuuaagu

SEQ ID NO: 431849 - RNA, 19 nt, Artificial Sequence
  Description of Artificial Sequence: Synthetic oligonucleotide
  Sense strand starting at position 88 of SEQ ID NO: 316678
cauugugaagauuagguuu

SEQ ID NO: 431850 - RNA, 19 nt, Artificial Sequence
  Description of Artificial Sequence: Synthetic oligonucleotide
  Antisense Strand to SEQ ID NO: 431849
aaaccuaaucuucacaaug

SEQ ID NO: 431851 - RNA, 19 nt, Artificial Sequence
  Description of Artificial Sequence: Synthetic oligonucleotide
  Sense strand starting at position 91 of SEQ ID NO: 316678
ugugaagauuagguuuaaa

SEQ ID NO: 431852 - RNA, 19 nt, Artificial Sequence
  Description of Artificial Sequence: Synthetic oligonucleotide
  Antisense Strand to SEQ ID NO: 431851
uuuaaaccuaaucuucaca

SEQ ID NO: 431853 - RNA, 19 nt, Artificial Sequence
  Description of Artificial Sequence: Synthetic oligonucleotide
  Sense strand starting at position 127 of SEQ ID NO: 316678
uuaugaucacucuggccau

SEQ ID NO: 431854 - RNA, 19 nt, Artificial Sequence
  Description of Artificial Sequence: Synthetic oligonucleotide
  Antisense Strand to SEQ ID NO: 431853
auggccagagugaucauaa

SEQ ID NO: 431855 - RNA, 19 nt, Artificial Sequence
  Description of Artificial Sequence: Synthetic oligonucleotide
  Sense strand starting at position 130 of SEQ ID NO: 316678
ugaucacucuggccauaua

SEQ ID NO: 431856 - RNA, 19 nt, Artificial Sequence
  Description of Artificial Sequence: Synthetic oligonucleotide
  Antisense Strand to SEQ ID NO: 431855
uauauggccagagugauca

SEQ ID NO: 431857 - RNA, 19 nt, Artificial Sequence
  Description of Artificial Sequence: Synthetic oligonucleotide
  Sense strand starting at position 146 of SEQ ID NO: 316678
auaggaugugcccacauua

SEQ ID NO: 431858 - RNA, 19 nt, Artificial Sequence
  Description of Artificial Sequence: Synthetic oligonucleotide
  Antisense Strand to SEQ ID NO: 431857
uaaugugggcacauccuau

SEQ ID NO: 431859 - RNA, 19 nt, Artificial Sequence
  Description of Artificial Sequence: Synthetic oligonucleotide
  Sense strand starting at position 254 of SEQ ID NO: 316678
agcagcuuugcucauauaa

SEQ ID NO: 431860 - RNA, 19 nt, Artificial Sequence
  Description of Artificial Sequence: Synthetic oligonucleotide
  Antisense Strand to SEQ ID NO: 431859
uuauaugagcaaagcugcu

SEQ ID NO: 431861 - RNA, 19 nt, Artificial Sequence
  Description of Artificial Sequence: Synthetic oligonucleotide
  Sense strand starting at position 621 of SEQ ID NO: 316678
gucagcuguguuagguaga

SEQ ID NO: 431862 - RNA, 19 nt, Artificial Sequence
  Description of Artificial Sequence: Synthetic oligonucleotide
  Antisense Strand to SEQ ID NO: 431861
ucuaccuaacacagcugac

SEQ ID NO: 431863 - RNA, 19 nt, Artificial Sequence
  Description of Artificial Sequence: Synthetic oligonucleotide
  Sense strand starting at position 684 of SEQ ID NO: 316678
uuguuugugauugagucau

SEQ ID NO: 431864 - RNA, 19 nt, Artificial Sequence
  Description of Artificial Sequence: Synthetic oligonucleotide
  Antisense Strand to SEQ ID NO: 431863
augacucaaucacaaacaa

SEQ ID NO: 431865 - RNA, 19 nt, Artificial Sequence
  Description of Artificial Sequence: Synthetic oligonucleotide
  Sense strand starting at position 686 of SEQ ID NO: 316678
guuugugauugagucauuu

SEQ ID NO: 431866 - RNA, 19 nt, Artificial Sequence
  Description of Artificial Sequence: Synthetic oligonucleotide
  Antisense Strand to SEQ ID NO: 431865
aaaugacucaaucacaaac

SEQ ID NO: 431867 - RNA, 19 nt, Artificial Sequence
  Description of Artificial Sequence: Synthetic oligonucleotide
  Sense strand starting at position 694 of SEQ ID NO: 316678
uugagucauuucuaugaaa

SEQ ID NO: 431868 - RNA, 19 nt, Artificial Sequence
  Description of Artificial Sequence: Synthetic oligonucleotide
  Antisense Strand to SEQ ID NO: 431867
uuucauagaaaugacucaa

SEQ ID NO: 431869 - RNA, 19 nt, Artificial Sequence
  Description of Artificial Sequence: Synthetic oligonucleotide
  Sense strand starting at position 697 of SEQ ID NO: 316678
agucauuucuaugaaagaa

SEQ ID NO: 431870 - RNA, 19 nt, Artificial Sequence
  Description of Artificial Sequence: Synthetic oligonucleotide
  Antisense Strand to SEQ ID NO: 431869
uucuuucauagaaaugacu

SEQ ID NO: 431871 - RNA, 19 nt, Artificial Sequence
  Description of Artificial Sequence: Synthetic oligonucleotide
  Sense strand starting at position 854 of SEQ ID NO: 316678
caauuacuugauggguaau

SEQ ID NO: 431872 - RNA, 19 nt, Artificial Sequence
  Description of Artificial Sequence: Synthetic oligonucleotide
  Antisense Strand to SEQ ID NO: 431871
auuacccaucaaguaauug

SEQ ID NO: 431873 - RNA, 19 nt, Artificial Sequence
  Description of Artificial Sequence: Synthetic oligonucleotide
  Sense strand starting at position 935 of SEQ ID NO: 316678
uggccuauuucgguagguu

SEQ ID NO: 431874 - RNA, 19 nt, Artificial Sequence
  Description of Artificial Sequence: Synthetic oligonucleotide
  Antisense Strand to SEQ ID NO: 431873
aaccuaccgaaauaggcca

SEQ ID NO: 431875 - RNA, 19 nt, Artificial Sequence
  Description of Artificial Sequence: Synthetic oligonucleotide
  Sense strand starting at position 936 of SEQ ID NO: 316678
ggccuauuucgguagguuu

SEQ ID NO: 431876 - RNA, 19 nt, Artificial Sequence
  Description of Artificial Sequence: Synthetic oligonucleotide
  Antisense Strand to SEQ ID NO: 431875
aaaccuaccgaaauaggcc

SEQ ID NO: 431877 - RNA, 19 nt, Artificial Sequence
  Description of Artificial Sequence: Synthetic oligonucleotide
  Sense strand starting at position 1358 of SEQ ID NO: 316678
ggguccaauaucugcggaa

SEQ ID NO: 431878 - RNA, 19 nt, Artificial Sequence
  Description of Artificial Sequence: Synthetic oligonucleotide
  Antisense Strand to SEQ ID NO: 431877
uuccgcagauauuggaccc

SEQ ID NO: 431879 - RNA, 19 nt, Artificial Sequence
  Description of Artificial Sequence: Synthetic oligonucleotide
  Sense strand starting at position 1359 of SEQ ID NO: 316678
gguccaauaucugcggaaa

SEQ ID NO: 431880 - RNA, 19 nt, Artificial Sequence
  Description of Artificial Sequence: Synthetic oligonucleotide
  Antisense Strand to SEQ ID NO: 431879
uuuccgcagauauuggacc

SEQ ID NO: 431881 - RNA, 19 nt, Artificial Sequence
  Description of Artificial Sequence: Synthetic oligonucleotide
  Sense strand starting at position 1362 of SEQ ID NO: 316678
ccaauaucugcggaaauca

SEQ ID NO: 431882 - RNA, 19 nt, Artificial Sequence
  Description of Artificial Sequence: Synthetic oligonucleotide
  Antisense Strand to SEQ ID NO: 431881
ugauuuccgcagauauugg

SEQ ID NO: 431883 - RNA, 19 nt, Artificial Sequence
  Description of Artificial Sequence: Synthetic oligonucleotide
  Sense strand starting at position 1457 of SEQ ID NO: 316678
gucuucucagcugaacuaa

SEQ ID NO: 431884 - RNA, 19 nt, Artificial Sequence
  Description of Artificial Sequence: Synthetic oligonucleotide
  Antisense Strand to SEQ ID NO: 431883
uuaguucagcugagaagac

SEQ ID NO: 431885 - RNA, 19 nt, Artificial Sequence
  Description of Artificial Sequence: Synthetic oligonucleotide
  Sense strand starting at position 1680 of SEQ ID NO: 316678
ggugaauccucaccugagc

SEQ ID NO: 431886 - RNA, 19 nt, Artificial Sequence
  Description of Artificial Sequence: Synthetic oligonucleotide
  Antisense Strand to SEQ ID NO: 431885
gcucaggugaggauucacc

SEQ ID NO: 431887 - RNA, 19 nt, Artificial Sequence
  Description of Artificial Sequence: Synthetic oligonucleotide
  Sense strand starting at position 2115 of SEQ ID NO: 316678
gugcguaaggauucgcuga

SEQ ID NO: 431888 - RNA, 19 nt, Artificial Sequence
  Description of Artificial Sequence: Synthetic oligonucleotide
  Antisense Strand to SEQ ID NO: 431887
ucagcgaauccuuacgcac

SEQ ID NO: 431889 - RNA, 19 nt, Artificial Sequence
  Description of Artificial Sequence: Synthetic oligonucleotide
  Sense strand starting at position 2198 of SEQ ID NO: 316678
ggagcuaguaccugacaga

SEQ ID NO: 431890 - RNA, 19 nt, Artificial Sequence
  Description of Artificial Sequence: Synthetic oligonucleotide
  Antisense Strand to SEQ ID NO: 431889
ucugucagguacuagcucc

SEQ ID NO: 431891 - RNA, 19 nt, Artificial Sequence
  Description of Artificial Sequence: Synthetic oligonucleotide
  Sense strand starting at position 2325 of SEQ ID NO: 316678
aagagugacuuugccugau

SEQ ID NO: 431892 - RNA, 19 nt, Artificial Sequence
  Description of Artificial Sequence: Synthetic oligonucleotide
  Antisense Strand to SEQ ID NO: 431891
aucaggcaaagucacucuu

SEQ ID NO: 431893 - RNA, 19 nt, Artificial Sequence
  Description of Artificial Sequence: Synthetic oligonucleotide
  Sense strand starting at position 2440 of SEQ ID NO: 316678
cugugaaguggccagaauu

SEQ ID NO: 431894 - RNA, 19 nt, Artificial Sequence
  Description of Artificial Sequence: Synthetic oligonucleotide
  Antisense Strand to SEQ ID NO: 431893
aauucuggccacuucacag

SEQ ID NO: 431895 - RNA, 19 nt, Artificial Sequence
  Description of Artificial Sequence: Synthetic oligonucleotide
  Sense strand starting at position 2497 of SEQ ID NO: 316678
gggccucaucaacauuaau

SEQ ID NO: 431896 - RNA, 19 nt, Artificial Sequence
  Description of Artificial Sequence: Synthetic oligonucleotide
  Antisense Strand to SEQ ID NO: 431895
auuaauguugaugaggccc

SEQ ID NO: 431897 - RNA, 19 nt, Artificial Sequence
  Description of Artificial Sequence: Synthetic oligonucleotide
  Sense strand starting at position 2658 of SEQ ID NO: 316678
gguuuaaacugauccuuga

SEQ ID NO: 431898 - RNA, 19 nt, Artificial Sequence
  Description of Artificial Sequence: Synthetic oligonucleotide
  Antisense Strand to SEQ ID NO: 431897
ucaaggaucaguuuaaacc

SEQ ID NO: 431899 - RNA, 19 nt, Artificial Sequence
  Description of Artificial Sequence: Synthetic oligonucleotide
  Sense strand starting at position 2752 of SEQ ID NO: 316678
agaguagugcucuagacug

SEQ ID NO: 431900 - RNA, 19 nt, Artificial Sequence
  Description of Artificial Sequence: Synthetic oligonucleotide
  Antisense Strand to SEQ ID NO: 431899
cagucuagagcacuacucu

SEQ ID NO: 431901 - RNA, 19 nt, Artificial Sequence
  Description of Artificial Sequence: Synthetic oligonucleotide
  Sense strand starting at position 2833 of SEQ ID NO: 316678
auuuaaucaugacaaguag

SEQ ID NO: 431902 - RNA, 19 nt, Artificial Sequence
  Description of Artificial Sequence: Synthetic oligonucleotide
  Antisense Strand to SEQ ID NO: 431901
cuacuugucaugauuaaau

SEQ ID NO: 431903 - RNA, 19 nt, Artificial Sequence
  Description of Artificial Sequence: Synthetic oligonucleotide
  Sense strand starting at position 2974 of SEQ ID NO: 316678
gagauaugauucuuuccug

SEQ ID NO: 431904 - RNA, 19 nt, Artificial Sequence
  Description of Artificial Sequence: Synthetic oligonucleotide
  Antisense Strand to SEQ ID NO: 431903
caggaaagaaucauaucuc

SEQ ID NO: 431905 - RNA, 19 nt, Artificial Sequence
  Description of Artificial Sequence: Synthetic oligonucleotide
  Sense strand starting at position 2975 of SEQ ID NO: 316678
agauaugauucuuuccuga

SEQ ID NO: 431906 - RNA, 19 nt, Artificial Sequence
  Description of Artificial Sequence: Synthetic oligonucleotide
  Antisense Strand to SEQ ID NO: 431905
ucaggaaagaaucauaucu

SEQ ID NO: 431907 - RNA, 19 nt, Artificial Sequence
  Description of Artificial Sequence: Synthetic oligonucleotide
  Sense strand starting at position 2980 of SEQ ID NO: 316678
ugauucuuuccugauuguu

SEQ ID NO: 431908 - RNA, 19 nt, Artificial Sequence
  Description of Artificial Sequence: Synthetic oligonucleotide
  Antisense Strand to SEQ ID NO: 431907
aacaaucaggaaagaauca

SEQ ID NO: 431909 - RNA, 19 nt, Artificial Sequence
  Description of Artificial Sequence: Synthetic oligonucleotide
  Sense strand starting at position 3589 of SEQ ID NO: 316678
uggugugggccagauacau

SEQ ID NO: 431910 - RNA, 19 nt, Artificial Sequence
  Description of Artificial Sequence: Synthetic oligonucleotide
  Antisense Strand to SEQ ID NO: 431909
auguaucuggcccacacca

SEQ ID NO: 431911 - RNA, 19 nt, Artificial Sequence
  Description of Artificial Sequence: Synthetic oligonucleotide
  Sense strand starting at position 3694 of SEQ ID NO: 316678
aauggaaagcucuguggaa

SEQ ID NO: 431912 - RNA, 19 nt, Artificial Sequence
  Description of Artificial Sequence: Synthetic oligonucleotide
  Antisense Strand to SEQ ID NO: 431911
uuccacagagcuuuccauu

SEQ ID NO: 431913 - RNA, 19 nt, Artificial Sequence
  Description of Artificial Sequence: Synthetic oligonucleotide
  Sense strand starting at position 3695 of SEQ ID NO: 316678
auggaaagcucuguggaaa

SEQ ID NO: 431914 - RNA, 19 nt, Artificial Sequence
  Description of Artificial Sequence: Synthetic oligonucleotide
  Antisense Strand to SEQ ID NO: 431913
uuuccacagagcuuuccau

SEQ ID NO: 431915 - RNA, 19 nt, Artificial Sequence
  Description of Artificial Sequence: Synthetic oligonucleotide
  Sense strand starting at position 3696 of SEQ ID NO: 316678
uggaaagcucuguggaaag

SEQ ID NO: 431916 - RNA, 19 nt, Artificial Sequence
  Description of Artificial Sequence: Synthetic oligonucleotide
  Antisense Strand to SEQ ID NO: 431915
cuuuccacagagcuuucca

SEQ ID NO: 431917 - RNA, 19 nt, Artificial Sequence
  Description of Artificial Sequence: Synthetic oligonucleotide
  Sense strand starting at position 3767 of SEQ ID NO: 316678
accugaugugaggguauga

SEQ ID NO: 431918 - RNA, 19 nt, Artificial Sequence
  Description of Artificial Sequence: Synthetic oligonucleotide
  Antisense Strand to SEQ ID NO: 431917
ucauacccucacaucaggu

SEQ ID NO: 431919 - RNA, 19 nt, Artificial Sequence
  Description of Artificial Sequence: Synthetic oligonucleotide
  Sense strand starting at position 3867 of SEQ ID NO: 316678
ggaugaggcaauugugauu

SEQ ID NO: 431920 - RNA, 19 nt, Artificial Sequence
  Description of Artificial Sequence: Synthetic oligonucleotide
  Antisense Strand to SEQ ID NO: 431919
aaucacaauugccucaucc

SEQ ID NO: 431921 - RNA, 19 nt, Artificial Sequence
  Description of Artificial Sequence: Synthetic oligonucleotide
  Sense strand starting at position 3872 of SEQ ID NO: 316678
aggcaauugugauucagag

SEQ ID NO: 431922 - RNA, 19 nt, Artificial Sequence
  Description of Artificial Sequence: Synthetic oligonucleotide
  Antisense Strand to SEQ ID NO: 431921
cucugaaucacaauugccu

SEQ ID NO: 431923 - RNA, 19 nt, Artificial Sequence
  Description of Artificial Sequence: Synthetic oligonucleotide
  Sense strand starting at position 3886 of SEQ ID NO: 316678
cagagagauugagagacuu

SEQ ID NO: 431924 - RNA, 19 nt, Artificial Sequence
  Description of Artificial Sequence: Synthetic oligonucleotide
  Antisense Strand to SEQ ID NO: 431923
aagucucucaaucucucug

SEQ ID NO: 431925 - RNA, 19 nt, Artificial Sequence
  Description of Artificial Sequence: Synthetic oligonucleotide
  Sense strand starting at position 3931 of SEQ ID NO: 316678
ggagacuuuguuuggagcu

SEQ ID NO: 431926 - RNA, 19 nt, Artificial Sequence
  Description of Artificial Sequence: Synthetic oligonucleotide
  Antisense Strand to SEQ ID NO: 431925
agcuccaaacaaagucucc

SEQ ID NO: 431927 - RNA, 19 nt, Artificial Sequence
  Description of Artificial Sequence: Synthetic oligonucleotide
  Sense strand starting at position 103 of SEQ ID NO: 316679
agucaucauccaggauuaa

SEQ ID NO: 431928 - RNA, 19 nt, Artificial Sequence
  Description of Artificial Sequence: Synthetic oligonucleotide
  Antisense Strand to SEQ ID NO: 431927
uuaauccuggaugaugacu

SEQ ID NO: 431929 - RNA, 19 nt, Artificial Sequence
  Description of Artificial Sequence: Synthetic oligonucleotide
  Sense strand starting at position 259 of SEQ ID NO: 316679
gggagaagacgugggucau

SEQ ID NO: 431930 - RNA, 19 nt, Artificial Sequence
  Description of Artificial Sequence: Synthetic oligonucleotide
  Antisense Strand to SEQ ID NO: 431929
augacccacgucuucuccc

SEQ ID NO: 431931 - RNA, 19 nt, Artificial Sequence
  Description of Artificial Sequence: Synthetic oligonucleotide
  Sense strand starting at position 329 of SEQ ID NO: 316679
gcagaauuaaggcagcagu

SEQ ID NO: 431932 - RNA, 19 nt, Artificial Sequence
  Description of Artificial Sequence: Synthetic oligonucleotide
  Antisense Strand to SEQ ID NO: 431931
acugcugccuuaauucugc

SEQ ID NO: 431933 - RNA, 19 nt, Artificial Sequence
  Description of Artificial Sequence: Synthetic oligonucleotide
  Sense strand starting at position 332 of SEQ ID NO: 316679
gaauuaaggcagcaguaaa

SEQ ID NO: 431934 - RNA, 19 nt, Artificial Sequence
  Description of Artificial Sequence: Synthetic oligonucleotide
  Antisense Strand to SEQ ID NO: 431933
uuuacugcugccuuaauuc

SEQ ID NO: 431935 - RNA, 19 nt, Artificial Sequence
  Description of Artificial Sequence: Synthetic oligonucleotide
  Sense strand starting at position 733 of SEQ ID NO: 316679
uuaacagacggcugacuua

SEQ ID NO: 431936 - RNA, 19 nt, Artificial Sequence
  Description of Artificial Sequence: Synthetic oligonucleotide
  Antisense Strand to SEQ ID NO: 431935
uaagucagccgucuguuaa

SEQ ID NO: 431937 - RNA, 19 nt, Artificial Sequence
  Description of Artificial Sequence: Synthetic oligonucleotide
  Sense strand starting at position 968 of SEQ ID NO: 316679
aaaggaucugcaggaagua

SEQ ID NO: 431938 - RNA, 19 nt, Artificial Sequence
  Description of Artificial Sequence: Synthetic oligonucleotide
  Antisense Strand to SEQ ID NO: 431937
uacuuccugcagauccuuu

SEQ ID NO: 431939 - RNA, 19 nt, Artificial Sequence
  Description of Artificial Sequence: Synthetic oligonucleotide
  Sense strand starting at position 980 of SEQ ID NO: 316679
ggaaguauaaaguguaaac

SEQ ID NO: 431940 - RNA, 19 nt, Artificial Sequence
  Description of Artificial Sequence: Synthetic oligonucleotide
  Antisense Strand to SEQ ID NO: 431939
guuuacacuuuauacuucc

SEQ ID NO: 431941 - RNA, 19 nt, Artificial Sequence
  Description of Artificial Sequence: Synthetic oligonucleotide
  Sense strand starting at position 1136 of SEQ ID NO: 316679
aguaguaacuuggcaaaca

SEQ ID NO: 431942 - RNA, 19 nt, Artificial Sequence
  Description of Artificial Sequence: Synthetic oligonucleotide
  Antisense Strand to SEQ ID NO: 431941
uguuugccaaguuacuacu

SEQ ID NO: 431943 - RNA, 19 nt, Artificial Sequence
  Description of Artificial Sequence: Synthetic oligonucleotide
  Sense strand starting at position 1207 of SEQ ID NO: 316679
cuuagucaggcuugggaca

SEQ ID NO: 431944 - RNA, 19 nt, Artificial Sequence
  Description of Artificial Sequence: Synthetic oligonucleotide
  Antisense Strand to SEQ ID NO: 431943
ugucccaagccugacuaag

SEQ ID NO: 431945 - RNA, 19 nt, Artificial Sequence
  Description of Artificial Sequence: Synthetic oligonucleotide
  Sense strand starting at position 1249 of SEQ ID NO: 316679
gcaccacugccagaugaau

SEQ ID NO: 431946 - RNA, 19 nt, Artificial Sequence
  Description of Artificial Sequence: Synthetic oligonucleotide
  Antisense Strand to SEQ ID NO: 431945
auucaucuggcaguggugc

SEQ ID NO: 431947 - RNA, 19 nt, Artificial Sequence
  Description of Artificial Sequence: Synthetic oligonucleotide
  Sense strand starting at position 1383 of SEQ ID NO: 316679
cuccgacacuuugucaaga

SEQ ID NO: 431948 - RNA, 19 nt, Artificial Sequence
  Description of Artificial Sequence: Synthetic oligonucleotide
  Antisense Strand to SEQ ID NO: 431947
ucuugacaaagugucggag

SEQ ID NO: 431949 - RNA, 19 nt, Artificial Sequence
  Description of Artificial Sequence: Synthetic oligonucleotide
  Sense strand starting at position 1384 of SEQ ID NO: 316679
uccgacacuuugucaagaa

SEQ ID NO: 431950 - RNA, 19 nt, Artificial Sequence
  Description of Artificial Sequence: Synthetic oligonucleotide
  Antisense Strand to SEQ ID NO: 431949
uucuugacaaagugucgga

SEQ ID NO: 431951 - RNA, 19 nt, Artificial Sequence
  Description of Artificial Sequence: Synthetic oligonucleotide
  Sense strand starting at position 1609 of SEQ ID NO: 316679
gaaaguucggaacggugaa

SEQ ID NO: 431952 - RNA, 19 nt, Artificial Sequence
  Description of Artificial Sequence: Synthetic oligonucleotide
  Antisense Strand to SEQ ID NO: 431951
uucaccguuccgaacuuuc

SEQ ID NO: 431953 - RNA, 19 nt, Artificial Sequence
  Description of Artificial Sequence: Synthetic oligonucleotide
  Sense strand starting at position 2257 of SEQ ID NO: 316679
cuggucuugagaggucgaa

SEQ ID NO: 431954 - RNA, 19 nt, Artificial Sequence
  Description of Artificial Sequence: Synthetic oligonucleotide
  Antisense Strand to SEQ ID NO: 431953
uucgaccucucaagaccag

SEQ ID NO: 431955 - RNA, 19 nt, Artificial Sequence
  Description of Artificial Sequence: Synthetic oligonucleotide
  Sense strand starting at position 2449 of SEQ ID NO: 316679
cgaagaagguuauuccagu

SEQ ID NO: 431956 - RNA, 19 nt, Artificial Sequence
  Description of Artificial Sequence: Synthetic oligonucleotide
  Antisense Strand to SEQ ID NO: 431955
acuggaauaaccuucuucg

SEQ ID NO: 431957 - RNA, 19 nt, Artificial Sequence
  Description of Artificial Sequence: Synthetic oligonucleotide
  Sense strand starting at position 2610 of SEQ ID NO: 316679
ucuuacuugcucuggauuu

SEQ ID NO: 431958 - RNA, 19 nt, Artificial Sequence
  Description of Artificial Sequence: Synthetic oligonucleotide
  Antisense Strand to SEQ ID NO: 431957
aaauccagagcaaguaaga

SEQ ID NO: 431959 - RNA, 19 nt, Artificial Sequence
  Description of Artificial Sequence: Synthetic oligonucleotide
  Sense strand starting at position 2621 of SEQ ID NO: 316679
cuggauuugugaucgcuuu

SEQ ID NO: 431960 - RNA, 19 nt, Artificial Sequence
  Description of Artificial Sequence: Synthetic oligonucleotide
  Antisense Strand to SEQ ID NO: 431959
aaagcgaucacaaauccag

SEQ ID NO: 431961 - RNA, 19 nt, Artificial Sequence
  Description of Artificial Sequence: Synthetic oligonucleotide
  Sense strand starting at position 2661 of SEQ ID NO: 316679
acaguagauuccuugauac

SEQ ID NO: 431962 - RNA, 19 nt, Artificial Sequence
  Description of Artificial Sequence: Synthetic oligonucleotide
  Antisense Strand to SEQ ID NO: 431961
guaucaaggaaucuacugu

SEQ ID NO: 431963 - RNA, 19 nt, Artificial Sequence
  Description of Artificial Sequence: Synthetic oligonucleotide
  Sense strand starting at position 2663 of SEQ ID NO: 316679
aguagauuccuugauacuu

SEQ ID NO: 431964 - RNA, 19 nt, Artificial Sequence
  Description of Artificial Sequence: Synthetic oligonucleotide
  Antisense Strand to SEQ ID NO: 431963
aaguaucaaggaaucuacu

SEQ ID NO: 431965 - RNA, 19 nt, Artificial Sequence
  Description of Artificial Sequence: Synthetic oligonucleotide
  Sense strand starting at position 2754 of SEQ ID NO: 316679
auagaucauuguucuguca

SEQ ID NO: 431966 - RNA, 19 nt, Artificial Sequence
  Description of Artificial Sequence: Synthetic oligonucleotide
  Antisense Strand to SEQ ID NO: 431965
ugacagaacaaugaucuau

SEQ ID NO: 431967 - RNA, 19 nt, Artificial Sequence
  Description of Artificial Sequence: Synthetic oligonucleotide
  Sense strand starting at position 2895 of SEQ ID NO: 316679
gcuagauagaccugaaguu

SEQ ID NO: 431968 - RNA, 19 nt, Artificial Sequence
  Description of Artificial Sequence: Synthetic oligonucleotide
  Antisense Strand to SEQ ID NO: 431967
aacuucaggucuaucuagc

SEQ ID NO: 431969 - RNA, 19 nt, Artificial Sequence
  Description of Artificial Sequence: Synthetic oligonucleotide
  Sense strand starting at position 2949 of SEQ ID NO: 316679
agaauaucccuucgaacug

SEQ ID NO: 431970 - RNA, 19 nt, Artificial Sequence
  Description of Artificial Sequence: Synthetic oligonucleotide
  Antisense Strand to SEQ ID NO: 431969
caguucgaagggauauucu

SEQ ID NO: 431971 - RNA, 19 nt, Artificial Sequence
  Description of Artificial Sequence: Synthetic oligonucleotide
  Sense strand starting at position 3173 of SEQ ID NO: 316679
ggaguuucaguguagugaa

SEQ ID NO: 431972 - RNA, 19 nt, Artificial Sequence
  Description of Artificial Sequence: Synthetic oligonucleotide
  Antisense Strand to SEQ ID NO: 431971
uucacuacacugaaacucc

SEQ ID NO: 431973 - RNA, 19 nt, Artificial Sequence
  Description of Artificial Sequence: Synthetic oligonucleotide
  Sense strand starting at position 3186 of SEQ ID NO: 316679
agugaaauaucccuggcag

SEQ ID NO: 431974 - RNA, 19 nt, Artificial Sequence
  Description of Artificial Sequence: Synthetic oligonucleotide
  Antisense Strand to SEQ ID NO: 431973
cugccagggauauuucacu

SEQ ID NO: 431975 - RNA, 19 nt, Artificial Sequence
  Description of Artificial Sequence: Synthetic oligonucleotide
  Sense strand starting at position 3187 of SEQ ID NO: 316679
gugaaauaucccuggcagg

SEQ ID NO: 431976 - RNA, 19 nt, Artificial Sequence
  Description of Artificial Sequence: Synthetic oligonucleotide
  Antisense Strand to SEQ ID NO: 431975
ccugccagggauauuucac

SEQ ID NO: 431977 - RNA, 19 nt, Artificial Sequence
  Description of Artificial Sequence: Synthetic oligonucleotide
  Sense strand starting at position 3188 of SEQ ID NO: 316679
ugaaauaucccuggcaggu

SEQ ID NO: 431978 - RNA, 19 nt, Artificial Sequence
  Description of Artificial Sequence: Synthetic oligonucleotide
  Antisense Strand to SEQ ID NO: 431977
accugccagggauauuuca

SEQ ID NO: 431979 - RNA, 19 nt, Artificial Sequence
  Description of Artificial Sequence: Synthetic oligonucleotide
  Sense strand starting at position 3245 of SEQ ID NO: 316679
ccauaaauguuuccaaugu

SEQ ID NO: 431980 - RNA, 19 nt, Artificial Sequence
  Description of Artificial Sequence: Synthetic oligonucleotide
  Antisense Strand to SEQ ID NO: 431979
acauuggaaacauuuaugg

SEQ ID NO: 431981 - RNA, 19 nt, Artificial Sequence
  Description of Artificial Sequence: Synthetic oligonucleotide
  Sense strand starting at position 3459 of SEQ ID NO: 316679
ugguuuggagaccauuagu

SEQ ID NO: 431982 - RNA, 19 nt, Artificial Sequence
  Description of Artificial Sequence: Synthetic oligonucleotide
  Antisense Strand to SEQ ID NO: 431981
acuaauggucuccaaacca

SEQ ID NO: 431983 - RNA, 19 nt, Artificial Sequence
  Description of Artificial Sequence: Synthetic oligonucleotide
  Sense strand starting at position 3462 of SEQ ID NO: 316679
uuuggagaccauuagucuu

SEQ ID NO: 431984 - RNA, 19 nt, Artificial Sequence
  Description of Artificial Sequence: Synthetic oligonucleotide
  Antisense Strand to SEQ ID NO: 431983
aagacuaauggucuccaaa

SEQ ID NO: 431985 - RNA, 19 nt, Artificial Sequence
  Description of Artificial Sequence: Synthetic oligonucleotide
  Sense strand starting at position 3521 of SEQ ID NO: 316679
gcuguaauuguguaggaac

SEQ ID NO: 431986 - RNA, 19 nt, Artificial Sequence
  Description of Artificial Sequence: Synthetic oligonucleotide
  Antisense Strand to SEQ ID NO: 431985
guuccuacacaauuacagc

SEQ ID NO: 431987 - RNA, 19 nt, Artificial Sequence
  Description of Artificial Sequence: Synthetic oligonucleotide
  Sense strand starting at position 3607 of SEQ ID NO: 316679
ggaaguguacgguaggacu

SEQ ID NO: 431988 - RNA, 19 nt, Artificial Sequence
  Description of Artificial Sequence: Synthetic oligonucleotide
  Antisense Strand to SEQ ID NO: 431987
aguccuaccguacacuucc

SEQ ID NO: 431989 - RNA, 19 nt, Artificial Sequence
  Description of Artificial Sequence: Synthetic oligonucleotide
  Sense strand starting at position 3633 of SEQ ID NO: 316679
gcuugaaugauguggacaa

SEQ ID NO: 431990 - RNA, 19 nt, Artificial Sequence
  Description of Artificial Sequence: Synthetic oligonucleotide
  Antisense Strand to SEQ ID NO: 431989
uuguccacaucauucaagc

SEQ ID NO: 431991 - RNA, 19 nt, Artificial Sequence
  Description of Artificial Sequence: Synthetic oligonucleotide
  Sense strand starting at position 3696 of SEQ ID NO: 316679
gcuagcugucucuugaguu

SEQ ID NO: 431992 - RNA, 19 nt, Artificial Sequence
  Description of Artificial Sequence: Synthetic oligonucleotide
  Antisense Strand to SEQ ID NO: 431991
aacucaagagacagcuagc

SEQ ID NO: 431993 - RNA, 19 nt, Artificial Sequence
  Description of Artificial Sequence: Synthetic oligonucleotide
  Sense strand starting at position 3703 of SEQ ID NO: 316679
gucucuugaguuuggagau

SEQ ID NO: 431994 - RNA, 19 nt, Artificial Sequence
  Description of Artificial Sequence: Synthetic oligonucleotide
  Antisense Strand to SEQ ID NO: 431993
aucuccaaacucaagagac

SEQ ID NO: 431995 - RNA, 19 nt, Artificial Sequence
  Description of Artificial Sequence: Synthetic oligonucleotide
  Sense strand starting at position 3718 of SEQ ID NO: 316679
agaugcuuagcuugacuaa

SEQ ID NO: 431996 - RNA, 19 nt, Artificial Sequence
  Description of Artificial Sequence: Synthetic oligonucleotide
  Antisense Strand to SEQ ID NO: 431995
uuagucaagcuaagcaucu

SEQ ID NO: 431997 - RNA, 19 nt, Artificial Sequence
  Description of Artificial Sequence: Synthetic oligonucleotide
  Sense strand starting at position 3730 of SEQ ID NO: 316679
ugacuaaaguuagucuaac

SEQ ID NO: 431998 - RNA, 19 nt, Artificial Sequence
  Description of Artificial Sequence: Synthetic oligonucleotide
  Antisense Strand to SEQ ID NO: 431997
guuagacuaacuuuaguca

SEQ ID NO: 431999 - RNA, 19 nt, Artificial Sequence
  Description of Artificial Sequence: Synthetic oligonucleotide
  Sense strand starting at position 3854 of SEQ ID NO: 316679
ucagauggauuuggaacua

SEQ ID NO: 432000 - RNA, 19 nt, Artificial Sequence
  Description of Artificial Sequence: Synthetic oligonucleotide
  Antisense Strand to SEQ ID NO: 431999
uaguuccaaauccaucuga

SEQ ID NO: 432001 - RNA, 19 nt, Artificial Sequence
  Description of Artificial Sequence: Synthetic oligonucleotide
  Sense strand starting at position 3878 of SEQ ID NO: 316679
aacuucugcuuggugaaga

SEQ ID NO: 432002 - RNA, 19 nt, Artificial Sequence
  Description of Artificial Sequence: Synthetic oligonucleotide
  Antisense Strand to SEQ ID NO: 432001
ucuucaccaagcagaaguu

SEQ ID NO: 432003 - RNA, 19 nt, Artificial Sequence
  Description of Artificial Sequence: Synthetic oligonucleotide
  Sense strand starting at position 3891 of SEQ ID NO: 316679
ugaagaugcuaaccaaguu

SEQ ID NO: 432004 - RNA, 19 nt, Artificial Sequence
  Description of Artificial Sequence: Synthetic oligonucleotide
  Antisense Strand to SEQ ID NO: 432003
aacuugguuagcaucuuca

SEQ ID NO: 432005 - RNA, 19 nt, Artificial Sequence
  Description of Artificial Sequence: Synthetic oligonucleotide
  Sense strand starting at position 3967 of SEQ ID NO: 316679
cgcugugcaaggcuauaua

SEQ ID NO: 432006 - RNA, 19 nt, Artificial Sequence
  Description of Artificial Sequence: Synthetic oligonucleotide
  Antisense Strand to SEQ ID NO: 432005
uauauagccuugcacagcg

SEQ ID NO: 432007 - RNA, 19 nt, Artificial Sequence
  Description of Artificial Sequence: Synthetic oligonucleotide
  Sense strand starting at position 168 of SEQ ID NO: 316680
ggccacugacucugguuaa

SEQ ID NO: 432008 - RNA, 19 nt, Artificial Sequence
  Description of Artificial Sequence: Synthetic oligonucleotide
  Antisense Strand to SEQ ID NO: 432007
uuaaccagagucaguggcc

SEQ ID NO: 432009 - RNA, 19 nt, Artificial Sequence
  Description of Artificial Sequence: Synthetic oligonucleotide
  Sense strand starting at position 178 of SEQ ID NO: 316680
ucugguuaacaucaaguua

SEQ ID NO: 432010 - RNA, 19 nt, Artificial Sequence
  Description of Artificial Sequence: Synthetic oligonucleotide
  Antisense Strand to SEQ ID NO: 432009
uaacuugauguuaaccaga

SEQ ID NO: 432011 - RNA, 19 nt, Artificial Sequence
  Description of Artificial Sequence: Synthetic oligonucleotide
  Sense strand starting at position 512 of SEQ ID NO: 316680
uugagugacuugccuccaa

SEQ ID NO: 432012 - RNA, 19 nt, Artificial Sequence
  Description of Artificial Sequence: Synthetic oligonucleotide
  Antisense Strand to SEQ ID NO: 432011
uuggaggcaagucacucaa

SEQ ID NO: 432013 - RNA, 19 nt, Artificial Sequence
  Description of Artificial Sequence: Synthetic oligonucleotide
  Sense strand starting at position 650 of SEQ ID NO: 316680
uuuaaucgcccuuacugaa

SEQ ID NO: 432014 - RNA, 19 nt, Artificial Sequence
  Description of Artificial Sequence: Synthetic oligonucleotide
  Antisense Strand to SEQ ID NO: 432013
uucaguaagggcgauuaaa

SEQ ID NO: 432015 - RNA, 19 nt, Artificial Sequence
  Description of Artificial Sequence: Synthetic oligonucleotide
  Sense strand starting at position 763 of SEQ ID NO: 316680
ggcugagaauuacugaacu

SEQ ID NO: 432016 - RNA, 19 nt, Artificial Sequence
  Description of Artificial Sequence: Synthetic oligonucleotide
  Antisense Strand to SEQ ID NO: 432015
aguucaguaauucucagcc

SEQ ID NO: 432017 - RNA, 19 nt, Artificial Sequence
  Description of Artificial Sequence: Synthetic oligonucleotide
  Sense strand starting at position 781 of SEQ ID NO: 316680
ugagaaucuaggugaguga

SEQ ID NO: 432018 - RNA, 19 nt, Artificial Sequence
  Description of Artificial Sequence: Synthetic oligonucleotide
  Antisense Strand to SEQ ID NO: 432017
ucacucaccuagauucuca

SEQ ID NO: 432019 - RNA, 19 nt, Artificial Sequence
  Description of Artificial Sequence: Synthetic oligonucleotide
  Sense strand starting at position 784 of SEQ ID NO: 316680
gaaucuaggugagugauga

SEQ ID NO: 432020 - RNA, 19 nt, Artificial Sequence
  Description of Artificial Sequence: Synthetic oligonucleotide
  Antisense Strand to SEQ ID NO: 432019
ucaucacucaccuagauuc

SEQ ID NO: 432021 - RNA, 19 nt, Artificial Sequence
  Description of Artificial Sequence: Synthetic oligonucleotide
  Sense strand starting at position 785 of SEQ ID NO: 316680
aaucuaggugagugaugaa

SEQ ID NO: 432022 - RNA, 19 nt, Artificial Sequence
  Description of Artificial Sequence: Synthetic oligonucleotide
  Antisense Strand to SEQ ID NO: 432021
uucaucacucaccuagauu

SEQ ID NO: 432023 - RNA, 19 nt, Artificial Sequence
  Description of Artificial Sequence: Synthetic oligonucleotide
  Sense strand starting at position 1062 of SEQ ID NO: 316680
acaguuaucucuccuguau

SEQ ID NO: 432024 - RNA, 19 nt, Artificial Sequence
  Description of Artificial Sequence: Synthetic oligonucleotide
  Antisense Strand to SEQ ID NO: 432023
auacaggagagauaacugu

SEQ ID NO: 432025 - RNA, 19 nt, Artificial Sequence
  Description of Artificial Sequence: Synthetic oligonucleotide
  Sense strand starting at position 1082 of SEQ ID NO: 316680
ucgugucuucuuccgaguu

SEQ ID NO: 432026 - RNA, 19 nt, Artificial Sequence
  Description of Artificial Sequence: Synthetic oligonucleotide
  Antisense Strand to SEQ ID NO: 432025
aacucggaagaagacacga

SEQ ID NO: 432027 - RNA, 19 nt, Artificial Sequence
  Description of Artificial Sequence: Synthetic oligonucleotide
  Sense strand starting at position 1089 of SEQ ID NO: 316680
uucuuccgaguuuaagaga

SEQ ID NO: 432028 - RNA, 19 nt, Artificial Sequence
  Description of Artificial Sequence: Synthetic oligonucleotide
  Antisense Strand to SEQ ID NO: 432027
ucucuuaaacucggaagaa

SEQ ID NO: 432029 - RNA, 19 nt, Artificial Sequence
  Description of Artificial Sequence: Synthetic oligonucleotide
  Sense strand starting at position 1280 of SEQ ID NO: 316680
uggacuuucugguuuggca

SEQ ID NO: 432030 - RNA, 19 nt, Artificial Sequence
  Description of Artificial Sequence: Synthetic oligonucleotide
  Antisense Strand to SEQ ID NO: 432029
ugccaaaccagaaagucca

SEQ ID NO: 432031 - RNA, 19 nt, Artificial Sequence
  Description of Artificial Sequence: Synthetic oligonucleotide
  Sense strand starting at position 1468 of SEQ ID NO: 316680
uuuguaagagauugugagu

SEQ ID NO: 432032 - RNA, 19 nt, Artificial Sequence
  Description of Artificial Sequence: Synthetic oligonucleotide
  Antisense Strand to SEQ ID NO: 432031
acucacaaucucuuacaaa

SEQ ID NO: 432033 - RNA, 19 nt, Artificial Sequence
  Description of Artificial Sequence: Synthetic oligonucleotide
  Sense strand starting at position 1473 of SEQ ID NO: 316680
aagagauugugaguagcuu

SEQ ID NO: 432034 - RNA, 19 nt, Artificial Sequence
  Description of Artificial Sequence: Synthetic oligonucleotide
  Antisense Strand to SEQ ID NO: 432033
aagcuacucacaaucucuu

SEQ ID NO: 432035 - RNA, 19 nt, Artificial Sequence
  Description of Artificial Sequence: Synthetic oligonucleotide
  Sense strand starting at position 1474 of SEQ ID NO: 316680
agagauugugaguagcuuu

SEQ ID NO: 432036 - RNA, 19 nt, Artificial Sequence
  Description of Artificial Sequence: Synthetic oligonucleotide
  Antisense Strand to SEQ ID NO: 432035
aaagcuacucacaaucucu

SEQ ID NO: 432037 - RNA, 19 nt, Artificial Sequence
  Description of Artificial Sequence: Synthetic oligonucleotide
  Sense strand starting at position 1484 of SEQ ID NO: 316680
aguagcuuuaggcagcaau

SEQ ID NO: 432038 - RNA, 19 nt, Artificial Sequence
  Description of Artificial Sequence: Synthetic oligonucleotide
  Antisense Strand to SEQ ID NO: 432037
auugcugccuaaagcuacu

SEQ ID NO: 432039 - RNA, 19 nt, Artificial Sequence
  Description of Artificial Sequence: Synthetic oligonucleotide
  Sense strand starting at position 1487 of SEQ ID NO: 316680
agcuuuaggcagcaaugaa

SEQ ID NO: 432040 - RNA, 19 nt, Artificial Sequence
  Description of Artificial Sequence: Synthetic oligonucleotide
  Antisense Strand to SEQ ID NO: 432039
uucauugcugccuaaagcu

SEQ ID NO: 432041 - RNA, 19 nt, Artificial Sequence
  Description of Artificial Sequence: Synthetic oligonucleotide
  Sense strand starting at position 2570 of SEQ ID NO: 316680
gucuuaauugcagucguua

SEQ ID NO: 432042 - RNA, 19 nt, Artificial Sequence
  Description of Artificial Sequence: Synthetic oligonucleotide
  Antisense Strand to SEQ ID NO: 432041
uaacgacugcaauuaagac

SEQ ID NO: 432043 - RNA, 19 nt, Artificial Sequence
  Description of Artificial Sequence: Synthetic oligonucleotide
  Sense strand starting at position 2603 of SEQ ID NO: 316680
gcgacauaacucugaagug

SEQ ID NO: 432044 - RNA, 19 nt, Artificial Sequence
  Description of Artificial Sequence: Synthetic oligonucleotide
  Antisense Strand to SEQ ID NO: 432043
cacuucagaguuaugucgc

SEQ ID NO: 432045 - RNA, 19 nt, Artificial Sequence
  Description of Artificial Sequence: Synthetic oligonucleotide
  Sense strand starting at position 2624 of SEQ ID NO: 316680
ugccuugcaggagaugauu

SEQ ID NO: 432046 - RNA, 19 nt, Artificial Sequence
  Description of Artificial Sequence: Synthetic oligonucleotide
  Antisense Strand to SEQ ID NO: 432045
aaucaucuccugcaaggca

SEQ ID NO: 432047 - RNA, 19 nt, Artificial Sequence
  Description of Artificial Sequence: Synthetic oligonucleotide
  Sense strand starting at position 2626 of SEQ ID NO: 316680
ccuugcaggagaugauuaa

SEQ ID NO: 432048 - RNA, 19 nt, Artificial Sequence
  Description of Artificial Sequence: Synthetic oligonucleotide
  Antisense Strand to SEQ ID NO: 432047
uuaaucaucuccugcaagg

SEQ ID NO: 432049 - RNA, 19 nt, Artificial Sequence
  Description of Artificial Sequence: Synthetic oligonucleotide
  Sense strand starting at position 2735 of SEQ ID NO: 316680
cccaguuuaaagugagaug

SEQ ID NO: 432050 - RNA, 19 nt, Artificial Sequence
  Description of Artificial Sequence: Synthetic oligonucleotide
  Antisense Strand to SEQ ID NO: 432049
caucucacuuuaaacuggg

SEQ ID NO: 432051 - RNA, 19 nt, Artificial Sequence
  Description of Artificial Sequence: Synthetic oligonucleotide
  Sense strand starting at position 2744 of SEQ ID NO: 316680
aagugagaugcgugguaaa

SEQ ID NO: 432052 - RNA, 19 nt, Artificial Sequence
  Description of Artificial Sequence: Synthetic oligonucleotide
  Antisense Strand to SEQ ID NO: 432051
uuuaccacgcaucucacuu

SEQ ID NO: 432053 - RNA, 19 nt, Artificial Sequence
  Description of Artificial Sequence: Synthetic oligonucleotide
  Sense strand starting at position 2896 of SEQ ID NO: 316680
guuguuucuguuguguuca

SEQ ID NO: 432054 - RNA, 19 nt, Artificial Sequence
  Description of Artificial Sequence: Synthetic oligonucleotide
  Antisense Strand to SEQ ID NO: 432053
ugaacacaacagaaacaac

SEQ ID NO: 432055 - RNA, 19 nt, Artificial Sequence
  Description of Artificial Sequence: Synthetic oligonucleotide
  Sense strand starting at position 2899 of SEQ ID NO: 316680
guuucuguuguguucagca

SEQ ID NO: 432056 - RNA, 19 nt, Artificial Sequence
  Description of Artificial Sequence: Synthetic oligonucleotide
  Antisense Strand to SEQ ID NO: 432055
ugcugaacacaacagaaac

SEQ ID NO: 432057 - RNA, 19 nt, Artificial Sequence
  Description of Artificial Sequence: Synthetic oligonucleotide
  Sense strand starting at position 2939 of SEQ ID NO: 316680
ugaagacgaucuuuauuau

SEQ ID NO: 432058 - RNA, 19 nt, Artificial Sequence
  Description of Artificial Sequence: Synthetic oligonucleotide
  Antisense Strand to SEQ ID NO: 432057
auaauaaagaucgucuuca

SEQ ID NO: 432059 - RNA, 19 nt, Artificial Sequence
  Description of Artificial Sequence: Synthetic oligonucleotide
  Sense strand starting at position 2942 of SEQ ID NO: 316680
agacgaucuuuauuauucu

SEQ ID NO: 432060 - RNA, 19 nt, Artificial Sequence
  Description of Artificial Sequence: Synthetic oligonucleotide
  Antisense Strand to SEQ ID NO: 432059
agaauaauaaagaucgucu

SEQ ID NO: 432061 - RNA, 19 nt, Artificial Sequence
  Description of Artificial Sequence: Synthetic oligonucleotide
  Sense strand starting at position 3014 of SEQ ID NO: 316680
ggugacgaucaaugagaau

SEQ ID NO: 432062 - RNA, 19 nt, Artificial Sequence
  Description of Artificial Sequence: Synthetic oligonucleotide
  Antisense Strand to SEQ ID NO: 432061
auucucauugaucgucacc

SEQ ID NO: 432063 - RNA, 19 nt, Artificial Sequence
  Description of Artificial Sequence: Synthetic oligonucleotide
  Sense strand starting at position 3017 of SEQ ID NO: 316680
gacgaucaaugagaauuua

SEQ ID NO: 432064 - RNA, 19 nt, Artificial Sequence
  Description of Artificial Sequence: Synthetic oligonucleotide
  Antisense Strand to SEQ ID NO: 432063
uaaauucucauugaucguc

SEQ ID NO: 432065 - RNA, 19 nt, Artificial Sequence
  Description of Artificial Sequence: Synthetic oligonucleotide
  Sense strand starting at position 3029 of SEQ ID NO: 316680
gaauuuaugucagugcccu

SEQ ID NO: 432066 - RNA, 19 nt, Artificial Sequence
  Description of Artificial Sequence: Synthetic oligonucleotide
  Antisense Strand to SEQ ID NO: 432065
agggcacugacauaaauuc

SEQ ID NO: 432067 - RNA, 19 nt, Artificial Sequence
  Description of Artificial Sequence: Synthetic oligonucleotide
  Sense strand starting at position 3534 of SEQ ID NO: 316680
gcgauauagacuuacauga

SEQ ID NO: 432068 - RNA, 19 nt, Artificial Sequence
  Description of Artificial Sequence: Synthetic oligonucleotide
  Antisense Strand to SEQ ID NO: 432067
ucauguaagucuauaucgc

SEQ ID NO: 432069 - RNA, 19 nt, Artificial Sequence
  Description of Artificial Sequence: Synthetic oligonucleotide
  Sense strand starting at position 3603 of SEQ ID NO: 316680
agacucucagcuggguaau

SEQ ID NO: 432070 - RNA, 19 nt, Artificial Sequence
  Description of Artificial Sequence: Synthetic oligonucleotide
  Antisense Strand to SEQ ID NO: 432069
auuacccagcugagagucu

SEQ ID NO: 432071 - RNA, 19 nt, Artificial Sequence
  Description of Artificial Sequence: Synthetic oligonucleotide
  Sense strand starting at position 3604 of SEQ ID NO: 316680
gacucucagcuggguaauu

SEQ ID NO: 432072 - RNA, 19 nt, Artificial Sequence
  Description of Artificial Sequence: Synthetic oligonucleotide
  Antisense Strand to SEQ ID NO: 432071
aauuacccagcugagaguc

SEQ ID NO: 432073 - RNA, 19 nt, Artificial Sequence
  Description of Artificial Sequence: Synthetic oligonucleotide
  Sense strand starting at position 3605 of SEQ ID NO: 316680
acucucagcuggguaauua

SEQ ID NO: 432074 - RNA, 19 nt, Artificial Sequence
  Description of Artificial Sequence: Synthetic oligonucleotide
  Antisense Strand to SEQ ID NO: 432073
uaauuacccagcugagagu

SEQ ID NO: 432075 - RNA, 19 nt, Artificial Sequence
  Description of Artificial Sequence: Synthetic oligonucleotide
  Sense strand starting at position 3606 of SEQ ID NO: 316680
cucucagcuggguaauuaa

SEQ ID NO: 432076 - RNA, 19 nt, Artificial Sequence
  Description of Artificial Sequence: Synthetic oligonucleotide
  Antisense Strand to SEQ ID NO: 432075
uuaauuacccagcugagag

SEQ ID NO: 432077 - RNA, 19 nt, Artificial Sequence
  Description of Artificial Sequence: Synthetic oligonucleotide
  Sense strand starting at position 3609 of SEQ ID NO: 316680
ucagcuggguaauuaagaa

SEQ ID NO: 432078 - RNA, 19 nt, Artificial Sequence
  Description of Artificial Sequence: Synthetic oligonucleotide
  Antisense Strand to SEQ ID NO: 432077
uucuuaauuacccagcuga

SEQ ID NO: 432079 - RNA, 19 nt, Artificial Sequence
  Description of Artificial Sequence: Synthetic oligonucleotide
  Sense strand starting at position 3621 of SEQ ID NO: 316680
uuaagaaucuguuuggaca

SEQ ID NO: 432080 - RNA, 19 nt, Artificial Sequence
  Description of Artificial Sequence: Synthetic oligonucleotide
  Antisense Strand to SEQ ID NO: 432079
uguccaaacagauucuuaa

SEQ ID NO: 432081 - RNA, 19 nt, Artificial Sequence
  Description of Artificial Sequence: Synthetic oligonucleotide
  Sense strand starting at position 3622 of SEQ ID NO: 316680
uaagaaucuguuuggacag

SEQ ID NO: 432082 - RNA, 19 nt, Artificial Sequence
  Description of Artificial Sequence: Synthetic oligonucleotide
  Antisense Strand to SEQ ID NO: 432081
cuguccaaacagauucuua

SEQ ID NO: 432083 - RNA, 19 nt, Artificial Sequence
  Description of Artificial Sequence: Synthetic oligonucleotide
  Sense strand starting at position 3725 of SEQ ID NO: 316680
gugccuaacccacagauaa

SEQ ID NO: 432084 - RNA, 19 nt, Artificial Sequence
  Description of Artificial Sequence: Synthetic oligonucleotide
  Antisense Strand to SEQ ID NO: 432083
uuaucuguggguuaggcac

SEQ ID NO: 432085 - RNA, 19 nt, Artificial Sequence
  Description of Artificial Sequence: Synthetic oligonucleotide
  Sense strand starting at position 3760 of SEQ ID NO: 316680
guccauccuccagagaguu

SEQ ID NO: 432086 - RNA, 19 nt, Artificial Sequence
  Description of Artificial Sequence: Synthetic oligonucleotide
  Antisense Strand to SEQ ID NO: 432085
aacucucuggaggauggac

SEQ ID NO: 432087 - RNA, 19 nt, Artificial Sequence
  Description of Artificial Sequence: Synthetic oligonucleotide
  Sense strand starting at position 46 of SEQ ID NO: 316681
agaauauacugccugugaa

SEQ ID NO: 432088 - RNA, 19 nt, Artificial Sequence
  Description of Artificial Sequence: Synthetic oligonucleotide
  Antisense Strand to SEQ ID NO: 432087
uucacaggcaguauauucu

SEQ ID NO: 432089 - RNA, 19 nt, Artificial Sequence
  Description of Artificial Sequence: Synthetic oligonucleotide
  Sense strand starting at position 47 of SEQ ID NO: 316681
gaauauacugccugugaau

SEQ ID NO: 432090 - RNA, 19 nt, Artificial Sequence
  Description of Artificial Sequence: Synthetic oligonucleotide
  Antisense Strand to SEQ ID NO: 432089
auucacaggcaguauauuc

SEQ ID NO: 432091 - RNA, 19 nt, Artificial Sequence
  Description of Artificial Sequence: Synthetic oligonucleotide
  Sense strand starting at position 123 of SEQ ID NO: 316681
aggugaagucucugaccac

SEQ ID NO: 432092 - RNA, 19 nt, Artificial Sequence
  Description of Artificial Sequence: Synthetic oligonucleotide
  Antisense Strand to SEQ ID NO: 432091
guggucagagacuucaccu

SEQ ID NO: 432093 - RNA, 19 nt, Artificial Sequence
  Description of Artificial Sequence: Synthetic oligonucleotide
  Sense strand starting at position 126 of SEQ ID NO: 316681
ugaagucucugaccacuaa

SEQ ID NO: 432094 - RNA, 19 nt, Artificial Sequence
  Description of Artificial Sequence: Synthetic oligonucleotide
  Antisense Strand to SEQ ID NO: 432093
uuaguggucagagacuuca

SEQ ID NO: 432095 - RNA, 19 nt, Artificial Sequence
  Description of Artificial Sequence: Synthetic oligonucleotide
  Sense strand starting at position 130 of SEQ ID NO: 316681
gucucugaccacuaaguaa

SEQ ID NO: 432096 - RNA, 19 nt, Artificial Sequence
  Description of Artificial Sequence: Synthetic oligonucleotide
  Antisense Strand to SEQ ID NO: 432095
uuacuuaguggucagagac

SEQ ID NO: 432097 - RNA, 19 nt, Artificial Sequence
  Description of Artificial Sequence: Synthetic oligonucleotide
  Sense strand starting at position 245 of SEQ ID NO: 316681
guugaaauaugcccagaaa

SEQ ID NO: 432098 - RNA, 19 nt, Artificial Sequence
  Description of Artificial Sequence: Synthetic oligonucleotide
  Antisense Strand to SEQ ID NO: 432097
uuucugggcauauuucaac

SEQ ID NO: 432099 - RNA, 19 nt, Artificial Sequence
  Description of Artificial Sequence: Synthetic oligonucleotide
  Sense strand starting at position 388 of SEQ ID NO: 316681
ucaauagcgucauccauuu

SEQ ID NO: 432100 - RNA, 19 nt, Artificial Sequence
  Description of Artificial Sequence: Synthetic oligonucleotide
  Antisense Strand to SEQ ID NO: 432099
aaauggaugacgcuauuga

SEQ ID NO: 432101 - RNA, 19 nt, Artificial Sequence
  Description of Artificial Sequence: Synthetic oligonucleotide
  Sense strand starting at position 446 of SEQ ID NO: 316681
gggacagauuguuuguauu

SEQ ID NO: 432102 - RNA, 19 nt, Artificial Sequence
  Description of Artificial Sequence: Synthetic oligonucleotide
  Antisense Strand to SEQ ID NO: 432101
aauacaaacaaucuguccc

SEQ ID NO: 432103 - RNA, 19 nt, Artificial Sequence
  Description of Artificial Sequence: Synthetic oligonucleotide
  Sense strand starting at position 459 of SEQ ID NO: 316681
uguauuuaauccgucugua

SEQ ID NO: 432104 - RNA, 19 nt, Artificial Sequence
  Description of Artificial Sequence: Synthetic oligonucleotide
  Antisense Strand to SEQ ID NO: 432103
uacagacggauuaaauaca

SEQ ID NO: 432105 - RNA, 19 nt, Artificial Sequence
  Description of Artificial Sequence: Synthetic oligonucleotide
  Sense strand starting at position 462 of SEQ ID NO: 316681
auuuaauccgucuguacau

SEQ ID NO: 432106 - RNA, 19 nt, Artificial Sequence
  Description of Artificial Sequence: Synthetic oligonucleotide
  Antisense Strand to SEQ ID NO: 432105
auguacagacggauuaaau

SEQ ID NO: 432107 - RNA, 19 nt, Artificial Sequence
  Description of Artificial Sequence: Synthetic oligonucleotide
  Sense strand starting at position 488 of SEQ ID NO: 316681
ucaguaacugaguaaagcu

SEQ ID NO: 432108 - RNA, 19 nt, Artificial Sequence
  Description of Artificial Sequence: Synthetic oligonucleotide
  Antisense Strand to SEQ ID NO: 432107
agcuuuacucaguuacuga

SEQ ID NO: 432109 - RNA, 19 nt, Artificial Sequence
  Description of Artificial Sequence: Synthetic oligonucleotide
  Sense strand starting at position 518 of SEQ ID NO: 316681
cugcaaauaucccuggauu

SEQ ID NO: 432110 - RNA, 19 nt, Artificial Sequence
  Description of Artificial Sequence: Synthetic oligonucleotide
  Antisense Strand to SEQ ID NO: 432109
aauccagggauauuugcag

SEQ ID NO: 432111 - RNA, 19 nt, Artificial Sequence
  Description of Artificial Sequence: Synthetic oligonucleotide
  Sense strand starting at position 519 of SEQ ID NO: 316681
ugcaaauaucccuggauuc

SEQ ID NO: 432112 - RNA, 19 nt, Artificial Sequence
  Description of Artificial Sequence: Synthetic oligonucleotide
  Antisense Strand to SEQ ID NO: 432111
gaauccagggauauuugca

SEQ ID NO: 432113 - RNA, 19 nt, Artificial Sequence
  Description of Artificial Sequence: Synthetic oligonucleotide
  Sense strand starting at position 628 of SEQ ID NO: 316681
uccaaauacucagcacgau

SEQ ID NO: 432114 - RNA, 19 nt, Artificial Sequence
  Description of Artificial Sequence: Synthetic oligonucleotide
  Antisense Strand to SEQ ID NO: 432113
aucgugcugaguauuugga

SEQ ID NO: 432115 - RNA, 19 nt, Artificial Sequence
  Description of Artificial Sequence: Synthetic oligonucleotide
  Sense strand starting at position 629 of SEQ ID NO: 316681
ccaaauacucagcacgauu

SEQ ID NO: 432116 - RNA, 19 nt, Artificial Sequence
  Description of Artificial Sequence: Synthetic oligonucleotide
  Antisense Strand to SEQ ID NO: 432115
aaucgugcugaguauuugg

SEQ ID NO: 432117 - RNA, 19 nt, Artificial Sequence
  Description of Artificial Sequence: Synthetic oligonucleotide
  Sense strand starting at position 862 of SEQ ID NO: 316681
ccuucuauuuggguacgua

SEQ ID NO: 432118 - RNA, 19 nt, Artificial Sequence
  Description of Artificial Sequence: Synthetic oligonucleotide
  Antisense Strand to SEQ ID NO: 432117
uacguacccaaauagaagg

SEQ ID NO: 432119 - RNA, 19 nt, Artificial Sequence
  Description of Artificial Sequence: Synthetic oligonucleotide
  Sense strand starting at position 994 of SEQ ID NO: 316681
accaaagauucccuaacgu

SEQ ID NO: 432120 - RNA, 19 nt, Artificial Sequence
  Description of Artificial Sequence: Synthetic oligonucleotide
  Antisense Strand to SEQ ID NO: 432119
acguuagggaaucuuuggu

SEQ ID NO: 432121 - RNA, 19 nt, Artificial Sequence
  Description of Artificial Sequence: Synthetic oligonucleotide
  Sense strand starting at position 1148 of SEQ ID NO: 316681
uaucuuugugcgccuguua

SEQ ID NO: 432122 - RNA, 19 nt, Artificial Sequence
  Description of Artificial Sequence: Synthetic oligonucleotide
  Antisense Strand to SEQ ID NO: 432121
uaacaggcgcacaaagaua

SEQ ID NO: 432123 - RNA, 19 nt, Artificial Sequence
  Description of Artificial Sequence: Synthetic oligonucleotide
  Sense strand starting at position 1151 of SEQ ID NO: 316681
cuuugugcgccuguuacau

SEQ ID NO: 432124 - RNA, 19 nt, Artificial Sequence
  Description of Artificial Sequence: Synthetic oligonucleotide
  Antisense Strand to SEQ ID NO: 432123
auguaacaggcgcacaaag

SEQ ID NO: 432125 - RNA, 19 nt, Artificial Sequence
  Description of Artificial Sequence: Synthetic oligonucleotide
  Sense strand starting at position 2149 of SEQ ID NO: 316681
aagccuggguuaucugaga

SEQ ID NO: 432126 - RNA, 19 nt, Artificial Sequence
  Description of Artificial Sequence: Synthetic oligonucleotide
  Antisense Strand to SEQ ID NO: 432125
ucucagauaacccaggcuu

SEQ ID NO: 432127 - RNA, 19 nt, Artificial Sequence
  Description of Artificial Sequence: Synthetic oligonucleotide
  Sense strand starting at position 2260 of SEQ ID NO: 316681
gauacuuguuggccacaga

SEQ ID NO: 432128 - RNA, 19 nt, Artificial Sequence
  Description of Artificial Sequence: Synthetic oligonucleotide
  Antisense Strand to SEQ ID NO: 432127
ucuguggccaacaaguauc

SEQ ID NO: 432129 - RNA, 19 nt, Artificial Sequence
  Description of Artificial Sequence: Synthetic oligonucleotide
  Sense strand starting at position 2261 of SEQ ID NO: 316681
auacuuguuggccacagau

SEQ ID NO: 432130 - RNA, 19 nt, Artificial Sequence
  Description of Artificial Sequence: Synthetic oligonucleotide
  Antisense Strand to SEQ ID NO: 432129
aucuguggccaacaaguau

SEQ ID NO: 432131 - RNA, 19 nt, Artificial Sequence
  Description of Artificial Sequence: Synthetic oligonucleotide
  Sense strand starting at position 2263 of SEQ ID NO: 316681
acuuguuggccacagaucu

SEQ ID NO: 432132 - RNA, 19 nt, Artificial Sequence
  Description of Artificial Sequence: Synthetic oligonucleotide
  Antisense Strand to SEQ ID NO: 432131
agaucuguggccaacaagu

SEQ ID NO: 432133 - RNA, 19 nt, Artificial Sequence
  Description of Artificial Sequence: Synthetic oligonucleotide
  Sense strand starting at position 2418 of SEQ ID NO: 316681
uuagaauuaccugggccau

SEQ ID NO: 432134 - RNA, 19 nt, Artificial Sequence
  Description of Artificial Sequence: Synthetic oligonucleotide
  Antisense Strand to SEQ ID NO: 432133
auggcccagguaauucuaa

SEQ ID NO: 432135 - RNA, 19 nt, Artificial Sequence
  Description of Artificial Sequence: Synthetic oligonucleotide
  Sense strand starting at position 2420 of SEQ ID NO: 316681
agaauuaccugggccauua

SEQ ID NO: 432136 - RNA, 19 nt, Artificial Sequence
  Description of Artificial Sequence: Synthetic oligonucleotide
  Antisense Strand to SEQ ID NO: 432135
uaauggcccagguaauucu

SEQ ID NO: 432137 - RNA, 19 nt, Artificial Sequence
  Description of Artificial Sequence: Synthetic oligonucleotide
  Sense strand starting at position 2440 of SEQ ID NO: 316681
agcaauauuccuggaaaug

SEQ ID NO: 432138 - RNA, 19 nt, Artificial Sequence
  Description of Artificial Sequence: Synthetic oligonucleotide
  Antisense Strand to SEQ ID NO: 432137
cauuuccaggaauauugcu

SEQ ID NO: 432139 - RNA, 19 nt, Artificial Sequence
  Description of Artificial Sequence: Synthetic oligonucleotide
  Sense strand starting at position 2441 of SEQ ID NO: 316681
gcaauauuccuggaaaugc

SEQ ID NO: 432140 - RNA, 19 nt, Artificial Sequence
  Description of Artificial Sequence: Synthetic oligonucleotide
  Antisense Strand to SEQ ID NO: 432139
gcauuuccaggaauauugc

SEQ ID NO: 432141 - RNA, 19 nt, Artificial Sequence
  Description of Artificial Sequence: Synthetic oligonucleotide
  Sense strand starting at position 2464 of SEQ ID NO: 316681
uuagauggaugcucucuaa

SEQ ID NO: 432142 - RNA, 19 nt, Artificial Sequence
  Description of Artificial Sequence: Synthetic oligonucleotide
  Antisense Strand to SEQ ID NO: 432141
uuagagagcauccaucuaa

SEQ ID NO: 432143 - RNA, 19 nt, Artificial Sequence
  Description of Artificial Sequence: Synthetic oligonucleotide
  Sense strand starting at position 2539 of SEQ ID NO: 316681
cucggaguuacacaauaug

SEQ ID NO: 432144 - RNA, 19 nt, Artificial Sequence
  Description of Artificial Sequence: Synthetic oligonucleotide
  Antisense Strand to SEQ ID NO: 432143
cauauuguguaacuccgag

SEQ ID NO: 432145 - RNA, 19 nt, Artificial Sequence
  Description of Artificial Sequence: Synthetic oligonucleotide
  Sense strand starting at position 3092 of SEQ ID NO: 316681
ggguguccucacuagggau

SEQ ID NO: 432146 - RNA, 19 nt, Artificial Sequence
  Description of Artificial Sequence: Synthetic oligonucleotide
  Antisense Strand to SEQ ID NO: 432145
aucccuagugaggacaccc

SEQ ID NO: 432147 - RNA, 19 nt, Artificial Sequence
  Description of Artificial Sequence: Synthetic oligonucleotide
  Sense strand starting at position 3177 of SEQ ID NO: 316681
cugaguggacacugauaug

SEQ ID NO: 432148 - RNA, 19 nt, Artificial Sequence
  Description of Artificial Sequence: Synthetic oligonucleotide
  Antisense Strand to SEQ ID NO: 432147
cauaucaguguccacucag

SEQ ID NO: 432149 - RNA, 19 nt, Artificial Sequence
  Description of Artificial Sequence: Synthetic oligonucleotide
  Sense strand starting at position 3217 of SEQ ID NO: 316681
cuccaaguucuuggagaaa

SEQ ID NO: 432150 - RNA, 19 nt, Artificial Sequence
  Description of Artificial Sequence: Synthetic oligonucleotide
  Antisense Strand to SEQ ID NO: 432149
uuucuccaagaacuuggag

SEQ ID NO: 432151 - RNA, 19 nt, Artificial Sequence
  Description of Artificial Sequence: Synthetic oligonucleotide
  Sense strand starting at position 3289 of SEQ ID NO: 316681
ggagaauucucagcccuuu

SEQ ID NO: 432152 - RNA, 19 nt, Artificial Sequence
  Description of Artificial Sequence: Synthetic oligonucleotide
  Antisense Strand to SEQ ID NO: 432151
aaagggcugagaauucucc

SEQ ID NO: 432153 - RNA, 19 nt, Artificial Sequence
  Description of Artificial Sequence: Synthetic oligonucleotide
  Sense strand starting at position 3372 of SEQ ID NO: 316681
uggaauuccuaagcuagaa

SEQ ID NO: 432154 - RNA, 19 nt, Artificial Sequence
  Description of Artificial Sequence: Synthetic oligonucleotide
  Antisense Strand to SEQ ID NO: 432153
uucuagcuuaggaauucca

SEQ ID NO: 432155 - RNA, 19 nt, Artificial Sequence
  Description of Artificial Sequence: Synthetic oligonucleotide
  Sense strand starting at position 3376 of SEQ ID NO: 316681
auuccuaagcuagaaguaa

SEQ ID NO: 432156 - RNA, 19 nt, Artificial Sequence
  Description of Artificial Sequence: Synthetic oligonucleotide
  Antisense Strand to SEQ ID NO: 432155
uuacuucuagcuuaggaau

SEQ ID NO: 432157 - RNA, 19 nt, Artificial Sequence
  Description of Artificial Sequence: Synthetic oligonucleotide
  Sense strand starting at position 3405 of SEQ ID NO: 316681
uuuccaauuggugggaaua

SEQ ID NO: 432158 - RNA, 19 nt, Artificial Sequence
  Description of Artificial Sequence: Synthetic oligonucleotide
  Antisense Strand to SEQ ID NO: 432157
uauucccaccaauuggaaa

SEQ ID NO: 432159 - RNA, 19 nt, Artificial Sequence
  Description of Artificial Sequence: Synthetic oligonucleotide
  Sense strand starting at position 3406 of SEQ ID NO: 316681
uuccaauuggugggaauaa

SEQ ID NO: 432160 - RNA, 19 nt, Artificial Sequence
  Description of Artificial Sequence: Synthetic oligonucleotide
  Antisense Strand to SEQ ID NO: 432159
uuauucccaccaauuggaa

SEQ ID NO: 432161 - RNA, 19 nt, Artificial Sequence
  Description of Artificial Sequence: Synthetic oligonucleotide
  Sense strand starting at position 3625 of SEQ ID NO: 316681
acugucaugucaguaauuu

SEQ ID NO: 432162 - RNA, 19 nt, Artificial Sequence
  Description of Artificial Sequence: Synthetic oligonucleotide
  Antisense Strand to SEQ ID NO: 432161
aaauuacugacaugacagu

SEQ ID NO: 432163 - RNA, 19 nt, Artificial Sequence
  Description of Artificial Sequence: Synthetic oligonucleotide
  Sense strand starting at position 3858 of SEQ ID NO: 316681
ugauuaucuuaagcuagaa

SEQ ID NO: 432164 - RNA, 19 nt, Artificial Sequence
  Description of Artificial Sequence: Synthetic oligonucleotide
  Antisense Strand to SEQ ID NO: 432163
uucuagcuuaagauaauca

SEQ ID NO: 432165 - RNA, 19 nt, Artificial Sequence
  Description of Artificial Sequence: Synthetic oligonucleotide
  Sense strand starting at position 3891 of SEQ ID NO: 316681
agaggaugguugucacuug

SEQ ID NO: 432166 - RNA, 19 nt, Artificial Sequence
  Description of Artificial Sequence: Synthetic oligonucleotide
  Antisense Strand to SEQ ID NO: 432165
caagugacaaccauccucu

SEQ ID NO: 432167 - RNA, 19 nt, Artificial Sequence
  Description of Artificial Sequence: Synthetic oligonucleotide
  Sense strand starting at position 90 of SEQ ID NO: 316682
gguuguugagguugaagga

SEQ ID NO: 432168 - RNA, 19 nt, Artificial Sequence
  Description of Artificial Sequence: Synthetic oligonucleotide
  Antisense Strand to SEQ ID NO: 432167
uccuucaaccucaacaacc

SEQ ID NO: 432169 - RNA, 19 nt, Artificial Sequence
  Description of Artificial Sequence: Synthetic oligonucleotide
  Sense strand starting at position 130 of SEQ ID NO: 316682
ugucuacaccaguaaguaa

SEQ ID NO: 432170 - RNA, 19 nt, Artificial Sequence
  Description of Artificial Sequence: Synthetic oligonucleotide
  Antisense Strand to SEQ ID NO: 432169
uuacuuacugguguagaca

SEQ ID NO: 432171 - RNA, 19 nt, Artificial Sequence
  Description of Artificial Sequence: Synthetic oligonucleotide
  Sense strand starting at position 547 of SEQ ID NO: 316682
augugaccauuugaucuaa

SEQ ID NO: 432172 - RNA, 19 nt, Artificial Sequence
  Description of Artificial Sequence: Synthetic oligonucleotide
  Antisense Strand to SEQ ID NO: 432171
uuagaucaaauggucacau

SEQ ID NO: 432173 - RNA, 19 nt, Artificial Sequence
  Description of Artificial Sequence: Synthetic oligonucleotide
  Sense strand starting at position 594 of SEQ ID NO: 316682
guauuacugcauuauagaa

SEQ ID NO: 432174 - RNA, 19 nt, Artificial Sequence
  Description of Artificial Sequence: Synthetic oligonucleotide
  Antisense Strand to SEQ ID NO: 432173
uucuauaaugcaguaauac

SEQ ID NO: 432175 - RNA, 19 nt, Artificial Sequence
  Description of Artificial Sequence: Synthetic oligonucleotide
  Sense strand starting at position 623 of SEQ ID NO: 316682
auauguauccaugaguaau

SEQ ID NO: 432176 - RNA, 19 nt, Artificial Sequence
  Description of Artificial Sequence: Synthetic oligonucleotide
  Antisense Strand to SEQ ID NO: 432175
auuacucauggauacauau

SEQ ID NO: 432177 - RNA, 19 nt, Artificial Sequence
  Description of Artificial Sequence: Synthetic oligonucleotide
  Sense strand starting at position 625 of SEQ ID NO: 316682
auguauccaugaguaauac

SEQ ID NO: 432178 - RNA, 19 nt, Artificial Sequence
  Description of Artificial Sequence: Synthetic oligonucleotide
  Antisense Strand to SEQ ID NO: 432177
guauuacucauggauacau

SEQ ID NO: 432179 - RNA, 19 nt, Artificial Sequence
  Description of Artificial Sequence: Synthetic oligonucleotide
  Sense strand starting at position 626 of SEQ ID NO: 316682
uguauccaugaguaauacu

SEQ ID NO: 432180 - RNA, 19 nt, Artificial Sequence
  Description of Artificial Sequence: Synthetic oligonucleotide
  Antisense Strand to SEQ ID NO: 432179
aguauuacucauggauaca

SEQ ID NO: 432181 - RNA, 19 nt, Artificial Sequence
  Description of Artificial Sequence: Synthetic oligonucleotide
  Sense strand starting at position 735 of SEQ ID NO: 316682
guggcuaaauucuuugaaa

SEQ ID NO: 432182 - RNA, 19 nt, Artificial Sequence
  Description of Artificial Sequence: Synthetic oligonucleotide
  Antisense Strand to SEQ ID NO: 432181
uuucaaagaauuuagccac

SEQ ID NO: 432183 - RNA, 19 nt, Artificial Sequence
  Description of Artificial Sequence: Synthetic oligonucleotide
  Sense strand starting at position 903 of SEQ ID NO: 316682
gagugacaccuggaaugcu

SEQ ID NO: 432184 - RNA, 19 nt, Artificial Sequence
  Description of Artificial Sequence: Synthetic oligonucleotide
  Antisense Strand to SEQ ID NO: 432183
agcauuccaggugucacuc

SEQ ID NO: 432185 - RNA, 19 nt, Artificial Sequence
  Description of Artificial Sequence: Synthetic oligonucleotide
  Sense strand starting at position 988 of SEQ ID NO: 316682
auggaucggugacuugaaa

SEQ ID NO: 432186 - RNA, 19 nt, Artificial Sequence
  Description of Artificial Sequence: Synthetic oligonucleotide
  Antisense Strand to SEQ ID NO: 432185
uuucaagucaccgauccau

SEQ ID NO: 432187 - RNA, 19 nt, Artificial Sequence
  Description of Artificial Sequence: Synthetic oligonucleotide
  Sense strand starting at position 1051 of SEQ ID NO: 316682
ggugaaugagcuuacacua

SEQ ID NO: 432188 - RNA, 19 nt, Artificial Sequence
  Description of Artificial Sequence: Synthetic oligonucleotide
  Antisense Strand to SEQ ID NO: 432187
uaguguaagcucauucacc

SEQ ID NO: 432189 - RNA, 19 nt, Artificial Sequence
  Description of Artificial Sequence: Synthetic oligonucleotide
  Sense strand starting at position 1093 of SEQ ID NO: 316682
aaaguaggcuuauuagaau

SEQ ID NO: 432190 - RNA, 19 nt, Artificial Sequence
  Description of Artificial Sequence: Synthetic oligonucleotide
  Antisense Strand to SEQ ID NO: 432189
auucuaauaagccuacuuu

SEQ ID NO: 432191 - RNA, 19 nt, Artificial Sequence
  Description of Artificial Sequence: Synthetic oligonucleotide
  Sense strand starting at position 1229 of SEQ ID NO: 316682
ccaagcugugaugaguuua

SEQ ID NO: 432192 - RNA, 19 nt, Artificial Sequence
  Description of Artificial Sequence: Synthetic oligonucleotide
  Antisense Strand to SEQ ID NO: 432191
uaaacucaucacagcuugg

SEQ ID NO: 432193 - RNA, 19 nt, Artificial Sequence
  Description of Artificial Sequence: Synthetic oligonucleotide
  Sense strand starting at position 1248 of SEQ ID NO: 316682
gugagccuugacugaauca

SEQ ID NO: 432194 - RNA, 19 nt, Artificial Sequence
  Description of Artificial Sequence: Synthetic oligonucleotide
  Antisense Strand to SEQ ID NO: 432193
ugauucagucaaggcucac

SEQ ID NO: 432195 - RNA, 19 nt, Artificial Sequence
  Description of Artificial Sequence: Synthetic oligonucleotide
  Sense strand starting at position 1255 of SEQ ID NO: 316682
uugacugaaucaguuaaag

SEQ ID NO: 432196 - RNA, 19 nt, Artificial Sequence
  Description of Artificial Sequence: Synthetic oligonucleotide
  Antisense Strand to SEQ ID NO: 432195
cuuuaacugauucagucaa

SEQ ID NO: 432197 - RNA, 19 nt, Artificial Sequence
  Description of Artificial Sequence: Synthetic oligonucleotide
  Sense strand starting at position 1304 of SEQ ID NO: 316682
ucugauuggcuccauauua

SEQ ID NO: 432198 - RNA, 19 nt, Artificial Sequence
  Description of Artificial Sequence: Synthetic oligonucleotide
  Antisense Strand to SEQ ID NO: 432197
uaauauggagccaaucaga

SEQ ID NO: 432199 - RNA, 19 nt, Artificial Sequence
  Description of Artificial Sequence: Synthetic oligonucleotide
  Sense strand starting at position 2222 of SEQ ID NO: 316682
uaguuagugccacaguuaa

SEQ ID NO: 432200 - RNA, 19 nt, Artificial Sequence
  Description of Artificial Sequence: Synthetic oligonucleotide
  Antisense Strand to SEQ ID NO: 432199
uuaacuguggcacuaacua

SEQ ID NO: 432201 - RNA, 19 nt, Artificial Sequence
  Description of Artificial Sequence: Synthetic oligonucleotide
  Sense strand starting at position 2378 of SEQ ID NO: 316682
ggaugugagaacugucuca

SEQ ID NO: 432202 - RNA, 19 nt, Artificial Sequence
  Description of Artificial Sequence: Synthetic oligonucleotide
  Antisense Strand to SEQ ID NO: 432201
ugagacaguucucacaucc

SEQ ID NO: 432203 - RNA, 19 nt, Artificial Sequence
  Description of Artificial Sequence: Synthetic oligonucleotide
  Sense strand starting at position 2492 of SEQ ID NO: 316682
gcugauuguccagaauauu

SEQ ID NO: 432204 - RNA, 19 nt, Artificial Sequence
  Description of Artificial Sequence: Synthetic oligonucleotide
  Antisense Strand to SEQ ID NO: 432203
aauauucuggacaaucagc

SEQ ID NO: 432205 - RNA, 19 nt, Artificial Sequence
  Description of Artificial Sequence: Synthetic oligonucleotide
  Sense strand starting at position 2552 of SEQ ID NO: 316682
uuuauuaguccuuacagag

SEQ ID NO: 432206 - RNA, 19 nt, Artificial Sequence
  Description of Artificial Sequence: Synthetic oligonucleotide
  Antisense Strand to SEQ ID NO: 432205
cucuguaaggacuaauaaa

SEQ ID NO: 432207 - RNA, 19 nt, Artificial Sequence
  Description of Artificial Sequence: Synthetic oligonucleotide
  Sense strand starting at position 2850 of SEQ ID NO: 316682
gaaagagugaugugcuuau

SEQ ID NO: 432208 - RNA, 19 nt, Artificial Sequence
  Description of Artificial Sequence: Synthetic oligonucleotide
  Antisense Strand to SEQ ID NO: 432207
auaagcacaucacucuuuc

SEQ ID NO: 432209 - RNA, 19 nt, Artificial Sequence
  Description of Artificial Sequence: Synthetic oligonucleotide
  Sense strand starting at position 2854 of SEQ ID NO: 316682
gagugaugugcuuauuaua

SEQ ID NO: 432210 - RNA, 19 nt, Artificial Sequence
  Description of Artificial Sequence: Synthetic oligonucleotide
  Antisense Strand to SEQ ID NO: 432209
uauaauaagcacaucacuc

SEQ ID NO: 432211 - RNA, 19 nt, Artificial Sequence
  Description of Artificial Sequence: Synthetic oligonucleotide
  Sense strand starting at position 2973 of SEQ ID NO: 316682
cgugaaauaguguaacaga

SEQ ID NO: 432212 - RNA, 19 nt, Artificial Sequence
  Description of Artificial Sequence: Synthetic oligonucleotide
  Antisense Strand to SEQ ID NO: 432211
ucuguuacacuauuucacg

SEQ ID NO: 432213 - RNA, 19 nt, Artificial Sequence
  Description of Artificial Sequence: Synthetic oligonucleotide
  Sense strand starting at position 2994 of SEQ ID NO: 316682
agcaauagcuuccuuagaa

SEQ ID NO: 432214 - RNA, 19 nt, Artificial Sequence
  Description of Artificial Sequence: Synthetic oligonucleotide
  Antisense Strand to SEQ ID NO: 432213
uucuaaggaagcuauugcu

SEQ ID NO: 432215 - RNA, 19 nt, Artificial Sequence
  Description of Artificial Sequence: Synthetic oligonucleotide
  Sense strand starting at position 2995 of SEQ ID NO: 316682
gcaauagcuuccuuagaaa

SEQ ID NO: 432216 - RNA, 19 nt, Artificial Sequence
  Description of Artificial Sequence: Synthetic oligonucleotide
  Antisense Strand to SEQ ID NO: 432215
uuucuaaggaagcuauugc

SEQ ID NO: 432217 - RNA, 19 nt, Artificial Sequence
  Description of Artificial Sequence: Synthetic oligonucleotide
  Sense strand starting at position 3039 of SEQ ID NO: 316682
aaggguuugcaugggaagu

SEQ ID NO: 432218 - RNA, 19 nt, Artificial Sequence
  Description of Artificial Sequence: Synthetic oligonucleotide
  Antisense Strand to SEQ ID NO: 432217
acuucccaugcaaacccuu

SEQ ID NO: 432219 - RNA, 19 nt, Artificial Sequence
  Description of Artificial Sequence: Synthetic oligonucleotide
  Sense strand starting at position 3040 of SEQ ID NO: 316682
aggguuugcaugggaagua

SEQ ID NO: 432220 - RNA, 19 nt, Artificial Sequence
  Description of Artificial Sequence: Synthetic oligonucleotide
  Antisense Strand to SEQ ID NO: 432219
uacuucccaugcaaacccu

SEQ ID NO: 432221 - RNA, 19 nt, Artificial Sequence
  Description of Artificial Sequence: Synthetic oligonucleotide
  Sense strand starting at position 3059 of SEQ ID NO: 316682
aggucaauucucuaugacu

SEQ ID NO: 432222 - RNA, 19 nt, Artificial Sequence
  Description of Artificial Sequence: Synthetic oligonucleotide
  Antisense Strand to SEQ ID NO: 432221
agucauagagaauugaccu

SEQ ID NO: 432223 - RNA, 19 nt, Artificial Sequence
  Description of Artificial Sequence: Synthetic oligonucleotide
  Sense strand starting at position 3068 of SEQ ID NO: 316682
cucuaugacuacuucugua

SEQ ID NO: 432224 - RNA, 19 nt, Artificial Sequence
  Description of Artificial Sequence: Synthetic oligonucleotide
  Antisense Strand to SEQ ID NO: 432223
uacagaaguagucauagag

SEQ ID NO: 432225 - RNA, 19 nt, Artificial Sequence
  Description of Artificial Sequence: Synthetic oligonucleotide
  Sense strand starting at position 3101 of SEQ ID NO: 316682
ucaaacauguguccuugau

SEQ ID NO: 432226 - RNA, 19 nt, Artificial Sequence
  Description of Artificial Sequence: Synthetic oligonucleotide
  Antisense Strand to SEQ ID NO: 432225
aucaaggacacauguuuga

SEQ ID NO: 432227 - RNA, 19 nt, Artificial Sequence
  Description of Artificial Sequence: Synthetic oligonucleotide
  Sense strand starting at position 3239 of SEQ ID NO: 316682
ugaucuggcuccuuaaauu

SEQ ID NO: 432228 - RNA, 19 nt, Artificial Sequence
  Description of Artificial Sequence: Synthetic oligonucleotide
  Antisense Strand to SEQ ID NO: 432227
aauuuaaggagccagauca

SEQ ID NO: 432229 - RNA, 19 nt, Artificial Sequence
  Description of Artificial Sequence: Synthetic oligonucleotide
  Sense strand starting at position 3438 of SEQ ID NO: 316682
guaugcuuaugaccaaaua

SEQ ID NO: 432230 - RNA, 19 nt, Artificial Sequence
  Description of Artificial Sequence: Synthetic oligonucleotide
  Antisense Strand to SEQ ID NO: 432229
uauuuggucauaagcauac

SEQ ID NO: 432231 - RNA, 19 nt, Artificial Sequence
  Description of Artificial Sequence: Synthetic oligonucleotide
  Sense strand starting at position 3799 of SEQ ID NO: 316682
cuuuacuuucgauauugac

SEQ ID NO: 432232 - RNA, 19 nt, Artificial Sequence
  Description of Artificial Sequence: Synthetic oligonucleotide
  Antisense Strand to SEQ ID NO: 432231
gucaauaucgaaaguaaag

SEQ ID NO: 432233 - RNA, 19 nt, Artificial Sequence
  Description of Artificial Sequence: Synthetic oligonucleotide
  Sense strand starting at position 3822 of SEQ ID NO: 316682
uuaccuuuaguccauuaga

SEQ ID NO: 432234 - RNA, 19 nt, Artificial Sequence
  Description of Artificial Sequence: Synthetic oligonucleotide
  Antisense Strand to SEQ ID NO: 432233
ucuaauggacuaaagguaa

SEQ ID NO: 432235 - RNA, 19 nt, Artificial Sequence
  Description of Artificial Sequence: Synthetic oligonucleotide
  Sense strand starting at position 3859 of SEQ ID NO: 316682
ugaguaagaccuuguaagg

SEQ ID NO: 432236 - RNA, 19 nt, Artificial Sequence
  Description of Artificial Sequence: Synthetic oligonucleotide
  Antisense Strand to SEQ ID NO: 432235
ccuuacaaggucuuacuca

SEQ ID NO: 432237 - RNA, 19 nt, Artificial Sequence
  Description of Artificial Sequence: Synthetic oligonucleotide
  Sense strand starting at position 3876 of SEQ ID NO: 316682
gguaauaggccuugaggag

SEQ ID NO: 432238 - RNA, 19 nt, Artificial Sequence
  Description of Artificial Sequence: Synthetic oligonucleotide
  Antisense Strand to SEQ ID NO: 432237
cuccucaaggccuauuacc

SEQ ID NO: 432239 - RNA, 19 nt, Artificial Sequence
  Description of Artificial Sequence: Synthetic oligonucleotide
  Sense strand starting at position 3923 of SEQ ID NO: 316682
ggugauucagaggguuaaa

SEQ ID NO: 432240 - RNA, 19 nt, Artificial Sequence
  Description of Artificial Sequence: Synthetic oligonucleotide
  Antisense Strand to SEQ ID NO: 432239
uuuaacccucugaaucacc

SEQ ID NO: 432241 - RNA, 19 nt, Artificial Sequence
  Description of Artificial Sequence: Synthetic oligonucleotide
  Sense strand starting at position 3934 of SEQ ID NO: 316682
ggguuaaauggcugcagga

SEQ ID NO: 432242 - RNA, 19 nt, Artificial Sequence
  Description of Artificial Sequence: Synthetic oligonucleotide
  Antisense Strand to SEQ ID NO: 432241
uccugcagccauuuaaccc

SEQ ID NO: 432243 - RNA, 19 nt, Artificial Sequence
  Description of Artificial Sequence: Synthetic oligonucleotide
  Sense strand starting at position 3974 of SEQ ID NO: 316682
agucacagauuguuuagaa

SEQ ID NO: 432244 - RNA, 19 nt, Artificial Sequence
  Description of Artificial Sequence: Synthetic oligonucleotide
  Antisense Strand to SEQ ID NO: 432243
uucuaaacaaucugugacu

SEQ ID NO: 432245 - RNA, 19 nt, Artificial Sequence
  Description of Artificial Sequence: Synthetic oligonucleotide
  Sense strand starting at position 3975 of SEQ ID NO: 316682
gucacagauuguuuagaac

SEQ ID NO: 432246 - RNA, 19 nt, Artificial Sequence
  Description of Artificial Sequence: Synthetic oligonucleotide
  Antisense Strand to SEQ ID NO: 432245
guucuaaacaaucugugac

SEQ ID NO: 432247 - RNA, 19 nt, Artificial Sequence
  Description of Artificial Sequence: Synthetic oligonucleotide
  Sense strand starting at position 10 of SEQ ID NO: 316683
uguauacacugauuaugau

SEQ ID NO: 432248 - RNA, 19 nt, Artificial Sequence
  Description of Artificial Sequence: Synthetic oligonucleotide
  Antisense Strand to SEQ ID NO: 432247
aucauaaucaguguauaca

SEQ ID NO: 432249 - RNA, 19 nt, Artificial Sequence
  Description of Artificial Sequence: Synthetic oligonucleotide
  Sense strand starting at position 32 of SEQ ID NO: 316683
ucaaauaggugacuuacuu

SEQ ID NO: 432250 - RNA, 19 nt, Artificial Sequence
  Description of Artificial Sequence: Synthetic oligonucleotide
  Antisense Strand to SEQ ID NO: 432249
aaguaagucaccuauuuga

SEQ ID NO: 432251 - RNA, 19 nt, Artificial Sequence
  Description of Artificial Sequence: Synthetic oligonucleotide
  Sense strand starting at position 36 of SEQ ID NO: 316683
auaggugacuuacuuucua

SEQ ID NO: 432252 - RNA, 19 nt, Artificial Sequence
  Description of Artificial Sequence: Synthetic oligonucleotide
  Antisense Strand to SEQ ID NO: 432251
uagaaaguaagucaccuau

SEQ ID NO: 432253 - RNA, 19 nt, Artificial Sequence
  Description of Artificial Sequence: Synthetic oligonucleotide
  Sense strand starting at position 117 of SEQ ID NO: 316683
guaguccucacagagggau

SEQ ID NO: 432254 - RNA, 19 nt, Artificial Sequence
  Description of Artificial Sequence: Synthetic oligonucleotide
  Antisense Strand to SEQ ID NO: 432253
aucccucugugaggacuac

SEQ ID NO: 432255 - RNA, 19 nt, Artificial Sequence
  Description of Artificial Sequence: Synthetic oligonucleotide
  Sense strand starting at position 136 of SEQ ID NO: 316683
gaauacucuuguguugaua

SEQ ID NO: 432256 - RNA, 19 nt, Artificial Sequence
  Description of Artificial Sequence: Synthetic oligonucleotide
  Antisense Strand to SEQ ID NO: 432255
uaucaacacaagaguauuc

SEQ ID NO: 432257 - RNA, 19 nt, Artificial Sequence
  Description of Artificial Sequence: Synthetic oligonucleotide
  Sense strand starting at position 311 of SEQ ID NO: 316683
aguuccacaucugugaaau

SEQ ID NO: 432258 - RNA, 19 nt, Artificial Sequence
  Description of Artificial Sequence: Synthetic oligonucleotide
  Antisense Strand to SEQ ID NO: 432257
auuucacagauguggaacu

SEQ ID NO: 432259 - RNA, 19 nt, Artificial Sequence
  Description of Artificial Sequence: Synthetic oligonucleotide
  Sense strand starting at position 339 of SEQ ID NO: 316683
ucuuaacucgcauagaaag

SEQ ID NO: 432260 - RNA, 19 nt, Artificial Sequence
  Description of Artificial Sequence: Synthetic oligonucleotide
  Antisense Strand to SEQ ID NO: 432259
cuuucuaugcgaguuaaga

SEQ ID NO: 432261 - RNA, 19 nt, Artificial Sequence
  Description of Artificial Sequence: Synthetic oligonucleotide
  Sense strand starting at position 354 of SEQ ID NO: 316683
aaagcauuacaguguuaga

SEQ ID NO: 432262 - RNA, 19 nt, Artificial Sequence
  Description of Artificial Sequence: Synthetic oligonucleotide
  Antisense Strand to SEQ ID NO: 432261
ucuaacacuguaaugcuuu

SEQ ID NO: 432263 - RNA, 19 nt, Artificial Sequence
  Description of Artificial Sequence: Synthetic oligonucleotide
  Sense strand starting at position 364 of SEQ ID NO: 316683
aguguuagagucagguguu

SEQ ID NO: 432264 - RNA, 19 nt, Artificial Sequence
  Description of Artificial Sequence: Synthetic oligonucleotide
  Antisense Strand to SEQ ID NO: 432263
aacaccugacucuaacacu

SEQ ID NO: 432265 - RNA, 19 nt, Artificial Sequence
  Description of Artificial Sequence: Synthetic oligonucleotide
  Sense strand starting at position 439 of SEQ ID NO: 316683
gagagugucccaggaacuu

SEQ ID NO: 432266 - RNA, 19 nt, Artificial Sequence
  Description of Artificial Sequence: Synthetic oligonucleotide
  Antisense Strand to SEQ ID NO: 432265
aaguuccugggacacucuc

SEQ ID NO: 432267 - RNA, 19 nt, Artificial Sequence
  Description of Artificial Sequence: Synthetic oligonucleotide
  Sense strand starting at position 486 of SEQ ID NO: 316683
gacgaucuaguuuacagua

SEQ ID NO: 432268 - RNA, 19 nt, Artificial Sequence
  Description of Artificial Sequence: Synthetic oligonucleotide
  Antisense Strand to SEQ ID NO: 432267
uacuguaaacuagaucguc

SEQ ID NO: 432269 - RNA, 19 nt, Artificial Sequence
  Description of Artificial Sequence: Synthetic oligonucleotide
  Sense strand starting at position 491 of SEQ ID NO: 316683
ucuaguuuacaguauuaga

SEQ ID NO: 432270 - RNA, 19 nt, Artificial Sequence
  Description of Artificial Sequence: Synthetic oligonucleotide
  Antisense Strand to SEQ ID NO: 432269
ucuaauacuguaaacuaga

SEQ ID NO: 432271 - RNA, 19 nt, Artificial Sequence
  Description of Artificial Sequence: Synthetic oligonucleotide
  Sense strand starting at position 1170 of SEQ ID NO: 316683
gacucauagugaguaauac

SEQ ID NO: 432272 - RNA, 19 nt, Artificial Sequence
  Description of Artificial Sequence: Synthetic oligonucleotide
  Antisense Strand to SEQ ID NO: 432271
guauuacucacuaugaguc

SEQ ID NO: 432273 - RNA, 19 nt, Artificial Sequence
  Description of Artificial Sequence: Synthetic oligonucleotide
  Sense strand starting at position 1171 of SEQ ID NO: 316683
acucauagugaguaauacu

SEQ ID NO: 432274 - RNA, 19 nt, Artificial Sequence
  Description of Artificial Sequence: Synthetic oligonucleotide
  Antisense Strand to SEQ ID NO: 432273
aguauuacucacuaugagu

SEQ ID NO: 432275 - RNA, 19 nt, Artificial Sequence
  Description of Artificial Sequence: Synthetic oligonucleotide
  Sense strand starting at position 1285 of SEQ ID NO: 316683
aaagcuuuauagguugauu

SEQ ID NO: 432276 - RNA, 19 nt, Artificial Sequence
  Description of Artificial Sequence: Synthetic oligonucleotide
  Antisense Strand to SEQ ID NO: 432275
aaucaaccuauaaagcuuu

SEQ ID NO: 432277 - RNA, 19 nt, Artificial Sequence
  Description of Artificial Sequence: Synthetic oligonucleotide
  Sense strand starting at position 1287 of SEQ ID NO: 316683
agcuuuauagguugauuaa

SEQ ID NO: 432278 - RNA, 19 nt, Artificial Sequence
  Description of Artificial Sequence: Synthetic oligonucleotide
  Antisense Strand to SEQ ID NO: 432277
uuaaucaaccuauaaagcu

SEQ ID NO: 432279 - RNA, 19 nt, Artificial Sequence
  Description of Artificial Sequence: Synthetic oligonucleotide
  Sense strand starting at position 1288 of SEQ ID NO: 316683
gcuuuauagguugauuaag

SEQ ID NO: 432280 - RNA, 19 nt, Artificial Sequence
  Description of Artificial Sequence: Synthetic oligonucleotide
  Antisense Strand to SEQ ID NO: 432279
cuuaaucaaccuauaaagc

SEQ ID NO: 432281 - RNA, 19 nt, Artificial Sequence
  Description of Artificial Sequence: Synthetic oligonucleotide
  Sense strand starting at position 1296 of SEQ ID NO: 316683
gguugauuaaguuaauugu

SEQ ID NO: 432282 - RNA, 19 nt, Artificial Sequence
  Description of Artificial Sequence: Synthetic oligonucleotide
  Antisense Strand to SEQ ID NO: 432281
acaauuaacuuaaucaacc

SEQ ID NO: 432283 - RNA, 19 nt, Artificial Sequence
  Description of Artificial Sequence: Synthetic oligonucleotide
  Sense strand starting at position 1305 of SEQ ID NO: 316683
aguuaauuguaaguacauc

SEQ ID NO: 432284 - RNA, 19 nt, Artificial Sequence
  Description of Artificial Sequence: Synthetic oligonucleotide
  Antisense Strand to SEQ ID NO: 432283
gauguacuuacaauuaacu

SEQ ID NO: 432285 - RNA, 19 nt, Artificial Sequence
  Description of Artificial Sequence: Synthetic oligonucleotide
  Sense strand starting at position 1601 of SEQ ID NO: 316683
ucaaauuagcacuggaauu

SEQ ID NO: 432286 - RNA, 19 nt, Artificial Sequence
  Description of Artificial Sequence: Synthetic oligonucleotide
  Antisense Strand to SEQ ID NO: 432285
aauuccagugcuaauuuga

SEQ ID NO: 432287 - RNA, 19 nt, Artificial Sequence
  Description of Artificial Sequence: Synthetic oligonucleotide
  Sense strand starting at position 1873 of SEQ ID NO: 316683
ccuggcaauuugucuccaa

SEQ ID NO: 432288 - RNA, 19 nt, Artificial Sequence
  Description of Artificial Sequence: Synthetic oligonucleotide
  Antisense Strand to SEQ ID NO: 432287
uuggagacaaauugccagg

SEQ ID NO: 432289 - RNA, 19 nt, Artificial Sequence
  Description of Artificial Sequence: Synthetic oligonucleotide
  Sense strand starting at position 2260 of SEQ ID NO: 316683
gauucugaacuccguaaau

SEQ ID NO: 432290 - RNA, 19 nt, Artificial Sequence
  Description of Artificial Sequence: Synthetic oligonucleotide
  Antisense Strand to SEQ ID NO: 432289
auuuacggaguucagaauc

SEQ ID NO: 432291 - RNA, 19 nt, Artificial Sequence
  Description of Artificial Sequence: Synthetic oligonucleotide
  Sense strand starting at position 2262 of SEQ ID NO: 316683
uucugaacuccguaaauca

SEQ ID NO: 432292 - RNA, 19 nt, Artificial Sequence
  Description of Artificial Sequence: Synthetic oligonucleotide
  Antisense Strand to SEQ ID NO: 432291
ugauuuacggaguucagaa

SEQ ID NO: 432293 - RNA, 19 nt, Artificial Sequence
  Description of Artificial Sequence: Synthetic oligonucleotide
  Sense strand starting at position 2273 of SEQ ID NO: 316683
guaaaucagagcugggaca

SEQ ID NO: 432294 - RNA, 19 nt, Artificial Sequence
  Description of Artificial Sequence: Synthetic oligonucleotide
  Antisense Strand to SEQ ID NO: 432293
ugucccagcucugauuuac

SEQ ID NO: 432295 - RNA, 19 nt, Artificial Sequence
  Description of Artificial Sequence: Synthetic oligonucleotide
  Sense strand starting at position 2869 of SEQ ID NO: 316683
cccuguagagucuaaguuu

SEQ ID NO: 432296 - RNA, 19 nt, Artificial Sequence
  Description of Artificial Sequence: Synthetic oligonucleotide
  Antisense Strand to SEQ ID NO: 432295
aaacuuagacucuacaggg

SEQ ID NO: 432297 - RNA, 19 nt, Artificial Sequence
  Description of Artificial Sequence: Synthetic oligonucleotide
  Sense strand starting at position 2906 of SEQ ID NO: 316683
ucuucuuagaaguggagaa

SEQ ID NO: 432298 - RNA, 19 nt, Artificial Sequence
  Description of Artificial Sequence: Synthetic oligonucleotide
  Antisense Strand to SEQ ID NO: 432297
uucuccacuucuaagaaga

SEQ ID NO: 432299 - RNA, 19 nt, Artificial Sequence
  Description of Artificial Sequence: Synthetic oligonucleotide
  Sense strand starting at position 3019 of SEQ ID NO: 316683
gauugauugcaugagcaag

SEQ ID NO: 432300 - RNA, 19 nt, Artificial Sequence
  Description of Artificial Sequence: Synthetic oligonucleotide
  Antisense Strand to SEQ ID NO: 432299
cuugcucaugcaaucaauc

SEQ ID NO: 432301 - RNA, 19 nt, Artificial Sequence
  Description of Artificial Sequence: Synthetic oligonucleotide
  Sense strand starting at position 3021 of SEQ ID NO: 316683
uugauugcaugagcaagaa

SEQ ID NO: 432302 - RNA, 19 nt, Artificial Sequence
  Description of Artificial Sequence: Synthetic oligonucleotide
  Antisense Strand to SEQ ID NO: 432301
uucuugcucaugcaaucaa

SEQ ID NO: 432303 - RNA, 19 nt, Artificial Sequence
  Description of Artificial Sequence: Synthetic oligonucleotide
  Sense strand starting at position 3183 of SEQ ID NO: 316683
uggugacaucagggugaaa

SEQ ID NO: 432304 - RNA, 19 nt, Artificial Sequence
  Description of Artificial Sequence: Synthetic oligonucleotide
  Antisense Strand to SEQ ID NO: 432303
uuucacccugaugucacca

SEQ ID NO: 432305 - RNA, 19 nt, Artificial Sequence
  Description of Artificial Sequence: Synthetic oligonucleotide
  Sense strand starting at position 3185 of SEQ ID NO: 316683
gugacaucagggugaaaug

SEQ ID NO: 432306 - RNA, 19 nt, Artificial Sequence
  Description of Artificial Sequence: Synthetic oligonucleotide
  Antisense Strand to SEQ ID NO: 432305
cauuucacccugaugucac

SEQ ID NO: 432307 - RNA, 19 nt, Artificial Sequence
  Description of Artificial Sequence: Synthetic oligonucleotide
  Sense strand starting at position 3230 of SEQ ID NO: 316683
cuauaugugcaguacuuga

SEQ ID NO: 432308 - RNA, 19 nt, Artificial Sequence
  Description of Artificial Sequence: Synthetic oligonucleotide
  Antisense Strand to SEQ ID NO: 432307
ucaaguacugcacauauag

SEQ ID NO: 432309 - RNA, 19 nt, Artificial Sequence
  Description of Artificial Sequence: Synthetic oligonucleotide
  Sense strand starting at position 3368 of SEQ ID NO: 316683
gugggcuauaaauagaguu

SEQ ID NO: 432310 - RNA, 19 nt, Artificial Sequence
  Description of Artificial Sequence: Synthetic oligonucleotide
  Antisense Strand to SEQ ID NO: 432309
aacucuauuuauagcccac

SEQ ID NO: 432311 - RNA, 19 nt, Artificial Sequence
  Description of Artificial Sequence: Synthetic oligonucleotide
  Sense strand starting at position 3375 of SEQ ID NO: 316683
auaaauagaguucgagauu

SEQ ID NO: 432312 - RNA, 19 nt, Artificial Sequence
  Description of Artificial Sequence: Synthetic oligonucleotide
  Antisense Strand to SEQ ID NO: 432311
aaucucgaacucuauuuau

SEQ ID NO: 432313 - RNA, 19 nt, Artificial Sequence
  Description of Artificial Sequence: Synthetic oligonucleotide
  Sense strand starting at position 3376 of SEQ ID NO: 316683
uaaauagaguucgagauuu

SEQ ID NO: 432314 - RNA, 19 nt, Artificial Sequence
  Description of Artificial Sequence: Synthetic oligonucleotide
  Antisense Strand to SEQ ID NO: 432313
aaaucucgaacucuauuua

SEQ ID NO: 432315 - RNA, 19 nt, Artificial Sequence
  Description of Artificial Sequence: Synthetic oligonucleotide
  Sense strand starting at position 3484 of SEQ ID NO: 316683
uaguguuugaggcagaaca

SEQ ID NO: 432316 - RNA, 19 nt, Artificial Sequence
  Description of Artificial Sequence: Synthetic oligonucleotide
  Antisense Strand to SEQ ID NO: 432315
uguucugccucaaacacua

SEQ ID NO: 432317 - RNA, 19 nt, Artificial Sequence
  Description of Artificial Sequence: Synthetic oligonucleotide
  Sense strand starting at position 3617 of SEQ ID NO: 316683
gggaaagguuagcuaugga

SEQ ID NO: 432318 - RNA, 19 nt, Artificial Sequence
  Description of Artificial Sequence: Synthetic oligonucleotide
  Antisense Strand to SEQ ID NO: 432317
uccauagcuaaccuuuccc

SEQ ID NO: 432319 - RNA, 19 nt, Artificial Sequence
  Description of Artificial Sequence: Synthetic oligonucleotide
  Sense strand starting at position 3620 of SEQ ID NO: 316683
aaagguuagcuauggaaug

SEQ ID NO: 432320 - RNA, 19 nt, Artificial Sequence
  Description of Artificial Sequence: Synthetic oligonucleotide
  Antisense Strand to SEQ ID NO: 432319
cauuccauagcuaaccuuu

SEQ ID NO: 432321 - RNA, 19 nt, Artificial Sequence
  Description of Artificial Sequence: Synthetic oligonucleotide
  Sense strand starting at position 3882 of SEQ ID NO: 316683
agauaccuguuauucuuau

SEQ ID NO: 432322 - RNA, 19 nt, Artificial Sequence
  Description of Artificial Sequence: Synthetic oligonucleotide
  Antisense Strand to SEQ ID NO: 432321
auaagaauaacagguaucu

SEQ ID NO: 432323 - RNA, 19 nt, Artificial Sequence
  Description of Artificial Sequence: Synthetic oligonucleotide
  Sense strand starting at position 3932 of SEQ ID NO: 316683
guuaaaggucaauggugaa

SEQ ID NO: 432324 - RNA, 19 nt, Artificial Sequence
  Description of Artificial Sequence: Synthetic oligonucleotide
  Antisense Strand to SEQ ID NO: 432323
uucaccauugaccuuuaac

SEQ ID NO: 432325 - RNA, 19 nt, Artificial Sequence
  Description of Artificial Sequence: Synthetic oligonucleotide
  Sense strand starting at position 3979 of SEQ ID NO: 316683
ucuagaguuccauagucug

SEQ ID NO: 432326 - RNA, 19 nt, Artificial Sequence
  Description of Artificial Sequence: Synthetic oligonucleotide
  Antisense Strand to SEQ ID NO: 432325
cagacuauggaacucuaga

SEQ ID NO: 432327 - RNA, 19 nt, Artificial Sequence
  Description of Artificial Sequence: Synthetic oligonucleotide
  Sense strand starting at position 33 of SEQ ID NO: 316684
gaugcaauccuaugguauu

SEQ ID NO: 432328 - RNA, 19 nt, Artificial Sequence
  Description of Artificial Sequence: Synthetic oligonucleotide
  Antisense Strand to SEQ ID NO: 432327
aauaccauaggauugcauc

SEQ ID NO: 432329 - RNA, 19 nt, Artificial Sequence
  Description of Artificial Sequence: Synthetic oligonucleotide
  Sense strand starting at position 100 of SEQ ID NO: 316684
uuaauuaucuuuguggaug

SEQ ID NO: 432330 - RNA, 19 nt, Artificial Sequence
  Description of Artificial Sequence: Synthetic oligonucleotide
  Antisense Strand to SEQ ID NO: 432329
cauccacaaagauaauuaa

SEQ ID NO: 432331 - RNA, 19 nt, Artificial Sequence
  Description of Artificial Sequence: Synthetic oligonucleotide
  Sense strand starting at position 101 of SEQ ID NO: 316684
uaauuaucuuuguggauga

SEQ ID NO: 432332 - RNA, 19 nt, Artificial Sequence
  Description of Artificial Sequence: Synthetic oligonucleotide
  Antisense Strand to SEQ ID NO: 432331
ucauccacaaagauaauua

SEQ ID NO: 432333 - RNA, 19 nt, Artificial Sequence
  Description of Artificial Sequence: Synthetic oligonucleotide
  Sense strand starting at position 105 of SEQ ID NO: 316684
uaucuuuguggaugagaua

SEQ ID NO: 432334 - RNA, 19 nt, Artificial Sequence
  Description of Artificial Sequence: Synthetic oligonucleotide
  Antisense Strand to SEQ ID NO: 432333
uaucucauccacaaagaua

SEQ ID NO: 432335 - RNA, 19 nt, Artificial Sequence
  Description of Artificial Sequence: Synthetic oligonucleotide
  Sense strand starting at position 139 of SEQ ID NO: 316684
accugaaauccuugcugau

SEQ ID NO: 432336 - RNA, 19 nt, Artificial Sequence
  Description of Artificial Sequence: Synthetic oligonucleotide
  Antisense Strand to SEQ ID NO: 432335
aucagcaaggauuucaggu

SEQ ID NO: 432337 - RNA, 19 nt, Artificial Sequence
  Description of Artificial Sequence: Synthetic oligonucleotide
  Sense strand starting at position 141 of SEQ ID NO: 316684
cugaaauccuugcugauaa

SEQ ID NO: 432338 - RNA, 19 nt, Artificial Sequence
  Description of Artificial Sequence: Synthetic oligonucleotide
  Antisense Strand to SEQ ID NO: 432337
uuaucagcaaggauuucag

SEQ ID NO: 432339 - RNA, 19 nt, Artificial Sequence
  Description of Artificial Sequence: Synthetic oligonucleotide
  Sense strand starting at position 148 of SEQ ID NO: 316684
ccuugcugauaauauauga

SEQ ID NO: 432340 - RNA, 19 nt, Artificial Sequence
  Description of Artificial Sequence: Synthetic oligonucleotide
  Antisense Strand to SEQ ID NO: 432339
ucauauauuaucagcaagg

SEQ ID NO: 432341 - RNA, 19 nt, Artificial Sequence
  Description of Artificial Sequence: Synthetic oligonucleotide
  Sense strand starting at position 155 of SEQ ID NO: 316684
gauaauauaugauggugau

SEQ ID NO: 432342 - RNA, 19 nt, Artificial Sequence
  Description of Artificial Sequence: Synthetic oligonucleotide
  Antisense Strand to SEQ ID NO: 432341
aucaccaucauauauuauc

SEQ ID NO: 432343 - RNA, 19 nt, Artificial Sequence
  Description of Artificial Sequence: Synthetic oligonucleotide
  Sense strand starting at position 158 of SEQ ID NO: 316684
aauauaugauggugauugu

SEQ ID NO: 432344 - RNA, 19 nt, Artificial Sequence
  Description of Artificial Sequence: Synthetic oligonucleotide
  Antisense Strand to SEQ ID NO: 432343
acaaucaccaucauauauu

SEQ ID NO: 432345 - RNA, 19 nt, Artificial Sequence
  Description of Artificial Sequence: Synthetic oligonucleotide
  Sense strand starting at position 159 of SEQ ID NO: 316684
auauaugauggugauuguu

SEQ ID NO: 432346 - RNA, 19 nt, Artificial Sequence
  Description of Artificial Sequence: Synthetic oligonucleotide
  Antisense Strand to SEQ ID NO: 432345
aacaaucaccaucauauau

SEQ ID NO: 432347 - RNA, 19 nt, Artificial Sequence
  Description of Artificial Sequence: Synthetic oligonucleotide
  Sense strand starting at position 179 of SEQ ID NO: 316684
ccaggucuuagcuacgcaa

SEQ ID NO: 432348 - RNA, 19 nt, Artificial Sequence
  Description of Artificial Sequence: Synthetic oligonucleotide
  Antisense Strand to SEQ ID NO: 432347
uugcguagcuaagaccugg

SEQ ID NO: 432349 - RNA, 19 nt, Artificial Sequence
  Description of Artificial Sequence: Synthetic oligonucleotide
  Sense strand starting at position 203 of SEQ ID NO: 316684
agcacucugcaggaacaau

SEQ ID NO: 432350 - RNA, 19 nt, Artificial Sequence
  Description of Artificial Sequence: Synthetic oligonucleotide
  Antisense Strand to SEQ ID NO: 432349
auuguuccugcagagugcu

SEQ ID NO: 432351 - RNA, 19 nt, Artificial Sequence
  Description of Artificial Sequence: Synthetic oligonucleotide
  Sense strand starting at position 284 of SEQ ID NO: 316684
guuaguuacuaacuaggga

SEQ ID NO: 432352 - RNA, 19 nt, Artificial Sequence
  Description of Artificial Sequence: Synthetic oligonucleotide
  Antisense Strand to SEQ ID NO: 432351
ucccuaguuaguaacuaac

SEQ ID NO: 432353 - RNA, 19 nt, Artificial Sequence
  Description of Artificial Sequence: Synthetic oligonucleotide
  Sense strand starting at position 288 of SEQ ID NO: 316684
guuacuaacuagggaagau

SEQ ID NO: 432354 - RNA, 19 nt, Artificial Sequence
  Description of Artificial Sequence: Synthetic oligonucleotide
  Antisense Strand to SEQ ID NO: 432353
aucuucccuaguuaguaac

SEQ ID NO: 432355 - RNA, 19 nt, Artificial Sequence
  Description of Artificial Sequence: Synthetic oligonucleotide
  Sense strand starting at position 306 of SEQ ID NO: 316684
uuaauuaauggguggcaaa

SEQ ID NO: 432356 - RNA, 19 nt, Artificial Sequence
  Description of Artificial Sequence: Synthetic oligonucleotide
  Antisense Strand to SEQ ID NO: 432355
uuugccacccauuaauuaa

SEQ ID NO: 432357 - RNA, 19 nt, Artificial Sequence
  Description of Artificial Sequence: Synthetic oligonucleotide
  Sense strand starting at position 307 of SEQ ID NO: 316684
uaauuaauggguggcaaau

SEQ ID NO: 432358 - RNA, 19 nt, Artificial Sequence
  Description of Artificial Sequence: Synthetic oligonucleotide
  Antisense Strand to SEQ ID NO: 432357
auuugccacccauuaauua

SEQ ID NO: 432359 - RNA, 19 nt, Artificial Sequence
  Description of Artificial Sequence: Synthetic oligonucleotide
  Sense strand starting at position 576 of SEQ ID NO: 316684
ucagaaaugucuuaguuuc

SEQ ID NO: 432360 - RNA, 19 nt, Artificial Sequence
  Description of Artificial Sequence: Synthetic oligonucleotide
  Antisense Strand to SEQ ID NO: 432359
gaaacuaagacauuucuga

SEQ ID NO: 432361 - RNA, 19 nt, Artificial Sequence
  Description of Artificial Sequence: Synthetic oligonucleotide
  Sense strand starting at position 578 of SEQ ID NO: 316684
agaaaugucuuaguuucuu

SEQ ID NO: 432362 - RNA, 19 nt, Artificial Sequence
  Description of Artificial Sequence: Synthetic oligonucleotide
  Antisense Strand to SEQ ID NO: 432361
aagaaacuaagacauuucu

SEQ ID NO: 432363 - RNA, 19 nt, Artificial Sequence
  Description of Artificial Sequence: Synthetic oligonucleotide
  Sense strand starting at position 602 of SEQ ID NO: 316684
gaucauaaguuguucuaug

SEQ ID NO: 432364 - RNA, 19 nt, Artificial Sequence
  Description of Artificial Sequence: Synthetic oligonucleotide
  Antisense Strand to SEQ ID NO: 432363
cauagaacaacuuaugauc

SEQ ID NO: 432365 - RNA, 19 nt, Artificial Sequence
  Description of Artificial Sequence: Synthetic oligonucleotide
  Sense strand starting at position 603 of SEQ ID NO: 316684
aucauaaguuguucuaugu

SEQ ID NO: 432366 - RNA, 19 nt, Artificial Sequence
  Description of Artificial Sequence: Synthetic oligonucleotide
  Antisense Strand to SEQ ID NO: 432365
acauagaacaacuuaugau

SEQ ID NO: 432367 - RNA, 19 nt, Artificial Sequence
  Description of Artificial Sequence: Synthetic oligonucleotide
  Sense strand starting at position 666 of SEQ ID NO: 316684
gccaccuugugauauauuu

SEQ ID NO: 432368 - RNA, 19 nt, Artificial Sequence
  Description of Artificial Sequence: Synthetic oligonucleotide
  Antisense Strand to SEQ ID NO: 432367
aaauauaucacaagguggc

SEQ ID NO: 432369 - RNA, 19 nt, Artificial Sequence
  Description of Artificial Sequence: Synthetic oligonucleotide
  Sense strand starting at position 683 of SEQ ID NO: 316684
uugaaaugucagggugacu

SEQ ID NO: 432370 - RNA, 19 nt, Artificial Sequence
  Description of Artificial Sequence: Synthetic oligonucleotide
  Antisense Strand to SEQ ID NO: 432369
agucacccugacauuucaa

SEQ ID NO: 432371 - RNA, 19 nt, Artificial Sequence
  Description of Artificial Sequence: Synthetic oligonucleotide
  Sense strand starting at position 720 of SEQ ID NO: 316684
ucaucaauaugguugaaag

SEQ ID NO: 432372 - RNA, 19 nt, Artificial Sequence
  Description of Artificial Sequence: Synthetic oligonucleotide
  Antisense Strand to SEQ ID NO: 432371
cuuucaaccauauugauga

SEQ ID NO: 432373 - RNA, 19 nt, Artificial Sequence
  Description of Artificial Sequence: Synthetic oligonucleotide
  Sense strand starting at position 721 of SEQ ID NO: 316684
caucaauaugguugaaagc

SEQ ID NO: 432374 - RNA, 19 nt, Artificial Sequence
  Description of Artificial Sequence: Synthetic oligonucleotide
  Antisense Strand to SEQ ID NO: 432373
gcuuucaaccauauugaug

SEQ ID NO: 432375 - RNA, 19 nt, Artificial Sequence
  Description of Artificial Sequence: Synthetic oligonucleotide
  Sense strand starting at position 749 of SEQ ID NO: 316684
augggucagcacgaauaau

SEQ ID NO: 432376 - RNA, 19 nt, Artificial Sequence
  Description of Artificial Sequence: Synthetic oligonucleotide
  Antisense Strand to SEQ ID NO: 432375
auuauucgugcugacccau

SEQ ID NO: 432377 - RNA, 19 nt, Artificial Sequence
  Description of Artificial Sequence: Synthetic oligonucleotide
  Sense strand starting at position 1121 of SEQ ID NO: 316684
cuaagcucuugguuuccaa

SEQ ID NO: 432378 - RNA, 19 nt, Artificial Sequence
  Description of Artificial Sequence: Synthetic oligonucleotide
  Antisense Strand to SEQ ID NO: 432377
uuggaaaccaagagcuuag

SEQ ID NO: 432379 - RNA, 19 nt, Artificial Sequence
  Description of Artificial Sequence: Synthetic oligonucleotide
  Sense strand starting at position 2003 of SEQ ID NO: 316684
agagaaucacaacgucaga

SEQ ID NO: 432380 - RNA, 19 nt, Artificial Sequence
  Description of Artificial Sequence: Synthetic oligonucleotide
  Antisense Strand to SEQ ID NO: 432379
ucugacguugugauucucu

SEQ ID NO: 432381 - RNA, 19 nt, Artificial Sequence
  Description of Artificial Sequence: Synthetic oligonucleotide
  Sense strand starting at position 2039 of SEQ ID NO: 316684
ccaagaggcucuuuggauc

SEQ ID NO: 432382 - RNA, 19 nt, Artificial Sequence
  Description of Artificial Sequence: Synthetic oligonucleotide
  Antisense Strand to SEQ ID NO: 432381
gauccaaagagccucuugg

SEQ ID NO: 432383 - RNA, 19 nt, Artificial Sequence
  Description of Artificial Sequence: Synthetic oligonucleotide
  Sense strand starting at position 2154 of SEQ ID NO: 316684
ugcgguugcuccucaccaa

SEQ ID NO: 432384 - RNA, 19 nt, Artificial Sequence
  Description of Artificial Sequence: Synthetic oligonucleotide
  Antisense Strand to SEQ ID NO: 432383
uuggugaggagcaaccgca

SEQ ID NO: 432385 - RNA, 19 nt, Artificial Sequence
  Description of Artificial Sequence: Synthetic oligonucleotide
  Sense strand starting at position 2309 of SEQ ID NO: 316684
ccagcucuugucuugugua

SEQ ID NO: 432386 - RNA, 19 nt, Artificial Sequence
  Description of Artificial Sequence: Synthetic oligonucleotide
  Antisense Strand to SEQ ID NO: 432385
uacacaagacaagagcugg

SEQ ID NO: 432387 - RNA, 19 nt, Artificial Sequence
  Description of Artificial Sequence: Synthetic oligonucleotide
  Sense strand starting at position 2573 of SEQ ID NO: 316684
ggcaaagagucugugggua

SEQ ID NO: 432388 - RNA, 19 nt, Artificial Sequence
  Description of Artificial Sequence: Synthetic oligonucleotide
  Antisense Strand to SEQ ID NO: 432387
uacccacagacucuuugcc

SEQ ID NO: 432389 - RNA, 19 nt, Artificial Sequence
  Description of Artificial Sequence: Synthetic oligonucleotide
  Sense strand starting at position 2617 of SEQ ID NO: 316684
uuguauguguauuuacaca

SEQ ID NO: 432390 - RNA, 19 nt, Artificial Sequence
  Description of Artificial Sequence: Synthetic oligonucleotide
  Antisense Strand to SEQ ID NO: 432389
uguguaaauacacauacaa

SEQ ID NO: 432391 - RNA, 19 nt, Artificial Sequence
  Description of Artificial Sequence: Synthetic oligonucleotide
  Sense strand starting at position 2639 of SEQ ID NO: 316684
auauauguuucucuaggca

SEQ ID NO: 432392 - RNA, 19 nt, Artificial Sequence
  Description of Artificial Sequence: Synthetic oligonucleotide
  Antisense Strand to SEQ ID NO: 432391
ugccuagagaaacauauau

SEQ ID NO: 432393 - RNA, 19 nt, Artificial Sequence
  Description of Artificial Sequence: Synthetic oligonucleotide
  Sense strand starting at position 2763 of SEQ ID NO: 316684
caauuuacuugcuggguua

SEQ ID NO: 432394 - RNA, 19 nt, Artificial Sequence
  Description of Artificial Sequence: Synthetic oligonucleotide
  Antisense Strand to SEQ ID NO: 432393
uaacccagcaaguaaauug

SEQ ID NO: 432395 - RNA, 19 nt, Artificial Sequence
  Description of Artificial Sequence: Synthetic oligonucleotide
  Sense strand starting at position 2795 of SEQ ID NO: 316684
cugguuguuccaugaacug

SEQ ID NO: 432396 - RNA, 19 nt, Artificial Sequence
  Description of Artificial Sequence: Synthetic oligonucleotide
  Antisense Strand to SEQ ID NO: 432395
caguucauggaacaaccag

SEQ ID NO: 432397 - RNA, 19 nt, Artificial Sequence
  Description of Artificial Sequence: Synthetic oligonucleotide
  Sense strand starting at position 2998 of SEQ ID NO: 316684
uuaguucugcccugugguu

SEQ ID NO: 432398 - RNA, 19 nt, Artificial Sequence
  Description of Artificial Sequence: Synthetic oligonucleotide
  Antisense Strand to SEQ ID NO: 432397
aaccacagggcagaacuaa

SEQ ID NO: 432399 - RNA, 19 nt, Artificial Sequence
  Description of Artificial Sequence: Synthetic oligonucleotide
  Sense strand starting at position 3146 of SEQ ID NO: 316684
ugaccugaacacugaucua

SEQ ID NO: 432400 - RNA, 19 nt, Artificial Sequence
  Description of Artificial Sequence: Synthetic oligonucleotide
  Antisense Strand to SEQ ID NO: 432399
uagaucaguguucagguca

SEQ ID NO: 432401 - RNA, 19 nt, Artificial Sequence
  Description of Artificial Sequence: Synthetic oligonucleotide
  Sense strand starting at position 3353 of SEQ ID NO: 316684
ccaauuacucauuguaagg

SEQ ID NO: 432402 - RNA, 19 nt, Artificial Sequence
  Description of Artificial Sequence: Synthetic oligonucleotide
  Antisense Strand to SEQ ID NO: 432401
ccuuacaaugaguaauugg

SEQ ID NO: 432403 - RNA, 19 nt, Artificial Sequence
  Description of Artificial Sequence: Synthetic oligonucleotide
  Sense strand starting at position 3383 of SEQ ID NO: 316684
auaguauucuuacugccuu

SEQ ID NO: 432404 - RNA, 19 nt, Artificial Sequence
  Description of Artificial Sequence: Synthetic oligonucleotide
  Antisense Strand to SEQ ID NO: 432403
aaggcaguaagaauacuau

SEQ ID NO: 432405 - RNA, 19 nt, Artificial Sequence
  Description of Artificial Sequence: Synthetic oligonucleotide
  Sense strand starting at position 3473 of SEQ ID NO: 316684
cuaacauuaggcuaagcaa

SEQ ID NO: 432406 - RNA, 19 nt, Artificial Sequence
  Description of Artificial Sequence: Synthetic oligonucleotide
  Antisense Strand to SEQ ID NO: 432405
uugcuuagccuaauguuag

SEQ ID NO: 432407 - RNA, 19 nt, Artificial Sequence
  Description of Artificial Sequence: Synthetic oligonucleotide
  Sense strand starting at position 8 of SEQ ID NO: 316685
gaaacuaaauguguaugau

SEQ ID NO: 432408 - RNA, 19 nt, Artificial Sequence
  Description of Artificial Sequence: Synthetic oligonucleotide
  Antisense Strand to SEQ ID NO: 432407
aucauacacauuuaguuuc

SEQ ID NO: 432409 - RNA, 19 nt, Artificial Sequence
  Description of Artificial Sequence: Synthetic oligonucleotide
  Sense strand starting at position 442 of SEQ ID NO: 316685
uguaucuauugcuuggaga

SEQ ID NO: 432410 - RNA, 19 nt, Artificial Sequence
  Description of Artificial Sequence: Synthetic oligonucleotide
  Antisense Strand to SEQ ID NO: 432409
ucuccaagcaauagauaca

SEQ ID NO: 432411 - RNA, 19 nt, Artificial Sequence
  Description of Artificial Sequence: Synthetic oligonucleotide
  Sense strand starting at position 443 of SEQ ID NO: 316685
guaucuauugcuuggagaa

SEQ ID NO: 432412 - RNA, 19 nt, Artificial Sequence
  Description of Artificial Sequence: Synthetic oligonucleotide
  Antisense Strand to SEQ ID NO: 432411
uucuccaagcaauagauac

SEQ ID NO: 432413 - RNA, 19 nt, Artificial Sequence
  Description of Artificial Sequence: Synthetic oligonucleotide
  Sense strand starting at position 516 of SEQ ID NO: 316685
ugaggauaagauugaugcu

SEQ ID NO: 432414 - RNA, 19 nt, Artificial Sequence
  Description of Artificial Sequence: Synthetic oligonucleotide
  Antisense Strand to SEQ ID NO: 432413
agcaucaaucuuauccuca

SEQ ID NO: 432415 - RNA, 19 nt, Artificial Sequence
  Description of Artificial Sequence: Synthetic oligonucleotide
  Sense strand starting at position 953 of SEQ ID NO: 316685
agauuaaggcccugaaaca

SEQ ID NO: 432416 - RNA, 19 nt, Artificial Sequence
  Description of Artificial Sequence: Synthetic oligonucleotide
  Antisense Strand to SEQ ID NO: 432415
uguuucagggccuuaaucu

SEQ ID NO: 432417 - RNA, 19 nt, Artificial Sequence
  Description of Artificial Sequence: Synthetic oligonucleotide
  Sense strand starting at position 1075 of SEQ ID NO: 316685
cuuaccauauuugaguauu

SEQ ID NO: 432418 - RNA, 19 nt, Artificial Sequence
  Description of Artificial Sequence: Synthetic oligonucleotide
  Antisense Strand to SEQ ID NO: 432417
aauacucaaauaugguaag

SEQ ID NO: 432419 - RNA, 19 nt, Artificial Sequence
  Description of Artificial Sequence: Synthetic oligonucleotide
  Sense strand starting at position 1152 of SEQ ID NO: 316685
cgucucucugacuauaaca

SEQ ID NO: 432420 - RNA, 19 nt, Artificial Sequence
  Description of Artificial Sequence: Synthetic oligonucleotide
  Antisense Strand to SEQ ID NO: 432419
uguuauagucagagagacg

SEQ ID NO: 432421 - RNA, 19 nt, Artificial Sequence
  Description of Artificial Sequence: Synthetic oligonucleotide
  Sense strand starting at position 1170 of SEQ ID NO: 316685
auuccuucuuugucacaga

SEQ ID NO: 432422 - RNA, 19 nt, Artificial Sequence
  Description of Artificial Sequence: Synthetic oligonucleotide
  Antisense Strand to SEQ ID NO: 432421
ucugugacaaagaaggaau

SEQ ID NO: 432423 - RNA, 19 nt, Artificial Sequence
  Description of Artificial Sequence: Synthetic oligonucleotide
  Sense strand starting at position 1180 of SEQ ID NO: 316685
ugucacagacacgauuaua

SEQ ID NO: 432424 - RNA, 19 nt, Artificial Sequence
  Description of Artificial Sequence: Synthetic oligonucleotide
  Antisense Strand to SEQ ID NO: 432423
uauaaucgugucugugaca

SEQ ID NO: 432425 - RNA, 19 nt, Artificial Sequence
  Description of Artificial Sequence: Synthetic oligonucleotide
  Sense strand starting at position 1183 of SEQ ID NO: 316685
cacagacacgauuauaguu

SEQ ID NO: 432426 - RNA, 19 nt, Artificial Sequence
  Description of Artificial Sequence: Synthetic oligonucleotide
  Antisense Strand to SEQ ID NO: 432425
aacuauaaucgugucugug

SEQ ID NO: 432427 - RNA, 19 nt, Artificial Sequence
  Description of Artificial Sequence: Synthetic oligonucleotide
  Sense strand starting at position 1236 of SEQ ID NO: 316685
ucaguaccauuaccuagau

SEQ ID NO: 432428 - RNA, 19 nt, Artificial Sequence
  Description of Artificial Sequence: Synthetic oligonucleotide
  Antisense Strand to SEQ ID NO: 432427
aucuagguaaugguacuga

SEQ ID NO: 432429 - RNA, 19 nt, Artificial Sequence
  Description of Artificial Sequence: Synthetic oligonucleotide
  Sense strand starting at position 1252 of SEQ ID NO: 316685
gauauaucucaugguguaa

SEQ ID NO: 432430 - RNA, 19 nt, Artificial Sequence
  Description of Artificial Sequence: Synthetic oligonucleotide
  Antisense Strand to SEQ ID NO: 432429
uuacaccaugagauauauc

SEQ ID NO: 432431 - RNA, 19 nt, Artificial Sequence
  Description of Artificial Sequence: Synthetic oligonucleotide
  Sense strand starting at position 1343 of SEQ ID NO: 316685
acuucuuaaguuggguaga

SEQ ID NO: 432432 - RNA, 19 nt, Artificial Sequence
  Description of Artificial Sequence: Synthetic oligonucleotide
  Antisense Strand to SEQ ID NO: 432431
ucuacccaacuuaagaagu

SEQ ID NO: 432433 - RNA, 19 nt, Artificial Sequence
  Description of Artificial Sequence: Synthetic oligonucleotide
  Sense strand starting at position 1345 of SEQ ID NO: 316685
uucuuaaguuggguagaga

SEQ ID NO: 432434 - RNA, 19 nt, Artificial Sequence
  Description of Artificial Sequence: Synthetic oligonucleotide
  Antisense Strand to SEQ ID NO: 432433
ucucuacccaacuuaagaa

SEQ ID NO: 432435 - RNA, 19 nt, Artificial Sequence
  Description of Artificial Sequence: Synthetic oligonucleotide
  Sense strand starting at position 1437 of SEQ ID NO: 316685
uauuaagaguaauucggaa

SEQ ID NO: 432436 - RNA, 19 nt, Artificial Sequence
  Description of Artificial Sequence: Synthetic oligonucleotide
  Antisense Strand to SEQ ID NO: 432435
uuccgaauuacucuuaaua

SEQ ID NO: 432437 - RNA, 19 nt, Artificial Sequence
  Description of Artificial Sequence: Synthetic oligonucleotide
  Sense strand starting at position 1439 of SEQ ID NO: 316685
uuaagaguaauucggaauu

SEQ ID NO: 432438 - RNA, 19 nt, Artificial Sequence
  Description of Artificial Sequence: Synthetic oligonucleotide
  Antisense Strand to SEQ ID NO: 432437
aauuccgaauuacucuuaa

SEQ ID NO: 432439 - RNA, 19 nt, Artificial Sequence
  Description of Artificial Sequence: Synthetic oligonucleotide
  Sense strand starting at position 2228 of SEQ ID NO: 316685
ggaaguacacguuagcaua

SEQ ID NO: 432440 - RNA, 19 nt, Artificial Sequence
  Description of Artificial Sequence: Synthetic oligonucleotide
  Antisense Strand to SEQ ID NO: 432439
uaugcuaacguguacuucc

SEQ ID NO: 432441 - RNA, 19 nt, Artificial Sequence
  Description of Artificial Sequence: Synthetic oligonucleotide
  Sense strand starting at position 2358 of SEQ ID NO: 316685
gcuagaguuacucacaggu

SEQ ID NO: 432442 - RNA, 19 nt, Artificial Sequence
  Description of Artificial Sequence: Synthetic oligonucleotide
  Antisense Strand to SEQ ID NO: 432441
accugugaguaacucuagc

SEQ ID NO: 432443 - RNA, 19 nt, Artificial Sequence
  Description of Artificial Sequence: Synthetic oligonucleotide
  Sense strand starting at position 2448 of SEQ ID NO: 316685
cagugauuacugugcacac

SEQ ID NO: 432444 - RNA, 19 nt, Artificial Sequence
  Description of Artificial Sequence: Synthetic oligonucleotide
  Antisense Strand to SEQ ID NO: 432443
gugugcacaguaaucacug

SEQ ID NO: 432445 - RNA, 19 nt, Artificial Sequence
  Description of Artificial Sequence: Synthetic oligonucleotide
  Sense strand starting at position 2449 of SEQ ID NO: 316685
agugauuacugugcacacu

SEQ ID NO: 432446 - RNA, 19 nt, Artificial Sequence
  Description of Artificial Sequence: Synthetic oligonucleotide
  Antisense Strand to SEQ ID NO: 432445
agugugcacaguaaucacu

SEQ ID NO: 432447 - RNA, 19 nt, Artificial Sequence
  Description of Artificial Sequence: Synthetic oligonucleotide
  Sense strand starting at position 2484 of SEQ ID NO: 316685
ccuuuaagcguugaacauu

SEQ ID NO: 432448 - RNA, 19 nt, Artificial Sequence
  Description of Artificial Sequence: Synthetic oligonucleotide
  Antisense Strand to SEQ ID NO: 432447
aauguucaacgcuuaaagg

SEQ ID NO: 432449 - RNA, 19 nt, Artificial Sequence
  Description of Artificial Sequence: Synthetic oligonucleotide
  Sense strand starting at position 2544 of SEQ ID NO: 316685
cgcauuccugaggaaauaa

SEQ ID NO: 432450 - RNA, 19 nt, Artificial Sequence
  Description of Artificial Sequence: Synthetic oligonucleotide
  Antisense Strand to SEQ ID NO: 432449
uuauuuccucaggaaugcg

SEQ ID NO: 432451 - RNA, 19 nt, Artificial Sequence
  Description of Artificial Sequence: Synthetic oligonucleotide
  Sense strand starting at position 2571 of SEQ ID NO: 316685
augugagagucaucuggca

SEQ ID NO: 432452 - RNA, 19 nt, Artificial Sequence
  Description of Artificial Sequence: Synthetic oligonucleotide
  Antisense Strand to SEQ ID NO: 432451
ugccagaugacucucacau

SEQ ID NO: 432453 - RNA, 19 nt, Artificial Sequence
  Description of Artificial Sequence: Synthetic oligonucleotide
  Sense strand starting at position 2661 of SEQ ID NO: 316685
cugcccuugccugaaauua

SEQ ID NO: 432454 - RNA, 19 nt, Artificial Sequence
  Description of Artificial Sequence: Synthetic oligonucleotide
  Antisense Strand to SEQ ID NO: 432453
uaauuucaggcaagggcag

SEQ ID NO: 432455 - RNA, 19 nt, Artificial Sequence
  Description of Artificial Sequence: Synthetic oligonucleotide
  Sense strand starting at position 2990 of SEQ ID NO: 316685
uaagaagcucugggaaugu

SEQ ID NO: 432456 - RNA, 19 nt, Artificial Sequence
  Description of Artificial Sequence: Synthetic oligonucleotide
  Antisense Strand to SEQ ID NO: 432455
acauucccagagcuucuua

SEQ ID NO: 432457 - RNA, 19 nt, Artificial Sequence
  Description of Artificial Sequence: Synthetic oligonucleotide
  Sense strand starting at position 3021 of SEQ ID NO: 316685
guaugccuucguuaaagaa

SEQ ID NO: 432458 - RNA, 19 nt, Artificial Sequence
  Description of Artificial Sequence: Synthetic oligonucleotide
  Antisense Strand to SEQ ID NO: 432457
uucuuuaacgaaggcauac

SEQ ID NO: 432459 - RNA, 19 nt, Artificial Sequence
  Description of Artificial Sequence: Synthetic oligonucleotide
  Sense strand starting at position 3126 of SEQ ID NO: 316685
ugcauaacuucuguuggaa

SEQ ID NO: 432460 - RNA, 19 nt, Artificial Sequence
  Description of Artificial Sequence: Synthetic oligonucleotide
  Antisense Strand to SEQ ID NO: 432459
uuccaacagaaguuaugca

SEQ ID NO: 432461 - RNA, 19 nt, Artificial Sequence
  Description of Artificial Sequence: Synthetic oligonucleotide
  Sense strand starting at position 3273 of SEQ ID NO: 316685
uauagcuuggcguauugaa

SEQ ID NO: 432462 - RNA, 19 nt, Artificial Sequence
  Description of Artificial Sequence: Synthetic oligonucleotide
  Antisense Strand to SEQ ID NO: 432461
uucaauacgccaagcuaua

SEQ ID NO: 432463 - RNA, 19 nt, Artificial Sequence
  Description of Artificial Sequence: Synthetic oligonucleotide
  Sense strand starting at position 3419 of SEQ ID NO: 316685
ccucaauuguguucgaaua

SEQ ID NO: 432464 - RNA, 19 nt, Artificial Sequence
  Description of Artificial Sequence: Synthetic oligonucleotide
  Antisense Strand to SEQ ID NO: 432463
uauucgaacacaauugagg

SEQ ID NO: 432465 - RNA, 19 nt, Artificial Sequence
  Description of Artificial Sequence: Synthetic oligonucleotide
  Sense strand starting at position 3420 of SEQ ID NO: 316685
cucaauuguguucgaauau

SEQ ID NO: 432466 - RNA, 19 nt, Artificial Sequence
  Description of Artificial Sequence: Synthetic oligonucleotide
  Antisense Strand to SEQ ID NO: 432465
auauucgaacacaauugag

SEQ ID NO: 432467 - RNA, 19 nt, Artificial Sequence
  Description of Artificial Sequence: Synthetic oligonucleotide
  Sense strand starting at position 3450 of SEQ ID NO: 316685
gaauguauguaugcauaua

SEQ ID NO: 432468 - RNA, 19 nt, Artificial Sequence
  Description of Artificial Sequence: Synthetic oligonucleotide
  Antisense Strand to SEQ ID NO: 432467
uauaugcauacauacauuc

SEQ ID NO: 432469 - RNA, 19 nt, Artificial Sequence
  Description of Artificial Sequence: Synthetic oligonucleotide
  Sense strand starting at position 3590 of SEQ ID NO: 316685
cucagaaacuuugucaaug

SEQ ID NO: 432470 - RNA, 19 nt, Artificial Sequence
  Description of Artificial Sequence: Synthetic oligonucleotide
  Antisense Strand to SEQ ID NO: 432469
cauugacaaaguuucugag

SEQ ID NO: 432471 - RNA, 19 nt, Artificial Sequence
  Description of Artificial Sequence: Synthetic oligonucleotide
  Sense strand starting at position 3725 of SEQ ID NO: 316685
acggcauuugcuuguggaa

SEQ ID NO: 432472 - RNA, 19 nt, Artificial Sequence
  Description of Artificial Sequence: Synthetic oligonucleotide
  Antisense Strand to SEQ ID NO: 432471
uuccacaagcaaaugccgu

SEQ ID NO: 432473 - RNA, 19 nt, Artificial Sequence
  Description of Artificial Sequence: Synthetic oligonucleotide
  Sense strand starting at position 3770 of SEQ ID NO: 316685
aggguugugaaauggcaga

SEQ ID NO: 432474 - RNA, 19 nt, Artificial Sequence
  Description of Artificial Sequence: Synthetic oligonucleotide
  Antisense Strand to SEQ ID NO: 432473
ucugccauuucacaacccu

SEQ ID NO: 432475 - RNA, 19 nt, Artificial Sequence
  Description of Artificial Sequence: Synthetic oligonucleotide
  Sense strand starting at position 3811 of SEQ ID NO: 316685
ggaaauuuauuacaccaga

SEQ ID NO: 432476 - RNA, 19 nt, Artificial Sequence
  Description of Artificial Sequence: Synthetic oligonucleotide
  Antisense Strand to SEQ ID NO: 432475
ucugguguaauaaauuucc

SEQ ID NO: 432477 - RNA, 19 nt, Artificial Sequence
  Description of Artificial Sequence: Synthetic oligonucleotide
  Sense strand starting at position 3835 of SEQ ID NO: 316685
auggguguggcucauaacu

SEQ ID NO: 432478 - RNA, 19 nt, Artificial Sequence
  Description of Artificial Sequence: Synthetic oligonucleotide
  Antisense Strand to SEQ ID NO: 432477
aguuaugagccacacccau

SEQ ID NO: 432479 - RNA, 19 nt, Artificial Sequence
  Description of Artificial Sequence: Synthetic oligonucleotide
  Sense strand starting at position 3873 of SEQ ID NO: 316685
acugguaagguuugaggau

SEQ ID NO: 432480 - RNA, 19 nt, Artificial Sequence
  Description of Artificial Sequence: Synthetic oligonucleotide
  Antisense Strand to SEQ ID NO: 432479
auccucaaaccuuaccagu

SEQ ID NO: 432481 - RNA, 19 nt, Artificial Sequence
  Description of Artificial Sequence: Synthetic oligonucleotide
  Sense strand starting at position 3886 of SEQ ID NO: 316685
gaggauuguaccuguguga

SEQ ID NO: 432482 - RNA, 19 nt, Artificial Sequence
  Description of Artificial Sequence: Synthetic oligonucleotide
  Antisense Strand to SEQ ID NO: 432481
ucacacagguacaauccuc

SEQ ID NO: 432483 - RNA, 19 nt, Artificial Sequence
  Description of Artificial Sequence: Synthetic oligonucleotide
  Sense strand starting at position 3927 of SEQ ID NO: 316685
ucaggucaucuggguaguu

SEQ ID NO: 432484 - RNA, 19 nt, Artificial Sequence
  Description of Artificial Sequence: Synthetic oligonucleotide
  Antisense Strand to SEQ ID NO: 432483
aacuacccagaugaccuga

SEQ ID NO: 432485 - RNA, 19 nt, Artificial Sequence
  Description of Artificial Sequence: Synthetic oligonucleotide
  Sense strand starting at position 3928 of SEQ ID NO: 316685
caggucaucuggguaguuu

SEQ ID NO: 432486 - RNA, 19 nt, Artificial Sequence
  Description of Artificial Sequence: Synthetic oligonucleotide
  Antisense Strand to SEQ ID NO: 432485
aaacuacccagaugaccug

SEQ ID NO: 432487 - RNA, 19 nt, Artificial Sequence
  Description of Artificial Sequence: Synthetic oligonucleotide
  Sense strand starting at position 65 of SEQ ID NO: 316686
agccaaauaugagucuaug

SEQ ID NO: 432488 - RNA, 19 nt, Artificial Sequence
  Description of Artificial Sequence: Synthetic oligonucleotide
  Antisense Strand to SEQ ID NO: 432487
cauagacucauauuuggcu

SEQ ID NO: 432489 - RNA, 19 nt, Artificial Sequence
  Description of Artificial Sequence: Synthetic oligonucleotide
  Sense strand starting at position 71 of SEQ ID NO: 316686
auaugagucuauguagucu

SEQ ID NO: 432490 - RNA, 19 nt, Artificial Sequence
  Description of Artificial Sequence: Synthetic oligonucleotide
  Antisense Strand to SEQ ID NO: 432489
agacuacauagacucauau

SEQ ID NO: 432491 - RNA, 19 nt, Artificial Sequence
  Description of Artificial Sequence: Synthetic oligonucleotide
  Sense strand starting at position 75 of SEQ ID NO: 316686
gagucuauguagucugugu

SEQ ID NO: 432492 - RNA, 19 nt, Artificial Sequence
  Description of Artificial Sequence: Synthetic oligonucleotide
  Antisense Strand to SEQ ID NO: 432491
acacagacuacauagacuc

SEQ ID NO: 432493 - RNA, 19 nt, Artificial Sequence
  Description of Artificial Sequence: Synthetic oligonucleotide
  Sense strand starting at position 77 of SEQ ID NO: 316686
gucuauguagucuguguuu

SEQ ID NO: 432494 - RNA, 19 nt, Artificial Sequence
  Description of Artificial Sequence: Synthetic oligonucleotide
  Antisense Strand to SEQ ID NO: 432493
aaacacagacuacauagac

SEQ ID NO: 432495 - RNA, 19 nt, Artificial Sequence
  Description of Artificial Sequence: Synthetic oligonucleotide
  Sense strand starting at position 113 of SEQ ID NO: 316686
cuguuaauccgugguggcu

SEQ ID NO: 432496 - RNA, 19 nt, Artificial Sequence
  Description of Artificial Sequence: Synthetic oligonucleotide
  Antisense Strand to SEQ ID NO: 432495
agccaccacggauuaacag

SEQ ID NO: 432497 - RNA, 19 nt, Artificial Sequence
  Description of Artificial Sequence: Synthetic oligonucleotide
  Sense strand starting at position 419 of SEQ ID NO: 316686
acacaacuguguuaaucau

SEQ ID NO: 432498 - RNA, 19 nt, Artificial Sequence
  Description of Artificial Sequence: Synthetic oligonucleotide
  Antisense Strand to SEQ ID NO: 432497
augauuaacacaguugugu

SEQ ID NO: 432499 - RNA, 19 nt, Artificial Sequence
  Description of Artificial Sequence: Synthetic oligonucleotide
  Sense strand starting at position 532 of SEQ ID NO: 316686
ccaaguuucuaagaccugu

SEQ ID NO: 432500 - RNA, 19 nt, Artificial Sequence
  Description of Artificial Sequence: Synthetic oligonucleotide
  Antisense Strand to SEQ ID NO: 432499
acaggucuuagaaacuugg

SEQ ID NO: 432501 - RNA, 19 nt, Artificial Sequence
  Description of Artificial Sequence: Synthetic oligonucleotide
  Sense strand starting at position 536 of SEQ ID NO: 316686
guuucuaagaccugucagu

SEQ ID NO: 432502 - RNA, 19 nt, Artificial Sequence
  Description of Artificial Sequence: Synthetic oligonucleotide
  Antisense Strand to SEQ ID NO: 432501
acugacaggucuuagaaac

SEQ ID NO: 432503 - RNA, 19 nt, Artificial Sequence
  Description of Artificial Sequence: Synthetic oligonucleotide
  Sense strand starting at position 579 of SEQ ID NO: 316686
ugguacugguggucugaaa

SEQ ID NO: 432504 - RNA, 19 nt, Artificial Sequence
  Description of Artificial Sequence: Synthetic oligonucleotide
  Antisense Strand to SEQ ID NO: 432503
uuucagaccaccaguacca

SEQ ID NO: 432505 - RNA, 19 nt, Artificial Sequence
  Description of Artificial Sequence: Synthetic oligonucleotide
  Sense strand starting at position 737 of SEQ ID NO: 316686
uaguguugcgcgcuggaca

SEQ ID NO: 432506 - RNA, 19 nt, Artificial Sequence
  Description of Artificial Sequence: Synthetic oligonucleotide
  Antisense Strand to SEQ ID NO: 432505
uguccagcgcgcaacacua

SEQ ID NO: 432507 - RNA, 19 nt, Artificial Sequence
  Description of Artificial Sequence: Synthetic oligonucleotide
  Sense strand starting at position 744 of SEQ ID NO: 316686
gcgcgcuggacagaucuaa

SEQ ID NO: 432508 - RNA, 19 nt, Artificial Sequence
  Description of Artificial Sequence: Synthetic oligonucleotide
  Antisense Strand to SEQ ID NO: 432507
uuagaucuguccagcgcgc

SEQ ID NO: 432509 - RNA, 19 nt, Artificial Sequence
  Description of Artificial Sequence: Synthetic oligonucleotide
  Sense strand starting at position 802 of SEQ ID NO: 316686
cgagaucucuugucccuca

SEQ ID NO: 432510 - RNA, 19 nt, Artificial Sequence
  Description of Artificial Sequence: Synthetic oligonucleotide
  Antisense Strand to SEQ ID NO: 432509
ugagggacaagagaucucg

SEQ ID NO: 432511 - RNA, 19 nt, Artificial Sequence
  Description of Artificial Sequence: Synthetic oligonucleotide
  Sense strand starting at position 937 of SEQ ID NO: 316686
guaaauagcccucaguuga

SEQ ID NO: 432512 - RNA, 19 nt, Artificial Sequence
  Description of Artificial Sequence: Synthetic oligonucleotide
  Antisense Strand to SEQ ID NO: 432511
ucaacugagggcuauuuac

SEQ ID NO: 432513 - RNA, 19 nt, Artificial Sequence
  Description of Artificial Sequence: Synthetic oligonucleotide
  Sense strand starting at position 944 of SEQ ID NO: 316686
gcccucaguugagauccau

SEQ ID NO: 432514 - RNA, 19 nt, Artificial Sequence
  Description of Artificial Sequence: Synthetic oligonucleotide
  Antisense Strand to SEQ ID NO: 432513
auggaucucaacugagggc

SEQ ID NO: 432515 - RNA, 19 nt, Artificial Sequence
  Description of Artificial Sequence: Synthetic oligonucleotide
  Sense strand starting at position 1659 of SEQ ID NO: 316686
gguauaucauugcugcaga

SEQ ID NO: 432516 - RNA, 19 nt, Artificial Sequence
  Description of Artificial Sequence: Synthetic oligonucleotide
  Antisense Strand to SEQ ID NO: 432515
ucugcagcaaugauauacc

SEQ ID NO: 432517 - RNA, 19 nt, Artificial Sequence
  Description of Artificial Sequence: Synthetic oligonucleotide
  Sense strand starting at position 1660 of SEQ ID NO: 316686
guauaucauugcugcagaa

SEQ ID NO: 432518 - RNA, 19 nt, Artificial Sequence
  Description of Artificial Sequence: Synthetic oligonucleotide
  Antisense Strand to SEQ ID NO: 432517
uucugcagcaaugauauac

SEQ ID NO: 432519 - RNA, 19 nt, Artificial Sequence
  Description of Artificial Sequence: Synthetic oligonucleotide
  Sense strand starting at position 2004 of SEQ ID NO: 316686
gaacgugaauggguuccau

SEQ ID NO: 432520 - RNA, 19 nt, Artificial Sequence
  Description of Artificial Sequence: Synthetic oligonucleotide
  Antisense Strand to SEQ ID NO: 432519
auggaacccauucacguuc

SEQ ID NO: 432521 - RNA, 19 nt, Artificial Sequence
  Description of Artificial Sequence: Synthetic oligonucleotide
  Sense strand starting at position 2008 of SEQ ID NO: 316686
gugaauggguuccauuguu

SEQ ID NO: 432522 - RNA, 19 nt, Artificial Sequence
  Description of Artificial Sequence: Synthetic oligonucleotide
  Antisense Strand to SEQ ID NO: 432521
aacaauggaacccauucac

SEQ ID NO: 432523 - RNA, 19 nt, Artificial Sequence
  Description of Artificial Sequence: Synthetic oligonucleotide
  Sense strand starting at position 2370 of SEQ ID NO: 316686
gaucacagcugcuaguaau

SEQ ID NO: 432524 - RNA, 19 nt, Artificial Sequence
  Description of Artificial Sequence: Synthetic oligonucleotide
  Antisense Strand to SEQ ID NO: 432523
auuacuagcagcugugauc

SEQ ID NO: 432525 - RNA, 19 nt, Artificial Sequence
  Description of Artificial Sequence: Synthetic oligonucleotide
  Sense strand starting at position 2380 of SEQ ID NO: 316686
gcuaguaaugcucaguauu

SEQ ID NO: 432526 - RNA, 19 nt, Artificial Sequence
  Description of Artificial Sequence: Synthetic oligonucleotide
  Antisense Strand to SEQ ID NO: 432525
aauacugagcauuacuagc

SEQ ID NO: 432527 - RNA, 19 nt, Artificial Sequence
  Description of Artificial Sequence: Synthetic oligonucleotide
  Sense strand starting at position 2383 of SEQ ID NO: 316686
aguaaugcucaguauuaaa

SEQ ID NO: 432528 - RNA, 19 nt, Artificial Sequence
  Description of Artificial Sequence: Synthetic oligonucleotide
  Antisense Strand to SEQ ID NO: 432527
uuuaauacugagcauuacu

SEQ ID NO: 432529 - RNA, 19 nt, Artificial Sequence
  Description of Artificial Sequence: Synthetic oligonucleotide
  Sense strand starting at position 2413 of SEQ ID NO: 316686
auagucuagucacuucuaa

SEQ ID NO: 432530 - RNA, 19 nt, Artificial Sequence
  Description of Artificial Sequence: Synthetic oligonucleotide
  Antisense Strand to SEQ ID NO: 432529
uuagaagugacuagacuau

SEQ ID NO: 432531 - RNA, 19 nt, Artificial Sequence
  Description of Artificial Sequence: Synthetic oligonucleotide
  Sense strand starting at position 2477 of SEQ ID NO: 316686
gugguauuguuucucaaac

SEQ ID NO: 432532 - RNA, 19 nt, Artificial Sequence
  Description of Artificial Sequence: Synthetic oligonucleotide
  Antisense Strand to SEQ ID NO: 432531
guuugagaaacaauaccac

SEQ ID NO: 432533 - RNA, 19 nt, Artificial Sequence
  Description of Artificial Sequence: Synthetic oligonucleotide
  Sense strand starting at position 2478 of SEQ ID NO: 316686
ugguauuguuucucaaacu

SEQ ID NO: 432534 - RNA, 19 nt, Artificial Sequence
  Description of Artificial Sequence: Synthetic oligonucleotide
  Antisense Strand to SEQ ID NO: 432533
aguuugagaaacaauacca

SEQ ID NO: 432535 - RNA, 19 nt, Artificial Sequence
  Description of Artificial Sequence: Synthetic oligonucleotide
  Sense strand starting at position 2479 of SEQ ID NO: 316686
gguauuguuucucaaacug

SEQ ID NO: 432536 - RNA, 19 nt, Artificial Sequence
  Description of Artificial Sequence: Synthetic oligonucleotide
  Antisense Strand to SEQ ID NO: 432535
caguuugagaaacaauacc

SEQ ID NO: 432537 - RNA, 19 nt, Artificial Sequence
  Description of Artificial Sequence: Synthetic oligonucleotide
  Sense strand starting at position 2500 of SEQ ID NO: 316686
uaagaaauaucuggagggu

SEQ ID NO: 432538 - RNA, 19 nt, Artificial Sequence
  Description of Artificial Sequence: Synthetic oligonucleotide
  Antisense Strand to SEQ ID NO: 432537
acccuccagauauuucuua

SEQ ID NO: 432539 - RNA, 19 nt, Artificial Sequence
  Description of Artificial Sequence: Synthetic oligonucleotide
  Sense strand starting at position 3214 of SEQ ID NO: 316686
auagacuuguaaggaacaa

SEQ ID NO: 432540 - RNA, 19 nt, Artificial Sequence
  Description of Artificial Sequence: Synthetic oligonucleotide
  Antisense Strand to SEQ ID NO: 432539
uuguuccuuacaagucuau

SEQ ID NO: 432541 - RNA, 19 nt, Artificial Sequence
  Description of Artificial Sequence: Synthetic oligonucleotide
  Sense strand starting at position 3245 of SEQ ID NO: 316686
uccagaaggcuugagugau

SEQ ID NO: 432542 - RNA, 19 nt, Artificial Sequence
  Description of Artificial Sequence: Synthetic oligonucleotide
  Antisense Strand to SEQ ID NO: 432541
aucacucaagccuucugga

SEQ ID NO: 432543 - RNA, 19 nt, Artificial Sequence
  Description of Artificial Sequence: Synthetic oligonucleotide
  Sense strand starting at position 3249 of SEQ ID NO: 316686
gaaggcuugagugaugcaa

SEQ ID NO: 432544 - RNA, 19 nt, Artificial Sequence
  Description of Artificial Sequence: Synthetic oligonucleotide
  Antisense Strand to SEQ ID NO: 432543
uugcaucacucaagccuuc

SEQ ID NO: 432545 - RNA, 19 nt, Artificial Sequence
  Description of Artificial Sequence: Synthetic oligonucleotide
  Sense strand starting at position 3251 of SEQ ID NO: 316686
aggcuugagugaugcaaug

SEQ ID NO: 432546 - RNA, 19 nt, Artificial Sequence
  Description of Artificial Sequence: Synthetic oligonucleotide
  Antisense Strand to SEQ ID NO: 432545
cauugcaucacucaagccu

SEQ ID NO: 432547 - RNA, 19 nt, Artificial Sequence
  Description of Artificial Sequence: Synthetic oligonucleotide
  Sense strand starting at position 3253 of SEQ ID NO: 316686
gcuugagugaugcaaugau

SEQ ID NO: 432548 - RNA, 19 nt, Artificial Sequence
  Description of Artificial Sequence: Synthetic oligonucleotide
  Antisense Strand to SEQ ID NO: 432547
aucauugcaucacucaagc

SEQ ID NO: 432549 - RNA, 19 nt, Artificial Sequence
  Description of Artificial Sequence: Synthetic oligonucleotide
  Sense strand starting at position 3276 of SEQ ID NO: 316686
aagguuggcuguucccaau

SEQ ID NO: 432550 - RNA, 19 nt, Artificial Sequence
  Description of Artificial Sequence: Synthetic oligonucleotide
  Antisense Strand to SEQ ID NO: 432549
auugggaacagccaaccuu

SEQ ID NO: 432551 - RNA, 19 nt, Artificial Sequence
  Description of Artificial Sequence: Synthetic oligonucleotide
  Sense strand starting at position 3282 of SEQ ID NO: 316686
ggcuguucccaauagcauu

SEQ ID NO: 432552 - RNA, 19 nt, Artificial Sequence
  Description of Artificial Sequence: Synthetic oligonucleotide
  Antisense Strand to SEQ ID NO: 432551
aaugcuauugggaacagcc

SEQ ID NO: 432553 - RNA, 19 nt, Artificial Sequence
  Description of Artificial Sequence: Synthetic oligonucleotide
  Sense strand starting at position 3288 of SEQ ID NO: 316686
ucccaauagcauuggaauu

SEQ ID NO: 432554 - RNA, 19 nt, Artificial Sequence
  Description of Artificial Sequence: Synthetic oligonucleotide
  Antisense Strand to SEQ ID NO: 432553
aauuccaaugcuauuggga

SEQ ID NO: 432555 - RNA, 19 nt, Artificial Sequence
  Description of Artificial Sequence: Synthetic oligonucleotide
  Sense strand starting at position 3299 of SEQ ID NO: 316686
uuggaauugcuaugcuuaa

SEQ ID NO: 432556 - RNA, 19 nt, Artificial Sequence
  Description of Artificial Sequence: Synthetic oligonucleotide
  Antisense Strand to SEQ ID NO: 432555
uuaagcauagcaauuccaa

SEQ ID NO: 432557 - RNA, 19 nt, Artificial Sequence
  Description of Artificial Sequence: Synthetic oligonucleotide
  Sense strand starting at position 3300 of SEQ ID NO: 316686
uggaauugcuaugcuuaau

SEQ ID NO: 432558 - RNA, 19 nt, Artificial Sequence
  Description of Artificial Sequence: Synthetic oligonucleotide
  Antisense Strand to SEQ ID NO: 432557
auuaagcauagcaauucca

SEQ ID NO: 432559 - RNA, 19 nt, Artificial Sequence
  Description of Artificial Sequence: Synthetic oligonucleotide
  Sense strand starting at position 3330 of SEQ ID NO: 316686
agguuuacuucuguuuaua

SEQ ID NO: 432560 - RNA, 19 nt, Artificial Sequence
  Description of Artificial Sequence: Synthetic oligonucleotide
  Antisense Strand to SEQ ID NO: 432559
uauaaacagaaguaaaccu

SEQ ID NO: 432561 - RNA, 19 nt, Artificial Sequence
  Description of Artificial Sequence: Synthetic oligonucleotide
  Sense strand starting at position 3332 of SEQ ID NO: 316686
guuuacuucuguuuauaca

SEQ ID NO: 432562 - RNA, 19 nt, Artificial Sequence
  Description of Artificial Sequence: Synthetic oligonucleotide
  Antisense Strand to SEQ ID NO: 432561
uguauaaacagaaguaaac

SEQ ID NO: 432563 - RNA, 19 nt, Artificial Sequence
  Description of Artificial Sequence: Synthetic oligonucleotide
  Sense strand starting at position 15 of SEQ ID NO: 316687
gcauccaaauagucugauu

SEQ ID NO: 432564 - RNA, 19 nt, Artificial Sequence
  Description of Artificial Sequence: Synthetic oligonucleotide
  Antisense Strand to SEQ ID NO: 432563
aaucagacuauuuggaugc

SEQ ID NO: 432565 - RNA, 19 nt, Artificial Sequence
  Description of Artificial Sequence: Synthetic oligonucleotide
  Sense strand starting at position 28 of SEQ ID NO: 316687
cugauuucuguugguuagu

SEQ ID NO: 432566 - RNA, 19 nt, Artificial Sequence
  Description of Artificial Sequence: Synthetic oligonucleotide
  Antisense Strand to SEQ ID NO: 432565
acuaaccaacagaaaucag

SEQ ID NO: 432567 - RNA, 19 nt, Artificial Sequence
  Description of Artificial Sequence: Synthetic oligonucleotide
  Sense strand starting at position 30 of SEQ ID NO: 316687
gauuucuguugguuaguca

SEQ ID NO: 432568 - RNA, 19 nt, Artificial Sequence
  Description of Artificial Sequence: Synthetic oligonucleotide
  Antisense Strand to SEQ ID NO: 432567
ugacuaaccaacagaaauc

SEQ ID NO: 432569 - RNA, 19 nt, Artificial Sequence
  Description of Artificial Sequence: Synthetic oligonucleotide
  Sense strand starting at position 91 of SEQ ID NO: 316687
aaguuugacuccucuugag

SEQ ID NO: 432570 - RNA, 19 nt, Artificial Sequence
  Description of Artificial Sequence: Synthetic oligonucleotide
  Antisense Strand to SEQ ID NO: 432569
cucaagaggagucaaacuu

SEQ ID NO: 432571 - RNA, 19 nt, Artificial Sequence
  Description of Artificial Sequence: Synthetic oligonucleotide
  Sense strand starting at position 325 of SEQ ID NO: 316687
ugaucuuucuuaucaguga

SEQ ID NO: 432572 - RNA, 19 nt, Artificial Sequence
  Description of Artificial Sequence: Synthetic oligonucleotide
  Antisense Strand to SEQ ID NO: 432571
ucacugauaagaaagauca

SEQ ID NO: 432573 - RNA, 19 nt, Artificial Sequence
  Description of Artificial Sequence: Synthetic oligonucleotide
  Sense strand starting at position 330 of SEQ ID NO: 316687
uuucuuaucagugauggug

SEQ ID NO: 432574 - RNA, 19 nt, Artificial Sequence
  Description of Artificial Sequence: Synthetic oligonucleotide
  Antisense Strand to SEQ ID NO: 432573
caccaucacugauaagaaa

SEQ ID NO: 432575 - RNA, 19 nt, Artificial Sequence
  Description of Artificial Sequence: Synthetic oligonucleotide
  Sense strand starting at position 353 of SEQ ID NO: 316687
ugaauucuaguaugacauc

SEQ ID NO: 432576 - RNA, 19 nt, Artificial Sequence
  Description of Artificial Sequence: Synthetic oligonucleotide
  Antisense Strand to SEQ ID NO: 432575
gaugucauacuagaauuca

SEQ ID NO: 432577 - RNA, 19 nt, Artificial Sequence
  Description of Artificial Sequence: Synthetic oligonucleotide
  Sense strand starting at position 418 of SEQ ID NO: 316687
ggagaccauuucuggaaau

SEQ ID NO: 432578 - RNA, 19 nt, Artificial Sequence
  Description of Artificial Sequence: Synthetic oligonucleotide
  Antisense Strand to SEQ ID NO: 432577
auuuccagaaauggucucc

SEQ ID NO: 432579 - RNA, 19 nt, Artificial Sequence
  Description of Artificial Sequence: Synthetic oligonucleotide
  Sense strand starting at position 438 of SEQ ID NO: 316687
ucugguuuguggguauuua

SEQ ID NO: 432580 - RNA, 19 nt, Artificial Sequence
  Description of Artificial Sequence: Synthetic oligonucleotide
  Antisense Strand to SEQ ID NO: 432579
uaaauacccacaaaccaga

SEQ ID NO: 432581 - RNA, 19 nt, Artificial Sequence
  Description of Artificial Sequence: Synthetic oligonucleotide
  Sense strand starting at position 448 of SEQ ID NO: 316687
ggguauuuauacguucuca

SEQ ID NO: 432582 - RNA, 19 nt, Artificial Sequence
  Description of Artificial Sequence: Synthetic oligonucleotide
  Antisense Strand to SEQ ID NO: 432581
ugagaacguauaaauaccc

SEQ ID NO: 432583 - RNA, 19 nt, Artificial Sequence
  Description of Artificial Sequence: Synthetic oligonucleotide
  Sense strand starting at position 746 of SEQ ID NO: 316687
ugcaaauaggcuggacaua

SEQ ID NO: 432584 - RNA, 19 nt, Artificial Sequence
  Description of Artificial Sequence: Synthetic oligonucleotide
  Antisense Strand to SEQ ID NO: 432583
uauguccagccuauuugca

SEQ ID NO: 432585 - RNA, 19 nt, Artificial Sequence
  Description of Artificial Sequence: Synthetic oligonucleotide
  Sense strand starting at position 762 of SEQ ID NO: 316687
auaguaguucuccaguuua

SEQ ID NO: 432586 - RNA, 19 nt, Artificial Sequence
  Description of Artificial Sequence: Synthetic oligonucleotide
  Antisense Strand to SEQ ID NO: 432585
uaaacuggagaacuacuau

SEQ ID NO: 432587 - RNA, 19 nt, Artificial Sequence
  Description of Artificial Sequence: Synthetic oligonucleotide
  Sense strand starting at position 819 of SEQ ID NO: 316687
aaucucagauccgugguaa

SEQ ID NO: 432588 - RNA, 19 nt, Artificial Sequence
  Description of Artificial Sequence: Synthetic oligonucleotide
  Antisense Strand to SEQ ID NO: 432587
uuaccacggaucugagauu

SEQ ID NO: 432589 - RNA, 19 nt, Artificial Sequence
  Description of Artificial Sequence: Synthetic oligonucleotide
  Sense strand starting at position 857 of SEQ ID NO: 316687
gaucauccgcuaggaugaa

SEQ ID NO: 432590 - RNA, 19 nt, Artificial Sequence
  Description of Artificial Sequence: Synthetic oligonucleotide
  Antisense Strand to SEQ ID NO: 432589
uucauccuagcggaugauc

SEQ ID NO: 432591 - RNA, 19 nt, Artificial Sequence
  Description of Artificial Sequence: Synthetic oligonucleotide
  Sense strand starting at position 1039 of SEQ ID NO: 316687
agcaucuuuccaggacaga

SEQ ID NO: 432592 - RNA, 19 nt, Artificial Sequence
  Description of Artificial Sequence: Synthetic oligonucleotide
  Antisense Strand to SEQ ID NO: 432591
ucuguccuggaaagaugcu

SEQ ID NO: 432593 - RNA, 19 nt, Artificial Sequence
  Description of Artificial Sequence: Synthetic oligonucleotide
  Sense strand starting at position 1040 of SEQ ID NO: 316687
gcaucuuuccaggacagac

SEQ ID NO: 432594 - RNA, 19 nt, Artificial Sequence
  Description of Artificial Sequence: Synthetic oligonucleotide
  Antisense Strand to SEQ ID NO: 432593
gucuguccuggaaagaugc

SEQ ID NO: 432595 - RNA, 19 nt, Artificial Sequence
  Description of Artificial Sequence: Synthetic oligonucleotide
  Sense strand starting at position 1248 of SEQ ID NO: 316687
guccgacaacuuuaaucuu

SEQ ID NO: 432596 - RNA, 19 nt, Artificial Sequence
  Description of Artificial Sequence: Synthetic oligonucleotide
  Antisense Strand to SEQ ID NO: 432595
aagauuaaaguugucggac

SEQ ID NO: 432597 - RNA, 19 nt, Artificial Sequence
  Description of Artificial Sequence: Synthetic oligonucleotide
  Sense strand starting at position 1266 of SEQ ID NO: 316687
uccagaagugauggcuuaa

SEQ ID NO: 432598 - RNA, 19 nt, Artificial Sequence
  Description of Artificial Sequence: Synthetic oligonucleotide
  Antisense Strand to SEQ ID NO: 432597
uuaagccaucacuucugga

SEQ ID NO: 432599 - RNA, 19 nt, Artificial Sequence
  Description of Artificial Sequence: Synthetic oligonucleotide
  Sense strand starting at position 1277 of SEQ ID NO: 316687
uggcuuaauggaugggacu

SEQ ID NO: 432600 - RNA, 19 nt, Artificial Sequence
  Description of Artificial Sequence: Synthetic oligonucleotide
  Antisense Strand to SEQ ID NO: 432599
agucccauccauuaagcca

SEQ ID NO: 432601 - RNA, 19 nt, Artificial Sequence
  Description of Artificial Sequence: Synthetic oligonucleotide
  Sense strand starting at position 2310 of SEQ ID NO: 316687
gucucccaucccuaaaguu

SEQ ID NO: 432602 - RNA, 19 nt, Artificial Sequence
  Description of Artificial Sequence: Synthetic oligonucleotide
  Antisense Strand to SEQ ID NO: 432601
aacuuuagggaugggagac

SEQ ID NO: 432603 - RNA, 19 nt, Artificial Sequence
  Description of Artificial Sequence: Synthetic oligonucleotide
  Sense strand starting at position 2320 of SEQ ID NO: 316687
ccuaaaguugcgcuugcaa

SEQ ID NO: 432604 - RNA, 19 nt, Artificial Sequence
  Description of Artificial Sequence: Synthetic oligonucleotide
  Antisense Strand to SEQ ID NO: 432603
uugcaagcgcaacuuuagg

SEQ ID NO: 432605 - RNA, 19 nt, Artificial Sequence
  Description of Artificial Sequence: Synthetic oligonucleotide
  Sense strand starting at position 2508 of SEQ ID NO: 316687
caguaacgaugacaaauuu

SEQ ID NO: 432606 - RNA, 19 nt, Artificial Sequence
  Description of Artificial Sequence: Synthetic oligonucleotide
  Antisense Strand to SEQ ID NO: 432605
aaauuugucaucguuacug

SEQ ID NO: 432607 - RNA, 19 nt, Artificial Sequence
  Description of Artificial Sequence: Synthetic oligonucleotide
  Sense strand starting at position 2578 of SEQ ID NO: 316687
uuacccuuucccuauguga

SEQ ID NO: 432608 - RNA, 19 nt, Artificial Sequence
  Description of Artificial Sequence: Synthetic oligonucleotide
  Antisense Strand to SEQ ID NO: 432607
ucacauagggaaaggguaa

SEQ ID NO: 432609 - RNA, 19 nt, Artificial Sequence
  Description of Artificial Sequence: Synthetic oligonucleotide
  Sense strand starting at position 2718 of SEQ ID NO: 316687
gcauuccugcauuaaagaa

SEQ ID NO: 432610 - RNA, 19 nt, Artificial Sequence
  Description of Artificial Sequence: Synthetic oligonucleotide
  Antisense Strand to SEQ ID NO: 432609
uucuuuaaugcaggaaugc

SEQ ID NO: 432611 - RNA, 19 nt, Artificial Sequence
  Description of Artificial Sequence: Synthetic oligonucleotide
  Sense strand starting at position 2824 of SEQ ID NO: 316687
aaacuuaucuugguuguga

SEQ ID NO: 432612 - RNA, 19 nt, Artificial Sequence
  Description of Artificial Sequence: Synthetic oligonucleotide
  Antisense Strand to SEQ ID NO: 432611
ucacaaccaagauaaguuu

SEQ ID NO: 432613 - RNA, 19 nt, Artificial Sequence
  Description of Artificial Sequence: Synthetic oligonucleotide
  Sense strand starting at position 2825 of SEQ ID NO: 316687
aacuuaucuugguugugaa

SEQ ID NO: 432614 - RNA, 19 nt, Artificial Sequence
  Description of Artificial Sequence: Synthetic oligonucleotide
  Antisense Strand to SEQ ID NO: 432613
uucacaaccaagauaaguu

SEQ ID NO: 432615 - RNA, 19 nt, Artificial Sequence
  Description of Artificial Sequence: Synthetic oligonucleotide
  Sense strand starting at position 2826 of SEQ ID NO: 316687
acuuaucuugguugugaaa

SEQ ID NO: 432616 - RNA, 19 nt, Artificial Sequence
  Description of Artificial Sequence: Synthetic oligonucleotide
  Antisense Strand to SEQ ID NO: 432615
uuucacaaccaagauaagu

SEQ ID NO: 432617 - RNA, 19 nt, Artificial Sequence
  Description of Artificial Sequence: Synthetic oligonucleotide
  Sense strand starting at position 2896 of SEQ ID NO: 316687
agcagagggauguauagua

SEQ ID NO: 432618 - RNA, 19 nt, Artificial Sequence
  Description of Artificial Sequence: Synthetic oligonucleotide
  Antisense Strand to SEQ ID NO: 432617
uacuauacaucccucugcu

SEQ ID NO: 432619 - RNA, 19 nt, Artificial Sequence
  Description of Artificial Sequence: Synthetic oligonucleotide
  Sense strand starting at position 2909 of SEQ ID NO: 316687
auaguauagucucuauaga

SEQ ID NO: 432620 - RNA, 19 nt, Artificial Sequence
  Description of Artificial Sequence: Synthetic oligonucleotide
  Antisense Strand to SEQ ID NO: 432619
ucuauagagacuauacuau

SEQ ID NO: 432621 - RNA, 19 nt, Artificial Sequence
  Description of Artificial Sequence: Synthetic oligonucleotide
  Sense strand starting at position 3133 of SEQ ID NO: 316687
cuuugugaaaugggaacuu

SEQ ID NO: 432622 - RNA, 19 nt, Artificial Sequence
  Description of Artificial Sequence: Synthetic oligonucleotide
  Antisense Strand to SEQ ID NO: 432621
aaguucccauuucacaaag

SEQ ID NO: 432623 - RNA, 19 nt, Artificial Sequence
  Description of Artificial Sequence: Synthetic oligonucleotide
  Sense strand starting at position 3396 of SEQ ID NO: 316687
ggugcuugaaugggaaaga

SEQ ID NO: 432624 - RNA, 19 nt, Artificial Sequence
  Description of Artificial Sequence: Synthetic oligonucleotide
  Antisense Strand to SEQ ID NO: 432623
ucuuucccauucaagcacc

SEQ ID NO: 432625 - RNA, 19 nt, Artificial Sequence
  Description of Artificial Sequence: Synthetic oligonucleotide
  Sense strand starting at position 3453 of SEQ ID NO: 316687
gauagugacuucuugugac

SEQ ID NO: 432626 - RNA, 19 nt, Artificial Sequence
  Description of Artificial Sequence: Synthetic oligonucleotide
  Antisense Strand to SEQ ID NO: 432625
gucacaagaagucacuauc

SEQ ID NO: 432627 - RNA, 19 nt, Artificial Sequence
  Description of Artificial Sequence: Synthetic oligonucleotide
  Sense strand starting at position 3488 of SEQ ID NO: 316687
ccauguucugugcaagaag

SEQ ID NO: 432628 - RNA, 19 nt, Artificial Sequence
  Description of Artificial Sequence: Synthetic oligonucleotide
  Antisense Strand to SEQ ID NO: 432627
cuucuugcacagaacaugg

SEQ ID NO: 432629 - RNA, 19 nt, Artificial Sequence
  Description of Artificial Sequence: Synthetic oligonucleotide
  Sense strand starting at position 3526 of SEQ ID NO: 316687
gguuccaagcaauaauaau

SEQ ID NO: 432630 - RNA, 19 nt, Artificial Sequence
  Description of Artificial Sequence: Synthetic oligonucleotide
  Antisense Strand to SEQ ID NO: 432629
auuauuauugcuuggaacc

SEQ ID NO: 432631 - RNA, 19 nt, Artificial Sequence
  Description of Artificial Sequence: Synthetic oligonucleotide
  Sense strand starting at position 3577 of SEQ ID NO: 316687
augugcuaaccauaguauu

SEQ ID NO: 432632 - RNA, 19 nt, Artificial Sequence
  Description of Artificial Sequence: Synthetic oligonucleotide
  Antisense Strand to SEQ ID NO: 432631
aauacuaugguuagcacau

SEQ ID NO: 432633 - RNA, 19 nt, Artificial Sequence
  Description of Artificial Sequence: Synthetic oligonucleotide
  Sense strand starting at position 3627 of SEQ ID NO: 316687
cgcaucuaucagggauuag

SEQ ID NO: 432634 - RNA, 19 nt, Artificial Sequence
  Description of Artificial Sequence: Synthetic oligonucleotide
  Antisense Strand to SEQ ID NO: 432633
cuaaucccugauagaugcg

SEQ ID NO: 432635 - RNA, 19 nt, Artificial Sequence
  Description of Artificial Sequence: Synthetic oligonucleotide
  Sense strand starting at position 3628 of SEQ ID NO: 316687
gcaucuaucagggauuagu

SEQ ID NO: 432636 - RNA, 19 nt, Artificial Sequence
  Description of Artificial Sequence: Synthetic oligonucleotide
  Antisense Strand to SEQ ID NO: 432635
acuaaucccugauagaugc

SEQ ID NO: 432637 - RNA, 19 nt, Artificial Sequence
  Description of Artificial Sequence: Synthetic oligonucleotide
  Sense strand starting at position 3645 of SEQ ID NO: 316687
guuucagaacccugaggga

SEQ ID NO: 432638 - RNA, 19 nt, Artificial Sequence
  Description of Artificial Sequence: Synthetic oligonucleotide
  Antisense Strand to SEQ ID NO: 432637
ucccucaggguucugaaac

SEQ ID NO: 432639 - RNA, 19 nt, Artificial Sequence
  Description of Artificial Sequence: Synthetic oligonucleotide
  Sense strand starting at position 3807 of SEQ ID NO: 316687
guuguuggacuguauuauu

SEQ ID NO: 432640 - RNA, 19 nt, Artificial Sequence
  Description of Artificial Sequence: Synthetic oligonucleotide
  Antisense Strand to SEQ ID NO: 432639
aauaauacaguccaacaac

SEQ ID NO: 432641 - RNA, 19 nt, Artificial Sequence
  Description of Artificial Sequence: Synthetic oligonucleotide
  Sense strand starting at position 3885 of SEQ ID NO: 316687
gguugagucccauaaugua

SEQ ID NO: 432642 - RNA, 19 nt, Artificial Sequence
  Description of Artificial Sequence: Synthetic oligonucleotide
  Antisense Strand to SEQ ID NO: 432641
uacauuaugggacucaacc

SEQ ID NO: 432643 - RNA, 19 nt, Artificial Sequence
  Description of Artificial Sequence: Synthetic oligonucleotide
  Sense strand starting at position 46 of SEQ ID NO: 316688
gcgugacaugcagcauagu

SEQ ID NO: 432644 - RNA, 19 nt, Artificial Sequence
  Description of Artificial Sequence: Synthetic oligonucleotide
  Antisense Strand to SEQ ID NO: 432643
acuaugcugcaugucacgc

SEQ ID NO: 432645 - RNA, 19 nt, Artificial Sequence
  Description of Artificial Sequence: Synthetic oligonucleotide
  Sense strand starting at position 150 of SEQ ID NO: 316688
ccaagaagccuguauacac

SEQ ID NO: 432646 - RNA, 19 nt, Artificial Sequence
  Description of Artificial Sequence: Synthetic oligonucleotide
  Antisense Strand to SEQ ID NO: 432645
guguauacaggcuucuugg

SEQ ID NO: 432647 - RNA, 19 nt, Artificial Sequence
  Description of Artificial Sequence: Synthetic oligonucleotide
  Sense strand starting at position 177 of SEQ ID NO: 316688
ugggaaucauucccucuga

SEQ ID NO: 432648 - RNA, 19 nt, Artificial Sequence
  Description of Artificial Sequence: Synthetic oligonucleotide
  Antisense Strand to SEQ ID NO: 432647
ucagagggaaugauuccca

SEQ ID NO: 432649 - RNA, 19 nt, Artificial Sequence
  Description of Artificial Sequence: Synthetic oligonucleotide
  Sense strand starting at position 353 of SEQ ID NO: 316688
agaugccucagguaauguu

SEQ ID NO: 432650 - RNA, 19 nt, Artificial Sequence
  Description of Artificial Sequence: Synthetic oligonucleotide
  Antisense Strand to SEQ ID NO: 432649
aacauuaccugaggcaucu

SEQ ID NO: 432651 - RNA, 19 nt, Artificial Sequence
  Description of Artificial Sequence: Synthetic oligonucleotide
  Sense strand starting at position 903 of SEQ ID NO: 316688
uuuagaaugugaguggaua

SEQ ID NO: 432652 - RNA, 19 nt, Artificial Sequence
  Description of Artificial Sequence: Synthetic oligonucleotide
  Antisense Strand to SEQ ID NO: 432651
uauccacucacauucuaaa

SEQ ID NO: 432653 - RNA, 19 nt, Artificial Sequence
  Description of Artificial Sequence: Synthetic oligonucleotide
  Sense strand starting at position 904 of SEQ ID NO: 316688
uuagaaugugaguggauag

SEQ ID NO: 432654 - RNA, 19 nt, Artificial Sequence
  Description of Artificial Sequence: Synthetic oligonucleotide
  Antisense Strand to SEQ ID NO: 432653
cuauccacucacauucuaa

SEQ ID NO: 432655 - RNA, 19 nt, Artificial Sequence
  Description of Artificial Sequence: Synthetic oligonucleotide
  Sense strand starting at position 919 of SEQ ID NO: 316688
auagcaugauggucaggaa

SEQ ID NO: 432656 - RNA, 19 nt, Artificial Sequence
  Description of Artificial Sequence: Synthetic oligonucleotide
  Antisense Strand to SEQ ID NO: 432655
uuccugaccaucaugcuau

SEQ ID NO: 432657 - RNA, 19 nt, Artificial Sequence
  Description of Artificial Sequence: Synthetic oligonucleotide
  Sense strand starting at position 927 of SEQ ID NO: 316688
auggucaggaagugauuau

SEQ ID NO: 432658 - RNA, 19 nt, Artificial Sequence
  Description of Artificial Sequence: Synthetic oligonucleotide
  Antisense Strand to SEQ ID NO: 432657
auaaucacuuccugaccau

SEQ ID NO: 432659 - RNA, 19 nt, Artificial Sequence
  Description of Artificial Sequence: Synthetic oligonucleotide
  Sense strand starting at position 1000 of SEQ ID NO: 316688
gcucucauucuacagacga

SEQ ID NO: 432660 - RNA, 19 nt, Artificial Sequence
  Description of Artificial Sequence: Synthetic oligonucleotide
  Antisense Strand to SEQ ID NO: 432659
ucgucuguagaaugagagc

SEQ ID NO: 432661 - RNA, 19 nt, Artificial Sequence
  Description of Artificial Sequence: Synthetic oligonucleotide
  Sense strand starting at position 1316 of SEQ ID NO: 316688
agaugaugaggucaguagu

SEQ ID NO: 432662 - RNA, 19 nt, Artificial Sequence
  Description of Artificial Sequence: Synthetic oligonucleotide
  Antisense Strand to SEQ ID NO: 432661
acuacugaccucaucaucu

SEQ ID NO: 432663 - RNA, 19 nt, Artificial Sequence
  Description of Artificial Sequence: Synthetic oligonucleotide
  Sense strand starting at position 1340 of SEQ ID NO: 316688
aaagcaguggauugucaga

SEQ ID NO: 432664 - RNA, 19 nt, Artificial Sequence
  Description of Artificial Sequence: Synthetic oligonucleotide
  Antisense Strand to SEQ ID NO: 432663
ucugacaauccacugcuuu

SEQ ID NO: 432665 - RNA, 19 nt, Artificial Sequence
  Description of Artificial Sequence: Synthetic oligonucleotide
  Sense strand starting at position 1781 of SEQ ID NO: 316688
gucacaaggcaauauguuu

SEQ ID NO: 432666 - RNA, 19 nt, Artificial Sequence
  Description of Artificial Sequence: Synthetic oligonucleotide
  Antisense Strand to SEQ ID NO: 432665
aaacauauugccuugugac

SEQ ID NO: 432667 - RNA, 19 nt, Artificial Sequence
  Description of Artificial Sequence: Synthetic oligonucleotide
  Sense strand starting at position 1803 of SEQ ID NO: 316688
gcaagcuuugaucaggauu

SEQ ID NO: 432668 - RNA, 19 nt, Artificial Sequence
  Description of Artificial Sequence: Synthetic oligonucleotide
  Antisense Strand to SEQ ID NO: 432667
aauccugaucaaagcuugc

SEQ ID NO: 432669 - RNA, 19 nt, Artificial Sequence
  Description of Artificial Sequence: Synthetic oligonucleotide
  Sense strand starting at position 1836 of SEQ ID NO: 316688
ucauuucuuuagucugagu

SEQ ID NO: 432670 - RNA, 19 nt, Artificial Sequence
  Description of Artificial Sequence: Synthetic oligonucleotide
  Antisense Strand to SEQ ID NO: 432669
acucagacuaaagaaauga

SEQ ID NO: 432671 - RNA, 19 nt, Artificial Sequence
  Description of Artificial Sequence: Synthetic oligonucleotide
  Sense strand starting at position 1838 of SEQ ID NO: 316688
auuucuuuagucugagugu

SEQ ID NO: 432672 - RNA, 19 nt, Artificial Sequence
  Description of Artificial Sequence: Synthetic oligonucleotide
  Antisense Strand to SEQ ID NO: 432671
acacucagacuaaagaaau

SEQ ID NO: 432673 - RNA, 19 nt, Artificial Sequence
  Description of Artificial Sequence: Synthetic oligonucleotide
  Sense strand starting at position 1844 of SEQ ID NO: 316688
uuagucugaguguaaauaa

SEQ ID NO: 432674 - RNA, 19 nt, Artificial Sequence
  Description of Artificial Sequence: Synthetic oligonucleotide
  Antisense Strand to SEQ ID NO: 432673
uuauuuacacucagacuaa

SEQ ID NO: 432675 - RNA, 19 nt, Artificial Sequence
  Description of Artificial Sequence: Synthetic oligonucleotide
  Sense strand starting at position 2053 of SEQ ID NO: 316688
gcuacuuguguucugcuau

SEQ ID NO: 432676 - RNA, 19 nt, Artificial Sequence
  Description of Artificial Sequence: Synthetic oligonucleotide
  Antisense Strand to SEQ ID NO: 432675
auagcagaacacaaguagc

SEQ ID NO: 432677 - RNA, 19 nt, Artificial Sequence
  Description of Artificial Sequence: Synthetic oligonucleotide
  Sense strand starting at position 2060 of SEQ ID NO: 316688
guguucugcuauuuauauc

SEQ ID NO: 432678 - RNA, 19 nt, Artificial Sequence
  Description of Artificial Sequence: Synthetic oligonucleotide
  Antisense Strand to SEQ ID NO: 432677
gauauaaauagcagaacac

SEQ ID NO: 432679 - RNA, 19 nt, Artificial Sequence
  Description of Artificial Sequence: Synthetic oligonucleotide
  Sense strand starting at position 2089 of SEQ ID NO: 316688
acacuaugccuuggaauca

SEQ ID NO: 432680 - RNA, 19 nt, Artificial Sequence
  Description of Artificial Sequence: Synthetic oligonucleotide
  Antisense Strand to SEQ ID NO: 432679
ugauuccaaggcauagugu

SEQ ID NO: 432681 - RNA, 19 nt, Artificial Sequence
  Description of Artificial Sequence: Synthetic oligonucleotide
  Sense strand starting at position 2122 of SEQ ID NO: 316688
uuaaaucuccaagaggcuu

SEQ ID NO: 432682 - RNA, 19 nt, Artificial Sequence
  Description of Artificial Sequence: Synthetic oligonucleotide
  Antisense Strand to SEQ ID NO: 432681
aagccucuuggagauuuaa

SEQ ID NO: 432683 - RNA, 19 nt, Artificial Sequence
  Description of Artificial Sequence: Synthetic oligonucleotide
  Sense strand starting at position 2128 of SEQ ID NO: 316688
cuccaagaggcuuguaaag

SEQ ID NO: 432684 - RNA, 19 nt, Artificial Sequence
  Description of Artificial Sequence: Synthetic oligonucleotide
  Antisense Strand to SEQ ID NO: 432683
cuuuacaagccucuuggag

SEQ ID NO: 432685 - RNA, 19 nt, Artificial Sequence
  Description of Artificial Sequence: Synthetic oligonucleotide
  Sense strand starting at position 2237 of SEQ ID NO: 316688
auccuuugacacugagaua

SEQ ID NO: 432686 - RNA, 19 nt, Artificial Sequence
  Description of Artificial Sequence: Synthetic oligonucleotide
  Antisense Strand to SEQ ID NO: 432685
uaucucagugucaaaggau

SEQ ID NO: 432687 - RNA, 19 nt, Artificial Sequence
  Description of Artificial Sequence: Synthetic oligonucleotide
  Sense strand starting at position 2506 of SEQ ID NO: 316688
gacaaaguccagugauaac

SEQ ID NO: 432688 - RNA, 19 nt, Artificial Sequence
  Description of Artificial Sequence: Synthetic oligonucleotide
  Antisense Strand to SEQ ID NO: 432687
guuaucacuggacuuuguc

SEQ ID NO: 432689 - RNA, 19 nt, Artificial Sequence
  Description of Artificial Sequence: Synthetic oligonucleotide
  Sense strand starting at position 2532 of SEQ ID NO: 316688
agggaaggauuugguaaug

SEQ ID NO: 432690 - RNA, 19 nt, Artificial Sequence
  Description of Artificial Sequence: Synthetic oligonucleotide
  Antisense Strand to SEQ ID NO: 432689
cauuaccaaauccuucccu

SEQ ID NO: 432691 - RNA, 19 nt, Artificial Sequence
  Description of Artificial Sequence: Synthetic oligonucleotide
  Sense strand starting at position 2573 of SEQ ID NO: 316688
gaguaacgcauacauggua

SEQ ID NO: 432692 - RNA, 19 nt, Artificial Sequence
  Description of Artificial Sequence: Synthetic oligonucleotide
  Antisense Strand to SEQ ID NO: 432691
uaccauguaugcguuacuc

SEQ ID NO: 432693 - RNA, 19 nt, Artificial Sequence
  Description of Artificial Sequence: Synthetic oligonucleotide
  Sense strand starting at position 2762 of SEQ ID NO: 316688
acaguagaaugguuagacu

SEQ ID NO: 432694 - RNA, 19 nt, Artificial Sequence
  Description of Artificial Sequence: Synthetic oligonucleotide
  Antisense Strand to SEQ ID NO: 432693
agucuaaccauucuacugu

SEQ ID NO: 432695 - RNA, 19 nt, Artificial Sequence
  Description of Artificial Sequence: Synthetic oligonucleotide
  Sense strand starting at position 2773 of SEQ ID NO: 316688
guuagacuguaagugaaau

SEQ ID NO: 432696 - RNA, 19 nt, Artificial Sequence
  Description of Artificial Sequence: Synthetic oligonucleotide
  Antisense Strand to SEQ ID NO: 432695
auuucacuuacagucuaac

SEQ ID NO: 432697 - RNA, 19 nt, Artificial Sequence
  Description of Artificial Sequence: Synthetic oligonucleotide
  Sense strand starting at position 3090 of SEQ ID NO: 316688
ugagcuauauacuuaugau

SEQ ID NO: 432698 - RNA, 19 nt, Artificial Sequence
  Description of Artificial Sequence: Synthetic oligonucleotide
  Antisense Strand to SEQ ID NO: 432697
aucauaaguauauagcuca

SEQ ID NO: 432699 - RNA, 19 nt, Artificial Sequence
  Description of Artificial Sequence: Synthetic oligonucleotide
  Sense strand starting at position 3309 of SEQ ID NO: 316688
gcaggaguuugguuagaaa

SEQ ID NO: 432700 - RNA, 19 nt, Artificial Sequence
  Description of Artificial Sequence: Synthetic oligonucleotide
  Antisense Strand to SEQ ID NO: 432699
uuucuaaccaaacuccugc

SEQ ID NO: 432701 - RNA, 19 nt, Artificial Sequence
  Description of Artificial Sequence: Synthetic oligonucleotide
  Sense strand starting at position 3543 of SEQ ID NO: 316688
gagauauaccagugaacga

SEQ ID NO: 432702 - RNA, 19 nt, Artificial Sequence
  Description of Artificial Sequence: Synthetic oligonucleotide
  Antisense Strand to SEQ ID NO: 432701
ucguucacugguauaucuc

SEQ ID NO: 432703 - RNA, 19 nt, Artificial Sequence
  Description of Artificial Sequence: Synthetic oligonucleotide
  Sense strand starting at position 3580 of SEQ ID NO: 316688
cuuugugaaguuuauauuc

SEQ ID NO: 432704 - RNA, 19 nt, Artificial Sequence
  Description of Artificial Sequence: Synthetic oligonucleotide
  Antisense Strand to SEQ ID NO: 432703
gaauauaaacuucacaaag

SEQ ID NO: 432705 - RNA, 19 nt, Artificial Sequence
  Description of Artificial Sequence: Synthetic oligonucleotide
  Sense strand starting at position 3717 of SEQ ID NO: 316688
gcgcauggaguguuugcaa

SEQ ID NO: 432706 - RNA, 19 nt, Artificial Sequence
  Description of Artificial Sequence: Synthetic oligonucleotide
  Antisense Strand to SEQ ID NO: 432705
uugcaaacacuccaugcgc

SEQ ID NO: 432707 - RNA, 19 nt, Artificial Sequence
  Description of Artificial Sequence: Synthetic oligonucleotide
  Sense strand starting at position 3720 of SEQ ID NO: 316688
cauggaguguuugcaauuu

SEQ ID NO: 432708 - RNA, 19 nt, Artificial Sequence
  Description of Artificial Sequence: Synthetic oligonucleotide
  Antisense Strand to SEQ ID NO: 432707
aaauugcaaacacuccaug

SEQ ID NO: 432709 - RNA, 19 nt, Artificial Sequence
  Description of Artificial Sequence: Synthetic oligonucleotide
  Sense strand starting at position 3758 of SEQ ID NO: 316688
gacucacugaaagguggua

SEQ ID NO: 432710 - RNA, 19 nt, Artificial Sequence
  Description of Artificial Sequence: Synthetic oligonucleotide
  Antisense Strand to SEQ ID NO: 432709
uaccaccuuucagugaguc

SEQ ID NO: 432711 - RNA, 19 nt, Artificial Sequence
  Description of Artificial Sequence: Synthetic oligonucleotide
  Sense strand starting at position 3760 of SEQ ID NO: 316688
cucacugaaaggugguauu

SEQ ID NO: 432712 - RNA, 19 nt, Artificial Sequence
  Description of Artificial Sequence: Synthetic oligonucleotide
  Antisense Strand to SEQ ID NO: 432711
aauaccaccuuucagugag

SEQ ID NO: 432713 - RNA, 19 nt, Artificial Sequence
  Description of Artificial Sequence: Synthetic oligonucleotide
  Sense strand starting at position 3831 of SEQ ID NO: 316688
gugaacagcacguacuaaa

SEQ ID NO: 432714 - RNA, 19 nt, Artificial Sequence
  Description of Artificial Sequence: Synthetic oligonucleotide
  Antisense Strand to SEQ ID NO: 432713
uuuaguacgugcuguucac

SEQ ID NO: 432715 - RNA, 19 nt, Artificial Sequence
  Description of Artificial Sequence: Synthetic oligonucleotide
  Sense strand starting at position 3842 of SEQ ID NO: 316688
guacuaaagcccugagaca

SEQ ID NO: 432716 - RNA, 19 nt, Artificial Sequence
  Description of Artificial Sequence: Synthetic oligonucleotide
  Antisense Strand to SEQ ID NO: 432715
ugucucagggcuuuaguac

SEQ ID NO: 432717 - RNA, 19 nt, Artificial Sequence
  Description of Artificial Sequence: Synthetic oligonucleotide
  Sense strand starting at position 3897 of SEQ ID NO: 316688
ggccaauaugguuggaaca

SEQ ID NO: 432718 - RNA, 19 nt, Artificial Sequence
  Description of Artificial Sequence: Synthetic oligonucleotide
  Antisense Strand to SEQ ID NO: 432717
uguuccaaccauauuggcc

SEQ ID NO: 432719 - RNA, 19 nt, Artificial Sequence
  Description of Artificial Sequence: Synthetic oligonucleotide
  Sense strand starting at position 3898 of SEQ ID NO: 316688
gccaauaugguuggaacau

SEQ ID NO: 432720 - RNA, 19 nt, Artificial Sequence
  Description of Artificial Sequence: Synthetic oligonucleotide
  Antisense Strand to SEQ ID NO: 432719
auguuccaaccauauuggc

SEQ ID NO: 432721 - RNA, 19 nt, Artificial Sequence
  Description of Artificial Sequence: Synthetic oligonucleotide
  Sense strand starting at position 3956 of SEQ ID NO: 316688
gugggaagaccaugucaau

SEQ ID NO: 432722 - RNA, 19 nt, Artificial Sequence
  Description of Artificial Sequence: Synthetic oligonucleotide
  Antisense Strand to SEQ ID NO: 432721
auugacauggucuucccac

SEQ ID NO: 432723 - RNA, 19 nt, Artificial Sequence
  Description of Artificial Sequence: Synthetic oligonucleotide
  Sense strand starting at position 145 of SEQ ID NO: 316689
cugugaacucucugaggaa

SEQ ID NO: 432724 - RNA, 19 nt, Artificial Sequence
  Description of Artificial Sequence: Synthetic oligonucleotide
  Antisense Strand to SEQ ID NO: 432723
uuccucagagaguucacag

SEQ ID NO: 432725 - RNA, 19 nt, Artificial Sequence
  Description of Artificial Sequence: Synthetic oligonucleotide
  Sense strand starting at position 172 of SEQ ID NO: 316689
ucacauaugugaccucaga

SEQ ID NO: 432726 - RNA, 19 nt, Artificial Sequence
  Description of Artificial Sequence: Synthetic oligonucleotide
  Antisense Strand to SEQ ID NO: 432725
ucugaggucacauauguga

SEQ ID NO: 432727 - RNA, 19 nt, Artificial Sequence
  Description of Artificial Sequence: Synthetic oligonucleotide
  Sense strand starting at position 211 of SEQ ID NO: 316689
aaguuugguggaugaaaug

SEQ ID NO: 432728 - RNA, 19 nt, Artificial Sequence
  Description of Artificial Sequence: Synthetic oligonucleotide
  Antisense Strand to SEQ ID NO: 432727
cauuucauccaccaaacuu

SEQ ID NO: 432729 - RNA, 19 nt, Artificial Sequence
  Description of Artificial Sequence: Synthetic oligonucleotide
  Sense strand starting at position 401 of SEQ ID NO: 316689
auuguuacauauccucaga

SEQ ID NO: 432730 - RNA, 19 nt, Artificial Sequence
  Description of Artificial Sequence: Synthetic oligonucleotide
  Antisense Strand to SEQ ID NO: 432729
ucugaggauauguaacaau

SEQ ID NO: 432731 - RNA, 19 nt, Artificial Sequence
  Description of Artificial Sequence: Synthetic oligonucleotide
  Sense strand starting at position 403 of SEQ ID NO: 316689
uguuacauauccucagacu

SEQ ID NO: 432732 - RNA, 19 nt, Artificial Sequence
  Description of Artificial Sequence: Synthetic oligonucleotide
  Antisense Strand to SEQ ID NO: 432731
agucugaggauauguaaca

SEQ ID NO: 432733 - RNA, 19 nt, Artificial Sequence
  Description of Artificial Sequence: Synthetic oligonucleotide
  Sense strand starting at position 434 of SEQ ID NO: 316689
gccuaaagucaccaagcaa

SEQ ID NO: 432734 - RNA, 19 nt, Artificial Sequence
  Description of Artificial Sequence: Synthetic oligonucleotide
  Antisense Strand to SEQ ID NO: 432733
uugcuuggugacuuuaggc

SEQ ID NO: 432735 - RNA, 19 nt, Artificial Sequence
  Description of Artificial Sequence: Synthetic oligonucleotide
  Sense strand starting at position 605 of SEQ ID NO: 316689
ggaagaacuugguccuuuc

SEQ ID NO: 432736 - RNA, 19 nt, Artificial Sequence
  Description of Artificial Sequence: Synthetic oligonucleotide
  Antisense Strand to SEQ ID NO: 432735
gaaaggaccaaguucuucc

SEQ ID NO: 432737 - RNA, 19 nt, Artificial Sequence
  Description of Artificial Sequence: Synthetic oligonucleotide
  Sense strand starting at position 621 of SEQ ID NO: 316689
uucucuuagugacuuagau

SEQ ID NO: 432738 - RNA, 19 nt, Artificial Sequence
  Description of Artificial Sequence: Synthetic oligonucleotide
  Antisense Strand to SEQ ID NO: 432737
aucuaagucacuaagagaa

SEQ ID NO: 432739 - RNA, 19 nt, Artificial Sequence
  Description of Artificial Sequence: Synthetic oligonucleotide
  Sense strand starting at position 667 of SEQ ID NO: 316689
cuaggauuugccugcaugu

SEQ ID NO: 432740 - RNA, 19 nt, Artificial Sequence
  Description of Artificial Sequence: Synthetic oligonucleotide
  Antisense Strand to SEQ ID NO: 432739
acaugcaggcaaauccuag

SEQ ID NO: 432741 - RNA, 19 nt, Artificial Sequence
  Description of Artificial Sequence: Synthetic oligonucleotide
  Sense strand starting at position 695 of SEQ ID NO: 316689
uguuguauuuaggaaggaa

SEQ ID NO: 432742 - RNA, 19 nt, Artificial Sequence
  Description of Artificial Sequence: Synthetic oligonucleotide
  Antisense Strand to SEQ ID NO: 432741
uuccuuccuaaauacaaca

SEQ ID NO: 432743 - RNA, 19 nt, Artificial Sequence
  Description of Artificial Sequence: Synthetic oligonucleotide
  Sense strand starting at position 877 of SEQ ID NO: 316689
ccuggagguuucuuuauga

SEQ ID NO: 432744 - RNA, 19 nt, Artificial Sequence
  Description of Artificial Sequence: Synthetic oligonucleotide
  Antisense Strand to SEQ ID NO: 432743
ucauaaagaaaccuccagg

SEQ ID NO: 432745 - RNA, 19 nt, Artificial Sequence
  Description of Artificial Sequence: Synthetic oligonucleotide
  Sense strand starting at position 1150 of SEQ ID NO: 316689
aggaauugguaacuguuga

SEQ ID NO: 432746 - RNA, 19 nt, Artificial Sequence
  Description of Artificial Sequence: Synthetic oligonucleotide
  Antisense Strand to SEQ ID NO: 432745
ucaacaguuaccaauuccu

SEQ ID NO: 432747 - RNA, 19 nt, Artificial Sequence
  Description of Artificial Sequence: Synthetic oligonucleotide
  Sense strand starting at position 1151 of SEQ ID NO: 316689
ggaauugguaacuguugau

SEQ ID NO: 432748 - RNA, 19 nt, Artificial Sequence
  Description of Artificial Sequence: Synthetic oligonucleotide
  Antisense Strand to SEQ ID NO: 432747
aucaacaguuaccaauucc

SEQ ID NO: 432749 - RNA, 19 nt, Artificial Sequence
  Description of Artificial Sequence: Synthetic oligonucleotide
  Sense strand starting at position 1197 of SEQ ID NO: 316689
uucccagggcugugagaaa

SEQ ID NO: 432750 - RNA, 19 nt, Artificial Sequence
  Description of Artificial Sequence: Synthetic oligonucleotide
  Antisense Strand to SEQ ID NO: 432749
uuucucacagcccugggaa

SEQ ID NO: 432751 - RNA, 19 nt, Artificial Sequence
  Description of Artificial Sequence: Synthetic oligonucleotide
  Sense strand starting at position 1269 of SEQ ID NO: 316689
ccauaaaugcaacgaucaa

SEQ ID NO: 432752 - RNA, 19 nt, Artificial Sequence
  Description of Artificial Sequence: Synthetic oligonucleotide
  Antisense Strand to SEQ ID NO: 432751
uugaucguugcauuuaugg

SEQ ID NO: 432753 - RNA, 19 nt, Artificial Sequence
  Description of Artificial Sequence: Synthetic oligonucleotide
  Sense strand starting at position 1276 of SEQ ID NO: 316689
ugcaacgaucaaugggauu

SEQ ID NO: 432754 - RNA, 19 nt, Artificial Sequence
  Description of Artificial Sequence: Synthetic oligonucleotide
  Antisense Strand to SEQ ID NO: 432753
aaucccauugaucguugca

SEQ ID NO: 432755 - RNA, 19 nt, Artificial Sequence
  Description of Artificial Sequence: Synthetic oligonucleotide
  Sense strand starting at position 1338 of SEQ ID NO: 316689
ucagacuuugcaugacaag

SEQ ID NO: 432756 - RNA, 19 nt, Artificial Sequence
  Description of Artificial Sequence: Synthetic oligonucleotide
  Antisense Strand to SEQ ID NO: 432755
cuugucaugcaaagucuga

SEQ ID NO: 432757 - RNA, 19 nt, Artificial Sequence
  Description of Artificial Sequence: Synthetic oligonucleotide
  Sense strand starting at position 1339 of SEQ ID NO: 316689
cagacuuugcaugacaagu

SEQ ID NO: 432758 - RNA, 19 nt, Artificial Sequence
  Description of Artificial Sequence: Synthetic oligonucleotide
  Antisense Strand to SEQ ID NO: 432757
acuugucaugcaaagucug

SEQ ID NO: 432759 - RNA, 19 nt, Artificial Sequence
  Description of Artificial Sequence: Synthetic oligonucleotide
  Sense strand starting at position 1374 of SEQ ID NO: 316689
ggaaacuagugucuggaca

SEQ ID NO: 432760 - RNA, 19 nt, Artificial Sequence
  Description of Artificial Sequence: Synthetic oligonucleotide
  Antisense Strand to SEQ ID NO: 432759
uguccagacacuaguuucc

SEQ ID NO: 432761 - RNA, 19 nt, Artificial Sequence
  Description of Artificial Sequence: Synthetic oligonucleotide
  Sense strand starting at position 1497 of SEQ ID NO: 316689
cucccauuccgcuugcuau

SEQ ID NO: 432762 - RNA, 19 nt, Artificial Sequence
  Description of Artificial Sequence: Synthetic oligonucleotide
  Antisense Strand to SEQ ID NO: 432761
auagcaagcggaaugggag

SEQ ID NO: 432763 - RNA, 19 nt, Artificial Sequence
  Description of Artificial Sequence: Synthetic oligonucleotide
  Sense strand starting at position 2159 of SEQ ID NO: 316689
gugcuaggcacuguguuua

SEQ ID NO: 432764 - RNA, 19 nt, Artificial Sequence
  Description of Artificial Sequence: Synthetic oligonucleotide
  Antisense Strand to SEQ ID NO: 432763
uaaacacagugccuagcac

SEQ ID NO: 432765 - RNA, 19 nt, Artificial Sequence
  Description of Artificial Sequence: Synthetic oligonucleotide
  Sense strand starting at position 2223 of SEQ ID NO: 316689
gguggaaggaaauguuaac

SEQ ID NO: 432766 - RNA, 19 nt, Artificial Sequence
  Description of Artificial Sequence: Synthetic oligonucleotide
  Antisense Strand to SEQ ID NO: 432765
guuaacauuuccuuccacc

SEQ ID NO: 432767 - RNA, 19 nt, Artificial Sequence
  Description of Artificial Sequence: Synthetic oligonucleotide
  Sense strand starting at position 2333 of SEQ ID NO: 316689
aaagucuucccagggaaau

SEQ ID NO: 432768 - RNA, 19 nt, Artificial Sequence
  Description of Artificial Sequence: Synthetic oligonucleotide
  Antisense Strand to SEQ ID NO: 432767
auuucccugggaagacuuu

SEQ ID NO: 432769 - RNA, 19 nt, Artificial Sequence
  Description of Artificial Sequence: Synthetic oligonucleotide
  Sense strand starting at position 2334 of SEQ ID NO: 316689
aagucuucccagggaaaug

SEQ ID NO: 432770 - RNA, 19 nt, Artificial Sequence
  Description of Artificial Sequence: Synthetic oligonucleotide
  Antisense Strand to SEQ ID NO: 432769
cauuucccugggaagacuu

SEQ ID NO: 432771 - RNA, 19 nt, Artificial Sequence
  Description of Artificial Sequence: Synthetic oligonucleotide
  Sense strand starting at position 2366 of SEQ ID NO: 316689
uaacuauggugaguaacua

SEQ ID NO: 432772 - RNA, 19 nt, Artificial Sequence
  Description of Artificial Sequence: Synthetic oligonucleotide
  Antisense Strand to SEQ ID NO: 432771
uaguuacucaccauaguua

SEQ ID NO: 432773 - RNA, 19 nt, Artificial Sequence
  Description of Artificial Sequence: Synthetic oligonucleotide
  Sense strand starting at position 2431 of SEQ ID NO: 316689
agaagaauggcaugagcaa

SEQ ID NO: 432774 - RNA, 19 nt, Artificial Sequence
  Description of Artificial Sequence: Synthetic oligonucleotide
  Antisense Strand to SEQ ID NO: 432773
uugcucaugccauucuucu

SEQ ID NO: 432775 - RNA, 19 nt, Artificial Sequence
  Description of Artificial Sequence: Synthetic oligonucleotide
  Sense strand starting at position 2863 of SEQ ID NO: 316689
cagagagcuguguaagaag

SEQ ID NO: 432776 - RNA, 19 nt, Artificial Sequence
  Description of Artificial Sequence: Synthetic oligonucleotide
  Antisense Strand to SEQ ID NO: 432775
cuucuuacacagcucucug

SEQ ID NO: 432777 - RNA, 19 nt, Artificial Sequence
  Description of Artificial Sequence: Synthetic oligonucleotide
  Sense strand starting at position 2950 of SEQ ID NO: 316689
cuuucuuugcuggaaagaa

SEQ ID NO: 432778 - RNA, 19 nt, Artificial Sequence
  Description of Artificial Sequence: Synthetic oligonucleotide
  Antisense Strand to SEQ ID NO: 432777
uucuuuccagcaaagaaag

SEQ ID NO: 432779 - RNA, 19 nt, Artificial Sequence
  Description of Artificial Sequence: Synthetic oligonucleotide
  Sense strand starting at position 3029 of SEQ ID NO: 316689
cccugugaggucuaauaau

SEQ ID NO: 432780 - RNA, 19 nt, Artificial Sequence
  Description of Artificial Sequence: Synthetic oligonucleotide
  Antisense Strand to SEQ ID NO: 432779
auuauuagaccucacaggg

SEQ ID NO: 432781 - RNA, 19 nt, Artificial Sequence
  Description of Artificial Sequence: Synthetic oligonucleotide
  Sense strand starting at position 3095 of SEQ ID NO: 316689
cacagucauuaagugguaa

SEQ ID NO: 432782 - RNA, 19 nt, Artificial Sequence
  Description of Artificial Sequence: Synthetic oligonucleotide
  Antisense Strand to SEQ ID NO: 432781
uuaccacuuaaugacugug

SEQ ID NO: 432783 - RNA, 19 nt, Artificial Sequence
  Description of Artificial Sequence: Synthetic oligonucleotide
  Sense strand starting at position 3121 of SEQ ID NO: 316689
acgugaaccuauuugcacu

SEQ ID NO: 432784 - RNA, 19 nt, Artificial Sequence
  Description of Artificial Sequence: Synthetic oligonucleotide
  Antisense Strand to SEQ ID NO: 432783
agugcaaauagguucacgu

SEQ ID NO: 432785 - RNA, 19 nt, Artificial Sequence
  Description of Artificial Sequence: Synthetic oligonucleotide
  Sense strand starting at position 3182 of SEQ ID NO: 316689
auggauaagcuguaucaau

SEQ ID NO: 432786 - RNA, 19 nt, Artificial Sequence
  Description of Artificial Sequence: Synthetic oligonucleotide
  Antisense Strand to SEQ ID NO: 432785
auugauacagcuuauccau

SEQ ID NO: 432787 - RNA, 19 nt, Artificial Sequence
  Description of Artificial Sequence: Synthetic oligonucleotide
  Sense strand starting at position 3334 of SEQ ID NO: 316689
augcauugucaaugggaag

SEQ ID NO: 432788 - RNA, 19 nt, Artificial Sequence
  Description of Artificial Sequence: Synthetic oligonucleotide
  Antisense Strand to SEQ ID NO: 432787
cuucccauugacaaugcau

SEQ ID NO: 432789 - RNA, 19 nt, Artificial Sequence
  Description of Artificial Sequence: Synthetic oligonucleotide
  Sense strand starting at position 3335 of SEQ ID NO: 316689
ugcauugucaaugggaaga

SEQ ID NO: 432790 - RNA, 19 nt, Artificial Sequence
  Description of Artificial Sequence: Synthetic oligonucleotide
  Antisense Strand to SEQ ID NO: 432789
ucuucccauugacaaugca

SEQ ID NO: 432791 - RNA, 19 nt, Artificial Sequence
  Description of Artificial Sequence: Synthetic oligonucleotide
  Sense strand starting at position 3353 of SEQ ID NO: 316689
agagguaaauugcucccaa

SEQ ID NO: 432792 - RNA, 19 nt, Artificial Sequence
  Description of Artificial Sequence: Synthetic oligonucleotide
  Antisense Strand to SEQ ID NO: 432791
uugggagcaauuuaccucu

SEQ ID NO: 432793 - RNA, 19 nt, Artificial Sequence
  Description of Artificial Sequence: Synthetic oligonucleotide
  Sense strand starting at position 3354 of SEQ ID NO: 316689
gagguaaauugcucccaag

SEQ ID NO: 432794 - RNA, 19 nt, Artificial Sequence
  Description of Artificial Sequence: Synthetic oligonucleotide
  Antisense Strand to SEQ ID NO: 432793
cuugggagcaauuuaccuc

SEQ ID NO: 432795 - RNA, 19 nt, Artificial Sequence
  Description of Artificial Sequence: Synthetic oligonucleotide
  Sense strand starting at position 3378 of SEQ ID NO: 316689
aaauauugguucuuggaga

SEQ ID NO: 432796 - RNA, 19 nt, Artificial Sequence
  Description of Artificial Sequence: Synthetic oligonucleotide
  Antisense Strand to SEQ ID NO: 432795
ucuccaagaaccaauauuu

SEQ ID NO: 432797 - RNA, 19 nt, Artificial Sequence
  Description of Artificial Sequence: Synthetic oligonucleotide
  Sense strand starting at position 3383 of SEQ ID NO: 316689
uugguucuuggagagcuaa

SEQ ID NO: 432798 - RNA, 19 nt, Artificial Sequence
  Description of Artificial Sequence: Synthetic oligonucleotide
  Antisense Strand to SEQ ID NO: 432797
uuagcucuccaagaaccaa

SEQ ID NO: 432799 - RNA, 19 nt, Artificial Sequence
  Description of Artificial Sequence: Synthetic oligonucleotide
  Sense strand starting at position 3746 of SEQ ID NO: 316689
gccuccaugggaggugaua

SEQ ID NO: 432800 - RNA, 19 nt, Artificial Sequence
  Description of Artificial Sequence: Synthetic oligonucleotide
  Antisense Strand to SEQ ID NO: 432799
uaucaccucccauggaggc

SEQ ID NO: 432801 - RNA, 19 nt, Artificial Sequence
  Description of Artificial Sequence: Synthetic oligonucleotide
  Sense strand starting at position 3882 of SEQ ID NO: 316689
gcaugagggcagcaaucua

SEQ ID NO: 432802 - RNA, 19 nt, Artificial Sequence
  Description of Artificial Sequence: Synthetic oligonucleotide
  Antisense Strand to SEQ ID NO: 432801
uagauugcugcccucaugc

SEQ ID NO: 432803 - RNA, 19 nt, Artificial Sequence
  Description of Artificial Sequence: Synthetic oligonucleotide
  Sense strand starting at position 267 of SEQ ID NO: 316690
uuguguguccuagcuacuu

SEQ ID NO: 432804 - RNA, 19 nt, Artificial Sequence
  Description of Artificial Sequence: Synthetic oligonucleotide
  Antisense Strand to SEQ ID NO: 432803
aaguagcuaggacacacaa

SEQ ID NO: 432805 - RNA, 19 nt, Artificial Sequence
  Description of Artificial Sequence: Synthetic oligonucleotide
  Sense strand starting at position 565 of SEQ ID NO: 316690
ugcagucuuccucaggaaa

SEQ ID NO: 432806 - RNA, 19 nt, Artificial Sequence
  Description of Artificial Sequence: Synthetic oligonucleotide
  Antisense Strand to SEQ ID NO: 432805
uuuccugaggaagacugca

SEQ ID NO: 432807 - RNA, 19 nt, Artificial Sequence
  Description of Artificial Sequence: Synthetic oligonucleotide
  Sense strand starting at position 579 of SEQ ID NO: 316690
ggaaacauguacucacuau

SEQ ID NO: 432808 - RNA, 19 nt, Artificial Sequence
  Description of Artificial Sequence: Synthetic oligonucleotide
  Antisense Strand to SEQ ID NO: 432807
auagugaguacauguuucc

SEQ ID NO: 432809 - RNA, 19 nt, Artificial Sequence
  Description of Artificial Sequence: Synthetic oligonucleotide
  Sense strand starting at position 677 of SEQ ID NO: 316690
agucgcaucccacauugaa

SEQ ID NO: 432810 - RNA, 19 nt, Artificial Sequence
  Description of Artificial Sequence: Synthetic oligonucleotide
  Antisense Strand to SEQ ID NO: 432809
uucaaugugggaugcgacu

SEQ ID NO: 432811 - RNA, 19 nt, Artificial Sequence
  Description of Artificial Sequence: Synthetic oligonucleotide
  Sense strand starting at position 726 of SEQ ID NO: 316690
agcuuucuacucuaagaga

SEQ ID NO: 432812 - RNA, 19 nt, Artificial Sequence
  Description of Artificial Sequence: Synthetic oligonucleotide
  Antisense Strand to SEQ ID NO: 432811
ucucuuagaguagaaagcu

SEQ ID NO: 432813 - RNA, 19 nt, Artificial Sequence
  Description of Artificial Sequence: Synthetic oligonucleotide
  Sense strand starting at position 865 of SEQ ID NO: 316690
agaaaugaaucugaagacu

SEQ ID NO: 432814 - RNA, 19 nt, Artificial Sequence
  Description of Artificial Sequence: Synthetic oligonucleotide
  Antisense Strand to SEQ ID NO: 432813
agucuucagauucauuucu

SEQ ID NO: 432815 - RNA, 19 nt, Artificial Sequence
  Description of Artificial Sequence: Synthetic oligonucleotide
  Sense strand starting at position 907 of SEQ ID NO: 316690
uaaagccugccauaugagu

SEQ ID NO: 432816 - RNA, 19 nt, Artificial Sequence
  Description of Artificial Sequence: Synthetic oligonucleotide
  Antisense Strand to SEQ ID NO: 432815
acucauauggcaggcuuua

SEQ ID NO: 432817 - RNA, 19 nt, Artificial Sequence
  Description of Artificial Sequence: Synthetic oligonucleotide
  Sense strand starting at position 912 of SEQ ID NO: 316690
ccugccauaugagucauuu

SEQ ID NO: 432818 - RNA, 19 nt, Artificial Sequence
  Description of Artificial Sequence: Synthetic oligonucleotide
  Antisense Strand to SEQ ID NO: 432817
aaaugacucauauggcagg

SEQ ID NO: 432819 - RNA, 19 nt, Artificial Sequence
  Description of Artificial Sequence: Synthetic oligonucleotide
  Sense strand starting at position 979 of SEQ ID NO: 316690
uucugaagucuauggguaa

SEQ ID NO: 432820 - RNA, 19 nt, Artificial Sequence
  Description of Artificial Sequence: Synthetic oligonucleotide
  Antisense Strand to SEQ ID NO: 432819
uuacccauagacuucagaa

SEQ ID NO: 432821 - RNA, 19 nt, Artificial Sequence
  Description of Artificial Sequence: Synthetic oligonucleotide
  Sense strand starting at position 982 of SEQ ID NO: 316690
ugaagucuauggguaauau

SEQ ID NO: 432822 - RNA, 19 nt, Artificial Sequence
  Description of Artificial Sequence: Synthetic oligonucleotide
  Antisense Strand to SEQ ID NO: 432821
auauuacccauagacuuca

SEQ ID NO: 432823 - RNA, 19 nt, Artificial Sequence
  Description of Artificial Sequence: Synthetic oligonucleotide
  Sense strand starting at position 991 of SEQ ID NO: 316690
uggguaauauuguuucuca

SEQ ID NO: 432824 - RNA, 19 nt, Artificial Sequence
  Description of Artificial Sequence: Synthetic oligonucleotide
  Antisense Strand to SEQ ID NO: 432823
ugagaaacaauauuaccca

SEQ ID NO: 432825 - RNA, 19 nt, Artificial Sequence
  Description of Artificial Sequence: Synthetic oligonucleotide
  Sense strand starting at position 992 of SEQ ID NO: 316690
ggguaauauuguuucucau

SEQ ID NO: 432826 - RNA, 19 nt, Artificial Sequence
  Description of Artificial Sequence: Synthetic oligonucleotide
  Antisense Strand to SEQ ID NO: 432825
augagaaacaauauuaccc

SEQ ID NO: 432827 - RNA, 19 nt, Artificial Sequence
  Description of Artificial Sequence: Synthetic oligonucleotide
  Sense strand starting at position 1119 of SEQ ID NO: 316690
ugagcugagcaguaacaau

SEQ ID NO: 432828 - RNA, 19 nt, Artificial Sequence
  Description of Artificial Sequence: Synthetic oligonucleotide
  Antisense Strand to SEQ ID NO: 432827
auuguuacugcucagcuca

SEQ ID NO: 432829 - RNA, 19 nt, Artificial Sequence
  Description of Artificial Sequence: Synthetic oligonucleotide
  Sense strand starting at position 1190 of SEQ ID NO: 316690
agagucaaaugguuaucuu

SEQ ID NO: 432830 - RNA, 19 nt, Artificial Sequence
  Description of Artificial Sequence: Synthetic oligonucleotide
  Antisense Strand to SEQ ID NO: 432829
aagauaaccauuugacucu

SEQ ID NO: 432831 - RNA, 19 nt, Artificial Sequence
  Description of Artificial Sequence: Synthetic oligonucleotide
  Sense strand starting at position 1191 of SEQ ID NO: 316690
gagucaaaugguuaucuua

SEQ ID NO: 432832 - RNA, 19 nt, Artificial Sequence
  Description of Artificial Sequence: Synthetic oligonucleotide
  Antisense Strand to SEQ ID NO: 432831
uaagauaaccauuugacuc

SEQ ID NO: 432833 - RNA, 19 nt, Artificial Sequence
  Description of Artificial Sequence: Synthetic oligonucleotide
  Sense strand starting at position 1193 of SEQ ID NO: 316690
gucaaaugguuaucuuauu

SEQ ID NO: 432834 - RNA, 19 nt, Artificial Sequence
  Description of Artificial Sequence: Synthetic oligonucleotide
  Antisense Strand to SEQ ID NO: 432833
aauaagauaaccauuugac

SEQ ID NO: 432835 - RNA, 19 nt, Artificial Sequence
  Description of Artificial Sequence: Synthetic oligonucleotide
  Sense strand starting at position 1361 of SEQ ID NO: 316690
auacuaugacuuggcagau

SEQ ID NO: 432836 - RNA, 19 nt, Artificial Sequence
  Description of Artificial Sequence: Synthetic oligonucleotide
  Antisense Strand to SEQ ID NO: 432835
aucugccaagucauaguau

SEQ ID NO: 432837 - RNA, 19 nt, Artificial Sequence
  Description of Artificial Sequence: Synthetic oligonucleotide
  Sense strand starting at position 1362 of SEQ ID NO: 316690
uacuaugacuuggcagauc

SEQ ID NO: 432838 - RNA, 19 nt, Artificial Sequence
  Description of Artificial Sequence: Synthetic oligonucleotide
  Antisense Strand to SEQ ID NO: 432837
gaucugccaagucauagua

SEQ ID NO: 432839 - RNA, 19 nt, Artificial Sequence
  Description of Artificial Sequence: Synthetic oligonucleotide
  Sense strand starting at position 1482 of SEQ ID NO: 316690
uugcaaugauaccuugauu

SEQ ID NO: 432840 - RNA, 19 nt, Artificial Sequence
  Description of Artificial Sequence: Synthetic oligonucleotide
  Antisense Strand to SEQ ID NO: 432839
aaucaagguaucauugcaa

SEQ ID NO: 432841 - RNA, 19 nt, Artificial Sequence
  Description of Artificial Sequence: Synthetic oligonucleotide
  Sense strand starting at position 1549 of SEQ ID NO: 316690
cacgaagugaguuacaagu

SEQ ID NO: 432842 - RNA, 19 nt, Artificial Sequence
  Description of Artificial Sequence: Synthetic oligonucleotide
  Antisense Strand to SEQ ID NO: 432841
acuuguaacucacuucgug

SEQ ID NO: 432843 - RNA, 19 nt, Artificial Sequence
  Description of Artificial Sequence: Synthetic oligonucleotide
  Sense strand starting at position 1822 of SEQ ID NO: 316690
aguauuguaaaguagacau

SEQ ID NO: 432844 - RNA, 19 nt, Artificial Sequence
  Description of Artificial Sequence: Synthetic oligonucleotide
  Antisense Strand to SEQ ID NO: 432843
augucuacuuuacaauacu

SEQ ID NO: 432845 - RNA, 19 nt, Artificial Sequence
  Description of Artificial Sequence: Synthetic oligonucleotide
  Sense strand starting at position 1839 of SEQ ID NO: 316690
auuggauaauuguugagca

SEQ ID NO: 432846 - RNA, 19 nt, Artificial Sequence
  Description of Artificial Sequence: Synthetic oligonucleotide
  Antisense Strand to SEQ ID NO: 432845
ugcucaacaauuauccaau

SEQ ID NO: 432847 - RNA, 19 nt, Artificial Sequence
  Description of Artificial Sequence: Synthetic oligonucleotide
  Sense strand starting at position 1880 of SEQ ID NO: 316690
ccgacauugcugcagaaga

SEQ ID NO: 432848 - RNA, 19 nt, Artificial Sequence
  Description of Artificial Sequence: Synthetic oligonucleotide
  Antisense Strand to SEQ ID NO: 432847
ucuucugcagcaaugucgg

SEQ ID NO: 432849 - RNA, 19 nt, Artificial Sequence
  Description of Artificial Sequence: Synthetic oligonucleotide
  Sense strand starting at position 1882 of SEQ ID NO: 316690
gacauugcugcagaagaau

SEQ ID NO: 432850 - RNA, 19 nt, Artificial Sequence
  Description of Artificial Sequence: Synthetic oligonucleotide
  Antisense Strand to SEQ ID NO: 432849
auucuucugcagcaauguc

SEQ ID NO: 432851 - RNA, 19 nt, Artificial Sequence
  Description of Artificial Sequence: Synthetic oligonucleotide
  Sense strand starting at position 2283 of SEQ ID NO: 316690
gaguaaaguugucuaucau

SEQ ID NO: 432852 - RNA, 19 nt, Artificial Sequence
  Description of Artificial Sequence: Synthetic oligonucleotide
  Antisense Strand to SEQ ID NO: 432851
augauagacaacuuuacuc

SEQ ID NO: 432853 - RNA, 19 nt, Artificial Sequence
  Description of Artificial Sequence: Synthetic oligonucleotide
  Sense strand starting at position 2284 of SEQ ID NO: 316690
aguaaaguugucuaucauu

SEQ ID NO: 432854 - RNA, 19 nt, Artificial Sequence
  Description of Artificial Sequence: Synthetic oligonucleotide
  Antisense Strand to SEQ ID NO: 432853
aaugauagacaacuuuacu

SEQ ID NO: 432855 - RNA, 19 nt, Artificial Sequence
  Description of Artificial Sequence: Synthetic oligonucleotide
  Sense strand starting at position 2331 of SEQ ID NO: 316690
uguagaccaugagcuaaau

SEQ ID NO: 432856 - RNA, 19 nt, Artificial Sequence
  Description of Artificial Sequence: Synthetic oligonucleotide
  Antisense Strand to SEQ ID NO: 432855
auuuagcucauggucuaca

SEQ ID NO: 432857 - RNA, 19 nt, Artificial Sequence
  Description of Artificial Sequence: Synthetic oligonucleotide
  Sense strand starting at position 2340 of SEQ ID NO: 316690
ugagcuaaaucaguacaca

SEQ ID NO: 432858 - RNA, 19 nt, Artificial Sequence
  Description of Artificial Sequence: Synthetic oligonucleotide
  Antisense Strand to SEQ ID NO: 432857
uguguacugauuuagcuca

SEQ ID NO: 432859 - RNA, 19 nt, Artificial Sequence
  Description of Artificial Sequence: Synthetic oligonucleotide
  Sense strand starting at position 2357 of SEQ ID NO: 316690
caguccauggcuuguauuu

SEQ ID NO: 432860 - RNA, 19 nt, Artificial Sequence
  Description of Artificial Sequence: Synthetic oligonucleotide
  Antisense Strand to SEQ ID NO: 432859
aaauacaagccauggacug

SEQ ID NO: 432861 - RNA, 19 nt, Artificial Sequence
  Description of Artificial Sequence: Synthetic oligonucleotide
  Sense strand starting at position 2510 of SEQ ID NO: 316690
aagaacuugguauguguca

SEQ ID NO: 432862 - RNA, 19 nt, Artificial Sequence
  Description of Artificial Sequence: Synthetic oligonucleotide
  Antisense Strand to SEQ ID NO: 432861
ugacacauaccaaguucuu

SEQ ID NO: 432863 - RNA, 19 nt, Artificial Sequence
  Description of Artificial Sequence: Synthetic oligonucleotide
  Sense strand starting at position 2511 of SEQ ID NO: 316690
agaacuugguaugugucaa

SEQ ID NO: 432864 - RNA, 19 nt, Artificial Sequence
  Description of Artificial Sequence: Synthetic oligonucleotide
  Antisense Strand to SEQ ID NO: 432863
uugacacauaccaaguucu

SEQ ID NO: 432865 - RNA, 19 nt, Artificial Sequence
  Description of Artificial Sequence: Synthetic oligonucleotide
  Sense strand starting at position 2974 of SEQ ID NO: 316690
cagggagcuuaguuacaua

SEQ ID NO: 432866 - RNA, 19 nt, Artificial Sequence
  Description of Artificial Sequence: Synthetic oligonucleotide
  Antisense Strand to SEQ ID NO: 432865
uauguaacuaagcucccug

SEQ ID NO: 432867 - RNA, 19 nt, Artificial Sequence
  Description of Artificial Sequence: Synthetic oligonucleotide
  Sense strand starting at position 3085 of SEQ ID NO: 316690
aauagaaguggccauucuu

SEQ ID NO: 432868 - RNA, 19 nt, Artificial Sequence
  Description of Artificial Sequence: Synthetic oligonucleotide
  Antisense Strand to SEQ ID NO: 432867
aagaauggccacuucuauu

SEQ ID NO: 432869 - RNA, 19 nt, Artificial Sequence
  Description of Artificial Sequence: Synthetic oligonucleotide
  Sense strand starting at position 3092 of SEQ ID NO: 316690
guggccauucuuggaauaa

SEQ ID NO: 432870 - RNA, 19 nt, Artificial Sequence
  Description of Artificial Sequence: Synthetic oligonucleotide
  Antisense Strand to SEQ ID NO: 432869
uuauuccaagaauggccac

SEQ ID NO: 432871 - RNA, 19 nt, Artificial Sequence
  Description of Artificial Sequence: Synthetic oligonucleotide
  Sense strand starting at position 3118 of SEQ ID NO: 316690
acccaugacuggucauacu

SEQ ID NO: 432872 - RNA, 19 nt, Artificial Sequence
  Description of Artificial Sequence: Synthetic oligonucleotide
  Antisense Strand to SEQ ID NO: 432871
aguaugaccagucaugggu

SEQ ID NO: 432873 - RNA, 19 nt, Artificial Sequence
  Description of Artificial Sequence: Synthetic oligonucleotide
  Sense strand starting at position 3401 of SEQ ID NO: 316690
uggcuaggcagacauuaau

SEQ ID NO: 432874 - RNA, 19 nt, Artificial Sequence
  Description of Artificial Sequence: Synthetic oligonucleotide
  Antisense Strand to SEQ ID NO: 432873
auuaaugucugccuagcca

SEQ ID NO: 432875 - RNA, 19 nt, Artificial Sequence
  Description of Artificial Sequence: Synthetic oligonucleotide
  Sense strand starting at position 3445 of SEQ ID NO: 316690
ugcuuugggagucagugaa

SEQ ID NO: 432876 - RNA, 19 nt, Artificial Sequence
  Description of Artificial Sequence: Synthetic oligonucleotide
  Antisense Strand to SEQ ID NO: 432875
uucacugacucccaaagca

SEQ ID NO: 432877 - RNA, 19 nt, Artificial Sequence
  Description of Artificial Sequence: Synthetic oligonucleotide
  Sense strand starting at position 3665 of SEQ ID NO: 316690
gugcuucgggaucagaaau

SEQ ID NO: 432878 - RNA, 19 nt, Artificial Sequence
  Description of Artificial Sequence: Synthetic oligonucleotide
  Antisense Strand to SEQ ID NO: 432877
auuucugaucccgaagcac

SEQ ID NO: 432879 - RNA, 19 nt, Artificial Sequence
  Description of Artificial Sequence: Synthetic oligonucleotide
  Sense strand starting at position 3691 of SEQ ID NO: 316690
gccuuagucacgucuaagu

SEQ ID NO: 432880 - RNA, 19 nt, Artificial Sequence
  Description of Artificial Sequence: Synthetic oligonucleotide
  Antisense Strand to SEQ ID NO: 432879
acuuagacgugacuaaggc

SEQ ID NO: 432881 - RNA, 19 nt, Artificial Sequence
  Description of Artificial Sequence: Synthetic oligonucleotide
  Sense strand starting at position 3836 of SEQ ID NO: 316690
gaaucaucggugcauuaag

SEQ ID NO: 432882 - RNA, 19 nt, Artificial Sequence
  Description of Artificial Sequence: Synthetic oligonucleotide
  Antisense Strand to SEQ ID NO: 432881
cuuaaugcaccgaugauuc

SEQ ID NO: 432883 - RNA, 19 nt, Artificial Sequence
  Description of Artificial Sequence: Synthetic oligonucleotide
  Sense strand starting at position 7 of SEQ ID NO: 316691
uugguuguuuagucagaau

SEQ ID NO: 432884 - RNA, 19 nt, Artificial Sequence
  Description of Artificial Sequence: Synthetic oligonucleotide
  Antisense Strand to SEQ ID NO: 432883
auucugacuaaacaaccaa

SEQ ID NO: 432885 - RNA, 19 nt, Artificial Sequence
  Description of Artificial Sequence: Synthetic oligonucleotide
  Sense strand starting at position 246 of SEQ ID NO: 316691
aaugaaucccuuuguggag

SEQ ID NO: 432886 - RNA, 19 nt, Artificial Sequence
  Description of Artificial Sequence: Synthetic oligonucleotide
  Antisense Strand to SEQ ID NO: 432885
cuccacaaagggauucauu

SEQ ID NO: 432887 - RNA, 19 nt, Artificial Sequence
  Description of Artificial Sequence: Synthetic oligonucleotide
  Sense strand starting at position 279 of SEQ ID NO: 316691
uaguuaagagcaugagaug

SEQ ID NO: 432888 - RNA, 19 nt, Artificial Sequence
  Description of Artificial Sequence: Synthetic oligonucleotide
  Antisense Strand to SEQ ID NO: 432887
caucucaugcucuuaacua

SEQ ID NO: 432889 - RNA, 19 nt, Artificial Sequence
  Description of Artificial Sequence: Synthetic oligonucleotide
  Sense strand starting at position 363 of SEQ ID NO: 316691
ccaaguuucuuagucuuau

SEQ ID NO: 432890 - RNA, 19 nt, Artificial Sequence
  Description of Artificial Sequence: Synthetic oligonucleotide
  Antisense Strand to SEQ ID NO: 432889
auaagacuaagaaacuugg

SEQ ID NO: 432891 - RNA, 19 nt, Artificial Sequence
  Description of Artificial Sequence: Synthetic oligonucleotide
  Sense strand starting at position 404 of SEQ ID NO: 316691
aaugguaucugccuuauga

SEQ ID NO: 432892 - RNA, 19 nt, Artificial Sequence
  Description of Artificial Sequence: Synthetic oligonucleotide
  Antisense Strand to SEQ ID NO: 432891
ucauaaggcagauaccauu

SEQ ID NO: 432893 - RNA, 19 nt, Artificial Sequence
  Description of Artificial Sequence: Synthetic oligonucleotide
  Sense strand starting at position 406 of SEQ ID NO: 316691
ugguaucugccuuaugaau

SEQ ID NO: 432894 - RNA, 19 nt, Artificial Sequence
  Description of Artificial Sequence: Synthetic oligonucleotide
  Antisense Strand to SEQ ID NO: 432893
auucauaaggcagauacca

SEQ ID NO: 432895 - RNA, 19 nt, Artificial Sequence
  Description of Artificial Sequence: Synthetic oligonucleotide
  Sense strand starting at position 440 of SEQ ID NO: 316691
uguugauaauaccuggaga

SEQ ID NO: 432896 - RNA, 19 nt, Artificial Sequence
  Description of Artificial Sequence: Synthetic oligonucleotide
  Antisense Strand to SEQ ID NO: 432895
ucuccagguauuaucaaca

SEQ ID NO: 432897 - RNA, 19 nt, Artificial Sequence
  Description of Artificial Sequence: Synthetic oligonucleotide
  Sense strand starting at position 457 of SEQ ID NO: 316691
gagagcuuagcacauuauc

SEQ ID NO: 432898 - RNA, 19 nt, Artificial Sequence
  Description of Artificial Sequence: Synthetic oligonucleotide
  Antisense Strand to SEQ ID NO: 432897
gauaaugugcuaagcucuc

SEQ ID NO: 432899 - RNA, 19 nt, Artificial Sequence
  Description of Artificial Sequence: Synthetic oligonucleotide
  Sense strand starting at position 485 of SEQ ID NO: 316691
auaaguacucaaggguauu

SEQ ID NO: 432900 - RNA, 19 nt, Artificial Sequence
  Description of Artificial Sequence: Synthetic oligonucleotide
  Antisense Strand to SEQ ID NO: 432899
aauacccuugaguacuuau

SEQ ID NO: 432901 - RNA, 19 nt, Artificial Sequence
  Description of Artificial Sequence: Synthetic oligonucleotide
  Sense strand starting at position 598 of SEQ ID NO: 316691
aguucuuaauggcuuuaua

SEQ ID NO: 432902 - RNA, 19 nt, Artificial Sequence
  Description of Artificial Sequence: Synthetic oligonucleotide
  Antisense Strand to SEQ ID NO: 432901
uauaaagccauuaagaacu

SEQ ID NO: 432903 - RNA, 19 nt, Artificial Sequence
  Description of Artificial Sequence: Synthetic oligonucleotide
  Sense strand starting at position 933 of SEQ ID NO: 316691
auaugauuagcuugaaguu

SEQ ID NO: 432904 - RNA, 19 nt, Artificial Sequence
  Description of Artificial Sequence: Synthetic oligonucleotide
  Antisense Strand to SEQ ID NO: 432903
aacuucaagcuaaucauau

SEQ ID NO: 432905 - RNA, 19 nt, Artificial Sequence
  Description of Artificial Sequence: Synthetic oligonucleotide
  Sense strand starting at position 1106 of SEQ ID NO: 316691
uuguguauucuuuagucau

SEQ ID NO: 432906 - RNA, 19 nt, Artificial Sequence
  Description of Artificial Sequence: Synthetic oligonucleotide
  Antisense Strand to SEQ ID NO: 432905
augacuaaagaauacacaa

SEQ ID NO: 432907 - RNA, 19 nt, Artificial Sequence
  Description of Artificial Sequence: Synthetic oligonucleotide
  Sense strand starting at position 1109 of SEQ ID NO: 316691
uguauucuuuagucaugac

SEQ ID NO: 432908 - RNA, 19 nt, Artificial Sequence
  Description of Artificial Sequence: Synthetic oligonucleotide
  Antisense Strand to SEQ ID NO: 432907
gucaugacuaaagaauaca

SEQ ID NO: 432909 - RNA, 19 nt, Artificial Sequence
  Description of Artificial Sequence: Synthetic oligonucleotide
  Sense strand starting at position 1165 of SEQ ID NO: 316691
acaacucagucucuggaua

SEQ ID NO: 432910 - RNA, 19 nt, Artificial Sequence
  Description of Artificial Sequence: Synthetic oligonucleotide
  Antisense Strand to SEQ ID NO: 432909
uauccagagacugaguugu

SEQ ID NO: 432911 - RNA, 19 nt, Artificial Sequence
  Description of Artificial Sequence: Synthetic oligonucleotide
  Sense strand starting at position 1236 of SEQ ID NO: 316691
uguaguaacuaguuacuga

SEQ ID NO: 432912 - RNA, 19 nt, Artificial Sequence
  Description of Artificial Sequence: Synthetic oligonucleotide
  Antisense Strand to SEQ ID NO: 432911
ucaguaacuaguuacuaca

SEQ ID NO: 432913 - RNA, 19 nt, Artificial Sequence
  Description of Artificial Sequence: Synthetic oligonucleotide
  Sense strand starting at position 1362 of SEQ ID NO: 316691
uuggccuuucuggaguaau

SEQ ID NO: 432914 - RNA, 19 nt, Artificial Sequence
  Description of Artificial Sequence: Synthetic oligonucleotide
  Antisense Strand to SEQ ID NO: 432913
auuacuccagaaaggccaa

SEQ ID NO: 432915 - RNA, 19 nt, Artificial Sequence
  Description of Artificial Sequence: Synthetic oligonucleotide
  Sense strand starting at position 1365 of SEQ ID NO: 316691
gccuuucuggaguaauacc

SEQ ID NO: 432916 - RNA, 19 nt, Artificial Sequence
  Description of Artificial Sequence: Synthetic oligonucleotide
  Antisense Strand to SEQ ID NO: 432915
gguauuacuccagaaaggc

SEQ ID NO: 432917 - RNA, 19 nt, Artificial Sequence
  Description of Artificial Sequence: Synthetic oligonucleotide
  Sense strand starting at position 1428 of SEQ ID NO: 316691
uagguaaauguaugacugu

SEQ ID NO: 432918 - RNA, 19 nt, Artificial Sequence
  Description of Artificial Sequence: Synthetic oligonucleotide
  Antisense Strand to SEQ ID NO: 432917
acagucauacauuuaccua

SEQ ID NO: 432919 - RNA, 19 nt, Artificial Sequence
  Description of Artificial Sequence: Synthetic oligonucleotide
  Sense strand starting at position 1467 of SEQ ID NO: 316691
gaauaaauggcccacuagu

SEQ ID NO: 432920 - RNA, 19 nt, Artificial Sequence
  Description of Artificial Sequence: Synthetic oligonucleotide
  Antisense Strand to SEQ ID NO: 432919
acuagugggccauuuauuc

SEQ ID NO: 432921 - RNA, 19 nt, Artificial Sequence
  Description of Artificial Sequence: Synthetic oligonucleotide
  Sense strand starting at position 1507 of SEQ ID NO: 316691
cucuccugacuggaguaua

SEQ ID NO: 432922 - RNA, 19 nt, Artificial Sequence
  Description of Artificial Sequence: Synthetic oligonucleotide
  Antisense Strand to SEQ ID NO: 432921
uauacuccagucaggagag

SEQ ID NO: 432923 - RNA, 19 nt, Artificial Sequence
  Description of Artificial Sequence: Synthetic oligonucleotide
  Sense strand starting at position 1519 of SEQ ID NO: 316691
gaguauauacagugucauu

SEQ ID NO: 432924 - RNA, 19 nt, Artificial Sequence
  Description of Artificial Sequence: Synthetic oligonucleotide
  Antisense Strand to SEQ ID NO: 432923
aaugacacuguauauacuc

SEQ ID NO: 432925 - RNA, 19 nt, Artificial Sequence
  Description of Artificial Sequence: Synthetic oligonucleotide
  Sense strand starting at position 1557 of SEQ ID NO: 316691
uugagugcugaucaacaua

SEQ ID NO: 432926 - RNA, 19 nt, Artificial Sequence
  Description of Artificial Sequence: Synthetic oligonucleotide
  Antisense Strand to SEQ ID NO: 432925
uauguugaucagcacucaa

SEQ ID NO: 432927 - RNA, 19 nt, Artificial Sequence
  Description of Artificial Sequence: Synthetic oligonucleotide
  Sense strand starting at position 1879 of SEQ ID NO: 316691
auauuacugcucugaggag

SEQ ID NO: 432928 - RNA, 19 nt, Artificial Sequence
  Description of Artificial Sequence: Synthetic oligonucleotide
  Antisense Strand to SEQ ID NO: 432927
cuccucagagcaguaauau

SEQ ID NO: 432929 - RNA, 19 nt, Artificial Sequence
  Description of Artificial Sequence: Synthetic oligonucleotide
  Sense strand starting at position 2256 of SEQ ID NO: 316691
aaauauguguaguuaagca

SEQ ID NO: 432930 - RNA, 19 nt, Artificial Sequence
  Description of Artificial Sequence: Synthetic oligonucleotide
  Antisense Strand to SEQ ID NO: 432929
ugcuuaacuacacauauuu

SEQ ID NO: 432931 - RNA, 19 nt, Artificial Sequence
  Description of Artificial Sequence: Synthetic oligonucleotide
  Sense strand starting at position 2426 of SEQ ID NO: 316691
guuucuuucuuaguaacag

SEQ ID NO: 432932 - RNA, 19 nt, Artificial Sequence
  Description of Artificial Sequence: Synthetic oligonucleotide
  Antisense Strand to SEQ ID NO: 432931
cuguuacuaagaaagaaac

SEQ ID NO: 432933 - RNA, 19 nt, Artificial Sequence
  Description of Artificial Sequence: Synthetic oligonucleotide
  Sense strand starting at position 2621 of SEQ ID NO: 316691
auggaagaaugugcauuau

SEQ ID NO: 432934 - RNA, 19 nt, Artificial Sequence
  Description of Artificial Sequence: Synthetic oligonucleotide
  Antisense Strand to SEQ ID NO: 432933
auaaugcacauucuuccau

SEQ ID NO: 432935 - RNA, 19 nt, Artificial Sequence
  Description of Artificial Sequence: Synthetic oligonucleotide
  Sense strand starting at position 2632 of SEQ ID NO: 316691
ugcauuauugugcauaaag

SEQ ID NO: 432936 - RNA, 19 nt, Artificial Sequence
  Description of Artificial Sequence: Synthetic oligonucleotide
  Antisense Strand to SEQ ID NO: 432935
cuuuaugcacaauaaugca

SEQ ID NO: 432937 - RNA, 19 nt, Artificial Sequence
  Description of Artificial Sequence: Synthetic oligonucleotide
  Sense strand starting at position 2649 of SEQ ID NO: 316691
agggcaucaucucuugaca

SEQ ID NO: 432938 - RNA, 19 nt, Artificial Sequence
  Description of Artificial Sequence: Synthetic oligonucleotide
  Antisense Strand to SEQ ID NO: 432937
ugucaagagaugaugcccu

SEQ ID NO: 432939 - RNA, 19 nt, Artificial Sequence
  Description of Artificial Sequence: Synthetic oligonucleotide
  Sense strand starting at position 2652 of SEQ ID NO: 316691
gcaucaucucuugacagaa

SEQ ID NO: 432940 - RNA, 19 nt, Artificial Sequence
  Description of Artificial Sequence: Synthetic oligonucleotide
  Antisense Strand to SEQ ID NO: 432939
uucugucaagagaugaugc

SEQ ID NO: 432941 - RNA, 19 nt, Artificial Sequence
  Description of Artificial Sequence: Synthetic oligonucleotide
  Sense strand starting at position 2694 of SEQ ID NO: 316691
ccuaauagagcuuguuaga

SEQ ID NO: 432942 - RNA, 19 nt, Artificial Sequence
  Description of Artificial Sequence: Synthetic oligonucleotide
  Antisense Strand to SEQ ID NO: 432941
ucuaacaagcucuauuagg

SEQ ID NO: 432943 - RNA, 19 nt, Artificial Sequence
  Description of Artificial Sequence: Synthetic oligonucleotide
  Sense strand starting at position 2743 of SEQ ID NO: 316691
ucaucaguaugauuacgua

SEQ ID NO: 432944 - RNA, 19 nt, Artificial Sequence
  Description of Artificial Sequence: Synthetic oligonucleotide
  Antisense Strand to SEQ ID NO: 432943
uacguaaucauacugauga

SEQ ID NO: 432945 - RNA, 19 nt, Artificial Sequence
  Description of Artificial Sequence: Synthetic oligonucleotide
  Sense strand starting at position 2747 of SEQ ID NO: 316691
caguaugauuacguauauu

SEQ ID NO: 432946 - RNA, 19 nt, Artificial Sequence
  Description of Artificial Sequence: Synthetic oligonucleotide
  Antisense Strand to SEQ ID NO: 432945
aauauacguaaucauacug

SEQ ID NO: 432947 - RNA, 19 nt, Artificial Sequence
  Description of Artificial Sequence: Synthetic oligonucleotide
  Sense strand starting at position 2767 of SEQ ID NO: 316691
ugcauauauuuggaaacuu

SEQ ID NO: 432948 - RNA, 19 nt, Artificial Sequence
  Description of Artificial Sequence: Synthetic oligonucleotide
  Antisense Strand to SEQ ID NO: 432947
aaguuuccaaauauaugca

SEQ ID NO: 432949 - RNA, 19 nt, Artificial Sequence
  Description of Artificial Sequence: Synthetic oligonucleotide
  Sense strand starting at position 2814 of SEQ ID NO: 316691
gucuuauacggaggcaaac

SEQ ID NO: 432950 - RNA, 19 nt, Artificial Sequence
  Description of Artificial Sequence: Synthetic oligonucleotide
  Antisense Strand to SEQ ID NO: 432949
guuugccuccguauaagac

SEQ ID NO: 432951 - RNA, 19 nt, Artificial Sequence
  Description of Artificial Sequence: Synthetic oligonucleotide
  Sense strand starting at position 2863 of SEQ ID NO: 316691
gcuagagguccucaguuau

SEQ ID NO: 432952 - RNA, 19 nt, Artificial Sequence
  Description of Artificial Sequence: Synthetic oligonucleotide
  Antisense Strand to SEQ ID NO: 432951
auaacugaggaccucuagc

SEQ ID NO: 432953 - RNA, 19 nt, Artificial Sequence
  Description of Artificial Sequence: Synthetic oligonucleotide
  Sense strand starting at position 2945 of SEQ ID NO: 316691
cuucuuuaggguuaaauua

SEQ ID NO: 432954 - RNA, 19 nt, Artificial Sequence
  Description of Artificial Sequence: Synthetic oligonucleotide
  Antisense Strand to SEQ ID NO: 432953
uaauuuaacccuaaagaag

SEQ ID NO: 432955 - RNA, 19 nt, Artificial Sequence
  Description of Artificial Sequence: Synthetic oligonucleotide
  Sense strand starting at position 3063 of SEQ ID NO: 316691
ccacgcaaucaugguggaa

SEQ ID NO: 432956 - RNA, 19 nt, Artificial Sequence
  Description of Artificial Sequence: Synthetic oligonucleotide
  Antisense Strand to SEQ ID NO: 432955
uuccaccaugauugcgugg

SEQ ID NO: 432957 - RNA, 19 nt, Artificial Sequence
  Description of Artificial Sequence: Synthetic oligonucleotide
  Sense strand starting at position 3619 of SEQ ID NO: 316691
uagggcagucauuaagcuu

SEQ ID NO: 432958 - RNA, 19 nt, Artificial Sequence
  Description of Artificial Sequence: Synthetic oligonucleotide
  Antisense Strand to SEQ ID NO: 432957
aagcuuaaugacugcccua

SEQ ID NO: 432959 - RNA, 19 nt, Artificial Sequence
  Description of Artificial Sequence: Synthetic oligonucleotide
  Sense strand starting at position 3626 of SEQ ID NO: 316691
gucauuaagcuuuaaaguu

SEQ ID NO: 432960 - RNA, 19 nt, Artificial Sequence
  Description of Artificial Sequence: Synthetic oligonucleotide
  Antisense Strand to SEQ ID NO: 432959
aacuuuaaagcuuaaugac

SEQ ID NO: 432961 - RNA, 19 nt, Artificial Sequence
  Description of Artificial Sequence: Synthetic oligonucleotide
  Sense strand starting at position 3819 of SEQ ID NO: 316691
caagcuauugauggagcua

SEQ ID NO: 432962 - RNA, 19 nt, Artificial Sequence
  Description of Artificial Sequence: Synthetic oligonucleotide
  Antisense Strand to SEQ ID NO: 432961
uagcuccaucaauagcuug

SEQ ID NO: 432963 - RNA, 19 nt, Artificial Sequence
  Description of Artificial Sequence: Synthetic oligonucleotide
  Sense strand starting at position 145 of SEQ ID NO: 316692
accaaaugcguuugacacu

SEQ ID NO: 432964 - RNA, 19 nt, Artificial Sequence
  Description of Artificial Sequence: Synthetic oligonucleotide
  Antisense Strand to SEQ ID NO: 432963
agugucaaacgcauuuggu

SEQ ID NO: 432965 - RNA, 19 nt, Artificial Sequence
  Description of Artificial Sequence: Synthetic oligonucleotide
  Sense strand starting at position 151 of SEQ ID NO: 316692
ugcguuugacacuacuaga

SEQ ID NO: 432966 - RNA, 19 nt, Artificial Sequence
  Description of Artificial Sequence: Synthetic oligonucleotide
  Antisense Strand to SEQ ID NO: 432965
ucuaguagugucaaacgca

SEQ ID NO: 432967 - RNA, 19 nt, Artificial Sequence
  Description of Artificial Sequence: Synthetic oligonucleotide
  Sense strand starting at position 154 of SEQ ID NO: 316692
guuugacacuacuagauuu

SEQ ID NO: 432968 - RNA, 19 nt, Artificial Sequence
  Description of Artificial Sequence: Synthetic oligonucleotide
  Antisense Strand to SEQ ID NO: 432967
aaaucuaguagugucaaac

SEQ ID NO: 432969 - RNA, 19 nt, Artificial Sequence
  Description of Artificial Sequence: Synthetic oligonucleotide
  Sense strand starting at position 203 of SEQ ID NO: 316692
uugcaaagagcuuaagaau

SEQ ID NO: 432970 - RNA, 19 nt, Artificial Sequence
  Description of Artificial Sequence: Synthetic oligonucleotide
  Antisense Strand to SEQ ID NO: 432969
auucuuaagcucuuugcaa

SEQ ID NO: 432971 - RNA, 19 nt, Artificial Sequence
  Description of Artificial Sequence: Synthetic oligonucleotide
  Sense strand starting at position 268 of SEQ ID NO: 316692
aguugaguuucuccuggag

SEQ ID NO: 432972 - RNA, 19 nt, Artificial Sequence
  Description of Artificial Sequence: Synthetic oligonucleotide
  Antisense Strand to SEQ ID NO: 432971
cuccaggagaaacucaacu

SEQ ID NO: 432973 - RNA, 19 nt, Artificial Sequence
  Description of Artificial Sequence: Synthetic oligonucleotide
  Sense strand starting at position 271 of SEQ ID NO: 316692
ugaguuucuccuggagcca

SEQ ID NO: 432974 - RNA, 19 nt, Artificial Sequence
  Description of Artificial Sequence: Synthetic oligonucleotide
  Antisense Strand to SEQ ID NO: 432973
uggcuccaggagaaacuca

SEQ ID NO: 432975 - RNA, 19 nt, Artificial Sequence
  Description of Artificial Sequence: Synthetic oligonucleotide
  Sense strand starting at position 365 of SEQ ID NO: 316692
cauacuggguauguuuaua

SEQ ID NO: 432976 - RNA, 19 nt, Artificial Sequence
  Description of Artificial Sequence: Synthetic oligonucleotide
  Antisense Strand to SEQ ID NO: 432975
uauaaacauacccaguaug

SEQ ID NO: 432977 - RNA, 19 nt, Artificial Sequence
  Description of Artificial Sequence: Synthetic oligonucleotide
  Sense strand starting at position 394 of SEQ ID NO: 316692
accuuaaaguuucuuguuu

SEQ ID NO: 432978 - RNA, 19 nt, Artificial Sequence
  Description of Artificial Sequence: Synthetic oligonucleotide
  Antisense Strand to SEQ ID NO: 432977
aaacaagaaacuuuaaggu

SEQ ID NO: 432979 - RNA, 19 nt, Artificial Sequence
  Description of Artificial Sequence: Synthetic oligonucleotide
  Sense strand starting at position 1995 of SEQ ID NO: 316692
gggacauugcacugcaaag

SEQ ID NO: 432980 - RNA, 19 nt, Artificial Sequence
  Description of Artificial Sequence: Synthetic oligonucleotide
  Antisense Strand to SEQ ID NO: 432979
cuuugcagugcaauguccc

SEQ ID NO: 432981 - RNA, 19 nt, Artificial Sequence
  Description of Artificial Sequence: Synthetic oligonucleotide
  Sense strand starting at position 2344 of SEQ ID NO: 316692
aguucuugugugcagagga

SEQ ID NO: 432982 - RNA, 19 nt, Artificial Sequence
  Description of Artificial Sequence: Synthetic oligonucleotide
  Antisense Strand to SEQ ID NO: 432981
uccucugcacacaagaacu

SEQ ID NO: 432983 - RNA, 19 nt, Artificial Sequence
  Description of Artificial Sequence: Synthetic oligonucleotide
  Sense strand starting at position 2436 of SEQ ID NO: 316692
gcuguaauucgacuccggu

SEQ ID NO: 432984 - RNA, 19 nt, Artificial Sequence
  Description of Artificial Sequence: Synthetic oligonucleotide
  Antisense Strand to SEQ ID NO: 432983
accggagucgaauuacagc

SEQ ID NO: 432985 - RNA, 19 nt, Artificial Sequence
  Description of Artificial Sequence: Synthetic oligonucleotide
  Sense strand starting at position 2687 of SEQ ID NO: 316692
uguauaauaggauguuugu

SEQ ID NO: 432986 - RNA, 19 nt, Artificial Sequence
  Description of Artificial Sequence: Synthetic oligonucleotide
  Antisense Strand to SEQ ID NO: 432985
acaaacauccuauuauaca

SEQ ID NO: 432987 - RNA, 19 nt, Artificial Sequence
  Description of Artificial Sequence: Synthetic oligonucleotide
  Sense strand starting at position 2700 of SEQ ID NO: 316692
guuuguauuuauguaugca

SEQ ID NO: 432988 - RNA, 19 nt, Artificial Sequence
  Description of Artificial Sequence: Synthetic oligonucleotide
  Antisense Strand to SEQ ID NO: 432987
ugcauacauaaauacaaac

SEQ ID NO: 432989 - RNA, 19 nt, Artificial Sequence
  Description of Artificial Sequence: Synthetic oligonucleotide
  Sense strand starting at position 2703 of SEQ ID NO: 316692
uguauuuauguaugcaggu

SEQ ID NO: 432990 - RNA, 19 nt, Artificial Sequence
  Description of Artificial Sequence: Synthetic oligonucleotide
  Antisense Strand to SEQ ID NO: 432989
accugcauacauaaauaca

SEQ ID NO: 432991 - RNA, 19 nt, Artificial Sequence
  Description of Artificial Sequence: Synthetic oligonucleotide
  Sense strand starting at position 2704 of SEQ ID NO: 316692
guauuuauguaugcaggua

SEQ ID NO: 432992 - RNA, 19 nt, Artificial Sequence
  Description of Artificial Sequence: Synthetic oligonucleotide
  Antisense Strand to SEQ ID NO: 432991
uaccugcauacauaaauac

SEQ ID NO: 432993 - RNA, 19 nt, Artificial Sequence
  Description of Artificial Sequence: Synthetic oligonucleotide
  Sense strand starting at position 2762 of SEQ ID NO: 316692
cuacaugacguccaucauu

SEQ ID NO: 432994 - RNA, 19 nt, Artificial Sequence
  Description of Artificial Sequence: Synthetic oligonucleotide
  Antisense Strand to SEQ ID NO: 432993
aaugauggacgucauguag

SEQ ID NO: 432995 - RNA, 19 nt, Artificial Sequence
  Description of Artificial Sequence: Synthetic oligonucleotide
  Sense strand starting at position 2782 of SEQ ID NO: 316692
aagauugcuguuggaauaa

SEQ ID NO: 432996 - RNA, 19 nt, Artificial Sequence
  Description of Artificial Sequence: Synthetic oligonucleotide
  Antisense Strand to SEQ ID NO: 432995
uuauuccaacagcaaucuu

SEQ ID NO: 432997 - RNA, 19 nt, Artificial Sequence
  Description of Artificial Sequence: Synthetic oligonucleotide
  Sense strand starting at position 2820 of SEQ ID NO: 316692
cucagaguauguuucuuac

SEQ ID NO: 432998 - RNA, 19 nt, Artificial Sequence
  Description of Artificial Sequence: Synthetic oligonucleotide
  Antisense Strand to SEQ ID NO: 432997
guaagaaacauacucugag

SEQ ID NO: 432999 - RNA, 19 nt, Artificial Sequence
  Description of Artificial Sequence: Synthetic oligonucleotide
  Sense strand starting at position 2823 of SEQ ID NO: 316692
agaguauguuucuuacuuu

SEQ ID NO: 433000 - RNA, 19 nt, Artificial Sequence
  Description of Artificial Sequence: Synthetic oligonucleotide
  Antisense Strand to SEQ ID NO: 432999
aaaguaagaaacauacucu

SEQ ID NO: 433001 - RNA, 19 nt, Artificial Sequence
  Description of Artificial Sequence: Synthetic oligonucleotide
  Sense strand starting at position 2867 of SEQ ID NO: 316692
cagaucucuuaguucgacu

SEQ ID NO: 433002 - RNA, 19 nt, Artificial Sequence
  Description of Artificial Sequence: Synthetic oligonucleotide
  Antisense Strand to SEQ ID NO: 433001
agucgaacuaagagaucug

SEQ ID NO: 433003 - RNA, 19 nt, Artificial Sequence
  Description of Artificial Sequence: Synthetic oligonucleotide
  Sense strand starting at position 2878 of SEQ ID NO: 316692
guucgacuucgucauauga

SEQ ID NO: 433004 - RNA, 19 nt, Artificial Sequence
  Description of Artificial Sequence: Synthetic oligonucleotide
  Antisense Strand to SEQ ID NO: 433003
ucauaugacgaagucgaac

SEQ ID NO: 433005 - RNA, 19 nt, Artificial Sequence
  Description of Artificial Sequence: Synthetic oligonucleotide
  Sense strand starting at position 2994 of SEQ ID NO: 316692
gccaauuaggauuguaauc

SEQ ID NO: 433006 - RNA, 19 nt, Artificial Sequence
  Description of Artificial Sequence: Synthetic oligonucleotide
  Antisense Strand to SEQ ID NO: 433005
gauuacaauccuaauuggc

SEQ ID NO: 433007 - RNA, 19 nt, Artificial Sequence
  Description of Artificial Sequence: Synthetic oligonucleotide
  Sense strand starting at position 3015 of SEQ ID NO: 316692
ccuaaaucucuccguugag

SEQ ID NO: 433008 - RNA, 19 nt, Artificial Sequence
  Description of Artificial Sequence: Synthetic oligonucleotide
  Antisense Strand to SEQ ID NO: 433007
cucaacggagagauuuagg

SEQ ID NO: 433009 - RNA, 19 nt, Artificial Sequence
  Description of Artificial Sequence: Synthetic oligonucleotide
  Sense strand starting at position 3057 of SEQ ID NO: 316692
uacgguauuaugcagaguu

SEQ ID NO: 433010 - RNA, 19 nt, Artificial Sequence
  Description of Artificial Sequence: Synthetic oligonucleotide
  Antisense Strand to SEQ ID NO: 433009
aacucugcauaauaccgua

SEQ ID NO: 433011 - RNA, 19 nt, Artificial Sequence
  Description of Artificial Sequence: Synthetic oligonucleotide
  Sense strand starting at position 3059 of SEQ ID NO: 316692
cgguauuaugcagaguuuc

SEQ ID NO: 433012 - RNA, 19 nt, Artificial Sequence
  Description of Artificial Sequence: Synthetic oligonucleotide
  Antisense Strand to SEQ ID NO: 433011
gaaacucugcauaauaccg

SEQ ID NO: 433013 - RNA, 19 nt, Artificial Sequence
  Description of Artificial Sequence: Synthetic oligonucleotide
  Sense strand starting at position 3365 of SEQ ID NO: 316692
ggccaauucccaggugaac

SEQ ID NO: 433014 - RNA, 19 nt, Artificial Sequence
  Description of Artificial Sequence: Synthetic oligonucleotide
  Antisense Strand to SEQ ID NO: 433013
guucaccugggaauuggcc

SEQ ID NO: 433015 - RNA, 19 nt, Artificial Sequence
  Description of Artificial Sequence: Synthetic oligonucleotide
  Sense strand starting at position 3580 of SEQ ID NO: 316692
ggcuguaaucccgaaagga

SEQ ID NO: 433016 - RNA, 19 nt, Artificial Sequence
  Description of Artificial Sequence: Synthetic oligonucleotide
  Antisense Strand to SEQ ID NO: 433015
uccuuucgggauuacagcc

SEQ ID NO: 433017 - RNA, 19 nt, Artificial Sequence
  Description of Artificial Sequence: Synthetic oligonucleotide
  Sense strand starting at position 3596 of SEQ ID NO: 316692
ggagucucauccucuagga

SEQ ID NO: 433018 - RNA, 19 nt, Artificial Sequence
  Description of Artificial Sequence: Synthetic oligonucleotide
  Antisense Strand to SEQ ID NO: 433017
uccuagaggaugagacucc

SEQ ID NO: 433019 - RNA, 19 nt, Artificial Sequence
  Description of Artificial Sequence: Synthetic oligonucleotide
  Sense strand starting at position 3600 of SEQ ID NO: 316692
ucucauccucuaggagaga

SEQ ID NO: 433020 - RNA, 19 nt, Artificial Sequence
  Description of Artificial Sequence: Synthetic oligonucleotide
  Antisense Strand to SEQ ID NO: 433019
ucucuccuagaggaugaga

SEQ ID NO: 433021 - RNA, 19 nt, Artificial Sequence
  Description of Artificial Sequence: Synthetic oligonucleotide
  Sense strand starting at position 3636 of SEQ ID NO: 316692
agagauagcucccuggaau

SEQ ID NO: 433022 - RNA, 19 nt, Artificial Sequence
  Description of Artificial Sequence: Synthetic oligonucleotide
  Antisense Strand to SEQ ID NO: 433021
auuccagggagcuaucucu

SEQ ID NO: 433023 - RNA, 19 nt, Artificial Sequence
  Description of Artificial Sequence: Synthetic oligonucleotide
  Sense strand starting at position 3637 of SEQ ID NO: 316692
gagauagcucccuggaaua

SEQ ID NO: 433024 - RNA, 19 nt, Artificial Sequence
  Description of Artificial Sequence: Synthetic oligonucleotide
  Antisense Strand to SEQ ID NO: 433023
uauuccagggagcuaucuc

SEQ ID NO: 433025 - RNA, 19 nt, Artificial Sequence
  Description of Artificial Sequence: Synthetic oligonucleotide
  Sense strand starting at position 3647 of SEQ ID NO: 316692
ccuggaauaugucuuugca

SEQ ID NO: 433026 - RNA, 19 nt, Artificial Sequence
  Description of Artificial Sequence: Synthetic oligonucleotide
  Antisense Strand to SEQ ID NO: 433025
ugcaaagacauauuccagg

SEQ ID NO: 433027 - RNA, 19 nt, Artificial Sequence
  Description of Artificial Sequence: Synthetic oligonucleotide
  Sense strand starting at position 3649 of SEQ ID NO: 316692
uggaauaugucuuugcaau

SEQ ID NO: 433028 - RNA, 19 nt, Artificial Sequence
  Description of Artificial Sequence: Synthetic oligonucleotide
  Antisense Strand to SEQ ID NO: 433027
auugcaaagacauauucca

SEQ ID NO: 433029 - RNA, 19 nt, Artificial Sequence
  Description of Artificial Sequence: Synthetic oligonucleotide
  Sense strand starting at position 3650 of SEQ ID NO: 316692
ggaauaugucuuugcaaug

SEQ ID NO: 433030 - RNA, 19 nt, Artificial Sequence
  Description of Artificial Sequence: Synthetic oligonucleotide
  Antisense Strand to SEQ ID NO: 433029
cauugcaaagacauauucc

SEQ ID NO: 433031 - RNA, 19 nt, Artificial Sequence
  Description of Artificial Sequence: Synthetic oligonucleotide
  Sense strand starting at position 3795 of SEQ ID NO: 316692
ggcagaauagggugcuaaa

SEQ ID NO: 433032 - RNA, 19 nt, Artificial Sequence
  Description of Artificial Sequence: Synthetic oligonucleotide
  Antisense Strand to SEQ ID NO: 433031
uuuagcacccuauucugcc

SEQ ID NO: 433033 - RNA, 19 nt, Artificial Sequence
  Description of Artificial Sequence: Synthetic oligonucleotide
  Sense strand starting at position 3859 of SEQ ID NO: 316692
gucuguuugcuggugucua

SEQ ID NO: 433034 - RNA, 19 nt, Artificial Sequence
  Description of Artificial Sequence: Synthetic oligonucleotide
  Antisense Strand to SEQ ID NO: 433033
uagacaccagcaaacagac

SEQ ID NO: 433035 - RNA, 19 nt, Artificial Sequence
  Description of Artificial Sequence: Synthetic oligonucleotide
  Sense strand starting at position 3870 of SEQ ID NO: 316692
ggugucuaggaauagucuu

SEQ ID NO: 433036 - RNA, 19 nt, Artificial Sequence
  Description of Artificial Sequence: Synthetic oligonucleotide
  Antisense Strand to SEQ ID NO: 433035
aagacuauuccuagacacc

SEQ ID NO: 433037 - RNA, 19 nt, Artificial Sequence
  Description of Artificial Sequence: Synthetic oligonucleotide
  Sense strand starting at position 3896 of SEQ ID NO: 316692
ucuuacgugccagaaacuu

SEQ ID NO: 433038 - RNA, 19 nt, Artificial Sequence
  Description of Artificial Sequence: Synthetic oligonucleotide
  Antisense Strand to SEQ ID NO: 433037
aaguuucuggcacguaaga

SEQ ID NO: 433039 - RNA, 19 nt, Artificial Sequence
  Description of Artificial Sequence: Synthetic oligonucleotide
  Sense strand starting at position 3920 of SEQ ID NO: 316692
cuuuauucuugugugaaug

SEQ ID NO: 433040 - RNA, 19 nt, Artificial Sequence
  Description of Artificial Sequence: Synthetic oligonucleotide
  Antisense Strand to SEQ ID NO: 433039
cauucacacaagaauaaag

SEQ ID NO: 433041 - RNA, 19 nt, Artificial Sequence
  Description of Artificial Sequence: Synthetic oligonucleotide
  Sense strand starting at position 3940 of SEQ ID NO: 316692
uugggcucugcugaaauaa

SEQ ID NO: 433042 - RNA, 19 nt, Artificial Sequence
  Description of Artificial Sequence: Synthetic oligonucleotide
  Antisense Strand to SEQ ID NO: 433041
uuauuucagcagagcccaa

SEQ ID NO: 433043 - RNA, 19 nt, Artificial Sequence
  Description of Artificial Sequence: Synthetic oligonucleotide
  Sense strand starting at position 93 of SEQ ID NO: 316693
uugagcauuucccuucguu

SEQ ID NO: 433044 - RNA, 19 nt, Artificial Sequence
  Description of Artificial Sequence: Synthetic oligonucleotide
  Antisense Strand to SEQ ID NO: 433043
aacgaagggaaaugcucaa

SEQ ID NO: 433045 - RNA, 19 nt, Artificial Sequence
  Description of Artificial Sequence: Synthetic oligonucleotide
  Sense strand starting at position 459 of SEQ ID NO: 316693
uuuagucacuaaguaugaa

SEQ ID NO: 433046 - RNA, 19 nt, Artificial Sequence
  Description of Artificial Sequence: Synthetic oligonucleotide
  Antisense Strand to SEQ ID NO: 433045
uucauacuuagugacuaaa

SEQ ID NO: 433047 - RNA, 19 nt, Artificial Sequence
  Description of Artificial Sequence: Synthetic oligonucleotide
  Sense strand starting at position 700 of SEQ ID NO: 316693
uaugauacguauuuguagu

SEQ ID NO: 433048 - RNA, 19 nt, Artificial Sequence
  Description of Artificial Sequence: Synthetic oligonucleotide
  Antisense Strand to SEQ ID NO: 433047
acuacaaauacguaucaua

SEQ ID NO: 433049 - RNA, 19 nt, Artificial Sequence
  Description of Artificial Sequence: Synthetic oligonucleotide
  Sense strand starting at position 1040 of SEQ ID NO: 316693
gaagaaacuuuggucuuau

SEQ ID NO: 433050 - RNA, 19 nt, Artificial Sequence
  Description of Artificial Sequence: Synthetic oligonucleotide
  Antisense Strand to SEQ ID NO: 433049
auaagaccaaaguuucuuc

SEQ ID NO: 433051 - RNA, 19 nt, Artificial Sequence
  Description of Artificial Sequence: Synthetic oligonucleotide
  Sense strand starting at position 1079 of SEQ ID NO: 316693
cugagcuagcaugauaaga

SEQ ID NO: 433052 - RNA, 19 nt, Artificial Sequence
  Description of Artificial Sequence: Synthetic oligonucleotide
  Antisense Strand to SEQ ID NO: 433051
ucuuaucaugcuagcucag

SEQ ID NO: 433053 - RNA, 19 nt, Artificial Sequence
  Description of Artificial Sequence: Synthetic oligonucleotide
  Sense strand starting at position 1087 of SEQ ID NO: 316693
gcaugauaagagcaguuaa

SEQ ID NO: 433054 - RNA, 19 nt, Artificial Sequence
  Description of Artificial Sequence: Synthetic oligonucleotide
  Antisense Strand to SEQ ID NO: 433053
uuaacugcucuuaucaugc

SEQ ID NO: 433055 - RNA, 19 nt, Artificial Sequence
  Description of Artificial Sequence: Synthetic oligonucleotide
  Sense strand starting at position 1243 of SEQ ID NO: 316693
acaacuagguucuuuaaag

SEQ ID NO: 433056 - RNA, 19 nt, Artificial Sequence
  Description of Artificial Sequence: Synthetic oligonucleotide
  Antisense Strand to SEQ ID NO: 433055
cuuuaaagaaccuaguugu

SEQ ID NO: 433057 - RNA, 19 nt, Artificial Sequence
  Description of Artificial Sequence: Synthetic oligonucleotide
  Sense strand starting at position 1319 of SEQ ID NO: 316693
ccgagaaagcuccaauaca

SEQ ID NO: 433058 - RNA, 19 nt, Artificial Sequence
  Description of Artificial Sequence: Synthetic oligonucleotide
  Antisense Strand to SEQ ID NO: 433057
uguauuggagcuuucucgg

SEQ ID NO: 433059 - RNA, 19 nt, Artificial Sequence
  Description of Artificial Sequence: Synthetic oligonucleotide
  Sense strand starting at position 1388 of SEQ ID NO: 316693
aucaaucugcugggcuaaa

SEQ ID NO: 433060 - RNA, 19 nt, Artificial Sequence
  Description of Artificial Sequence: Synthetic oligonucleotide
  Antisense Strand to SEQ ID NO: 433059
uuuagcccagcagauugau

SEQ ID NO: 433061 - RNA, 19 nt, Artificial Sequence
  Description of Artificial Sequence: Synthetic oligonucleotide
  Sense strand starting at position 1544 of SEQ ID NO: 316693
guacaaaggugugugagaa

SEQ ID NO: 433062 - RNA, 19 nt, Artificial Sequence
  Description of Artificial Sequence: Synthetic oligonucleotide
  Antisense Strand to SEQ ID NO: 433061
uucucacacaccuuuguac

SEQ ID NO: 433063 - RNA, 19 nt, Artificial Sequence
  Description of Artificial Sequence: Synthetic oligonucleotide
  Sense strand starting at position 1545 of SEQ ID NO: 316693
uacaaaggugugugagaau

SEQ ID NO: 433064 - RNA, 19 nt, Artificial Sequence
  Description of Artificial Sequence: Synthetic oligonucleotide
  Antisense Strand to SEQ ID NO: 433063
auucucacacaccuuugua

SEQ ID NO: 433065 - RNA, 19 nt, Artificial Sequence
  Description of Artificial Sequence: Synthetic oligonucleotide
  Sense strand starting at position 1552 of SEQ ID NO: 316693
gugugugagaaugcgugua

SEQ ID NO: 433066 - RNA, 19 nt, Artificial Sequence
  Description of Artificial Sequence: Synthetic oligonucleotide
  Antisense Strand to SEQ ID NO: 433065
uacacgcauucucacacac

SEQ ID NO: 433067 - RNA, 19 nt, Artificial Sequence
  Description of Artificial Sequence: Synthetic oligonucleotide
  Sense strand starting at position 1737 of SEQ ID NO: 316693
ugagccaugucaucaaauc

SEQ ID NO: 433068 - RNA, 19 nt, Artificial Sequence
  Description of Artificial Sequence: Synthetic oligonucleotide
  Antisense Strand to SEQ ID NO: 433067
gauuugaugacauggcuca

SEQ ID NO: 433069 - RNA, 19 nt, Artificial Sequence
  Description of Artificial Sequence: Synthetic oligonucleotide
  Sense strand starting at position 2888 of SEQ ID NO: 316693
ucagaugugcaacaagagu

SEQ ID NO: 433070 - RNA, 19 nt, Artificial Sequence
  Description of Artificial Sequence: Synthetic oligonucleotide
  Antisense Strand to SEQ ID NO: 433069
acucuuguugcacaucuga

SEQ ID NO: 433071 - RNA, 19 nt, Artificial Sequence
  Description of Artificial Sequence: Synthetic oligonucleotide
  Sense strand starting at position 2914 of SEQ ID NO: 316693
acuaaaugagcaugcaaau

SEQ ID NO: 433072 - RNA, 19 nt, Artificial Sequence
  Description of Artificial Sequence: Synthetic oligonucleotide
  Antisense Strand to SEQ ID NO: 433071
auuugcaugcucauuuagu

SEQ ID NO: 433073 - RNA, 19 nt, Artificial Sequence
  Description of Artificial Sequence: Synthetic oligonucleotide
  Sense strand starting at position 2927 of SEQ ID NO: 316693
gcaaauguuugacuauuag

SEQ ID NO: 433074 - RNA, 19 nt, Artificial Sequence
  Description of Artificial Sequence: Synthetic oligonucleotide
  Antisense Strand to SEQ ID NO: 433073
cuaauagucaaacauuugc

SEQ ID NO: 433075 - RNA, 19 nt, Artificial Sequence
  Description of Artificial Sequence: Synthetic oligonucleotide
  Sense strand starting at position 2943 of SEQ ID NO: 316693
uaguaaagagcucaccagu

SEQ ID NO: 433076 - RNA, 19 nt, Artificial Sequence
  Description of Artificial Sequence: Synthetic oligonucleotide
  Antisense Strand to SEQ ID NO: 433075
acuggugagcucuuuacua

SEQ ID NO: 433077 - RNA, 19 nt, Artificial Sequence
  Description of Artificial Sequence: Synthetic oligonucleotide
  Sense strand starting at position 3180 of SEQ ID NO: 316693
aguagaauacacugucauu

SEQ ID NO: 433078 - RNA, 19 nt, Artificial Sequence
  Description of Artificial Sequence: Synthetic oligonucleotide
  Antisense Strand to SEQ ID NO: 433077
aaugacaguguauucuacu

SEQ ID NO: 433079 - RNA, 19 nt, Artificial Sequence
  Description of Artificial Sequence: Synthetic oligonucleotide
  Sense strand starting at position 3198 of SEQ ID NO: 316693
uuacauggccucugaaauu

SEQ ID NO: 433080 - RNA, 19 nt, Artificial Sequence
  Description of Artificial Sequence: Synthetic oligonucleotide
  Antisense Strand to SEQ ID NO: 433079
aauuucagaggccauguaa

SEQ ID NO: 433081 - RNA, 19 nt, Artificial Sequence
  Description of Artificial Sequence: Synthetic oligonucleotide
  Sense strand starting at position 3208 of SEQ ID NO: 316693
ucugaaauuccuggcccua

SEQ ID NO: 433082 - RNA, 19 nt, Artificial Sequence
  Description of Artificial Sequence: Synthetic oligonucleotide
  Antisense Strand to SEQ ID NO: 433081
uagggccaggaauuucaga

SEQ ID NO: 433083 - RNA, 19 nt, Artificial Sequence
  Description of Artificial Sequence: Synthetic oligonucleotide
  Sense strand starting at position 3396 of SEQ ID NO: 316693
cguacauaccaggacaauu

SEQ ID NO: 433084 - RNA, 19 nt, Artificial Sequence
  Description of Artificial Sequence: Synthetic oligonucleotide
  Antisense Strand to SEQ ID NO: 433083
aauuguccugguauguacg

SEQ ID NO: 433085 - RNA, 19 nt, Artificial Sequence
  Description of Artificial Sequence: Synthetic oligonucleotide
  Sense strand starting at position 3440 of SEQ ID NO: 316693
uuaaaucagugguucuaac

SEQ ID NO: 433086 - RNA, 19 nt, Artificial Sequence
  Description of Artificial Sequence: Synthetic oligonucleotide
  Antisense Strand to SEQ ID NO: 433085
guuagaaccacugauuuaa

SEQ ID NO: 433087 - RNA, 19 nt, Artificial Sequence
  Description of Artificial Sequence: Synthetic oligonucleotide
  Sense strand starting at position 3450 of SEQ ID NO: 316693
gguucuaacuagcuacaca

SEQ ID NO: 433088 - RNA, 19 nt, Artificial Sequence
  Description of Artificial Sequence: Synthetic oligonucleotide
  Antisense Strand to SEQ ID NO: 433087
uguguagcuaguuagaacc

SEQ ID NO: 433089 - RNA, 19 nt, Artificial Sequence
  Description of Artificial Sequence: Synthetic oligonucleotide
  Sense strand starting at position 3584 of SEQ ID NO: 316693
gugcacaaggguugagaau

SEQ ID NO: 433090 - RNA, 19 nt, Artificial Sequence
  Description of Artificial Sequence: Synthetic oligonucleotide
  Antisense Strand to SEQ ID NO: 433089
auucucaacccuugugcac

SEQ ID NO: 433091 - RNA, 19 nt, Artificial Sequence
  Description of Artificial Sequence: Synthetic oligonucleotide
  Sense strand starting at position 3593 of SEQ ID NO: 316693
gguugagaaucacugacua

SEQ ID NO: 433092 - RNA, 19 nt, Artificial Sequence
  Description of Artificial Sequence: Synthetic oligonucleotide
  Antisense Strand to SEQ ID NO: 433091
uagucagugauucucaacc

SEQ ID NO: 433093 - RNA, 19 nt, Artificial Sequence
  Description of Artificial Sequence: Synthetic oligonucleotide
  Sense strand starting at position 3601 of SEQ ID NO: 316693
aucacugacuaagauuuga

SEQ ID NO: 433094 - RNA, 19 nt, Artificial Sequence
  Description of Artificial Sequence: Synthetic oligonucleotide
  Antisense Strand to SEQ ID NO: 433093
ucaaaucuuagucagugau

SEQ ID NO: 433095 - RNA, 19 nt, Artificial Sequence
  Description of Artificial Sequence: Synthetic oligonucleotide
  Sense strand starting at position 3652 of SEQ ID NO: 316693
aagucuaaagagcauagua

SEQ ID NO: 433096 - RNA, 19 nt, Artificial Sequence
  Description of Artificial Sequence: Synthetic oligonucleotide
  Antisense Strand to SEQ ID NO: 433095
uacuaugcucuuuagacuu

SEQ ID NO: 433097 - RNA, 19 nt, Artificial Sequence
  Description of Artificial Sequence: Synthetic oligonucleotide
  Sense strand starting at position 3654 of SEQ ID NO: 316693
gucuaaagagcauaguagu

SEQ ID NO: 433098 - RNA, 19 nt, Artificial Sequence
  Description of Artificial Sequence: Synthetic oligonucleotide
  Antisense Strand to SEQ ID NO: 433097
acuacuaugcucuuuagac

SEQ ID NO: 433099 - RNA, 19 nt, Artificial Sequence
  Description of Artificial Sequence: Synthetic oligonucleotide
  Sense strand starting at position 3662 of SEQ ID NO: 316693
agcauaguaguagaauaau

SEQ ID NO: 433100 - RNA, 19 nt, Artificial Sequence
  Description of Artificial Sequence: Synthetic oligonucleotide
  Antisense Strand to SEQ ID NO: 433099
auuauucuacuacuaugcu

SEQ ID NO: 433101 - RNA, 19 nt, Artificial Sequence
  Description of Artificial Sequence: Synthetic oligonucleotide
  Sense strand starting at position 3777 of SEQ ID NO: 316693
uuguuuacucagggaagga

SEQ ID NO: 433102 - RNA, 19 nt, Artificial Sequence
  Description of Artificial Sequence: Synthetic oligonucleotide
  Antisense Strand to SEQ ID NO: 433101
uccuucccugaguaaacaa

SEQ ID NO: 433103 - RNA, 19 nt, Artificial Sequence
  Description of Artificial Sequence: Synthetic oligonucleotide
  Sense strand starting at position 3804 of SEQ ID NO: 316693
ggagauuacuagcuuucua

SEQ ID NO: 433104 - RNA, 19 nt, Artificial Sequence
  Description of Artificial Sequence: Synthetic oligonucleotide
  Antisense Strand to SEQ ID NO: 433103
uagaaagcuaguaaucucc

SEQ ID NO: 433105 - RNA, 19 nt, Artificial Sequence
  Description of Artificial Sequence: Synthetic oligonucleotide
  Sense strand starting at position 3818 of SEQ ID NO: 316693
uucuauuugugucugucau

SEQ ID NO: 433106 - RNA, 19 nt, Artificial Sequence
  Description of Artificial Sequence: Synthetic oligonucleotide
  Antisense Strand to SEQ ID NO: 433105
augacagacacaaauagaa

SEQ ID NO: 433107 - RNA, 19 nt, Artificial Sequence
  Description of Artificial Sequence: Synthetic oligonucleotide
  Sense strand starting at position 3819 of SEQ ID NO: 316693
ucuauuugugucugucauu

SEQ ID NO: 433108 - RNA, 19 nt, Artificial Sequence
  Description of Artificial Sequence: Synthetic oligonucleotide
  Antisense Strand to SEQ ID NO: 433107
aaugacagacacaaauaga

SEQ ID NO: 433109 - RNA, 19 nt, Artificial Sequence
  Description of Artificial Sequence: Synthetic oligonucleotide
  Sense strand starting at position 3822 of SEQ ID NO: 316693
auuugugucugucauuuga

SEQ ID NO: 433110 - RNA, 19 nt, Artificial Sequence
  Description of Artificial Sequence: Synthetic oligonucleotide
  Antisense Strand to SEQ ID NO: 433109
ucaaaugacagacacaaau

SEQ ID NO: 433111 - RNA, 19 nt, Artificial Sequence
  Description of Artificial Sequence: Synthetic oligonucleotide
  Sense strand starting at position 3824 of SEQ ID NO: 316693
uugugucugucauuugaau

SEQ ID NO: 433112 - RNA, 19 nt, Artificial Sequence
  Description of Artificial Sequence: Synthetic oligonucleotide
  Antisense Strand to SEQ ID NO: 433111
auucaaaugacagacacaa

SEQ ID NO: 433113 - RNA, 19 nt, Artificial Sequence
  Description of Artificial Sequence: Synthetic oligonucleotide
  Sense strand starting at position 3826 of SEQ ID NO: 316693
gugucugucauuugaauga

SEQ ID NO: 433114 - RNA, 19 nt, Artificial Sequence
  Description of Artificial Sequence: Synthetic oligonucleotide
  Antisense Strand to SEQ ID NO: 433113
ucauucaaaugacagacac

SEQ ID NO: 433115 - RNA, 19 nt, Artificial Sequence
  Description of Artificial Sequence: Synthetic oligonucleotide
  Sense strand starting at position 3911 of SEQ ID NO: 316693
ccaugaaggucauuggaau

SEQ ID NO: 433116 - RNA, 19 nt, Artificial Sequence
  Description of Artificial Sequence: Synthetic oligonucleotide
  Antisense Strand to SEQ ID NO: 433115
auuccaaugaccuucaugg

SEQ ID NO: 433117 - RNA, 19 nt, Artificial Sequence
  Description of Artificial Sequence: Synthetic oligonucleotide
  Sense strand starting at position 3932 of SEQ ID NO: 316693
ccacuauuaagguggguuu

SEQ ID NO: 433118 - RNA, 19 nt, Artificial Sequence
  Description of Artificial Sequence: Synthetic oligonucleotide
  Antisense Strand to SEQ ID NO: 433117
aaacccaccuuaauagugg

SEQ ID NO: 433119 - RNA, 19 nt, Artificial Sequence
  Description of Artificial Sequence: Synthetic oligonucleotide
  Sense strand starting at position 3935 of SEQ ID NO: 316693
cuauuaagguggguuucua

SEQ ID NO: 433120 - RNA, 19 nt, Artificial Sequence
  Description of Artificial Sequence: Synthetic oligonucleotide
  Antisense Strand to SEQ ID NO: 433119
uagaaacccaccuuaauag

SEQ ID NO: 433121 - RNA, 19 nt, Artificial Sequence
  Description of Artificial Sequence: Synthetic oligonucleotide
  Sense strand starting at position 3939 of SEQ ID NO: 316693
uaagguggguuucuaucaa

SEQ ID NO: 433122 - RNA, 19 nt, Artificial Sequence
  Description of Artificial Sequence: Synthetic oligonucleotide
  Antisense Strand to SEQ ID NO: 433121
uugauagaaacccaccuua

SEQ ID NO: 433123 - RNA, 19 nt, Artificial Sequence
  Description of Artificial Sequence: Synthetic oligonucleotide
  Sense strand starting at position 91 of SEQ ID NO: 316694
gccggaguaucacacaaca

SEQ ID NO: 433124 - RNA, 19 nt, Artificial Sequence
  Description of Artificial Sequence: Synthetic oligonucleotide
  Antisense Strand to SEQ ID NO: 433123
uguugugugauacuccggc

SEQ ID NO: 433125 - RNA, 19 nt, Artificial Sequence
  Description of Artificial Sequence: Synthetic oligonucleotide
  Sense strand starting at position 156 of SEQ ID NO: 316694
ggucacucacuuuaauaug

SEQ ID NO: 433126 - RNA, 19 nt, Artificial Sequence
  Description of Artificial Sequence: Synthetic oligonucleotide
  Antisense Strand to SEQ ID NO: 433125
cauauuaaagugagugacc

SEQ ID NO: 433127 - RNA, 19 nt, Artificial Sequence
  Description of Artificial Sequence: Synthetic oligonucleotide
  Sense strand starting at position 175 of SEQ ID NO: 316694
cugucaucuugggccggaa

SEQ ID NO: 433128 - RNA, 19 nt, Artificial Sequence
  Description of Artificial Sequence: Synthetic oligonucleotide
  Antisense Strand to SEQ ID NO: 433127
uuccggcccaagaugacag

SEQ ID NO: 433129 - RNA, 19 nt, Artificial Sequence
  Description of Artificial Sequence: Synthetic oligonucleotide
  Sense strand starting at position 187 of SEQ ID NO: 316694
gccggaagguuagaagaaa

SEQ ID NO: 433130 - RNA, 19 nt, Artificial Sequence
  Description of Artificial Sequence: Synthetic oligonucleotide
  Antisense Strand to SEQ ID NO: 433129
uuucuucuaaccuuccggc

SEQ ID NO: 433131 - RNA, 19 nt, Artificial Sequence
  Description of Artificial Sequence: Synthetic oligonucleotide
  Sense strand starting at position 876 of SEQ ID NO: 316694
cuuagcucugcuuaaaugu

SEQ ID NO: 433132 - RNA, 19 nt, Artificial Sequence
  Description of Artificial Sequence: Synthetic oligonucleotide
  Antisense Strand to SEQ ID NO: 433131
acauuuaagcagagcuaag

SEQ ID NO: 433133 - RNA, 19 nt, Artificial Sequence
  Description of Artificial Sequence: Synthetic oligonucleotide
  Sense strand starting at position 957 of SEQ ID NO: 316694
acucguaccuucugccaau

SEQ ID NO: 433134 - RNA, 19 nt, Artificial Sequence
  Description of Artificial Sequence: Synthetic oligonucleotide
  Antisense Strand to SEQ ID NO: 433133
auuggcagaagguacgagu

SEQ ID NO: 433135 - RNA, 19 nt, Artificial Sequence
  Description of Artificial Sequence: Synthetic oligonucleotide
  Sense strand starting at position 968 of SEQ ID NO: 316694
cugccaauucucuggcaau

SEQ ID NO: 433136 - RNA, 19 nt, Artificial Sequence
  Description of Artificial Sequence: Synthetic oligonucleotide
  Antisense Strand to SEQ ID NO: 433135
auugccagagaauuggcag

SEQ ID NO: 433137 - RNA, 19 nt, Artificial Sequence
  Description of Artificial Sequence: Synthetic oligonucleotide
  Sense strand starting at position 969 of SEQ ID NO: 316694
ugccaauucucuggcaauc

SEQ ID NO: 433138 - RNA, 19 nt, Artificial Sequence
  Description of Artificial Sequence: Synthetic oligonucleotide
  Antisense Strand to SEQ ID NO: 433137
gauugccagagaauuggca

SEQ ID NO: 433139 - RNA, 19 nt, Artificial Sequence
  Description of Artificial Sequence: Synthetic oligonucleotide
  Sense strand starting at position 1037 of SEQ ID NO: 316694
ccucuucugcccgagguuu

SEQ ID NO: 433140 - RNA, 19 nt, Artificial Sequence
  Description of Artificial Sequence: Synthetic oligonucleotide
  Antisense Strand to SEQ ID NO: 433139
aaaccucgggcagaagagg

SEQ ID NO: 433141 - RNA, 19 nt, Artificial Sequence
  Description of Artificial Sequence: Synthetic oligonucleotide
  Sense strand starting at position 1057 of SEQ ID NO: 316694
agguaaucuguuuggcgga

SEQ ID NO: 433142 - RNA, 19 nt, Artificial Sequence
  Description of Artificial Sequence: Synthetic oligonucleotide
  Antisense Strand to SEQ ID NO: 433141
uccgccaaacagauuaccu

SEQ ID NO: 433143 - RNA, 19 nt, Artificial Sequence
  Description of Artificial Sequence: Synthetic oligonucleotide
  Sense strand starting at position 1058 of SEQ ID NO: 316694
gguaaucuguuuggcggaa

SEQ ID NO: 433144 - RNA, 19 nt, Artificial Sequence
  Description of Artificial Sequence: Synthetic oligonucleotide
  Antisense Strand to SEQ ID NO: 433143
uuccgccaaacagauuacc

SEQ ID NO: 433145 - RNA, 19 nt, Artificial Sequence
  Description of Artificial Sequence: Synthetic oligonucleotide
  Sense strand starting at position 1059 of SEQ ID NO: 316694
guaaucuguuuggcggaau

SEQ ID NO: 433146 - RNA, 19 nt, Artificial Sequence
  Description of Artificial Sequence: Synthetic oligonucleotide
  Antisense Strand to SEQ ID NO: 433145
auuccgccaaacagauuac

SEQ ID NO: 433147 - RNA, 19 nt, Artificial Sequence
  Description of Artificial Sequence: Synthetic oligonucleotide
  Sense strand starting at position 1062 of SEQ ID NO: 316694
aucuguuuggcggaaugca

SEQ ID NO: 433148 - RNA, 19 nt, Artificial Sequence
  Description of Artificial Sequence: Synthetic oligonucleotide
  Antisense Strand to SEQ ID NO: 433147
ugcauuccgccaaacagau

SEQ ID NO: 433149 - RNA, 19 nt, Artificial Sequence
  Description of Artificial Sequence: Synthetic oligonucleotide
  Sense strand starting at position 1070 of SEQ ID NO: 316694
ggcggaaugcaggagaaua

SEQ ID NO: 433150 - RNA, 19 nt, Artificial Sequence
  Description of Artificial Sequence: Synthetic oligonucleotide
  Antisense Strand to SEQ ID NO: 433149
uauucuccugcauuccgcc

SEQ ID NO: 433151 - RNA, 19 nt, Artificial Sequence
  Description of Artificial Sequence: Synthetic oligonucleotide
  Sense strand starting at position 1174 of SEQ ID NO: 316694
guucccgcucuuuauguua

SEQ ID NO: 433152 - RNA, 19 nt, Artificial Sequence
  Description of Artificial Sequence: Synthetic oligonucleotide
  Antisense Strand to SEQ ID NO: 433151
uaacauaaagagcgggaac

SEQ ID NO: 433153 - RNA, 19 nt, Artificial Sequence
  Description of Artificial Sequence: Synthetic oligonucleotide
  Sense strand starting at position 1176 of SEQ ID NO: 316694
ucccgcucuuuauguuaau

SEQ ID NO: 433154 - RNA, 19 nt, Artificial Sequence
  Description of Artificial Sequence: Synthetic oligonucleotide
  Antisense Strand to SEQ ID NO: 433153
auuaacauaaagagcggga

SEQ ID NO: 433155 - RNA, 19 nt, Artificial Sequence
  Description of Artificial Sequence: Synthetic oligonucleotide
  Sense strand starting at position 1182 of SEQ ID NO: 316694
ucuuuauguuaaugcgagu

SEQ ID NO: 433156 - RNA, 19 nt, Artificial Sequence
  Description of Artificial Sequence: Synthetic oligonucleotide
  Antisense Strand to SEQ ID NO: 433155
acucgcauuaacauaaaga

SEQ ID NO: 433157 - RNA, 19 nt, Artificial Sequence
  Description of Artificial Sequence: Synthetic oligonucleotide
  Sense strand starting at position 1185 of SEQ ID NO: 316694
uuauguuaaugcgagucaa

SEQ ID NO: 433158 - RNA, 19 nt, Artificial Sequence
  Description of Artificial Sequence: Synthetic oligonucleotide
  Antisense Strand to SEQ ID NO: 433157
uugacucgcauuaacauaa

SEQ ID NO: 433159 - RNA, 19 nt, Artificial Sequence
  Description of Artificial Sequence: Synthetic oligonucleotide
  Sense strand starting at position 1494 of SEQ ID NO: 316694
gcuggaguucuccaaauag

SEQ ID NO: 433160 - RNA, 19 nt, Artificial Sequence
  Description of Artificial Sequence: Synthetic oligonucleotide
  Antisense Strand to SEQ ID NO: 433159
cuauuuggagaacuccagc

SEQ ID NO: 433161 - RNA, 19 nt, Artificial Sequence
  Description of Artificial Sequence: Synthetic oligonucleotide
  Sense strand starting at position 1631 of SEQ ID NO: 316694
gcgaaagagguuggucaga

SEQ ID NO: 433162 - RNA, 19 nt, Artificial Sequence
  Description of Artificial Sequence: Synthetic oligonucleotide
  Antisense Strand to SEQ ID NO: 433161
ucugaccaaccucuuucgc

SEQ ID NO: 433163 - RNA, 19 nt, Artificial Sequence
  Description of Artificial Sequence: Synthetic oligonucleotide
  Sense strand starting at position 1864 of SEQ ID NO: 316694
ccuggaucaccuugaugag

SEQ ID NO: 433164 - RNA, 19 nt, Artificial Sequence
  Description of Artificial Sequence: Synthetic oligonucleotide
  Antisense Strand to SEQ ID NO: 433163
cucaucaaggugauccagg

SEQ ID NO: 433165 - RNA, 19 nt, Artificial Sequence
  Description of Artificial Sequence: Synthetic oligonucleotide
  Sense strand starting at position 2462 of SEQ ID NO: 316694
gcagguccuucuccuacaa

SEQ ID NO: 433166 - RNA, 19 nt, Artificial Sequence
  Description of Artificial Sequence: Synthetic oligonucleotide
  Antisense Strand to SEQ ID NO: 433165
uuguaggagaaggaccugc

SEQ ID NO: 433167 - RNA, 19 nt, Artificial Sequence
  Description of Artificial Sequence: Synthetic oligonucleotide
  Sense strand starting at position 2632 of SEQ ID NO: 316694
ucacuucugucccgaagag

SEQ ID NO: 433168 - RNA, 19 nt, Artificial Sequence
  Description of Artificial Sequence: Synthetic oligonucleotide
  Antisense Strand to SEQ ID NO: 433167
cucuucgggacagaaguga

SEQ ID NO: 433169 - RNA, 19 nt, Artificial Sequence
  Description of Artificial Sequence: Synthetic oligonucleotide
  Sense strand starting at position 2654 of SEQ ID NO: 316694
cugggaucuucuugggaag

SEQ ID NO: 433170 - RNA, 19 nt, Artificial Sequence
  Description of Artificial Sequence: Synthetic oligonucleotide
  Antisense Strand to SEQ ID NO: 433169
cuucccaagaagaucccag

SEQ ID NO: 433171 - RNA, 19 nt, Artificial Sequence
  Description of Artificial Sequence: Synthetic oligonucleotide
  Sense strand starting at position 2656 of SEQ ID NO: 316694
gggaucuucuugggaagac

SEQ ID NO: 433172 - RNA, 19 nt, Artificial Sequence
  Description of Artificial Sequence: Synthetic oligonucleotide
  Antisense Strand to SEQ ID NO: 433171
gucuucccaagaagauccc

SEQ ID NO: 433173 - RNA, 19 nt, Artificial Sequence
  Description of Artificial Sequence: Synthetic oligonucleotide
  Sense strand starting at position 3248 of SEQ ID NO: 316694
gggccucucuggcugagaa

SEQ ID NO: 433174 - RNA, 19 nt, Artificial Sequence
  Description of Artificial Sequence: Synthetic oligonucleotide
  Antisense Strand to SEQ ID NO: 433173
uucucagccagagaggccc

SEQ ID NO: 433175 - RNA, 19 nt, Artificial Sequence
  Description of Artificial Sequence: Synthetic oligonucleotide
  Sense strand starting at position 3249 of SEQ ID NO: 316694
ggccucucuggcugagaaa

SEQ ID NO: 433176 - RNA, 19 nt, Artificial Sequence
  Description of Artificial Sequence: Synthetic oligonucleotide
  Antisense Strand to SEQ ID NO: 433175
uuucucagccagagaggcc

SEQ ID NO: 433177 - RNA, 19 nt, Artificial Sequence
  Description of Artificial Sequence: Synthetic oligonucleotide
  Sense strand starting at position 3252 of SEQ ID NO: 316694
cucucuggcugagaaacua

SEQ ID NO: 433178 - RNA, 19 nt, Artificial Sequence
  Description of Artificial Sequence: Synthetic oligonucleotide
  Antisense Strand to SEQ ID NO: 433177
uaguuucucagccagagag

SEQ ID NO: 433179 - RNA, 19 nt, Artificial Sequence
  Description of Artificial Sequence: Synthetic oligonucleotide
  Sense strand starting at position 3288 of SEQ ID NO: 316694
guuuccugagcuggguaua

SEQ ID NO: 433180 - RNA, 19 nt, Artificial Sequence
  Description of Artificial Sequence: Synthetic oligonucleotide
  Antisense Strand to SEQ ID NO: 433179
uauacccagcucaggaaac

SEQ ID NO: 433181 - RNA, 19 nt, Artificial Sequence
  Description of Artificial Sequence: Synthetic oligonucleotide
  Sense strand starting at position 3509 of SEQ ID NO: 316694
gcgcucuggugagaaucua

SEQ ID NO: 433182 - RNA, 19 nt, Artificial Sequence
  Description of Artificial Sequence: Synthetic oligonucleotide
  Antisense Strand to SEQ ID NO: 433181
uagauucucaccagagcgc

SEQ ID NO: 433183 - RNA, 19 nt, Artificial Sequence
  Description of Artificial Sequence: Synthetic oligonucleotide
  Sense strand starting at position 3681 of SEQ ID NO: 316694
cuggcagucccugaagacu

SEQ ID NO: 433184 - RNA, 19 nt, Artificial Sequence
  Description of Artificial Sequence: Synthetic oligonucleotide
  Antisense Strand to SEQ ID NO: 433183
agucuucagggacugccag

SEQ ID NO: 433185 - RNA, 19 nt, Artificial Sequence
  Description of Artificial Sequence: Synthetic oligonucleotide
  Sense strand starting at position 3690 of SEQ ID NO: 316694
ccugaagacuccugccuga

SEQ ID NO: 433186 - RNA, 19 nt, Artificial Sequence
  Description of Artificial Sequence: Synthetic oligonucleotide
  Antisense Strand to SEQ ID NO: 433185
ucaggcaggagucuucagg

SEQ ID NO: 433187 - RNA, 19 nt, Artificial Sequence
  Description of Artificial Sequence: Synthetic oligonucleotide
  Sense strand starting at position 3767 of SEQ ID NO: 316694
ucuacugcucgcugaggaa

SEQ ID NO: 433188 - RNA, 19 nt, Artificial Sequence
  Description of Artificial Sequence: Synthetic oligonucleotide
  Antisense Strand to SEQ ID NO: 433187
uuccucagcgagcaguaga

SEQ ID NO: 433189 - RNA, 19 nt, Artificial Sequence
  Description of Artificial Sequence: Synthetic oligonucleotide
  Sense strand starting at position 54 of SEQ ID NO: 316695
ccaaaugugucacugaacu

SEQ ID NO: 433190 - RNA, 19 nt, Artificial Sequence
  Description of Artificial Sequence: Synthetic oligonucleotide
  Antisense Strand to SEQ ID NO: 433189
aguucagugacacauuugg

SEQ ID NO: 433191 - RNA, 19 nt, Artificial Sequence
  Description of Artificial Sequence: Synthetic oligonucleotide
  Sense strand starting at position 74 of SEQ ID NO: 316695
guuacuugaccuugggcaa

SEQ ID NO: 433192 - RNA, 19 nt, Artificial Sequence
  Description of Artificial Sequence: Synthetic oligonucleotide
  Antisense Strand to SEQ ID NO: 433191
uugcccaaggucaaguaac

SEQ ID NO: 433193 - RNA, 19 nt, Artificial Sequence
  Description of Artificial Sequence: Synthetic oligonucleotide
  Sense strand starting at position 75 of SEQ ID NO: 316695
uuacuugaccuugggcaaa

SEQ ID NO: 433194 - RNA, 19 nt, Artificial Sequence
  Description of Artificial Sequence: Synthetic oligonucleotide
  Antisense Strand to SEQ ID NO: 433193
uuugcccaaggucaaguaa

SEQ ID NO: 433195 - RNA, 19 nt, Artificial Sequence
  Description of Artificial Sequence: Synthetic oligonucleotide
  Sense strand starting at position 77 of SEQ ID NO: 316695
acuugaccuugggcaaauu

SEQ ID NO: 433196 - RNA, 19 nt, Artificial Sequence
  Description of Artificial Sequence: Synthetic oligonucleotide
  Antisense Strand to SEQ ID NO: 433195
aauuugcccaaggucaagu

SEQ ID NO: 433197 - RNA, 19 nt, Artificial Sequence
  Description of Artificial Sequence: Synthetic oligonucleotide
  Sense strand starting at position 164 of SEQ ID NO: 316695
uguuguaaguuuccauaaa

SEQ ID NO: 433198 - RNA, 19 nt, Artificial Sequence
  Description of Artificial Sequence: Synthetic oligonucleotide
  Antisense Strand to SEQ ID NO: 433197
uuuauggaaacuuacaaca

SEQ ID NO: 433199 - RNA, 19 nt, Artificial Sequence
  Description of Artificial Sequence: Synthetic oligonucleotide
  Sense strand starting at position 523 of SEQ ID NO: 316695
accgaauuccuauguagua

SEQ ID NO: 433200 - RNA, 19 nt, Artificial Sequence
  Description of Artificial Sequence: Synthetic oligonucleotide
  Antisense Strand to SEQ ID NO: 433199
uacuacauaggaauucggu

SEQ ID NO: 433201 - RNA, 19 nt, Artificial Sequence
  Description of Artificial Sequence: Synthetic oligonucleotide
  Sense strand starting at position 770 of SEQ ID NO: 316695
gugggaaucagcgaugaug

SEQ ID NO: 433202 - RNA, 19 nt, Artificial Sequence
  Description of Artificial Sequence: Synthetic oligonucleotide
  Antisense Strand to SEQ ID NO: 433201
caucaucgcugauucccac

SEQ ID NO: 433203 - RNA, 19 nt, Artificial Sequence
  Description of Artificial Sequence: Synthetic oligonucleotide
  Sense strand starting at position 841 of SEQ ID NO: 316695
acagguuuaugggagagga

SEQ ID NO: 433204 - RNA, 19 nt, Artificial Sequence
  Description of Artificial Sequence: Synthetic oligonucleotide
  Antisense Strand to SEQ ID NO: 433203
uccucucccauaaaccugu

SEQ ID NO: 433205 - RNA, 19 nt, Artificial Sequence
  Description of Artificial Sequence: Synthetic oligonucleotide
  Sense strand starting at position 870 of SEQ ID NO: 316695
uugggauauuuacagucuu

SEQ ID NO: 433206 - RNA, 19 nt, Artificial Sequence
  Description of Artificial Sequence: Synthetic oligonucleotide
  Antisense Strand to SEQ ID NO: 433205
aagacuguaaauaucccaa

SEQ ID NO: 433207 - RNA, 19 nt, Artificial Sequence
  Description of Artificial Sequence: Synthetic oligonucleotide
  Sense strand starting at position 888 of SEQ ID NO: 316695
uggcuuugacgcgagcaaa

SEQ ID NO: 433208 - RNA, 19 nt, Artificial Sequence
  Description of Artificial Sequence: Synthetic oligonucleotide
  Antisense Strand to SEQ ID NO: 433207
uuugcucgcgucaaagcca

SEQ ID NO: 433209 - RNA, 19 nt, Artificial Sequence
  Description of Artificial Sequence: Synthetic oligonucleotide
  Sense strand starting at position 1020 of SEQ ID NO: 316695
aucuguugcucaguguuga

SEQ ID NO: 433210 - RNA, 19 nt, Artificial Sequence
  Description of Artificial Sequence: Synthetic oligonucleotide
  Antisense Strand to SEQ ID NO: 433209
ucaacacugagcaacagau

SEQ ID NO: 433211 - RNA, 19 nt, Artificial Sequence
  Description of Artificial Sequence: Synthetic oligonucleotide
  Sense strand starting at position 1389 of SEQ ID NO: 316695
gggaucugcugaguggaaa

SEQ ID NO: 433212 - RNA, 19 nt, Artificial Sequence
  Description of Artificial Sequence: Synthetic oligonucleotide
  Antisense Strand to SEQ ID NO: 433211
uuuccacucagcagauccc

SEQ ID NO: 433213 - RNA, 19 nt, Artificial Sequence
  Description of Artificial Sequence: Synthetic oligonucleotide
  Sense strand starting at position 1390 of SEQ ID NO: 316695
ggaucugcugaguggaaau

SEQ ID NO: 433214 - RNA, 19 nt, Artificial Sequence
  Description of Artificial Sequence: Synthetic oligonucleotide
  Antisense Strand to SEQ ID NO: 433213
auuuccacucagcagaucc

SEQ ID NO: 433215 - RNA, 19 nt, Artificial Sequence
  Description of Artificial Sequence: Synthetic oligonucleotide
  Sense strand starting at position 1437 of SEQ ID NO: 316695
gcgagugagcucagugacu

SEQ ID NO: 433216 - RNA, 19 nt, Artificial Sequence
  Description of Artificial Sequence: Synthetic oligonucleotide
  Antisense Strand to SEQ ID NO: 433215
agucacugagcucacucgc

SEQ ID NO: 433217 - RNA, 19 nt, Artificial Sequence
  Description of Artificial Sequence: Synthetic oligonucleotide
  Sense strand starting at position 1535 of SEQ ID NO: 316695
uggaaagggucugcgagua

SEQ ID NO: 433218 - RNA, 19 nt, Artificial Sequence
  Description of Artificial Sequence: Synthetic oligonucleotide
  Antisense Strand to SEQ ID NO: 433217
uacucgcagacccuuucca

SEQ ID NO: 433219 - RNA, 19 nt, Artificial Sequence
  Description of Artificial Sequence: Synthetic oligonucleotide
  Sense strand starting at position 1634 of SEQ ID NO: 316695
cggucucuuccaggauaaa

SEQ ID NO: 433220 - RNA, 19 nt, Artificial Sequence
  Description of Artificial Sequence: Synthetic oligonucleotide
  Antisense Strand to SEQ ID NO: 433219
uuuauccuggaagagaccg

SEQ ID NO: 433221 - RNA, 19 nt, Artificial Sequence
  Description of Artificial Sequence: Synthetic oligonucleotide
  Sense strand starting at position 2210 of SEQ ID NO: 316695
uccuuaguccuccagcguu

SEQ ID NO: 433222 - RNA, 19 nt, Artificial Sequence
  Description of Artificial Sequence: Synthetic oligonucleotide
  Antisense Strand to SEQ ID NO: 433221
aacgcuggaggacuaagga

SEQ ID NO: 433223 - RNA, 19 nt, Artificial Sequence
  Description of Artificial Sequence: Synthetic oligonucleotide
  Sense strand starting at position 2288 of SEQ ID NO: 316695
ucacaucuugcucagaaag

SEQ ID NO: 433224 - RNA, 19 nt, Artificial Sequence
  Description of Artificial Sequence: Synthetic oligonucleotide
  Antisense Strand to SEQ ID NO: 433223
cuuucugagcaagauguga

SEQ ID NO: 433225 - RNA, 19 nt, Artificial Sequence
  Description of Artificial Sequence: Synthetic oligonucleotide
  Sense strand starting at position 2489 of SEQ ID NO: 316695
uucgccaucuggguguaau

SEQ ID NO: 433226 - RNA, 19 nt, Artificial Sequence
  Description of Artificial Sequence: Synthetic oligonucleotide
  Antisense Strand to SEQ ID NO: 433225
auuacacccagauggcgaa

SEQ ID NO: 433227 - RNA, 19 nt, Artificial Sequence
  Description of Artificial Sequence: Synthetic oligonucleotide
  Sense strand starting at position 2490 of SEQ ID NO: 316695
ucgccaucuggguguaauu

SEQ ID NO: 433228 - RNA, 19 nt, Artificial Sequence
  Description of Artificial Sequence: Synthetic oligonucleotide
  Antisense Strand to SEQ ID NO: 433227
aauuacacccagauggcga

SEQ ID NO: 433229 - RNA, 19 nt, Artificial Sequence
  Description of Artificial Sequence: Synthetic oligonucleotide
  Sense strand starting at position 2492 of SEQ ID NO: 316695
gccaucuggguguaauucu

SEQ ID NO: 433230 - RNA, 19 nt, Artificial Sequence
  Description of Artificial Sequence: Synthetic oligonucleotide
  Antisense Strand to SEQ ID NO: 433229
agaauuacacccagauggc

SEQ ID NO: 433231 - RNA, 19 nt, Artificial Sequence
  Description of Artificial Sequence: Synthetic oligonucleotide
  Sense strand starting at position 2501 of SEQ ID NO: 316695
guguaauucuaaccucucu

SEQ ID NO: 433232 - RNA, 19 nt, Artificial Sequence
  Description of Artificial Sequence: Synthetic oligonucleotide
  Antisense Strand to SEQ ID NO: 433231
agagagguuagaauuacac

SEQ ID NO: 433233 - RNA, 19 nt, Artificial Sequence
  Description of Artificial Sequence: Synthetic oligonucleotide
  Sense strand starting at position 2700 of SEQ ID NO: 316695
cugacaaggcacugaaaua

SEQ ID NO: 433234 - RNA, 19 nt, Artificial Sequence
  Description of Artificial Sequence: Synthetic oligonucleotide
  Antisense Strand to SEQ ID NO: 433233
uauuucagugccuugucag

SEQ ID NO: 433235 - RNA, 19 nt, Artificial Sequence
  Description of Artificial Sequence: Synthetic oligonucleotide
  Sense strand starting at position 2781 of SEQ ID NO: 316695
guuaaaucugcauaaaguu

SEQ ID NO: 433236 - RNA, 19 nt, Artificial Sequence
  Description of Artificial Sequence: Synthetic oligonucleotide
  Antisense Strand to SEQ ID NO: 433235
aacuuuaugcagauuuaac

SEQ ID NO: 433237 - RNA, 19 nt, Artificial Sequence
  Description of Artificial Sequence: Synthetic oligonucleotide
  Sense strand starting at position 2828 of SEQ ID NO: 316695
agaggagucuuuguauaaa

SEQ ID NO: 433238 - RNA, 19 nt, Artificial Sequence
  Description of Artificial Sequence: Synthetic oligonucleotide
  Antisense Strand to SEQ ID NO: 433237
uuuauacaaagacuccucu

SEQ ID NO: 433239 - RNA, 19 nt, Artificial Sequence
  Description of Artificial Sequence: Synthetic oligonucleotide
  Sense strand starting at position 2867 of SEQ ID NO: 316695
uuaauuugccgauguccuu

SEQ ID NO: 433240 - RNA, 19 nt, Artificial Sequence
  Description of Artificial Sequence: Synthetic oligonucleotide
  Antisense Strand to SEQ ID NO: 433239
aaggacaucggcaaauuaa

SEQ ID NO: 433241 - RNA, 19 nt, Artificial Sequence
  Description of Artificial Sequence: Synthetic oligonucleotide
  Sense strand starting at position 2915 of SEQ ID NO: 316695
uuuguauaccgagaucuau

SEQ ID NO: 433242 - RNA, 19 nt, Artificial Sequence
  Description of Artificial Sequence: Synthetic oligonucleotide
  Antisense Strand to SEQ ID NO: 433241
auagaucucgguauacaaa

SEQ ID NO: 433243 - RNA, 19 nt, Artificial Sequence
  Description of Artificial Sequence: Synthetic oligonucleotide
  Sense strand starting at position 3186 of SEQ ID NO: 316695
agugauuauuuccaagccu

SEQ ID NO: 433244 - RNA, 19 nt, Artificial Sequence
  Description of Artificial Sequence: Synthetic oligonucleotide
  Antisense Strand to SEQ ID NO: 433243
aggcuuggaaauaaucacu

SEQ ID NO: 433245 - RNA, 19 nt, Artificial Sequence
  Description of Artificial Sequence: Synthetic oligonucleotide
  Sense strand starting at position 3251 of SEQ ID NO: 316695
ugugguauuucuucugcuu

SEQ ID NO: 433246 - RNA, 19 nt, Artificial Sequence
  Description of Artificial Sequence: Synthetic oligonucleotide
  Antisense Strand to SEQ ID NO: 433245
aagcagaagaaauaccaca

SEQ ID NO: 433247 - RNA, 19 nt, Artificial Sequence
  Description of Artificial Sequence: Synthetic oligonucleotide
  Sense strand starting at position 3273 of SEQ ID NO: 316695
gcagguagcacuugcuaau

SEQ ID NO: 433248 - RNA, 19 nt, Artificial Sequence
  Description of Artificial Sequence: Synthetic oligonucleotide
  Antisense Strand to SEQ ID NO: 433247
auuagcaagugcuaccugc

SEQ ID NO: 433249 - RNA, 19 nt, Artificial Sequence
  Description of Artificial Sequence: Synthetic oligonucleotide
  Sense strand starting at position 3409 of SEQ ID NO: 316695
cauggaacaucucagggua

SEQ ID NO: 433250 - RNA, 19 nt, Artificial Sequence
  Description of Artificial Sequence: Synthetic oligonucleotide
  Antisense Strand to SEQ ID NO: 433249
uacccugagauguuccaug

SEQ ID NO: 433251 - RNA, 19 nt, Artificial Sequence
  Description of Artificial Sequence: Synthetic oligonucleotide
  Sense strand starting at position 3463 of SEQ ID NO: 316695
cagugauagucaugauuua

SEQ ID NO: 433252 - RNA, 19 nt, Artificial Sequence
  Description of Artificial Sequence: Synthetic oligonucleotide
  Antisense Strand to SEQ ID NO: 433251
uaaaucaugacuaucacug

SEQ ID NO: 433253 - RNA, 19 nt, Artificial Sequence
  Description of Artificial Sequence: Synthetic oligonucleotide
  Sense strand starting at position 3526 of SEQ ID NO: 316695
gacugucaucacugggcau

SEQ ID NO: 433254 - RNA, 19 nt, Artificial Sequence
  Description of Artificial Sequence: Synthetic oligonucleotide
  Antisense Strand to SEQ ID NO: 433253
augcccagugaugacaguc

SEQ ID NO: 433255 - RNA, 19 nt, Artificial Sequence
  Description of Artificial Sequence: Synthetic oligonucleotide
  Sense strand starting at position 3528 of SEQ ID NO: 316695
cugucaucacugggcauuu

SEQ ID NO: 433256 - RNA, 19 nt, Artificial Sequence
  Description of Artificial Sequence: Synthetic oligonucleotide
  Antisense Strand to SEQ ID NO: 433255
aaaugcccagugaugacag

SEQ ID NO: 433257 - RNA, 19 nt, Artificial Sequence
  Description of Artificial Sequence: Synthetic oligonucleotide
  Sense strand starting at position 3588 of SEQ ID NO: 316695
cuugcucuggcuuaaugaa

SEQ ID NO: 433258 - RNA, 19 nt, Artificial Sequence
  Description of Artificial Sequence: Synthetic oligonucleotide
  Antisense Strand to SEQ ID NO: 433257
uucauuaagccagagcaag

SEQ ID NO: 433259 - RNA, 19 nt, Artificial Sequence
  Description of Artificial Sequence: Synthetic oligonucleotide
  Sense strand starting at position 3595 of SEQ ID NO: 316695
uggcuuaaugaacaugagu

SEQ ID NO: 433260 - RNA, 19 nt, Artificial Sequence
  Description of Artificial Sequence: Synthetic oligonucleotide
  Antisense Strand to SEQ ID NO: 433259
acucauguucauuaagcca

SEQ ID NO: 433261 - RNA, 19 nt, Artificial Sequence
  Description of Artificial Sequence: Synthetic oligonucleotide
  Sense strand starting at position 3782 of SEQ ID NO: 316695
gcagcaugacgauaguuca

SEQ ID NO: 433262 - RNA, 19 nt, Artificial Sequence
  Description of Artificial Sequence: Synthetic oligonucleotide
  Antisense Strand to SEQ ID NO: 433261
ugaacuaucgucaugcugc

SEQ ID NO: 433263 - RNA, 19 nt, Artificial Sequence
  Description of Artificial Sequence: Synthetic oligonucleotide
  Sense strand starting at position 3826 of SEQ ID NO: 316695
ccuaauuaguccucagaug

SEQ ID NO: 433264 - RNA, 19 nt, Artificial Sequence
  Description of Artificial Sequence: Synthetic oligonucleotide
  Antisense Strand to SEQ ID NO: 433263
caucugaggacuaauuagg

SEQ ID NO: 433265 - RNA, 19 nt, Artificial Sequence
  Description of Artificial Sequence: Synthetic oligonucleotide
  Sense strand starting at position 3932 of SEQ ID NO: 316695
uuacaugugugucccauua

SEQ ID NO: 433266 - RNA, 19 nt, Artificial Sequence
  Description of Artificial Sequence: Synthetic oligonucleotide
  Antisense Strand to SEQ ID NO: 433265
uaaugggacacacauguaa

SEQ ID NO: 433267 - RNA, 19 nt, Artificial Sequence
  Description of Artificial Sequence: Synthetic oligonucleotide
  Sense strand starting at position 3969 of SEQ ID NO: 316695
aaacgucauugauacagga

SEQ ID NO: 433268 - RNA, 19 nt, Artificial Sequence
  Description of Artificial Sequence: Synthetic oligonucleotide
  Antisense Strand to SEQ ID NO: 433267
uccuguaucaaugacguuu

SEQ ID NO: 433269 - RNA, 19 nt, Artificial Sequence
  Description of Artificial Sequence: Synthetic oligonucleotide
  Sense strand starting at position 104 of SEQ ID NO: 316696
guggcaacuccuuaacaga

SEQ ID NO: 433270 - RNA, 19 nt, Artificial Sequence
  Description of Artificial Sequence: Synthetic oligonucleotide
  Antisense Strand to SEQ ID NO: 433269
ucuguuaaggaguugccac

SEQ ID NO: 433271 - RNA, 19 nt, Artificial Sequence
  Description of Artificial Sequence: Synthetic oligonucleotide
  Sense strand starting at position 115 of SEQ ID NO: 316696
uuaacagaguacuuaaagu

SEQ ID NO: 433272 - RNA, 19 nt, Artificial Sequence
  Description of Artificial Sequence: Synthetic oligonucleotide
  Antisense Strand to SEQ ID NO: 433271
acuuuaaguacucuguuaa

SEQ ID NO: 433273 - RNA, 19 nt, Artificial Sequence
  Description of Artificial Sequence: Synthetic oligonucleotide
  Sense strand starting at position 199 of SEQ ID NO: 316696
gucagaacuugauccaaau

SEQ ID NO: 433274 - RNA, 19 nt, Artificial Sequence
  Description of Artificial Sequence: Synthetic oligonucleotide
  Antisense Strand to SEQ ID NO: 433273
auuuggaucaaguucugac

SEQ ID NO: 433275 - RNA, 19 nt, Artificial Sequence
  Description of Artificial Sequence: Synthetic oligonucleotide
  Sense strand starting at position 601 of SEQ ID NO: 316696
gagggcauauguucugaca

SEQ ID NO: 433276 - RNA, 19 nt, Artificial Sequence
  Description of Artificial Sequence: Synthetic oligonucleotide
  Antisense Strand to SEQ ID NO: 433275
ugucagaacauaugcccuc

SEQ ID NO: 433277 - RNA, 19 nt, Artificial Sequence
  Description of Artificial Sequence: Synthetic oligonucleotide
  Sense strand starting at position 614 of SEQ ID NO: 316696
cugacaguuccugaccuau

SEQ ID NO: 433278 - RNA, 19 nt, Artificial Sequence
  Description of Artificial Sequence: Synthetic oligonucleotide
  Antisense Strand to SEQ ID NO: 433277
auaggucaggaacugucag

SEQ ID NO: 433279 - RNA, 19 nt, Artificial Sequence
  Description of Artificial Sequence: Synthetic oligonucleotide
  Sense strand starting at position 658 of SEQ ID NO: 316696
ggguauaucucucuaauuc

SEQ ID NO: 433280 - RNA, 19 nt, Artificial Sequence
  Description of Artificial Sequence: Synthetic oligonucleotide
  Antisense Strand to SEQ ID NO: 433279
gaauuagagagauauaccc

SEQ ID NO: 433281 - RNA, 19 nt, Artificial Sequence
  Description of Artificial Sequence: Synthetic oligonucleotide
  Sense strand starting at position 832 of SEQ ID NO: 316696
gguuauuuauugcucaauc

SEQ ID NO: 433282 - RNA, 19 nt, Artificial Sequence
  Description of Artificial Sequence: Synthetic oligonucleotide
  Antisense Strand to SEQ ID NO: 433281
gauugagcaauaaauaacc

SEQ ID NO: 433283 - RNA, 19 nt, Artificial Sequence
  Description of Artificial Sequence: Synthetic oligonucleotide
  Sense strand starting at position 1138 of SEQ ID NO: 316696
auaguaagucauuaagcug

SEQ ID NO: 433284 - RNA, 19 nt, Artificial Sequence
  Description of Artificial Sequence: Synthetic oligonucleotide
  Antisense Strand to SEQ ID NO: 433283
cagcuuaaugacuuacuau

SEQ ID NO: 433285 - RNA, 19 nt, Artificial Sequence
  Description of Artificial Sequence: Synthetic oligonucleotide
  Sense strand starting at position 1144 of SEQ ID NO: 316696
agucauuaagcuggacuua

SEQ ID NO: 433286 - RNA, 19 nt, Artificial Sequence
  Description of Artificial Sequence: Synthetic oligonucleotide
  Antisense Strand to SEQ ID NO: 433285
uaaguccagcuuaaugacu

SEQ ID NO: 433287 - RNA, 19 nt, Artificial Sequence
  Description of Artificial Sequence: Synthetic oligonucleotide
  Sense strand starting at position 1145 of SEQ ID NO: 316696
gucauuaagcuggacuuaa

SEQ ID NO: 433288 - RNA, 19 nt, Artificial Sequence
  Description of Artificial Sequence: Synthetic oligonucleotide
  Antisense Strand to SEQ ID NO: 433287
uuaaguccagcuuaaugac

SEQ ID NO: 433289 - RNA, 19 nt, Artificial Sequence
  Description of Artificial Sequence: Synthetic oligonucleotide
  Sense strand starting at position 1212 of SEQ ID NO: 316696
caggcaguauuauugacaa

SEQ ID NO: 433290 - RNA, 19 nt, Artificial Sequence
  Description of Artificial Sequence: Synthetic oligonucleotide
  Antisense Strand to SEQ ID NO: 433289
uugucaauaauacugccug

SEQ ID NO: 433291 - RNA, 19 nt, Artificial Sequence
  Description of Artificial Sequence: Synthetic oligonucleotide
  Sense strand starting at position 1258 of SEQ ID NO: 316696
ugagguucucaacggauaa

SEQ ID NO: 433292 - RNA, 19 nt, Artificial Sequence
  Description of Artificial Sequence: Synthetic oligonucleotide
  Antisense Strand to SEQ ID NO: 433291
uuauccguugagaaccuca

SEQ ID NO: 433293 - RNA, 19 nt, Artificial Sequence
  Description of Artificial Sequence: Synthetic oligonucleotide
  Sense strand starting at position 1262 of SEQ ID NO: 316696
guucucaacggauaaagca

SEQ ID NO: 433294 - RNA, 19 nt, Artificial Sequence
  Description of Artificial Sequence: Synthetic oligonucleotide
  Antisense Strand to SEQ ID NO: 433293
ugcuuuauccguugagaac

SEQ ID NO: 433295 - RNA, 19 nt, Artificial Sequence
  Description of Artificial Sequence: Synthetic oligonucleotide
  Sense strand starting at position 1282 of SEQ ID NO: 316696
augaccagcugaucagauu

SEQ ID NO: 433296 - RNA, 19 nt, Artificial Sequence
  Description of Artificial Sequence: Synthetic oligonucleotide
  Antisense Strand to SEQ ID NO: 433295
aaucugaucagcuggucau

SEQ ID NO: 433297 - RNA, 19 nt, Artificial Sequence
  Description of Artificial Sequence: Synthetic oligonucleotide
  Sense strand starting at position 1472 of SEQ ID NO: 316696
gcauaaucaugacuugaga

SEQ ID NO: 433298 - RNA, 19 nt, Artificial Sequence
  Description of Artificial Sequence: Synthetic oligonucleotide
  Antisense Strand to SEQ ID NO: 433297
ucucaagucaugauuaugc

SEQ ID NO: 433299 - RNA, 19 nt, Artificial Sequence
  Description of Artificial Sequence: Synthetic oligonucleotide
  Sense strand starting at position 1602 of SEQ ID NO: 316696
auuacuaaagcauguaagu

SEQ ID NO: 433300 - RNA, 19 nt, Artificial Sequence
  Description of Artificial Sequence: Synthetic oligonucleotide
  Antisense Strand to SEQ ID NO: 433299
acuuacaugcuuuaguaau

SEQ ID NO: 433301 - RNA, 19 nt, Artificial Sequence
  Description of Artificial Sequence: Synthetic oligonucleotide
  Sense strand starting at position 1613 of SEQ ID NO: 316696
auguaaguuagggauguaa

SEQ ID NO: 433302 - RNA, 19 nt, Artificial Sequence
  Description of Artificial Sequence: Synthetic oligonucleotide
  Antisense Strand to SEQ ID NO: 433301
uuacaucccuaacuuacau

SEQ ID NO: 433303 - RNA, 19 nt, Artificial Sequence
  Description of Artificial Sequence: Synthetic oligonucleotide
  Sense strand starting at position 1615 of SEQ ID NO: 316696
guaaguuagggauguaaua

SEQ ID NO: 433304 - RNA, 19 nt, Artificial Sequence
  Description of Artificial Sequence: Synthetic oligonucleotide
  Antisense Strand to SEQ ID NO: 433303
uauuacaucccuaacuuac

SEQ ID NO: 433305 - RNA, 19 nt, Artificial Sequence
  Description of Artificial Sequence: Synthetic oligonucleotide
  Sense strand starting at position 1670 of SEQ ID NO: 316696
uuaauuacauuggcaagua

SEQ ID NO: 433306 - RNA, 19 nt, Artificial Sequence
  Description of Artificial Sequence: Synthetic oligonucleotide
  Antisense Strand to SEQ ID NO: 433305
uacuugccaauguaauuaa

SEQ ID NO: 433307 - RNA, 19 nt, Artificial Sequence
  Description of Artificial Sequence: Synthetic oligonucleotide
  Sense strand starting at position 1680 of SEQ ID NO: 316696
uggcaaguauuuguguaca

SEQ ID NO: 433308 - RNA, 19 nt, Artificial Sequence
  Description of Artificial Sequence: Synthetic oligonucleotide
  Antisense Strand to SEQ ID NO: 433307
uguacacaaauacuugcca

SEQ ID NO: 433309 - RNA, 19 nt, Artificial Sequence
  Description of Artificial Sequence: Synthetic oligonucleotide
  Sense strand starting at position 1682 of SEQ ID NO: 316696
gcaaguauuuguguacagu

SEQ ID NO: 433310 - RNA, 19 nt, Artificial Sequence
  Description of Artificial Sequence: Synthetic oligonucleotide
  Antisense Strand to SEQ ID NO: 433309
acuguacacaaauacuugc

SEQ ID NO: 433311 - RNA, 19 nt, Artificial Sequence
  Description of Artificial Sequence: Synthetic oligonucleotide
  Sense strand starting at position 1737 of SEQ ID NO: 316696
aguuacaugggaugucaca

SEQ ID NO: 433312 - RNA, 19 nt, Artificial Sequence
  Description of Artificial Sequence: Synthetic oligonucleotide
  Antisense Strand to SEQ ID NO: 433311
ugugacaucccauguaacu

SEQ ID NO: 433313 - RNA, 19 nt, Artificial Sequence
  Description of Artificial Sequence: Synthetic oligonucleotide
  Sense strand starting at position 1989 of SEQ ID NO: 316696
ccuuguuggccagaaggga

SEQ ID NO: 433314 - RNA, 19 nt, Artificial Sequence
  Description of Artificial Sequence: Synthetic oligonucleotide
  Antisense Strand to SEQ ID NO: 433313
ucccuucuggccaacaagg

SEQ ID NO: 433315 - RNA, 19 nt, Artificial Sequence
  Description of Artificial Sequence: Synthetic oligonucleotide
  Sense strand starting at position 2096 of SEQ ID NO: 316696
cugcauggaguuuacaaga

SEQ ID NO: 433316 - RNA, 19 nt, Artificial Sequence
  Description of Artificial Sequence: Synthetic oligonucleotide
  Antisense Strand to SEQ ID NO: 433315
ucuuguaaacuccaugcag

SEQ ID NO: 433317 - RNA, 19 nt, Artificial Sequence
  Description of Artificial Sequence: Synthetic oligonucleotide
  Sense strand starting at position 2169 of SEQ ID NO: 316696
gcacuuggucacgacuaca

SEQ ID NO: 433318 - RNA, 19 nt, Artificial Sequence
  Description of Artificial Sequence: Synthetic oligonucleotide
  Antisense Strand to SEQ ID NO: 433317
uguagucgugaccaagugc

SEQ ID NO: 433319 - RNA, 19 nt, Artificial Sequence
  Description of Artificial Sequence: Synthetic oligonucleotide
  Sense strand starting at position 2188 of SEQ ID NO: 316696
uuucuccuagagugacauu

SEQ ID NO: 433320 - RNA, 19 nt, Artificial Sequence
  Description of Artificial Sequence: Synthetic oligonucleotide
  Antisense Strand to SEQ ID NO: 433319
aaugucacucuaggagaaa

SEQ ID NO: 433321 - RNA, 19 nt, Artificial Sequence
  Description of Artificial Sequence: Synthetic oligonucleotide
  Sense strand starting at position 2197 of SEQ ID NO: 316696
gagugacauugucuuuaca

SEQ ID NO: 433322 - RNA, 19 nt, Artificial Sequence
  Description of Artificial Sequence: Synthetic oligonucleotide
  Antisense Strand to SEQ ID NO: 433321
uguaaagacaaugucacuc

SEQ ID NO: 433323 - RNA, 19 nt, Artificial Sequence
  Description of Artificial Sequence: Synthetic oligonucleotide
  Sense strand starting at position 2199 of SEQ ID NO: 316696
gugacauugucuuuacaua

SEQ ID NO: 433324 - RNA, 19 nt, Artificial Sequence
  Description of Artificial Sequence: Synthetic oligonucleotide
  Antisense Strand to SEQ ID NO: 433323
uauguaaagacaaugucac

SEQ ID NO: 433325 - RNA, 19 nt, Artificial Sequence
  Description of Artificial Sequence: Synthetic oligonucleotide
  Sense strand starting at position 2325 of SEQ ID NO: 316696
gguaauucuuaaguccacu

SEQ ID NO: 433326 - RNA, 19 nt, Artificial Sequence
  Description of Artificial Sequence: Synthetic oligonucleotide
  Antisense Strand to SEQ ID NO: 433325
aguggacuuaagaauuacc

SEQ ID NO: 433327 - RNA, 19 nt, Artificial Sequence
  Description of Artificial Sequence: Synthetic oligonucleotide
  Sense strand starting at position 2338 of SEQ ID NO: 316696
uccacucaaguuugagaau

SEQ ID NO: 433328 - RNA, 19 nt, Artificial Sequence
  Description of Artificial Sequence: Synthetic oligonucleotide
  Antisense Strand to SEQ ID NO: 433327
auucucaaacuugagugga

SEQ ID NO: 433329 - RNA, 19 nt, Artificial Sequence
  Description of Artificial Sequence: Synthetic oligonucleotide
  Sense strand starting at position 2347 of SEQ ID NO: 316696
guuugagaaucaccauagu

SEQ ID NO: 433330 - RNA, 19 nt, Artificial Sequence
  Description of Artificial Sequence: Synthetic oligonucleotide
  Antisense Strand to SEQ ID NO: 433329
acuauggugauucucaaac

SEQ ID NO: 433331 - RNA, 19 nt, Artificial Sequence
  Description of Artificial Sequence: Synthetic oligonucleotide
  Sense strand starting at position 2397 of SEQ ID NO: 316696
cauaguagaugauuacagu

SEQ ID NO: 433332 - RNA, 19 nt, Artificial Sequence
  Description of Artificial Sequence: Synthetic oligonucleotide
  Antisense Strand to SEQ ID NO: 433331
acuguaaucaucuacuaug

SEQ ID NO: 433333 - RNA, 19 nt, Artificial Sequence
  Description of Artificial Sequence: Synthetic oligonucleotide
  Sense strand starting at position 2498 of SEQ ID NO: 316696
auugaaauagcucaaaugu

SEQ ID NO: 433334 - RNA, 19 nt, Artificial Sequence
  Description of Artificial Sequence: Synthetic oligonucleotide
  Antisense Strand to SEQ ID NO: 433333
acauuugagcuauuucaau

SEQ ID NO: 433335 - RNA, 19 nt, Artificial Sequence
  Description of Artificial Sequence: Synthetic oligonucleotide
  Sense strand starting at position 2689 of SEQ ID NO: 316696
uucugaagugaauauugua

SEQ ID NO: 433336 - RNA, 19 nt, Artificial Sequence
  Description of Artificial Sequence: Synthetic oligonucleotide
  Antisense Strand to SEQ ID NO: 433335
uacaauauucacuucagaa

SEQ ID NO: 433337 - RNA, 19 nt, Artificial Sequence
  Description of Artificial Sequence: Synthetic oligonucleotide
  Sense strand starting at position 3058 of SEQ ID NO: 316696
gguugcuuugauuaauauu

SEQ ID NO: 433338 - RNA, 19 nt, Artificial Sequence
  Description of Artificial Sequence: Synthetic oligonucleotide
  Antisense Strand to SEQ ID NO: 433337
aauauuaaucaaagcaacc

SEQ ID NO: 433339 - RNA, 19 nt, Artificial Sequence
  Description of Artificial Sequence: Synthetic oligonucleotide
  Sense strand starting at position 3074 of SEQ ID NO: 316696
auuugacacuuagaaguau

SEQ ID NO: 433340 - RNA, 19 nt, Artificial Sequence
  Description of Artificial Sequence: Synthetic oligonucleotide
  Antisense Strand to SEQ ID NO: 433339
auacuucuaagugucaaau

SEQ ID NO: 433341 - RNA, 19 nt, Artificial Sequence
  Description of Artificial Sequence: Synthetic oligonucleotide
  Sense strand starting at position 3240 of SEQ ID NO: 316696
accgaagcucuacaucaua

SEQ ID NO: 433342 - RNA, 19 nt, Artificial Sequence
  Description of Artificial Sequence: Synthetic oligonucleotide
  Antisense Strand to SEQ ID NO: 433341
uaugauguagagcuucggu

SEQ ID NO: 433343 - RNA, 19 nt, Artificial Sequence
  Description of Artificial Sequence: Synthetic oligonucleotide
  Sense strand starting at position 3270 of SEQ ID NO: 316696
aagauagagcuaugucaag

SEQ ID NO: 433344 - RNA, 19 nt, Artificial Sequence
  Description of Artificial Sequence: Synthetic oligonucleotide
  Antisense Strand to SEQ ID NO: 433343
cuugacauagcucuaucuu

SEQ ID NO: 433345 - RNA, 19 nt, Artificial Sequence
  Description of Artificial Sequence: Synthetic oligonucleotide
  Sense strand starting at position 3488 of SEQ ID NO: 316696
ugaagauauuccuuuaugu

SEQ ID NO: 433346 - RNA, 19 nt, Artificial Sequence
  Description of Artificial Sequence: Synthetic oligonucleotide
  Antisense Strand to SEQ ID NO: 433345
acauaaaggaauaucuuca

SEQ ID NO: 433347 - RNA, 19 nt, Artificial Sequence
  Description of Artificial Sequence: Synthetic oligonucleotide
  Sense strand starting at position 3579 of SEQ ID NO: 316696
acaguuuauucuuuggaac

SEQ ID NO: 433348 - RNA, 19 nt, Artificial Sequence
  Description of Artificial Sequence: Synthetic oligonucleotide
  Antisense Strand to SEQ ID NO: 433347
guuccaaagaauaaacugu

SEQ ID NO: 433349 - RNA, 19 nt, Artificial Sequence
  Description of Artificial Sequence: Synthetic oligonucleotide
  Sense strand starting at position 75 of SEQ ID NO: 316697
cccaaugugccauauuaag

SEQ ID NO: 433350 - RNA, 19 nt, Artificial Sequence
  Description of Artificial Sequence: Synthetic oligonucleotide
  Antisense Strand to SEQ ID NO: 433349
cuuaauauggcacauuggg

SEQ ID NO: 433351 - RNA, 19 nt, Artificial Sequence
  Description of Artificial Sequence: Synthetic oligonucleotide
  Sense strand starting at position 89 of SEQ ID NO: 316697
uuaagauaguuguuggaga

SEQ ID NO: 433352 - RNA, 19 nt, Artificial Sequence
  Description of Artificial Sequence: Synthetic oligonucleotide
  Antisense Strand to SEQ ID NO: 433351
ucuccaacaacuaucuuaa

SEQ ID NO: 433353 - RNA, 19 nt, Artificial Sequence
  Description of Artificial Sequence: Synthetic oligonucleotide
  Sense strand starting at position 91 of SEQ ID NO: 316697
aagauaguuguuggagaga

SEQ ID NO: 433354 - RNA, 19 nt, Artificial Sequence
  Description of Artificial Sequence: Synthetic oligonucleotide
  Antisense Strand to SEQ ID NO: 433353
ucucuccaacaacuaucuu

SEQ ID NO: 433355 - RNA, 19 nt, Artificial Sequence
  Description of Artificial Sequence: Synthetic oligonucleotide
  Sense strand starting at position 186 of SEQ ID NO: 316697
gcuagaagauuacucauau

SEQ ID NO: 433356 - RNA, 19 nt, Artificial Sequence
  Description of Artificial Sequence: Synthetic oligonucleotide
  Antisense Strand to SEQ ID NO: 433355
auaugaguaaucuucuagc

SEQ ID NO: 433357 - RNA, 19 nt, Artificial Sequence
  Description of Artificial Sequence: Synthetic oligonucleotide
  Sense strand starting at position 258 of SEQ ID NO: 316697
ucauuauguuggccagaaa

SEQ ID NO: 433358 - RNA, 19 nt, Artificial Sequence
  Description of Artificial Sequence: Synthetic oligonucleotide
  Antisense Strand to SEQ ID NO: 433357
uuucuggccaacauaauga

SEQ ID NO: 433359 - RNA, 19 nt, Artificial Sequence
  Description of Artificial Sequence: Synthetic oligonucleotide
  Sense strand starting at position 430 of SEQ ID NO: 316697
uagcaagugccucaaagua

SEQ ID NO: 433360 - RNA, 19 nt, Artificial Sequence
  Description of Artificial Sequence: Synthetic oligonucleotide
  Antisense Strand to SEQ ID NO: 433359
uacuuugaggcacuugcua

SEQ ID NO: 433361 - RNA, 19 nt, Artificial Sequence
  Description of Artificial Sequence: Synthetic oligonucleotide
  Sense strand starting at position 491 of SEQ ID NO: 316697
cuguuuaaucuagaaguuu

SEQ ID NO: 433362 - RNA, 19 nt, Artificial Sequence
  Description of Artificial Sequence: Synthetic oligonucleotide
  Antisense Strand to SEQ ID NO: 433361
aaacuucuagauuaaacag

SEQ ID NO: 433363 - RNA, 19 nt, Artificial Sequence
  Description of Artificial Sequence: Synthetic oligonucleotide
  Sense strand starting at position 563 of SEQ ID NO: 316697
gagguaaccugcucaaagu

SEQ ID NO: 433364 - RNA, 19 nt, Artificial Sequence
  Description of Artificial Sequence: Synthetic oligonucleotide
  Antisense Strand to SEQ ID NO: 433363
acuuugagcagguuaccuc

SEQ ID NO: 433365 - RNA, 19 nt, Artificial Sequence
  Description of Artificial Sequence: Synthetic oligonucleotide
  Sense strand starting at position 564 of SEQ ID NO: 316697
agguaaccugcucaaaguu

SEQ ID NO: 433366 - RNA, 19 nt, Artificial Sequence
  Description of Artificial Sequence: Synthetic oligonucleotide
  Antisense Strand to SEQ ID NO: 433365
aacuuugagcagguuaccu

SEQ ID NO: 433367 - RNA, 19 nt, Artificial Sequence
  Description of Artificial Sequence: Synthetic oligonucleotide
  Sense strand starting at position 571 of SEQ ID NO: 316697
cugcucaaaguuugaaaga

SEQ ID NO: 433368 - RNA, 19 nt, Artificial Sequence
  Description of Artificial Sequence: Synthetic oligonucleotide
  Antisense Strand to SEQ ID NO: 433367
ucuuucaaacuuugagcag

SEQ ID NO: 433369 - RNA, 19 nt, Artificial Sequence
  Description of Artificial Sequence: Synthetic oligonucleotide
  Sense strand starting at position 664 of SEQ ID NO: 316697
gucaauaugcaauaguuaa

SEQ ID NO: 433370 - RNA, 19 nt, Artificial Sequence
  Description of Artificial Sequence: Synthetic oligonucleotide
  Antisense Strand to SEQ ID NO: 433369
uuaacuauugcauauugac

SEQ ID NO: 433371 - RNA, 19 nt, Artificial Sequence
  Description of Artificial Sequence: Synthetic oligonucleotide
  Sense strand starting at position 796 of SEQ ID NO: 316697
ugcacuagccaacagaaau

SEQ ID NO: 433372 - RNA, 19 nt, Artificial Sequence
  Description of Artificial Sequence: Synthetic oligonucleotide
  Antisense Strand to SEQ ID NO: 433371
auuucuguuggcuagugca

SEQ ID NO: 433373 - RNA, 19 nt, Artificial Sequence
  Description of Artificial Sequence: Synthetic oligonucleotide
  Sense strand starting at position 930 of SEQ ID NO: 316697
ccacgaacacuccaguaau

SEQ ID NO: 433374 - RNA, 19 nt, Artificial Sequence
  Description of Artificial Sequence: Synthetic oligonucleotide
  Antisense Strand to SEQ ID NO: 433373
auuacuggaguguucgugg

SEQ ID NO: 433375 - RNA, 19 nt, Artificial Sequence
  Description of Artificial Sequence: Synthetic oligonucleotide
  Sense strand starting at position 933 of SEQ ID NO: 316697
cgaacacuccaguaauauu

SEQ ID NO: 433376 - RNA, 19 nt, Artificial Sequence
  Description of Artificial Sequence: Synthetic oligonucleotide
  Antisense Strand to SEQ ID NO: 433375
aauauuacuggaguguucg

SEQ ID NO: 433377 - RNA, 19 nt, Artificial Sequence
  Description of Artificial Sequence: Synthetic oligonucleotide
  Sense strand starting at position 949 of SEQ ID NO: 316697
auuaauaccuaagugaagu

SEQ ID NO: 433378 - RNA, 19 nt, Artificial Sequence
  Description of Artificial Sequence: Synthetic oligonucleotide
  Antisense Strand to SEQ ID NO: 433377
acuucacuuagguauuaau

SEQ ID NO: 433379 - RNA, 19 nt, Artificial Sequence
  Description of Artificial Sequence: Synthetic oligonucleotide
  Sense strand starting at position 1146 of SEQ ID NO: 316697
ggugguguugguagaguuu

SEQ ID NO: 433380 - RNA, 19 nt, Artificial Sequence
  Description of Artificial Sequence: Synthetic oligonucleotide
  Antisense Strand to SEQ ID NO: 433379
aaacucuaccaacaccacc

SEQ ID NO: 433381 - RNA, 19 nt, Artificial Sequence
  Description of Artificial Sequence: Synthetic oligonucleotide
  Sense strand starting at position 1563 of SEQ ID NO: 316697
gcccgagugcaguugucua

SEQ ID NO: 433382 - RNA, 19 nt, Artificial Sequence
  Description of Artificial Sequence: Synthetic oligonucleotide
  Antisense Strand to SEQ ID NO: 433381
uagacaacugcacucgggc

SEQ ID NO: 433383 - RNA, 19 nt, Artificial Sequence
  Description of Artificial Sequence: Synthetic oligonucleotide
  Sense strand starting at position 1988 of SEQ ID NO: 316697
ggccgcuuugguuucuuau

SEQ ID NO: 433384 - RNA, 19 nt, Artificial Sequence
  Description of Artificial Sequence: Synthetic oligonucleotide
  Antisense Strand to SEQ ID NO: 433383
auaagaaaccaaagcggcc

SEQ ID NO: 433385 - RNA, 19 nt, Artificial Sequence
  Description of Artificial Sequence: Synthetic oligonucleotide
  Sense strand starting at position 1989 of SEQ ID NO: 316697
gccgcuuugguuucuuaua

SEQ ID NO: 433386 - RNA, 19 nt, Artificial Sequence
  Description of Artificial Sequence: Synthetic oligonucleotide
  Antisense Strand to SEQ ID NO: 433385
uauaagaaaccaaagcggc

SEQ ID NO: 433387 - RNA, 19 nt, Artificial Sequence
  Description of Artificial Sequence: Synthetic oligonucleotide
  Sense strand starting at position 2053 of SEQ ID NO: 316697
uauuuagaccgcuguuauu

SEQ ID NO: 433388 - RNA, 19 nt, Artificial Sequence
  Description of Artificial Sequence: Synthetic oligonucleotide
  Antisense Strand to SEQ ID NO: 433387
aauaacagcggucuaaaua

SEQ ID NO: 433389 - RNA, 19 nt, Artificial Sequence
  Description of Artificial Sequence: Synthetic oligonucleotide
  Sense strand starting at position 2452 of SEQ ID NO: 316697
ggaguugucccagaaccuu

SEQ ID NO: 433390 - RNA, 19 nt, Artificial Sequence
  Description of Artificial Sequence: Synthetic oligonucleotide
  Antisense Strand to SEQ ID NO: 433389
aagguucugggacaacucc

SEQ ID NO: 433391 - RNA, 19 nt, Artificial Sequence
  Description of Artificial Sequence: Synthetic oligonucleotide
  Sense strand starting at position 2595 of SEQ ID NO: 316697
aaggaaggcuuucuuugaa

SEQ ID NO: 433392 - RNA, 19 nt, Artificial Sequence
  Description of Artificial Sequence: Synthetic oligonucleotide
  Antisense Strand to SEQ ID NO: 433391
uucaaagaaagccuuccuu

SEQ ID NO: 433393 - RNA, 19 nt, Artificial Sequence
  Description of Artificial Sequence: Synthetic oligonucleotide
  Sense strand starting at position 2608 of SEQ ID NO: 316697
uuugaaacuuucucucgga

SEQ ID NO: 433394 - RNA, 19 nt, Artificial Sequence
  Description of Artificial Sequence: Synthetic oligonucleotide
  Antisense Strand to SEQ ID NO: 433393
uccgagagaaaguuucaaa

SEQ ID NO: 433395 - RNA, 19 nt, Artificial Sequence
  Description of Artificial Sequence: Synthetic oligonucleotide
  Sense strand starting at position 2609 of SEQ ID NO: 316697
uugaaacuuucucucggau

SEQ ID NO: 433396 - RNA, 19 nt, Artificial Sequence
  Description of Artificial Sequence: Synthetic oligonucleotide
  Antisense Strand to SEQ ID NO: 433395
auccgagagaaaguuucaa

SEQ ID NO: 433397 - RNA, 19 nt, Artificial Sequence
  Description of Artificial Sequence: Synthetic oligonucleotide
  Sense strand starting at position 2727 of SEQ ID NO: 316697
cuuggagaaguaugcgaaa

SEQ ID NO: 433398 - RNA, 19 nt, Artificial Sequence
  Description of Artificial Sequence: Synthetic oligonucleotide
  Antisense Strand to SEQ ID NO: 433397
uuucgcauacuucuccaag

SEQ ID NO: 433399 - RNA, 19 nt, Artificial Sequence
  Description of Artificial Sequence: Synthetic oligonucleotide
  Sense strand starting at position 2729 of SEQ ID NO: 316697
uggagaaguaugcgaaaug

SEQ ID NO: 433400 - RNA, 19 nt, Artificial Sequence
  Description of Artificial Sequence: Synthetic oligonucleotide
  Antisense Strand to SEQ ID NO: 433399
cauuucgcauacuucucca

SEQ ID NO: 433401 - RNA, 19 nt, Artificial Sequence
  Description of Artificial Sequence: Synthetic oligonucleotide
  Sense strand starting at position 2796 of SEQ ID NO: 316697
uccaguaguuucuuuaaca

SEQ ID NO: 433402 - RNA, 19 nt, Artificial Sequence
  Description of Artificial Sequence: Synthetic oligonucleotide
  Antisense Strand to SEQ ID NO: 433401
uguuaaagaaacuacugga

SEQ ID NO: 433403 - RNA, 19 nt, Artificial Sequence
  Description of Artificial Sequence: Synthetic oligonucleotide
  Sense strand starting at position 3012 of SEQ ID NO: 316697
uuaggaaaguaugucuuaa

SEQ ID NO: 433404 - RNA, 19 nt, Artificial Sequence
  Description of Artificial Sequence: Synthetic oligonucleotide
  Antisense Strand to SEQ ID NO: 433403
uuaagacauacuuuccuaa

SEQ ID NO: 433405 - RNA, 19 nt, Artificial Sequence
  Description of Artificial Sequence: Synthetic oligonucleotide
  Sense strand starting at position 3014 of SEQ ID NO: 316697
aggaaaguaugucuuaaac

SEQ ID NO: 433406 - RNA, 19 nt, Artificial Sequence
  Description of Artificial Sequence: Synthetic oligonucleotide
  Antisense Strand to SEQ ID NO: 433405
guuuaagacauacuuuccu

SEQ ID NO: 433407 - RNA, 19 nt, Artificial Sequence
  Description of Artificial Sequence: Synthetic oligonucleotide
  Sense strand starting at position 3074 of SEQ ID NO: 316697
auacguauuccugacaaga

SEQ ID NO: 433408 - RNA, 19 nt, Artificial Sequence
  Description of Artificial Sequence: Synthetic oligonucleotide
  Antisense Strand to SEQ ID NO: 433407
ucuugucaggaauacguau

SEQ ID NO: 433409 - RNA, 19 nt, Artificial Sequence
  Description of Artificial Sequence: Synthetic oligonucleotide
  Sense strand starting at position 3236 of SEQ ID NO: 316697
agccuucuuguaugaagag

SEQ ID NO: 433410 - RNA, 19 nt, Artificial Sequence
  Description of Artificial Sequence: Synthetic oligonucleotide
  Antisense Strand to SEQ ID NO: 433409
cucuucauacaagaaggcu

SEQ ID NO: 433411 - RNA, 19 nt, Artificial Sequence
  Description of Artificial Sequence: Synthetic oligonucleotide
  Sense strand starting at position 3302 of SEQ ID NO: 316697
ccacaauaucuggguguuu

SEQ ID NO: 433412 - RNA, 19 nt, Artificial Sequence
  Description of Artificial Sequence: Synthetic oligonucleotide
  Antisense Strand to SEQ ID NO: 433411
aaacacccagauauugugg

SEQ ID NO: 433413 - RNA, 19 nt, Artificial Sequence
  Description of Artificial Sequence: Synthetic oligonucleotide
  Sense strand starting at position 3313 of SEQ ID NO: 316697
ggguguuuggagcaauucu

SEQ ID NO: 433414 - RNA, 19 nt, Artificial Sequence
  Description of Artificial Sequence: Synthetic oligonucleotide
  Antisense Strand to SEQ ID NO: 433413
agaauugcuccaaacaccc

SEQ ID NO: 433415 - RNA, 19 nt, Artificial Sequence
  Description of Artificial Sequence: Synthetic oligonucleotide
  Sense strand starting at position 3336 of SEQ ID NO: 316697
auuucugagccuugcguau

SEQ ID NO: 433416 - RNA, 19 nt, Artificial Sequence
  Description of Artificial Sequence: Synthetic oligonucleotide
  Antisense Strand to SEQ ID NO: 433415
auacgcaaggcucagaaau

SEQ ID NO: 433417 - RNA, 19 nt, Artificial Sequence
  Description of Artificial Sequence: Synthetic oligonucleotide
  Sense strand starting at position 3404 of SEQ ID NO: 316697
gaguuucugccagauauaa

SEQ ID NO: 433418 - RNA, 19 nt, Artificial Sequence
  Description of Artificial Sequence: Synthetic oligonucleotide
  Antisense Strand to SEQ ID NO: 433417
uuauaucuggcagaaacuc

SEQ ID NO: 433419 - RNA, 19 nt, Artificial Sequence
  Description of Artificial Sequence: Synthetic oligonucleotide
  Sense strand starting at position 3761 of SEQ ID NO: 316697
uccuauguucuauguaaga

SEQ ID NO: 433420 - RNA, 19 nt, Artificial Sequence
  Description of Artificial Sequence: Synthetic oligonucleotide
  Antisense Strand to SEQ ID NO: 433419
ucuuacauagaacauagga

SEQ ID NO: 433421 - RNA, 19 nt, Artificial Sequence
  Description of Artificial Sequence: Synthetic oligonucleotide
  Sense strand starting at position 3763 of SEQ ID NO: 316697
cuauguucuauguaagagu

SEQ ID NO: 433422 - RNA, 19 nt, Artificial Sequence
  Description of Artificial Sequence: Synthetic oligonucleotide
  Antisense Strand to SEQ ID NO: 433421
acucuuacauagaacauag

SEQ ID NO: 433423 - RNA, 19 nt, Artificial Sequence
  Description of Artificial Sequence: Synthetic oligonucleotide
  Sense strand starting at position 3792 of SEQ ID NO: 316697
ucaugucauuugguucuca

SEQ ID NO: 433424 - RNA, 19 nt, Artificial Sequence
  Description of Artificial Sequence: Synthetic oligonucleotide
  Antisense Strand to SEQ ID NO: 433423
ugagaaccaaaugacauga

SEQ ID NO: 433425 - RNA, 19 nt, Artificial Sequence
  Description of Artificial Sequence: Synthetic oligonucleotide
  Sense strand starting at position 3842 of SEQ ID NO: 316697
ugaagaaucugggcguuga

SEQ ID NO: 433426 - RNA, 19 nt, Artificial Sequence
  Description of Artificial Sequence: Synthetic oligonucleotide
  Antisense Strand to SEQ ID NO: 433425
ucaacgcccagauucuuca

SEQ ID NO: 433427 - RNA, 19 nt, Artificial Sequence
  Description of Artificial Sequence: Synthetic oligonucleotide
  Sense strand starting at position 3962 of SEQ ID NO: 316697
acauaaggcccuugcuaaa

SEQ ID NO: 433428 - RNA, 19 nt, Artificial Sequence
  Description of Artificial Sequence: Synthetic oligonucleotide
  Antisense Strand to SEQ ID NO: 433427
uuuagcaagggccuuaugu

SEQ ID NO: 433429 - RNA, 19 nt, Artificial Sequence
  Description of Artificial Sequence: Synthetic oligonucleotide
  Sense strand starting at position 33 of SEQ ID NO: 316698
ccaagagauccucgaaauu

SEQ ID NO: 433430 - RNA, 19 nt, Artificial Sequence
  Description of Artificial Sequence: Synthetic oligonucleotide
  Antisense Strand to SEQ ID NO: 433429
aauuucgaggaucucuugg

SEQ ID NO: 433431 - RNA, 19 nt, Artificial Sequence
  Description of Artificial Sequence: Synthetic oligonucleotide
  Sense strand starting at position 50 of SEQ ID NO: 316698
uuaggauuggguugaguau

SEQ ID NO: 433432 - RNA, 19 nt, Artificial Sequence
  Description of Artificial Sequence: Synthetic oligonucleotide
  Antisense Strand to SEQ ID NO: 433431
auacucaacccaauccuaa

SEQ ID NO: 433433 - RNA, 19 nt, Artificial Sequence
  Description of Artificial Sequence: Synthetic oligonucleotide
  Sense strand starting at position 56 of SEQ ID NO: 316698
uuggguugaguauauacuu

SEQ ID NO: 433434 - RNA, 19 nt, Artificial Sequence
  Description of Artificial Sequence: Synthetic oligonucleotide
  Antisense Strand to SEQ ID NO: 433433
aaguauauacucaacccaa

SEQ ID NO: 433435 - RNA, 19 nt, Artificial Sequence
  Description of Artificial Sequence: Synthetic oligonucleotide
  Sense strand starting at position 61 of SEQ ID NO: 316698
uugaguauauacuugguca

SEQ ID NO: 433436 - RNA, 19 nt, Artificial Sequence
  Description of Artificial Sequence: Synthetic oligonucleotide
  Antisense Strand to SEQ ID NO: 433435
ugaccaaguauauacucaa

SEQ ID NO: 433437 - RNA, 19 nt, Artificial Sequence
  Description of Artificial Sequence: Synthetic oligonucleotide
  Sense strand starting at position 63 of SEQ ID NO: 316698
gaguauauacuuggucacu

SEQ ID NO: 433438 - RNA, 19 nt, Artificial Sequence
  Description of Artificial Sequence: Synthetic oligonucleotide
  Antisense Strand to SEQ ID NO: 433437
agugaccaaguauauacuc

SEQ ID NO: 433439 - RNA, 19 nt, Artificial Sequence
  Description of Artificial Sequence: Synthetic oligonucleotide
  Sense strand starting at position 64 of SEQ ID NO: 316698
aguauauacuuggucacua

SEQ ID NO: 433440 - RNA, 19 nt, Artificial Sequence
  Description of Artificial Sequence: Synthetic oligonucleotide
  Antisense Strand to SEQ ID NO: 433439
uagugaccaaguauauacu

SEQ ID NO: 433441 - RNA, 19 nt, Artificial Sequence
  Description of Artificial Sequence: Synthetic oligonucleotide
  Sense strand starting at position 431 of SEQ ID NO: 316698
aguguaugaccuugaaacu

SEQ ID NO: 433442 - RNA, 19 nt, Artificial Sequence
  Description of Artificial Sequence: Synthetic oligonucleotide
  Antisense Strand to SEQ ID NO: 433441
aguuucaaggucauacacu

SEQ ID NO: 433443 - RNA, 19 nt, Artificial Sequence
  Description of Artificial Sequence: Synthetic oligonucleotide
  Sense strand starting at position 432 of SEQ ID NO: 316698
guguaugaccuugaaacug

SEQ ID NO: 433444 - RNA, 19 nt, Artificial Sequence
  Description of Artificial Sequence: Synthetic oligonucleotide
  Antisense Strand to SEQ ID NO: 433443
caguuucaaggucauacac

SEQ ID NO: 433445 - RNA, 19 nt, Artificial Sequence
  Description of Artificial Sequence: Synthetic oligonucleotide
  Sense strand starting at position 843 of SEQ ID NO: 316698
agacuaaaguuaguauucu

SEQ ID NO: 433446 - RNA, 19 nt, Artificial Sequence
  Description of Artificial Sequence: Synthetic oligonucleotide
  Antisense Strand to SEQ ID NO: 433445
agaauacuaacuuuagucu

SEQ ID NO: 433447 - RNA, 19 nt, Artificial Sequence
  Description of Artificial Sequence: Synthetic oligonucleotide
  Sense strand starting at position 921 of SEQ ID NO: 316698
gacauuguaggaggcauaa

SEQ ID NO: 433448 - RNA, 19 nt, Artificial Sequence
  Description of Artificial Sequence: Synthetic oligonucleotide
  Antisense Strand to SEQ ID NO: 433447
uuaugccuccuacaauguc

SEQ ID NO: 433449 - RNA, 19 nt, Artificial Sequence
  Description of Artificial Sequence: Synthetic oligonucleotide
  Sense strand starting at position 956 of SEQ ID NO: 316698
ugagcaauuaaagguuaga

SEQ ID NO: 433450 - RNA, 19 nt, Artificial Sequence
  Description of Artificial Sequence: Synthetic oligonucleotide
  Antisense Strand to SEQ ID NO: 433449
ucuaaccuuuaauugcuca

SEQ ID NO: 433451 - RNA, 19 nt, Artificial Sequence
  Description of Artificial Sequence: Synthetic oligonucleotide
  Sense strand starting at position 959 of SEQ ID NO: 316698
gcaauuaaagguuagaagu

SEQ ID NO: 433452 - RNA, 19 nt, Artificial Sequence
  Description of Artificial Sequence: Synthetic oligonucleotide
  Antisense Strand to SEQ ID NO: 433451
acuucuaaccuuuaauugc

SEQ ID NO: 433453 - RNA, 19 nt, Artificial Sequence
  Description of Artificial Sequence: Synthetic oligonucleotide
  Sense strand starting at position 1012 of SEQ ID NO: 316698
aagucagugguccauccua

SEQ ID NO: 433454 - RNA, 19 nt, Artificial Sequence
  Description of Artificial Sequence: Synthetic oligonucleotide
  Antisense Strand to SEQ ID NO: 433453
uaggauggaccacugacuu

SEQ ID NO: 433455 - RNA, 19 nt, Artificial Sequence
  Description of Artificial Sequence: Synthetic oligonucleotide
  Sense strand starting at position 1112 of SEQ ID NO: 316698
acaagagauugaguugguu

SEQ ID NO: 433456 - RNA, 19 nt, Artificial Sequence
  Description of Artificial Sequence: Synthetic oligonucleotide
  Antisense Strand to SEQ ID NO: 433455
aaccaacucaaucucuugu

SEQ ID NO: 433457 - RNA, 19 nt, Artificial Sequence
  Description of Artificial Sequence: Synthetic oligonucleotide
  Sense strand starting at position 1114 of SEQ ID NO: 316698
aagagauugaguugguuua

SEQ ID NO: 433458 - RNA, 19 nt, Artificial Sequence
  Description of Artificial Sequence: Synthetic oligonucleotide
  Antisense Strand to SEQ ID NO: 433457
uaaaccaacucaaucucuu

SEQ ID NO: 433459 - RNA, 19 nt, Artificial Sequence
  Description of Artificial Sequence: Synthetic oligonucleotide
  Sense strand starting at position 1116 of SEQ ID NO: 316698
gagauugaguugguuuaca

SEQ ID NO: 433460 - RNA, 19 nt, Artificial Sequence
  Description of Artificial Sequence: Synthetic oligonucleotide
  Antisense Strand to SEQ ID NO: 433459
uguaaaccaacucaaucuc

SEQ ID NO: 433461 - RNA, 19 nt, Artificial Sequence
  Description of Artificial Sequence: Synthetic oligonucleotide
  Sense strand starting at position 1154 of SEQ ID NO: 316698
aaucuaggccguuacugaa

SEQ ID NO: 433462 - RNA, 19 nt, Artificial Sequence
  Description of Artificial Sequence: Synthetic oligonucleotide
  Antisense Strand to SEQ ID NO: 433461
uucaguaacggccuagauu

SEQ ID NO: 433463 - RNA, 19 nt, Artificial Sequence
  Description of Artificial Sequence: Synthetic oligonucleotide
  Sense strand starting at position 1222 of SEQ ID NO: 316698
guugauaucguugacaacu

SEQ ID NO: 433464 - RNA, 19 nt, Artificial Sequence
  Description of Artificial Sequence: Synthetic oligonucleotide
  Antisense Strand to SEQ ID NO: 433463
aguugucaacgauaucaac

SEQ ID NO: 433465 - RNA, 19 nt, Artificial Sequence
  Description of Artificial Sequence: Synthetic oligonucleotide
  Sense strand starting at position 1264 of SEQ ID NO: 316698
aggaaauggcuggaugugu

SEQ ID NO: 433466 - RNA, 19 nt, Artificial Sequence
  Description of Artificial Sequence: Synthetic oligonucleotide
  Antisense Strand to SEQ ID NO: 433465
acacauccagccauuuccu

SEQ ID NO: 433467 - RNA, 19 nt, Artificial Sequence
  Description of Artificial Sequence: Synthetic oligonucleotide
  Sense strand starting at position 1505 of SEQ ID NO: 316698
augccacugcuauacagaa

SEQ ID NO: 433468 - RNA, 19 nt, Artificial Sequence
  Description of Artificial Sequence: Synthetic oligonucleotide
  Antisense Strand to SEQ ID NO: 433467
uucuguauagcaguggcau

SEQ ID NO: 433469 - RNA, 19 nt, Artificial Sequence
  Description of Artificial Sequence: Synthetic oligonucleotide
  Sense strand starting at position 1799 of SEQ ID NO: 316698
ggaagcaccucacuacuaa

SEQ ID NO: 433470 - RNA, 19 nt, Artificial Sequence
  Description of Artificial Sequence: Synthetic oligonucleotide
  Antisense Strand to SEQ ID NO: 433469
uuaguagugaggugcuucc

SEQ ID NO: 433471 - RNA, 19 nt, Artificial Sequence
  Description of Artificial Sequence: Synthetic oligonucleotide
  Sense strand starting at position 2058 of SEQ ID NO: 316698
gcuauugguagggaguaga

SEQ ID NO: 433472 - RNA, 19 nt, Artificial Sequence
  Description of Artificial Sequence: Synthetic oligonucleotide
  Antisense Strand to SEQ ID NO: 433471
ucuacucccuaccaauagc

SEQ ID NO: 433473 - RNA, 19 nt, Artificial Sequence
  Description of Artificial Sequence: Synthetic oligonucleotide
  Sense strand starting at position 2075 of SEQ ID NO: 316698
gagagaaagggcugguuua

SEQ ID NO: 433474 - RNA, 19 nt, Artificial Sequence
  Description of Artificial Sequence: Synthetic oligonucleotide
  Antisense Strand to SEQ ID NO: 433473
uaaaccagcccuuucucuc

SEQ ID NO: 433475 - RNA, 19 nt, Artificial Sequence
  Description of Artificial Sequence: Synthetic oligonucleotide
  Sense strand starting at position 2614 of SEQ ID NO: 316698
ugauauugaugggucugga

SEQ ID NO: 433476 - RNA, 19 nt, Artificial Sequence
  Description of Artificial Sequence: Synthetic oligonucleotide
  Antisense Strand to SEQ ID NO: 433475
uccagacccaucaauauca

SEQ ID NO: 433477 - RNA, 19 nt, Artificial Sequence
  Description of Artificial Sequence: Synthetic oligonucleotide
  Sense strand starting at position 2627 of SEQ ID NO: 316698
ucuggaaccaucgauguaa

SEQ ID NO: 433478 - RNA, 19 nt, Artificial Sequence
  Description of Artificial Sequence: Synthetic oligonucleotide
  Antisense Strand to SEQ ID NO: 433477
uuacaucgaugguuccaga

SEQ ID NO: 433479 - RNA, 19 nt, Artificial Sequence
  Description of Artificial Sequence: Synthetic oligonucleotide
  Sense strand starting at position 2848 of SEQ ID NO: 316698
ggguguaacagugauguac

SEQ ID NO: 433480 - RNA, 19 nt, Artificial Sequence
  Description of Artificial Sequence: Synthetic oligonucleotide
  Antisense Strand to SEQ ID NO: 433479
guacaucacuguuacaccc

SEQ ID NO: 433481 - RNA, 19 nt, Artificial Sequence
  Description of Artificial Sequence: Synthetic oligonucleotide
  Sense strand starting at position 2852 of SEQ ID NO: 316698
guaacagugauguacauga

SEQ ID NO: 433482 - RNA, 19 nt, Artificial Sequence
  Description of Artificial Sequence: Synthetic oligonucleotide
  Antisense Strand to SEQ ID NO: 433481
ucauguacaucacuguuac

SEQ ID NO: 433483 - RNA, 19 nt, Artificial Sequence
  Description of Artificial Sequence: Synthetic oligonucleotide
  Sense strand starting at position 2919 of SEQ ID NO: 316698
augcucaguccauaauaga

SEQ ID NO: 433484 - RNA, 19 nt, Artificial Sequence
  Description of Artificial Sequence: Synthetic oligonucleotide
  Antisense Strand to SEQ ID NO: 433483
ucuauuauggacugagcau

SEQ ID NO: 433485 - RNA, 19 nt, Artificial Sequence
  Description of Artificial Sequence: Synthetic oligonucleotide
  Sense strand starting at position 2948 of SEQ ID NO: 316698
gcucuuaauagggaguuaa

SEQ ID NO: 433486 - RNA, 19 nt, Artificial Sequence
  Description of Artificial Sequence: Synthetic oligonucleotide
  Antisense Strand to SEQ ID NO: 433485
uuaacucccuauuaagagc

SEQ ID NO: 433487 - RNA, 19 nt, Artificial Sequence
  Description of Artificial Sequence: Synthetic oligonucleotide
  Sense strand starting at position 3024 of SEQ ID NO: 316698
cagugugggccuuaggauu

SEQ ID NO: 433488 - RNA, 19 nt, Artificial Sequence
  Description of Artificial Sequence: Synthetic oligonucleotide
  Antisense Strand to SEQ ID NO: 433487
aauccuaaggcccacacug

SEQ ID NO: 433489 - RNA, 19 nt, Artificial Sequence
  Description of Artificial Sequence: Synthetic oligonucleotide
  Sense strand starting at position 3073 of SEQ ID NO: 316698
gguagcugaaguugauaaa

SEQ ID NO: 433490 - RNA, 19 nt, Artificial Sequence
  Description of Artificial Sequence: Synthetic oligonucleotide
  Antisense Strand to SEQ ID NO: 433489
uuuaucaacuucagcuacc

SEQ ID NO: 433491 - RNA, 19 nt, Artificial Sequence
  Description of Artificial Sequence: Synthetic oligonucleotide
  Sense strand starting at position 3094 of SEQ ID NO: 316698
aggaauuggcaccauuagu

SEQ ID NO: 433492 - RNA, 19 nt, Artificial Sequence
  Description of Artificial Sequence: Synthetic oligonucleotide
  Antisense Strand to SEQ ID NO: 433491
acuaauggugccaauuccu

SEQ ID NO: 433493 - RNA, 19 nt, Artificial Sequence
  Description of Artificial Sequence: Synthetic oligonucleotide
  Sense strand starting at position 3128 of SEQ ID NO: 316698
uugccauuaugaguauaaa

SEQ ID NO: 433494 - RNA, 19 nt, Artificial Sequence
  Description of Artificial Sequence: Synthetic oligonucleotide
  Antisense Strand to SEQ ID NO: 433493
uuuauacucauaauggcaa

SEQ ID NO: 433495 - RNA, 19 nt, Artificial Sequence
  Description of Artificial Sequence: Synthetic oligonucleotide
  Sense strand starting at position 3355 of SEQ ID NO: 316698
ggcuauauugcaggauaga

SEQ ID NO: 433496 - RNA, 19 nt, Artificial Sequence
  Description of Artificial Sequence: Synthetic oligonucleotide
  Antisense Strand to SEQ ID NO: 433495
ucuauccugcaauauagcc

SEQ ID NO: 433497 - RNA, 19 nt, Artificial Sequence
  Description of Artificial Sequence: Synthetic oligonucleotide
  Sense strand starting at position 3356 of SEQ ID NO: 316698
gcuauauugcaggauagag

SEQ ID NO: 433498 - RNA, 19 nt, Artificial Sequence
  Description of Artificial Sequence: Synthetic oligonucleotide
  Antisense Strand to SEQ ID NO: 433497
cucuauccugcaauauagc

SEQ ID NO: 433499 - RNA, 19 nt, Artificial Sequence
  Description of Artificial Sequence: Synthetic oligonucleotide
  Sense strand starting at position 3496 of SEQ ID NO: 316698
ugguaacggaucugaauua

SEQ ID NO: 433500 - RNA, 19 nt, Artificial Sequence
  Description of Artificial Sequence: Synthetic oligonucleotide
  Antisense Strand to SEQ ID NO: 433499
uaauucagauccguuacca

SEQ ID NO: 433501 - RNA, 19 nt, Artificial Sequence
  Description of Artificial Sequence: Synthetic oligonucleotide
  Sense strand starting at position 3601 of SEQ ID NO: 316698
gugaguacauaauuguuaa

SEQ ID NO: 433502 - RNA, 19 nt, Artificial Sequence
  Description of Artificial Sequence: Synthetic oligonucleotide
  Antisense Strand to SEQ ID NO: 433501
uuaacaauuauguacucac

SEQ ID NO: 433503 - RNA, 19 nt, Artificial Sequence
  Description of Artificial Sequence: Synthetic oligonucleotide
  Sense strand starting at position 3687 of SEQ ID NO: 316698
uuaaguccagcuugauaaa

SEQ ID NO: 433504 - RNA, 19 nt, Artificial Sequence
  Description of Artificial Sequence: Synthetic oligonucleotide
  Antisense Strand to SEQ ID NO: 433503
uuuaucaagcuggacuuaa

SEQ ID NO: 433505 - RNA, 19 nt, Artificial Sequence
  Description of Artificial Sequence: Synthetic oligonucleotide
  Sense strand starting at position 3831 of SEQ ID NO: 316698
uaucaagagguuugcuaag

SEQ ID NO: 433506 - RNA, 19 nt, Artificial Sequence
  Description of Artificial Sequence: Synthetic oligonucleotide
  Antisense Strand to SEQ ID NO: 433505
cuuagcaaaccucuugaua

SEQ ID NO: 433507 - RNA, 19 nt, Artificial Sequence
  Description of Artificial Sequence: Synthetic oligonucleotide
  Sense strand starting at position 3833 of SEQ ID NO: 316698
ucaagagguuugcuaagaa

SEQ ID NO: 433508 - RNA, 19 nt, Artificial Sequence
  Description of Artificial Sequence: Synthetic oligonucleotide
  Antisense Strand to SEQ ID NO: 433507
uucuuagcaaaccucuuga

SEQ ID NO: 433509 - RNA, 19 nt, Artificial Sequence
  Description of Artificial Sequence: Synthetic oligonucleotide
  Sense strand starting at position 243 of SEQ ID NO: 316699
auaugauaauggccauaac

SEQ ID NO: 433510 - RNA, 19 nt, Artificial Sequence
  Description of Artificial Sequence: Synthetic oligonucleotide
  Antisense Strand to SEQ ID NO: 433509
guuauggccauuaucauau

SEQ ID NO: 433511 - RNA, 19 nt, Artificial Sequence
  Description of Artificial Sequence: Synthetic oligonucleotide
  Sense strand starting at position 450 of SEQ ID NO: 316699
guauuaaagucaucugcuu

SEQ ID NO: 433512 - RNA, 19 nt, Artificial Sequence
  Description of Artificial Sequence: Synthetic oligonucleotide
  Antisense Strand to SEQ ID NO: 433511
aagcagaugacuuuaauac

SEQ ID NO: 433513 - RNA, 19 nt, Artificial Sequence
  Description of Artificial Sequence: Synthetic oligonucleotide
  Sense strand starting at position 464 of SEQ ID NO: 316699
ugcuuagauuuguauuucu

SEQ ID NO: 433514 - RNA, 19 nt, Artificial Sequence
  Description of Artificial Sequence: Synthetic oligonucleotide
  Antisense Strand to SEQ ID NO: 433513
agaaauacaaaucuaagca

SEQ ID NO: 433515 - RNA, 19 nt, Artificial Sequence
  Description of Artificial Sequence: Synthetic oligonucleotide
  Sense strand starting at position 495 of SEQ ID NO: 316699
uagcaagugaugugaagga

SEQ ID NO: 433516 - RNA, 19 nt, Artificial Sequence
  Description of Artificial Sequence: Synthetic oligonucleotide
  Antisense Strand to SEQ ID NO: 433515
uccuucacaucacuugcua

SEQ ID NO: 433517 - RNA, 19 nt, Artificial Sequence
  Description of Artificial Sequence: Synthetic oligonucleotide
  Sense strand starting at position 598 of SEQ ID NO: 316699
aaaugaggguaauagagau

SEQ ID NO: 433518 - RNA, 19 nt, Artificial Sequence
  Description of Artificial Sequence: Synthetic oligonucleotide
  Antisense Strand to SEQ ID NO: 433517
aucucuauuacccucauuu

SEQ ID NO: 433519 - RNA, 19 nt, Artificial Sequence
  Description of Artificial Sequence: Synthetic oligonucleotide
  Sense strand starting at position 637 of SEQ ID NO: 316699
aagagauauuugggaguua

SEQ ID NO: 433520 - RNA, 19 nt, Artificial Sequence
  Description of Artificial Sequence: Synthetic oligonucleotide
  Antisense Strand to SEQ ID NO: 433519
uaacucccaaauaucucuu

SEQ ID NO: 433521 - RNA, 19 nt, Artificial Sequence
  Description of Artificial Sequence: Synthetic oligonucleotide
  Sense strand starting at position 638 of SEQ ID NO: 316699
agagauauuugggaguuaa

SEQ ID NO: 433522 - RNA, 19 nt, Artificial Sequence
  Description of Artificial Sequence: Synthetic oligonucleotide
  Antisense Strand to SEQ ID NO: 433521
uuaacucccaaauaucucu

SEQ ID NO: 433523 - RNA, 19 nt, Artificial Sequence
  Description of Artificial Sequence: Synthetic oligonucleotide
  Sense strand starting at position 662 of SEQ ID NO: 316699
guaagauguggugaccagu

SEQ ID NO: 433524 - RNA, 19 nt, Artificial Sequence
  Description of Artificial Sequence: Synthetic oligonucleotide
  Antisense Strand to SEQ ID NO: 433523
acuggucaccacaucuuac

SEQ ID NO: 433525 - RNA, 19 nt, Artificial Sequence
  Description of Artificial Sequence: Synthetic oligonucleotide
  Sense strand starting at position 724 of SEQ ID NO: 316699
ggcaaacauuuguaccauu

SEQ ID NO: 433526 - RNA, 19 nt, Artificial Sequence
  Description of Artificial Sequence: Synthetic oligonucleotide
  Antisense Strand to SEQ ID NO: 433525
aaugguacaaauguuugcc

SEQ ID NO: 433527 - RNA, 19 nt, Artificial Sequence
  Description of Artificial Sequence: Synthetic oligonucleotide
  Sense strand starting at position 820 of SEQ ID NO: 316699
ggcaguguaguguaacaaa

SEQ ID NO: 433528 - RNA, 19 nt, Artificial Sequence
  Description of Artificial Sequence: Synthetic oligonucleotide
  Antisense Strand to SEQ ID NO: 433527
uuuguuacacuacacugcc

SEQ ID NO: 433529 - RNA, 19 nt, Artificial Sequence
  Description of Artificial Sequence: Synthetic oligonucleotide
  Sense strand starting at position 973 of SEQ ID NO: 316699
gaggauuaaauauguuggu

SEQ ID NO: 433530 - RNA, 19 nt, Artificial Sequence
  Description of Artificial Sequence: Synthetic oligonucleotide
  Antisense Strand to SEQ ID NO: 433529
accaacauauuuaauccuc

SEQ ID NO: 433531 - RNA, 19 nt, Artificial Sequence
  Description of Artificial Sequence: Synthetic oligonucleotide
  Sense strand starting at position 974 of SEQ ID NO: 316699
aggauuaaauauguuggua

SEQ ID NO: 433532 - RNA, 19 nt, Artificial Sequence
  Description of Artificial Sequence: Synthetic oligonucleotide
  Antisense Strand to SEQ ID NO: 433531
uaccaacauauuuaauccu

SEQ ID NO: 433533 - RNA, 19 nt, Artificial Sequence
  Description of Artificial Sequence: Synthetic oligonucleotide
  Sense strand starting at position 978 of SEQ ID NO: 316699
uuaaauauguugguaggua

SEQ ID NO: 433534 - RNA, 19 nt, Artificial Sequence
  Description of Artificial Sequence: Synthetic oligonucleotide
  Antisense Strand to SEQ ID NO: 433533
uaccuaccaacauauuuaa

SEQ ID NO: 433535 - RNA, 19 nt, Artificial Sequence
  Description of Artificial Sequence: Synthetic oligonucleotide
  Sense strand starting at position 986 of SEQ ID NO: 316699
guugguagguaugcuaaau

SEQ ID NO: 433536 - RNA, 19 nt, Artificial Sequence
  Description of Artificial Sequence: Synthetic oligonucleotide
  Antisense Strand to SEQ ID NO: 433535
auuuagcauaccuaccaac

SEQ ID NO: 433537 - RNA, 19 nt, Artificial Sequence
  Description of Artificial Sequence: Synthetic oligonucleotide
  Sense strand starting at position 1233 of SEQ ID NO: 316699
gguuuaaccauguaggcua

SEQ ID NO: 433538 - RNA, 19 nt, Artificial Sequence
  Description of Artificial Sequence: Synthetic oligonucleotide
  Antisense Strand to SEQ ID NO: 433537
uagccuacaugguuaaacc

SEQ ID NO: 433539 - RNA, 19 nt, Artificial Sequence
  Description of Artificial Sequence: Synthetic oligonucleotide
  Sense strand starting at position 1426 of SEQ ID NO: 316699
ccggguagagauggagauu

SEQ ID NO: 433540 - RNA, 19 nt, Artificial Sequence
  Description of Artificial Sequence: Synthetic oligonucleotide
  Antisense Strand to SEQ ID NO: 433539
aaucuccaucucuacccgg

SEQ ID NO: 433541 - RNA, 19 nt, Artificial Sequence
  Description of Artificial Sequence: Synthetic oligonucleotide
  Sense strand starting at position 1511 of SEQ ID NO: 316699
augagacagugucacauuu

SEQ ID NO: 433542 - RNA, 19 nt, Artificial Sequence
  Description of Artificial Sequence: Synthetic oligonucleotide
  Antisense Strand to SEQ ID NO: 433541
aaaugugacacugucucau

SEQ ID NO: 433543 - RNA, 19 nt, Artificial Sequence
  Description of Artificial Sequence: Synthetic oligonucleotide
  Sense strand starting at position 1696 of SEQ ID NO: 316699
cgagacuuucgucagugga

SEQ ID NO: 433544 - RNA, 19 nt, Artificial Sequence
  Description of Artificial Sequence: Synthetic oligonucleotide
  Antisense Strand to SEQ ID NO: 433543
uccacugacgaaagucucg

SEQ ID NO: 433545 - RNA, 19 nt, Artificial Sequence
  Description of Artificial Sequence: Synthetic oligonucleotide
  Sense strand starting at position 1698 of SEQ ID NO: 316699
agacuuucgucaguggaag

SEQ ID NO: 433546 - RNA, 19 nt, Artificial Sequence
  Description of Artificial Sequence: Synthetic oligonucleotide
  Antisense Strand to SEQ ID NO: 433545
cuuccacugacgaaagucu

SEQ ID NO: 433547 - RNA, 19 nt, Artificial Sequence
  Description of Artificial Sequence: Synthetic oligonucleotide
  Sense strand starting at position 1761 of SEQ ID NO: 316699
gcccuaucccuuggguuua

SEQ ID NO: 433548 - RNA, 19 nt, Artificial Sequence
  Description of Artificial Sequence: Synthetic oligonucleotide
  Antisense Strand to SEQ ID NO: 433547
uaaacccaagggauagggc

SEQ ID NO: 433549 - RNA, 19 nt, Artificial Sequence
  Description of Artificial Sequence: Synthetic oligonucleotide
  Sense strand starting at position 1772 of SEQ ID NO: 316699
uggguuuaccugcagauaa

SEQ ID NO: 433550 - RNA, 19 nt, Artificial Sequence
  Description of Artificial Sequence: Synthetic oligonucleotide
  Antisense Strand to SEQ ID NO: 433549
uuaucugcagguaaaccca

SEQ ID NO: 433551 - RNA, 19 nt, Artificial Sequence
  Description of Artificial Sequence: Synthetic oligonucleotide
  Sense strand starting at position 1774 of SEQ ID NO: 316699
gguuuaccugcagauaauc

SEQ ID NO: 433552 - RNA, 19 nt, Artificial Sequence
  Description of Artificial Sequence: Synthetic oligonucleotide
  Antisense Strand to SEQ ID NO: 433551
gauuaucugcagguaaacc

SEQ ID NO: 433553 - RNA, 19 nt, Artificial Sequence
  Description of Artificial Sequence: Synthetic oligonucleotide
  Sense strand starting at position 1787 of SEQ ID NO: 316699
auaauccauucgguuuaaa

SEQ ID NO: 433554 - RNA, 19 nt, Artificial Sequence
  Description of Artificial Sequence: Synthetic oligonucleotide
  Antisense Strand to SEQ ID NO: 433553
uuuaaaccgaauggauuau

SEQ ID NO: 433555 - RNA, 19 nt, Artificial Sequence
  Description of Artificial Sequence: Synthetic oligonucleotide
  Sense strand starting at position 2229 of SEQ ID NO: 316699
acuagauaagccugcuaga

SEQ ID NO: 433556 - RNA, 19 nt, Artificial Sequence
  Description of Artificial Sequence: Synthetic oligonucleotide
  Antisense Strand to SEQ ID NO: 433555
ucuagcaggcuuaucuagu

SEQ ID NO: 433557 - RNA, 19 nt, Artificial Sequence
  Description of Artificial Sequence: Synthetic oligonucleotide
  Sense strand starting at position 2272 of SEQ ID NO: 316699
uggaaaggguccuacaaag

SEQ ID NO: 433558 - RNA, 19 nt, Artificial Sequence
  Description of Artificial Sequence: Synthetic oligonucleotide
  Antisense Strand to SEQ ID NO: 433557
cuuuguaggacccuuucca

SEQ ID NO: 433559 - RNA, 19 nt, Artificial Sequence
  Description of Artificial Sequence: Synthetic oligonucleotide
  Sense strand starting at position 2303 of SEQ ID NO: 316699
ccguuauaggugcuagcuu

SEQ ID NO: 433560 - RNA, 19 nt, Artificial Sequence
  Description of Artificial Sequence: Synthetic oligonucleotide
  Antisense Strand to SEQ ID NO: 433559
aagcuagcaccuauaacgg

SEQ ID NO: 433561 - RNA, 19 nt, Artificial Sequence
  Description of Artificial Sequence: Synthetic oligonucleotide
  Sense strand starting at position 2351 of SEQ ID NO: 316699
aggacuuauuuacaagacu

SEQ ID NO: 433562 - RNA, 19 nt, Artificial Sequence
  Description of Artificial Sequence: Synthetic oligonucleotide
  Antisense Strand to SEQ ID NO: 433561
agucuuguaaauaaguccu

SEQ ID NO: 433563 - RNA, 19 nt, Artificial Sequence
  Description of Artificial Sequence: Synthetic oligonucleotide
  Sense strand starting at position 2852 of SEQ ID NO: 316699
uugcgacuuaugcugcuau

SEQ ID NO: 433564 - RNA, 19 nt, Artificial Sequence
  Description of Artificial Sequence: Synthetic oligonucleotide
  Antisense Strand to SEQ ID NO: 433563
auagcagcauaagucgcaa

SEQ ID NO: 433565 - RNA, 19 nt, Artificial Sequence
  Description of Artificial Sequence: Synthetic oligonucleotide
  Sense strand starting at position 2867 of SEQ ID NO: 316699
cuauaaacaugcguguaua

SEQ ID NO: 433566 - RNA, 19 nt, Artificial Sequence
  Description of Artificial Sequence: Synthetic oligonucleotide
  Antisense Strand to SEQ ID NO: 433565
uauacacgcauguuuauag

SEQ ID NO: 433567 - RNA, 19 nt, Artificial Sequence
  Description of Artificial Sequence: Synthetic oligonucleotide
  Sense strand starting at position 2868 of SEQ ID NO: 316699
uauaaacaugcguguauau

SEQ ID NO: 433568 - RNA, 19 nt, Artificial Sequence
  Description of Artificial Sequence: Synthetic oligonucleotide
  Antisense Strand to SEQ ID NO: 433567
auauacacgcauguuuaua

SEQ ID NO: 433569 - RNA, 19 nt, Artificial Sequence
  Description of Artificial Sequence: Synthetic oligonucleotide
  Sense strand starting at position 2870 of SEQ ID NO: 316699
uaaacaugcguguauaugu

SEQ ID NO: 433570 - RNA, 19 nt, Artificial Sequence
  Description of Artificial Sequence: Synthetic oligonucleotide
  Antisense Strand to SEQ ID NO: 433569
acauauacacgcauguuua

SEQ ID NO: 433571 - RNA, 19 nt, Artificial Sequence
  Description of Artificial Sequence: Synthetic oligonucleotide
  Sense strand starting at position 2984 of SEQ ID NO: 316699
uuccauaguggugguauua

SEQ ID NO: 433572 - RNA, 19 nt, Artificial Sequence
  Description of Artificial Sequence: Synthetic oligonucleotide
  Antisense Strand to SEQ ID NO: 433571
uaauaccaccacuauggaa

SEQ ID NO: 433573 - RNA, 19 nt, Artificial Sequence
  Description of Artificial Sequence: Synthetic oligonucleotide
  Sense strand starting at position 3330 of SEQ ID NO: 316699
cugccucauggccauuauu

SEQ ID NO: 433574 - RNA, 19 nt, Artificial Sequence
  Description of Artificial Sequence: Synthetic oligonucleotide
  Antisense Strand to SEQ ID NO: 433573
aauaauggccaugaggcag

SEQ ID NO: 433575 - RNA, 19 nt, Artificial Sequence
  Description of Artificial Sequence: Synthetic oligonucleotide
  Sense strand starting at position 3386 of SEQ ID NO: 316699
gcauuucccuggugauuua

SEQ ID NO: 433576 - RNA, 19 nt, Artificial Sequence
  Description of Artificial Sequence: Synthetic oligonucleotide
  Antisense Strand to SEQ ID NO: 433575
uaaaucaccagggaaaugc

SEQ ID NO: 433577 - RNA, 19 nt, Artificial Sequence
  Description of Artificial Sequence: Synthetic oligonucleotide
  Sense strand starting at position 3521 of SEQ ID NO: 316699
uguagauucuagguacaag

SEQ ID NO: 433578 - RNA, 19 nt, Artificial Sequence
  Description of Artificial Sequence: Synthetic oligonucleotide
  Antisense Strand to SEQ ID NO: 433577
cuuguaccuagaaucuaca

SEQ ID NO: 433579 - RNA, 19 nt, Artificial Sequence
  Description of Artificial Sequence: Synthetic oligonucleotide
  Sense strand starting at position 3522 of SEQ ID NO: 316699
guagauucuagguacaagu

SEQ ID NO: 433580 - RNA, 19 nt, Artificial Sequence
  Description of Artificial Sequence: Synthetic oligonucleotide
  Antisense Strand to SEQ ID NO: 433579
acuuguaccuagaaucuac

SEQ ID NO: 433581 - RNA, 19 nt, Artificial Sequence
  Description of Artificial Sequence: Synthetic oligonucleotide
  Sense strand starting at position 3583 of SEQ ID NO: 316699
augggcuguuuacugauua

SEQ ID NO: 433582 - RNA, 19 nt, Artificial Sequence
  Description of Artificial Sequence: Synthetic oligonucleotide
  Antisense Strand to SEQ ID NO: 433581
uaaucaguaaacagcccau

SEQ ID NO: 433583 - RNA, 19 nt, Artificial Sequence
  Description of Artificial Sequence: Synthetic oligonucleotide
  Sense strand starting at position 3587 of SEQ ID NO: 316699
gcuguuuacugauuauuuc

SEQ ID NO: 433584 - RNA, 19 nt, Artificial Sequence
  Description of Artificial Sequence: Synthetic oligonucleotide
  Antisense Strand to SEQ ID NO: 433583
gaaauaaucaguaaacagc

SEQ ID NO: 433585 - RNA, 19 nt, Artificial Sequence
  Description of Artificial Sequence: Synthetic oligonucleotide
  Sense strand starting at position 3947 of SEQ ID NO: 316699
auuggucuaugugucuuua

SEQ ID NO: 433586 - RNA, 19 nt, Artificial Sequence
  Description of Artificial Sequence: Synthetic oligonucleotide
  Antisense Strand to SEQ ID NO: 433585
uaaagacacauagaccaau

SEQ ID NO: 433587 - RNA, 19 nt, Artificial Sequence
  Description of Artificial Sequence: Synthetic oligonucleotide
  Sense strand starting at position 3951 of SEQ ID NO: 316699
gucuaugugucuuuauuua

SEQ ID NO: 433588 - RNA, 19 nt, Artificial Sequence
  Description of Artificial Sequence: Synthetic oligonucleotide
  Antisense Strand to SEQ ID NO: 433587
uaaauaaagacacauagac

SEQ ID NO: 433589 - RNA, 19 nt, Artificial Sequence
  Description of Artificial Sequence: Synthetic oligonucleotide
  Sense strand starting at position 19 of SEQ ID NO: 316700
gccuaaagggcuuauauua

SEQ ID NO: 433590 - RNA, 19 nt, Artificial Sequence
  Description of Artificial Sequence: Synthetic oligonucleotide
  Antisense Strand to SEQ ID NO: 433589
uaauauaagcccuuuaggc

SEQ ID NO: 433591 - RNA, 19 nt, Artificial Sequence
  Description of Artificial Sequence: Synthetic oligonucleotide
  Sense strand starting at position 234 of SEQ ID NO: 316700
gaaggacugcuguggagaa

SEQ ID NO: 433592 - RNA, 19 nt, Artificial Sequence
  Description of Artificial Sequence: Synthetic oligonucleotide
  Antisense Strand to SEQ ID NO: 433591
uucuccacagcaguccuuc

SEQ ID NO: 433593 - RNA, 19 nt, Artificial Sequence
  Description of Artificial Sequence: Synthetic oligonucleotide
  Sense strand starting at position 430 of SEQ ID NO: 316700
aauguuauuugcccagugu

SEQ ID NO: 433594 - RNA, 19 nt, Artificial Sequence
  Description of Artificial Sequence: Synthetic oligonucleotide
  Antisense Strand to SEQ ID NO: 433593
acacugggcaaauaacauu

SEQ ID NO: 433595 - RNA, 19 nt, Artificial Sequence
  Description of Artificial Sequence: Synthetic oligonucleotide
  Sense strand starting at position 431 of SEQ ID NO: 316700
auguuauuugcccaguguu

SEQ ID NO: 433596 - RNA, 19 nt, Artificial Sequence
  Description of Artificial Sequence: Synthetic oligonucleotide
  Antisense Strand to SEQ ID NO: 433595
aacacugggcaaauaacau

SEQ ID NO: 433597 - RNA, 19 nt, Artificial Sequence
  Description of Artificial Sequence: Synthetic oligonucleotide
  Sense strand starting at position 496 of SEQ ID NO: 316700
ggaagaucucauggcauug

SEQ ID NO: 433598 - RNA, 19 nt, Artificial Sequence
  Description of Artificial Sequence: Synthetic oligonucleotide
  Antisense Strand to SEQ ID NO: 433597
caaugccaugagaucuucc

SEQ ID NO: 433599 - RNA, 19 nt, Artificial Sequence
  Description of Artificial Sequence: Synthetic oligonucleotide
  Sense strand starting at position 712 of SEQ ID NO: 316700
acucauuucugggagacau

SEQ ID NO: 433600 - RNA, 19 nt, Artificial Sequence
  Description of Artificial Sequence: Synthetic oligonucleotide
  Antisense Strand to SEQ ID NO: 433599
augucucccagaaaugagu

SEQ ID NO: 433601 - RNA, 19 nt, Artificial Sequence
  Description of Artificial Sequence: Synthetic oligonucleotide
  Sense strand starting at position 745 of SEQ ID NO: 316700
acggaugacuggcuagaga

SEQ ID NO: 433602 - RNA, 19 nt, Artificial Sequence
  Description of Artificial Sequence: Synthetic oligonucleotide
  Antisense Strand to SEQ ID NO: 433601
ucucuagccagucauccgu

SEQ ID NO: 433603 - RNA, 19 nt, Artificial Sequence
  Description of Artificial Sequence: Synthetic oligonucleotide
  Sense strand starting at position 1269 of SEQ ID NO: 316700
acaacacugucauuaguga

SEQ ID NO: 433604 - RNA, 19 nt, Artificial Sequence
  Description of Artificial Sequence: Synthetic oligonucleotide
  Antisense Strand to SEQ ID NO: 433603
ucacuaaugacaguguugu

SEQ ID NO: 433605 - RNA, 19 nt, Artificial Sequence
  Description of Artificial Sequence: Synthetic oligonucleotide
  Sense strand starting at position 1455 of SEQ ID NO: 316700
gggucaaagccuuaacauu

SEQ ID NO: 433606 - RNA, 19 nt, Artificial Sequence
  Description of Artificial Sequence: Synthetic oligonucleotide
  Antisense Strand to SEQ ID NO: 433605
aauguuaaggcuuugaccc

SEQ ID NO: 433607 - RNA, 19 nt, Artificial Sequence
  Description of Artificial Sequence: Synthetic oligonucleotide
  Sense strand starting at position 1795 of SEQ ID NO: 316700
ugaucuaacugcucagauu

SEQ ID NO: 433608 - RNA, 19 nt, Artificial Sequence
  Description of Artificial Sequence: Synthetic oligonucleotide
  Antisense Strand to SEQ ID NO: 433607
aaucugagcaguuagauca

SEQ ID NO: 433609 - RNA, 19 nt, Artificial Sequence
  Description of Artificial Sequence: Synthetic oligonucleotide
  Sense strand starting at position 1904 of SEQ ID NO: 316700
aggaaaucuuacuuuaagc

SEQ ID NO: 433610 - RNA, 19 nt, Artificial Sequence
  Description of Artificial Sequence: Synthetic oligonucleotide
  Antisense Strand to SEQ ID NO: 433609
gcuuaaaguaagauuuccu

SEQ ID NO: 433611 - RNA, 19 nt, Artificial Sequence
  Description of Artificial Sequence: Synthetic oligonucleotide
  Sense strand starting at position 1950 of SEQ ID NO: 316700
cgguuugagcaacaaacuu

SEQ ID NO: 433612 - RNA, 19 nt, Artificial Sequence
  Description of Artificial Sequence: Synthetic oligonucleotide
  Antisense Strand to SEQ ID NO: 433611
aaguuuguugcucaaaccg

SEQ ID NO: 433613 - RNA, 19 nt, Artificial Sequence
  Description of Artificial Sequence: Synthetic oligonucleotide
  Sense strand starting at position 2101 of SEQ ID NO: 316700
cagguagaacuaugaauuc

SEQ ID NO: 433614 - RNA, 19 nt, Artificial Sequence
  Description of Artificial Sequence: Synthetic oligonucleotide
  Antisense Strand to SEQ ID NO: 433613
gaauucauaguucuaccug

SEQ ID NO: 433615 - RNA, 19 nt, Artificial Sequence
  Description of Artificial Sequence: Synthetic oligonucleotide
  Sense strand starting at position 2149 of SEQ ID NO: 316700
cuuagagcuuacuuaggau

SEQ ID NO: 433616 - RNA, 19 nt, Artificial Sequence
  Description of Artificial Sequence: Synthetic oligonucleotide
  Antisense Strand to SEQ ID NO: 433615
auccuaaguaagcucuaag

SEQ ID NO: 433617 - RNA, 19 nt, Artificial Sequence
  Description of Artificial Sequence: Synthetic oligonucleotide
  Sense strand starting at position 2157 of SEQ ID NO: 316700
uuacuuaggaugcggaaau

SEQ ID NO: 433618 - RNA, 19 nt, Artificial Sequence
  Description of Artificial Sequence: Synthetic oligonucleotide
  Antisense Strand to SEQ ID NO: 433617
auuuccgcauccuaaguaa

SEQ ID NO: 433619 - RNA, 19 nt, Artificial Sequence
  Description of Artificial Sequence: Synthetic oligonucleotide
  Sense strand starting at position 2393 of SEQ ID NO: 316700
uugagauacaguugugauu

SEQ ID NO: 433620 - RNA, 19 nt, Artificial Sequence
  Description of Artificial Sequence: Synthetic oligonucleotide
  Antisense Strand to SEQ ID NO: 433619
aaucacaacuguaucucaa

SEQ ID NO: 433621 - RNA, 19 nt, Artificial Sequence
  Description of Artificial Sequence: Synthetic oligonucleotide
  Sense strand starting at position 2506 of SEQ ID NO: 316700
gaacgugaaacuuggauga

SEQ ID NO: 433622 - RNA, 19 nt, Artificial Sequence
  Description of Artificial Sequence: Synthetic oligonucleotide
  Antisense Strand to SEQ ID NO: 433621
ucauccaaguuucacguuc

SEQ ID NO: 433623 - RNA, 19 nt, Artificial Sequence
  Description of Artificial Sequence: Synthetic oligonucleotide
  Sense strand starting at position 2567 of SEQ ID NO: 316700
cccaguuuggcugaagaga

SEQ ID NO: 433624 - RNA, 19 nt, Artificial Sequence
  Description of Artificial Sequence: Synthetic oligonucleotide
  Antisense Strand to SEQ ID NO: 433623
ucucuucagccaaacuggg

SEQ ID NO: 433625 - RNA, 19 nt, Artificial Sequence
  Description of Artificial Sequence: Synthetic oligonucleotide
  Sense strand starting at position 2621 of SEQ ID NO: 316700
ucaugagcccucuagguua

SEQ ID NO: 433626 - RNA, 19 nt, Artificial Sequence
  Description of Artificial Sequence: Synthetic oligonucleotide
  Antisense Strand to SEQ ID NO: 433625
uaaccuagagggcucauga

SEQ ID NO: 433627 - RNA, 19 nt, Artificial Sequence
  Description of Artificial Sequence: Synthetic oligonucleotide
  Sense strand starting at position 2626 of SEQ ID NO: 316700
agcccucuagguuaggaua

SEQ ID NO: 433628 - RNA, 19 nt, Artificial Sequence
  Description of Artificial Sequence: Synthetic oligonucleotide
  Antisense Strand to SEQ ID NO: 433627
uauccuaaccuagagggcu

SEQ ID NO: 433629 - RNA, 19 nt, Artificial Sequence
  Description of Artificial Sequence: Synthetic oligonucleotide
  Sense strand starting at position 2700 of SEQ ID NO: 316700
guacauguacuguauaaau

SEQ ID NO: 433630 - RNA, 19 nt, Artificial Sequence
  Description of Artificial Sequence: Synthetic oligonucleotide
  Antisense Strand to SEQ ID NO: 433629
auuuauacaguacauguac

SEQ ID NO: 433631 - RNA, 19 nt, Artificial Sequence
  Description of Artificial Sequence: Synthetic oligonucleotide
  Sense strand starting at position 2833 of SEQ ID NO: 316700
agauguugccaaugaaaug

SEQ ID NO: 433632 - RNA, 19 nt, Artificial Sequence
  Description of Artificial Sequence: Synthetic oligonucleotide
  Antisense Strand to SEQ ID NO: 433631
cauuucauuggcaacaucu

SEQ ID NO: 433633 - RNA, 19 nt, Artificial Sequence
  Description of Artificial Sequence: Synthetic oligonucleotide
  Sense strand starting at position 2844 of SEQ ID NO: 316700
augaaaugcaggugggaau

SEQ ID NO: 433634 - RNA, 19 nt, Artificial Sequence
  Description of Artificial Sequence: Synthetic oligonucleotide
  Antisense Strand to SEQ ID NO: 433633
auucccaccugcauuucau

SEQ ID NO: 433635 - RNA, 19 nt, Artificial Sequence
  Description of Artificial Sequence: Synthetic oligonucleotide
  Sense strand starting at position 2871 of SEQ ID NO: 316700
agggccuccuucuuaaaua

SEQ ID NO: 433636 - RNA, 19 nt, Artificial Sequence
  Description of Artificial Sequence: Synthetic oligonucleotide
  Antisense Strand to SEQ ID NO: 433635
uauuuaagaaggaggcccu

SEQ ID NO: 433637 - RNA, 19 nt, Artificial Sequence
  Description of Artificial Sequence: Synthetic oligonucleotide
  Sense strand starting at position 3084 of SEQ ID NO: 316700
uggacuucuuaugugagga

SEQ ID NO: 433638 - RNA, 19 nt, Artificial Sequence
  Description of Artificial Sequence: Synthetic oligonucleotide
  Antisense Strand to SEQ ID NO: 433637
uccucacauaagaagucca

SEQ ID NO: 433639 - RNA, 19 nt, Artificial Sequence
  Description of Artificial Sequence: Synthetic oligonucleotide
  Sense strand starting at position 3085 of SEQ ID NO: 316700
ggacuucuuaugugaggac

SEQ ID NO: 433640 - RNA, 19 nt, Artificial Sequence
  Description of Artificial Sequence: Synthetic oligonucleotide
  Antisense Strand to SEQ ID NO: 433639
guccucacauaagaagucc

SEQ ID NO: 433641 - RNA, 19 nt, Artificial Sequence
  Description of Artificial Sequence: Synthetic oligonucleotide
  Sense strand starting at position 3133 of SEQ ID NO: 316700
guuacauggagcuaaguga

SEQ ID NO: 433642 - RNA, 19 nt, Artificial Sequence
  Description of Artificial Sequence: Synthetic oligonucleotide
  Antisense Strand to SEQ ID NO: 433641
ucacuuagcuccauguaac

SEQ ID NO: 433643 - RNA, 19 nt, Artificial Sequence
  Description of Artificial Sequence: Synthetic oligonucleotide
  Sense strand starting at position 3230 of SEQ ID NO: 316700
uagcuaagugaguaaauca

SEQ ID NO: 433644 - RNA, 19 nt, Artificial Sequence
  Description of Artificial Sequence: Synthetic oligonucleotide
  Antisense Strand to SEQ ID NO: 433643
ugauuuacucacuuagcua

SEQ ID NO: 433645 - RNA, 19 nt, Artificial Sequence
  Description of Artificial Sequence: Synthetic oligonucleotide
  Sense strand starting at position 3237 of SEQ ID NO: 316700
gugaguaaaucacuuaaau

SEQ ID NO: 433646 - RNA, 19 nt, Artificial Sequence
  Description of Artificial Sequence: Synthetic oligonucleotide
  Antisense Strand to SEQ ID NO: 433645
auuuaagugauuuacucac

SEQ ID NO: 433647 - RNA, 19 nt, Artificial Sequence
  Description of Artificial Sequence: Synthetic oligonucleotide
  Sense strand starting at position 3341 of SEQ ID NO: 316700
cugugaauccaucagcaca

SEQ ID NO: 433648 - RNA, 19 nt, Artificial Sequence
  Description of Artificial Sequence: Synthetic oligonucleotide
  Antisense Strand to SEQ ID NO: 433647
ugugcugauggauucacag

SEQ ID NO: 433649 - RNA, 19 nt, Artificial Sequence
  Description of Artificial Sequence: Synthetic oligonucleotide
  Sense strand starting at position 3343 of SEQ ID NO: 316700
gugaauccaucagcacaau

SEQ ID NO: 433650 - RNA, 19 nt, Artificial Sequence
  Description of Artificial Sequence: Synthetic oligonucleotide
  Antisense Strand to SEQ ID NO: 433649
auugugcugauggauucac

SEQ ID NO: 433651 - RNA, 19 nt, Artificial Sequence
  Description of Artificial Sequence: Synthetic oligonucleotide
  Sense strand starting at position 3499 of SEQ ID NO: 316700
cuauaugaggucuauggua

SEQ ID NO: 433652 - RNA, 19 nt, Artificial Sequence
  Description of Artificial Sequence: Synthetic oligonucleotide
  Antisense Strand to SEQ ID NO: 433651
uaccauagaccucauauag

SEQ ID NO: 433653 - RNA, 19 nt, Artificial Sequence
  Description of Artificial Sequence: Synthetic oligonucleotide
  Sense strand starting at position 3501 of SEQ ID NO: 316700
auaugaggucuaugguaaa

SEQ ID NO: 433654 - RNA, 19 nt, Artificial Sequence
  Description of Artificial Sequence: Synthetic oligonucleotide
  Antisense Strand to SEQ ID NO: 433653
uuuaccauagaccucauau

SEQ ID NO: 433655 - RNA, 19 nt, Artificial Sequence
  Description of Artificial Sequence: Synthetic oligonucleotide
  Sense strand starting at position 3646 of SEQ ID NO: 316700
uuaugagaguucucuaauc

SEQ ID NO: 433656 - RNA, 19 nt, Artificial Sequence
  Description of Artificial Sequence: Synthetic oligonucleotide
  Antisense Strand to SEQ ID NO: 433655
gauuagagaacucucauaa

SEQ ID NO: 433657 - RNA, 19 nt, Artificial Sequence
  Description of Artificial Sequence: Synthetic oligonucleotide
  Sense strand starting at position 3651 of SEQ ID NO: 316700
agaguucucuaaucaaagc

SEQ ID NO: 433658 - RNA, 19 nt, Artificial Sequence
  Description of Artificial Sequence: Synthetic oligonucleotide
  Antisense Strand to SEQ ID NO: 433657
gcuuugauuagagaacucu

SEQ ID NO: 433659 - RNA, 19 nt, Artificial Sequence
  Description of Artificial Sequence: Synthetic oligonucleotide
  Sense strand starting at position 3787 of SEQ ID NO: 316700
guauucucagcagacuaaa

SEQ ID NO: 433660 - RNA, 19 nt, Artificial Sequence
  Description of Artificial Sequence: Synthetic oligonucleotide
  Antisense Strand to SEQ ID NO: 433659
uuuagucugcugagaauac

SEQ ID NO: 433661 - RNA, 19 nt, Artificial Sequence
  Description of Artificial Sequence: Synthetic oligonucleotide
  Sense strand starting at position 3896 of SEQ ID NO: 316700
auaugaguuccacauuggu

SEQ ID NO: 433662 - RNA, 19 nt, Artificial Sequence
  Description of Artificial Sequence: Synthetic oligonucleotide
  Antisense Strand to SEQ ID NO: 433661
accaauguggaacucauau

SEQ ID NO: 433663 - RNA, 19 nt, Artificial Sequence
  Description of Artificial Sequence: Synthetic oligonucleotide
  Sense strand starting at position 3936 of SEQ ID NO: 316700
caguaauuggcagauagua

SEQ ID NO: 433664 - RNA, 19 nt, Artificial Sequence
  Description of Artificial Sequence: Synthetic oligonucleotide
  Antisense Strand to SEQ ID NO: 433663
uacuaucugccaauuacug

SEQ ID NO: 433665 - RNA, 19 nt, Artificial Sequence
  Description of Artificial Sequence: Synthetic oligonucleotide
  Sense strand starting at position 3938 of SEQ ID NO: 316700
guaauuggcagauaguaga

SEQ ID NO: 433666 - RNA, 19 nt, Artificial Sequence
  Description of Artificial Sequence: Synthetic oligonucleotide
  Antisense Strand to SEQ ID NO: 433665
ucuacuaucugccaauuac

SEQ ID NO: 433667 - RNA, 19 nt, Artificial Sequence
  Description of Artificial Sequence: Synthetic oligonucleotide
  Sense strand starting at position 3948 of SEQ ID NO: 316700
gauaguagaugcucauuaa

SEQ ID NO: 433668 - RNA, 19 nt, Artificial Sequence
  Description of Artificial Sequence: Synthetic oligonucleotide
  Antisense Strand to SEQ ID NO: 433667
uuaaugagcaucuacuauc

SEQ ID NO: 433669 - RNA, 19 nt, Artificial Sequence
  Description of Artificial Sequence: Synthetic oligonucleotide
  Sense strand starting at position 610 of SEQ ID NO: 316701
gagaauccucucgaaguuu

SEQ ID NO: 433670 - RNA, 19 nt, Artificial Sequence
  Description of Artificial Sequence: Synthetic oligonucleotide
  Antisense Strand to SEQ ID NO: 433669
aaacuucgagaggauucuc

SEQ ID NO: 433671 - RNA, 19 nt, Artificial Sequence
  Description of Artificial Sequence: Synthetic oligonucleotide
  Sense strand starting at position 755 of SEQ ID NO: 316701
gaaaguugugcggagaguu

SEQ ID NO: 433672 - RNA, 19 nt, Artificial Sequence
  Description of Artificial Sequence: Synthetic oligonucleotide
  Antisense Strand to SEQ ID NO: 433671
aacucuccgcacaacuuuc

SEQ ID NO: 433673 - RNA, 19 nt, Artificial Sequence
  Description of Artificial Sequence: Synthetic oligonucleotide
  Sense strand starting at position 1520 of SEQ ID NO: 316701
agagcaaguguuuagggua

SEQ ID NO: 433674 - RNA, 19 nt, Artificial Sequence
  Description of Artificial Sequence: Synthetic oligonucleotide
  Antisense Strand to SEQ ID NO: 433673
uacccuaaacacuugcucu

SEQ ID NO: 433675 - RNA, 19 nt, Artificial Sequence
  Description of Artificial Sequence: Synthetic oligonucleotide
  Sense strand starting at position 1525 of SEQ ID NO: 316701
aaguguuuaggguaauauc

SEQ ID NO: 433676 - RNA, 19 nt, Artificial Sequence
  Description of Artificial Sequence: Synthetic oligonucleotide
  Antisense Strand to SEQ ID NO: 433675
gauauuacccuaaacacuu

SEQ ID NO: 433677 - RNA, 19 nt, Artificial Sequence
  Description of Artificial Sequence: Synthetic oligonucleotide
  Sense strand starting at position 1533 of SEQ ID NO: 316701
aggguaauaucugcuaaug

SEQ ID NO: 433678 - RNA, 19 nt, Artificial Sequence
  Description of Artificial Sequence: Synthetic oligonucleotide
  Antisense Strand to SEQ ID NO: 433677
cauuagcagauauuacccu

SEQ ID NO: 433679 - RNA, 19 nt, Artificial Sequence
  Description of Artificial Sequence: Synthetic oligonucleotide
  Sense strand starting at position 1857 of SEQ ID NO: 316701
agaguacguguguauuaca

SEQ ID NO: 433680 - RNA, 19 nt, Artificial Sequence
  Description of Artificial Sequence: Synthetic oligonucleotide
  Antisense Strand to SEQ ID NO: 433679
uguaauacacacguacucu

SEQ ID NO: 433681 - RNA, 19 nt, Artificial Sequence
  Description of Artificial Sequence: Synthetic oligonucleotide
  Sense strand starting at position 1865 of SEQ ID NO: 316701
uguguauuacagcaaguuc

SEQ ID NO: 433682 - RNA, 19 nt, Artificial Sequence
  Description of Artificial Sequence: Synthetic oligonucleotide
  Antisense Strand to SEQ ID NO: 433681
gaacuugcuguaauacaca

SEQ ID NO: 433683 - RNA, 19 nt, Artificial Sequence
  Description of Artificial Sequence: Synthetic oligonucleotide
  Sense strand starting at position 1896 of SEQ ID NO: 316701
ggaauugcucuccgauccu

SEQ ID NO: 433684 - RNA, 19 nt, Artificial Sequence
  Description of Artificial Sequence: Synthetic oligonucleotide
  Antisense Strand to SEQ ID NO: 433683
aggaucggagagcaauucc

SEQ ID NO: 433685 - RNA, 19 nt, Artificial Sequence
  Description of Artificial Sequence: Synthetic oligonucleotide
  Sense strand starting at position 2007 of SEQ ID NO: 316701
ugagcucaugcggaacaua

SEQ ID NO: 433686 - RNA, 19 nt, Artificial Sequence
  Description of Artificial Sequence: Synthetic oligonucleotide
  Antisense Strand to SEQ ID NO: 433685
uauguuccgcaugagcuca

SEQ ID NO: 433687 - RNA, 19 nt, Artificial Sequence
  Description of Artificial Sequence: Synthetic oligonucleotide
  Sense strand starting at position 2088 of SEQ ID NO: 316701
cgugcaugacaccaugauu

SEQ ID NO: 433688 - RNA, 19 nt, Artificial Sequence
  Description of Artificial Sequence: Synthetic oligonucleotide
  Antisense Strand to SEQ ID NO: 433687
aaucauggugucaugcacg

SEQ ID NO: 433689 - RNA, 19 nt, Artificial Sequence
  Description of Artificial Sequence: Synthetic oligonucleotide
  Sense strand starting at position 2249 of SEQ ID NO: 316701
guagccucugugcaauuga

SEQ ID NO: 433690 - RNA, 19 nt, Artificial Sequence
  Description of Artificial Sequence: Synthetic oligonucleotide
  Antisense Strand to SEQ ID NO: 433689
ucaauugcacagaggcuac

SEQ ID NO: 433691 - RNA, 19 nt, Artificial Sequence
  Description of Artificial Sequence: Synthetic oligonucleotide
  Sense strand starting at position 2288 of SEQ ID NO: 316701
cucccuuugaggugaugau

SEQ ID NO: 433692 - RNA, 19 nt, Artificial Sequence
  Description of Artificial Sequence: Synthetic oligonucleotide
  Antisense Strand to SEQ ID NO: 433691
aucaucaccucaaagggag

SEQ ID NO: 433693 - RNA, 19 nt, Artificial Sequence
  Description of Artificial Sequence: Synthetic oligonucleotide
  Sense strand starting at position 2289 of SEQ ID NO: 316701
ucccuuugaggugaugauu

SEQ ID NO: 433694 - RNA, 19 nt, Artificial Sequence
  Description of Artificial Sequence: Synthetic oligonucleotide
  Antisense Strand to SEQ ID NO: 433693
aaucaucaccucaaaggga

SEQ ID NO: 433695 - RNA, 19 nt, Artificial Sequence
  Description of Artificial Sequence: Synthetic oligonucleotide
  Sense strand starting at position 2440 of SEQ ID NO: 316701
ucaguagccguuugaauga

SEQ ID NO: 433696 - RNA, 19 nt, Artificial Sequence
  Description of Artificial Sequence: Synthetic oligonucleotide
  Antisense Strand to SEQ ID NO: 433695
ucauucaaacggcuacuga

SEQ ID NO: 433697 - RNA, 19 nt, Artificial Sequence
  Description of Artificial Sequence: Synthetic oligonucleotide
  Sense strand starting at position 2445 of SEQ ID NO: 316701
agccguuugaaugagagau

SEQ ID NO: 433698 - RNA, 19 nt, Artificial Sequence
  Description of Artificial Sequence: Synthetic oligonucleotide
  Antisense Strand to SEQ ID NO: 433697
aucucucauucaaacggcu

SEQ ID NO: 433699 - RNA, 19 nt, Artificial Sequence
  Description of Artificial Sequence: Synthetic oligonucleotide
  Sense strand starting at position 2621 of SEQ ID NO: 316701
uuucguucuccaggucaga

SEQ ID NO: 433700 - RNA, 19 nt, Artificial Sequence
  Description of Artificial Sequence: Synthetic oligonucleotide
  Antisense Strand to SEQ ID NO: 433699
ucugaccuggagaacgaaa

SEQ ID NO: 433701 - RNA, 19 nt, Artificial Sequence
  Description of Artificial Sequence: Synthetic oligonucleotide
  Sense strand starting at position 2634 of SEQ ID NO: 316701
gucagaguucuggaugcuc

SEQ ID NO: 433702 - RNA, 19 nt, Artificial Sequence
  Description of Artificial Sequence: Synthetic oligonucleotide
  Antisense Strand to SEQ ID NO: 433701
gagcauccagaacucugac

SEQ ID NO: 433703 - RNA, 19 nt, Artificial Sequence
  Description of Artificial Sequence: Synthetic oligonucleotide
  Sense strand starting at position 2642 of SEQ ID NO: 316701
ucuggaugcuccuugaugu

SEQ ID NO: 433704 - RNA, 19 nt, Artificial Sequence
  Description of Artificial Sequence: Synthetic oligonucleotide
  Antisense Strand to SEQ ID NO: 433703
acaucaaggagcauccaga

SEQ ID NO: 433705 - RNA, 19 nt, Artificial Sequence
  Description of Artificial Sequence: Synthetic oligonucleotide
  Sense strand starting at position 2643 of SEQ ID NO: 316701
cuggaugcuccuugaugua

SEQ ID NO: 433706 - RNA, 19 nt, Artificial Sequence
  Description of Artificial Sequence: Synthetic oligonucleotide
  Antisense Strand to SEQ ID NO: 433705
uacaucaaggagcauccag

SEQ ID NO: 433707 - RNA, 19 nt, Artificial Sequence
  Description of Artificial Sequence: Synthetic oligonucleotide
  Sense strand starting at position 2898 of SEQ ID NO: 316701
auccauuuauuagagauga

SEQ ID NO: 433708 - RNA, 19 nt, Artificial Sequence
  Description of Artificial Sequence: Synthetic oligonucleotide
  Antisense Strand to SEQ ID NO: 433707
ucaucucuaauaaauggau

SEQ ID NO: 433709 - RNA, 19 nt, Artificial Sequence
  Description of Artificial Sequence: Synthetic oligonucleotide
  Sense strand starting at position 2936 of SEQ ID NO: 316701
auaaguauuugggagucca

SEQ ID NO: 433710 - RNA, 19 nt, Artificial Sequence
  Description of Artificial Sequence: Synthetic oligonucleotide
  Antisense Strand to SEQ ID NO: 433709
uggacucccaaauacuuau

SEQ ID NO: 433711 - RNA, 19 nt, Artificial Sequence
  Description of Artificial Sequence: Synthetic oligonucleotide
  Sense strand starting at position 3043 of SEQ ID NO: 316701
guaacucaugcaugucaua

SEQ ID NO: 433712 - RNA, 19 nt, Artificial Sequence
  Description of Artificial Sequence: Synthetic oligonucleotide
  Antisense Strand to SEQ ID NO: 433711
uaugacaugcaugaguuac

SEQ ID NO: 433713 - RNA, 19 nt, Artificial Sequence
  Description of Artificial Sequence: Synthetic oligonucleotide
  Sense strand starting at position 3046 of SEQ ID NO: 316701
acucaugcaugucauauuu

SEQ ID NO: 433714 - RNA, 19 nt, Artificial Sequence
  Description of Artificial Sequence: Synthetic oligonucleotide
  Antisense Strand to SEQ ID NO: 433713
aaauaugacaugcaugagu

SEQ ID NO: 433715 - RNA, 19 nt, Artificial Sequence
  Description of Artificial Sequence: Synthetic oligonucleotide
  Sense strand starting at position 3179 of SEQ ID NO: 316701
agggacaguuaagaaauaa

SEQ ID NO: 433716 - RNA, 19 nt, Artificial Sequence
  Description of Artificial Sequence: Synthetic oligonucleotide
  Antisense Strand to SEQ ID NO: 433715
uuauuucuuaacugucccu

SEQ ID NO: 433717 - RNA, 19 nt, Artificial Sequence
  Description of Artificial Sequence: Synthetic oligonucleotide
  Sense strand starting at position 3195 of SEQ ID NO: 316701
uaaugaaaugcuggugaaa

SEQ ID NO: 433718 - RNA, 19 nt, Artificial Sequence
  Description of Artificial Sequence: Synthetic oligonucleotide
  Antisense Strand to SEQ ID NO: 433717
uuucaccagcauuucauua

SEQ ID NO: 433719 - RNA, 19 nt, Artificial Sequence
  Description of Artificial Sequence: Synthetic oligonucleotide
  Sense strand starting at position 3235 of SEQ ID NO: 316701
gggagauguuucuuaggca

SEQ ID NO: 433720 - RNA, 19 nt, Artificial Sequence
  Description of Artificial Sequence: Synthetic oligonucleotide
  Antisense Strand to SEQ ID NO: 433719
ugccuaagaaacaucuccc

SEQ ID NO: 433721 - RNA, 19 nt, Artificial Sequence
  Description of Artificial Sequence: Synthetic oligonucleotide
  Sense strand starting at position 3240 of SEQ ID NO: 316701
auguuucuuaggcacguaa

SEQ ID NO: 433722 - RNA, 19 nt, Artificial Sequence
  Description of Artificial Sequence: Synthetic oligonucleotide
  Antisense Strand to SEQ ID NO: 433721
uuacgugccuaagaaacau

SEQ ID NO: 433723 - RNA, 19 nt, Artificial Sequence
  Description of Artificial Sequence: Synthetic oligonucleotide
  Sense strand starting at position 3249 of SEQ ID NO: 316701
aggcacguaagugagaaau

SEQ ID NO: 433724 - RNA, 19 nt, Artificial Sequence
  Description of Artificial Sequence: Synthetic oligonucleotide
  Antisense Strand to SEQ ID NO: 433723
auuucucacuuacgugccu

SEQ ID NO: 433725 - RNA, 19 nt, Artificial Sequence
  Description of Artificial Sequence: Synthetic oligonucleotide
  Sense strand starting at position 3275 of SEQ ID NO: 316701
cuacuucugagacgugaga

SEQ ID NO: 433726 - RNA, 19 nt, Artificial Sequence
  Description of Artificial Sequence: Synthetic oligonucleotide
  Antisense Strand to SEQ ID NO: 433725
ucucacgucucagaaguag

SEQ ID NO: 433727 - RNA, 19 nt, Artificial Sequence
  Description of Artificial Sequence: Synthetic oligonucleotide
  Sense strand starting at position 3277 of SEQ ID NO: 316701
acuucugagacgugagaca

SEQ ID NO: 433728 - RNA, 19 nt, Artificial Sequence
  Description of Artificial Sequence: Synthetic oligonucleotide
  Antisense Strand to SEQ ID NO: 433727
ugucucacgucucagaagu

SEQ ID NO: 433729 - RNA, 19 nt, Artificial Sequence
  Description of Artificial Sequence: Synthetic oligonucleotide
  Sense strand starting at position 3286 of SEQ ID NO: 316701
acgugagacagcugaaauu

SEQ ID NO: 433730 - RNA, 19 nt, Artificial Sequence
  Description of Artificial Sequence: Synthetic oligonucleotide
  Antisense Strand to SEQ ID NO: 433729
aauuucagcugucucacgu

SEQ ID NO: 433731 - RNA, 19 nt, Artificial Sequence
  Description of Artificial Sequence: Synthetic oligonucleotide
  Sense strand starting at position 3296 of SEQ ID NO: 316701
gcugaaauugaaugauaua

SEQ ID NO: 433732 - RNA, 19 nt, Artificial Sequence
  Description of Artificial Sequence: Synthetic oligonucleotide
  Antisense Strand to SEQ ID NO: 433731
uauaucauucaauuucagc

SEQ ID NO: 433733 - RNA, 19 nt, Artificial Sequence
  Description of Artificial Sequence: Synthetic oligonucleotide
  Sense strand starting at position 3583 of SEQ ID NO: 316701
uuaagagacugggaacaau

SEQ ID NO: 433734 - RNA, 19 nt, Artificial Sequence
  Description of Artificial Sequence: Synthetic oligonucleotide
  Antisense Strand to SEQ ID NO: 433733
auuguucccagucucuuaa

SEQ ID NO: 433735 - RNA, 19 nt, Artificial Sequence
  Description of Artificial Sequence: Synthetic oligonucleotide
  Sense strand starting at position 3799 of SEQ ID NO: 316701
cuaugucugcguccugagu

SEQ ID NO: 433736 - RNA, 19 nt, Artificial Sequence
  Description of Artificial Sequence: Synthetic oligonucleotide
  Antisense Strand to SEQ ID NO: 433735
acucaggacgcagacauag

SEQ ID NO: 433737 - RNA, 19 nt, Artificial Sequence
  Description of Artificial Sequence: Synthetic oligonucleotide
  Sense strand starting at position 3807 of SEQ ID NO: 316701
gcguccugaguucauagaa

SEQ ID NO: 433738 - RNA, 19 nt, Artificial Sequence
  Description of Artificial Sequence: Synthetic oligonucleotide
  Antisense Strand to SEQ ID NO: 433737
uucuaugaacucaggacgc

SEQ ID NO: 433739 - RNA, 19 nt, Artificial Sequence
  Description of Artificial Sequence: Synthetic oligonucleotide
  Sense strand starting at position 3873 of SEQ ID NO: 316701
acucuaaguguggaguuga

SEQ ID NO: 433740 - RNA, 19 nt, Artificial Sequence
  Description of Artificial Sequence: Synthetic oligonucleotide
  Antisense Strand to SEQ ID NO: 433739
ucaacuccacacuuagagu

SEQ ID NO: 433741 - RNA, 19 nt, Artificial Sequence
  Description of Artificial Sequence: Synthetic oligonucleotide
  Sense strand starting at position 3881 of SEQ ID NO: 316701
uguggaguugaaggcaauu

SEQ ID NO: 433742 - RNA, 19 nt, Artificial Sequence
  Description of Artificial Sequence: Synthetic oligonucleotide
  Antisense Strand to SEQ ID NO: 433741
aauugccuucaacuccaca

SEQ ID NO: 433743 - RNA, 19 nt, Artificial Sequence
  Description of Artificial Sequence: Synthetic oligonucleotide
  Sense strand starting at position 3925 of SEQ ID NO: 316701
ccugccugagauuguauuu

SEQ ID NO: 433744 - RNA, 19 nt, Artificial Sequence
  Description of Artificial Sequence: Synthetic oligonucleotide
  Antisense Strand to SEQ ID NO: 433743
aaauacaaucucaggcagg

SEQ ID NO: 433745 - RNA, 19 nt, Artificial Sequence
  Description of Artificial Sequence: Synthetic oligonucleotide
  Sense strand starting at position 3946 of SEQ ID NO: 316701
cugaguauuguacauagau

SEQ ID NO: 433746 - RNA, 19 nt, Artificial Sequence
  Description of Artificial Sequence: Synthetic oligonucleotide
  Antisense Strand to SEQ ID NO: 433745
aucuauguacaauacucag

SEQ ID NO: 433747 - RNA, 19 nt, Artificial Sequence
  Description of Artificial Sequence: Synthetic oligonucleotide
  Sense strand starting at position 3954 of SEQ ID NO: 316701
uguacauagauguaaugua

SEQ ID NO: 433748 - RNA, 19 nt, Artificial Sequence
  Description of Artificial Sequence: Synthetic oligonucleotide
  Antisense Strand to SEQ ID NO: 433747
uacauuacaucuauguaca

SEQ ID NO: 433749 - RNA, 19 nt, Artificial Sequence
  Description of Artificial Sequence: Synthetic oligonucleotide
  Sense strand starting at position 305 of SEQ ID NO: 316702
auaccaugcucugaaauag

SEQ ID NO: 433750 - RNA, 19 nt, Artificial Sequence
  Description of Artificial Sequence: Synthetic oligonucleotide
  Antisense Strand to SEQ ID NO: 433749
cuauuucagagcaugguau

SEQ ID NO: 433751 - RNA, 19 nt, Artificial Sequence
  Description of Artificial Sequence: Synthetic oligonucleotide
  Sense strand starting at position 2210 of SEQ ID NO: 316702
auugaugacuuuguacaca

SEQ ID NO: 433752 - RNA, 19 nt, Artificial Sequence
  Description of Artificial Sequence: Synthetic oligonucleotide
  Antisense Strand to SEQ ID NO: 433751
uguguacaaagucaucaau

SEQ ID NO: 433753 - RNA, 19 nt, Artificial Sequence
  Description of Artificial Sequence: Synthetic oligonucleotide
  Sense strand starting at position 2401 of SEQ ID NO: 316702
uccucagcuucgccugauu

SEQ ID NO: 433754 - RNA, 19 nt, Artificial Sequence
  Description of Artificial Sequence: Synthetic oligonucleotide
  Antisense Strand to SEQ ID NO: 433753
aaucaggcgaagcugagga

SEQ ID NO: 433755 - RNA, 19 nt, Artificial Sequence
  Description of Artificial Sequence: Synthetic oligonucleotide
  Sense strand starting at position 2406 of SEQ ID NO: 316702
agcuucgccugauugcaaa

SEQ ID NO: 433756 - RNA, 19 nt, Artificial Sequence
  Description of Artificial Sequence: Synthetic oligonucleotide
  Antisense Strand to SEQ ID NO: 433755
uuugcaaucaggcgaagcu

SEQ ID NO: 433757 - RNA, 19 nt, Artificial Sequence
  Description of Artificial Sequence: Synthetic oligonucleotide
  Sense strand starting at position 2444 of SEQ ID NO: 316702
aguaauaguuuccaagcaa

SEQ ID NO: 433758 - RNA, 19 nt, Artificial Sequence
  Description of Artificial Sequence: Synthetic oligonucleotide
  Antisense Strand to SEQ ID NO: 433757
uugcuuggaaacuauuacu

SEQ ID NO: 433759 - RNA, 19 nt, Artificial Sequence
  Description of Artificial Sequence: Synthetic oligonucleotide
  Sense strand starting at position 2463 of SEQ ID NO: 316702
auaucaaauccaggguacu

SEQ ID NO: 433760 - RNA, 19 nt, Artificial Sequence
  Description of Artificial Sequence: Synthetic oligonucleotide
  Antisense Strand to SEQ ID NO: 433759
aguacccuggauuugauau

SEQ ID NO: 433761 - RNA, 19 nt, Artificial Sequence
  Description of Artificial Sequence: Synthetic oligonucleotide
  Sense strand starting at position 2497 of SEQ ID NO: 316702
aggugaaguugagauguga

SEQ ID NO: 433762 - RNA, 19 nt, Artificial Sequence
  Description of Artificial Sequence: Synthetic oligonucleotide
  Antisense Strand to SEQ ID NO: 433761
ucacaucucaacuucaccu

SEQ ID NO: 433763 - RNA, 19 nt, Artificial Sequence
  Description of Artificial Sequence: Synthetic oligonucleotide
  Sense strand starting at position 2505 of SEQ ID NO: 316702
uugagaugugacgguuaaa

SEQ ID NO: 433764 - RNA, 19 nt, Artificial Sequence
  Description of Artificial Sequence: Synthetic oligonucleotide
  Antisense Strand to SEQ ID NO: 433763
uuuaaccgucacaucucaa

SEQ ID NO: 433765 - RNA, 19 nt, Artificial Sequence
  Description of Artificial Sequence: Synthetic oligonucleotide
  Sense strand starting at position 2550 of SEQ ID NO: 316702
aaagacggugccugagaau

SEQ ID NO: 433766 - RNA, 19 nt, Artificial Sequence
  Description of Artificial Sequence: Synthetic oligonucleotide
  Antisense Strand to SEQ ID NO: 433765
auucucaggcaccgucuuu

SEQ ID NO: 433767 - RNA, 19 nt, Artificial Sequence
  Description of Artificial Sequence: Synthetic oligonucleotide
  Sense strand starting at position 2556 of SEQ ID NO: 316702
ggugccugagaauaccauu

SEQ ID NO: 433768 - RNA, 19 nt, Artificial Sequence
  Description of Artificial Sequence: Synthetic oligonucleotide
  Antisense Strand to SEQ ID NO: 433767
aaugguauucucaggcacc

SEQ ID NO: 433769 - RNA, 19 nt, Artificial Sequence
  Description of Artificial Sequence: Synthetic oligonucleotide
  Sense strand starting at position 2600 of SEQ ID NO: 316702
agauuaaugguguggcuca

SEQ ID NO: 433770 - RNA, 19 nt, Artificial Sequence
  Description of Artificial Sequence: Synthetic oligonucleotide
  Antisense Strand to SEQ ID NO: 433769
ugagccacaccauuaaucu

SEQ ID NO: 433771 - RNA, 19 nt, Artificial Sequence
  Description of Artificial Sequence: Synthetic oligonucleotide
  Sense strand starting at position 2655 of SEQ ID NO: 316702
gcuuaaggcuuguucguca

SEQ ID NO: 433772 - RNA, 19 nt, Artificial Sequence
  Description of Artificial Sequence: Synthetic oligonucleotide
  Antisense Strand to SEQ ID NO: 433771
ugacgaacaagccuuaagc

SEQ ID NO: 433773 - RNA, 19 nt, Artificial Sequence
  Description of Artificial Sequence: Synthetic oligonucleotide
  Sense strand starting at position 2658 of SEQ ID NO: 316702
uaaggcuuguucgucagua

SEQ ID NO: 433774 - RNA, 19 nt, Artificial Sequence
  Description of Artificial Sequence: Synthetic oligonucleotide
  Antisense Strand to SEQ ID NO: 433773
uacugacgaacaagccuua

SEQ ID NO: 433775 - RNA, 19 nt, Artificial Sequence
  Description of Artificial Sequence: Synthetic oligonucleotide
  Sense strand starting at position 2659 of SEQ ID NO: 316702
aaggcuuguucgucaguau

SEQ ID NO: 433776 - RNA, 19 nt, Artificial Sequence
  Description of Artificial Sequence: Synthetic oligonucleotide
  Antisense Strand to SEQ ID NO: 433775
auacugacgaacaagccuu

SEQ ID NO: 433777 - RNA, 19 nt, Artificial Sequence
  Description of Artificial Sequence: Synthetic oligonucleotide
  Sense strand starting at position 2660 of SEQ ID NO: 316702
aggcuuguucgucaguauu

SEQ ID NO: 433778 - RNA, 19 nt, Artificial Sequence
  Description of Artificial Sequence: Synthetic oligonucleotide
  Antisense Strand to SEQ ID NO: 433777
aauacugacgaacaagccu

SEQ ID NO: 433779 - RNA, 19 nt, Artificial Sequence
  Description of Artificial Sequence: Synthetic oligonucleotide
  Sense strand starting at position 2662 of SEQ ID NO: 316702
gcuuguucgucaguauuag

SEQ ID NO: 433780 - RNA, 19 nt, Artificial Sequence
  Description of Artificial Sequence: Synthetic oligonucleotide
  Antisense Strand to SEQ ID NO: 433779
cuaauacugacgaacaagc

SEQ ID NO: 433781 - RNA, 19 nt, Artificial Sequence
  Description of Artificial Sequence: Synthetic oligonucleotide
  Sense strand starting at position 2755 of SEQ ID NO: 316702
cgaugagauucacaggaga

SEQ ID NO: 433782 - RNA, 19 nt, Artificial Sequence
  Description of Artificial Sequence: Synthetic oligonucleotide
  Antisense Strand to SEQ ID NO: 433781
ucuccugugaaucucaucg

SEQ ID NO: 433783 - RNA, 19 nt, Artificial Sequence
  Description of Artificial Sequence: Synthetic oligonucleotide
  Sense strand starting at position 2934 of SEQ ID NO: 316702
aguauaacucagggcauga

SEQ ID NO: 433784 - RNA, 19 nt, Artificial Sequence
  Description of Artificial Sequence: Synthetic oligonucleotide
  Antisense Strand to SEQ ID NO: 433783
ucaugcccugaguuauacu

SEQ ID NO: 433785 - RNA, 19 nt, Artificial Sequence
  Description of Artificial Sequence: Synthetic oligonucleotide
  Sense strand starting at position 2989 of SEQ ID NO: 316702
aguccuagaccuugagacu

SEQ ID NO: 433786 - RNA, 19 nt, Artificial Sequence
  Description of Artificial Sequence: Synthetic oligonucleotide
  Antisense Strand to SEQ ID NO: 433785
agucucaaggucuaggacu

SEQ ID NO: 433787 - RNA, 19 nt, Artificial Sequence
  Description of Artificial Sequence: Synthetic oligonucleotide
  Sense strand starting at position 3030 of SEQ ID NO: 316702
uggcaacuuguuuguacuu

SEQ ID NO: 433788 - RNA, 19 nt, Artificial Sequence
  Description of Artificial Sequence: Synthetic oligonucleotide
  Antisense Strand to SEQ ID NO: 433787
aaguacaaacaaguugcca

SEQ ID NO: 433789 - RNA, 19 nt, Artificial Sequence
  Description of Artificial Sequence: Synthetic oligonucleotide
  Sense strand starting at position 3035 of SEQ ID NO: 316702
acuuguuuguacuuccaau

SEQ ID NO: 433790 - RNA, 19 nt, Artificial Sequence
  Description of Artificial Sequence: Synthetic oligonucleotide
  Antisense Strand to SEQ ID NO: 433789
auuggaaguacaaacaagu

SEQ ID NO: 433791 - RNA, 19 nt, Artificial Sequence
  Description of Artificial Sequence: Synthetic oligonucleotide
  Sense strand starting at position 3081 of SEQ ID NO: 316702
uggcuaaucuagucguagu

SEQ ID NO: 433792 - RNA, 19 nt, Artificial Sequence
  Description of Artificial Sequence: Synthetic oligonucleotide
  Antisense Strand to SEQ ID NO: 433791
acuacgacuagauuagcca

SEQ ID NO: 433793 - RNA, 19 nt, Artificial Sequence
  Description of Artificial Sequence: Synthetic oligonucleotide
  Sense strand starting at position 3084 of SEQ ID NO: 316702
cuaaucuagucguagugga

SEQ ID NO: 433794 - RNA, 19 nt, Artificial Sequence
  Description of Artificial Sequence: Synthetic oligonucleotide
  Antisense Strand to SEQ ID NO: 433793
uccacuacgacuagauuag

SEQ ID NO: 433795 - RNA, 19 nt, Artificial Sequence
  Description of Artificial Sequence: Synthetic oligonucleotide
  Sense strand starting at position 3105 of SEQ ID NO: 316702
agaacaggucuguagugau

SEQ ID NO: 433796 - RNA, 19 nt, Artificial Sequence
  Description of Artificial Sequence: Synthetic oligonucleotide
  Antisense Strand to SEQ ID NO: 433795
aucacuacagaccuguucu

SEQ ID NO: 433797 - RNA, 19 nt, Artificial Sequence
  Description of Artificial Sequence: Synthetic oligonucleotide
  Sense strand starting at position 3108 of SEQ ID NO: 316702
acaggucuguagugauuau

SEQ ID NO: 433798 - RNA, 19 nt, Artificial Sequence
  Description of Artificial Sequence: Synthetic oligonucleotide
  Antisense Strand to SEQ ID NO: 433797
auaaucacuacagaccugu

SEQ ID NO: 433799 - RNA, 19 nt, Artificial Sequence
  Description of Artificial Sequence: Synthetic oligonucleotide
  Sense strand starting at position 3169 of SEQ ID NO: 316702
gagaacuugucuccuuagu

SEQ ID NO: 433800 - RNA, 19 nt, Artificial Sequence
  Description of Artificial Sequence: Synthetic oligonucleotide
  Antisense Strand to SEQ ID NO: 433799
acuaaggagacaaguucuc

SEQ ID NO: 433801 - RNA, 19 nt, Artificial Sequence
  Description of Artificial Sequence: Synthetic oligonucleotide
  Sense strand starting at position 3226 of SEQ ID NO: 316702
agcugaauuuaaggaacua

SEQ ID NO: 433802 - RNA, 19 nt, Artificial Sequence
  Description of Artificial Sequence: Synthetic oligonucleotide
  Antisense Strand to SEQ ID NO: 433801
uaguuccuuaaauucagcu

SEQ ID NO: 433803 - RNA, 19 nt, Artificial Sequence
  Description of Artificial Sequence: Synthetic oligonucleotide
  Sense strand starting at position 3266 of SEQ ID NO: 316702
aucugaucuuauugagaag

SEQ ID NO: 433804 - RNA, 19 nt, Artificial Sequence
  Description of Artificial Sequence: Synthetic oligonucleotide
  Antisense Strand to SEQ ID NO: 433803
cuucucaauaagaucagau

SEQ ID NO: 433805 - RNA, 19 nt, Artificial Sequence
  Description of Artificial Sequence: Synthetic oligonucleotide
  Sense strand starting at position 3269 of SEQ ID NO: 316702
ugaucuuauugagaagaca

SEQ ID NO: 433806 - RNA, 19 nt, Artificial Sequence
  Description of Artificial Sequence: Synthetic oligonucleotide
  Antisense Strand to SEQ ID NO: 433805
ugucuucucaauaagauca

SEQ ID NO: 433807 - RNA, 19 nt, Artificial Sequence
  Description of Artificial Sequence: Synthetic oligonucleotide
  Sense strand starting at position 3297 of SEQ ID NO: 316702
acuuaaagcugaugugaca

SEQ ID NO: 433808 - RNA, 19 nt, Artificial Sequence
  Description of Artificial Sequence: Synthetic oligonucleotide
  Antisense Strand to SEQ ID NO: 433807
ugucacaucagcuuuaagu

SEQ ID NO: 433809 - RNA, 19 nt, Artificial Sequence
  Description of Artificial Sequence: Synthetic oligonucleotide
  Sense strand starting at position 3300 of SEQ ID NO: 316702
uaaagcugaugugacaaua

SEQ ID NO: 433810 - RNA, 19 nt, Artificial Sequence
  Description of Artificial Sequence: Synthetic oligonucleotide
  Antisense Strand to SEQ ID NO: 433809
uauugucacaucagcuuua

SEQ ID NO: 433811 - RNA, 19 nt, Artificial Sequence
  Description of Artificial Sequence: Synthetic oligonucleotide
  Sense strand starting at position 3316 of SEQ ID NO: 316702
auaggauaguaauaccuaa

SEQ ID NO: 433812 - RNA, 19 nt, Artificial Sequence
  Description of Artificial Sequence: Synthetic oligonucleotide
  Antisense Strand to SEQ ID NO: 433811
uuagguauuacuauccuau

SEQ ID NO: 433813 - RNA, 19 nt, Artificial Sequence
  Description of Artificial Sequence: Synthetic oligonucleotide
  Sense strand starting at position 3433 of SEQ ID NO: 316702
ggcaaacugugauugcuag

SEQ ID NO: 433814 - RNA, 19 nt, Artificial Sequence
  Description of Artificial Sequence: Synthetic oligonucleotide
  Antisense Strand to SEQ ID NO: 433813
cuagcaaucacaguuugcc

SEQ ID NO: 433815 - RNA, 19 nt, Artificial Sequence
  Description of Artificial Sequence: Synthetic oligonucleotide
  Sense strand starting at position 3474 of SEQ ID NO: 316702
gugauuucuuacuccuggu

SEQ ID NO: 433816 - RNA, 19 nt, Artificial Sequence
  Description of Artificial Sequence: Synthetic oligonucleotide
  Antisense Strand to SEQ ID NO: 433815
accaggaguaagaaaucac

SEQ ID NO: 433817 - RNA, 19 nt, Artificial Sequence
  Description of Artificial Sequence: Synthetic oligonucleotide
  Sense strand starting at position 3477 of SEQ ID NO: 316702
auuucuuacuccugguauu

SEQ ID NO: 433818 - RNA, 19 nt, Artificial Sequence
  Description of Artificial Sequence: Synthetic oligonucleotide
  Antisense Strand to SEQ ID NO: 433817
aauaccaggaguaagaaau

SEQ ID NO: 433819 - RNA, 19 nt, Artificial Sequence
  Description of Artificial Sequence: Synthetic oligonucleotide
  Sense strand starting at position 3513 of SEQ ID NO: 316702
ccucuugucgaguauguac

SEQ ID NO: 433820 - RNA, 19 nt, Artificial Sequence
  Description of Artificial Sequence: Synthetic oligonucleotide
  Antisense Strand to SEQ ID NO: 433819
guacauacucgacaagagg

SEQ ID NO: 433821 - RNA, 19 nt, Artificial Sequence
  Description of Artificial Sequence: Synthetic oligonucleotide
  Sense strand starting at position 3520 of SEQ ID NO: 316702
ucgaguauguacuggacuu

SEQ ID NO: 433822 - RNA, 19 nt, Artificial Sequence
  Description of Artificial Sequence: Synthetic oligonucleotide
  Antisense Strand to SEQ ID NO: 433821
aaguccaguacauacucga

SEQ ID NO: 433823 - RNA, 19 nt, Artificial Sequence
  Description of Artificial Sequence: Synthetic oligonucleotide
  Sense strand starting at position 3521 of SEQ ID NO: 316702
cgaguauguacuggacuua

SEQ ID NO: 433824 - RNA, 19 nt, Artificial Sequence
  Description of Artificial Sequence: Synthetic oligonucleotide
  Antisense Strand to SEQ ID NO: 433823
uaaguccaguacauacucg

SEQ ID NO: 433825 - RNA, 19 nt, Artificial Sequence
  Description of Artificial Sequence: Synthetic oligonucleotide
  Sense strand starting at position 3584 of SEQ ID NO: 316702
gauguaugauuuggacauu

SEQ ID NO: 433826 - RNA, 19 nt, Artificial Sequence
  Description of Artificial Sequence: Synthetic oligonucleotide
  Antisense Strand to SEQ ID NO: 433825
aauguccaaaucauacauc

SEQ ID NO: 433827 - RNA, 19 nt, Artificial Sequence
  Description of Artificial Sequence: Synthetic oligonucleotide
  Sense strand starting at position 3585 of SEQ ID NO: 316702
auguaugauuuggacauua

SEQ ID NO: 433828 - RNA, 19 nt, Artificial Sequence
  Description of Artificial Sequence: Synthetic oligonucleotide
  Antisense Strand to SEQ ID NO: 433827
uaauguccaaaucauacau

SEQ ID NO: 433829 - RNA, 19 nt, Artificial Sequence
  Description of Artificial Sequence: Synthetic oligonucleotide
  Sense strand starting at position 70 of SEQ ID NO: 316703
gcuugcuuaggguagugau

SEQ ID NO: 433830 - RNA, 19 nt, Artificial Sequence
  Description of Artificial Sequence: Synthetic oligonucleotide
  Antisense Strand to SEQ ID NO: 433829
aucacuacccuaagcaagc

SEQ ID NO: 433831 - RNA, 19 nt, Artificial Sequence
  Description of Artificial Sequence: Synthetic oligonucleotide
  Sense strand starting at position 99 of SEQ ID NO: 316703
uaggguagugaguaauaca

SEQ ID NO: 433832 - RNA, 19 nt, Artificial Sequence
  Description of Artificial Sequence: Synthetic oligonucleotide
  Antisense Strand to SEQ ID NO: 433831
uguauuacucacuacccua

SEQ ID NO: 433833 - RNA, 19 nt, Artificial Sequence
  Description of Artificial Sequence: Synthetic oligonucleotide
  Sense strand starting at position 207 of SEQ ID NO: 316703
guguaacacuacucaagcu

SEQ ID NO: 433834 - RNA, 19 nt, Artificial Sequence
  Description of Artificial Sequence: Synthetic oligonucleotide
  Antisense Strand to SEQ ID NO: 433833
agcuugaguaguguuacac

SEQ ID NO: 433835 - RNA, 19 nt, Artificial Sequence
  Description of Artificial Sequence: Synthetic oligonucleotide
  Sense strand starting at position 257 of SEQ ID NO: 316703
gacagaauauggcauuuga

SEQ ID NO: 433836 - RNA, 19 nt, Artificial Sequence
  Description of Artificial Sequence: Synthetic oligonucleotide
  Antisense Strand to SEQ ID NO: 433835
ucaaaugccauauucuguc

SEQ ID NO: 433837 - RNA, 19 nt, Artificial Sequence
  Description of Artificial Sequence: Synthetic oligonucleotide
  Sense strand starting at position 275 of SEQ ID NO: 316703
agugaagagccaugugcuu

SEQ ID NO: 433838 - RNA, 19 nt, Artificial Sequence
  Description of Artificial Sequence: Synthetic oligonucleotide
  Antisense Strand to SEQ ID NO: 433837
aagcacauggcucuucacu

SEQ ID NO: 433839 - RNA, 19 nt, Artificial Sequence
  Description of Artificial Sequence: Synthetic oligonucleotide
  Sense strand starting at position 442 of SEQ ID NO: 316703
cuccaaguuucggcuaaga

SEQ ID NO: 433840 - RNA, 19 nt, Artificial Sequence
  Description of Artificial Sequence: Synthetic oligonucleotide
  Antisense Strand to SEQ ID NO: 433839
ucuuagccgaaacuuggag

SEQ ID NO: 433841 - RNA, 19 nt, Artificial Sequence
  Description of Artificial Sequence: Synthetic oligonucleotide
  Sense strand starting at position 444 of SEQ ID NO: 316703
ccaaguuucggcuaagauc

SEQ ID NO: 433842 - RNA, 19 nt, Artificial Sequence
  Description of Artificial Sequence: Synthetic oligonucleotide
  Antisense Strand to SEQ ID NO: 433841
gaucuuagccgaaacuugg

SEQ ID NO: 433843 - RNA, 19 nt, Artificial Sequence
  Description of Artificial Sequence: Synthetic oligonucleotide
  Sense strand starting at position 450 of SEQ ID NO: 316703
uucggcuaagaucauuauu

SEQ ID NO: 433844 - RNA, 19 nt, Artificial Sequence
  Description of Artificial Sequence: Synthetic oligonucleotide
  Antisense Strand to SEQ ID NO: 433843
aauaaugaucuuagccgaa

SEQ ID NO: 433845 - RNA, 19 nt, Artificial Sequence
  Description of Artificial Sequence: Synthetic oligonucleotide
  Sense strand starting at position 452 of SEQ ID NO: 316703
cggcuaagaucauuauucu

SEQ ID NO: 433846 - RNA, 19 nt, Artificial Sequence
  Description of Artificial Sequence: Synthetic oligonucleotide
  Antisense Strand to SEQ ID NO: 433845
agaauaaugaucuuagccg

SEQ ID NO: 433847 - RNA, 19 nt, Artificial Sequence
  Description of Artificial Sequence: Synthetic oligonucleotide
  Sense strand starting at position 453 of SEQ ID NO: 316703
ggcuaagaucauuauucug

SEQ ID NO: 433848 - RNA, 19 nt, Artificial Sequence
  Description of Artificial Sequence: Synthetic oligonucleotide
  Antisense Strand to SEQ ID NO: 433847
cagaauaaugaucuuagcc

SEQ ID NO: 433849 - RNA, 19 nt, Artificial Sequence
  Description of Artificial Sequence: Synthetic oligonucleotide
  Sense strand starting at position 461 of SEQ ID NO: 316703
ucauuauucugagcaaugg

SEQ ID NO: 433850 - RNA, 19 nt, Artificial Sequence
  Description of Artificial Sequence: Synthetic oligonucleotide
  Antisense Strand to SEQ ID NO: 433849
ccauugcucagaauaauga

SEQ ID NO: 433851 - RNA, 19 nt, Artificial Sequence
  Description of Artificial Sequence: Synthetic oligonucleotide
  Sense strand starting at position 462 of SEQ ID NO: 316703
cauuauucugagcaauggu

SEQ ID NO: 433852 - RNA, 19 nt, Artificial Sequence
  Description of Artificial Sequence: Synthetic oligonucleotide
  Antisense Strand to SEQ ID NO: 433851
accauugcucagaauaaug

SEQ ID NO: 433853 - RNA, 19 nt, Artificial Sequence
  Description of Artificial Sequence: Synthetic oligonucleotide
  Sense strand starting at position 577 of SEQ ID NO: 316703
uuuacuguuguguauagca

SEQ ID NO: 433854 - RNA, 19 nt, Artificial Sequence
  Description of Artificial Sequence: Synthetic oligonucleotide
  Antisense Strand to SEQ ID NO: 433853
ugcuauacacaacaguaaa

SEQ ID NO: 433855 - RNA, 19 nt, Artificial Sequence
  Description of Artificial Sequence: Synthetic oligonucleotide
  Sense strand starting at position 579 of SEQ ID NO: 316703
uacuguuguguauagcauu

SEQ ID NO: 433856 - RNA, 19 nt, Artificial Sequence
  Description of Artificial Sequence: Synthetic oligonucleotide
  Antisense Strand to SEQ ID NO: 433855
aaugcuauacacaacagua

SEQ ID NO: 433857 - RNA, 19 nt, Artificial Sequence
  Description of Artificial Sequence: Synthetic oligonucleotide
  Sense strand starting at position 610 of SEQ ID NO: 316703
agcggaaucucagucuacu

SEQ ID NO: 433858 - RNA, 19 nt, Artificial Sequence
  Description of Artificial Sequence: Synthetic oligonucleotide
  Antisense Strand to SEQ ID NO: 433857
aguagacugagauuccgcu

SEQ ID NO: 433859 - RNA, 19 nt, Artificial Sequence
  Description of Artificial Sequence: Synthetic oligonucleotide
  Sense strand starting at position 613 of SEQ ID NO: 316703
ggaaucucagucuacuguu

SEQ ID NO: 433860 - RNA, 19 nt, Artificial Sequence
  Description of Artificial Sequence: Synthetic oligonucleotide
  Antisense Strand to SEQ ID NO: 433859
aacaguagacugagauucc

SEQ ID NO: 433861 - RNA, 19 nt, Artificial Sequence
  Description of Artificial Sequence: Synthetic oligonucleotide
  Sense strand starting at position 711 of SEQ ID NO: 316703
agggccauuuaucaacaaa

SEQ ID NO: 433862 - RNA, 19 nt, Artificial Sequence
  Description of Artificial Sequence: Synthetic oligonucleotide
  Antisense Strand to SEQ ID NO: 433861
uuuguugauaaauggcccu

SEQ ID NO: 433863 - RNA, 19 nt, Artificial Sequence
  Description of Artificial Sequence: Synthetic oligonucleotide
  Sense strand starting at position 831 of SEQ ID NO: 316703
gcaauuaugccagaaauac

SEQ ID NO: 433864 - RNA, 19 nt, Artificial Sequence
  Description of Artificial Sequence: Synthetic oligonucleotide
  Antisense Strand to SEQ ID NO: 433863
guauuucuggcauaauugc

SEQ ID NO: 433865 - RNA, 19 nt, Artificial Sequence
  Description of Artificial Sequence: Synthetic oligonucleotide
  Sense strand starting at position 918 of SEQ ID NO: 316703
gucauaaccuguuccagau

SEQ ID NO: 433866 - RNA, 19 nt, Artificial Sequence
  Description of Artificial Sequence: Synthetic oligonucleotide
  Antisense Strand to SEQ ID NO: 433865
aucuggaacagguuaugac

SEQ ID NO: 433867 - RNA, 19 nt, Artificial Sequence
  Description of Artificial Sequence: Synthetic oligonucleotide
  Sense strand starting at position 1032 of SEQ ID NO: 316703
ugaauagcaccuuguccaa

SEQ ID NO: 433868 - RNA, 19 nt, Artificial Sequence
  Description of Artificial Sequence: Synthetic oligonucleotide
  Antisense Strand to SEQ ID NO: 433867
uuggacaaggugcuauuca

SEQ ID NO: 433869 - RNA, 19 nt, Artificial Sequence
  Description of Artificial Sequence: Synthetic oligonucleotide
  Sense strand starting at position 1075 of SEQ ID NO: 316703
auaaaugggcuccaaguuu

SEQ ID NO: 433870 - RNA, 19 nt, Artificial Sequence
  Description of Artificial Sequence: Synthetic oligonucleotide
  Antisense Strand to SEQ ID NO: 433869
aaacuuggagcccauuuau

SEQ ID NO: 433871 - RNA, 19 nt, Artificial Sequence
  Description of Artificial Sequence: Synthetic oligonucleotide
  Sense strand starting at position 1560 of SEQ ID NO: 316703
guauaagagucaguccgga

SEQ ID NO: 433872 - RNA, 19 nt, Artificial Sequence
  Description of Artificial Sequence: Synthetic oligonucleotide
  Antisense Strand to SEQ ID NO: 433871
uccggacugacucuuauac

SEQ ID NO: 433873 - RNA, 19 nt, Artificial Sequence
  Description of Artificial Sequence: Synthetic oligonucleotide
  Sense strand starting at position 2658 of SEQ ID NO: 316703
ggaacuucucgcuucguuu

SEQ ID NO: 433874 - RNA, 19 nt, Artificial Sequence
  Description of Artificial Sequence: Synthetic oligonucleotide
  Antisense Strand to SEQ ID NO: 433873
aaacgaagcgagaaguucc

SEQ ID NO: 433875 - RNA, 19 nt, Artificial Sequence
  Description of Artificial Sequence: Synthetic oligonucleotide
  Sense strand starting at position 2691 of SEQ ID NO: 316703
caggccuucucccuugaga

SEQ ID NO: 433876 - RNA, 19 nt, Artificial Sequence
  Description of Artificial Sequence: Synthetic oligonucleotide
  Antisense Strand to SEQ ID NO: 433875
ucucaagggagaaggccug

SEQ ID NO: 433877 - RNA, 19 nt, Artificial Sequence
  Description of Artificial Sequence: Synthetic oligonucleotide
  Sense strand starting at position 2693 of SEQ ID NO: 316703
ggccuucucccuugagagu

SEQ ID NO: 433878 - RNA, 19 nt, Artificial Sequence
  Description of Artificial Sequence: Synthetic oligonucleotide
  Antisense Strand to SEQ ID NO: 433877
acucucaagggagaaggcc

SEQ ID NO: 433879 - RNA, 19 nt, Artificial Sequence
  Description of Artificial Sequence: Synthetic oligonucleotide
  Sense strand starting at position 3292 of SEQ ID NO: 316703
aacuguagagccuguguaa

SEQ ID NO: 433880 - RNA, 19 nt, Artificial Sequence
  Description of Artificial Sequence: Synthetic oligonucleotide
  Antisense Strand to SEQ ID NO: 433879
uuacacaggcucuacaguu

SEQ ID NO: 433881 - RNA, 19 nt, Artificial Sequence
  Description of Artificial Sequence: Synthetic oligonucleotide
  Sense strand starting at position 3295 of SEQ ID NO: 316703
uguagagccuguguaaaga

SEQ ID NO: 433882 - RNA, 19 nt, Artificial Sequence
  Description of Artificial Sequence: Synthetic oligonucleotide
  Antisense Strand to SEQ ID NO: 433881
ucuuuacacaggcucuaca

SEQ ID NO: 433883 - RNA, 19 nt, Artificial Sequence
  Description of Artificial Sequence: Synthetic oligonucleotide
  Sense strand starting at position 3381 of SEQ ID NO: 316703
agguuccaguuucuuaaga

SEQ ID NO: 433884 - RNA, 19 nt, Artificial Sequence
  Description of Artificial Sequence: Synthetic oligonucleotide
  Antisense Strand to SEQ ID NO: 433883
ucuuaagaaacuggaaccu

SEQ ID NO: 433885 - RNA, 19 nt, Artificial Sequence
  Description of Artificial Sequence: Synthetic oligonucleotide
  Sense strand starting at position 3489 of SEQ ID NO: 316703
augcaccuucuaugaaagu

SEQ ID NO: 433886 - RNA, 19 nt, Artificial Sequence
  Description of Artificial Sequence: Synthetic oligonucleotide
  Antisense Strand to SEQ ID NO: 433885
acuuucauagaaggugcau

SEQ ID NO: 433887 - RNA, 19 nt, Artificial Sequence
  Description of Artificial Sequence: Synthetic oligonucleotide
  Sense strand starting at position 3508 of SEQ ID NO: 316703
agaugaaugugguucuauc

SEQ ID NO: 433888 - RNA, 19 nt, Artificial Sequence
  Description of Artificial Sequence: Synthetic oligonucleotide
  Antisense Strand to SEQ ID NO: 433887
gauagaaccacauucaucu

SEQ ID NO: 433889 - RNA, 19 nt, Artificial Sequence
  Description of Artificial Sequence: Synthetic oligonucleotide
  Sense strand starting at position 3682 of SEQ ID NO: 316703
uuaggcauuucugcuacau

SEQ ID NO: 433890 - RNA, 19 nt, Artificial Sequence
  Description of Artificial Sequence: Synthetic oligonucleotide
  Antisense Strand to SEQ ID NO: 433889
auguagcagaaaugccuaa

SEQ ID NO: 433891 - RNA, 19 nt, Artificial Sequence
  Description of Artificial Sequence: Synthetic oligonucleotide
  Sense strand starting at position 3684 of SEQ ID NO: 316703
aggcauuucugcuacauaa

SEQ ID NO: 433892 - RNA, 19 nt, Artificial Sequence
  Description of Artificial Sequence: Synthetic oligonucleotide
  Antisense Strand to SEQ ID NO: 433891
uuauguagcagaaaugccu

SEQ ID NO: 433893 - RNA, 19 nt, Artificial Sequence
  Description of Artificial Sequence: Synthetic oligonucleotide
  Sense strand starting at position 3730 of SEQ ID NO: 316703
agaccugacguuuaaagua

SEQ ID NO: 433894 - RNA, 19 nt, Artificial Sequence
  Description of Artificial Sequence: Synthetic oligonucleotide
  Antisense Strand to SEQ ID NO: 433893
uacuuuaaacgucaggucu

SEQ ID NO: 433895 - RNA, 19 nt, Artificial Sequence
  Description of Artificial Sequence: Synthetic oligonucleotide
  Sense strand starting at position 3767 of SEQ ID NO: 316703
gugagauuauaugucagau

SEQ ID NO: 433896 - RNA, 19 nt, Artificial Sequence
  Description of Artificial Sequence: Synthetic oligonucleotide
  Antisense Strand to SEQ ID NO: 433895
aucugacauauaaucucac

SEQ ID NO: 433897 - RNA, 19 nt, Artificial Sequence
  Description of Artificial Sequence: Synthetic oligonucleotide
  Sense strand starting at position 3769 of SEQ ID NO: 316703
gagauuauaugucagauga

SEQ ID NO: 433898 - RNA, 19 nt, Artificial Sequence
  Description of Artificial Sequence: Synthetic oligonucleotide
  Antisense Strand to SEQ ID NO: 433897
ucaucugacauauaaucuc

SEQ ID NO: 433899 - RNA, 19 nt, Artificial Sequence
  Description of Artificial Sequence: Synthetic oligonucleotide
  Sense strand starting at position 3782 of SEQ ID NO: 316703
agaugauugauguggugug

SEQ ID NO: 433900 - RNA, 19 nt, Artificial Sequence
  Description of Artificial Sequence: Synthetic oligonucleotide
  Antisense Strand to SEQ ID NO: 433899
cacaccacaucaaucaucu

SEQ ID NO: 433901 - RNA, 19 nt, Artificial Sequence
  Description of Artificial Sequence: Synthetic oligonucleotide
  Sense strand starting at position 3860 of SEQ ID NO: 316703
uguggagucucauuccuaa

SEQ ID NO: 433902 - RNA, 19 nt, Artificial Sequence
  Description of Artificial Sequence: Synthetic oligonucleotide
  Antisense Strand to SEQ ID NO: 433901
uuaggaaugagacuccaca

SEQ ID NO: 433903 - RNA, 19 nt, Artificial Sequence
  Description of Artificial Sequence: Synthetic oligonucleotide
  Sense strand starting at position 3863 of SEQ ID NO: 316703
ggagucucauuccuaaauu

SEQ ID NO: 433904 - RNA, 19 nt, Artificial Sequence
  Description of Artificial Sequence: Synthetic oligonucleotide
  Antisense Strand to SEQ ID NO: 433903
aauuuaggaaugagacucc

SEQ ID NO: 433905 - RNA, 19 nt, Artificial Sequence
  Description of Artificial Sequence: Synthetic oligonucleotide
  Sense strand starting at position 3959 of SEQ ID NO: 316703
aaaguuugggccugauaua

SEQ ID NO: 433906 - RNA, 19 nt, Artificial Sequence
  Description of Artificial Sequence: Synthetic oligonucleotide
  Antisense Strand to SEQ ID NO: 433905
uauaucaggcccaaacuuu

SEQ ID NO: 433907 - RNA, 19 nt, Artificial Sequence
  Description of Artificial Sequence: Synthetic oligonucleotide
  Sense strand starting at position 3960 of SEQ ID NO: 316703
aaguuugggccugauauaa

SEQ ID NO: 433908 - RNA, 19 nt, Artificial Sequence
  Description of Artificial Sequence: Synthetic oligonucleotide
  Antisense Strand to SEQ ID NO: 433907
uuauaucaggcccaaacuu

SEQ ID NO: 433909 - RNA, 19 nt, Artificial Sequence
  Description of Artificial Sequence: Synthetic oligonucleotide
  Sense strand starting at position 164 of SEQ ID NO: 316704
uguaaaugucaucaugccu

SEQ ID NO: 433910 - RNA, 19 nt, Artificial Sequence
  Description of Artificial Sequence: Synthetic oligonucleotide
  Antisense Strand to SEQ ID NO: 433909
aggcaugaugacauuuaca

SEQ ID NO: 433911 - RNA, 19 nt, Artificial Sequence
  Description of Artificial Sequence: Synthetic oligonucleotide
  Sense strand starting at position 179 of SEQ ID NO: 316704
gccuguaagcucuagaaua

SEQ ID NO: 433912 - RNA, 19 nt, Artificial Sequence
  Description of Artificial Sequence: Synthetic oligonucleotide
  Antisense Strand to SEQ ID NO: 433911
uauucuagagcuuacaggc

SEQ ID NO: 433913 - RNA, 19 nt, Artificial Sequence
  Description of Artificial Sequence: Synthetic oligonucleotide
  Sense strand starting at position 181 of SEQ ID NO: 316704
cuguaagcucuagaauaua

SEQ ID NO: 433914 - RNA, 19 nt, Artificial Sequence
  Description of Artificial Sequence: Synthetic oligonucleotide
  Antisense Strand to SEQ ID NO: 433913
uauauucuagagcuuacag

SEQ ID NO: 433915 - RNA, 19 nt, Artificial Sequence
  Description of Artificial Sequence: Synthetic oligonucleotide
  Sense strand starting at position 215 of SEQ ID NO: 316704
cagggcuuuccuugaugaa

SEQ ID NO: 433916 - RNA, 19 nt, Artificial Sequence
  Description of Artificial Sequence: Synthetic oligonucleotide
  Antisense Strand to SEQ ID NO: 433915
uucaucaaggaaagcccug

SEQ ID NO: 433917 - RNA, 19 nt, Artificial Sequence
  Description of Artificial Sequence: Synthetic oligonucleotide
  Sense strand starting at position 216 of SEQ ID NO: 316704
agggcuuuccuugaugaau

SEQ ID NO: 433918 - RNA, 19 nt, Artificial Sequence
  Description of Artificial Sequence: Synthetic oligonucleotide
  Antisense Strand to SEQ ID NO: 433917
auucaucaaggaaagcccu

SEQ ID NO: 433919 - RNA, 19 nt, Artificial Sequence
  Description of Artificial Sequence: Synthetic oligonucleotide
  Sense strand starting at position 222 of SEQ ID NO: 316704
uuccuugaugaaugccuua

SEQ ID NO: 433920 - RNA, 19 nt, Artificial Sequence
  Description of Artificial Sequence: Synthetic oligonucleotide
  Antisense Strand to SEQ ID NO: 433919
uaaggcauucaucaaggaa

SEQ ID NO: 433921 - RNA, 19 nt, Artificial Sequence
  Description of Artificial Sequence: Synthetic oligonucleotide
  Sense strand starting at position 256 of SEQ ID NO: 316704
aggagucuugcauaucaaa

SEQ ID NO: 433922 - RNA, 19 nt, Artificial Sequence
  Description of Artificial Sequence: Synthetic oligonucleotide
  Antisense Strand to SEQ ID NO: 433921
uuugauaugcaagacuccu

SEQ ID NO: 433923 - RNA, 19 nt, Artificial Sequence
  Description of Artificial Sequence: Synthetic oligonucleotide
  Sense strand starting at position 304 of SEQ ID NO: 316704
gacaguauugacugaggca

SEQ ID NO: 433924 - RNA, 19 nt, Artificial Sequence
  Description of Artificial Sequence: Synthetic oligonucleotide
  Antisense Strand to SEQ ID NO: 433923
ugccucagucaauacuguc

SEQ ID NO: 433925 - RNA, 19 nt, Artificial Sequence
  Description of Artificial Sequence: Synthetic oligonucleotide
  Sense strand starting at position 305 of SEQ ID NO: 316704
acaguauugacugaggcau

SEQ ID NO: 433926 - RNA, 19 nt, Artificial Sequence
  Description of Artificial Sequence: Synthetic oligonucleotide
  Antisense Strand to SEQ ID NO: 433925
augccucagucaauacugu

SEQ ID NO: 433927 - RNA, 19 nt, Artificial Sequence
  Description of Artificial Sequence: Synthetic oligonucleotide
  Sense strand starting at position 334 of SEQ ID NO: 316704
ucuugaagauucuuggcua

SEQ ID NO: 433928 - RNA, 19 nt, Artificial Sequence
  Description of Artificial Sequence: Synthetic oligonucleotide
  Antisense Strand to SEQ ID NO: 433927
uagccaagaaucuucaaga

SEQ ID NO: 433929 - RNA, 19 nt, Artificial Sequence
  Description of Artificial Sequence: Synthetic oligonucleotide
  Sense strand starting at position 337 of SEQ ID NO: 316704
ugaagauucuuggcuauug

SEQ ID NO: 433930 - RNA, 19 nt, Artificial Sequence
  Description of Artificial Sequence: Synthetic oligonucleotide
  Antisense Strand to SEQ ID NO: 433929
caauagccaagaaucuuca

SEQ ID NO: 433931 - RNA, 19 nt, Artificial Sequence
  Description of Artificial Sequence: Synthetic oligonucleotide
  Sense strand starting at position 339 of SEQ ID NO: 316704
aagauucuuggcuauuguu

SEQ ID NO: 433932 - RNA, 19 nt, Artificial Sequence
  Description of Artificial Sequence: Synthetic oligonucleotide
  Antisense Strand to SEQ ID NO: 433931
aacaauagccaagaaucuu

SEQ ID NO: 433933 - RNA, 19 nt, Artificial Sequence
  Description of Artificial Sequence: Synthetic oligonucleotide
  Sense strand starting at position 452 of SEQ ID NO: 316704
cagaguuaguguccaggaa

SEQ ID NO: 433934 - RNA, 19 nt, Artificial Sequence
  Description of Artificial Sequence: Synthetic oligonucleotide
  Antisense Strand to SEQ ID NO: 433933
uuccuggacacuaacucug

SEQ ID NO: 433935 - RNA, 19 nt, Artificial Sequence
  Description of Artificial Sequence: Synthetic oligonucleotide
  Sense strand starting at position 453 of SEQ ID NO: 316704
agaguuaguguccaggaag

SEQ ID NO: 433936 - RNA, 19 nt, Artificial Sequence
  Description of Artificial Sequence: Synthetic oligonucleotide
  Antisense Strand to SEQ ID NO: 433935
cuuccuggacacuaacucu

SEQ ID NO: 433937 - RNA, 19 nt, Artificial Sequence
  Description of Artificial Sequence: Synthetic oligonucleotide
  Sense strand starting at position 464 of SEQ ID NO: 316704
ccaggaagcuuucccucaa

SEQ ID NO: 433938 - RNA, 19 nt, Artificial Sequence
  Description of Artificial Sequence: Synthetic oligonucleotide
  Antisense Strand to SEQ ID NO: 433937
uugagggaaagcuuccugg

SEQ ID NO: 433939 - RNA, 19 nt, Artificial Sequence
  Description of Artificial Sequence: Synthetic oligonucleotide
  Sense strand starting at position 618 of SEQ ID NO: 316704
ggcagauuccaagaggugu

SEQ ID NO: 433940 - RNA, 19 nt, Artificial Sequence
  Description of Artificial Sequence: Synthetic oligonucleotide
  Antisense Strand to SEQ ID NO: 433939
acaccucuuggaaucugcc

SEQ ID NO: 433941 - RNA, 19 nt, Artificial Sequence
  Description of Artificial Sequence: Synthetic oligonucleotide
  Sense strand starting at position 632 of SEQ ID NO: 316704
gguguuuacauccaggguu

SEQ ID NO: 433942 - RNA, 19 nt, Artificial Sequence
  Description of Artificial Sequence: Synthetic oligonucleotide
  Antisense Strand to SEQ ID NO: 433941
aacccuggauguaaacacc

SEQ ID NO: 433943 - RNA, 19 nt, Artificial Sequence
  Description of Artificial Sequence: Synthetic oligonucleotide
  Sense strand starting at position 840 of SEQ ID NO: 316704
gggugcaauaucuggagaa

SEQ ID NO: 433944 - RNA, 19 nt, Artificial Sequence
  Description of Artificial Sequence: Synthetic oligonucleotide
  Antisense Strand to SEQ ID NO: 433943
uucuccagauauugcaccc

SEQ ID NO: 433945 - RNA, 19 nt, Artificial Sequence
  Description of Artificial Sequence: Synthetic oligonucleotide
  Sense strand starting at position 842 of SEQ ID NO: 316704
gugcaauaucuggagaagc

SEQ ID NO: 433946 - RNA, 19 nt, Artificial Sequence
  Description of Artificial Sequence: Synthetic oligonucleotide
  Antisense Strand to SEQ ID NO: 433945
gcuucuccagauauugcac

SEQ ID NO: 433947 - RNA, 19 nt, Artificial Sequence
  Description of Artificial Sequence: Synthetic oligonucleotide
  Sense strand starting at position 844 of SEQ ID NO: 316704
gcaauaucuggagaagcga

SEQ ID NO: 433948 - RNA, 19 nt, Artificial Sequence
  Description of Artificial Sequence: Synthetic oligonucleotide
  Antisense Strand to SEQ ID NO: 433947
ucgcuucuccagauauugc

SEQ ID NO: 433949 - RNA, 19 nt, Artificial Sequence
  Description of Artificial Sequence: Synthetic oligonucleotide
  Sense strand starting at position 952 of SEQ ID NO: 316704
cuuaguaaacauggcuaaa

SEQ ID NO: 433950 - RNA, 19 nt, Artificial Sequence
  Description of Artificial Sequence: Synthetic oligonucleotide
  Antisense Strand to SEQ ID NO: 433949
uuuagccauguuuacuaag

SEQ ID NO: 433951 - RNA, 19 nt, Artificial Sequence
  Description of Artificial Sequence: Synthetic oligonucleotide
  Sense strand starting at position 983 of SEQ ID NO: 316704
ggaauuuccgcuggccgau

SEQ ID NO: 433952 - RNA, 19 nt, Artificial Sequence
  Description of Artificial Sequence: Synthetic oligonucleotide
  Antisense Strand to SEQ ID NO: 433951
aucggccagcggaaauucc

SEQ ID NO: 433953 - RNA, 19 nt, Artificial Sequence
  Description of Artificial Sequence: Synthetic oligonucleotide
  Sense strand starting at position 1250 of SEQ ID NO: 316704
ggagaaaggucccuaggca

SEQ ID NO: 433954 - RNA, 19 nt, Artificial Sequence
  Description of Artificial Sequence: Synthetic oligonucleotide
  Antisense Strand to SEQ ID NO: 433953
ugccuagggaccuuucucc

SEQ ID NO: 433955 - RNA, 19 nt, Artificial Sequence
  Description of Artificial Sequence: Synthetic oligonucleotide
  Sense strand starting at position 2602 of SEQ ID NO: 316704
ucggucuuaugauuccaaa

SEQ ID NO: 433956 - RNA, 19 nt, Artificial Sequence
  Description of Artificial Sequence: Synthetic oligonucleotide
  Antisense Strand to SEQ ID NO: 433955
uuuggaaucauaagaccga

SEQ ID NO: 433957 - RNA, 19 nt, Artificial Sequence
  Description of Artificial Sequence: Synthetic oligonucleotide
  Sense strand starting at position 2764 of SEQ ID NO: 316704
ucaucuucucucgagguga

SEQ ID NO: 433958 - RNA, 19 nt, Artificial Sequence
  Description of Artificial Sequence: Synthetic oligonucleotide
  Antisense Strand to SEQ ID NO: 433957
ucaccucgagagaagauga

SEQ ID NO: 433959 - RNA, 19 nt, Artificial Sequence
  Description of Artificial Sequence: Synthetic oligonucleotide
  Sense strand starting at position 2766 of SEQ ID NO: 316704
aucuucucucgaggugaga

SEQ ID NO: 433960 - RNA, 19 nt, Artificial Sequence
  Description of Artificial Sequence: Synthetic oligonucleotide
  Antisense Strand to SEQ ID NO: 433959
ucucaccucgagagaagau

SEQ ID NO: 433961 - RNA, 19 nt, Artificial Sequence
  Description of Artificial Sequence: Synthetic oligonucleotide
  Sense strand starting at position 2768 of SEQ ID NO: 316704
cuucucucgaggugagaaa

SEQ ID NO: 433962 - RNA, 19 nt, Artificial Sequence
  Description of Artificial Sequence: Synthetic oligonucleotide
  Antisense Strand to SEQ ID NO: 433961
uuucucaccucgagagaag

SEQ ID NO: 433963 - RNA, 19 nt, Artificial Sequence
  Description of Artificial Sequence: Synthetic oligonucleotide
  Sense strand starting at position 2769 of SEQ ID NO: 316704
uucucucgaggugagaaau

SEQ ID NO: 433964 - RNA, 19 nt, Artificial Sequence
  Description of Artificial Sequence: Synthetic oligonucleotide
  Antisense Strand to SEQ ID NO: 433963
auuucucaccucgagagaa

SEQ ID NO: 433965 - RNA, 19 nt, Artificial Sequence
  Description of Artificial Sequence: Synthetic oligonucleotide
  Sense strand starting at position 3003 of SEQ ID NO: 316704
uugucauggcuguacaaug

SEQ ID NO: 433966 - RNA, 19 nt, Artificial Sequence
  Description of Artificial Sequence: Synthetic oligonucleotide
  Antisense Strand to SEQ ID NO: 433965
cauuguacagccaugacaa

SEQ ID NO: 433967 - RNA, 19 nt, Artificial Sequence
  Description of Artificial Sequence: Synthetic oligonucleotide
  Sense strand starting at position 3008 of SEQ ID NO: 316704
auggcuguacaauggagau

SEQ ID NO: 433968 - RNA, 19 nt, Artificial Sequence
  Description of Artificial Sequence: Synthetic oligonucleotide
  Antisense Strand to SEQ ID NO: 433967
aucuccauuguacagccau

SEQ ID NO: 433969 - RNA, 19 nt, Artificial Sequence
  Description of Artificial Sequence: Synthetic oligonucleotide
  Sense strand starting at position 3611 of SEQ ID NO: 316704
agugcaguucuugaccaua

SEQ ID NO: 433970 - RNA, 19 nt, Artificial Sequence
  Description of Artificial Sequence: Synthetic oligonucleotide
  Antisense Strand to SEQ ID NO: 433969
uauggucaagaacugcacu

SEQ ID NO: 433971 - RNA, 19 nt, Artificial Sequence
  Description of Artificial Sequence: Synthetic oligonucleotide
  Sense strand starting at position 3643 of SEQ ID NO: 316704
ucagucaaugucuauugca

SEQ ID NO: 433972 - RNA, 19 nt, Artificial Sequence
  Description of Artificial Sequence: Synthetic oligonucleotide
  Antisense Strand to SEQ ID NO: 433971
ugcaauagacauugacuga

SEQ ID NO: 433973 - RNA, 19 nt, Artificial Sequence
  Description of Artificial Sequence: Synthetic oligonucleotide
  Sense strand starting at position 3684 of SEQ ID NO: 316704
gggcaauggaguugaucga

SEQ ID NO: 433974 - RNA, 19 nt, Artificial Sequence
  Description of Artificial Sequence: Synthetic oligonucleotide
  Antisense Strand to SEQ ID NO: 433973
ucgaucaacuccauugccc

SEQ ID NO: 433975 - RNA, 19 nt, Artificial Sequence
  Description of Artificial Sequence: Synthetic oligonucleotide
  Sense strand starting at position 3685 of SEQ ID NO: 316704
ggcaauggaguugaucgaa

SEQ ID NO: 433976 - RNA, 19 nt, Artificial Sequence
  Description of Artificial Sequence: Synthetic oligonucleotide
  Antisense Strand to SEQ ID NO: 433975
uucgaucaacuccauugcc

SEQ ID NO: 433977 - RNA, 19 nt, Artificial Sequence
  Description of Artificial Sequence: Synthetic oligonucleotide
  Sense strand starting at position 3726 of SEQ ID NO: 316704
acaccaugucuccagaucu

SEQ ID NO: 433978 - RNA, 19 nt, Artificial Sequence
  Description of Artificial Sequence: Synthetic oligonucleotide
  Antisense Strand to SEQ ID NO: 433977
agaucuggagacauggugu

SEQ ID NO: 433979 - RNA, 19 nt, Artificial Sequence
  Description of Artificial Sequence: Synthetic oligonucleotide
  Sense strand starting at position 3739 of SEQ ID NO: 316704
agaucugaguuucuucuuu

SEQ ID NO: 433980 - RNA, 19 nt, Artificial Sequence
  Description of Artificial Sequence: Synthetic oligonucleotide
  Antisense Strand to SEQ ID NO: 433979
aaagaagaaacucagaucu

SEQ ID NO: 433981 - RNA, 19 nt, Artificial Sequence
  Description of Artificial Sequence: Synthetic oligonucleotide
  Sense strand starting at position 3741 of SEQ ID NO: 316704
aucugaguuucuucuuuga

SEQ ID NO: 433982 - RNA, 19 nt, Artificial Sequence
  Description of Artificial Sequence: Synthetic oligonucleotide
  Antisense Strand to SEQ ID NO: 433981
ucaaagaagaaacucagau

SEQ ID NO: 433983 - RNA, 19 nt, Artificial Sequence
  Description of Artificial Sequence: Synthetic oligonucleotide
  Sense strand starting at position 3749 of SEQ ID NO: 316704
uucuucuuugauggugaau

SEQ ID NO: 433984 - RNA, 19 nt, Artificial Sequence
  Description of Artificial Sequence: Synthetic oligonucleotide
  Antisense Strand to SEQ ID NO: 433983
auucaccaucaaagaagaa

SEQ ID NO: 433985 - RNA, 19 nt, Artificial Sequence
  Description of Artificial Sequence: Synthetic oligonucleotide
  Sense strand starting at position 3960 of SEQ ID NO: 316704
gggaacuguucugcagaua

SEQ ID NO: 433986 - RNA, 19 nt, Artificial Sequence
  Description of Artificial Sequence: Synthetic oligonucleotide
  Antisense Strand to SEQ ID NO: 433985
uaucugcagaacaguuccc

SEQ ID NO: 433987 - RNA, 19 nt, Artificial Sequence
  Description of Artificial Sequence: Synthetic oligonucleotide
  Sense strand starting at position 3961 of SEQ ID NO: 316704
ggaacuguucugcagauaa

SEQ ID NO: 433988 - RNA, 19 nt, Artificial Sequence
  Description of Artificial Sequence: Synthetic oligonucleotide
  Antisense Strand to SEQ ID NO: 433987
uuaucugcagaacaguucc

SEQ ID NO: 433989 - RNA, 19 nt, Artificial Sequence
  Description of Artificial Sequence: Synthetic oligonucleotide
  Sense strand starting at position 41 of SEQ ID NO: 316705
guacauuaugcaugacuaa

SEQ ID NO: 433990 - RNA, 19 nt, Artificial Sequence
  Description of Artificial Sequence: Synthetic oligonucleotide
  Antisense Strand to SEQ ID NO: 433989
uuagucaugcauaauguac

SEQ ID NO: 433991 - RNA, 19 nt, Artificial Sequence
  Description of Artificial Sequence: Synthetic oligonucleotide
  Sense strand starting at position 156 of SEQ ID NO: 316705
auugcacaaugaucuaagu

SEQ ID NO: 433992 - RNA, 19 nt, Artificial Sequence
  Description of Artificial Sequence: Synthetic oligonucleotide
  Antisense Strand to SEQ ID NO: 433991
acuuagaucauugugcaau

SEQ ID NO: 433993 - RNA, 19 nt, Artificial Sequence
  Description of Artificial Sequence: Synthetic oligonucleotide
  Sense strand starting at position 165 of SEQ ID NO: 316705
ugaucuaaguguguaauaa

SEQ ID NO: 433994 - RNA, 19 nt, Artificial Sequence
  Description of Artificial Sequence: Synthetic oligonucleotide
  Antisense Strand to SEQ ID NO: 433993
uuauuacacacuuagauca

SEQ ID NO: 433995 - RNA, 19 nt, Artificial Sequence
  Description of Artificial Sequence: Synthetic oligonucleotide
  Sense strand starting at position 166 of SEQ ID NO: 316705
gaucuaaguguguaauaac

SEQ ID NO: 433996 - RNA, 19 nt, Artificial Sequence
  Description of Artificial Sequence: Synthetic oligonucleotide
  Antisense Strand to SEQ ID NO: 433995
guuauuacacacuuagauc

SEQ ID NO: 433997 - RNA, 19 nt, Artificial Sequence
  Description of Artificial Sequence: Synthetic oligonucleotide
  Sense strand starting at position 285 of SEQ ID NO: 316705
acugacgaauccuuuacua

SEQ ID NO: 433998 - RNA, 19 nt, Artificial Sequence
  Description of Artificial Sequence: Synthetic oligonucleotide
  Antisense Strand to SEQ ID NO: 433997
uaguaaaggauucgucagu

SEQ ID NO: 433999 - RNA, 19 nt, Artificial Sequence
  Description of Artificial Sequence: Synthetic oligonucleotide
  Sense strand starting at position 287 of SEQ ID NO: 316705
ugacgaauccuuuacuauu

SEQ ID NO: 434000 - RNA, 19 nt, Artificial Sequence
  Description of Artificial Sequence: Synthetic oligonucleotide
  Antisense Strand to SEQ ID NO: 433999
aauaguaaaggauucguca

SEQ ID NO: 434001 - RNA, 19 nt, Artificial Sequence
  Description of Artificial Sequence: Synthetic oligonucleotide
  Sense strand starting at position 327 of SEQ ID NO: 316705
ucuucuugaucacuagagu

SEQ ID NO: 434002 - RNA, 19 nt, Artificial Sequence
  Description of Artificial Sequence: Synthetic oligonucleotide
  Antisense Strand to SEQ ID NO: 434001
acucuagugaucaagaaga

SEQ ID NO: 434003 - RNA, 19 nt, Artificial Sequence
  Description of Artificial Sequence: Synthetic oligonucleotide
  Sense strand starting at position 328 of SEQ ID NO: 316705
cuucuugaucacuagagug

SEQ ID NO: 434004 - RNA, 19 nt, Artificial Sequence
  Description of Artificial Sequence: Synthetic oligonucleotide
  Antisense Strand to SEQ ID NO: 434003
cacucuagugaucaagaag

SEQ ID NO: 434005 - RNA, 19 nt, Artificial Sequence
  Description of Artificial Sequence: Synthetic oligonucleotide
  Sense strand starting at position 330 of SEQ ID NO: 316705
ucuugaucacuagagugua

SEQ ID NO: 434006 - RNA, 19 nt, Artificial Sequence
  Description of Artificial Sequence: Synthetic oligonucleotide
  Antisense Strand to SEQ ID NO: 434005
uacacucuagugaucaaga

SEQ ID NO: 434007 - RNA, 19 nt, Artificial Sequence
  Description of Artificial Sequence: Synthetic oligonucleotide
  Sense strand starting at position 333 of SEQ ID NO: 316705
ugaucacuagaguguaaag

SEQ ID NO: 434008 - RNA, 19 nt, Artificial Sequence
  Description of Artificial Sequence: Synthetic oligonucleotide
  Antisense Strand to SEQ ID NO: 434007
cuuuacacucuagugauca

SEQ ID NO: 434009 - RNA, 19 nt, Artificial Sequence
  Description of Artificial Sequence: Synthetic oligonucleotide
  Sense strand starting at position 445 of SEQ ID NO: 316705
gagaguugucacuggaauc

SEQ ID NO: 434010 - RNA, 19 nt, Artificial Sequence
  Description of Artificial Sequence: Synthetic oligonucleotide
  Antisense Strand to SEQ ID NO: 434009
gauuccagugacaacucuc

SEQ ID NO: 434011 - RNA, 19 nt, Artificial Sequence
  Description of Artificial Sequence: Synthetic oligonucleotide
  Sense strand starting at position 598 of SEQ ID NO: 316705
uguuucuuugcagaacuca

SEQ ID NO: 434012 - RNA, 19 nt, Artificial Sequence
  Description of Artificial Sequence: Synthetic oligonucleotide
  Antisense Strand to SEQ ID NO: 434011
ugaguucugcaaagaaaca

SEQ ID NO: 434013 - RNA, 19 nt, Artificial Sequence
  Description of Artificial Sequence: Synthetic oligonucleotide
  Sense strand starting at position 680 of SEQ ID NO: 316705
aucuguuggagguagugaa

SEQ ID NO: 434014 - RNA, 19 nt, Artificial Sequence
  Description of Artificial Sequence: Synthetic oligonucleotide
  Antisense Strand to SEQ ID NO: 434013
uucacuaccuccaacagau

SEQ ID NO: 434015 - RNA, 19 nt, Artificial Sequence
  Description of Artificial Sequence: Synthetic oligonucleotide
  Sense strand starting at position 768 of SEQ ID NO: 316705
cuggaaagguggcuaagaa

SEQ ID NO: 434016 - RNA, 19 nt, Artificial Sequence
  Description of Artificial Sequence: Synthetic oligonucleotide
  Antisense Strand to SEQ ID NO: 434015
uucuuagccaccuuuccag

SEQ ID NO: 434017 - RNA, 19 nt, Artificial Sequence
  Description of Artificial Sequence: Synthetic oligonucleotide
  Sense strand starting at position 2151 of SEQ ID NO: 316705
ucccacuagugauuggaga

SEQ ID NO: 434018 - RNA, 19 nt, Artificial Sequence
  Description of Artificial Sequence: Synthetic oligonucleotide
  Antisense Strand to SEQ ID NO: 434017
ucuccaaucacuaguggga

SEQ ID NO: 434019 - RNA, 19 nt, Artificial Sequence
  Description of Artificial Sequence: Synthetic oligonucleotide
  Sense strand starting at position 2153 of SEQ ID NO: 316705
ccacuagugauuggagacu

SEQ ID NO: 434020 - RNA, 19 nt, Artificial Sequence
  Description of Artificial Sequence: Synthetic oligonucleotide
  Antisense Strand to SEQ ID NO: 434019
agucuccaaucacuagugg

SEQ ID NO: 434021 - RNA, 19 nt, Artificial Sequence
  Description of Artificial Sequence: Synthetic oligonucleotide
  Sense strand starting at position 2414 of SEQ ID NO: 316705
gaacaaagauucguggaau

SEQ ID NO: 434022 - RNA, 19 nt, Artificial Sequence
  Description of Artificial Sequence: Synthetic oligonucleotide
  Antisense Strand to SEQ ID NO: 434021
auuccacgaaucuuuguuc

SEQ ID NO: 434023 - RNA, 19 nt, Artificial Sequence
  Description of Artificial Sequence: Synthetic oligonucleotide
  Sense strand starting at position 2429 of SEQ ID NO: 316705
gaauuauuguaccuugaga

SEQ ID NO: 434024 - RNA, 19 nt, Artificial Sequence
  Description of Artificial Sequence: Synthetic oligonucleotide
  Antisense Strand to SEQ ID NO: 434023
ucucaagguacaauaauuc

SEQ ID NO: 434025 - RNA, 19 nt, Artificial Sequence
  Description of Artificial Sequence: Synthetic oligonucleotide
  Sense strand starting at position 2455 of SEQ ID NO: 316705
agggcucgcagagaugaua

SEQ ID NO: 434026 - RNA, 19 nt, Artificial Sequence
  Description of Artificial Sequence: Synthetic oligonucleotide
  Antisense Strand to SEQ ID NO: 434025
uaucaucucugcgagcccu

SEQ ID NO: 434027 - RNA, 19 nt, Artificial Sequence
  Description of Artificial Sequence: Synthetic oligonucleotide
  Sense strand starting at position 2458 of SEQ ID NO: 316705
gcucgcagagaugauauaa

SEQ ID NO: 434028 - RNA, 19 nt, Artificial Sequence
  Description of Artificial Sequence: Synthetic oligonucleotide
  Antisense Strand to SEQ ID NO: 434027
uuauaucaucucugcgagc

SEQ ID NO: 434029 - RNA, 19 nt, Artificial Sequence
  Description of Artificial Sequence: Synthetic oligonucleotide
  Sense strand starting at position 2731 of SEQ ID NO: 316705
ccauuccauuuguauuuga

SEQ ID NO: 434030 - RNA, 19 nt, Artificial Sequence
  Description of Artificial Sequence: Synthetic oligonucleotide
  Antisense Strand to SEQ ID NO: 434029
ucaaauacaaauggaaugg

SEQ ID NO: 434031 - RNA, 19 nt, Artificial Sequence
  Description of Artificial Sequence: Synthetic oligonucleotide
  Sense strand starting at position 2738 of SEQ ID NO: 316705
auuuguauuugaugacagu

SEQ ID NO: 434032 - RNA, 19 nt, Artificial Sequence
  Description of Artificial Sequence: Synthetic oligonucleotide
  Antisense Strand to SEQ ID NO: 434031
acugucaucaaauacaaau

SEQ ID NO: 434033 - RNA, 19 nt, Artificial Sequence
  Description of Artificial Sequence: Synthetic oligonucleotide
  Sense strand starting at position 2759 of SEQ ID NO: 316705
acaguuagucguguuucuu

SEQ ID NO: 434034 - RNA, 19 nt, Artificial Sequence
  Description of Artificial Sequence: Synthetic oligonucleotide
  Antisense Strand to SEQ ID NO: 434033
aagaaacacgacuaacugu

SEQ ID NO: 434035 - RNA, 19 nt, Artificial Sequence
  Description of Artificial Sequence: Synthetic oligonucleotide
  Sense strand starting at position 2760 of SEQ ID NO: 316705
caguuagucguguuucuuu

SEQ ID NO: 434036 - RNA, 19 nt, Artificial Sequence
  Description of Artificial Sequence: Synthetic oligonucleotide
  Antisense Strand to SEQ ID NO: 434035
aaagaaacacgacuaacug

SEQ ID NO: 434037 - RNA, 19 nt, Artificial Sequence
  Description of Artificial Sequence: Synthetic oligonucleotide
  Sense strand starting at position 2824 of SEQ ID NO: 316705
ucuuuaaguguugaaacac

SEQ ID NO: 434038 - RNA, 19 nt, Artificial Sequence
  Description of Artificial Sequence: Synthetic oligonucleotide
  Antisense Strand to SEQ ID NO: 434037
guguuucaacacuuaaaga

SEQ ID NO: 434039 - RNA, 19 nt, Artificial Sequence
  Description of Artificial Sequence: Synthetic oligonucleotide
  Sense strand starting at position 2838 of SEQ ID NO: 316705
aacacuuucuaagugggua

SEQ ID NO: 434040 - RNA, 19 nt, Artificial Sequence
  Description of Artificial Sequence: Synthetic oligonucleotide
  Antisense Strand to SEQ ID NO: 434039
uacccacuuagaaaguguu

SEQ ID NO: 434041 - RNA, 19 nt, Artificial Sequence
  Description of Artificial Sequence: Synthetic oligonucleotide
  Sense strand starting at position 2841 of SEQ ID NO: 316705
acuuucuaaguggguaaau

SEQ ID NO: 434042 - RNA, 19 nt, Artificial Sequence
  Description of Artificial Sequence: Synthetic oligonucleotide
  Antisense Strand to SEQ ID NO: 434041
auuuacccacuuagaaagu

SEQ ID NO: 434043 - RNA, 19 nt, Artificial Sequence
  Description of Artificial Sequence: Synthetic oligonucleotide
  Sense strand starting at position 2842 of SEQ ID NO: 316705
cuuucuaaguggguaaaua

SEQ ID NO: 434044 - RNA, 19 nt, Artificial Sequence
  Description of Artificial Sequence: Synthetic oligonucleotide
  Antisense Strand to SEQ ID NO: 434043
uauuuacccacuuagaaag

SEQ ID NO: 434045 - RNA, 19 nt, Artificial Sequence
  Description of Artificial Sequence: Synthetic oligonucleotide
  Sense strand starting at position 2843 of SEQ ID NO: 316705
uuucuaaguggguaaauau

SEQ ID NO: 434046 - RNA, 19 nt, Artificial Sequence
  Description of Artificial Sequence: Synthetic oligonucleotide
  Antisense Strand to SEQ ID NO: 434045
auauuuacccacuuagaaa

SEQ ID NO: 434047 - RNA, 19 nt, Artificial Sequence
  Description of Artificial Sequence: Synthetic oligonucleotide
  Sense strand starting at position 2947 of SEQ ID NO: 316705
gagauaucucgugacuucc

SEQ ID NO: 434048 - RNA, 19 nt, Artificial Sequence
  Description of Artificial Sequence: Synthetic oligonucleotide
  Antisense Strand to SEQ ID NO: 434047
ggaagucacgagauaucuc

SEQ ID NO: 434049 - RNA, 19 nt, Artificial Sequence
  Description of Artificial Sequence: Synthetic oligonucleotide
  Sense strand starting at position 3339 of SEQ ID NO: 316705
guuuauugaguguaugaag

SEQ ID NO: 434050 - RNA, 19 nt, Artificial Sequence
  Description of Artificial Sequence: Synthetic oligonucleotide
  Antisense Strand to SEQ ID NO: 434049
cuucauacacucaauaaac

SEQ ID NO: 434051 - RNA, 19 nt, Artificial Sequence
  Description of Artificial Sequence: Synthetic oligonucleotide
  Sense strand starting at position 3353 of SEQ ID NO: 316705
ugaagauguggucauguuu

SEQ ID NO: 434052 - RNA, 19 nt, Artificial Sequence
  Description of Artificial Sequence: Synthetic oligonucleotide
  Antisense Strand to SEQ ID NO: 434051
aaacaugaccacaucuuca

SEQ ID NO: 434053 - RNA, 19 nt, Artificial Sequence
  Description of Artificial Sequence: Synthetic oligonucleotide
  Sense strand starting at position 3386 of SEQ ID NO: 316705
auguuagagucuccacaaa

SEQ ID NO: 434054 - RNA, 19 nt, Artificial Sequence
  Description of Artificial Sequence: Synthetic oligonucleotide
  Antisense Strand to SEQ ID NO: 434053
uuuguggagacucuaacau

SEQ ID NO: 434055 - RNA, 19 nt, Artificial Sequence
  Description of Artificial Sequence: Synthetic oligonucleotide
  Sense strand starting at position 3419 of SEQ ID NO: 316705
augauauaucugcauugug

SEQ ID NO: 434056 - RNA, 19 nt, Artificial Sequence
  Description of Artificial Sequence: Synthetic oligonucleotide
  Antisense Strand to SEQ ID NO: 434055
cacaaugcagauauaucau

SEQ ID NO: 434057 - RNA, 19 nt, Artificial Sequence
  Description of Artificial Sequence: Synthetic oligonucleotide
  Sense strand starting at position 3427 of SEQ ID NO: 316705
ucugcauugugauuucuaa

SEQ ID NO: 434058 - RNA, 19 nt, Artificial Sequence
  Description of Artificial Sequence: Synthetic oligonucleotide
  Antisense Strand to SEQ ID NO: 434057
uuagaaaucacaaugcaga

SEQ ID NO: 434059 - RNA, 19 nt, Artificial Sequence
  Description of Artificial Sequence: Synthetic oligonucleotide
  Sense strand starting at position 3492 of SEQ ID NO: 316705
aagugaaauuagucauuga

SEQ ID NO: 434060 - RNA, 19 nt, Artificial Sequence
  Description of Artificial Sequence: Synthetic oligonucleotide
  Antisense Strand to SEQ ID NO: 434059
ucaaugacuaauuucacuu

SEQ ID NO: 434061 - RNA, 19 nt, Artificial Sequence
  Description of Artificial Sequence: Synthetic oligonucleotide
  Sense strand starting at position 3495 of SEQ ID NO: 316705
ugaaauuagucauugacau

SEQ ID NO: 434062 - RNA, 19 nt, Artificial Sequence
  Description of Artificial Sequence: Synthetic oligonucleotide
  Antisense Strand to SEQ ID NO: 434061
augucaaugacuaauuuca

SEQ ID NO: 434063 - RNA, 19 nt, Artificial Sequence
  Description of Artificial Sequence: Synthetic oligonucleotide
  Sense strand starting at position 3783 of SEQ ID NO: 316705
gcuugaagacacggaaauu

SEQ ID NO: 434064 - RNA, 19 nt, Artificial Sequence
  Description of Artificial Sequence: Synthetic oligonucleotide
  Antisense Strand to SEQ ID NO: 434063
aauuuccgugucuucaagc

SEQ ID NO: 434065 - RNA, 19 nt, Artificial Sequence
  Description of Artificial Sequence: Synthetic oligonucleotide
  Sense strand starting at position 3886 of SEQ ID NO: 316705
aaugaaaugugaguuuaga

SEQ ID NO: 434066 - RNA, 19 nt, Artificial Sequence
  Description of Artificial Sequence: Synthetic oligonucleotide
  Antisense Strand to SEQ ID NO: 434065
ucuaaacucacauuucauu

SEQ ID NO: 434067 - RNA, 19 nt, Artificial Sequence
  Description of Artificial Sequence: Synthetic oligonucleotide
  Sense strand starting at position 3954 of SEQ ID NO: 316705
cagagcuuaugauuguaua

SEQ ID NO: 434068 - RNA, 19 nt, Artificial Sequence
  Description of Artificial Sequence: Synthetic oligonucleotide
  Antisense Strand to SEQ ID NO: 434067
uauacaaucauaagcucug

SEQ ID NO: 434069 - RNA, 19 nt, Artificial Sequence
  Description of Artificial Sequence: Synthetic oligonucleotide
  Sense strand starting at position 159 of SEQ ID NO: 316706
auuaucaaccagugucaca

SEQ ID NO: 434070 - RNA, 19 nt, Artificial Sequence
  Description of Artificial Sequence: Synthetic oligonucleotide
  Antisense Strand to SEQ ID NO: 434069
ugugacacugguugauaau

SEQ ID NO: 434071 - RNA, 19 nt, Artificial Sequence
  Description of Artificial Sequence: Synthetic oligonucleotide
  Sense strand starting at position 346 of SEQ ID NO: 316706
ucaugcuaguauuuaugca

SEQ ID NO: 434072 - RNA, 19 nt, Artificial Sequence
  Description of Artificial Sequence: Synthetic oligonucleotide
  Antisense Strand to SEQ ID NO: 434071
ugcauaaauacuagcauga

SEQ ID NO: 434073 - RNA, 19 nt, Artificial Sequence
  Description of Artificial Sequence: Synthetic oligonucleotide
  Sense strand starting at position 463 of SEQ ID NO: 316706
ugaugaacuuagccaguua

SEQ ID NO: 434074 - RNA, 19 nt, Artificial Sequence
  Description of Artificial Sequence: Synthetic oligonucleotide
  Antisense Strand to SEQ ID NO: 434073
uaacuggcuaaguucauca

SEQ ID NO: 434075 - RNA, 19 nt, Artificial Sequence
  Description of Artificial Sequence: Synthetic oligonucleotide
  Sense strand starting at position 492 of SEQ ID NO: 316706
cugggaaaugcccauucua

SEQ ID NO: 434076 - RNA, 19 nt, Artificial Sequence
  Description of Artificial Sequence: Synthetic oligonucleotide
  Antisense Strand to SEQ ID NO: 434075
uagaaugggcauuucccag

SEQ ID NO: 434077 - RNA, 19 nt, Artificial Sequence
  Description of Artificial Sequence: Synthetic oligonucleotide
  Sense strand starting at position 509 of SEQ ID NO: 316706
uagaucaaucaugguugua

SEQ ID NO: 434078 - RNA, 19 nt, Artificial Sequence
  Description of Artificial Sequence: Synthetic oligonucleotide
  Antisense Strand to SEQ ID NO: 434077
uacaaccaugauugaucua

SEQ ID NO: 434079 - RNA, 19 nt, Artificial Sequence
  Description of Artificial Sequence: Synthetic oligonucleotide
  Sense strand starting at position 511 of SEQ ID NO: 316706
gaucaaucaugguuguauu

SEQ ID NO: 434080 - RNA, 19 nt, Artificial Sequence
  Description of Artificial Sequence: Synthetic oligonucleotide
  Antisense Strand to SEQ ID NO: 434079
aauacaaccaugauugauc

SEQ ID NO: 434081 - RNA, 19 nt, Artificial Sequence
  Description of Artificial Sequence: Synthetic oligonucleotide
  Sense strand starting at position 579 of SEQ ID NO: 316706
uggaaaugguaggcagaau

SEQ ID NO: 434082 - RNA, 19 nt, Artificial Sequence
  Description of Artificial Sequence: Synthetic oligonucleotide
  Antisense Strand to SEQ ID NO: 434081
auucugccuaccauuucca

SEQ ID NO: 434083 - RNA, 19 nt, Artificial Sequence
  Description of Artificial Sequence: Synthetic oligonucleotide
  Sense strand starting at position 670 of SEQ ID NO: 316706
uuagauuagccuuaaggua

SEQ ID NO: 434084 - RNA, 19 nt, Artificial Sequence
  Description of Artificial Sequence: Synthetic oligonucleotide
  Antisense Strand to SEQ ID NO: 434083
uaccuuaaggcuaaucuaa

SEQ ID NO: 434085 - RNA, 19 nt, Artificial Sequence
  Description of Artificial Sequence: Synthetic oligonucleotide
  Sense strand starting at position 759 of SEQ ID NO: 316706
agugauacugcacagcuau

SEQ ID NO: 434086 - RNA, 19 nt, Artificial Sequence
  Description of Artificial Sequence: Synthetic oligonucleotide
  Antisense Strand to SEQ ID NO: 434085
auagcugugcaguaucacu

SEQ ID NO: 434087 - RNA, 19 nt, Artificial Sequence
  Description of Artificial Sequence: Synthetic oligonucleotide
  Sense strand starting at position 831 of SEQ ID NO: 316706
uuagaucuggcuuauccua

SEQ ID NO: 434088 - RNA, 19 nt, Artificial Sequence
  Description of Artificial Sequence: Synthetic oligonucleotide
  Antisense Strand to SEQ ID NO: 434087
uaggauaagccagaucuaa

SEQ ID NO: 434089 - RNA, 19 nt, Artificial Sequence
  Description of Artificial Sequence: Synthetic oligonucleotide
  Sense strand starting at position 890 of SEQ ID NO: 316706
aaaucugugccagaguauu

SEQ ID NO: 434090 - RNA, 19 nt, Artificial Sequence
  Description of Artificial Sequence: Synthetic oligonucleotide
  Antisense Strand to SEQ ID NO: 434089
aauacucuggcacagauuu

SEQ ID NO: 434091 - RNA, 19 nt, Artificial Sequence
  Description of Artificial Sequence: Synthetic oligonucleotide
  Sense strand starting at position 1065 of SEQ ID NO: 316706
cugauaguucuacauucug

SEQ ID NO: 434092 - RNA, 19 nt, Artificial Sequence
  Description of Artificial Sequence: Synthetic oligonucleotide
  Antisense Strand to SEQ ID NO: 434091
cagaauguagaacuaucag

SEQ ID NO: 434093 - RNA, 19 nt, Artificial Sequence
  Description of Artificial Sequence: Synthetic oligonucleotide
  Sense strand starting at position 1104 of SEQ ID NO: 316706
ucauuaugucaguagauaa

SEQ ID NO: 434094 - RNA, 19 nt, Artificial Sequence
  Description of Artificial Sequence: Synthetic oligonucleotide
  Antisense Strand to SEQ ID NO: 434093
uuaucuacugacauaauga

SEQ ID NO: 434095 - RNA, 19 nt, Artificial Sequence
  Description of Artificial Sequence: Synthetic oligonucleotide
  Sense strand starting at position 1115 of SEQ ID NO: 316706
guagauaacucuccucuag

SEQ ID NO: 434096 - RNA, 19 nt, Artificial Sequence
  Description of Artificial Sequence: Synthetic oligonucleotide
  Antisense Strand to SEQ ID NO: 434095
cuagaggagaguuaucuac

SEQ ID NO: 434097 - RNA, 19 nt, Artificial Sequence
  Description of Artificial Sequence: Synthetic oligonucleotide
  Sense strand starting at position 1178 of SEQ ID NO: 316706
ccauguguaguacauauaa

SEQ ID NO: 434098 - RNA, 19 nt, Artificial Sequence
  Description of Artificial Sequence: Synthetic oligonucleotide
  Antisense Strand to SEQ ID NO: 434097
uuauauguacuacacaugg

SEQ ID NO: 434099 - RNA, 19 nt, Artificial Sequence
  Description of Artificial Sequence: Synthetic oligonucleotide
  Sense strand starting at position 1423 of SEQ ID NO: 316706
uuaguuugagauugaguag

SEQ ID NO: 434100 - RNA, 19 nt, Artificial Sequence
  Description of Artificial Sequence: Synthetic oligonucleotide
  Antisense Strand to SEQ ID NO: 434099
cuacucaaucucaaacuaa

SEQ ID NO: 434101 - RNA, 19 nt, Artificial Sequence
  Description of Artificial Sequence: Synthetic oligonucleotide
  Sense strand starting at position 1426 of SEQ ID NO: 316706
guuugagauugaguaggga

SEQ ID NO: 434102 - RNA, 19 nt, Artificial Sequence
  Description of Artificial Sequence: Synthetic oligonucleotide
  Antisense Strand to SEQ ID NO: 434101
ucccuacucaaucucaaac

SEQ ID NO: 434103 - RNA, 19 nt, Artificial Sequence
  Description of Artificial Sequence: Synthetic oligonucleotide
  Sense strand starting at position 1528 of SEQ ID NO: 316706
uaggaagacuguucucacu

SEQ ID NO: 434104 - RNA, 19 nt, Artificial Sequence
  Description of Artificial Sequence: Synthetic oligonucleotide
  Antisense Strand to SEQ ID NO: 434103
agugagaacagucuuccua

SEQ ID NO: 434105 - RNA, 19 nt, Artificial Sequence
  Description of Artificial Sequence: Synthetic oligonucleotide
  Sense strand starting at position 1530 of SEQ ID NO: 316706
ggaagacuguucucacuuc

SEQ ID NO: 434106 - RNA, 19 nt, Artificial Sequence
  Description of Artificial Sequence: Synthetic oligonucleotide
  Antisense Strand to SEQ ID NO: 434105
gaagugagaacagucuucc

SEQ ID NO: 434107 - RNA, 19 nt, Artificial Sequence
  Description of Artificial Sequence: Synthetic oligonucleotide
  Sense strand starting at position 1804 of SEQ ID NO: 316706
acuggaagaccucgaguuu

SEQ ID NO: 434108 - RNA, 19 nt, Artificial Sequence
  Description of Artificial Sequence: Synthetic oligonucleotide
  Antisense Strand to SEQ ID NO: 434107
aaacucgaggucuuccagu

SEQ ID NO: 434109 - RNA, 19 nt, Artificial Sequence
  Description of Artificial Sequence: Synthetic oligonucleotide
  Sense strand starting at position 1810 of SEQ ID NO: 316706
agaccucgaguuugacaga

SEQ ID NO: 434110 - RNA, 19 nt, Artificial Sequence
  Description of Artificial Sequence: Synthetic oligonucleotide
  Antisense Strand to SEQ ID NO: 434109
ucugucaaacucgaggucu

SEQ ID NO: 434111 - RNA, 19 nt, Artificial Sequence
  Description of Artificial Sequence: Synthetic oligonucleotide
  Sense strand starting at position 2073 of SEQ ID NO: 316706
cgagacugaacuggcuaau

SEQ ID NO: 434112 - RNA, 19 nt, Artificial Sequence
  Description of Artificial Sequence: Synthetic oligonucleotide
  Antisense Strand to SEQ ID NO: 434111
auuagccaguucagucucg

SEQ ID NO: 434113 - RNA, 19 nt, Artificial Sequence
  Description of Artificial Sequence: Synthetic oligonucleotide
  Sense strand starting at position 2079 of SEQ ID NO: 316706
ugaacuggcuaauuacuua

SEQ ID NO: 434114 - RNA, 19 nt, Artificial Sequence
  Description of Artificial Sequence: Synthetic oligonucleotide
  Antisense Strand to SEQ ID NO: 434113
uaaguaauuagccaguuca

SEQ ID NO: 434115 - RNA, 19 nt, Artificial Sequence
  Description of Artificial Sequence: Synthetic oligonucleotide
  Sense strand starting at position 2558 of SEQ ID NO: 316706
uuauuaaguuugucugaag

SEQ ID NO: 434116 - RNA, 19 nt, Artificial Sequence
  Description of Artificial Sequence: Synthetic oligonucleotide
  Antisense Strand to SEQ ID NO: 434115
cuucagacaaacuuaauaa

SEQ ID NO: 434117 - RNA, 19 nt, Artificial Sequence
  Description of Artificial Sequence: Synthetic oligonucleotide
  Sense strand starting at position 2559 of SEQ ID NO: 316706
uauuaaguuugucugaaga

SEQ ID NO: 434118 - RNA, 19 nt, Artificial Sequence
  Description of Artificial Sequence: Synthetic oligonucleotide
  Antisense Strand to SEQ ID NO: 434117
ucuucagacaaacuuaaua

SEQ ID NO: 434119 - RNA, 19 nt, Artificial Sequence
  Description of Artificial Sequence: Synthetic oligonucleotide
  Sense strand starting at position 2698 of SEQ ID NO: 316706
aucuaaaugucagucaauc

SEQ ID NO: 434120 - RNA, 19 nt, Artificial Sequence
  Description of Artificial Sequence: Synthetic oligonucleotide
  Antisense Strand to SEQ ID NO: 434119
gauugacugacauuuagau

SEQ ID NO: 434121 - RNA, 19 nt, Artificial Sequence
  Description of Artificial Sequence: Synthetic oligonucleotide
  Sense strand starting at position 2792 of SEQ ID NO: 316706
auugcuucucaaugagaaa

SEQ ID NO: 434122 - RNA, 19 nt, Artificial Sequence
  Description of Artificial Sequence: Synthetic oligonucleotide
  Antisense Strand to SEQ ID NO: 434121
uuucucauugagaagcaau

SEQ ID NO: 434123 - RNA, 19 nt, Artificial Sequence
  Description of Artificial Sequence: Synthetic oligonucleotide
  Sense strand starting at position 2822 of SEQ ID NO: 316706
cuaaguaauuggucacaaa

SEQ ID NO: 434124 - RNA, 19 nt, Artificial Sequence
  Description of Artificial Sequence: Synthetic oligonucleotide
  Antisense Strand to SEQ ID NO: 434123
uuugugaccaauuacuuag

SEQ ID NO: 434125 - RNA, 19 nt, Artificial Sequence
  Description of Artificial Sequence: Synthetic oligonucleotide
  Sense strand starting at position 3064 of SEQ ID NO: 316706
ugguuugcaggugacauaa

SEQ ID NO: 434126 - RNA, 19 nt, Artificial Sequence
  Description of Artificial Sequence: Synthetic oligonucleotide
  Antisense Strand to SEQ ID NO: 434125
uuaugucaccugcaaacca

SEQ ID NO: 434127 - RNA, 19 nt, Artificial Sequence
  Description of Artificial Sequence: Synthetic oligonucleotide
  Sense strand starting at position 3110 of SEQ ID NO: 316706
accuauaagguccacagua

SEQ ID NO: 434128 - RNA, 19 nt, Artificial Sequence
  Description of Artificial Sequence: Synthetic oligonucleotide
  Antisense Strand to SEQ ID NO: 434127
uacuguggaccuuauaggu

SEQ ID NO: 434129 - RNA, 19 nt, Artificial Sequence
  Description of Artificial Sequence: Synthetic oligonucleotide
  Sense strand starting at position 3112 of SEQ ID NO: 316706
cuauaagguccacaguaua

SEQ ID NO: 434130 - RNA, 19 nt, Artificial Sequence
  Description of Artificial Sequence: Synthetic oligonucleotide
  Antisense Strand to SEQ ID NO: 434129
uauacuguggaccuuauag

SEQ ID NO: 434131 - RNA, 19 nt, Artificial Sequence
  Description of Artificial Sequence: Synthetic oligonucleotide
  Sense strand starting at position 3182 of SEQ ID NO: 316706
ucauuuguuugcuuuacua

SEQ ID NO: 434132 - RNA, 19 nt, Artificial Sequence
  Description of Artificial Sequence: Synthetic oligonucleotide
  Antisense Strand to SEQ ID NO: 434131
uaguaaagcaaacaaauga

SEQ ID NO: 434133 - RNA, 19 nt, Artificial Sequence
  Description of Artificial Sequence: Synthetic oligonucleotide
  Sense strand starting at position 3241 of SEQ ID NO: 316706
gggagacucuggucacuua

SEQ ID NO: 434134 - RNA, 19 nt, Artificial Sequence
  Description of Artificial Sequence: Synthetic oligonucleotide
  Antisense Strand to SEQ ID NO: 434133
uaagugaccagagucuccc

SEQ ID NO: 434135 - RNA, 19 nt, Artificial Sequence
  Description of Artificial Sequence: Synthetic oligonucleotide
  Sense strand starting at position 3342 of SEQ ID NO: 316706
cuagaaaccuugccugauu

SEQ ID NO: 434136 - RNA, 19 nt, Artificial Sequence
  Description of Artificial Sequence: Synthetic oligonucleotide
  Antisense Strand to SEQ ID NO: 434135
aaucaggcaagguuucuag

SEQ ID NO: 434137 - RNA, 19 nt, Artificial Sequence
  Description of Artificial Sequence: Synthetic oligonucleotide
  Sense strand starting at position 3344 of SEQ ID NO: 316706
agaaaccuugccugauuac

SEQ ID NO: 434138 - RNA, 19 nt, Artificial Sequence
  Description of Artificial Sequence: Synthetic oligonucleotide
  Antisense Strand to SEQ ID NO: 434137
guaaucaggcaagguuucu

SEQ ID NO: 434139 - RNA, 19 nt, Artificial Sequence
  Description of Artificial Sequence: Synthetic oligonucleotide
  Sense strand starting at position 3385 of SEQ ID NO: 316706
uuagaauggugguucucaa

SEQ ID NO: 434140 - RNA, 19 nt, Artificial Sequence
  Description of Artificial Sequence: Synthetic oligonucleotide
  Antisense Strand to SEQ ID NO: 434139
uugagaaccaccauucuaa

SEQ ID NO: 434141 - RNA, 19 nt, Artificial Sequence
  Description of Artificial Sequence: Synthetic oligonucleotide
  Sense strand starting at position 3616 of SEQ ID NO: 316706
ugaauuaacuuauugucga

SEQ ID NO: 434142 - RNA, 19 nt, Artificial Sequence
  Description of Artificial Sequence: Synthetic oligonucleotide
  Antisense Strand to SEQ ID NO: 434141
ucgacaauaaguuaauuca

SEQ ID NO: 434143 - RNA, 19 nt, Artificial Sequence
  Description of Artificial Sequence: Synthetic oligonucleotide
  Sense strand starting at position 3805 of SEQ ID NO: 316706
gguaauuccucacuccaga

SEQ ID NO: 434144 - RNA, 19 nt, Artificial Sequence
  Description of Artificial Sequence: Synthetic oligonucleotide
  Antisense Strand to SEQ ID NO: 434143
ucuggagugaggaauuacc

SEQ ID NO: 434145 - RNA, 19 nt, Artificial Sequence
  Description of Artificial Sequence: Synthetic oligonucleotide
  Sense strand starting at position 3942 of SEQ ID NO: 316706
uggagcuuagaguguaaga

SEQ ID NO: 434146 - RNA, 19 nt, Artificial Sequence
  Description of Artificial Sequence: Synthetic oligonucleotide
  Antisense Strand to SEQ ID NO: 434145
ucuuacacucuaagcucca

SEQ ID NO: 434147 - RNA, 19 nt, Artificial Sequence
  Description of Artificial Sequence: Synthetic oligonucleotide
  Sense strand starting at position 3944 of SEQ ID NO: 316706
gagcuuagaguguaagaca

SEQ ID NO: 434148 - RNA, 19 nt, Artificial Sequence
  Description of Artificial Sequence: Synthetic oligonucleotide
  Antisense Strand to SEQ ID NO: 434147
ugucuuacacucuaagcuc

SEQ ID NO: 434149 - RNA, 19 nt, Artificial Sequence
  Description of Artificial Sequence: Synthetic oligonucleotide
  Sense strand starting at position 24 of SEQ ID NO: 316707
guacauuucuagcuugguu

SEQ ID NO: 434150 - RNA, 19 nt, Artificial Sequence
  Description of Artificial Sequence: Synthetic oligonucleotide
  Antisense Strand to SEQ ID NO: 434149
aaccaagcuagaaauguac

SEQ ID NO: 434151 - RNA, 19 nt, Artificial Sequence
  Description of Artificial Sequence: Synthetic oligonucleotide
  Sense strand starting at position 102 of SEQ ID NO: 316707
gguaauauuaugugccaga

SEQ ID NO: 434152 - RNA, 19 nt, Artificial Sequence
  Description of Artificial Sequence: Synthetic oligonucleotide
  Antisense Strand to SEQ ID NO: 434151
ucuggcacauaauauuacc

SEQ ID NO: 434153 - RNA, 19 nt, Artificial Sequence
  Description of Artificial Sequence: Synthetic oligonucleotide
  Sense strand starting at position 125 of SEQ ID NO: 316707
auucuaagugcuuauguau

SEQ ID NO: 434154 - RNA, 19 nt, Artificial Sequence
  Description of Artificial Sequence: Synthetic oligonucleotide
  Antisense Strand to SEQ ID NO: 434153
auacauaagcacuuagaau

SEQ ID NO: 434155 - RNA, 19 nt, Artificial Sequence
  Description of Artificial Sequence: Synthetic oligonucleotide
  Sense strand starting at position 251 of SEQ ID NO: 316707
uagugaguggcagagcuaa

SEQ ID NO: 434156 - RNA, 19 nt, Artificial Sequence
  Description of Artificial Sequence: Synthetic oligonucleotide
  Antisense Strand to SEQ ID NO: 434155
uuagcucugccacucacua

SEQ ID NO: 434157 - RNA, 19 nt, Artificial Sequence
  Description of Artificial Sequence: Synthetic oligonucleotide
  Sense strand starting at position 283 of SEQ ID NO: 316707
gcauucuggguccagaauu

SEQ ID NO: 434158 - RNA, 19 nt, Artificial Sequence
  Description of Artificial Sequence: Synthetic oligonucleotide
  Antisense Strand to SEQ ID NO: 434157
aauucuggacccagaaugc

SEQ ID NO: 434159 - RNA, 19 nt, Artificial Sequence
  Description of Artificial Sequence: Synthetic oligonucleotide
  Sense strand starting at position 461 of SEQ ID NO: 316707
aaagaaugucucuggaugu

SEQ ID NO: 434160 - RNA, 19 nt, Artificial Sequence
  Description of Artificial Sequence: Synthetic oligonucleotide
  Antisense Strand to SEQ ID NO: 434159
acauccagagacauucuuu

SEQ ID NO: 434161 - RNA, 19 nt, Artificial Sequence
  Description of Artificial Sequence: Synthetic oligonucleotide
  Sense strand starting at position 573 of SEQ ID NO: 316707
agauucugucuguagcaua

SEQ ID NO: 434162 - RNA, 19 nt, Artificial Sequence
  Description of Artificial Sequence: Synthetic oligonucleotide
  Antisense Strand to SEQ ID NO: 434161
uaugcuacagacagaaucu

SEQ ID NO: 434163 - RNA, 19 nt, Artificial Sequence
  Description of Artificial Sequence: Synthetic oligonucleotide
  Sense strand starting at position 699 of SEQ ID NO: 316707
ggcaguaguagcuagaaua

SEQ ID NO: 434164 - RNA, 19 nt, Artificial Sequence
  Description of Artificial Sequence: Synthetic oligonucleotide
  Antisense Strand to SEQ ID NO: 434163
uauucuagcuacuacugcc

SEQ ID NO: 434165 - RNA, 19 nt, Artificial Sequence
  Description of Artificial Sequence: Synthetic oligonucleotide
  Sense strand starting at position 753 of SEQ ID NO: 316707
ucgagcuuccuggaacauu

SEQ ID NO: 434166 - RNA, 19 nt, Artificial Sequence
  Description of Artificial Sequence: Synthetic oligonucleotide
  Antisense Strand to SEQ ID NO: 434165
aauguuccaggaagcucga

SEQ ID NO: 434167 - RNA, 19 nt, Artificial Sequence
  Description of Artificial Sequence: Synthetic oligonucleotide
  Sense strand starting at position 835 of SEQ ID NO: 316707
agcaaacuagguugaugaa

SEQ ID NO: 434168 - RNA, 19 nt, Artificial Sequence
  Description of Artificial Sequence: Synthetic oligonucleotide
  Antisense Strand to SEQ ID NO: 434167
uucaucaaccuaguuugcu

SEQ ID NO: 434169 - RNA, 19 nt, Artificial Sequence
  Description of Artificial Sequence: Synthetic oligonucleotide
  Sense strand starting at position 889 of SEQ ID NO: 316707
uaaacuuauguauacggua

SEQ ID NO: 434170 - RNA, 19 nt, Artificial Sequence
  Description of Artificial Sequence: Synthetic oligonucleotide
  Antisense Strand to SEQ ID NO: 434169
uaccguauacauaaguuua

SEQ ID NO: 434171 - RNA, 19 nt, Artificial Sequence
  Description of Artificial Sequence: Synthetic oligonucleotide
  Sense strand starting at position 894 of SEQ ID NO: 316707
uuauguauacgguauaagu

SEQ ID NO: 434172 - RNA, 19 nt, Artificial Sequence
  Description of Artificial Sequence: Synthetic oligonucleotide
  Antisense Strand to SEQ ID NO: 434171
acuuauaccguauacauaa

SEQ ID NO: 434173 - RNA, 19 nt, Artificial Sequence
  Description of Artificial Sequence: Synthetic oligonucleotide
  Sense strand starting at position 896 of SEQ ID NO: 316707
auguauacgguauaaguaa

SEQ ID NO: 434174 - RNA, 19 nt, Artificial Sequence
  Description of Artificial Sequence: Synthetic oligonucleotide
  Antisense Strand to SEQ ID NO: 434173
uuacuuauaccguauacau

SEQ ID NO: 434175 - RNA, 19 nt, Artificial Sequence
  Description of Artificial Sequence: Synthetic oligonucleotide
  Sense strand starting at position 989 of SEQ ID NO: 316707
gucacagaauacuuugaga

SEQ ID NO: 434176 - RNA, 19 nt, Artificial Sequence
  Description of Artificial Sequence: Synthetic oligonucleotide
  Antisense Strand to SEQ ID NO: 434175
ucucaaaguauucugugac

SEQ ID NO: 434177 - RNA, 19 nt, Artificial Sequence
  Description of Artificial Sequence: Synthetic oligonucleotide
  Sense strand starting at position 1727 of SEQ ID NO: 316707
cuuagaaagccuugccaua

SEQ ID NO: 434178 - RNA, 19 nt, Artificial Sequence
  Description of Artificial Sequence: Synthetic oligonucleotide
  Antisense Strand to SEQ ID NO: 434177
uauggcaaggcuuucuaag

SEQ ID NO: 434179 - RNA, 19 nt, Artificial Sequence
  Description of Artificial Sequence: Synthetic oligonucleotide
  Sense strand starting at position 2120 of SEQ ID NO: 316707
gaaagacaagccuguuaca

SEQ ID NO: 434180 - RNA, 19 nt, Artificial Sequence
  Description of Artificial Sequence: Synthetic oligonucleotide
  Antisense Strand to SEQ ID NO: 434179
uguaacaggcuugucuuuc

SEQ ID NO: 434181 - RNA, 19 nt, Artificial Sequence
  Description of Artificial Sequence: Synthetic oligonucleotide
  Sense strand starting at position 2486 of SEQ ID NO: 316707
agugcaacagaucaaagua

SEQ ID NO: 434182 - RNA, 19 nt, Artificial Sequence
  Description of Artificial Sequence: Synthetic oligonucleotide
  Antisense Strand to SEQ ID NO: 434181
uacuuugaucuguugcacu

SEQ ID NO: 434183 - RNA, 19 nt, Artificial Sequence
  Description of Artificial Sequence: Synthetic oligonucleotide
  Sense strand starting at position 2512 of SEQ ID NO: 316707
acaguaguuuacucacacu

SEQ ID NO: 434184 - RNA, 19 nt, Artificial Sequence
  Description of Artificial Sequence: Synthetic oligonucleotide
  Antisense Strand to SEQ ID NO: 434183
agugugaguaaacuacugu

SEQ ID NO: 434185 - RNA, 19 nt, Artificial Sequence
  Description of Artificial Sequence: Synthetic oligonucleotide
  Sense strand starting at position 2549 of SEQ ID NO: 316707
ugaagugaauacccuugaa

SEQ ID NO: 434186 - RNA, 19 nt, Artificial Sequence
  Description of Artificial Sequence: Synthetic oligonucleotide
  Antisense Strand to SEQ ID NO: 434185
uucaaggguauucacuuca

SEQ ID NO: 434187 - RNA, 19 nt, Artificial Sequence
  Description of Artificial Sequence: Synthetic oligonucleotide
  Sense strand starting at position 2552 of SEQ ID NO: 316707
agugaauacccuugaauca

SEQ ID NO: 434188 - RNA, 19 nt, Artificial Sequence
  Description of Artificial Sequence: Synthetic oligonucleotide
  Antisense Strand to SEQ ID NO: 434187
ugauucaaggguauucacu

SEQ ID NO: 434189 - RNA, 19 nt, Artificial Sequence
  Description of Artificial Sequence: Synthetic oligonucleotide
  Sense strand starting at position 2785 of SEQ ID NO: 316707
gauauugaaugagauaaag

SEQ ID NO: 434190 - RNA, 19 nt, Artificial Sequence
  Description of Artificial Sequence: Synthetic oligonucleotide
  Antisense Strand to SEQ ID NO: 434189
cuuuaucucauucaauauc

SEQ ID NO: 434191 - RNA, 19 nt, Artificial Sequence
  Description of Artificial Sequence: Synthetic oligonucleotide
  Sense strand starting at position 2873 of SEQ ID NO: 316707
aaugaauugucaguauaug

SEQ ID NO: 434192 - RNA, 19 nt, Artificial Sequence
  Description of Artificial Sequence: Synthetic oligonucleotide
  Antisense Strand to SEQ ID NO: 434191
cauauacugacaauucauu

SEQ ID NO: 434193 - RNA, 19 nt, Artificial Sequence
  Description of Artificial Sequence: Synthetic oligonucleotide
  Sense strand starting at position 2874 of SEQ ID NO: 316707
augaauugucaguauaugu

SEQ ID NO: 434194 - RNA, 19 nt, Artificial Sequence
  Description of Artificial Sequence: Synthetic oligonucleotide
  Antisense Strand to SEQ ID NO: 434193
acauauacugacaauucau

SEQ ID NO: 434195 - RNA, 19 nt, Artificial Sequence
  Description of Artificial Sequence: Synthetic oligonucleotide
  Sense strand starting at position 2878 of SEQ ID NO: 316707
auugucaguauauguagaa

SEQ ID NO: 434196 - RNA, 19 nt, Artificial Sequence
  Description of Artificial Sequence: Synthetic oligonucleotide
  Antisense Strand to SEQ ID NO: 434195
uucuacauauacugacaau

SEQ ID NO: 434197 - RNA, 19 nt, Artificial Sequence
  Description of Artificial Sequence: Synthetic oligonucleotide
  Sense strand starting at position 2879 of SEQ ID NO: 316707
uugucaguauauguagaaa

SEQ ID NO: 434198 - RNA, 19 nt, Artificial Sequence
  Description of Artificial Sequence: Synthetic oligonucleotide
  Antisense Strand to SEQ ID NO: 434197
uuucuacauauacugacaa

SEQ ID NO: 434199 - RNA, 19 nt, Artificial Sequence
  Description of Artificial Sequence: Synthetic oligonucleotide
  Sense strand starting at position 2945 of SEQ ID NO: 316707
ccaucaguuugucugauaa

SEQ ID NO: 434200 - RNA, 19 nt, Artificial Sequence
  Description of Artificial Sequence: Synthetic oligonucleotide
  Antisense Strand to SEQ ID NO: 434199
uuaucagacaaacugaugg

SEQ ID NO: 434201 - RNA, 19 nt, Artificial Sequence
  Description of Artificial Sequence: Synthetic oligonucleotide
  Sense strand starting at position 2969 of SEQ ID NO: 316707
uuaugaguagaguagcaaa

SEQ ID NO: 434202 - RNA, 19 nt, Artificial Sequence
  Description of Artificial Sequence: Synthetic oligonucleotide
  Antisense Strand to SEQ ID NO: 434201
uuugcuacucuacucauaa

SEQ ID NO: 434203 - RNA, 19 nt, Artificial Sequence
  Description of Artificial Sequence: Synthetic oligonucleotide
  Sense strand starting at position 3018 of SEQ ID NO: 316707
ucaucauauguuuacuuga

SEQ ID NO: 434204 - RNA, 19 nt, Artificial Sequence
  Description of Artificial Sequence: Synthetic oligonucleotide
  Antisense Strand to SEQ ID NO: 434203
ucaaguaaacauaugauga

SEQ ID NO: 434205 - RNA, 19 nt, Artificial Sequence
  Description of Artificial Sequence: Synthetic oligonucleotide
  Sense strand starting at position 3141 of SEQ ID NO: 316707
gcacuauuccucuagguac

SEQ ID NO: 434206 - RNA, 19 nt, Artificial Sequence
  Description of Artificial Sequence: Synthetic oligonucleotide
  Antisense Strand to SEQ ID NO: 434205
guaccuagaggaauagugc

SEQ ID NO: 434207 - RNA, 19 nt, Artificial Sequence
  Description of Artificial Sequence: Synthetic oligonucleotide
  Sense strand starting at position 3412 of SEQ ID NO: 316707
aaagaacugucuuugagua

SEQ ID NO: 434208 - RNA, 19 nt, Artificial Sequence
  Description of Artificial Sequence: Synthetic oligonucleotide
  Antisense Strand to SEQ ID NO: 434207
uacucaaagacaguucuuu

SEQ ID NO: 434209 - RNA, 19 nt, Artificial Sequence
  Description of Artificial Sequence: Synthetic oligonucleotide
  Sense strand starting at position 3413 of SEQ ID NO: 316707
aagaacugucuuugaguaa

SEQ ID NO: 434210 - RNA, 19 nt, Artificial Sequence
  Description of Artificial Sequence: Synthetic oligonucleotide
  Antisense Strand to SEQ ID NO: 434209
uuacucaaagacaguucuu

SEQ ID NO: 434211 - RNA, 19 nt, Artificial Sequence
  Description of Artificial Sequence: Synthetic oligonucleotide
  Sense strand starting at position 3417 of SEQ ID NO: 316707
acugucuuugaguaauauu

SEQ ID NO: 434212 - RNA, 19 nt, Artificial Sequence
  Description of Artificial Sequence: Synthetic oligonucleotide
  Antisense Strand to SEQ ID NO: 434211
aauauuacucaaagacagu

SEQ ID NO: 434213 - RNA, 19 nt, Artificial Sequence
  Description of Artificial Sequence: Synthetic oligonucleotide
  Sense strand starting at position 3636 of SEQ ID NO: 316707
gcaagaagugaauagcuga

SEQ ID NO: 434214 - RNA, 19 nt, Artificial Sequence
  Description of Artificial Sequence: Synthetic oligonucleotide
  Antisense Strand to SEQ ID NO: 434213
ucagcuauucacuucuugc

SEQ ID NO: 434215 - RNA, 19 nt, Artificial Sequence
  Description of Artificial Sequence: Synthetic oligonucleotide
  Sense strand starting at position 3639 of SEQ ID NO: 316707
agaagugaauagcugaaau

SEQ ID NO: 434216 - RNA, 19 nt, Artificial Sequence
  Description of Artificial Sequence: Synthetic oligonucleotide
  Antisense Strand to SEQ ID NO: 434215
auuucagcuauucacuucu

SEQ ID NO: 434217 - RNA, 19 nt, Artificial Sequence
  Description of Artificial Sequence: Synthetic oligonucleotide
  Sense strand starting at position 3641 of SEQ ID NO: 316707
aagugaauagcugaaaugu

SEQ ID NO: 434218 - RNA, 19 nt, Artificial Sequence
  Description of Artificial Sequence: Synthetic oligonucleotide
  Antisense Strand to SEQ ID NO: 434217
acauuucagcuauucacuu

SEQ ID NO: 434219 - RNA, 19 nt, Artificial Sequence
  Description of Artificial Sequence: Synthetic oligonucleotide
  Sense strand starting at position 3695 of SEQ ID NO: 316707
ggcuucuauaaauggcuga

SEQ ID NO: 434220 - RNA, 19 nt, Artificial Sequence
  Description of Artificial Sequence: Synthetic oligonucleotide
  Antisense Strand to SEQ ID NO: 434219
ucagccauuuauagaagcc

SEQ ID NO: 434221 - RNA, 19 nt, Artificial Sequence
  Description of Artificial Sequence: Synthetic oligonucleotide
  Sense strand starting at position 3699 of SEQ ID NO: 316707
ucuauaaauggcugaaagu

SEQ ID NO: 434222 - RNA, 19 nt, Artificial Sequence
  Description of Artificial Sequence: Synthetic oligonucleotide
  Antisense Strand to SEQ ID NO: 434221
acuuucagccauuuauaga

SEQ ID NO: 434223 - RNA, 19 nt, Artificial Sequence
  Description of Artificial Sequence: Synthetic oligonucleotide
  Sense strand starting at position 3700 of SEQ ID NO: 316707
cuauaaauggcugaaaguu

SEQ ID NO: 434224 - RNA, 19 nt, Artificial Sequence
  Description of Artificial Sequence: Synthetic oligonucleotide
  Antisense Strand to SEQ ID NO: 434223
aacuuucagccauuuauag

SEQ ID NO: 434225 - RNA, 19 nt, Artificial Sequence
  Description of Artificial Sequence: Synthetic oligonucleotide
  Sense strand starting at position 3816 of SEQ ID NO: 316707
uugguuccucaagaagguu

SEQ ID NO: 434226 - RNA, 19 nt, Artificial Sequence
  Description of Artificial Sequence: Synthetic oligonucleotide
  Antisense Strand to SEQ ID NO: 434225
aaccuucuugaggaaccaa

SEQ ID NO: 434227 - RNA, 19 nt, Artificial Sequence
  Description of Artificial Sequence: Synthetic oligonucleotide
  Sense strand starting at position 3819 of SEQ ID NO: 316707
guuccucaagaagguuaua

SEQ ID NO: 434228 - RNA, 19 nt, Artificial Sequence
  Description of Artificial Sequence: Synthetic oligonucleotide
  Antisense Strand to SEQ ID NO: 434227
uauaaccuucuugaggaac

SEQ ID NO: 434229 - RNA, 19 nt, Artificial Sequence
  Description of Artificial Sequence: Synthetic oligonucleotide
  Sense strand starting at position 62 of SEQ ID NO: 316708
uuauaaaccucagcaggaa

SEQ ID NO: 434230 - RNA, 19 nt, Artificial Sequence
  Description of Artificial Sequence: Synthetic oligonucleotide
  Antisense Strand to SEQ ID NO: 434229
uuccugcugagguuuauaa

SEQ ID NO: 434231 - RNA, 19 nt, Artificial Sequence
  Description of Artificial Sequence: Synthetic oligonucleotide
  Sense strand starting at position 243 of SEQ ID NO: 316708
acacaacuuguuuauaagu

SEQ ID NO: 434232 - RNA, 19 nt, Artificial Sequence
  Description of Artificial Sequence: Synthetic oligonucleotide
  Antisense Strand to SEQ ID NO: 434231
acuuauaaacaaguugugu

SEQ ID NO: 434233 - RNA, 19 nt, Artificial Sequence
  Description of Artificial Sequence: Synthetic oligonucleotide
  Sense strand starting at position 367 of SEQ ID NO: 316708
auaaucucagccgauagaa

SEQ ID NO: 434234 - RNA, 19 nt, Artificial Sequence
  Description of Artificial Sequence: Synthetic oligonucleotide
  Antisense Strand to SEQ ID NO: 434233
uucuaucggcugagauuau

SEQ ID NO: 434235 - RNA, 19 nt, Artificial Sequence
  Description of Artificial Sequence: Synthetic oligonucleotide
  Sense strand starting at position 437 of SEQ ID NO: 316708
ucagcuccacauuguuaga

SEQ ID NO: 434236 - RNA, 19 nt, Artificial Sequence
  Description of Artificial Sequence: Synthetic oligonucleotide
  Antisense Strand to SEQ ID NO: 434235
ucuaacaauguggagcuga

SEQ ID NO: 434237 - RNA, 19 nt, Artificial Sequence
  Description of Artificial Sequence: Synthetic oligonucleotide
  Sense strand starting at position 439 of SEQ ID NO: 316708
agcuccacauuguuagaaa

SEQ ID NO: 434238 - RNA, 19 nt, Artificial Sequence
  Description of Artificial Sequence: Synthetic oligonucleotide
  Antisense Strand to SEQ ID NO: 434237
uuucuaacaauguggagcu

SEQ ID NO: 434239 - RNA, 19 nt, Artificial Sequence
  Description of Artificial Sequence: Synthetic oligonucleotide
  Sense strand starting at position 500 of SEQ ID NO: 316708
acuagaacuuggcagauuu

SEQ ID NO: 434240 - RNA, 19 nt, Artificial Sequence
  Description of Artificial Sequence: Synthetic oligonucleotide
  Antisense Strand to SEQ ID NO: 434239
aaaucugccaaguucuagu

SEQ ID NO: 434241 - RNA, 19 nt, Artificial Sequence
  Description of Artificial Sequence: Synthetic oligonucleotide
  Sense strand starting at position 577 of SEQ ID NO: 316708
uuccgaagcuaaucaaagu

SEQ ID NO: 434242 - RNA, 19 nt, Artificial Sequence
  Description of Artificial Sequence: Synthetic oligonucleotide
  Antisense Strand to SEQ ID NO: 434241
acuuugauuagcuucggaa

SEQ ID NO: 434243 - RNA, 19 nt, Artificial Sequence
  Description of Artificial Sequence: Synthetic oligonucleotide
  Sense strand starting at position 978 of SEQ ID NO: 316708
aguuuaaaggucuaucucu

SEQ ID NO: 434244 - RNA, 19 nt, Artificial Sequence
  Description of Artificial Sequence: Synthetic oligonucleotide
  Antisense Strand to SEQ ID NO: 434243
agagauagaccuuuaaacu

SEQ ID NO: 434245 - RNA, 19 nt, Artificial Sequence
  Description of Artificial Sequence: Synthetic oligonucleotide
  Sense strand starting at position 984 of SEQ ID NO: 316708
aaggucuaucucuggugaa

SEQ ID NO: 434246 - RNA, 19 nt, Artificial Sequence
  Description of Artificial Sequence: Synthetic oligonucleotide
  Antisense Strand to SEQ ID NO: 434245
uucaccagagauagaccuu

SEQ ID NO: 434247 - RNA, 19 nt, Artificial Sequence
  Description of Artificial Sequence: Synthetic oligonucleotide
  Sense strand starting at position 1038 of SEQ ID NO: 316708
auaagaaugcaauguaaac

SEQ ID NO: 434248 - RNA, 19 nt, Artificial Sequence
  Description of Artificial Sequence: Synthetic oligonucleotide
  Antisense Strand to SEQ ID NO: 434247
guuuacauugcauucuuau

SEQ ID NO: 434249 - RNA, 19 nt, Artificial Sequence
  Description of Artificial Sequence: Synthetic oligonucleotide
  Sense strand starting at position 1058 of SEQ ID NO: 316708
uuagaaagccaucauaguu

SEQ ID NO: 434250 - RNA, 19 nt, Artificial Sequence
  Description of Artificial Sequence: Synthetic oligonucleotide
  Antisense Strand to SEQ ID NO: 434249
aacuaugauggcuuucuaa

SEQ ID NO: 434251 - RNA, 19 nt, Artificial Sequence
  Description of Artificial Sequence: Synthetic oligonucleotide
  Sense strand starting at position 1425 of SEQ ID NO: 316708
uuuagaaguguauaguuga

SEQ ID NO: 434252 - RNA, 19 nt, Artificial Sequence
  Description of Artificial Sequence: Synthetic oligonucleotide
  Antisense Strand to SEQ ID NO: 434251
ucaacuauacacuucuaaa

SEQ ID NO: 434253 - RNA, 19 nt, Artificial Sequence
  Description of Artificial Sequence: Synthetic oligonucleotide
  Sense strand starting at position 1430 of SEQ ID NO: 316708
aaguguauaguugauacau

SEQ ID NO: 434254 - RNA, 19 nt, Artificial Sequence
  Description of Artificial Sequence: Synthetic oligonucleotide
  Antisense Strand to SEQ ID NO: 434253
auguaucaacuauacacuu

SEQ ID NO: 434255 - RNA, 19 nt, Artificial Sequence
  Description of Artificial Sequence: Synthetic oligonucleotide
  Sense strand starting at position 1529 of SEQ ID NO: 316708
uaaccuugacaguguugaa

SEQ ID NO: 434256 - RNA, 19 nt, Artificial Sequence
  Description of Artificial Sequence: Synthetic oligonucleotide
  Antisense Strand to SEQ ID NO: 434255
uucaacacugucaagguua

SEQ ID NO: 434257 - RNA, 19 nt, Artificial Sequence
  Description of Artificial Sequence: Synthetic oligonucleotide
  Sense strand starting at position 1651 of SEQ ID NO: 316708
agaguucggcuacauggua

SEQ ID NO: 434258 - RNA, 19 nt, Artificial Sequence
  Description of Artificial Sequence: Synthetic oligonucleotide
  Antisense Strand to SEQ ID NO: 434257
uaccauguagccgaacucu

SEQ ID NO: 434259 - RNA, 19 nt, Artificial Sequence
  Description of Artificial Sequence: Synthetic oligonucleotide
  Sense strand starting at position 2079 of SEQ ID NO: 316708
ugauuauaagcuggcaaga

SEQ ID NO: 434260 - RNA, 19 nt, Artificial Sequence
  Description of Artificial Sequence: Synthetic oligonucleotide
  Antisense Strand to SEQ ID NO: 434259
ucuugccagcuuauaauca

SEQ ID NO: 434261 - RNA, 19 nt, Artificial Sequence
  Description of Artificial Sequence: Synthetic oligonucleotide
  Sense strand starting at position 2088 of SEQ ID NO: 316708
gcuggcaagagacauuauu

SEQ ID NO: 434262 - RNA, 19 nt, Artificial Sequence
  Description of Artificial Sequence: Synthetic oligonucleotide
  Antisense Strand to SEQ ID NO: 434261
aauaaugucucuugccagc

SEQ ID NO: 434263 - RNA, 19 nt, Artificial Sequence
  Description of Artificial Sequence: Synthetic oligonucleotide
  Sense strand starting at position 2100 of SEQ ID NO: 316708
cauuauuccggucaagcaa

SEQ ID NO: 434264 - RNA, 19 nt, Artificial Sequence
  Description of Artificial Sequence: Synthetic oligonucleotide
  Antisense Strand to SEQ ID NO: 434263
uugcuugaccggaauaaug

SEQ ID NO: 434265 - RNA, 19 nt, Artificial Sequence
  Description of Artificial Sequence: Synthetic oligonucleotide
  Sense strand starting at position 2140 of SEQ ID NO: 316708
ggcauaugacaguggaaag

SEQ ID NO: 434266 - RNA, 19 nt, Artificial Sequence
  Description of Artificial Sequence: Synthetic oligonucleotide
  Antisense Strand to SEQ ID NO: 434265
cuuuccacugucauaugcc

SEQ ID NO: 434267 - RNA, 19 nt, Artificial Sequence
  Description of Artificial Sequence: Synthetic oligonucleotide
  Sense strand starting at position 2272 of SEQ ID NO: 316708
cacugaccacaguguguua

SEQ ID NO: 434268 - RNA, 19 nt, Artificial Sequence
  Description of Artificial Sequence: Synthetic oligonucleotide
  Antisense Strand to SEQ ID NO: 434267
uaacacacuguggucagug

SEQ ID NO: 434269 - RNA, 19 nt, Artificial Sequence
  Description of Artificial Sequence: Synthetic oligonucleotide
  Sense strand starting at position 2429 of SEQ ID NO: 316708
gucuuaaguuuaucuuaag

SEQ ID NO: 434270 - RNA, 19 nt, Artificial Sequence
  Description of Artificial Sequence: Synthetic oligonucleotide
  Antisense Strand to SEQ ID NO: 434269
cuuaagauaaacuuaagac

SEQ ID NO: 434271 - RNA, 19 nt, Artificial Sequence
  Description of Artificial Sequence: Synthetic oligonucleotide
  Sense strand starting at position 2508 of SEQ ID NO: 316708
gguuuaccuuuacuaaaug

SEQ ID NO: 434272 - RNA, 19 nt, Artificial Sequence
  Description of Artificial Sequence: Synthetic oligonucleotide
  Antisense Strand to SEQ ID NO: 434271
cauuuaguaaagguaaacc

SEQ ID NO: 434273 - RNA, 19 nt, Artificial Sequence
  Description of Artificial Sequence: Synthetic oligonucleotide
  Sense strand starting at position 2731 of SEQ ID NO: 316708
aguuaaagccucuaacuag

SEQ ID NO: 434274 - RNA, 19 nt, Artificial Sequence
  Description of Artificial Sequence: Synthetic oligonucleotide
  Antisense Strand to SEQ ID NO: 434273
cuaguuagaggcuuuaacu

SEQ ID NO: 434275 - RNA, 19 nt, Artificial Sequence
  Description of Artificial Sequence: Synthetic oligonucleotide
  Sense strand starting at position 2764 of SEQ ID NO: 316708
agagauauuugucauacac

SEQ ID NO: 434276 - RNA, 19 nt, Artificial Sequence
  Description of Artificial Sequence: Synthetic oligonucleotide
  Antisense Strand to SEQ ID NO: 434275
guguaugacaaauaucucu

SEQ ID NO: 434277 - RNA, 19 nt, Artificial Sequence
  Description of Artificial Sequence: Synthetic oligonucleotide
  Sense strand starting at position 2831 of SEQ ID NO: 316708
gcacuuugggcucaaagag

SEQ ID NO: 434278 - RNA, 19 nt, Artificial Sequence
  Description of Artificial Sequence: Synthetic oligonucleotide
  Antisense Strand to SEQ ID NO: 434277
cucuuugagcccaaagugc

SEQ ID NO: 434279 - RNA, 19 nt, Artificial Sequence
  Description of Artificial Sequence: Synthetic oligonucleotide
  Sense strand starting at position 2839 of SEQ ID NO: 316708
ggcucaaagaguugaagaa

SEQ ID NO: 434280 - RNA, 19 nt, Artificial Sequence
  Description of Artificial Sequence: Synthetic oligonucleotide
  Antisense Strand to SEQ ID NO: 434279
uucuucaacucuuugagcc

SEQ ID NO: 434281 - RNA, 19 nt, Artificial Sequence
  Description of Artificial Sequence: Synthetic oligonucleotide
  Sense strand starting at position 3322 of SEQ ID NO: 316708
auaugcauaggauauguau

SEQ ID NO: 434282 - RNA, 19 nt, Artificial Sequence
  Description of Artificial Sequence: Synthetic oligonucleotide
  Antisense Strand to SEQ ID NO: 434281
auacauauccuaugcauau

SEQ ID NO: 434283 - RNA, 19 nt, Artificial Sequence
  Description of Artificial Sequence: Synthetic oligonucleotide
  Sense strand starting at position 3325 of SEQ ID NO: 316708
ugcauaggauauguauuaa

SEQ ID NO: 434284 - RNA, 19 nt, Artificial Sequence
  Description of Artificial Sequence: Synthetic oligonucleotide
  Antisense Strand to SEQ ID NO: 434283
uuaauacauauccuaugca

SEQ ID NO: 434285 - RNA, 19 nt, Artificial Sequence
  Description of Artificial Sequence: Synthetic oligonucleotide
  Sense strand starting at position 3363 of SEQ ID NO: 316708
aauuccuguguacaugaga

SEQ ID NO: 434286 - RNA, 19 nt, Artificial Sequence
  Description of Artificial Sequence: Synthetic oligonucleotide
  Antisense Strand to SEQ ID NO: 434285
ucucauguacacaggaauu

SEQ ID NO: 434287 - RNA, 19 nt, Artificial Sequence
  Description of Artificial Sequence: Synthetic oligonucleotide
  Sense strand starting at position 3366 of SEQ ID NO: 316708
uccuguguacaugagaaca

SEQ ID NO: 434288 - RNA, 19 nt, Artificial Sequence
  Description of Artificial Sequence: Synthetic oligonucleotide
  Antisense Strand to SEQ ID NO: 434287
uguucucauguacacagga

SEQ ID NO: 434289 - RNA, 19 nt, Artificial Sequence
  Description of Artificial Sequence: Synthetic oligonucleotide
  Sense strand starting at position 3509 of SEQ ID NO: 316708
agaagugugcuguaagaug

SEQ ID NO: 434290 - RNA, 19 nt, Artificial Sequence
  Description of Artificial Sequence: Synthetic oligonucleotide
  Antisense Strand to SEQ ID NO: 434289
caucuuacagcacacuucu

SEQ ID NO: 434291 - RNA, 19 nt, Artificial Sequence
  Description of Artificial Sequence: Synthetic oligonucleotide
  Sense strand starting at position 3555 of SEQ ID NO: 316708
auuagucuauauccaaagu

SEQ ID NO: 434292 - RNA, 19 nt, Artificial Sequence
  Description of Artificial Sequence: Synthetic oligonucleotide
  Antisense Strand to SEQ ID NO: 434291
acuuuggauauagacuaau

SEQ ID NO: 434293 - RNA, 19 nt, Artificial Sequence
  Description of Artificial Sequence: Synthetic oligonucleotide
  Sense strand starting at position 3600 of SEQ ID NO: 316708
ggauauauguaagucuaga

SEQ ID NO: 434294 - RNA, 19 nt, Artificial Sequence
  Description of Artificial Sequence: Synthetic oligonucleotide
  Antisense Strand to SEQ ID NO: 434293
ucuagacuuacauauaucc

SEQ ID NO: 434295 - RNA, 19 nt, Artificial Sequence
  Description of Artificial Sequence: Synthetic oligonucleotide
  Sense strand starting at position 3707 of SEQ ID NO: 316708
uuugauuuguaggaagaag

SEQ ID NO: 434296 - RNA, 19 nt, Artificial Sequence
  Description of Artificial Sequence: Synthetic oligonucleotide
  Antisense Strand to SEQ ID NO: 434295
cuucuuccuacaaaucaaa

SEQ ID NO: 434297 - RNA, 19 nt, Artificial Sequence
  Description of Artificial Sequence: Synthetic oligonucleotide
  Sense strand starting at position 3734 of SEQ ID NO: 316708
aggacaaucuuguugaauu

SEQ ID NO: 434298 - RNA, 19 nt, Artificial Sequence
  Description of Artificial Sequence: Synthetic oligonucleotide
  Antisense Strand to SEQ ID NO: 434297
aauucaacaagauuguccu

SEQ ID NO: 434299 - RNA, 19 nt, Artificial Sequence
  Description of Artificial Sequence: Synthetic oligonucleotide
  Sense strand starting at position 3744 of SEQ ID NO: 316708
uguugaauucugggcagaa

SEQ ID NO: 434300 - RNA, 19 nt, Artificial Sequence
  Description of Artificial Sequence: Synthetic oligonucleotide
  Antisense Strand to SEQ ID NO: 434299
uucugcccagaauucaaca

SEQ ID NO: 434301 - RNA, 19 nt, Artificial Sequence
  Description of Artificial Sequence: Synthetic oligonucleotide
  Sense strand starting at position 3745 of SEQ ID NO: 316708
guugaauucugggcagaaa

SEQ ID NO: 434302 - RNA, 19 nt, Artificial Sequence
  Description of Artificial Sequence: Synthetic oligonucleotide
  Antisense Strand to SEQ ID NO: 434301
uuucugcccagaauucaac

SEQ ID NO: 434303 - RNA, 19 nt, Artificial Sequence
  Description of Artificial Sequence: Synthetic oligonucleotide
  Sense strand starting at position 3840 of SEQ ID NO: 316708
ggaacauucuggccugaug

SEQ ID NO: 434304 - RNA, 19 nt, Artificial Sequence
  Description of Artificial Sequence: Synthetic oligonucleotide
  Antisense Strand to SEQ ID NO: 434303
caucaggccagaauguucc

SEQ ID NO: 434305 - RNA, 19 nt, Artificial Sequence
  Description of Artificial Sequence: Synthetic oligonucleotide
  Sense strand starting at position 3866 of SEQ ID NO: 316708
agcucucccucuuuggaua

SEQ ID NO: 434306 - RNA, 19 nt, Artificial Sequence
  Description of Artificial Sequence: Synthetic oligonucleotide
  Antisense Strand to SEQ ID NO: 434305
uauccaaagagggagagcu

SEQ ID NO: 434307 - RNA, 19 nt, Artificial Sequence
  Description of Artificial Sequence: Synthetic oligonucleotide
  Sense strand starting at position 3867 of SEQ ID NO: 316708
gcucucccucuuuggauaa

SEQ ID NO: 434308 - RNA, 19 nt, Artificial Sequence
  Description of Artificial Sequence: Synthetic oligonucleotide
  Antisense Strand to SEQ ID NO: 434307
uuauccaaagagggagagc

SEQ ID NO: 434309 - RNA, 19 nt, Artificial Sequence
  Description of Artificial Sequence: Synthetic oligonucleotide
  Sense strand starting at position 51 of SEQ ID NO: 316709
cagugcauauuccugaaga

SEQ ID NO: 434310 - RNA, 19 nt, Artificial Sequence
  Description of Artificial Sequence: Synthetic oligonucleotide
  Antisense Strand to SEQ ID NO: 434309
ucuucaggaauaugcacug

SEQ ID NO: 434311 - RNA, 19 nt, Artificial Sequence
  Description of Artificial Sequence: Synthetic oligonucleotide
  Sense strand starting at position 53 of SEQ ID NO: 316709
gugcauauuccugaagaca

SEQ ID NO: 434312 - RNA, 19 nt, Artificial Sequence
  Description of Artificial Sequence: Synthetic oligonucleotide
  Antisense Strand to SEQ ID NO: 434311
ugucuucaggaauaugcac

SEQ ID NO: 434313 - RNA, 19 nt, Artificial Sequence
  Description of Artificial Sequence: Synthetic oligonucleotide
  Sense strand starting at position 119 of SEQ ID NO: 316709
aauugaauucucuguggug

SEQ ID NO: 434314 - RNA, 19 nt, Artificial Sequence
  Description of Artificial Sequence: Synthetic oligonucleotide
  Antisense Strand to SEQ ID NO: 434313
caccacagagaauucaauu

SEQ ID NO: 434315 - RNA, 19 nt, Artificial Sequence
  Description of Artificial Sequence: Synthetic oligonucleotide
  Sense strand starting at position 280 of SEQ ID NO: 316709
agaaacuguggauguugua

SEQ ID NO: 434316 - RNA, 19 nt, Artificial Sequence
  Description of Artificial Sequence: Synthetic oligonucleotide
  Antisense Strand to SEQ ID NO: 434315
uacaacauccacaguuucu

SEQ ID NO: 434317 - RNA, 19 nt, Artificial Sequence
  Description of Artificial Sequence: Synthetic oligonucleotide
  Sense strand starting at position 289 of SEQ ID NO: 316709
ggauguuguaaacaugcau

SEQ ID NO: 434318 - RNA, 19 nt, Artificial Sequence
  Description of Artificial Sequence: Synthetic oligonucleotide
  Antisense Strand to SEQ ID NO: 434317
augcauguuuacaacaucc

SEQ ID NO: 434319 - RNA, 19 nt, Artificial Sequence
  Description of Artificial Sequence: Synthetic oligonucleotide
  Sense strand starting at position 805 of SEQ ID NO: 316709
ggugucuuuggcuaauucu

SEQ ID NO: 434320 - RNA, 19 nt, Artificial Sequence
  Description of Artificial Sequence: Synthetic oligonucleotide
  Antisense Strand to SEQ ID NO: 434319
agaauuagccaaagacacc

SEQ ID NO: 434321 - RNA, 19 nt, Artificial Sequence
  Description of Artificial Sequence: Synthetic oligonucleotide
  Sense strand starting at position 1091 of SEQ ID NO: 316709
ggugacauggccuaaguua

SEQ ID NO: 434322 - RNA, 19 nt, Artificial Sequence
  Description of Artificial Sequence: Synthetic oligonucleotide
  Antisense Strand to SEQ ID NO: 434321
uaacuuaggccaugucacc

SEQ ID NO: 434323 - RNA, 19 nt, Artificial Sequence
  Description of Artificial Sequence: Synthetic oligonucleotide
  Sense strand starting at position 1098 of SEQ ID NO: 316709
uggccuaaguuaccuaaau

SEQ ID NO: 434324 - RNA, 19 nt, Artificial Sequence
  Description of Artificial Sequence: Synthetic oligonucleotide
  Antisense Strand to SEQ ID NO: 434323
auuuagguaacuuaggcca

SEQ ID NO: 434325 - RNA, 19 nt, Artificial Sequence
  Description of Artificial Sequence: Synthetic oligonucleotide
  Sense strand starting at position 1099 of SEQ ID NO: 316709
ggccuaaguuaccuaaauc

SEQ ID NO: 434326 - RNA, 19 nt, Artificial Sequence
  Description of Artificial Sequence: Synthetic oligonucleotide
  Antisense Strand to SEQ ID NO: 434325
gauuuagguaacuuaggcc

SEQ ID NO: 434327 - RNA, 19 nt, Artificial Sequence
  Description of Artificial Sequence: Synthetic oligonucleotide
  Sense strand starting at position 1116 of SEQ ID NO: 316709
ucaggcaaucacugcuaga

SEQ ID NO: 434328 - RNA, 19 nt, Artificial Sequence
  Description of Artificial Sequence: Synthetic oligonucleotide
  Antisense Strand to SEQ ID NO: 434327
ucuagcagugauugccuga

SEQ ID NO: 434329 - RNA, 19 nt, Artificial Sequence
  Description of Artificial Sequence: Synthetic oligonucleotide
  Sense strand starting at position 1388 of SEQ ID NO: 316709
cuguaagaacaaugccuua

SEQ ID NO: 434330 - RNA, 19 nt, Artificial Sequence
  Description of Artificial Sequence: Synthetic oligonucleotide
  Antisense Strand to SEQ ID NO: 434329
uaaggcauuguucuuacag

SEQ ID NO: 434331 - RNA, 19 nt, Artificial Sequence
  Description of Artificial Sequence: Synthetic oligonucleotide
  Sense strand starting at position 1393 of SEQ ID NO: 316709
agaacaaugccuuagucuu

SEQ ID NO: 434332 - RNA, 19 nt, Artificial Sequence
  Description of Artificial Sequence: Synthetic oligonucleotide
  Antisense Strand to SEQ ID NO: 434331
aagacuaaggcauuguucu

SEQ ID NO: 434333 - RNA, 19 nt, Artificial Sequence
  Description of Artificial Sequence: Synthetic oligonucleotide
  Sense strand starting at position 1426 of SEQ ID NO: 316709
gguaaucacugugccgaaa

SEQ ID NO: 434334 - RNA, 19 nt, Artificial Sequence
  Description of Artificial Sequence: Synthetic oligonucleotide
  Antisense Strand to SEQ ID NO: 434333
uuucggcacagugauuacc

SEQ ID NO: 434335 - RNA, 19 nt, Artificial Sequence
  Description of Artificial Sequence: Synthetic oligonucleotide
  Sense strand starting at position 1454 of SEQ ID NO: 316709
gcacguaguagguacuuaa

SEQ ID NO: 434336 - RNA, 19 nt, Artificial Sequence
  Description of Artificial Sequence: Synthetic oligonucleotide
  Antisense Strand to SEQ ID NO: 434335
uuaaguaccuacuacgugc

SEQ ID NO: 434337 - RNA, 19 nt, Artificial Sequence
  Description of Artificial Sequence: Synthetic oligonucleotide
  Sense strand starting at position 1457 of SEQ ID NO: 316709
cguaguagguacuuaaaca

SEQ ID NO: 434338 - RNA, 19 nt, Artificial Sequence
  Description of Artificial Sequence: Synthetic oligonucleotide
  Antisense Strand to SEQ ID NO: 434337
uguuuaaguaccuacuacg

SEQ ID NO: 434339 - RNA, 19 nt, Artificial Sequence
  Description of Artificial Sequence: Synthetic oligonucleotide
  Sense strand starting at position 1468 of SEQ ID NO: 316709
cuuaaacacuagucgguaa

SEQ ID NO: 434340 - RNA, 19 nt, Artificial Sequence
  Description of Artificial Sequence: Synthetic oligonucleotide
  Antisense Strand to SEQ ID NO: 434339
uuaccgacuaguguuuaag

SEQ ID NO: 434341 - RNA, 19 nt, Artificial Sequence
  Description of Artificial Sequence: Synthetic oligonucleotide
  Sense strand starting at position 1510 of SEQ ID NO: 316709
gaaugaacacucugugcuu

SEQ ID NO: 434342 - RNA, 19 nt, Artificial Sequence
  Description of Artificial Sequence: Synthetic oligonucleotide
  Antisense Strand to SEQ ID NO: 434341
aagcacagaguguucauuc

SEQ ID NO: 434343 - RNA, 19 nt, Artificial Sequence
  Description of Artificial Sequence: Synthetic oligonucleotide
  Sense strand starting at position 2362 of SEQ ID NO: 316709
cggagcagugcauagagau

SEQ ID NO: 434344 - RNA, 19 nt, Artificial Sequence
  Description of Artificial Sequence: Synthetic oligonucleotide
  Antisense Strand to SEQ ID NO: 434343
aucucuaugcacugcuccg

SEQ ID NO: 434345 - RNA, 19 nt, Artificial Sequence
  Description of Artificial Sequence: Synthetic oligonucleotide
  Sense strand starting at position 2408 of SEQ ID NO: 316709
cguggaucugcucauucua

SEQ ID NO: 434346 - RNA, 19 nt, Artificial Sequence
  Description of Artificial Sequence: Synthetic oligonucleotide
  Antisense Strand to SEQ ID NO: 434345
uagaaugagcagauccacg

SEQ ID NO: 434347 - RNA, 19 nt, Artificial Sequence
  Description of Artificial Sequence: Synthetic oligonucleotide
  Sense strand starting at position 2443 of SEQ ID NO: 316709
uucguucuuagccugugau

SEQ ID NO: 434348 - RNA, 19 nt, Artificial Sequence
  Description of Artificial Sequence: Synthetic oligonucleotide
  Antisense Strand to SEQ ID NO: 434347
aucacaggcuaagaacgaa

SEQ ID NO: 434349 - RNA, 19 nt, Artificial Sequence
  Description of Artificial Sequence: Synthetic oligonucleotide
  Sense strand starting at position 2556 of SEQ ID NO: 316709
ggcagugugccuguggauu

SEQ ID NO: 434350 - RNA, 19 nt, Artificial Sequence
  Description of Artificial Sequence: Synthetic oligonucleotide
  Antisense Strand to SEQ ID NO: 434349
aauccacaggcacacugcc

SEQ ID NO: 434351 - RNA, 19 nt, Artificial Sequence
  Description of Artificial Sequence: Synthetic oligonucleotide
  Sense strand starting at position 2597 of SEQ ID NO: 316709
ucuuccuaucugugaagac

SEQ ID NO: 434352 - RNA, 19 nt, Artificial Sequence
  Description of Artificial Sequence: Synthetic oligonucleotide
  Antisense Strand to SEQ ID NO: 434351
gucuucacagauaggaaga

SEQ ID NO: 434353 - RNA, 19 nt, Artificial Sequence
  Description of Artificial Sequence: Synthetic oligonucleotide
  Sense strand starting at position 2646 of SEQ ID NO: 316709
ugcuauugauuacuaugau

SEQ ID NO: 434354 - RNA, 19 nt, Artificial Sequence
  Description of Artificial Sequence: Synthetic oligonucleotide
  Antisense Strand to SEQ ID NO: 434353
aucauaguaaucaauagca

SEQ ID NO: 434355 - RNA, 19 nt, Artificial Sequence
  Description of Artificial Sequence: Synthetic oligonucleotide
  Sense strand starting at position 2822 of SEQ ID NO: 316709
uaaguauguugaguaagau

SEQ ID NO: 434356 - RNA, 19 nt, Artificial Sequence
  Description of Artificial Sequence: Synthetic oligonucleotide
  Antisense Strand to SEQ ID NO: 434355
aucuuacucaacauacuua

SEQ ID NO: 434357 - RNA, 19 nt, Artificial Sequence
  Description of Artificial Sequence: Synthetic oligonucleotide
  Sense strand starting at position 2823 of SEQ ID NO: 316709
aaguauguugaguaagauu

SEQ ID NO: 434358 - RNA, 19 nt, Artificial Sequence
  Description of Artificial Sequence: Synthetic oligonucleotide
  Antisense Strand to SEQ ID NO: 434357
aaucuuacucaacauacuu

SEQ ID NO: 434359 - RNA, 19 nt, Artificial Sequence
  Description of Artificial Sequence: Synthetic oligonucleotide
  Sense strand starting at position 2867 of SEQ ID NO: 316709
uggacugcaucaucuuuga

SEQ ID NO: 434360 - RNA, 19 nt, Artificial Sequence
  Description of Artificial Sequence: Synthetic oligonucleotide
  Antisense Strand to SEQ ID NO: 434359
ucaaagaugaugcagucca

SEQ ID NO: 434361 - RNA, 19 nt, Artificial Sequence
  Description of Artificial Sequence: Synthetic oligonucleotide
  Sense strand starting at position 2996 of SEQ ID NO: 316709
cuacaucuguggcugaaua

SEQ ID NO: 434362 - RNA, 19 nt, Artificial Sequence
  Description of Artificial Sequence: Synthetic oligonucleotide
  Antisense Strand to SEQ ID NO: 434361
uauucagccacagauguag

SEQ ID NO: 434363 - RNA, 19 nt, Artificial Sequence
  Description of Artificial Sequence: Synthetic oligonucleotide
  Sense strand starting at position 2997 of SEQ ID NO: 316709
uacaucuguggcugaauau

SEQ ID NO: 434364 - RNA, 19 nt, Artificial Sequence
  Description of Artificial Sequence: Synthetic oligonucleotide
  Antisense Strand to SEQ ID NO: 434363
auauucagccacagaugua

SEQ ID NO: 434365 - RNA, 19 nt, Artificial Sequence
  Description of Artificial Sequence: Synthetic oligonucleotide
  Sense strand starting at position 3006 of SEQ ID NO: 316709
ggcugaauauaucuuauua

SEQ ID NO: 434366 - RNA, 19 nt, Artificial Sequence
  Description of Artificial Sequence: Synthetic oligonucleotide
  Antisense Strand to SEQ ID NO: 434365
uaauaagauauauucagcc

SEQ ID NO: 434367 - RNA, 19 nt, Artificial Sequence
  Description of Artificial Sequence: Synthetic oligonucleotide
  Sense strand starting at position 3110 of SEQ ID NO: 316709
caaguacugugccuaggaa

SEQ ID NO: 434368 - RNA, 19 nt, Artificial Sequence
  Description of Artificial Sequence: Synthetic oligonucleotide
  Antisense Strand to SEQ ID NO: 434367
uuccuaggcacaguacuug

SEQ ID NO: 434369 - RNA, 19 nt, Artificial Sequence
  Description of Artificial Sequence: Synthetic oligonucleotide
  Sense strand starting at position 3111 of SEQ ID NO: 316709
aaguacugugccuaggaau

SEQ ID NO: 434370 - RNA, 19 nt, Artificial Sequence
  Description of Artificial Sequence: Synthetic oligonucleotide
  Antisense Strand to SEQ ID NO: 434369
auuccuaggcacaguacuu

SEQ ID NO: 434371 - RNA, 19 nt, Artificial Sequence
  Description of Artificial Sequence: Synthetic oligonucleotide
  Sense strand starting at position 3183 of SEQ ID NO: 316709
uuugauuaucuaugagcug

SEQ ID NO: 434372 - RNA, 19 nt, Artificial Sequence
  Description of Artificial Sequence: Synthetic oligonucleotide
  Antisense Strand to SEQ ID NO: 434371
cagcucauagauaaucaaa

SEQ ID NO: 434373 - RNA, 19 nt, Artificial Sequence
  Description of Artificial Sequence: Synthetic oligonucleotide
  Sense strand starting at position 3186 of SEQ ID NO: 316709
gauuaucuaugagcugacu

SEQ ID NO: 434374 - RNA, 19 nt, Artificial Sequence
  Description of Artificial Sequence: Synthetic oligonucleotide
  Antisense Strand to SEQ ID NO: 434373
agucagcucauagauaauc

SEQ ID NO: 434375 - RNA, 19 nt, Artificial Sequence
  Description of Artificial Sequence: Synthetic oligonucleotide
  Sense strand starting at position 3311 of SEQ ID NO: 316709
ugggaaauauaccagauag

SEQ ID NO: 434376 - RNA, 19 nt, Artificial Sequence
  Description of Artificial Sequence: Synthetic oligonucleotide
  Antisense Strand to SEQ ID NO: 434375
cuaucugguauauuuccca

SEQ ID NO: 434377 - RNA, 19 nt, Artificial Sequence
  Description of Artificial Sequence: Synthetic oligonucleotide
  Sense strand starting at position 3467 of SEQ ID NO: 316709
uuuguuaucaggugguuaa

SEQ ID NO: 434378 - RNA, 19 nt, Artificial Sequence
  Description of Artificial Sequence: Synthetic oligonucleotide
  Antisense Strand to SEQ ID NO: 434377
uuaaccaccugauaacaaa

SEQ ID NO: 434379 - RNA, 19 nt, Artificial Sequence
  Description of Artificial Sequence: Synthetic oligonucleotide
  Sense strand starting at position 3468 of SEQ ID NO: 316709
uuguuaucaggugguuaaa

SEQ ID NO: 434380 - RNA, 19 nt, Artificial Sequence
  Description of Artificial Sequence: Synthetic oligonucleotide
  Antisense Strand to SEQ ID NO: 434379
uuuaaccaccugauaacaa

SEQ ID NO: 434381 - RNA, 19 nt, Artificial Sequence
  Description of Artificial Sequence: Synthetic oligonucleotide
  Sense strand starting at position 3470 of SEQ ID NO: 316709
guuaucaggugguuaaauu

SEQ ID NO: 434382 - RNA, 19 nt, Artificial Sequence
  Description of Artificial Sequence: Synthetic oligonucleotide
  Antisense Strand to SEQ ID NO: 434381
aauuuaaccaccugauaac

SEQ ID NO: 434383 - RNA, 19 nt, Artificial Sequence
  Description of Artificial Sequence: Synthetic oligonucleotide
  Sense strand starting at position 3471 of SEQ ID NO: 316709
uuaucaggugguuaaauua

SEQ ID NO: 434384 - RNA, 19 nt, Artificial Sequence
  Description of Artificial Sequence: Synthetic oligonucleotide
  Antisense Strand to SEQ ID NO: 434383
uaauuuaaccaccugauaa

SEQ ID NO: 434385 - RNA, 19 nt, Artificial Sequence
  Description of Artificial Sequence: Synthetic oligonucleotide
  Sense strand starting at position 3606 of SEQ ID NO: 316709
aucgguugaguccagaguu

SEQ ID NO: 434386 - RNA, 19 nt, Artificial Sequence
  Description of Artificial Sequence: Synthetic oligonucleotide
  Antisense Strand to SEQ ID NO: 434385
aacucuggacucaaccgau

SEQ ID NO: 434387 - RNA, 19 nt, Artificial Sequence
  Description of Artificial Sequence: Synthetic oligonucleotide
  Sense strand starting at position 3674 of SEQ ID NO: 316709
aaagaaauuaggcggugua

SEQ ID NO: 434388 - RNA, 19 nt, Artificial Sequence
  Description of Artificial Sequence: Synthetic oligonucleotide
  Antisense Strand to SEQ ID NO: 434387
uacaccgccuaauuucuuu

SEQ ID NO: 434389 - RNA, 19 nt, Artificial Sequence
  Description of Artificial Sequence: Synthetic oligonucleotide
  Sense strand starting at position 18 of SEQ ID NO: 316710
uguuucuuauuugccugaa

SEQ ID NO: 434390 - RNA, 19 nt, Artificial Sequence
  Description of Artificial Sequence: Synthetic oligonucleotide
  Antisense Strand to SEQ ID NO: 434389
uucaggcaaauaagaaaca

SEQ ID NO: 434391 - RNA, 19 nt, Artificial Sequence
  Description of Artificial Sequence: Synthetic oligonucleotide
  Sense strand starting at position 19 of SEQ ID NO: 316710
guuucuuauuugccugaaa

SEQ ID NO: 434392 - RNA, 19 nt, Artificial Sequence
  Description of Artificial Sequence: Synthetic oligonucleotide
  Antisense Strand to SEQ ID NO: 434391
uuucaggcaaauaagaaac

SEQ ID NO: 434393 - RNA, 19 nt, Artificial Sequence
  Description of Artificial Sequence: Synthetic oligonucleotide
  Sense strand starting at position 30 of SEQ ID NO: 316710
gccugaaaugugcgacaau

SEQ ID NO: 434394 - RNA, 19 nt, Artificial Sequence
  Description of Artificial Sequence: Synthetic oligonucleotide
  Antisense Strand to SEQ ID NO: 434393
auugucgcacauuucaggc

SEQ ID NO: 434395 - RNA, 19 nt, Artificial Sequence
  Description of Artificial Sequence: Synthetic oligonucleotide
  Sense strand starting at position 33 of SEQ ID NO: 316710
ugaaaugugcgacaauaaa

SEQ ID NO: 434396 - RNA, 19 nt, Artificial Sequence
  Description of Artificial Sequence: Synthetic oligonucleotide
  Antisense Strand to SEQ ID NO: 434395
uuuauugucgcacauuuca

SEQ ID NO: 434397 - RNA, 19 nt, Artificial Sequence
  Description of Artificial Sequence: Synthetic oligonucleotide
  Sense strand starting at position 229 of SEQ ID NO: 316710
aucacauucuggguucuga

SEQ ID NO: 434398 - RNA, 19 nt, Artificial Sequence
  Description of Artificial Sequence: Synthetic oligonucleotide
  Antisense Strand to SEQ ID NO: 434397
ucagaacccagaaugugau

SEQ ID NO: 434399 - RNA, 19 nt, Artificial Sequence
  Description of Artificial Sequence: Synthetic oligonucleotide
  Sense strand starting at position 237 of SEQ ID NO: 316710
cuggguucugaguauucag

SEQ ID NO: 434400 - RNA, 19 nt, Artificial Sequence
  Description of Artificial Sequence: Synthetic oligonucleotide
  Antisense Strand to SEQ ID NO: 434399
cugaauacucagaacccag

SEQ ID NO: 434401 - RNA, 19 nt, Artificial Sequence
  Description of Artificial Sequence: Synthetic oligonucleotide
  Sense strand starting at position 849 of SEQ ID NO: 316710
accugucaccucuagacua

SEQ ID NO: 434402 - RNA, 19 nt, Artificial Sequence
  Description of Artificial Sequence: Synthetic oligonucleotide
  Antisense Strand to SEQ ID NO: 434401
uagucuagaggugacaggu

SEQ ID NO: 434403 - RNA, 19 nt, Artificial Sequence
  Description of Artificial Sequence: Synthetic oligonucleotide
  Sense strand starting at position 1532 of SEQ ID NO: 316710
cgaacuuuagcgccaguuu

SEQ ID NO: 434404 - RNA, 19 nt, Artificial Sequence
  Description of Artificial Sequence: Synthetic oligonucleotide
  Antisense Strand to SEQ ID NO: 434403
aaacuggcgcuaaaguucg

SEQ ID NO: 434405 - RNA, 19 nt, Artificial Sequence
  Description of Artificial Sequence: Synthetic oligonucleotide
  Sense strand starting at position 2014 of SEQ ID NO: 316710
cgggcggaucgcuugagua

SEQ ID NO: 434406 - RNA, 19 nt, Artificial Sequence
  Description of Artificial Sequence: Synthetic oligonucleotide
  Antisense Strand to SEQ ID NO: 434405
uacucaagcgauccgcccg

SEQ ID NO: 434407 - RNA, 19 nt, Artificial Sequence
  Description of Artificial Sequence: Synthetic oligonucleotide
  Sense strand starting at position 2016 of SEQ ID NO: 316710
ggcggaucgcuugaguaua

SEQ ID NO: 434408 - RNA, 19 nt, Artificial Sequence
  Description of Artificial Sequence: Synthetic oligonucleotide
  Antisense Strand to SEQ ID NO: 434407
uauacucaagcgauccgcc

SEQ ID NO: 434409 - RNA, 19 nt, Artificial Sequence
  Description of Artificial Sequence: Synthetic oligonucleotide
  Sense strand starting at position 2029 of SEQ ID NO: 316710
aguauaggaguucgagaca

SEQ ID NO: 434410 - RNA, 19 nt, Artificial Sequence
  Description of Artificial Sequence: Synthetic oligonucleotide
  Antisense Strand to SEQ ID NO: 434409
ugucucgaacuccuauacu

SEQ ID NO: 434411 - RNA, 19 nt, Artificial Sequence
  Description of Artificial Sequence: Synthetic oligonucleotide
  Sense strand starting at position 2040 of SEQ ID NO: 316710
ucgagacaaaccugaguaa

SEQ ID NO: 434412 - RNA, 19 nt, Artificial Sequence
  Description of Artificial Sequence: Synthetic oligonucleotide
  Antisense Strand to SEQ ID NO: 434411
uuacucagguuugucucga

SEQ ID NO: 434413 - RNA, 19 nt, Artificial Sequence
  Description of Artificial Sequence: Synthetic oligonucleotide
  Sense strand starting at position 2148 of SEQ ID NO: 316710
gugagaugugaggaggcuu

SEQ ID NO: 434414 - RNA, 19 nt, Artificial Sequence
  Description of Artificial Sequence: Synthetic oligonucleotide
  Antisense Strand to SEQ ID NO: 434413
aagccuccucacaucucac

SEQ ID NO: 434415 - RNA, 19 nt, Artificial Sequence
  Description of Artificial Sequence: Synthetic oligonucleotide
  Sense strand starting at position 2445 of SEQ ID NO: 316710
gacgacaacuuugacagau

SEQ ID NO: 434416 - RNA, 19 nt, Artificial Sequence
  Description of Artificial Sequence: Synthetic oligonucleotide
  Antisense Strand to SEQ ID NO: 434415
aucugucaaaguugucguc

SEQ ID NO: 434417 - RNA, 19 nt, Artificial Sequence
  Description of Artificial Sequence: Synthetic oligonucleotide
  Sense strand starting at position 2579 of SEQ ID NO: 316710
ccuagcuaaguuuguaauu

SEQ ID NO: 434418 - RNA, 19 nt, Artificial Sequence
  Description of Artificial Sequence: Synthetic oligonucleotide
  Antisense Strand to SEQ ID NO: 434417
aauuacaaacuuagcuagg

SEQ ID NO: 434419 - RNA, 19 nt, Artificial Sequence
  Description of Artificial Sequence: Synthetic oligonucleotide
  Sense strand starting at position 2580 of SEQ ID NO: 316710
cuagcuaaguuuguaauuu

SEQ ID NO: 434420 - RNA, 19 nt, Artificial Sequence
  Description of Artificial Sequence: Synthetic oligonucleotide
  Antisense Strand to SEQ ID NO: 434419
aaauuacaaacuuagcuag

SEQ ID NO: 434421 - RNA, 19 nt, Artificial Sequence
  Description of Artificial Sequence: Synthetic oligonucleotide
  Sense strand starting at position 2588 of SEQ ID NO: 316710
guuuguaauuucucucgcu

SEQ ID NO: 434422 - RNA, 19 nt, Artificial Sequence
  Description of Artificial Sequence: Synthetic oligonucleotide
  Antisense Strand to SEQ ID NO: 434421
agcgagagaaauuacaaac

SEQ ID NO: 434423 - RNA, 19 nt, Artificial Sequence
  Description of Artificial Sequence: Synthetic oligonucleotide
  Sense strand starting at position 2589 of SEQ ID NO: 316710
uuuguaauuucucucgcuu

SEQ ID NO: 434424 - RNA, 19 nt, Artificial Sequence
  Description of Artificial Sequence: Synthetic oligonucleotide
  Antisense Strand to SEQ ID NO: 434423
aagcgagagaaauuacaaa

SEQ ID NO: 434425 - RNA, 19 nt, Artificial Sequence
  Description of Artificial Sequence: Synthetic oligonucleotide
  Sense strand starting at position 2596 of SEQ ID NO: 316710
uuucucucgcuuuagcaau

SEQ ID NO: 434426 - RNA, 19 nt, Artificial Sequence
  Description of Artificial Sequence: Synthetic oligonucleotide
  Antisense Strand to SEQ ID NO: 434425
auugcuaaagcgagagaaa

SEQ ID NO: 434427 - RNA, 19 nt, Artificial Sequence
  Description of Artificial Sequence: Synthetic oligonucleotide
  Sense strand starting at position 2602 of SEQ ID NO: 316710
ucgcuuuagcaauggauaa

SEQ ID NO: 434428 - RNA, 19 nt, Artificial Sequence
  Description of Artificial Sequence: Synthetic oligonucleotide
  Antisense Strand to SEQ ID NO: 434427
uuauccauugcuaaagcga

SEQ ID NO: 434429 - RNA, 19 nt, Artificial Sequence
  Description of Artificial Sequence: Synthetic oligonucleotide
  Sense strand starting at position 2680 of SEQ ID NO: 316710
gcuaaccacggaugagaaa

SEQ ID NO: 434430 - RNA, 19 nt, Artificial Sequence
  Description of Artificial Sequence: Synthetic oligonucleotide
  Antisense Strand to SEQ ID NO: 434429
uuucucauccgugguuagc

SEQ ID NO: 434431 - RNA, 19 nt, Artificial Sequence
  Description of Artificial Sequence: Synthetic oligonucleotide
  Sense strand starting at position 2842 of SEQ ID NO: 316710
ugacgugaauuauagaaga

SEQ ID NO: 434432 - RNA, 19 nt, Artificial Sequence
  Description of Artificial Sequence: Synthetic oligonucleotide
  Antisense Strand to SEQ ID NO: 434431
ucuucuauaauucacguca

SEQ ID NO: 434433 - RNA, 19 nt, Artificial Sequence
  Description of Artificial Sequence: Synthetic oligonucleotide
  Sense strand starting at position 2865 of SEQ ID NO: 316710
gugcaaauacuguauacua

SEQ ID NO: 434434 - RNA, 19 nt, Artificial Sequence
  Description of Artificial Sequence: Synthetic oligonucleotide
  Antisense Strand to SEQ ID NO: 434433
uaguauacaguauuugcac

SEQ ID NO: 434435 - RNA, 19 nt, Artificial Sequence
  Description of Artificial Sequence: Synthetic oligonucleotide
  Sense strand starting at position 2969 of SEQ ID NO: 316710
ccgacuguaacuugucaga

SEQ ID NO: 434436 - RNA, 19 nt, Artificial Sequence
  Description of Artificial Sequence: Synthetic oligonucleotide
  Antisense Strand to SEQ ID NO: 434435
ucugacaaguuacagucgg

SEQ ID NO: 434437 - RNA, 19 nt, Artificial Sequence
  Description of Artificial Sequence: Synthetic oligonucleotide
  Sense strand starting at position 2971 of SEQ ID NO: 316710
gacuguaacuugucagagg

SEQ ID NO: 434438 - RNA, 19 nt, Artificial Sequence
  Description of Artificial Sequence: Synthetic oligonucleotide
  Antisense Strand to SEQ ID NO: 434437
ccucugacaaguuacaguc

SEQ ID NO: 434439 - RNA, 19 nt, Artificial Sequence
  Description of Artificial Sequence: Synthetic oligonucleotide
  Sense strand starting at position 2979 of SEQ ID NO: 316710
cuugucagaggucacaaua

SEQ ID NO: 434440 - RNA, 19 nt, Artificial Sequence
  Description of Artificial Sequence: Synthetic oligonucleotide
  Antisense Strand to SEQ ID NO: 434439
uauugugaccucugacaag

SEQ ID NO: 434441 - RNA, 19 nt, Artificial Sequence
  Description of Artificial Sequence: Synthetic oligonucleotide
  Sense strand starting at position 3023 of SEQ ID NO: 316710
uggagauguucaguuuaag

SEQ ID NO: 434442 - RNA, 19 nt, Artificial Sequence
  Description of Artificial Sequence: Synthetic oligonucleotide
  Antisense Strand to SEQ ID NO: 434441
cuuaaacugaacaucucca

SEQ ID NO: 434443 - RNA, 19 nt, Artificial Sequence
  Description of Artificial Sequence: Synthetic oligonucleotide
  Sense strand starting at position 3350 of SEQ ID NO: 316710
aagagccaguauuaauaga

SEQ ID NO: 434444 - RNA, 19 nt, Artificial Sequence
  Description of Artificial Sequence: Synthetic oligonucleotide
  Antisense Strand to SEQ ID NO: 434443
ucuauuaauacuggcucuu

SEQ ID NO: 434445 - RNA, 19 nt, Artificial Sequence
  Description of Artificial Sequence: Synthetic oligonucleotide
  Sense strand starting at position 3381 of SEQ ID NO: 316710
ggcccaaguccucaauucu

SEQ ID NO: 434446 - RNA, 19 nt, Artificial Sequence
  Description of Artificial Sequence: Synthetic oligonucleotide
  Antisense Strand to SEQ ID NO: 434445
agaauugaggacuugggcc

SEQ ID NO: 434447 - RNA, 19 nt, Artificial Sequence
  Description of Artificial Sequence: Synthetic oligonucleotide
  Sense strand starting at position 3466 of SEQ ID NO: 316710
acagguguucucuacuguu

SEQ ID NO: 434448 - RNA, 19 nt, Artificial Sequence
  Description of Artificial Sequence: Synthetic oligonucleotide
  Antisense Strand to SEQ ID NO: 434447
aacaguagagaacaccugu

SEQ ID NO: 434449 - RNA, 19 nt, Artificial Sequence
  Description of Artificial Sequence: Synthetic oligonucleotide
  Sense strand starting at position 3532 of SEQ ID NO: 316710
ucaguuccuccuuaaguua

SEQ ID NO: 434450 - RNA, 19 nt, Artificial Sequence
  Description of Artificial Sequence: Synthetic oligonucleotide
  Antisense Strand to SEQ ID NO: 434449
uaacuuaaggaggaacuga

SEQ ID NO: 434451 - RNA, 19 nt, Artificial Sequence
  Description of Artificial Sequence: Synthetic oligonucleotide
  Sense strand starting at position 3535 of SEQ ID NO: 316710
guuccuccuuaaguuaaau

SEQ ID NO: 434452 - RNA, 19 nt, Artificial Sequence
  Description of Artificial Sequence: Synthetic oligonucleotide
  Antisense Strand to SEQ ID NO: 434451
auuuaacuuaaggaggaac

SEQ ID NO: 434453 - RNA, 19 nt, Artificial Sequence
  Description of Artificial Sequence: Synthetic oligonucleotide
  Sense strand starting at position 3597 of SEQ ID NO: 316710
uccuguguuuacuuccaua

SEQ ID NO: 434454 - RNA, 19 nt, Artificial Sequence
  Description of Artificial Sequence: Synthetic oligonucleotide
  Antisense Strand to SEQ ID NO: 434453
uauggaaguaaacacagga

SEQ ID NO: 434455 - RNA, 19 nt, Artificial Sequence
  Description of Artificial Sequence: Synthetic oligonucleotide
  Sense strand starting at position 3694 of SEQ ID NO: 316710
aggacacguguccaugaca

SEQ ID NO: 434456 - RNA, 19 nt, Artificial Sequence
  Description of Artificial Sequence: Synthetic oligonucleotide
  Antisense Strand to SEQ ID NO: 434455
ugucauggacacguguccu

SEQ ID NO: 434457 - RNA, 19 nt, Artificial Sequence
  Description of Artificial Sequence: Synthetic oligonucleotide
  Sense strand starting at position 3697 of SEQ ID NO: 316710
acacguguccaugacacaa

SEQ ID NO: 434458 - RNA, 19 nt, Artificial Sequence
  Description of Artificial Sequence: Synthetic oligonucleotide
  Antisense Strand to SEQ ID NO: 434457
uugugucauggacacgugu

SEQ ID NO: 434459 - RNA, 19 nt, Artificial Sequence
  Description of Artificial Sequence: Synthetic oligonucleotide
  Sense strand starting at position 3820 of SEQ ID NO: 316710
auugguucuguccagagag

SEQ ID NO: 434460 - RNA, 19 nt, Artificial Sequence
  Description of Artificial Sequence: Synthetic oligonucleotide
  Antisense Strand to SEQ ID NO: 434459
cucucuggacagaaccaau

SEQ ID NO: 434461 - RNA, 19 nt, Artificial Sequence
  Description of Artificial Sequence: Synthetic oligonucleotide
  Sense strand starting at position 3938 of SEQ ID NO: 316710
aggccaucagaauaugcau

SEQ ID NO: 434462 - RNA, 19 nt, Artificial Sequence
  Description of Artificial Sequence: Synthetic oligonucleotide
  Antisense Strand to SEQ ID NO: 434461
augcauauucugauggccu

SEQ ID NO: 434463 - RNA, 19 nt, Artificial Sequence
  Description of Artificial Sequence: Synthetic oligonucleotide
  Sense strand starting at position 3969 of SEQ ID NO: 316710
gcagcugaaugacuuugaa

SEQ ID NO: 434464 - RNA, 19 nt, Artificial Sequence
  Description of Artificial Sequence: Synthetic oligonucleotide
  Antisense Strand to SEQ ID NO: 434463
uucaaagucauucagcugc

SEQ ID NO: 434465 - RNA, 19 nt, Artificial Sequence
  Description of Artificial Sequence: Synthetic oligonucleotide
  Sense strand starting at position 3972 of SEQ ID NO: 316710
gcugaaugacuuugaauag

SEQ ID NO: 434466 - RNA, 19 nt, Artificial Sequence
  Description of Artificial Sequence: Synthetic oligonucleotide
  Antisense Strand to SEQ ID NO: 434465
cuauucaaagucauucagc

SEQ ID NO: 434467 - RNA, 19 nt, Artificial Sequence
  Description of Artificial Sequence: Synthetic oligonucleotide
  Sense strand starting at position 3973 of SEQ ID NO: 316710
cugaaugacuuugaauaga

SEQ ID NO: 434468 - RNA, 19 nt, Artificial Sequence
  Description of Artificial Sequence: Synthetic oligonucleotide
  Antisense Strand to SEQ ID NO: 434467
ucuauucaaagucauucag

SEQ ID NO: 434469 - RNA, 19 nt, Artificial Sequence
  Description of Artificial Sequence: Synthetic oligonucleotide
  Sense strand starting at position 107 of SEQ ID NO: 316711
cgcauucguguccuccauu

SEQ ID NO: 434470 - RNA, 19 nt, Artificial Sequence
  Description of Artificial Sequence: Synthetic oligonucleotide
  Antisense Strand to SEQ ID NO: 434469
aauggaggacacgaaugcg

SEQ ID NO: 434471 - RNA, 19 nt, Artificial Sequence
  Description of Artificial Sequence: Synthetic oligonucleotide
  Sense strand starting at position 212 of SEQ ID NO: 316711
gggcuugcauauccaaauu

SEQ ID NO: 434472 - RNA, 19 nt, Artificial Sequence
  Description of Artificial Sequence: Synthetic oligonucleotide
  Antisense Strand to SEQ ID NO: 434471
aauuuggauaugcaagccc

SEQ ID NO: 434473 - RNA, 19 nt, Artificial Sequence
  Description of Artificial Sequence: Synthetic oligonucleotide
  Sense strand starting at position 239 of SEQ ID NO: 316711
guucuagggcaggaaucau

SEQ ID NO: 434474 - RNA, 19 nt, Artificial Sequence
  Description of Artificial Sequence: Synthetic oligonucleotide
  Antisense Strand to SEQ ID NO: 434473
augauuccugcccuagaac

SEQ ID NO: 434475 - RNA, 19 nt, Artificial Sequence
  Description of Artificial Sequence: Synthetic oligonucleotide
  Sense strand starting at position 340 of SEQ ID NO: 316711
cagggaauacuuugacugu

SEQ ID NO: 434476 - RNA, 19 nt, Artificial Sequence
  Description of Artificial Sequence: Synthetic oligonucleotide
  Antisense Strand to SEQ ID NO: 434475
acagucaaaguauucccug

SEQ ID NO: 434477 - RNA, 19 nt, Artificial Sequence
  Description of Artificial Sequence: Synthetic oligonucleotide
  Sense strand starting at position 344 of SEQ ID NO: 316711
gaauacuuugacuguugga

SEQ ID NO: 434478 - RNA, 19 nt, Artificial Sequence
  Description of Artificial Sequence: Synthetic oligonucleotide
  Antisense Strand to SEQ ID NO: 434477
uccaacagucaaaguauuc

SEQ ID NO: 434479 - RNA, 19 nt, Artificial Sequence
  Description of Artificial Sequence: Synthetic oligonucleotide
  Sense strand starting at position 351 of SEQ ID NO: 316711
uugacuguuggauaguuua

SEQ ID NO: 434480 - RNA, 19 nt, Artificial Sequence
  Description of Artificial Sequence: Synthetic oligonucleotide
  Antisense Strand to SEQ ID NO: 434479
uaaacuauccaacagucaa

SEQ ID NO: 434481 - RNA, 19 nt, Artificial Sequence
  Description of Artificial Sequence: Synthetic oligonucleotide
  Sense strand starting at position 383 of SEQ ID NO: 316711
aagagaaugucagcuacuu

SEQ ID NO: 434482 - RNA, 19 nt, Artificial Sequence
  Description of Artificial Sequence: Synthetic oligonucleotide
  Antisense Strand to SEQ ID NO: 434481
aaguagcugacauucucuu

SEQ ID NO: 434483 - RNA, 19 nt, Artificial Sequence
  Description of Artificial Sequence: Synthetic oligonucleotide
  Sense strand starting at position 733 of SEQ ID NO: 316711
gagugauaucguggugaca

SEQ ID NO: 434484 - RNA, 19 nt, Artificial Sequence
  Description of Artificial Sequence: Synthetic oligonucleotide
  Antisense Strand to SEQ ID NO: 434483
ugucaccacgauaucacuc

SEQ ID NO: 434485 - RNA, 19 nt, Artificial Sequence
  Description of Artificial Sequence: Synthetic oligonucleotide
  Sense strand starting at position 736 of SEQ ID NO: 316711
ugauaucguggugacacuu

SEQ ID NO: 434486 - RNA, 19 nt, Artificial Sequence
  Description of Artificial Sequence: Synthetic oligonucleotide
  Antisense Strand to SEQ ID NO: 434485
aagugucaccacgauauca

SEQ ID NO: 434487 - RNA, 19 nt, Artificial Sequence
  Description of Artificial Sequence: Synthetic oligonucleotide
  Sense strand starting at position 1144 of SEQ ID NO: 316711
aggauaugcuucuuggucu

SEQ ID NO: 434488 - RNA, 19 nt, Artificial Sequence
  Description of Artificial Sequence: Synthetic oligonucleotide
  Antisense Strand to SEQ ID NO: 434487
agaccaagaagcauauccu

SEQ ID NO: 434489 - RNA, 19 nt, Artificial Sequence
  Description of Artificial Sequence: Synthetic oligonucleotide
  Sense strand starting at position 1147 of SEQ ID NO: 316711
auaugcuucuuggucuaua

SEQ ID NO: 434490 - RNA, 19 nt, Artificial Sequence
  Description of Artificial Sequence: Synthetic oligonucleotide
  Antisense Strand to SEQ ID NO: 434489
uauagaccaagaagcauau

SEQ ID NO: 434491 - RNA, 19 nt, Artificial Sequence
  Description of Artificial Sequence: Synthetic oligonucleotide
  Sense strand starting at position 1150 of SEQ ID NO: 316711
ugcuucuuggucuauacua

SEQ ID NO: 434492 - RNA, 19 nt, Artificial Sequence
  Description of Artificial Sequence: Synthetic oligonucleotide
  Antisense Strand to SEQ ID NO: 434491
uaguauagaccaagaagca

SEQ ID NO: 434493 - RNA, 19 nt, Artificial Sequence
  Description of Artificial Sequence: Synthetic oligonucleotide
  Sense strand starting at position 1412 of SEQ ID NO: 316711
gcccaauugccagaucuuu

SEQ ID NO: 434494 - RNA, 19 nt, Artificial Sequence
  Description of Artificial Sequence: Synthetic oligonucleotide
  Antisense Strand to SEQ ID NO: 434493
aaagaucuggcaauugggc

SEQ ID NO: 434495 - RNA, 19 nt, Artificial Sequence
  Description of Artificial Sequence: Synthetic oligonucleotide
  Sense strand starting at position 1746 of SEQ ID NO: 316711
gaaacuaaucccggaggca

SEQ ID NO: 434496 - RNA, 19 nt, Artificial Sequence
  Description of Artificial Sequence: Synthetic oligonucleotide
  Antisense Strand to SEQ ID NO: 434495
ugccuccgggauuaguuuc

SEQ ID NO: 434497 - RNA, 19 nt, Artificial Sequence
  Description of Artificial Sequence: Synthetic oligonucleotide
  Sense strand starting at position 1863 of SEQ ID NO: 316711
gagggagccuccuauuuau

SEQ ID NO: 434498 - RNA, 19 nt, Artificial Sequence
  Description of Artificial Sequence: Synthetic oligonucleotide
  Antisense Strand to SEQ ID NO: 434497
auaaauaggaggcucccuc

SEQ ID NO: 434499 - RNA, 19 nt, Artificial Sequence
  Description of Artificial Sequence: Synthetic oligonucleotide
  Sense strand starting at position 2189 of SEQ ID NO: 316711
acccaaacguguucuggaa

SEQ ID NO: 434500 - RNA, 19 nt, Artificial Sequence
  Description of Artificial Sequence: Synthetic oligonucleotide
  Antisense Strand to SEQ ID NO: 434499
uuccagaacacguuugggu

SEQ ID NO: 434501 - RNA, 19 nt, Artificial Sequence
  Description of Artificial Sequence: Synthetic oligonucleotide
  Sense strand starting at position 2193 of SEQ ID NO: 316711
aaacguguucuggaauucu

SEQ ID NO: 434502 - RNA, 19 nt, Artificial Sequence
  Description of Artificial Sequence: Synthetic oligonucleotide
  Antisense Strand to SEQ ID NO: 434501
agaauuccagaacacguuu

SEQ ID NO: 434503 - RNA, 19 nt, Artificial Sequence
  Description of Artificial Sequence: Synthetic oligonucleotide
  Sense strand starting at position 2235 of SEQ ID NO: 316711
gcuagugucauggagaaac

SEQ ID NO: 434504 - RNA, 19 nt, Artificial Sequence
  Description of Artificial Sequence: Synthetic oligonucleotide
  Antisense Strand to SEQ ID NO: 434503
guuucuccaugacacuagc

SEQ ID NO: 434505 - RNA, 19 nt, Artificial Sequence
  Description of Artificial Sequence: Synthetic oligonucleotide
  Sense strand starting at position 2270 of SEQ ID NO: 316711
ugugguugacuucaggcau

SEQ ID NO: 434506 - RNA, 19 nt, Artificial Sequence
  Description of Artificial Sequence: Synthetic oligonucleotide
  Antisense Strand to SEQ ID NO: 434505
augccugaagucaaccaca

SEQ ID NO: 434507 - RNA, 19 nt, Artificial Sequence
  Description of Artificial Sequence: Synthetic oligonucleotide
  Sense strand starting at position 2288 of SEQ ID NO: 316711
uuugauaaugcaggcaauu

SEQ ID NO: 434508 - RNA, 19 nt, Artificial Sequence
  Description of Artificial Sequence: Synthetic oligonucleotide
  Antisense Strand to SEQ ID NO: 434507
aauugccugcauuaucaaa

SEQ ID NO: 434509 - RNA, 19 nt, Artificial Sequence
  Description of Artificial Sequence: Synthetic oligonucleotide
  Sense strand starting at position 2379 of SEQ ID NO: 316711
guaaauuaauagccgggua

SEQ ID NO: 434510 - RNA, 19 nt, Artificial Sequence
  Description of Artificial Sequence: Synthetic oligonucleotide
  Antisense Strand to SEQ ID NO: 434509
uacccggcuauuaauuuac

SEQ ID NO: 434511 - RNA, 19 nt, Artificial Sequence
  Description of Artificial Sequence: Synthetic oligonucleotide
  Sense strand starting at position 2517 of SEQ ID NO: 316711
gcaagagugagacacuguu

SEQ ID NO: 434512 - RNA, 19 nt, Artificial Sequence
  Description of Artificial Sequence: Synthetic oligonucleotide
  Antisense Strand to SEQ ID NO: 434511
aacagugucucacucuugc

SEQ ID NO: 434513 - RNA, 19 nt, Artificial Sequence
  Description of Artificial Sequence: Synthetic oligonucleotide
  Sense strand starting at position 2680 of SEQ ID NO: 316711
ggaccuacuuuagaaauuu

SEQ ID NO: 434514 - RNA, 19 nt, Artificial Sequence
  Description of Artificial Sequence: Synthetic oligonucleotide
  Antisense Strand to SEQ ID NO: 434513
aaauuucuaaaguaggucc

SEQ ID NO: 434515 - RNA, 19 nt, Artificial Sequence
  Description of Artificial Sequence: Synthetic oligonucleotide
  Sense strand starting at position 2825 of SEQ ID NO: 316711
accuuaugugguuauauau

SEQ ID NO: 434516 - RNA, 19 nt, Artificial Sequence
  Description of Artificial Sequence: Synthetic oligonucleotide
  Antisense Strand to SEQ ID NO: 434515
auauauaaccacauaaggu

SEQ ID NO: 434517 - RNA, 19 nt, Artificial Sequence
  Description of Artificial Sequence: Synthetic oligonucleotide
  Sense strand starting at position 2834 of SEQ ID NO: 316711
gguuauauauugccuccaa

SEQ ID NO: 434518 - RNA, 19 nt, Artificial Sequence
  Description of Artificial Sequence: Synthetic oligonucleotide
  Antisense Strand to SEQ ID NO: 434517
uuggaggcaauauauaacc

SEQ ID NO: 434519 - RNA, 19 nt, Artificial Sequence
  Description of Artificial Sequence: Synthetic oligonucleotide
  Sense strand starting at position 2835 of SEQ ID NO: 316711
guuauauauugccuccaag

SEQ ID NO: 434520 - RNA, 19 nt, Artificial Sequence
  Description of Artificial Sequence: Synthetic oligonucleotide
  Antisense Strand to SEQ ID NO: 434519
cuuggaggcaauauauaac

SEQ ID NO: 434521 - RNA, 19 nt, Artificial Sequence
  Description of Artificial Sequence: Synthetic oligonucleotide
  Sense strand starting at position 2885 of SEQ ID NO: 316711
gucuguguuccucauauaa

SEQ ID NO: 434522 - RNA, 19 nt, Artificial Sequence
  Description of Artificial Sequence: Synthetic oligonucleotide
  Antisense Strand to SEQ ID NO: 434521
uuauaugaggaacacagac

SEQ ID NO: 434523 - RNA, 19 nt, Artificial Sequence
  Description of Artificial Sequence: Synthetic oligonucleotide
  Sense strand starting at position 2985 of SEQ ID NO: 316711
uaugaaauguaguuugggu

SEQ ID NO: 434524 - RNA, 19 nt, Artificial Sequence
  Description of Artificial Sequence: Synthetic oligonucleotide
  Antisense Strand to SEQ ID NO: 434523
acccaaacuacauuucaua

SEQ ID NO: 434525 - RNA, 19 nt, Artificial Sequence
  Description of Artificial Sequence: Synthetic oligonucleotide
  Sense strand starting at position 3020 of SEQ ID NO: 316711
ucauccuacuguuuaaguu

SEQ ID NO: 434526 - RNA, 19 nt, Artificial Sequence
  Description of Artificial Sequence: Synthetic oligonucleotide
  Antisense Strand to SEQ ID NO: 434525
aacuuaaacaguaggauga

SEQ ID NO: 434527 - RNA, 19 nt, Artificial Sequence
  Description of Artificial Sequence: Synthetic oligonucleotide
  Sense strand starting at position 3024 of SEQ ID NO: 316711
ccuacuguuuaaguuaagu

SEQ ID NO: 434528 - RNA, 19 nt, Artificial Sequence
  Description of Artificial Sequence: Synthetic oligonucleotide
  Antisense Strand to SEQ ID NO: 434527
acuuaacuuaaacaguagg

SEQ ID NO: 434529 - RNA, 19 nt, Artificial Sequence
  Description of Artificial Sequence: Synthetic oligonucleotide
  Sense strand starting at position 3055 of SEQ ID NO: 316711
acuugucucccacgaauaa

SEQ ID NO: 434530 - RNA, 19 nt, Artificial Sequence
  Description of Artificial Sequence: Synthetic oligonucleotide
  Antisense Strand to SEQ ID NO: 434529
uuauucgugggagacaagu

SEQ ID NO: 434531 - RNA, 19 nt, Artificial Sequence
  Description of Artificial Sequence: Synthetic oligonucleotide
  Sense strand starting at position 3116 of SEQ ID NO: 316711
ugauauauccgguggaaua

SEQ ID NO: 434532 - RNA, 19 nt, Artificial Sequence
  Description of Artificial Sequence: Synthetic oligonucleotide
  Antisense Strand to SEQ ID NO: 434531
uauuccaccggauauauca

SEQ ID NO: 434533 - RNA, 19 nt, Artificial Sequence
  Description of Artificial Sequence: Synthetic oligonucleotide
  Sense strand starting at position 3117 of SEQ ID NO: 316711
gauauauccgguggaauaa

SEQ ID NO: 434534 - RNA, 19 nt, Artificial Sequence
  Description of Artificial Sequence: Synthetic oligonucleotide
  Antisense Strand to SEQ ID NO: 434533
uuauuccaccggauauauc

SEQ ID NO: 434535 - RNA, 19 nt, Artificial Sequence
  Description of Artificial Sequence: Synthetic oligonucleotide
  Sense strand starting at position 3233 of SEQ ID NO: 316711
aguuguaagauggaagguu

SEQ ID NO: 434536 - RNA, 19 nt, Artificial Sequence
  Description of Artificial Sequence: Synthetic oligonucleotide
  Antisense Strand to SEQ ID NO: 434535
aaccuuccaucuuacaacu

SEQ ID NO: 434537 - RNA, 19 nt, Artificial Sequence
  Description of Artificial Sequence: Synthetic oligonucleotide
  Sense strand starting at position 3386 of SEQ ID NO: 316711
guuaaaguaucucuuacuc

SEQ ID NO: 434538 - RNA, 19 nt, Artificial Sequence
  Description of Artificial Sequence: Synthetic oligonucleotide
  Antisense Strand to SEQ ID NO: 434537
gaguaagagauacuuuaac

SEQ ID NO: 434539 - RNA, 19 nt, Artificial Sequence
  Description of Artificial Sequence: Synthetic oligonucleotide
  Sense strand starting at position 3523 of SEQ ID NO: 316711
aguacuaaauguuuguuga

SEQ ID NO: 434540 - RNA, 19 nt, Artificial Sequence
  Description of Artificial Sequence: Synthetic oligonucleotide
  Antisense Strand to SEQ ID NO: 434539
ucaacaaacauuuaguacu

SEQ ID NO: 434541 - RNA, 19 nt, Artificial Sequence
  Description of Artificial Sequence: Synthetic oligonucleotide
  Sense strand starting at position 3524 of SEQ ID NO: 316711
guacuaaauguuuguugag

SEQ ID NO: 434542 - RNA, 19 nt, Artificial Sequence
  Description of Artificial Sequence: Synthetic oligonucleotide
  Antisense Strand to SEQ ID NO: 434541
cucaacaaacauuuaguac

SEQ ID NO: 434543 - RNA, 19 nt, Artificial Sequence
  Description of Artificial Sequence: Synthetic oligonucleotide
  Sense strand starting at position 3531 of SEQ ID NO: 316711
auguuuguugagcauugga

SEQ ID NO: 434544 - RNA, 19 nt, Artificial Sequence
  Description of Artificial Sequence: Synthetic oligonucleotide
  Antisense Strand to SEQ ID NO: 434543
uccaaugcucaacaaacau

SEQ ID NO: 434545 - RNA, 19 nt, Artificial Sequence
  Description of Artificial Sequence: Synthetic oligonucleotide
  Sense strand starting at position 3556 of SEQ ID NO: 316711
caggacuugguguaaguau

SEQ ID NO: 434546 - RNA, 19 nt, Artificial Sequence
  Description of Artificial Sequence: Synthetic oligonucleotide
  Antisense Strand to SEQ ID NO: 434545
auacuuacaccaaguccug

SEQ ID NO: 434547 - RNA, 19 nt, Artificial Sequence
  Description of Artificial Sequence: Synthetic oligonucleotide
  Sense strand starting at position 3947 of SEQ ID NO: 316711
ccauuacauuuggaagagu

SEQ ID NO: 434548 - RNA, 19 nt, Artificial Sequence
  Description of Artificial Sequence: Synthetic oligonucleotide
  Antisense Strand to SEQ ID NO: 434547
acucuuccaaauguaaugg

SEQ ID NO: 434549 - RNA, 19 nt, Artificial Sequence
  Description of Artificial Sequence: Synthetic oligonucleotide
  Sense strand starting at position 422 of SEQ ID NO: 316712
ccugaucacucugcaauga

SEQ ID NO: 434550 - RNA, 19 nt, Artificial Sequence
  Description of Artificial Sequence: Synthetic oligonucleotide
  Antisense Strand to SEQ ID NO: 434549
ucauugcagagugaucagg

SEQ ID NO: 434551 - RNA, 19 nt, Artificial Sequence
  Description of Artificial Sequence: Synthetic oligonucleotide
  Sense strand starting at position 469 of SEQ ID NO: 316712
uuucuuaucguugagacca

SEQ ID NO: 434552 - RNA, 19 nt, Artificial Sequence
  Description of Artificial Sequence: Synthetic oligonucleotide
  Antisense Strand to SEQ ID NO: 434551
uggucucaacgauaagaaa

SEQ ID NO: 434553 - RNA, 19 nt, Artificial Sequence
  Description of Artificial Sequence: Synthetic oligonucleotide
  Sense strand starting at position 645 of SEQ ID NO: 316712
aggccuaauggcugagaaa

SEQ ID NO: 434554 - RNA, 19 nt, Artificial Sequence
  Description of Artificial Sequence: Synthetic oligonucleotide
  Antisense Strand to SEQ ID NO: 434553
uuucucagccauuaggccu

SEQ ID NO: 434555 - RNA, 19 nt, Artificial Sequence
  Description of Artificial Sequence: Synthetic oligonucleotide
  Sense strand starting at position 646 of SEQ ID NO: 316712
ggccuaauggcugagaaau

SEQ ID NO: 434556 - RNA, 19 nt, Artificial Sequence
  Description of Artificial Sequence: Synthetic oligonucleotide
  Antisense Strand to SEQ ID NO: 434555
auuucucagccauuaggcc

SEQ ID NO: 434557 - RNA, 19 nt, Artificial Sequence
  Description of Artificial Sequence: Synthetic oligonucleotide
  Sense strand starting at position 739 of SEQ ID NO: 316712
cugucaaauccacaggguu

SEQ ID NO: 434558 - RNA, 19 nt, Artificial Sequence
  Description of Artificial Sequence: Synthetic oligonucleotide
  Antisense Strand to SEQ ID NO: 434557
aacccuguggauuugacag

SEQ ID NO: 434559 - RNA, 19 nt, Artificial Sequence
  Description of Artificial Sequence: Synthetic oligonucleotide
  Sense strand starting at position 823 of SEQ ID NO: 316712
cucagccugcuggaagaau

SEQ ID NO: 434560 - RNA, 19 nt, Artificial Sequence
  Description of Artificial Sequence: Synthetic oligonucleotide
  Antisense Strand to SEQ ID NO: 434559
auucuuccagcaggcugag

SEQ ID NO: 434561 - RNA, 19 nt, Artificial Sequence
  Description of Artificial Sequence: Synthetic oligonucleotide
  Sense strand starting at position 832 of SEQ ID NO: 316712
cuggaagaaugugcagauu

SEQ ID NO: 434562 - RNA, 19 nt, Artificial Sequence
  Description of Artificial Sequence: Synthetic oligonucleotide
  Antisense Strand to SEQ ID NO: 434561
aaucugcacauucuuccag

SEQ ID NO: 434563 - RNA, 19 nt, Artificial Sequence
  Description of Artificial Sequence: Synthetic oligonucleotide
  Sense strand starting at position 846 of SEQ ID NO: 316712
agauuucugugacaaucua

SEQ ID NO: 434564 - RNA, 19 nt, Artificial Sequence
  Description of Artificial Sequence: Synthetic oligonucleotide
  Antisense Strand to SEQ ID NO: 434563
uagauugucacagaaaucu

SEQ ID NO: 434565 - RNA, 19 nt, Artificial Sequence
  Description of Artificial Sequence: Synthetic oligonucleotide
  Sense strand starting at position 878 of SEQ ID NO: 316712
ggaauugugccucagacag

SEQ ID NO: 434566 - RNA, 19 nt, Artificial Sequence
  Description of Artificial Sequence: Synthetic oligonucleotide
  Antisense Strand to SEQ ID NO: 434565
cugucugaggcacaauucc

SEQ ID NO: 434567 - RNA, 19 nt, Artificial Sequence
  Description of Artificial Sequence: Synthetic oligonucleotide
  Sense strand starting at position 979 of SEQ ID NO: 316712
acaagauacuucucaagug

SEQ ID NO: 434568 - RNA, 19 nt, Artificial Sequence
  Description of Artificial Sequence: Synthetic oligonucleotide
  Antisense Strand to SEQ ID NO: 434567
cacuugagaaguaucuugu

SEQ ID NO: 434569 - RNA, 19 nt, Artificial Sequence
  Description of Artificial Sequence: Synthetic oligonucleotide
  Sense strand starting at position 1104 of SEQ ID NO: 316712
ccgacugugacuugaauua

SEQ ID NO: 434570 - RNA, 19 nt, Artificial Sequence
  Description of Artificial Sequence: Synthetic oligonucleotide
  Antisense Strand to SEQ ID NO: 434569
uaauucaagucacagucgg

SEQ ID NO: 434571 - RNA, 19 nt, Artificial Sequence
  Description of Artificial Sequence: Synthetic oligonucleotide
  Sense strand starting at position 1122 of SEQ ID NO: 316712
aaugaauguugaguugaac

SEQ ID NO: 434572 - RNA, 19 nt, Artificial Sequence
  Description of Artificial Sequence: Synthetic oligonucleotide
  Antisense Strand to SEQ ID NO: 434571
guucaacucaacauucauu

SEQ ID NO: 434573 - RNA, 19 nt, Artificial Sequence
  Description of Artificial Sequence: Synthetic oligonucleotide
  Sense strand starting at position 1125 of SEQ ID NO: 316712
gaauguugaguugaacugu

SEQ ID NO: 434574 - RNA, 19 nt, Artificial Sequence
  Description of Artificial Sequence: Synthetic oligonucleotide
  Antisense Strand to SEQ ID NO: 434573
acaguucaacucaacauuc

SEQ ID NO: 434575 - RNA, 19 nt, Artificial Sequence
  Description of Artificial Sequence: Synthetic oligonucleotide
  Sense strand starting at position 1313 of SEQ ID NO: 316712
gggaaacauuuccaaguua

SEQ ID NO: 434576 - RNA, 19 nt, Artificial Sequence
  Description of Artificial Sequence: Synthetic oligonucleotide
  Antisense Strand to SEQ ID NO: 434575
uaacuuggaaauguuuccc

SEQ ID NO: 434577 - RNA, 19 nt, Artificial Sequence
  Description of Artificial Sequence: Synthetic oligonucleotide
  Sense strand starting at position 1389 of SEQ ID NO: 316712
auaagcugaccuugggaau

SEQ ID NO: 434578 - RNA, 19 nt, Artificial Sequence
  Description of Artificial Sequence: Synthetic oligonucleotide
  Antisense Strand to SEQ ID NO: 434577
auucccaaggucagcuuau

SEQ ID NO: 434579 - RNA, 19 nt, Artificial Sequence
  Description of Artificial Sequence: Synthetic oligonucleotide
  Sense strand starting at position 1390 of SEQ ID NO: 316712
uaagcugaccuugggaaua

SEQ ID NO: 434580 - RNA, 19 nt, Artificial Sequence
  Description of Artificial Sequence: Synthetic oligonucleotide
  Antisense Strand to SEQ ID NO: 434579
uauucccaaggucagcuua

SEQ ID NO: 434581 - RNA, 19 nt, Artificial Sequence
  Description of Artificial Sequence: Synthetic oligonucleotide
  Sense strand starting at position 1510 of SEQ ID NO: 316712
gaaagauauuuacagaggu

SEQ ID NO: 434582 - RNA, 19 nt, Artificial Sequence
  Description of Artificial Sequence: Synthetic oligonucleotide
  Antisense Strand to SEQ ID NO: 434581
accucuguaaauaucuuuc

SEQ ID NO: 434583 - RNA, 19 nt, Artificial Sequence
  Description of Artificial Sequence: Synthetic oligonucleotide
  Sense strand starting at position 1646 of SEQ ID NO: 316712
uucuuaaguucucccagga

SEQ ID NO: 434584 - RNA, 19 nt, Artificial Sequence
  Description of Artificial Sequence: Synthetic oligonucleotide
  Antisense Strand to SEQ ID NO: 434583
uccugggagaacuuaagaa

SEQ ID NO: 434585 - RNA, 19 nt, Artificial Sequence
  Description of Artificial Sequence: Synthetic oligonucleotide
  Sense strand starting at position 2153 of SEQ ID NO: 316712
agucucagguaucuaaaca

SEQ ID NO: 434586 - RNA, 19 nt, Artificial Sequence
  Description of Artificial Sequence: Synthetic oligonucleotide
  Antisense Strand to SEQ ID NO: 434585
uguuuagauaccugagacu

SEQ ID NO: 434587 - RNA, 19 nt, Artificial Sequence
  Description of Artificial Sequence: Synthetic oligonucleotide
  Sense strand starting at position 2321 of SEQ ID NO: 316712
agugaugcuagugaaauua

SEQ ID NO: 434588 - RNA, 19 nt, Artificial Sequence
  Description of Artificial Sequence: Synthetic oligonucleotide
  Antisense Strand to SEQ ID NO: 434587
uaauuucacuagcaucacu

SEQ ID NO: 434589 - RNA, 19 nt, Artificial Sequence
  Description of Artificial Sequence: Synthetic oligonucleotide
  Sense strand starting at position 2331 of SEQ ID NO: 316712
gugaaauuauguuuaaacg

SEQ ID NO: 434590 - RNA, 19 nt, Artificial Sequence
  Description of Artificial Sequence: Synthetic oligonucleotide
  Antisense Strand to SEQ ID NO: 434589
cguuuaaacauaauuucac

SEQ ID NO: 434591 - RNA, 19 nt, Artificial Sequence
  Description of Artificial Sequence: Synthetic oligonucleotide
  Sense strand starting at position 2567 of SEQ ID NO: 316712
aucuguaaccaauguuaca

SEQ ID NO: 434592 - RNA, 19 nt, Artificial Sequence
  Description of Artificial Sequence: Synthetic oligonucleotide
  Antisense Strand to SEQ ID NO: 434591
uguaacauugguuacagau

SEQ ID NO: 434593 - RNA, 19 nt, Artificial Sequence
  Description of Artificial Sequence: Synthetic oligonucleotide
  Sense strand starting at position 2767 of SEQ ID NO: 316712
ugcuuaguaccugauagau

SEQ ID NO: 434594 - RNA, 19 nt, Artificial Sequence
  Description of Artificial Sequence: Synthetic oligonucleotide
  Antisense Strand to SEQ ID NO: 434593
aucuaucagguacuaagca

SEQ ID NO: 434595 - RNA, 19 nt, Artificial Sequence
  Description of Artificial Sequence: Synthetic oligonucleotide
  Sense strand starting at position 2873 of SEQ ID NO: 316712
guucccauuagagaugguu

SEQ ID NO: 434596 - RNA, 19 nt, Artificial Sequence
  Description of Artificial Sequence: Synthetic oligonucleotide
  Antisense Strand to SEQ ID NO: 434595
aaccaucucuaaugggaac

SEQ ID NO: 434597 - RNA, 19 nt, Artificial Sequence
  Description of Artificial Sequence: Synthetic oligonucleotide
  Sense strand starting at position 2876 of SEQ ID NO: 316712
cccauuagagaugguuaau

SEQ ID NO: 434598 - RNA, 19 nt, Artificial Sequence
  Description of Artificial Sequence: Synthetic oligonucleotide
  Antisense Strand to SEQ ID NO: 434597
auuaaccaucucuaauggg

SEQ ID NO: 434599 - RNA, 19 nt, Artificial Sequence
  Description of Artificial Sequence: Synthetic oligonucleotide
  Sense strand starting at position 2885 of SEQ ID NO: 316712
gaugguuaauaugucaaag

SEQ ID NO: 434600 - RNA, 19 nt, Artificial Sequence
  Description of Artificial Sequence: Synthetic oligonucleotide
  Antisense Strand to SEQ ID NO: 434599
cuuugacauauuaaccauc

SEQ ID NO: 434601 - RNA, 19 nt, Artificial Sequence
  Description of Artificial Sequence: Synthetic oligonucleotide
  Sense strand starting at position 3137 of SEQ ID NO: 316712
gcuuccuuucugcuauguu

SEQ ID NO: 434602 - RNA, 19 nt, Artificial Sequence
  Description of Artificial Sequence: Synthetic oligonucleotide
  Antisense Strand to SEQ ID NO: 434601
aacauagcagaaaggaagc

SEQ ID NO: 434603 - RNA, 19 nt, Artificial Sequence
  Description of Artificial Sequence: Synthetic oligonucleotide
  Sense strand starting at position 3176 of SEQ ID NO: 316712
cuauuaugcaaugggcaga

SEQ ID NO: 434604 - RNA, 19 nt, Artificial Sequence
  Description of Artificial Sequence: Synthetic oligonucleotide
  Antisense Strand to SEQ ID NO: 434603
ucugcccauugcauaauag

SEQ ID NO: 434605 - RNA, 19 nt, Artificial Sequence
  Description of Artificial Sequence: Synthetic oligonucleotide
  Sense strand starting at position 3354 of SEQ ID NO: 316712
uguagugucauagaccuga

SEQ ID NO: 434606 - RNA, 19 nt, Artificial Sequence
  Description of Artificial Sequence: Synthetic oligonucleotide
  Antisense Strand to SEQ ID NO: 434605
ucaggucuaugacacuaca

SEQ ID NO: 434607 - RNA, 19 nt, Artificial Sequence
  Description of Artificial Sequence: Synthetic oligonucleotide
  Sense strand starting at position 3398 of SEQ ID NO: 316712
ccaguuaugugaccuugga

SEQ ID NO: 434608 - RNA, 19 nt, Artificial Sequence
  Description of Artificial Sequence: Synthetic oligonucleotide
  Antisense Strand to SEQ ID NO: 434607
uccaaggucacauaacugg

SEQ ID NO: 434609 - RNA, 19 nt, Artificial Sequence
  Description of Artificial Sequence: Synthetic oligonucleotide
  Sense strand starting at position 3439 of SEQ ID NO: 316712
gguuuccucaguugagaaa

SEQ ID NO: 434610 - RNA, 19 nt, Artificial Sequence
  Description of Artificial Sequence: Synthetic oligonucleotide
  Antisense Strand to SEQ ID NO: 434609
uuucucaacugaggaaacc

SEQ ID NO: 434611 - RNA, 19 nt, Artificial Sequence
  Description of Artificial Sequence: Synthetic oligonucleotide
  Sense strand starting at position 3440 of SEQ ID NO: 316712
guuuccucaguugagaaau

SEQ ID NO: 434612 - RNA, 19 nt, Artificial Sequence
  Description of Artificial Sequence: Synthetic oligonucleotide
  Antisense Strand to SEQ ID NO: 434611
auuucucaacugaggaaac

SEQ ID NO: 434613 - RNA, 19 nt, Artificial Sequence
  Description of Artificial Sequence: Synthetic oligonucleotide
  Sense strand starting at position 3532 of SEQ ID NO: 316712
cccaucagguaguuaacaa

SEQ ID NO: 434614 - RNA, 19 nt, Artificial Sequence
  Description of Artificial Sequence: Synthetic oligonucleotide
  Antisense Strand to SEQ ID NO: 434613
uuguuaacuaccugauggg

SEQ ID NO: 434615 - RNA, 19 nt, Artificial Sequence
  Description of Artificial Sequence: Synthetic oligonucleotide
  Sense strand starting at position 3560 of SEQ ID NO: 316712
aggagucacugagauuuag

SEQ ID NO: 434616 - RNA, 19 nt, Artificial Sequence
  Description of Artificial Sequence: Synthetic oligonucleotide
  Antisense Strand to SEQ ID NO: 434615
cuaaaucucagugacuccu

SEQ ID NO: 434617 - RNA, 19 nt, Artificial Sequence
  Description of Artificial Sequence: Synthetic oligonucleotide
  Sense strand starting at position 3695 of SEQ ID NO: 316712
ugucaagggaacugauauc

SEQ ID NO: 434618 - RNA, 19 nt, Artificial Sequence
  Description of Artificial Sequence: Synthetic oligonucleotide
  Antisense Strand to SEQ ID NO: 434617
gauaucaguucccuugaca

SEQ ID NO: 434619 - RNA, 19 nt, Artificial Sequence
  Description of Artificial Sequence: Synthetic oligonucleotide
  Sense strand starting at position 3735 of SEQ ID NO: 316712
ccauguuucgcaguagcua

SEQ ID NO: 434620 - RNA, 19 nt, Artificial Sequence
  Description of Artificial Sequence: Synthetic oligonucleotide
  Antisense Strand to SEQ ID NO: 434619
uagcuacugcgaaacaugg

SEQ ID NO: 434621 - RNA, 19 nt, Artificial Sequence
  Description of Artificial Sequence: Synthetic oligonucleotide
  Sense strand starting at position 3838 of SEQ ID NO: 316712
gagagaauguuaguuaugu

SEQ ID NO: 434622 - RNA, 19 nt, Artificial Sequence
  Description of Artificial Sequence: Synthetic oligonucleotide
  Antisense Strand to SEQ ID NO: 434621
acauaacuaacauucucuc

SEQ ID NO: 434623 - RNA, 19 nt, Artificial Sequence
  Description of Artificial Sequence: Synthetic oligonucleotide
  Sense strand starting at position 3839 of SEQ ID NO: 316712
agagaauguuaguuaugug

SEQ ID NO: 434624 - RNA, 19 nt, Artificial Sequence
  Description of Artificial Sequence: Synthetic oligonucleotide
  Antisense Strand to SEQ ID NO: 434623
cacauaacuaacauucucu

SEQ ID NO: 434625 - RNA, 19 nt, Artificial Sequence
  Description of Artificial Sequence: Synthetic oligonucleotide
  Sense strand starting at position 3840 of SEQ ID NO: 316712
gagaauguuaguuaugugu

SEQ ID NO: 434626 - RNA, 19 nt, Artificial Sequence
  Description of Artificial Sequence: Synthetic oligonucleotide
  Antisense Strand to SEQ ID NO: 434625
acacauaacuaacauucuc

SEQ ID NO: 434627 - RNA, 19 nt, Artificial Sequence
  Description of Artificial Sequence: Synthetic oligonucleotide
  Sense strand starting at position 3888 of SEQ ID NO: 316712
guguuucaagaaugagaug

SEQ ID NO: 434628 - RNA, 19 nt, Artificial Sequence
  Description of Artificial Sequence: Synthetic oligonucleotide
  Antisense Strand to SEQ ID NO: 434627
caucucauucuugaaacac

SEQ ID NO: 434629 - RNA, 19 nt, Artificial Sequence
  Description of Artificial Sequence: Synthetic oligonucleotide
  Sense strand starting at position 208 of SEQ ID NO: 316713
cacgacaaaugcucaguaa

SEQ ID NO: 434630 - RNA, 19 nt, Artificial Sequence
  Description of Artificial Sequence: Synthetic oligonucleotide
  Antisense Strand to SEQ ID NO: 434629
uuacugagcauuugucgug

SEQ ID NO: 434631 - RNA, 19 nt, Artificial Sequence
  Description of Artificial Sequence: Synthetic oligonucleotide
  Sense strand starting at position 209 of SEQ ID NO: 316713
acgacaaaugcucaguaaa

SEQ ID NO: 434632 - RNA, 19 nt, Artificial Sequence
  Description of Artificial Sequence: Synthetic oligonucleotide
  Antisense Strand to SEQ ID NO: 434631
uuuacugagcauuugucgu

SEQ ID NO: 434633 - RNA, 19 nt, Artificial Sequence
  Description of Artificial Sequence: Synthetic oligonucleotide
  Sense strand starting at position 270 of SEQ ID NO: 316713
ucauccuucuauuucguua

SEQ ID NO: 434634 - RNA, 19 nt, Artificial Sequence
  Description of Artificial Sequence: Synthetic oligonucleotide
  Antisense Strand to SEQ ID NO: 434633
uaacgaaauagaaggauga

SEQ ID NO: 434635 - RNA, 19 nt, Artificial Sequence
  Description of Artificial Sequence: Synthetic oligonucleotide
  Sense strand starting at position 440 of SEQ ID NO: 316713
gcacauuaggcacauacua

SEQ ID NO: 434636 - RNA, 19 nt, Artificial Sequence
  Description of Artificial Sequence: Synthetic oligonucleotide
  Antisense Strand to SEQ ID NO: 434635
uaguaugugccuaaugugc

SEQ ID NO: 434637 - RNA, 19 nt, Artificial Sequence
  Description of Artificial Sequence: Synthetic oligonucleotide
  Sense strand starting at position 460 of SEQ ID NO: 316713
cuguuuauuagguaaaggu

SEQ ID NO: 434638 - RNA, 19 nt, Artificial Sequence
  Description of Artificial Sequence: Synthetic oligonucleotide
  Antisense Strand to SEQ ID NO: 434637
accuuuaccuaauaaacag

SEQ ID NO: 434639 - RNA, 19 nt, Artificial Sequence
  Description of Artificial Sequence: Synthetic oligonucleotide
  Sense strand starting at position 483 of SEQ ID NO: 316713
gguuacagaucaccuuaga

SEQ ID NO: 434640 - RNA, 19 nt, Artificial Sequence
  Description of Artificial Sequence: Synthetic oligonucleotide
  Antisense Strand to SEQ ID NO: 434639
ucuaaggugaucuguaacc

SEQ ID NO: 434641 - RNA, 19 nt, Artificial Sequence
  Description of Artificial Sequence: Synthetic oligonucleotide
  Sense strand starting at position 512 of SEQ ID NO: 316713
agaugaguugcuugagaaa

SEQ ID NO: 434642 - RNA, 19 nt, Artificial Sequence
  Description of Artificial Sequence: Synthetic oligonucleotide
  Antisense Strand to SEQ ID NO: 434641
uuucucaagcaacucaucu

SEQ ID NO: 434643 - RNA, 19 nt, Artificial Sequence
  Description of Artificial Sequence: Synthetic oligonucleotide
  Sense strand starting at position 608 of SEQ ID NO: 316713
gcugacaaugacugacaua

SEQ ID NO: 434644 - RNA, 19 nt, Artificial Sequence
  Description of Artificial Sequence: Synthetic oligonucleotide
  Antisense Strand to SEQ ID NO: 434643
uaugucagucauugucagc

SEQ ID NO: 434645 - RNA, 19 nt, Artificial Sequence
  Description of Artificial Sequence: Synthetic oligonucleotide
  Sense strand starting at position 629 of SEQ ID NO: 316713
ggaaaugaaacccgucuua

SEQ ID NO: 434646 - RNA, 19 nt, Artificial Sequence
  Description of Artificial Sequence: Synthetic oligonucleotide
  Antisense Strand to SEQ ID NO: 434645
uaagacggguuucauuucc

SEQ ID NO: 434647 - RNA, 19 nt, Artificial Sequence
  Description of Artificial Sequence: Synthetic oligonucleotide
  Sense strand starting at position 712 of SEQ ID NO: 316713
acuagaguuaagggcaauu

SEQ ID NO: 434648 - RNA, 19 nt, Artificial Sequence
  Description of Artificial Sequence: Synthetic oligonucleotide
  Antisense Strand to SEQ ID NO: 434647
aauugcccuuaacucuagu

SEQ ID NO: 434649 - RNA, 19 nt, Artificial Sequence
  Description of Artificial Sequence: Synthetic oligonucleotide
  Sense strand starting at position 829 of SEQ ID NO: 316713
agauacauagucugaugau

SEQ ID NO: 434650 - RNA, 19 nt, Artificial Sequence
  Description of Artificial Sequence: Synthetic oligonucleotide
  Antisense Strand to SEQ ID NO: 434649
aucaucagacuauguaucu

SEQ ID NO: 434651 - RNA, 19 nt, Artificial Sequence
  Description of Artificial Sequence: Synthetic oligonucleotide
  Sense strand starting at position 856 of SEQ ID NO: 316713
gugugaggacucgggacau

SEQ ID NO: 434652 - RNA, 19 nt, Artificial Sequence
  Description of Artificial Sequence: Synthetic oligonucleotide
  Antisense Strand to SEQ ID NO: 434651
augucccgaguccucacac

SEQ ID NO: 434653 - RNA, 19 nt, Artificial Sequence
  Description of Artificial Sequence: Synthetic oligonucleotide
  Sense strand starting at position 1200 of SEQ ID NO: 316713
agcacauucguuuaauaau

SEQ ID NO: 434654 - RNA, 19 nt, Artificial Sequence
  Description of Artificial Sequence: Synthetic oligonucleotide
  Antisense Strand to SEQ ID NO: 434653
auuauuaaacgaaugugcu

SEQ ID NO: 434655 - RNA, 19 nt, Artificial Sequence
  Description of Artificial Sequence: Synthetic oligonucleotide
  Sense strand starting at position 1481 of SEQ ID NO: 316713
acuccucuugaguauggau

SEQ ID NO: 434656 - RNA, 19 nt, Artificial Sequence
  Description of Artificial Sequence: Synthetic oligonucleotide
  Antisense Strand to SEQ ID NO: 434655
auccauacucaagaggagu

SEQ ID NO: 434657 - RNA, 19 nt, Artificial Sequence
  Description of Artificial Sequence: Synthetic oligonucleotide
  Sense strand starting at position 1489 of SEQ ID NO: 316713
ugaguauggaucuauagcu

SEQ ID NO: 434658 - RNA, 19 nt, Artificial Sequence
  Description of Artificial Sequence: Synthetic oligonucleotide
  Antisense Strand to SEQ ID NO: 434657
agcuauagauccauacuca

SEQ ID NO: 434659 - RNA, 19 nt, Artificial Sequence
  Description of Artificial Sequence: Synthetic oligonucleotide
  Sense strand starting at position 1494 of SEQ ID NO: 316713
auggaucuauagcuaugaa

SEQ ID NO: 434660 - RNA, 19 nt, Artificial Sequence
  Description of Artificial Sequence: Synthetic oligonucleotide
  Antisense Strand to SEQ ID NO: 434659
uucauagcuauagauccau

SEQ ID NO: 434661 - RNA, 19 nt, Artificial Sequence
  Description of Artificial Sequence: Synthetic oligonucleotide
  Sense strand starting at position 1497 of SEQ ID NO: 316713
gaucuauagcuaugaagga

SEQ ID NO: 434662 - RNA, 19 nt, Artificial Sequence
  Description of Artificial Sequence: Synthetic oligonucleotide
  Antisense Strand to SEQ ID NO: 434661
uccuucauagcuauagauc

SEQ ID NO: 434663 - RNA, 19 nt, Artificial Sequence
  Description of Artificial Sequence: Synthetic oligonucleotide
  Sense strand starting at position 1623 of SEQ ID NO: 316713
aguuguguuauugacuaag

SEQ ID NO: 434664 - RNA, 19 nt, Artificial Sequence
  Description of Artificial Sequence: Synthetic oligonucleotide
  Antisense Strand to SEQ ID NO: 434663
cuuagucaauaacacaacu

SEQ ID NO: 434665 - RNA, 19 nt, Artificial Sequence
  Description of Artificial Sequence: Synthetic oligonucleotide
  Sense strand starting at position 1742 of SEQ ID NO: 316713
ccugaagacguuuaucaau

SEQ ID NO: 434666 - RNA, 19 nt, Artificial Sequence
  Description of Artificial Sequence: Synthetic oligonucleotide
  Antisense Strand to SEQ ID NO: 434665
auugauaaacgucuucagg

SEQ ID NO: 434667 - RNA, 19 nt, Artificial Sequence
  Description of Artificial Sequence: Synthetic oligonucleotide
  Sense strand starting at position 1748 of SEQ ID NO: 316713
gacguuuaucaauggagag

SEQ ID NO: 434668 - RNA, 19 nt, Artificial Sequence
  Description of Artificial Sequence: Synthetic oligonucleotide
  Antisense Strand to SEQ ID NO: 434667
cucuccauugauaaacguc

SEQ ID NO: 434669 - RNA, 19 nt, Artificial Sequence
  Description of Artificial Sequence: Synthetic oligonucleotide
  Sense strand starting at position 1749 of SEQ ID NO: 316713
acguuuaucaauggagaga

SEQ ID NO: 434670 - RNA, 19 nt, Artificial Sequence
  Description of Artificial Sequence: Synthetic oligonucleotide
  Antisense Strand to SEQ ID NO: 434669
ucucuccauugauaaacgu

SEQ ID NO: 434671 - RNA, 19 nt, Artificial Sequence
  Description of Artificial Sequence: Synthetic oligonucleotide
  Sense strand starting at position 2020 of SEQ ID NO: 316713
agaucuccugauuguuuga

SEQ ID NO: 434672 - RNA, 19 nt, Artificial Sequence
  Description of Artificial Sequence: Synthetic oligonucleotide
  Antisense Strand to SEQ ID NO: 434671
ucaaacaaucaggagaucu

SEQ ID NO: 434673 - RNA, 19 nt, Artificial Sequence
  Description of Artificial Sequence: Synthetic oligonucleotide
  Sense strand starting at position 2047 of SEQ ID NO: 316713
gaaagaagacgucgacauu

SEQ ID NO: 434674 - RNA, 19 nt, Artificial Sequence
  Description of Artificial Sequence: Synthetic oligonucleotide
  Antisense Strand to SEQ ID NO: 434673
aaugucgacgucuucuuuc

SEQ ID NO: 434675 - RNA, 19 nt, Artificial Sequence
  Description of Artificial Sequence: Synthetic oligonucleotide
  Sense strand starting at position 2050 of SEQ ID NO: 316713
agaagacgucgacauuaca

SEQ ID NO: 434676 - RNA, 19 nt, Artificial Sequence
  Description of Artificial Sequence: Synthetic oligonucleotide
  Antisense Strand to SEQ ID NO: 434675
uguaaugucgacgucuucu

SEQ ID NO: 434677 - RNA, 19 nt, Artificial Sequence
  Description of Artificial Sequence: Synthetic oligonucleotide
  Sense strand starting at position 2269 of SEQ ID NO: 316713
uuuacaggauguucuuaga

SEQ ID NO: 434678 - RNA, 19 nt, Artificial Sequence
  Description of Artificial Sequence: Synthetic oligonucleotide
  Antisense Strand to SEQ ID NO: 434677
ucuaagaacauccuguaaa

SEQ ID NO: 434679 - RNA, 19 nt, Artificial Sequence
  Description of Artificial Sequence: Synthetic oligonucleotide
  Sense strand starting at position 2495 of SEQ ID NO: 316713
ggacauggcccuuaauguu

SEQ ID NO: 434680 - RNA, 19 nt, Artificial Sequence
  Description of Artificial Sequence: Synthetic oligonucleotide
  Antisense Strand to SEQ ID NO: 434679
aacauuaagggccaugucc

SEQ ID NO: 434681 - RNA, 19 nt, Artificial Sequence
  Description of Artificial Sequence: Synthetic oligonucleotide
  Sense strand starting at position 2581 of SEQ ID NO: 316713
gugguaaucucucugaaag

SEQ ID NO: 434682 - RNA, 19 nt, Artificial Sequence
  Description of Artificial Sequence: Synthetic oligonucleotide
  Antisense Strand to SEQ ID NO: 434681
cuuucagagagauuaccac

SEQ ID NO: 434683 - RNA, 19 nt, Artificial Sequence
  Description of Artificial Sequence: Synthetic oligonucleotide
  Sense strand starting at position 2723 of SEQ ID NO: 316713
gaaaccauugagugacuuu

SEQ ID NO: 434684 - RNA, 19 nt, Artificial Sequence
  Description of Artificial Sequence: Synthetic oligonucleotide
  Antisense Strand to SEQ ID NO: 434683
aaagucacucaaugguuuc

SEQ ID NO: 434685 - RNA, 19 nt, Artificial Sequence
  Description of Artificial Sequence: Synthetic oligonucleotide
  Sense strand starting at position 2756 of SEQ ID NO: 316713
ggaguauaguggccaggaa

SEQ ID NO: 434686 - RNA, 19 nt, Artificial Sequence
  Description of Artificial Sequence: Synthetic oligonucleotide
  Antisense Strand to SEQ ID NO: 434685
uuccuggccacuauacucc

SEQ ID NO: 434687 - RNA, 19 nt, Artificial Sequence
  Description of Artificial Sequence: Synthetic oligonucleotide
  Sense strand starting at position 2757 of SEQ ID NO: 316713
gaguauaguggccaggaaa

SEQ ID NO: 434688 - RNA, 19 nt, Artificial Sequence
  Description of Artificial Sequence: Synthetic oligonucleotide
  Antisense Strand to SEQ ID NO: 434687
uuuccuggccacuauacuc

SEQ ID NO: 434689 - RNA, 19 nt, Artificial Sequence
  Description of Artificial Sequence: Synthetic oligonucleotide
  Sense strand starting at position 2857 of SEQ ID NO: 316713
cuuaacaugugccucagaa

SEQ ID NO: 434690 - RNA, 19 nt, Artificial Sequence
  Description of Artificial Sequence: Synthetic oligonucleotide
  Antisense Strand to SEQ ID NO: 434689
uucugaggcacauguuaag

SEQ ID NO: 434691 - RNA, 19 nt, Artificial Sequence
  Description of Artificial Sequence: Synthetic oligonucleotide
  Sense strand starting at position 2859 of SEQ ID NO: 316713
uaacaugugccucagaaag

SEQ ID NO: 434692 - RNA, 19 nt, Artificial Sequence
  Description of Artificial Sequence: Synthetic oligonucleotide
  Antisense Strand to SEQ ID NO: 434691
cuuucugaggcacauguua

SEQ ID NO: 434693 - RNA, 19 nt, Artificial Sequence
  Description of Artificial Sequence: Synthetic oligonucleotide
  Sense strand starting at position 2975 of SEQ ID NO: 316713
acaguugacucacugggua

SEQ ID NO: 434694 - RNA, 19 nt, Artificial Sequence
  Description of Artificial Sequence: Synthetic oligonucleotide
  Antisense Strand to SEQ ID NO: 434693
uacccagugagucaacugu

SEQ ID NO: 434695 - RNA, 19 nt, Artificial Sequence
  Description of Artificial Sequence: Synthetic oligonucleotide
  Sense strand starting at position 3034 of SEQ ID NO: 316713
guuagaaucaaaugaggug

SEQ ID NO: 434696 - RNA, 19 nt, Artificial Sequence
  Description of Artificial Sequence: Synthetic oligonucleotide
  Antisense Strand to SEQ ID NO: 434695
caccucauuugauucuaac

SEQ ID NO: 434697 - RNA, 19 nt, Artificial Sequence
  Description of Artificial Sequence: Synthetic oligonucleotide
  Sense strand starting at position 3049 of SEQ ID NO: 316713
gguguuuaucaagauagug

SEQ ID NO: 434698 - RNA, 19 nt, Artificial Sequence
  Description of Artificial Sequence: Synthetic oligonucleotide
  Antisense Strand to SEQ ID NO: 434697
cacuaucuugauaaacacc

SEQ ID NO: 434699 - RNA, 19 nt, Artificial Sequence
  Description of Artificial Sequence: Synthetic oligonucleotide
  Sense strand starting at position 3194 of SEQ ID NO: 316713
ggaggucauuaggucacaa

SEQ ID NO: 434700 - RNA, 19 nt, Artificial Sequence
  Description of Artificial Sequence: Synthetic oligonucleotide
  Antisense Strand to SEQ ID NO: 434699
uugugaccuaaugaccucc

SEQ ID NO: 434701 - RNA, 19 nt, Artificial Sequence
  Description of Artificial Sequence: Synthetic oligonucleotide
  Sense strand starting at position 3312 of SEQ ID NO: 316713
uagcauuugucccucugga

SEQ ID NO: 434702 - RNA, 19 nt, Artificial Sequence
  Description of Artificial Sequence: Synthetic oligonucleotide
  Antisense Strand to SEQ ID NO: 434701
uccagagggacaaaugcua

SEQ ID NO: 434703 - RNA, 19 nt, Artificial Sequence
  Description of Artificial Sequence: Synthetic oligonucleotide
  Sense strand starting at position 3480 of SEQ ID NO: 316713
uuguuauagcaguacuaau

SEQ ID NO: 434704 - RNA, 19 nt, Artificial Sequence
  Description of Artificial Sequence: Synthetic oligonucleotide
  Antisense Strand to SEQ ID NO: 434703
auuaguacugcuauaacaa

SEQ ID NO: 434705 - RNA, 19 nt, Artificial Sequence
  Description of Artificial Sequence: Synthetic oligonucleotide
  Sense strand starting at position 3491 of SEQ ID NO: 316713
guacuaaugggcugagaca

SEQ ID NO: 434706 - RNA, 19 nt, Artificial Sequence
  Description of Artificial Sequence: Synthetic oligonucleotide
  Antisense Strand to SEQ ID NO: 434705
ugucucagcccauuaguac

SEQ ID NO: 434707 - RNA, 19 nt, Artificial Sequence
  Description of Artificial Sequence: Synthetic oligonucleotide
  Sense strand starting at position 3816 of SEQ ID NO: 316713
cacaaaugggaaugucuuu

SEQ ID NO: 434708 - RNA, 19 nt, Artificial Sequence
  Description of Artificial Sequence: Synthetic oligonucleotide
  Antisense Strand to SEQ ID NO: 434707
aaagacauucccauuugug

SEQ ID NO: 434709 - RNA, 19 nt, Artificial Sequence
  Description of Artificial Sequence: Synthetic oligonucleotide
  Sense strand starting at position 26 of SEQ ID NO: 316714
ugagaucccuuuguaaaua

SEQ ID NO: 434710 - RNA, 19 nt, Artificial Sequence
  Description of Artificial Sequence: Synthetic oligonucleotide
  Antisense Strand to SEQ ID NO: 434709
uauuuacaaagggaucuca

SEQ ID NO: 434711 - RNA, 19 nt, Artificial Sequence
  Description of Artificial Sequence: Synthetic oligonucleotide
  Sense strand starting at position 66 of SEQ ID NO: 316714
guaaguagacuccaaguau

SEQ ID NO: 434712 - RNA, 19 nt, Artificial Sequence
  Description of Artificial Sequence: Synthetic oligonucleotide
  Antisense Strand to SEQ ID NO: 434711
auacuuggagucuacuuac

SEQ ID NO: 434713 - RNA, 19 nt, Artificial Sequence
  Description of Artificial Sequence: Synthetic oligonucleotide
  Sense strand starting at position 152 of SEQ ID NO: 316714
acaggauagugauuccuca

SEQ ID NO: 434714 - RNA, 19 nt, Artificial Sequence
  Description of Artificial Sequence: Synthetic oligonucleotide
  Antisense Strand to SEQ ID NO: 434713
ugaggaaucacuauccugu

SEQ ID NO: 434715 - RNA, 19 nt, Artificial Sequence
  Description of Artificial Sequence: Synthetic oligonucleotide
  Sense strand starting at position 310 of SEQ ID NO: 316714
gccauaucugcagcguuau

SEQ ID NO: 434716 - RNA, 19 nt, Artificial Sequence
  Description of Artificial Sequence: Synthetic oligonucleotide
  Antisense Strand to SEQ ID NO: 434715
auaacgcugcagauauggc

SEQ ID NO: 434717 - RNA, 19 nt, Artificial Sequence
  Description of Artificial Sequence: Synthetic oligonucleotide
  Sense strand starting at position 361 of SEQ ID NO: 316714
uguccauggaaaggugaau

SEQ ID NO: 434718 - RNA, 19 nt, Artificial Sequence
  Description of Artificial Sequence: Synthetic oligonucleotide
  Antisense Strand to SEQ ID NO: 434717
auucaccuuuccauggaca

SEQ ID NO: 434719 - RNA, 19 nt, Artificial Sequence
  Description of Artificial Sequence: Synthetic oligonucleotide
  Sense strand starting at position 579 of SEQ ID NO: 316714
uagaauacucacuguugga

SEQ ID NO: 434720 - RNA, 19 nt, Artificial Sequence
  Description of Artificial Sequence: Synthetic oligonucleotide
  Antisense Strand to SEQ ID NO: 434719
uccaacagugaguauucua

SEQ ID NO: 434721 - RNA, 19 nt, Artificial Sequence
  Description of Artificial Sequence: Synthetic oligonucleotide
  Sense strand starting at position 628 of SEQ ID NO: 316714
ugguuucauggguauagag

SEQ ID NO: 434722 - RNA, 19 nt, Artificial Sequence
  Description of Artificial Sequence: Synthetic oligonucleotide
  Antisense Strand to SEQ ID NO: 434721
cucuauacccaugaaacca

SEQ ID NO: 434723 - RNA, 19 nt, Artificial Sequence
  Description of Artificial Sequence: Synthetic oligonucleotide
  Sense strand starting at position 665 of SEQ ID NO: 316714
cgaagaaguccuggagaga

SEQ ID NO: 434724 - RNA, 19 nt, Artificial Sequence
  Description of Artificial Sequence: Synthetic oligonucleotide
  Antisense Strand to SEQ ID NO: 434723
ucucuccaggacuucuucg

SEQ ID NO: 434725 - RNA, 19 nt, Artificial Sequence
  Description of Artificial Sequence: Synthetic oligonucleotide
  Sense strand starting at position 724 of SEQ ID NO: 316714
ugcagaaccguacacauaa

SEQ ID NO: 434726 - RNA, 19 nt, Artificial Sequence
  Description of Artificial Sequence: Synthetic oligonucleotide
  Antisense Strand to SEQ ID NO: 434725
uuauguguacgguucugca

SEQ ID NO: 434727 - RNA, 19 nt, Artificial Sequence
  Description of Artificial Sequence: Synthetic oligonucleotide
  Sense strand starting at position 823 of SEQ ID NO: 316714
gggagagcccaguauucuu

SEQ ID NO: 434728 - RNA, 19 nt, Artificial Sequence
  Description of Artificial Sequence: Synthetic oligonucleotide
  Antisense Strand to SEQ ID NO: 434727
aagaauacugggcucuccc

SEQ ID NO: 434729 - RNA, 19 nt, Artificial Sequence
  Description of Artificial Sequence: Synthetic oligonucleotide
  Sense strand starting at position 831 of SEQ ID NO: 316714
ccaguauucuuauuucugu

SEQ ID NO: 434730 - RNA, 19 nt, Artificial Sequence
  Description of Artificial Sequence: Synthetic oligonucleotide
  Antisense Strand to SEQ ID NO: 434729
acagaaauaagaauacugg

SEQ ID NO: 434731 - RNA, 19 nt, Artificial Sequence
  Description of Artificial Sequence: Synthetic oligonucleotide
  Sense strand starting at position 1031 of SEQ ID NO: 316714
cccuacaucaugugaggga

SEQ ID NO: 434732 - RNA, 19 nt, Artificial Sequence
  Description of Artificial Sequence: Synthetic oligonucleotide
  Antisense Strand to SEQ ID NO: 434731
ucccucacaugauguaggg

SEQ ID NO: 434733 - RNA, 19 nt, Artificial Sequence
  Description of Artificial Sequence: Synthetic oligonucleotide
  Sense strand starting at position 1474 of SEQ ID NO: 316714
augcaaacucuaggacaga

SEQ ID NO: 434734 - RNA, 19 nt, Artificial Sequence
  Description of Artificial Sequence: Synthetic oligonucleotide
  Antisense Strand to SEQ ID NO: 434733
ucuguccuagaguuugcau

SEQ ID NO: 434735 - RNA, 19 nt, Artificial Sequence
  Description of Artificial Sequence: Synthetic oligonucleotide
  Sense strand starting at position 1581 of SEQ ID NO: 316714
uacuuuauggcacagugau

SEQ ID NO: 434736 - RNA, 19 nt, Artificial Sequence
  Description of Artificial Sequence: Synthetic oligonucleotide
  Antisense Strand to SEQ ID NO: 434735
aucacugugccauaaagua

SEQ ID NO: 434737 - RNA, 19 nt, Artificial Sequence
  Description of Artificial Sequence: Synthetic oligonucleotide
  Sense strand starting at position 1726 of SEQ ID NO: 316714
acuugucuaugguuagaaa

SEQ ID NO: 434738 - RNA, 19 nt, Artificial Sequence
  Description of Artificial Sequence: Synthetic oligonucleotide
  Antisense Strand to SEQ ID NO: 434737
uuucuaaccauagacaagu

SEQ ID NO: 434739 - RNA, 19 nt, Artificial Sequence
  Description of Artificial Sequence: Synthetic oligonucleotide
  Sense strand starting at position 1727 of SEQ ID NO: 316714
cuugucuaugguuagaaag

SEQ ID NO: 434740 - RNA, 19 nt, Artificial Sequence
  Description of Artificial Sequence: Synthetic oligonucleotide
  Antisense Strand to SEQ ID NO: 434739
cuuucuaaccauagacaag

SEQ ID NO: 434741 - RNA, 19 nt, Artificial Sequence
  Description of Artificial Sequence: Synthetic oligonucleotide
  Sense strand starting at position 1748 of SEQ ID NO: 316714
agugucaguccagagacuu

SEQ ID NO: 434742 - RNA, 19 nt, Artificial Sequence
  Description of Artificial Sequence: Synthetic oligonucleotide
  Antisense Strand to SEQ ID NO: 434741
aagucucuggacugacacu

SEQ ID NO: 434743 - RNA, 19 nt, Artificial Sequence
  Description of Artificial Sequence: Synthetic oligonucleotide
  Sense strand starting at position 1803 of SEQ ID NO: 316714
gagccaucuguuuaauaag

SEQ ID NO: 434744 - RNA, 19 nt, Artificial Sequence
  Description of Artificial Sequence: Synthetic oligonucleotide
  Antisense Strand to SEQ ID NO: 434743
cuuauuaaacagauggcuc

SEQ ID NO: 434745 - RNA, 19 nt, Artificial Sequence
  Description of Artificial Sequence: Synthetic oligonucleotide
  Sense strand starting at position 2266 of SEQ ID NO: 316714
cugagugaauguuucagga

SEQ ID NO: 434746 - RNA, 19 nt, Artificial Sequence
  Description of Artificial Sequence: Synthetic oligonucleotide
  Antisense Strand to SEQ ID NO: 434745
uccugaaacauucacucag

SEQ ID NO: 434747 - RNA, 19 nt, Artificial Sequence
  Description of Artificial Sequence: Synthetic oligonucleotide
  Sense strand starting at position 2291 of SEQ ID NO: 316714
uuacucacugacuggaaau

SEQ ID NO: 434748 - RNA, 19 nt, Artificial Sequence
  Description of Artificial Sequence: Synthetic oligonucleotide
  Antisense Strand to SEQ ID NO: 434747
auuuccagucagugaguaa

SEQ ID NO: 434749 - RNA, 19 nt, Artificial Sequence
  Description of Artificial Sequence: Synthetic oligonucleotide
  Sense strand starting at position 2301 of SEQ ID NO: 316714
acuggaaauuaguuguuaa

SEQ ID NO: 434750 - RNA, 19 nt, Artificial Sequence
  Description of Artificial Sequence: Synthetic oligonucleotide
  Antisense Strand to SEQ ID NO: 434749
uuaacaacuaauuuccagu

SEQ ID NO: 434751 - RNA, 19 nt, Artificial Sequence
  Description of Artificial Sequence: Synthetic oligonucleotide
  Sense strand starting at position 2304 of SEQ ID NO: 316714
ggaaauuaguuguuaacuu

SEQ ID NO: 434752 - RNA, 19 nt, Artificial Sequence
  Description of Artificial Sequence: Synthetic oligonucleotide
  Antisense Strand to SEQ ID NO: 434751
aaguuaacaacuaauuucc

SEQ ID NO: 434753 - RNA, 19 nt, Artificial Sequence
  Description of Artificial Sequence: Synthetic oligonucleotide
  Sense strand starting at position 2603 of SEQ ID NO: 316714
gcagaaugauucuccaaag

SEQ ID NO: 434754 - RNA, 19 nt, Artificial Sequence
  Description of Artificial Sequence: Synthetic oligonucleotide
  Antisense Strand to SEQ ID NO: 434753
cuuuggagaaucauucugc

SEQ ID NO: 434755 - RNA, 19 nt, Artificial Sequence
  Description of Artificial Sequence: Synthetic oligonucleotide
  Sense strand starting at position 2661 of SEQ ID NO: 316714
uuccuucugcuauguauuu

SEQ ID NO: 434756 - RNA, 19 nt, Artificial Sequence
  Description of Artificial Sequence: Synthetic oligonucleotide
  Antisense Strand to SEQ ID NO: 434755
aaauacauagcagaaggaa

SEQ ID NO: 434757 - RNA, 19 nt, Artificial Sequence
  Description of Artificial Sequence: Synthetic oligonucleotide
  Sense strand starting at position 2666 of SEQ ID NO: 316714
ucugcuauguauuucuuau

SEQ ID NO: 434758 - RNA, 19 nt, Artificial Sequence
  Description of Artificial Sequence: Synthetic oligonucleotide
  Antisense Strand to SEQ ID NO: 434757
auaagaaauacauagcaga

SEQ ID NO: 434759 - RNA, 19 nt, Artificial Sequence
  Description of Artificial Sequence: Synthetic oligonucleotide
  Sense strand starting at position 2808 of SEQ ID NO: 316714
aaaggaauguuuccagagu

SEQ ID NO: 434760 - RNA, 19 nt, Artificial Sequence
  Description of Artificial Sequence: Synthetic oligonucleotide
  Antisense Strand to SEQ ID NO: 434759
acucuggaaacauuccuuu

SEQ ID NO: 434761 - RNA, 19 nt, Artificial Sequence
  Description of Artificial Sequence: Synthetic oligonucleotide
  Sense strand starting at position 2815 of SEQ ID NO: 316714
uguuuccagaguuagugaa

SEQ ID NO: 434762 - RNA, 19 nt, Artificial Sequence
  Description of Artificial Sequence: Synthetic oligonucleotide
  Antisense Strand to SEQ ID NO: 434761
uucacuaacucuggaaaca

SEQ ID NO: 434763 - RNA, 19 nt, Artificial Sequence
  Description of Artificial Sequence: Synthetic oligonucleotide
  Sense strand starting at position 2849 of SEQ ID NO: 316714
acacuugaccaacgagauu

SEQ ID NO: 434764 - RNA, 19 nt, Artificial Sequence
  Description of Artificial Sequence: Synthetic oligonucleotide
  Antisense Strand to SEQ ID NO: 434763
aaucucguuggucaagugu

SEQ ID NO: 434765 - RNA, 19 nt, Artificial Sequence
  Description of Artificial Sequence: Synthetic oligonucleotide
  Sense strand starting at position 2927 of SEQ ID NO: 316714
aggaaaugguccuuugaau

SEQ ID NO: 434766 - RNA, 19 nt, Artificial Sequence
  Description of Artificial Sequence: Synthetic oligonucleotide
  Antisense Strand to SEQ ID NO: 434765
auucaaaggaccauuuccu

SEQ ID NO: 434767 - RNA, 19 nt, Artificial Sequence
  Description of Artificial Sequence: Synthetic oligonucleotide
  Sense strand starting at position 2941 of SEQ ID NO: 316714
ugaauuuguuggcuuucca

SEQ ID NO: 434768 - RNA, 19 nt, Artificial Sequence
  Description of Artificial Sequence: Synthetic oligonucleotide
  Antisense Strand to SEQ ID NO: 434767
uggaaagccaacaaauuca

SEQ ID NO: 434769 - RNA, 19 nt, Artificial Sequence
  Description of Artificial Sequence: Synthetic oligonucleotide
  Sense strand starting at position 2963 of SEQ ID NO: 316714
ucuuaaugccaucauagga

SEQ ID NO: 434770 - RNA, 19 nt, Artificial Sequence
  Description of Artificial Sequence: Synthetic oligonucleotide
  Antisense Strand to SEQ ID NO: 434769
uccuaugauggcauuaaga

SEQ ID NO: 434771 - RNA, 19 nt, Artificial Sequence
  Description of Artificial Sequence: Synthetic oligonucleotide
  Sense strand starting at position 2971 of SEQ ID NO: 316714
ccaucauaggauggucaaa

SEQ ID NO: 434772 - RNA, 19 nt, Artificial Sequence
  Description of Artificial Sequence: Synthetic oligonucleotide
  Antisense Strand to SEQ ID NO: 434771
uuugaccauccuaugaugg

SEQ ID NO: 434773 - RNA, 19 nt, Artificial Sequence
  Description of Artificial Sequence: Synthetic oligonucleotide
  Sense strand starting at position 2991 of SEQ ID NO: 316714
caaugucuugagcauagaa

SEQ ID NO: 434774 - RNA, 19 nt, Artificial Sequence
  Description of Artificial Sequence: Synthetic oligonucleotide
  Antisense Strand to SEQ ID NO: 434773
uucuaugcucaagacauug

SEQ ID NO: 434775 - RNA, 19 nt, Artificial Sequence
  Description of Artificial Sequence: Synthetic oligonucleotide
  Sense strand starting at position 3095 of SEQ ID NO: 316714
gguuguccuugauuauuuc

SEQ ID NO: 434776 - RNA, 19 nt, Artificial Sequence
  Description of Artificial Sequence: Synthetic oligonucleotide
  Antisense Strand to SEQ ID NO: 434775
gaaauaaucaaggacaacc

SEQ ID NO: 434777 - RNA, 19 nt, Artificial Sequence
  Description of Artificial Sequence: Synthetic oligonucleotide
  Sense strand starting at position 3231 of SEQ ID NO: 316714
agugauaacuucuuaagug

SEQ ID NO: 434778 - RNA, 19 nt, Artificial Sequence
  Description of Artificial Sequence: Synthetic oligonucleotide
  Antisense Strand to SEQ ID NO: 434777
cacuuaagaaguuaucacu

SEQ ID NO: 434779 - RNA, 19 nt, Artificial Sequence
  Description of Artificial Sequence: Synthetic oligonucleotide
  Sense strand starting at position 3358 of SEQ ID NO: 316714
ccuuaaaguguugauacaa

SEQ ID NO: 434780 - RNA, 19 nt, Artificial Sequence
  Description of Artificial Sequence: Synthetic oligonucleotide
  Antisense Strand to SEQ ID NO: 434779
uuguaucaacacuuuaagg

SEQ ID NO: 434781 - RNA, 19 nt, Artificial Sequence
  Description of Artificial Sequence: Synthetic oligonucleotide
  Sense strand starting at position 3704 of SEQ ID NO: 316714
uggugaagugauggguaga

SEQ ID NO: 434782 - RNA, 19 nt, Artificial Sequence
  Description of Artificial Sequence: Synthetic oligonucleotide
  Antisense Strand to SEQ ID NO: 434781
ucuacccaucacuucacca

SEQ ID NO: 434783 - RNA, 19 nt, Artificial Sequence
  Description of Artificial Sequence: Synthetic oligonucleotide
  Sense strand starting at position 3705 of SEQ ID NO: 316714
ggugaagugauggguagaa

SEQ ID NO: 434784 - RNA, 19 nt, Artificial Sequence
  Description of Artificial Sequence: Synthetic oligonucleotide
  Antisense Strand to SEQ ID NO: 434783
uucuacccaucacuucacc

SEQ ID NO: 434785 - RNA, 19 nt, Artificial Sequence
  Description of Artificial Sequence: Synthetic oligonucleotide
  Sense strand starting at position 3734 of SEQ ID NO: 316714
aaggaaguauuggcucaga

SEQ ID NO: 434786 - RNA, 19 nt, Artificial Sequence
  Description of Artificial Sequence: Synthetic oligonucleotide
  Antisense Strand to SEQ ID NO: 434785
ucugagccaauacuuccuu

SEQ ID NO: 434787 - RNA, 19 nt, Artificial Sequence
  Description of Artificial Sequence: Synthetic oligonucleotide
  Sense strand starting at position 3737 of SEQ ID NO: 316714
gaaguauuggcucagagua

SEQ ID NO: 434788 - RNA, 19 nt, Artificial Sequence
  Description of Artificial Sequence: Synthetic oligonucleotide
  Antisense Strand to SEQ ID NO: 434787
uacucugagccaauacuuc

SEQ ID NO: 434789 - RNA, 19 nt, Artificial Sequence
  Description of Artificial Sequence: Synthetic oligonucleotide
  Sense strand starting at position 7 of SEQ ID NO: 316715
ugcucagacccugaaauca

SEQ ID NO: 434790 - RNA, 19 nt, Artificial Sequence
  Description of Artificial Sequence: Synthetic oligonucleotide
  Antisense Strand to SEQ ID NO: 434789
ugauuucagggucugagca

SEQ ID NO: 434791 - RNA, 19 nt, Artificial Sequence
  Description of Artificial Sequence: Synthetic oligonucleotide
  Sense strand starting at position 43 of SEQ ID NO: 316715
ugacaagaguuucuuguca

SEQ ID NO: 434792 - RNA, 19 nt, Artificial Sequence
  Description of Artificial Sequence: Synthetic oligonucleotide
  Antisense Strand to SEQ ID NO: 434791
ugacaagaaacucuuguca

SEQ ID NO: 434793 - RNA, 19 nt, Artificial Sequence
  Description of Artificial Sequence: Synthetic oligonucleotide
  Sense strand starting at position 461 of SEQ ID NO: 316715
uguauaucaucuucggaga

SEQ ID NO: 434794 - RNA, 19 nt, Artificial Sequence
  Description of Artificial Sequence: Synthetic oligonucleotide
  Antisense Strand to SEQ ID NO: 434793
ucuccgaagaugauauaca

SEQ ID NO: 434795 - RNA, 19 nt, Artificial Sequence
  Description of Artificial Sequence: Synthetic oligonucleotide
  Sense strand starting at position 462 of SEQ ID NO: 316715
guauaucaucuucggagag

SEQ ID NO: 434796 - RNA, 19 nt, Artificial Sequence
  Description of Artificial Sequence: Synthetic oligonucleotide
  Antisense Strand to SEQ ID NO: 434795
cucuccgaagaugauauac

SEQ ID NO: 434797 - RNA, 19 nt, Artificial Sequence
  Description of Artificial Sequence: Synthetic oligonucleotide
  Sense strand starting at position 516 of SEQ ID NO: 316715
gagugauguaucuggagau

SEQ ID NO: 434798 - RNA, 19 nt, Artificial Sequence
  Description of Artificial Sequence: Synthetic oligonucleotide
  Antisense Strand to SEQ ID NO: 434797
aucuccagauacaucacuc

SEQ ID NO: 434799 - RNA, 19 nt, Artificial Sequence
  Description of Artificial Sequence: Synthetic oligonucleotide
  Sense strand starting at position 568 of SEQ ID NO: 316715
ugcaauauugaguaacagu

SEQ ID NO: 434800 - RNA, 19 nt, Artificial Sequence
  Description of Artificial Sequence: Synthetic oligonucleotide
  Antisense Strand to SEQ ID NO: 434799
acuguuacucaauauugca

SEQ ID NO: 434801 - RNA, 19 nt, Artificial Sequence
  Description of Artificial Sequence: Synthetic oligonucleotide
  Sense strand starting at position 608 of SEQ ID NO: 316715
gugucauagaccugggaga

SEQ ID NO: 434802 - RNA, 19 nt, Artificial Sequence
  Description of Artificial Sequence: Synthetic oligonucleotide
  Antisense Strand to SEQ ID NO: 434801
ucucccaggucuaugacac

SEQ ID NO: 434803 - RNA, 19 nt, Artificial Sequence
  Description of Artificial Sequence: Synthetic oligonucleotide
  Sense strand starting at position 609 of SEQ ID NO: 316715
ugucauagaccugggagau

SEQ ID NO: 434804 - RNA, 19 nt, Artificial Sequence
  Description of Artificial Sequence: Synthetic oligonucleotide
  Antisense Strand to SEQ ID NO: 434803
aucucccaggucuaugaca

SEQ ID NO: 434805 - RNA, 19 nt, Artificial Sequence
  Description of Artificial Sequence: Synthetic oligonucleotide
  Sense strand starting at position 610 of SEQ ID NO: 316715
gucauagaccugggagauu

SEQ ID NO: 434806 - RNA, 19 nt, Artificial Sequence
  Description of Artificial Sequence: Synthetic oligonucleotide
  Antisense Strand to SEQ ID NO: 434805
aaucucccaggucuaugac

SEQ ID NO: 434807 - RNA, 19 nt, Artificial Sequence
  Description of Artificial Sequence: Synthetic oligonucleotide
  Sense strand starting at position 809 of SEQ ID NO: 316715
cguagcagaauugggaaau

SEQ ID NO: 434808 - RNA, 19 nt, Artificial Sequence
  Description of Artificial Sequence: Synthetic oligonucleotide
  Antisense Strand to SEQ ID NO: 434807
auuucccaauucugcuacg

SEQ ID NO: 434809 - RNA, 19 nt, Artificial Sequence
  Description of Artificial Sequence: Synthetic oligonucleotide
  Sense strand starting at position 1007 of SEQ ID NO: 316715
gacuguaugguguauaaau

SEQ ID NO: 434810 - RNA, 19 nt, Artificial Sequence
  Description of Artificial Sequence: Synthetic oligonucleotide
  Antisense Strand to SEQ ID NO: 434809
auuuauacaccauacaguc

SEQ ID NO: 434811 - RNA, 19 nt, Artificial Sequence
  Description of Artificial Sequence: Synthetic oligonucleotide
  Sense strand starting at position 1016 of SEQ ID NO: 316715
guguauaaauucccagacu

SEQ ID NO: 434812 - RNA, 19 nt, Artificial Sequence
  Description of Artificial Sequence: Synthetic oligonucleotide
  Antisense Strand to SEQ ID NO: 434811
agucugggaauuuauacac

SEQ ID NO: 434813 - RNA, 19 nt, Artificial Sequence
  Description of Artificial Sequence: Synthetic oligonucleotide
  Sense strand starting at position 1169 of SEQ ID NO: 316715
cuuauugcuguuuaugaau

SEQ ID NO: 434814 - RNA, 19 nt, Artificial Sequence
  Description of Artificial Sequence: Synthetic oligonucleotide
  Antisense Strand to SEQ ID NO: 434813
auucauaaacagcaauaag

SEQ ID NO: 434815 - RNA, 19 nt, Artificial Sequence
  Description of Artificial Sequence: Synthetic oligonucleotide
  Sense strand starting at position 1175 of SEQ ID NO: 316715
gcuguuuaugaauaucaca

SEQ ID NO: 434816 - RNA, 19 nt, Artificial Sequence
  Description of Artificial Sequence: Synthetic oligonucleotide
  Antisense Strand to SEQ ID NO: 434815
ugugauauucauaaacagc

SEQ ID NO: 434817 - RNA, 19 nt, Artificial Sequence
  Description of Artificial Sequence: Synthetic oligonucleotide
  Sense strand starting at position 1451 of SEQ ID NO: 316715
uuugucuauuaccugauga

SEQ ID NO: 434818 - RNA, 19 nt, Artificial Sequence
  Description of Artificial Sequence: Synthetic oligonucleotide
  Antisense Strand to SEQ ID NO: 434817
ucaucagguaauagacaaa

SEQ ID NO: 434819 - RNA, 19 nt, Artificial Sequence
  Description of Artificial Sequence: Synthetic oligonucleotide
  Sense strand starting at position 1475 of SEQ ID NO: 316715
acuuaaauguuagcugaua

SEQ ID NO: 434820 - RNA, 19 nt, Artificial Sequence
  Description of Artificial Sequence: Synthetic oligonucleotide
  Antisense Strand to SEQ ID NO: 434819
uaucagcuaacauuuaagu

SEQ ID NO: 434821 - RNA, 19 nt, Artificial Sequence
  Description of Artificial Sequence: Synthetic oligonucleotide
  Sense strand starting at position 2000 of SEQ ID NO: 316715
gugguaacauuccuuagaa

SEQ ID NO: 434822 - RNA, 19 nt, Artificial Sequence
  Description of Artificial Sequence: Synthetic oligonucleotide
  Antisense Strand to SEQ ID NO: 434821
uucuaaggaauguuaccac

SEQ ID NO: 434823 - RNA, 19 nt, Artificial Sequence
  Description of Artificial Sequence: Synthetic oligonucleotide
  Sense strand starting at position 2001 of SEQ ID NO: 316715
ugguaacauuccuuagaaa

SEQ ID NO: 434824 - RNA, 19 nt, Artificial Sequence
  Description of Artificial Sequence: Synthetic oligonucleotide
  Antisense Strand to SEQ ID NO: 434823
uuucuaaggaauguuacca

SEQ ID NO: 434825 - RNA, 19 nt, Artificial Sequence
  Description of Artificial Sequence: Synthetic oligonucleotide
  Sense strand starting at position 2130 of SEQ ID NO: 316715
aguuaaauccaaugcaaga

SEQ ID NO: 434826 - RNA, 19 nt, Artificial Sequence
  Description of Artificial Sequence: Synthetic oligonucleotide
  Antisense Strand to SEQ ID NO: 434825
ucuugcauuggauuuaacu

SEQ ID NO: 434827 - RNA, 19 nt, Artificial Sequence
  Description of Artificial Sequence: Synthetic oligonucleotide
  Sense strand starting at position 2302 of SEQ ID NO: 316715
aauaguugugaauggaaua

SEQ ID NO: 434828 - RNA, 19 nt, Artificial Sequence
  Description of Artificial Sequence: Synthetic oligonucleotide
  Antisense Strand to SEQ ID NO: 434827
uauuccauucacaacuauu

SEQ ID NO: 434829 - RNA, 19 nt, Artificial Sequence
  Description of Artificial Sequence: Synthetic oligonucleotide
  Sense strand starting at position 2303 of SEQ ID NO: 316715
auaguugugaauggaauau

SEQ ID NO: 434830 - RNA, 19 nt, Artificial Sequence
  Description of Artificial Sequence: Synthetic oligonucleotide
  Antisense Strand to SEQ ID NO: 434829
auauuccauucacaacuau

SEQ ID NO: 434831 - RNA, 19 nt, Artificial Sequence
  Description of Artificial Sequence: Synthetic oligonucleotide
  Sense strand starting at position 2315 of SEQ ID NO: 316715
ggaauauacugcuuuggua

SEQ ID NO: 434832 - RNA, 19 nt, Artificial Sequence
  Description of Artificial Sequence: Synthetic oligonucleotide
  Antisense Strand to SEQ ID NO: 434831
uaccaaagcaguauauucc

SEQ ID NO: 434833 - RNA, 19 nt, Artificial Sequence
  Description of Artificial Sequence: Synthetic oligonucleotide
  Sense strand starting at position 2339 of SEQ ID NO: 316715
gaugucugugcugaugaca

SEQ ID NO: 434834 - RNA, 19 nt, Artificial Sequence
  Description of Artificial Sequence: Synthetic oligonucleotide
  Antisense Strand to SEQ ID NO: 434833
ugucaucagcacagacauc

SEQ ID NO: 434835 - RNA, 19 nt, Artificial Sequence
  Description of Artificial Sequence: Synthetic oligonucleotide
  Sense strand starting at position 2547 of SEQ ID NO: 316715
gagccuaauuugucuguuu

SEQ ID NO: 434836 - RNA, 19 nt, Artificial Sequence
  Description of Artificial Sequence: Synthetic oligonucleotide
  Antisense Strand to SEQ ID NO: 434835
aaacagacaaauuaggcuc

SEQ ID NO: 434837 - RNA, 19 nt, Artificial Sequence
  Description of Artificial Sequence: Synthetic oligonucleotide
  Sense strand starting at position 2566 of SEQ ID NO: 316715
ucuugacuggcccaagaau

SEQ ID NO: 434838 - RNA, 19 nt, Artificial Sequence
  Description of Artificial Sequence: Synthetic oligonucleotide
  Antisense Strand to SEQ ID NO: 434837
auucuugggccagucaaga

SEQ ID NO: 434839 - RNA, 19 nt, Artificial Sequence
  Description of Artificial Sequence: Synthetic oligonucleotide
  Sense strand starting at position 2623 of SEQ ID NO: 316715
gccuuaugccucccuguuu

SEQ ID NO: 434840 - RNA, 19 nt, Artificial Sequence
  Description of Artificial Sequence: Synthetic oligonucleotide
  Antisense Strand to SEQ ID NO: 434839
aaacagggaggcauaaggc

SEQ ID NO: 434841 - RNA, 19 nt, Artificial Sequence
  Description of Artificial Sequence: Synthetic oligonucleotide
  Sense strand starting at position 2674 of SEQ ID NO: 316715
cuaauugacuuucuaaggu

SEQ ID NO: 434842 - RNA, 19 nt, Artificial Sequence
  Description of Artificial Sequence: Synthetic oligonucleotide
  Antisense Strand to SEQ ID NO: 434841
accuuagaaagucaauuag

SEQ ID NO: 434843 - RNA, 19 nt, Artificial Sequence
  Description of Artificial Sequence: Synthetic oligonucleotide
  Sense strand starting at position 2722 of SEQ ID NO: 316715
cacuuuguaucaguugaga

SEQ ID NO: 434844 - RNA, 19 nt, Artificial Sequence
  Description of Artificial Sequence: Synthetic oligonucleotide
  Antisense Strand to SEQ ID NO: 434843
ucucaacugauacaaagug

SEQ ID NO: 434845 - RNA, 19 nt, Artificial Sequence
  Description of Artificial Sequence: Synthetic oligonucleotide
  Sense strand starting at position 2725 of SEQ ID NO: 316715
uuuguaucaguugagaaac

SEQ ID NO: 434846 - RNA, 19 nt, Artificial Sequence
  Description of Artificial Sequence: Synthetic oligonucleotide
  Antisense Strand to SEQ ID NO: 434845
guuucucaacugauacaaa

SEQ ID NO: 434847 - RNA, 19 nt, Artificial Sequence
  Description of Artificial Sequence: Synthetic oligonucleotide
  Sense strand starting at position 2783 of SEQ ID NO: 316715
cuaaguaagauagaugugu

SEQ ID NO: 434848 - RNA, 19 nt, Artificial Sequence
  Description of Artificial Sequence: Synthetic oligonucleotide
  Antisense Strand to SEQ ID NO: 434847
acacaucuaucuuacuuag

SEQ ID NO: 434849 - RNA, 19 nt, Artificial Sequence
  Description of Artificial Sequence: Synthetic oligonucleotide
  Sense strand starting at position 2798 of SEQ ID NO: 316715
guguauuucuuccucacau

SEQ ID NO: 434850 - RNA, 19 nt, Artificial Sequence
  Description of Artificial Sequence: Synthetic oligonucleotide
  Antisense Strand to SEQ ID NO: 434849
augugaggaagaaauacac

SEQ ID NO: 434851 - RNA, 19 nt, Artificial Sequence
  Description of Artificial Sequence: Synthetic oligonucleotide
  Sense strand starting at position 2944 of SEQ ID NO: 316715
ucaagaugguuccugaagu

SEQ ID NO: 434852 - RNA, 19 nt, Artificial Sequence
  Description of Artificial Sequence: Synthetic oligonucleotide
  Antisense Strand to SEQ ID NO: 434851
acuucaggaaccaucuuga

SEQ ID NO: 434853 - RNA, 19 nt, Artificial Sequence
  Description of Artificial Sequence: Synthetic oligonucleotide
  Sense strand starting at position 3085 of SEQ ID NO: 316715
guaagagccuucucaugag

SEQ ID NO: 434854 - RNA, 19 nt, Artificial Sequence
  Description of Artificial Sequence: Synthetic oligonucleotide
  Antisense Strand to SEQ ID NO: 434853
cucaugagaaggcucuuac

SEQ ID NO: 434855 - RNA, 19 nt, Artificial Sequence
  Description of Artificial Sequence: Synthetic oligonucleotide
  Sense strand starting at position 3319 of SEQ ID NO: 316715
ugugcuuucccuuagagag

SEQ ID NO: 434856 - RNA, 19 nt, Artificial Sequence
  Description of Artificial Sequence: Synthetic oligonucleotide
  Antisense Strand to SEQ ID NO: 434855
cucucuaagggaaagcaca

SEQ ID NO: 434857 - RNA, 19 nt, Artificial Sequence
  Description of Artificial Sequence: Synthetic oligonucleotide
  Sense strand starting at position 3354 of SEQ ID NO: 316715
cauguacuuggcuauguaa

SEQ ID NO: 434858 - RNA, 19 nt, Artificial Sequence
  Description of Artificial Sequence: Synthetic oligonucleotide
  Antisense Strand to SEQ ID NO: 434857
uuacauagccaaguacaug

SEQ ID NO: 434859 - RNA, 19 nt, Artificial Sequence
  Description of Artificial Sequence: Synthetic oligonucleotide
  Sense strand starting at position 3413 of SEQ ID NO: 316715
ccugucucauuacuaggaa

SEQ ID NO: 434860 - RNA, 19 nt, Artificial Sequence
  Description of Artificial Sequence: Synthetic oligonucleotide
  Antisense Strand to SEQ ID NO: 434859
uuccuaguaaugagacagg

SEQ ID NO: 434861 - RNA, 19 nt, Artificial Sequence
  Description of Artificial Sequence: Synthetic oligonucleotide
  Sense strand starting at position 3600 of SEQ ID NO: 316715
uaugaaugguaauuaguga

SEQ ID NO: 434862 - RNA, 19 nt, Artificial Sequence
  Description of Artificial Sequence: Synthetic oligonucleotide
  Antisense Strand to SEQ ID NO: 434861
ucacuaauuaccauucaua

SEQ ID NO: 434863 - RNA, 19 nt, Artificial Sequence
  Description of Artificial Sequence: Synthetic oligonucleotide
  Sense strand starting at position 3638 of SEQ ID NO: 316715
ucaugauaagcaggaaauc

SEQ ID NO: 434864 - RNA, 19 nt, Artificial Sequence
  Description of Artificial Sequence: Synthetic oligonucleotide
  Antisense Strand to SEQ ID NO: 434863
gauuuccugcuuaucauga

SEQ ID NO: 434865 - RNA, 19 nt, Artificial Sequence
  Description of Artificial Sequence: Synthetic oligonucleotide
  Sense strand starting at position 3647 of SEQ ID NO: 316715
gcaggaaauccacagguuu

SEQ ID NO: 434866 - RNA, 19 nt, Artificial Sequence
  Description of Artificial Sequence: Synthetic oligonucleotide
  Antisense Strand to SEQ ID NO: 434865
aaaccuguggauuuccugc

SEQ ID NO: 434867 - RNA, 19 nt, Artificial Sequence
  Description of Artificial Sequence: Synthetic oligonucleotide
  Sense strand starting at position 3812 of SEQ ID NO: 316715
guuggacccuaaucuuaua

SEQ ID NO: 434868 - RNA, 19 nt, Artificial Sequence
  Description of Artificial Sequence: Synthetic oligonucleotide
  Antisense Strand to SEQ ID NO: 434867
uauaagauuaggguccaac

SEQ ID NO: 434869 - RNA, 19 nt, Artificial Sequence
  Description of Artificial Sequence: Synthetic oligonucleotide
  Sense strand starting at position 47 of SEQ ID NO: 316716
cgucuauuccaagaagcac

SEQ ID NO: 434870 - RNA, 19 nt, Artificial Sequence
  Description of Artificial Sequence: Synthetic oligonucleotide
  Antisense Strand to SEQ ID NO: 434869
gugcuucuuggaauagacg

SEQ ID NO: 434871 - RNA, 19 nt, Artificial Sequence
  Description of Artificial Sequence: Synthetic oligonucleotide
  Sense strand starting at position 153 of SEQ ID NO: 316716
ggauucuggccggagcuua

SEQ ID NO: 434872 - RNA, 19 nt, Artificial Sequence
  Description of Artificial Sequence: Synthetic oligonucleotide
  Antisense Strand to SEQ ID NO: 434871
uaagcuccggccagaaucc

SEQ ID NO: 434873 - RNA, 19 nt, Artificial Sequence
  Description of Artificial Sequence: Synthetic oligonucleotide
  Sense strand starting at position 219 of SEQ ID NO: 316716
ggaaucauuccauguuuag

SEQ ID NO: 434874 - RNA, 19 nt, Artificial Sequence
  Description of Artificial Sequence: Synthetic oligonucleotide
  Antisense Strand to SEQ ID NO: 434873
cuaaacauggaaugauucc

SEQ ID NO: 434875 - RNA, 19 nt, Artificial Sequence
  Description of Artificial Sequence: Synthetic oligonucleotide
  Sense strand starting at position 222 of SEQ ID NO: 316716
aucauuccauguuuaggau

SEQ ID NO: 434876 - RNA, 19 nt, Artificial Sequence
  Description of Artificial Sequence: Synthetic oligonucleotide
  Antisense Strand to SEQ ID NO: 434875
auccuaaacauggaaugau

SEQ ID NO: 434877 - RNA, 19 nt, Artificial Sequence
  Description of Artificial Sequence: Synthetic oligonucleotide
  Sense strand starting at position 223 of SEQ ID NO: 316716
ucauuccauguuuaggaua

SEQ ID NO: 434878 - RNA, 19 nt, Artificial Sequence
  Description of Artificial Sequence: Synthetic oligonucleotide
  Antisense Strand to SEQ ID NO: 434877
uauccuaaacauggaauga

SEQ ID NO: 434879 - RNA, 19 nt, Artificial Sequence
  Description of Artificial Sequence: Synthetic oligonucleotide
  Sense strand starting at position 253 of SEQ ID NO: 316716
ugaguugguaugcaagguu

SEQ ID NO: 434880 - RNA, 19 nt, Artificial Sequence
  Description of Artificial Sequence: Synthetic oligonucleotide
  Antisense Strand to SEQ ID NO: 434879
aaccuugcauaccaacuca

SEQ ID NO: 434881 - RNA, 19 nt, Artificial Sequence
  Description of Artificial Sequence: Synthetic oligonucleotide
  Sense strand starting at position 313 of SEQ ID NO: 316716
aggaaagauuggcccuauu

SEQ ID NO: 434882 - RNA, 19 nt, Artificial Sequence
  Description of Artificial Sequence: Synthetic oligonucleotide
  Antisense Strand to SEQ ID NO: 434881
aauagggccaaucuuuccu

SEQ ID NO: 434883 - RNA, 19 nt, Artificial Sequence
  Description of Artificial Sequence: Synthetic oligonucleotide
  Sense strand starting at position 354 of SEQ ID NO: 316716
ucuaaaucuccggagccau

SEQ ID NO: 434884 - RNA, 19 nt, Artificial Sequence
  Description of Artificial Sequence: Synthetic oligonucleotide
  Antisense Strand to SEQ ID NO: 434883
auggcuccggagauuuaga

SEQ ID NO: 434885 - RNA, 19 nt, Artificial Sequence
  Description of Artificial Sequence: Synthetic oligonucleotide
  Sense strand starting at position 379 of SEQ ID NO: 316716
ccaagaucauacuugcuga

SEQ ID NO: 434886 - RNA, 19 nt, Artificial Sequence
  Description of Artificial Sequence: Synthetic oligonucleotide
  Antisense Strand to SEQ ID NO: 434885
ucagcaaguaugaucuugg

SEQ ID NO: 434887 - RNA, 19 nt, Artificial Sequence
  Description of Artificial Sequence: Synthetic oligonucleotide
  Sense strand starting at position 382 of SEQ ID NO: 316716
agaucauacuugcugaaua

SEQ ID NO: 434888 - RNA, 19 nt, Artificial Sequence
  Description of Artificial Sequence: Synthetic oligonucleotide
  Antisense Strand to SEQ ID NO: 434887
uauucagcaaguaugaucu

SEQ ID NO: 434889 - RNA, 19 nt, Artificial Sequence
  Description of Artificial Sequence: Synthetic oligonucleotide
  Sense strand starting at position 476 of SEQ ID NO: 316716
cucagcaucuguuccauuu

SEQ ID NO: 434890 - RNA, 19 nt, Artificial Sequence
  Description of Artificial Sequence: Synthetic oligonucleotide
  Antisense Strand to SEQ ID NO: 434889
aaauggaacagaugcugag

SEQ ID NO: 434891 - RNA, 19 nt, Artificial Sequence
  Description of Artificial Sequence: Synthetic oligonucleotide
  Sense strand starting at position 650 of SEQ ID NO: 316716
ggaccaguaagguggucua

SEQ ID NO: 434892 - RNA, 19 nt, Artificial Sequence
  Description of Artificial Sequence: Synthetic oligonucleotide
  Antisense Strand to SEQ ID NO: 434891
uagaccaccuuacuggucc

SEQ ID NO: 434893 - RNA, 19 nt, Artificial Sequence
  Description of Artificial Sequence: Synthetic oligonucleotide
  Sense strand starting at position 653 of SEQ ID NO: 316716
ccaguaagguggucuauga

SEQ ID NO: 434894 - RNA, 19 nt, Artificial Sequence
  Description of Artificial Sequence: Synthetic oligonucleotide
  Antisense Strand to SEQ ID NO: 434893
ucauagaccaccuuacugg

SEQ ID NO: 434895 - RNA, 19 nt, Artificial Sequence
  Description of Artificial Sequence: Synthetic oligonucleotide
  Sense strand starting at position 657 of SEQ ID NO: 316716
uaagguggucuaugaucuu

SEQ ID NO: 434896 - RNA, 19 nt, Artificial Sequence
  Description of Artificial Sequence: Synthetic oligonucleotide
  Antisense Strand to SEQ ID NO: 434895
aagaucauagaccaccuua

SEQ ID NO: 434897 - RNA, 19 nt, Artificial Sequence
  Description of Artificial Sequence: Synthetic oligonucleotide
  Sense strand starting at position 660 of SEQ ID NO: 316716
gguggucuaugaucuuuaa

SEQ ID NO: 434898 - RNA, 19 nt, Artificial Sequence
  Description of Artificial Sequence: Synthetic oligonucleotide
  Antisense Strand to SEQ ID NO: 434897
uuaaagaucauagaccacc

SEQ ID NO: 434899 - RNA, 19 nt, Artificial Sequence
  Description of Artificial Sequence: Synthetic oligonucleotide
  Sense strand starting at position 663 of SEQ ID NO: 316716
ggucuaugaucuuuaacau

SEQ ID NO: 434900 - RNA, 19 nt, Artificial Sequence
  Description of Artificial Sequence: Synthetic oligonucleotide
  Antisense Strand to SEQ ID NO: 434899
auguuaaagaucauagacc

SEQ ID NO: 434901 - RNA, 19 nt, Artificial Sequence
  Description of Artificial Sequence: Synthetic oligonucleotide
  Sense strand starting at position 849 of SEQ ID NO: 316716
auaagagcuugcuugauug

SEQ ID NO: 434902 - RNA, 19 nt, Artificial Sequence
  Description of Artificial Sequence: Synthetic oligonucleotide
  Antisense Strand to SEQ ID NO: 434901
caaucaagcaagcucuuau

SEQ ID NO: 434903 - RNA, 19 nt, Artificial Sequence
  Description of Artificial Sequence: Synthetic oligonucleotide
  Sense strand starting at position 1072 of SEQ ID NO: 316716
aagucaucacagggaguuu

SEQ ID NO: 434904 - RNA, 19 nt, Artificial Sequence
  Description of Artificial Sequence: Synthetic oligonucleotide
  Antisense Strand to SEQ ID NO: 434903
aaacucccugugaugacuu

SEQ ID NO: 434905 - RNA, 19 nt, Artificial Sequence
  Description of Artificial Sequence: Synthetic oligonucleotide
  Sense strand starting at position 1168 of SEQ ID NO: 316716
ucaccaguacuuugugaaa

SEQ ID NO: 434906 - RNA, 19 nt, Artificial Sequence
  Description of Artificial Sequence: Synthetic oligonucleotide
  Antisense Strand to SEQ ID NO: 434905
uuucacaaaguacugguga

SEQ ID NO: 434907 - RNA, 19 nt, Artificial Sequence
  Description of Artificial Sequence: Synthetic oligonucleotide
  Sense strand starting at position 1239 of SEQ ID NO: 316716
ggagaugcuugccuaauua

SEQ ID NO: 434908 - RNA, 19 nt, Artificial Sequence
  Description of Artificial Sequence: Synthetic oligonucleotide
  Antisense Strand to SEQ ID NO: 434907
uaauuaggcaagcaucucc

SEQ ID NO: 434909 - RNA, 19 nt, Artificial Sequence
  Description of Artificial Sequence: Synthetic oligonucleotide
  Sense strand starting at position 1268 of SEQ ID NO: 316716
agcaaacaguuugugacua

SEQ ID NO: 434910 - RNA, 19 nt, Artificial Sequence
  Description of Artificial Sequence: Synthetic oligonucleotide
  Antisense Strand to SEQ ID NO: 434909
uagucacaaacuguuugcu

SEQ ID NO: 434911 - RNA, 19 nt, Artificial Sequence
  Description of Artificial Sequence: Synthetic oligonucleotide
  Sense strand starting at position 1529 of SEQ ID NO: 316716
uucgcaugcaccguugaaa

SEQ ID NO: 434912 - RNA, 19 nt, Artificial Sequence
  Description of Artificial Sequence: Synthetic oligonucleotide
  Antisense Strand to SEQ ID NO: 434911
uuucaacggugcaugcgaa

SEQ ID NO: 434913 - RNA, 19 nt, Artificial Sequence
  Description of Artificial Sequence: Synthetic oligonucleotide
  Sense strand starting at position 1711 of SEQ ID NO: 316716
ucccgaagucaucaaacuu

SEQ ID NO: 434914 - RNA, 19 nt, Artificial Sequence
  Description of Artificial Sequence: Synthetic oligonucleotide
  Antisense Strand to SEQ ID NO: 434913
aaguuugaugacuucggga

SEQ ID NO: 434915 - RNA, 19 nt, Artificial Sequence
  Description of Artificial Sequence: Synthetic oligonucleotide
  Sense strand starting at position 1730 of SEQ ID NO: 316716
ugaauugcgucucuaauuu

SEQ ID NO: 434916 - RNA, 19 nt, Artificial Sequence
  Description of Artificial Sequence: Synthetic oligonucleotide
  Antisense Strand to SEQ ID NO: 434915
aaauuagagacgcaauuca

SEQ ID NO: 434917 - RNA, 19 nt, Artificial Sequence
  Description of Artificial Sequence: Synthetic oligonucleotide
  Sense strand starting at position 1834 of SEQ ID NO: 316716
caaguuccgcaggacuaaa

SEQ ID NO: 434918 - RNA, 19 nt, Artificial Sequence
  Description of Artificial Sequence: Synthetic oligonucleotide
  Antisense Strand to SEQ ID NO: 434917
uuuaguccugcggaacuug

SEQ ID NO: 434919 - RNA, 19 nt, Artificial Sequence
  Description of Artificial Sequence: Synthetic oligonucleotide
  Sense strand starting at position 2214 of SEQ ID NO: 316716
gcuuguuggccucugagca

SEQ ID NO: 434920 - RNA, 19 nt, Artificial Sequence
  Description of Artificial Sequence: Synthetic oligonucleotide
  Antisense Strand to SEQ ID NO: 434919
ugcucagaggccaacaagc

SEQ ID NO: 434921 - RNA, 19 nt, Artificial Sequence
  Description of Artificial Sequence: Synthetic oligonucleotide
  Sense strand starting at position 2287 of SEQ ID NO: 316716
aauguugcgcuggagagaa

SEQ ID NO: 434922 - RNA, 19 nt, Artificial Sequence
  Description of Artificial Sequence: Synthetic oligonucleotide
  Antisense Strand to SEQ ID NO: 434921
uucucuccagcgcaacauu

SEQ ID NO: 434923 - RNA, 19 nt, Artificial Sequence
  Description of Artificial Sequence: Synthetic oligonucleotide
  Sense strand starting at position 2306 of SEQ ID NO: 316716
gggagcuuccuaugaucaa

SEQ ID NO: 434924 - RNA, 19 nt, Artificial Sequence
  Description of Artificial Sequence: Synthetic oligonucleotide
  Antisense Strand to SEQ ID NO: 434923
uugaucauaggaagcuccc

SEQ ID NO: 434925 - RNA, 19 nt, Artificial Sequence
  Description of Artificial Sequence: Synthetic oligonucleotide
  Sense strand starting at position 2649 of SEQ ID NO: 316716
gggcauuggccacaagacu

SEQ ID NO: 434926 - RNA, 19 nt, Artificial Sequence
  Description of Artificial Sequence: Synthetic oligonucleotide
  Antisense Strand to SEQ ID NO: 434925
agucuuguggccaaugccc

SEQ ID NO: 434927 - RNA, 19 nt, Artificial Sequence
  Description of Artificial Sequence: Synthetic oligonucleotide
  Sense strand starting at position 2678 of SEQ ID NO: 316716
uacugaguuccacauucgu

SEQ ID NO: 434928 - RNA, 19 nt, Artificial Sequence
  Description of Artificial Sequence: Synthetic oligonucleotide
  Antisense Strand to SEQ ID NO: 434927
acgaauguggaacucagua

SEQ ID NO: 434929 - RNA, 19 nt, Artificial Sequence
  Description of Artificial Sequence: Synthetic oligonucleotide
  Sense strand starting at position 2730 of SEQ ID NO: 316716
agaacugacucugcuuaag

SEQ ID NO: 434930 - RNA, 19 nt, Artificial Sequence
  Description of Artificial Sequence: Synthetic oligonucleotide
  Antisense Strand to SEQ ID NO: 434929
cuuaagcagagucaguucu

SEQ ID NO: 434931 - RNA, 19 nt, Artificial Sequence
  Description of Artificial Sequence: Synthetic oligonucleotide
  Sense strand starting at position 2741 of SEQ ID NO: 316716
ugcuuaaggacuggacauu

SEQ ID NO: 434932 - RNA, 19 nt, Artificial Sequence
  Description of Artificial Sequence: Synthetic oligonucleotide
  Antisense Strand to SEQ ID NO: 434931
aauguccaguccuuaagca

SEQ ID NO: 434933 - RNA, 19 nt, Artificial Sequence
  Description of Artificial Sequence: Synthetic oligonucleotide
  Sense strand starting at position 3078 of SEQ ID NO: 316716
caggaaguuauaugugguu

SEQ ID NO: 434934 - RNA, 19 nt, Artificial Sequence
  Description of Artificial Sequence: Synthetic oligonucleotide
  Antisense Strand to SEQ ID NO: 434933
aaccacauauaacuuccug

SEQ ID NO: 434935 - RNA, 19 nt, Artificial Sequence
  Description of Artificial Sequence: Synthetic oligonucleotide
  Sense strand starting at position 3120 of SEQ ID NO: 316716
ggcacucauguccaacuua

SEQ ID NO: 434936 - RNA, 19 nt, Artificial Sequence
  Description of Artificial Sequence: Synthetic oligonucleotide
  Antisense Strand to SEQ ID NO: 434935
uaaguuggacaugagugcc

SEQ ID NO: 434937 - RNA, 19 nt, Artificial Sequence
  Description of Artificial Sequence: Synthetic oligonucleotide
  Sense strand starting at position 3134 of SEQ ID NO: 316716
acuuauagucgacacuuaa

SEQ ID NO: 434938 - RNA, 19 nt, Artificial Sequence
  Description of Artificial Sequence: Synthetic oligonucleotide
  Antisense Strand to SEQ ID NO: 434937
uuaagugucgacuauaagu

SEQ ID NO: 434939 - RNA, 19 nt, Artificial Sequence
  Description of Artificial Sequence: Synthetic oligonucleotide
  Sense strand starting at position 3159 of SEQ ID NO: 316716
acaggauauugauacauuu

SEQ ID NO: 434940 - RNA, 19 nt, Artificial Sequence
  Description of Artificial Sequence: Synthetic oligonucleotide
  Antisense Strand to SEQ ID NO: 434939
aaauguaucaauauccugu

SEQ ID NO: 434941 - RNA, 19 nt, Artificial Sequence
  Description of Artificial Sequence: Synthetic oligonucleotide
  Sense strand starting at position 3288 of SEQ ID NO: 316716
gugugaugcgaucucagcu

SEQ ID NO: 434942 - RNA, 19 nt, Artificial Sequence
  Description of Artificial Sequence: Synthetic oligonucleotide
  Antisense Strand to SEQ ID NO: 434941
agcugagaucgcaucacac

SEQ ID NO: 434943 - RNA, 19 nt, Artificial Sequence
  Description of Artificial Sequence: Synthetic oligonucleotide
  Sense strand starting at position 3618 of SEQ ID NO: 316716
aucggcauaaucugagaga

SEQ ID NO: 434944 - RNA, 19 nt, Artificial Sequence
  Description of Artificial Sequence: Synthetic oligonucleotide
  Antisense Strand to SEQ ID NO: 434943
ucucucagauuaugccgau

SEQ ID NO: 434945 - RNA, 19 nt, Artificial Sequence
  Description of Artificial Sequence: Synthetic oligonucleotide
  Sense strand starting at position 3706 of SEQ ID NO: 316716
ggugaagaaaucuguguuu

SEQ ID NO: 434946 - RNA, 19 nt, Artificial Sequence
  Description of Artificial Sequence: Synthetic oligonucleotide
  Antisense Strand to SEQ ID NO: 434945
aaacacagauuucuucacc

SEQ ID NO: 434947 - RNA, 19 nt, Artificial Sequence
  Description of Artificial Sequence: Synthetic oligonucleotide
  Sense strand starting at position 3911 of SEQ ID NO: 316716
ccuccauguguccauacaa

SEQ ID NO: 434948 - RNA, 19 nt, Artificial Sequence
  Description of Artificial Sequence: Synthetic oligonucleotide
  Antisense Strand to SEQ ID NO: 434947
uuguauggacacauggagg

SEQ ID NO: 434949 - RNA, 19 nt, Artificial Sequence
  Description of Artificial Sequence: Synthetic oligonucleotide
  Sense strand starting at position 209 of SEQ ID NO: 316717
gaggucuaguauccaagaa

SEQ ID NO: 434950 - RNA, 19 nt, Artificial Sequence
  Description of Artificial Sequence: Synthetic oligonucleotide
  Antisense Strand to SEQ ID NO: 434949
uucuuggauacuagaccuc

SEQ ID NO: 434951 - RNA, 19 nt, Artificial Sequence
  Description of Artificial Sequence: Synthetic oligonucleotide
  Sense strand starting at position 229 of SEQ ID NO: 316717
gauauaaucuaguugccag

SEQ ID NO: 434952 - RNA, 19 nt, Artificial Sequence
  Description of Artificial Sequence: Synthetic oligonucleotide
  Antisense Strand to SEQ ID NO: 434951
cuggcaacuagauuauauc

SEQ ID NO: 434953 - RNA, 19 nt, Artificial Sequence
  Description of Artificial Sequence: Synthetic oligonucleotide
  Sense strand starting at position 243 of SEQ ID NO: 316717
gccagaaccuaugcauaca

SEQ ID NO: 434954 - RNA, 19 nt, Artificial Sequence
  Description of Artificial Sequence: Synthetic oligonucleotide
  Antisense Strand to SEQ ID NO: 434953
uguaugcauagguucuggc

SEQ ID NO: 434955 - RNA, 19 nt, Artificial Sequence
  Description of Artificial Sequence: Synthetic oligonucleotide
  Sense strand starting at position 267 of SEQ ID NO: 316717
gaguauuaacaaugucaag

SEQ ID NO: 434956 - RNA, 19 nt, Artificial Sequence
  Description of Artificial Sequence: Synthetic oligonucleotide
  Antisense Strand to SEQ ID NO: 434955
cuugacauuguuaauacuc

SEQ ID NO: 434957 - RNA, 19 nt, Artificial Sequence
  Description of Artificial Sequence: Synthetic oligonucleotide
  Sense strand starting at position 286 of SEQ ID NO: 316717
uaggacuuguuucuggaau

SEQ ID NO: 434958 - RNA, 19 nt, Artificial Sequence
  Description of Artificial Sequence: Synthetic oligonucleotide
  Antisense Strand to SEQ ID NO: 434957
auuccagaaacaaguccua

SEQ ID NO: 434959 - RNA, 19 nt, Artificial Sequence
  Description of Artificial Sequence: Synthetic oligonucleotide
  Sense strand starting at position 404 of SEQ ID NO: 316717
uauggaacuguguacacau

SEQ ID NO: 434960 - RNA, 19 nt, Artificial Sequence
  Description of Artificial Sequence: Synthetic oligonucleotide
  Antisense Strand to SEQ ID NO: 434959
auguguacacaguuccaua

SEQ ID NO: 434961 - RNA, 19 nt, Artificial Sequence
  Description of Artificial Sequence: Synthetic oligonucleotide
  Sense strand starting at position 414 of SEQ ID NO: 316717
uguacacauguguaacauu

SEQ ID NO: 434962 - RNA, 19 nt, Artificial Sequence
  Description of Artificial Sequence: Synthetic oligonucleotide
  Antisense Strand to SEQ ID NO: 434961
aauguuacacauguguaca

SEQ ID NO: 434963 - RNA, 19 nt, Artificial Sequence
  Description of Artificial Sequence: Synthetic oligonucleotide
  Sense strand starting at position 1140 of SEQ ID NO: 316717
uuguuuauccuggacucuu

SEQ ID NO: 434964 - RNA, 19 nt, Artificial Sequence
  Description of Artificial Sequence: Synthetic oligonucleotide
  Antisense Strand to SEQ ID NO: 434963
aagaguccaggauaaacaa

SEQ ID NO: 434965 - RNA, 19 nt, Artificial Sequence
  Description of Artificial Sequence: Synthetic oligonucleotide
  Sense strand starting at position 1249 of SEQ ID NO: 316717
agagcuuagaacuguuuga

SEQ ID NO: 434966 - RNA, 19 nt, Artificial Sequence
  Description of Artificial Sequence: Synthetic oligonucleotide
  Antisense Strand to SEQ ID NO: 434965
ucaaacaguucuaagcucu

SEQ ID NO: 434967 - RNA, 19 nt, Artificial Sequence
  Description of Artificial Sequence: Synthetic oligonucleotide
  Sense strand starting at position 1253 of SEQ ID NO: 316717
cuuagaacuguuugagaaa

SEQ ID NO: 434968 - RNA, 19 nt, Artificial Sequence
  Description of Artificial Sequence: Synthetic oligonucleotide
  Antisense Strand to SEQ ID NO: 434967
uuucucaaacaguucuaag

SEQ ID NO: 434969 - RNA, 19 nt, Artificial Sequence
  Description of Artificial Sequence: Synthetic oligonucleotide
  Sense strand starting at position 1279 of SEQ ID NO: 316717
ggcagacuggauuguaaua

SEQ ID NO: 434970 - RNA, 19 nt, Artificial Sequence
  Description of Artificial Sequence: Synthetic oligonucleotide
  Antisense Strand to SEQ ID NO: 434969
uauuacaauccagucugcc

SEQ ID NO: 434971 - RNA, 19 nt, Artificial Sequence
  Description of Artificial Sequence: Synthetic oligonucleotide
  Sense strand starting at position 1346 of SEQ ID NO: 316717
caacuuuaugauggugaau

SEQ ID NO: 434972 - RNA, 19 nt, Artificial Sequence
  Description of Artificial Sequence: Synthetic oligonucleotide
  Antisense Strand to SEQ ID NO: 434971
auucaccaucauaaaguug

SEQ ID NO: 434973 - RNA, 19 nt, Artificial Sequence
  Description of Artificial Sequence: Synthetic oligonucleotide
  Sense strand starting at position 1357 of SEQ ID NO: 316717
uggugaauucaagaggugu

SEQ ID NO: 434974 - RNA, 19 nt, Artificial Sequence
  Description of Artificial Sequence: Synthetic oligonucleotide
  Antisense Strand to SEQ ID NO: 434973
acaccucuugaauucacca

SEQ ID NO: 434975 - RNA, 19 nt, Artificial Sequence
  Description of Artificial Sequence: Synthetic oligonucleotide
  Sense strand starting at position 1629 of SEQ ID NO: 316717
ccugcuucugaaggaaaua

SEQ ID NO: 434976 - RNA, 19 nt, Artificial Sequence
  Description of Artificial Sequence: Synthetic oligonucleotide
  Antisense Strand to SEQ ID NO: 434975
uauuuccuucagaagcagg

SEQ ID NO: 434977 - RNA, 19 nt, Artificial Sequence
  Description of Artificial Sequence: Synthetic oligonucleotide
  Sense strand starting at position 1817 of SEQ ID NO: 316717
auggguuuccuauagaccu

SEQ ID NO: 434978 - RNA, 19 nt, Artificial Sequence
  Description of Artificial Sequence: Synthetic oligonucleotide
  Antisense Strand to SEQ ID NO: 434977
aggucuauaggaaacccau

SEQ ID NO: 434979 - RNA, 19 nt, Artificial Sequence
  Description of Artificial Sequence: Synthetic oligonucleotide
  Sense strand starting at position 2077 of SEQ ID NO: 316717
cuuauaugaugugucauau

SEQ ID NO: 434980 - RNA, 19 nt, Artificial Sequence
  Description of Artificial Sequence: Synthetic oligonucleotide
  Antisense Strand to SEQ ID NO: 434979
auaugacacaucauauaag

SEQ ID NO: 434981 - RNA, 19 nt, Artificial Sequence
  Description of Artificial Sequence: Synthetic oligonucleotide
  Sense strand starting at position 2242 of SEQ ID NO: 316717
acguaagauuggguucaaa

SEQ ID NO: 434982 - RNA, 19 nt, Artificial Sequence
  Description of Artificial Sequence: Synthetic oligonucleotide
  Antisense Strand to SEQ ID NO: 434981
uuugaacccaaucuuacgu

SEQ ID NO: 434983 - RNA, 19 nt, Artificial Sequence
  Description of Artificial Sequence: Synthetic oligonucleotide
  Sense strand starting at position 2321 of SEQ ID NO: 316717
agaauucaguuguugggua

SEQ ID NO: 434984 - RNA, 19 nt, Artificial Sequence
  Description of Artificial Sequence: Synthetic oligonucleotide
  Antisense Strand to SEQ ID NO: 434983
uacccaacaacugaauucu

SEQ ID NO: 434985 - RNA, 19 nt, Artificial Sequence
  Description of Artificial Sequence: Synthetic oligonucleotide
  Sense strand starting at position 2333 of SEQ ID NO: 316717
uuggguacccuuuauuacu

SEQ ID NO: 434986 - RNA, 19 nt, Artificial Sequence
  Description of Artificial Sequence: Synthetic oligonucleotide
  Antisense Strand to SEQ ID NO: 434985
aguaauaaaggguacccaa

SEQ ID NO: 434987 - RNA, 19 nt, Artificial Sequence
  Description of Artificial Sequence: Synthetic oligonucleotide
  Sense strand starting at position 2842 of SEQ ID NO: 316717
augucagucauuggugaag

SEQ ID NO: 434988 - RNA, 19 nt, Artificial Sequence
  Description of Artificial Sequence: Synthetic oligonucleotide
  Antisense Strand to SEQ ID NO: 434987
cuucaccaaugacugacau

SEQ ID NO: 434989 - RNA, 19 nt, Artificial Sequence
  Description of Artificial Sequence: Synthetic oligonucleotide
  Sense strand starting at position 3001 of SEQ ID NO: 316717
ggaagcugccuuuaaauag

SEQ ID NO: 434990 - RNA, 19 nt, Artificial Sequence
  Description of Artificial Sequence: Synthetic oligonucleotide
  Antisense Strand to SEQ ID NO: 434989
cuauuuaaaggcagcuucc

SEQ ID NO: 434991 - RNA, 19 nt, Artificial Sequence
  Description of Artificial Sequence: Synthetic oligonucleotide
  Sense strand starting at position 3017 of SEQ ID NO: 316717
uagugauagcuuugaagaa

SEQ ID NO: 434992 - RNA, 19 nt, Artificial Sequence
  Description of Artificial Sequence: Synthetic oligonucleotide
  Antisense Strand to SEQ ID NO: 434991
uucuucaaagcuaucacua

SEQ ID NO: 434993 - RNA, 19 nt, Artificial Sequence
  Description of Artificial Sequence: Synthetic oligonucleotide
  Sense strand starting at position 3159 of SEQ ID NO: 316717
aaggacuuaugaguccaca

SEQ ID NO: 434994 - RNA, 19 nt, Artificial Sequence
  Description of Artificial Sequence: Synthetic oligonucleotide
  Antisense Strand to SEQ ID NO: 434993
uguggacucauaaguccuu

SEQ ID NO: 434995 - RNA, 19 nt, Artificial Sequence
  Description of Artificial Sequence: Synthetic oligonucleotide
  Sense strand starting at position 3335 of SEQ ID NO: 316717
agaaguaucaauggauggu

SEQ ID NO: 434996 - RNA, 19 nt, Artificial Sequence
  Description of Artificial Sequence: Synthetic oligonucleotide
  Antisense Strand to SEQ ID NO: 434995
accauccauugauacuucu

SEQ ID NO: 434997 - RNA, 19 nt, Artificial Sequence
  Description of Artificial Sequence: Synthetic oligonucleotide
  Sense strand starting at position 3352 of SEQ ID NO: 316717
guaggacuagugggugaaa

SEQ ID NO: 434998 - RNA, 19 nt, Artificial Sequence
  Description of Artificial Sequence: Synthetic oligonucleotide
  Antisense Strand to SEQ ID NO: 434997
uuucacccacuaguccuac

SEQ ID NO: 434999 - RNA, 19 nt, Artificial Sequence
  Description of Artificial Sequence: Synthetic oligonucleotide
  Sense strand starting at position 3353 of SEQ ID NO: 316717
uaggacuagugggugaaau

SEQ ID NO: 435000 - RNA, 19 nt, Artificial Sequence
  Description of Artificial Sequence: Synthetic oligonucleotide
  Antisense Strand to SEQ ID NO: 434999
auuucacccacuaguccua

SEQ ID NO: 435001 - RNA, 19 nt, Artificial Sequence
  Description of Artificial Sequence: Synthetic oligonucleotide
  Sense strand starting at position 3354 of SEQ ID NO: 316717
aggacuagugggugaaauu

SEQ ID NO: 435002 - RNA, 19 nt, Artificial Sequence
  Description of Artificial Sequence: Synthetic oligonucleotide
  Antisense Strand to SEQ ID NO: 435001
aauuucacccacuaguccu

SEQ ID NO: 435003 - RNA, 19 nt, Artificial Sequence
  Description of Artificial Sequence: Synthetic oligonucleotide
  Sense strand starting at position 3435 of SEQ ID NO: 316717
uuauccuuacguuggagaa

SEQ ID NO: 435004 - RNA, 19 nt, Artificial Sequence
  Description of Artificial Sequence: Synthetic oligonucleotide
  Antisense Strand to SEQ ID NO: 435003
uucuccaacguaaggauaa

SEQ ID NO: 435005 - RNA, 19 nt, Artificial Sequence
  Description of Artificial Sequence: Synthetic oligonucleotide
  Sense strand starting at position 3436 of SEQ ID NO: 316717
uauccuuacguuggagaaa

SEQ ID NO: 435006 - RNA, 19 nt, Artificial Sequence
  Description of Artificial Sequence: Synthetic oligonucleotide
  Antisense Strand to SEQ ID NO: 435005
uuucuccaacguaaggaua

SEQ ID NO: 435007 - RNA, 19 nt, Artificial Sequence
  Description of Artificial Sequence: Synthetic oligonucleotide
  Sense strand starting at position 3489 of SEQ ID NO: 316717
guaauagugccauaaugag

SEQ ID NO: 435008 - RNA, 19 nt, Artificial Sequence
  Description of Artificial Sequence: Synthetic oligonucleotide
  Antisense Strand to SEQ ID NO: 435007
cucauuauggcacuauuac

SEQ ID NO: 435009 - RNA, 19 nt, Artificial Sequence
  Description of Artificial Sequence: Synthetic oligonucleotide
  Sense strand starting at position 3505 of SEQ ID NO: 316717
gagacuaaucaauggcaug

SEQ ID NO: 435010 - RNA, 19 nt, Artificial Sequence
  Description of Artificial Sequence: Synthetic oligonucleotide
  Antisense Strand to SEQ ID NO: 435009
caugccauugauuagucuc

SEQ ID NO: 435011 - RNA, 19 nt, Artificial Sequence
  Description of Artificial Sequence: Synthetic oligonucleotide
  Sense strand starting at position 3543 of SEQ ID NO: 316717
cugagaacuuagccucacu

SEQ ID NO: 435012 - RNA, 19 nt, Artificial Sequence
  Description of Artificial Sequence: Synthetic oligonucleotide
  Antisense Strand to SEQ ID NO: 435011
agugaggcuaaguucucag

SEQ ID NO: 435013 - RNA, 19 nt, Artificial Sequence
  Description of Artificial Sequence: Synthetic oligonucleotide
  Sense strand starting at position 3553 of SEQ ID NO: 316717
agccucacuucugugauuu

SEQ ID NO: 435014 - RNA, 19 nt, Artificial Sequence
  Description of Artificial Sequence: Synthetic oligonucleotide
  Antisense Strand to SEQ ID NO: 435013
aaaucacagaagugaggcu

SEQ ID NO: 435015 - RNA, 19 nt, Artificial Sequence
  Description of Artificial Sequence: Synthetic oligonucleotide
  Sense strand starting at position 3554 of SEQ ID NO: 316717
gccucacuucugugauuuc

SEQ ID NO: 435016 - RNA, 19 nt, Artificial Sequence
  Description of Artificial Sequence: Synthetic oligonucleotide
  Antisense Strand to SEQ ID NO: 435015
gaaaucacagaagugaggc

SEQ ID NO: 435017 - RNA, 19 nt, Artificial Sequence
  Description of Artificial Sequence: Synthetic oligonucleotide
  Sense strand starting at position 3583 of SEQ ID NO: 316717
agcauacucugaguugaaa

SEQ ID NO: 435018 - RNA, 19 nt, Artificial Sequence
  Description of Artificial Sequence: Synthetic oligonucleotide
  Antisense Strand to SEQ ID NO: 435017
uuucaacucagaguaugcu

SEQ ID NO: 435019 - RNA, 19 nt, Artificial Sequence
  Description of Artificial Sequence: Synthetic oligonucleotide
  Sense strand starting at position 3607 of SEQ ID NO: 316717
agggauagucugcaaagca

SEQ ID NO: 435020 - RNA, 19 nt, Artificial Sequence
  Description of Artificial Sequence: Synthetic oligonucleotide
  Antisense Strand to SEQ ID NO: 435019
ugcuuugcagacuaucccu

SEQ ID NO: 435021 - RNA, 19 nt, Artificial Sequence
  Description of Artificial Sequence: Synthetic oligonucleotide
  Sense strand starting at position 3786 of SEQ ID NO: 316717
aggucuguagauuagguaa

SEQ ID NO: 435022 - RNA, 19 nt, Artificial Sequence
  Description of Artificial Sequence: Synthetic oligonucleotide
  Antisense Strand to SEQ ID NO: 435021
uuaccuaaucuacagaccu

SEQ ID NO: 435023 - RNA, 19 nt, Artificial Sequence
  Description of Artificial Sequence: Synthetic oligonucleotide
  Sense strand starting at position 3793 of SEQ ID NO: 316717
uagauuagguaaucguauu

SEQ ID NO: 435024 - RNA, 19 nt, Artificial Sequence
  Description of Artificial Sequence: Synthetic oligonucleotide
  Antisense Strand to SEQ ID NO: 435023
aauacgauuaccuaaucua

SEQ ID NO: 435025 - RNA, 19 nt, Artificial Sequence
  Description of Artificial Sequence: Synthetic oligonucleotide
  Sense strand starting at position 3794 of SEQ ID NO: 316717
agauuagguaaucguauua

SEQ ID NO: 435026 - RNA, 19 nt, Artificial Sequence
  Description of Artificial Sequence: Synthetic oligonucleotide
  Antisense Strand to SEQ ID NO: 435025
uaauacgauuaccuaaucu

SEQ ID NO: 435027 - RNA, 19 nt, Artificial Sequence
  Description of Artificial Sequence: Synthetic oligonucleotide
  Sense strand starting at position 3805 of SEQ ID NO: 316717
ucguauuaaauugauguga

SEQ ID NO: 435028 - RNA, 19 nt, Artificial Sequence
  Description of Artificial Sequence: Synthetic oligonucleotide
  Antisense Strand to SEQ ID NO: 435027
ucacaucaauuuaauacga

SEQ ID NO: 435029 - RNA, 19 nt, Artificial Sequence
  Description of Artificial Sequence: Synthetic oligonucleotide
  Sense strand starting at position 394 of SEQ ID NO: 316718
caugaagaacugugccuua

SEQ ID NO: 435030 - RNA, 19 nt, Artificial Sequence
  Description of Artificial Sequence: Synthetic oligonucleotide
  Antisense Strand to SEQ ID NO: 435029
uaaggcacaguucuucaug

SEQ ID NO: 435031 - RNA, 19 nt, Artificial Sequence
  Description of Artificial Sequence: Synthetic oligonucleotide
  Sense strand starting at position 487 of SEQ ID NO: 316718
uuagucuaucaagauguuu

SEQ ID NO: 435032 - RNA, 19 nt, Artificial Sequence
  Description of Artificial Sequence: Synthetic oligonucleotide
  Antisense Strand to SEQ ID NO: 435031
aaacaucuugauagacuaa

SEQ ID NO: 435033 - RNA, 19 nt, Artificial Sequence
  Description of Artificial Sequence: Synthetic oligonucleotide
  Sense strand starting at position 551 of SEQ ID NO: 316718
agauguaaacauuguuuag

SEQ ID NO: 435034 - RNA, 19 nt, Artificial Sequence
  Description of Artificial Sequence: Synthetic oligonucleotide
  Antisense Strand to SEQ ID NO: 435033
cuaaacaauguuuacaucu

SEQ ID NO: 435035 - RNA, 19 nt, Artificial Sequence
  Description of Artificial Sequence: Synthetic oligonucleotide
  Sense strand starting at position 757 of SEQ ID NO: 316718
ugaaaugccucuguaacca

SEQ ID NO: 435036 - RNA, 19 nt, Artificial Sequence
  Description of Artificial Sequence: Synthetic oligonucleotide
  Antisense Strand to SEQ ID NO: 435035
ugguuacagaggcauuuca

SEQ ID NO: 435037 - RNA, 19 nt, Artificial Sequence
  Description of Artificial Sequence: Synthetic oligonucleotide
  Sense strand starting at position 768 of SEQ ID NO: 316718
uguaaccaaucuuugaagu

SEQ ID NO: 435038 - RNA, 19 nt, Artificial Sequence
  Description of Artificial Sequence: Synthetic oligonucleotide
  Antisense Strand to SEQ ID NO: 435037
acuucaaagauugguuaca

SEQ ID NO: 435039 - RNA, 19 nt, Artificial Sequence
  Description of Artificial Sequence: Synthetic oligonucleotide
  Sense strand starting at position 769 of SEQ ID NO: 316718
guaaccaaucuuugaaguc

SEQ ID NO: 435040 - RNA, 19 nt, Artificial Sequence
  Description of Artificial Sequence: Synthetic oligonucleotide
  Antisense Strand to SEQ ID NO: 435039
gacuucaaagauugguuac

SEQ ID NO: 435041 - RNA, 19 nt, Artificial Sequence
  Description of Artificial Sequence: Synthetic oligonucleotide
  Sense strand starting at position 991 of SEQ ID NO: 316718
gggccuauccgggaaguuu

SEQ ID NO: 435042 - RNA, 19 nt, Artificial Sequence
  Description of Artificial Sequence: Synthetic oligonucleotide
  Antisense Strand to SEQ ID NO: 435041
aaacuucccggauaggccc

SEQ ID NO: 435043 - RNA, 19 nt, Artificial Sequence
  Description of Artificial Sequence: Synthetic oligonucleotide
  Sense strand starting at position 999 of SEQ ID NO: 316718
ccgggaaguuuggcuagga

SEQ ID NO: 435044 - RNA, 19 nt, Artificial Sequence
  Description of Artificial Sequence: Synthetic oligonucleotide
  Antisense Strand to SEQ ID NO: 435043
uccuagccaaacuucccgg

SEQ ID NO: 435045 - RNA, 19 nt, Artificial Sequence
  Description of Artificial Sequence: Synthetic oligonucleotide
  Sense strand starting at position 1000 of SEQ ID NO: 316718
cgggaaguuuggcuaggaa

SEQ ID NO: 435046 - RNA, 19 nt, Artificial Sequence
  Description of Artificial Sequence: Synthetic oligonucleotide
  Antisense Strand to SEQ ID NO: 435045
uuccuagccaaacuucccg

SEQ ID NO: 435047 - RNA, 19 nt, Artificial Sequence
  Description of Artificial Sequence: Synthetic oligonucleotide
  Sense strand starting at position 1003 of SEQ ID NO: 316718
gaaguuuggcuaggaauau

SEQ ID NO: 435048 - RNA, 19 nt, Artificial Sequence
  Description of Artificial Sequence: Synthetic oligonucleotide
  Antisense Strand to SEQ ID NO: 435047
auauuccuagccaaacuuc

SEQ ID NO: 435049 - RNA, 19 nt, Artificial Sequence
  Description of Artificial Sequence: Synthetic oligonucleotide
  Sense strand starting at position 1065 of SEQ ID NO: 316718
acugaugacuuguuaauuc

SEQ ID NO: 435050 - RNA, 19 nt, Artificial Sequence
  Description of Artificial Sequence: Synthetic oligonucleotide
  Antisense Strand to SEQ ID NO: 435049
gaauuaacaagucaucagu

SEQ ID NO: 435051 - RNA, 19 nt, Artificial Sequence
  Description of Artificial Sequence: Synthetic oligonucleotide
  Sense strand starting at position 1172 of SEQ ID NO: 316718
ggcuguugggcagaggaaa

SEQ ID NO: 435052 - RNA, 19 nt, Artificial Sequence
  Description of Artificial Sequence: Synthetic oligonucleotide
  Antisense Strand to SEQ ID NO: 435051
uuuccucugcccaacagcc

SEQ ID NO: 435053 - RNA, 19 nt, Artificial Sequence
  Description of Artificial Sequence: Synthetic oligonucleotide
  Sense strand starting at position 1239 of SEQ ID NO: 316718
cuaucaaaguuaguuguga

SEQ ID NO: 435054 - RNA, 19 nt, Artificial Sequence
  Description of Artificial Sequence: Synthetic oligonucleotide
  Antisense Strand to SEQ ID NO: 435053
ucacaacuaacuuugauag

SEQ ID NO: 435055 - RNA, 19 nt, Artificial Sequence
  Description of Artificial Sequence: Synthetic oligonucleotide
  Sense strand starting at position 1240 of SEQ ID NO: 316718
uaucaaaguuaguugugau

SEQ ID NO: 435056 - RNA, 19 nt, Artificial Sequence
  Description of Artificial Sequence: Synthetic oligonucleotide
  Antisense Strand to SEQ ID NO: 435055
aucacaacuaacuuugaua

SEQ ID NO: 435057 - RNA, 19 nt, Artificial Sequence
  Description of Artificial Sequence: Synthetic oligonucleotide
  Sense strand starting at position 1247 of SEQ ID NO: 316718
guuaguugugaucaucaac

SEQ ID NO: 435058 - RNA, 19 nt, Artificial Sequence
  Description of Artificial Sequence: Synthetic oligonucleotide
  Antisense Strand to SEQ ID NO: 435057
guugaugaucacaacuaac

SEQ ID NO: 435059 - RNA, 19 nt, Artificial Sequence
  Description of Artificial Sequence: Synthetic oligonucleotide
  Sense strand starting at position 1280 of SEQ ID NO: 316718
ucaggaauaugucugcaca

SEQ ID NO: 435060 - RNA, 19 nt, Artificial Sequence
  Description of Artificial Sequence: Synthetic oligonucleotide
  Antisense Strand to SEQ ID NO: 435059
ugugcagacauauuccuga

SEQ ID NO: 435061 - RNA, 19 nt, Artificial Sequence
  Description of Artificial Sequence: Synthetic oligonucleotide
  Sense strand starting at position 1283 of SEQ ID NO: 316718
ggaauaugucugcacaacu

SEQ ID NO: 435062 - RNA, 19 nt, Artificial Sequence
  Description of Artificial Sequence: Synthetic oligonucleotide
  Antisense Strand to SEQ ID NO: 435061
aguugugcagacauauucc

SEQ ID NO: 435063 - RNA, 19 nt, Artificial Sequence
  Description of Artificial Sequence: Synthetic oligonucleotide
  Sense strand starting at position 1302 of SEQ ID NO: 316718
accuguaaugcgucucugu

SEQ ID NO: 435064 - RNA, 19 nt, Artificial Sequence
  Description of Artificial Sequence: Synthetic oligonucleotide
  Antisense Strand to SEQ ID NO: 435063
acagagacgcauuacaggu

SEQ ID NO: 435065 - RNA, 19 nt, Artificial Sequence
  Description of Artificial Sequence: Synthetic oligonucleotide
  Sense strand starting at position 1303 of SEQ ID NO: 316718
ccuguaaugcgucucugua

SEQ ID NO: 435066 - RNA, 19 nt, Artificial Sequence
  Description of Artificial Sequence: Synthetic oligonucleotide
  Antisense Strand to SEQ ID NO: 435065
uacagagacgcauuacagg

SEQ ID NO: 435067 - RNA, 19 nt, Artificial Sequence
  Description of Artificial Sequence: Synthetic oligonucleotide
  Sense strand starting at position 1304 of SEQ ID NO: 316718
cuguaaugcgucucuguaa

SEQ ID NO: 435068 - RNA, 19 nt, Artificial Sequence
  Description of Artificial Sequence: Synthetic oligonucleotide
  Antisense Strand to SEQ ID NO: 435067
uuacagagacgcauuacag

SEQ ID NO: 435069 - RNA, 19 nt, Artificial Sequence
  Description of Artificial Sequence: Synthetic oligonucleotide
  Sense strand starting at position 1338 of SEQ ID NO: 316718
aaucaauuagugugaggug

SEQ ID NO: 435070 - RNA, 19 nt, Artificial Sequence
  Description of Artificial Sequence: Synthetic oligonucleotide
  Antisense Strand to SEQ ID NO: 435069
caccucacacuaauugauu

SEQ ID NO: 435071 - RNA, 19 nt, Artificial Sequence
  Description of Artificial Sequence: Synthetic oligonucleotide
  Sense strand starting at position 1394 of SEQ ID NO: 316718
uacacuagguugguguaaa

SEQ ID NO: 435072 - RNA, 19 nt, Artificial Sequence
  Description of Artificial Sequence: Synthetic oligonucleotide
  Antisense Strand to SEQ ID NO: 435071
uuuacaccaaccuagugua

SEQ ID NO: 435073 - RNA, 19 nt, Artificial Sequence
  Description of Artificial Sequence: Synthetic oligonucleotide
  Sense strand starting at position 1454 of SEQ ID NO: 316718
gagagaaacaggugucugu

SEQ ID NO: 435074 - RNA, 19 nt, Artificial Sequence
  Description of Artificial Sequence: Synthetic oligonucleotide
  Antisense Strand to SEQ ID NO: 435073
acagacaccuguuucucuc

SEQ ID NO: 435075 - RNA, 19 nt, Artificial Sequence
  Description of Artificial Sequence: Synthetic oligonucleotide
  Sense strand starting at position 1465 of SEQ ID NO: 316718
gugucuguccuagaucaca

SEQ ID NO: 435076 - RNA, 19 nt, Artificial Sequence
  Description of Artificial Sequence: Synthetic oligonucleotide
  Antisense Strand to SEQ ID NO: 435075
ugugaucuaggacagacac

SEQ ID NO: 435077 - RNA, 19 nt, Artificial Sequence
  Description of Artificial Sequence: Synthetic oligonucleotide
  Sense strand starting at position 1488 of SEQ ID NO: 316718
gagacuucucagcagaccu

SEQ ID NO: 435078 - RNA, 19 nt, Artificial Sequence
  Description of Artificial Sequence: Synthetic oligonucleotide
  Antisense Strand to SEQ ID NO: 435077
aggucugcugagaagucuc

SEQ ID NO: 435079 - RNA, 19 nt, Artificial Sequence
  Description of Artificial Sequence: Synthetic oligonucleotide
  Sense strand starting at position 2170 of SEQ ID NO: 316718
cgacucaggcuucagugaa

SEQ ID NO: 435080 - RNA, 19 nt, Artificial Sequence
  Description of Artificial Sequence: Synthetic oligonucleotide
  Antisense Strand to SEQ ID NO: 435079
uucacugaagccugagucg

SEQ ID NO: 435081 - RNA, 19 nt, Artificial Sequence
  Description of Artificial Sequence: Synthetic oligonucleotide
  Sense strand starting at position 2235 of SEQ ID NO: 316718
guaugacacugccuacaua

SEQ ID NO: 435082 - RNA, 19 nt, Artificial Sequence
  Description of Artificial Sequence: Synthetic oligonucleotide
  Antisense Strand to SEQ ID NO: 435081
uauguaggcagugucauac

SEQ ID NO: 435083 - RNA, 19 nt, Artificial Sequence
  Description of Artificial Sequence: Synthetic oligonucleotide
  Sense strand starting at position 2447 of SEQ ID NO: 316718
aauguuuguguacaagaag

SEQ ID NO: 435084 - RNA, 19 nt, Artificial Sequence
  Description of Artificial Sequence: Synthetic oligonucleotide
  Antisense Strand to SEQ ID NO: 435083
cuucuuguacacaaacauu

SEQ ID NO: 435085 - RNA, 19 nt, Artificial Sequence
  Description of Artificial Sequence: Synthetic oligonucleotide
  Sense strand starting at position 2450 of SEQ ID NO: 316718
guuuguguacaagaagcaa

SEQ ID NO: 435086 - RNA, 19 nt, Artificial Sequence
  Description of Artificial Sequence: Synthetic oligonucleotide
  Antisense Strand to SEQ ID NO: 435085
uugcuucuuguacacaaac

SEQ ID NO: 435087 - RNA, 19 nt, Artificial Sequence
  Description of Artificial Sequence: Synthetic oligonucleotide
  Sense strand starting at position 3330 of SEQ ID NO: 316718
gcagaagaauccuccuaua

SEQ ID NO: 435088 - RNA, 19 nt, Artificial Sequence
  Description of Artificial Sequence: Synthetic oligonucleotide
  Antisense Strand to SEQ ID NO: 435087
uauaggaggauucuucugc

SEQ ID NO: 435089 - RNA, 19 nt, Artificial Sequence
  Description of Artificial Sequence: Synthetic oligonucleotide
  Sense strand starting at position 3384 of SEQ ID NO: 316718
ucuagagaauguuuggguu

SEQ ID NO: 435090 - RNA, 19 nt, Artificial Sequence
  Description of Artificial Sequence: Synthetic oligonucleotide
  Antisense Strand to SEQ ID NO: 435089
aacccaaacauucucuaga

SEQ ID NO: 435091 - RNA, 19 nt, Artificial Sequence
  Description of Artificial Sequence: Synthetic oligonucleotide
  Sense strand starting at position 3388 of SEQ ID NO: 316718
gagaauguuuggguuuauu

SEQ ID NO: 435092 - RNA, 19 nt, Artificial Sequence
  Description of Artificial Sequence: Synthetic oligonucleotide
  Antisense Strand to SEQ ID NO: 435091
aauaaacccaaacauucuc

SEQ ID NO: 435093 - RNA, 19 nt, Artificial Sequence
  Description of Artificial Sequence: Synthetic oligonucleotide
  Sense strand starting at position 3459 of SEQ ID NO: 316718
augguuuggcuauauauug

SEQ ID NO: 435094 - RNA, 19 nt, Artificial Sequence
  Description of Artificial Sequence: Synthetic oligonucleotide
  Antisense Strand to SEQ ID NO: 435093
caauauauagccaaaccau

SEQ ID NO: 435095 - RNA, 19 nt, Artificial Sequence
  Description of Artificial Sequence: Synthetic oligonucleotide
  Sense strand starting at position 3528 of SEQ ID NO: 316718
uuugccauuuggucaacau

SEQ ID NO: 435096 - RNA, 19 nt, Artificial Sequence
  Description of Artificial Sequence: Synthetic oligonucleotide
  Antisense Strand to SEQ ID NO: 435095
auguugaccaaauggcaaa

SEQ ID NO: 435097 - RNA, 19 nt, Artificial Sequence
  Description of Artificial Sequence: Synthetic oligonucleotide
  Sense strand starting at position 3537 of SEQ ID NO: 316718
uggucaacaucucuuugau

SEQ ID NO: 435098 - RNA, 19 nt, Artificial Sequence
  Description of Artificial Sequence: Synthetic oligonucleotide
  Antisense Strand to SEQ ID NO: 435097
aucaaagagauguugacca

SEQ ID NO: 435099 - RNA, 19 nt, Artificial Sequence
  Description of Artificial Sequence: Synthetic oligonucleotide
  Sense strand starting at position 3555 of SEQ ID NO: 316718
ugaaguaaucucuacagca

SEQ ID NO: 435100 - RNA, 19 nt, Artificial Sequence
  Description of Artificial Sequence: Synthetic oligonucleotide
  Antisense Strand to SEQ ID NO: 435099
ugcuguagagauuacuuca

SEQ ID NO: 435101 - RNA, 19 nt, Artificial Sequence
  Description of Artificial Sequence: Synthetic oligonucleotide
  Sense strand starting at position 3701 of SEQ ID NO: 316718
auccuuguuccucacagua

SEQ ID NO: 435102 - RNA, 19 nt, Artificial Sequence
  Description of Artificial Sequence: Synthetic oligonucleotide
  Antisense Strand to SEQ ID NO: 435101
uacugugaggaacaaggau

SEQ ID NO: 435103 - RNA, 19 nt, Artificial Sequence
  Description of Artificial Sequence: Synthetic oligonucleotide
  Sense strand starting at position 3728 of SEQ ID NO: 316718
auuaauagugcguauaacu

SEQ ID NO: 435104 - RNA, 19 nt, Artificial Sequence
  Description of Artificial Sequence: Synthetic oligonucleotide
  Antisense Strand to SEQ ID NO: 435103
aguuauacgcacuauuaau

SEQ ID NO: 435105 - RNA, 19 nt, Artificial Sequence
  Description of Artificial Sequence: Synthetic oligonucleotide
  Sense strand starting at position 3792 of SEQ ID NO: 316718
cagaccugugccugagaaa

SEQ ID NO: 435106 - RNA, 19 nt, Artificial Sequence
  Description of Artificial Sequence: Synthetic oligonucleotide
  Antisense Strand to SEQ ID NO: 435105
uuucucaggcacaggucug

SEQ ID NO: 435107 - RNA, 19 nt, Artificial Sequence
  Description of Artificial Sequence: Synthetic oligonucleotide
  Sense strand starting at position 3793 of SEQ ID NO: 316718
agaccugugccugagaaau

SEQ ID NO: 435108 - RNA, 19 nt, Artificial Sequence
  Description of Artificial Sequence: Synthetic oligonucleotide
  Antisense Strand to SEQ ID NO: 435107
auuucucaggcacaggucu

SEQ ID NO: 435109 - RNA, 19 nt, Artificial Sequence
  Description of Artificial Sequence: Synthetic oligonucleotide
  Sense strand starting at position 202 of SEQ ID NO: 316719
ccgugcaucagugagaaga

SEQ ID NO: 435110 - RNA, 19 nt, Artificial Sequence
  Description of Artificial Sequence: Synthetic oligonucleotide
  Antisense Strand to SEQ ID NO: 435109
ucuucucacugaugcacgg

SEQ ID NO: 435111 - RNA, 19 nt, Artificial Sequence
  Description of Artificial Sequence: Synthetic oligonucleotide
  Sense strand starting at position 370 of SEQ ID NO: 316719
ggaaaucaaaucugguguu

SEQ ID NO: 435112 - RNA, 19 nt, Artificial Sequence
  Description of Artificial Sequence: Synthetic oligonucleotide
  Antisense Strand to SEQ ID NO: 435111
aacaccagauuugauuucc

SEQ ID NO: 435113 - RNA, 19 nt, Artificial Sequence
  Description of Artificial Sequence: Synthetic oligonucleotide
  Sense strand starting at position 750 of SEQ ID NO: 316719
uagcuauguguuuacaaag

SEQ ID NO: 435114 - RNA, 19 nt, Artificial Sequence
  Description of Artificial Sequence: Synthetic oligonucleotide
  Antisense Strand to SEQ ID NO: 435113
cuuuguaaacacauagcua

SEQ ID NO: 435115 - RNA, 19 nt, Artificial Sequence
  Description of Artificial Sequence: Synthetic oligonucleotide
  Sense strand starting at position 966 of SEQ ID NO: 316719
cugaguguuccacaaccag

SEQ ID NO: 435116 - RNA, 19 nt, Artificial Sequence
  Description of Artificial Sequence: Synthetic oligonucleotide
  Antisense Strand to SEQ ID NO: 435115
cugguuguggaacacucag

SEQ ID NO: 435117 - RNA, 19 nt, Artificial Sequence
  Description of Artificial Sequence: Synthetic oligonucleotide
  Sense strand starting at position 1012 of SEQ ID NO: 316719
uauugugagcucugaggga

SEQ ID NO: 435118 - RNA, 19 nt, Artificial Sequence
  Description of Artificial Sequence: Synthetic oligonucleotide
  Antisense Strand to SEQ ID NO: 435117
ucccucagagcucacaaua

SEQ ID NO: 435119 - RNA, 19 nt, Artificial Sequence
  Description of Artificial Sequence: Synthetic oligonucleotide
  Sense strand starting at position 1137 of SEQ ID NO: 316719
guccaucuuccguaaacag

SEQ ID NO: 435120 - RNA, 19 nt, Artificial Sequence
  Description of Artificial Sequence: Synthetic oligonucleotide
  Antisense Strand to SEQ ID NO: 435119
cuguuuacggaagauggac

SEQ ID NO: 435121 - RNA, 19 nt, Artificial Sequence
  Description of Artificial Sequence: Synthetic oligonucleotide
  Sense strand starting at position 1422 of SEQ ID NO: 316719
agaugugauuaauuaaagc

SEQ ID NO: 435122 - RNA, 19 nt, Artificial Sequence
  Description of Artificial Sequence: Synthetic oligonucleotide
  Antisense Strand to SEQ ID NO: 435121
gcuuuaauuaaucacaucu

SEQ ID NO: 435123 - RNA, 19 nt, Artificial Sequence
  Description of Artificial Sequence: Synthetic oligonucleotide
  Sense strand starting at position 1601 of SEQ ID NO: 316719
cucauuugguccuugcaaa

SEQ ID NO: 435124 - RNA, 19 nt, Artificial Sequence
  Description of Artificial Sequence: Synthetic oligonucleotide
  Antisense Strand to SEQ ID NO: 435123
uuugcaaggaccaaaugag

SEQ ID NO: 435125 - RNA, 19 nt, Artificial Sequence
  Description of Artificial Sequence: Synthetic oligonucleotide
  Sense strand starting at position 1602 of SEQ ID NO: 316719
ucauuugguccuugcaaac

SEQ ID NO: 435126 - RNA, 19 nt, Artificial Sequence
  Description of Artificial Sequence: Synthetic oligonucleotide
  Antisense Strand to SEQ ID NO: 435125
guuugcaaggaccaaauga

SEQ ID NO: 435127 - RNA, 19 nt, Artificial Sequence
  Description of Artificial Sequence: Synthetic oligonucleotide
  Sense strand starting at position 1667 of SEQ ID NO: 316719
aucugauacucagagauuu

SEQ ID NO: 435128 - RNA, 19 nt, Artificial Sequence
  Description of Artificial Sequence: Synthetic oligonucleotide
  Antisense Strand to SEQ ID NO: 435127
aaaucucugaguaucagau

SEQ ID NO: 435129 - RNA, 19 nt, Artificial Sequence
  Description of Artificial Sequence: Synthetic oligonucleotide
  Sense strand starting at position 1705 of SEQ ID NO: 316719
agagcuauugcugagacga

SEQ ID NO: 435130 - RNA, 19 nt, Artificial Sequence
  Description of Artificial Sequence: Synthetic oligonucleotide
  Antisense Strand to SEQ ID NO: 435129
ucgucucagcaauagcucu

SEQ ID NO: 435131 - RNA, 19 nt, Artificial Sequence
  Description of Artificial Sequence: Synthetic oligonucleotide
  Sense strand starting at position 1816 of SEQ ID NO: 316719
acguauaaucauggagcca

SEQ ID NO: 435132 - RNA, 19 nt, Artificial Sequence
  Description of Artificial Sequence: Synthetic oligonucleotide
  Antisense Strand to SEQ ID NO: 435131
uggcuccaugauuauacgu

SEQ ID NO: 435133 - RNA, 19 nt, Artificial Sequence
  Description of Artificial Sequence: Synthetic oligonucleotide
  Sense strand starting at position 1995 of SEQ ID NO: 316719
accugauguugcuuuaaag

SEQ ID NO: 435134 - RNA, 19 nt, Artificial Sequence
  Description of Artificial Sequence: Synthetic oligonucleotide
  Antisense Strand to SEQ ID NO: 435133
cuuuaaagcaacaucaggu

SEQ ID NO: 435135 - RNA, 19 nt, Artificial Sequence
  Description of Artificial Sequence: Synthetic oligonucleotide
  Sense strand starting at position 2088 of SEQ ID NO: 316719
gcggugugaggguaagaaa

SEQ ID NO: 435136 - RNA, 19 nt, Artificial Sequence
  Description of Artificial Sequence: Synthetic oligonucleotide
  Antisense Strand to SEQ ID NO: 435135
uuucuuacccucacaccgc

SEQ ID NO: 435137 - RNA, 19 nt, Artificial Sequence
  Description of Artificial Sequence: Synthetic oligonucleotide
  Sense strand starting at position 2138 of SEQ ID NO: 316719
accagaagcuucuuggaau

SEQ ID NO: 435138 - RNA, 19 nt, Artificial Sequence
  Description of Artificial Sequence: Synthetic oligonucleotide
  Antisense Strand to SEQ ID NO: 435137
auuccaagaagcuucuggu

SEQ ID NO: 435139 - RNA, 19 nt, Artificial Sequence
  Description of Artificial Sequence: Synthetic oligonucleotide
  Sense strand starting at position 2273 of SEQ ID NO: 316719
agucuuccucugcaagaga

SEQ ID NO: 435140 - RNA, 19 nt, Artificial Sequence
  Description of Artificial Sequence: Synthetic oligonucleotide
  Antisense Strand to SEQ ID NO: 435139
ucucuugcagaggaagacu

SEQ ID NO: 435141 - RNA, 19 nt, Artificial Sequence
  Description of Artificial Sequence: Synthetic oligonucleotide
  Sense strand starting at position 2276 of SEQ ID NO: 316719
cuuccucugcaagagaaau

SEQ ID NO: 435142 - RNA, 19 nt, Artificial Sequence
  Description of Artificial Sequence: Synthetic oligonucleotide
  Antisense Strand to SEQ ID NO: 435141
auuucucuugcagaggaag

SEQ ID NO: 435143 - RNA, 19 nt, Artificial Sequence
  Description of Artificial Sequence: Synthetic oligonucleotide
  Sense strand starting at position 2293 of SEQ ID NO: 316719
auaagcuguccagaaauau

SEQ ID NO: 435144 - RNA, 19 nt, Artificial Sequence
  Description of Artificial Sequence: Synthetic oligonucleotide
  Antisense Strand to SEQ ID NO: 435143
auauuucuggacagcuuau

SEQ ID NO: 435145 - RNA, 19 nt, Artificial Sequence
  Description of Artificial Sequence: Synthetic oligonucleotide
  Sense strand starting at position 2504 of SEQ ID NO: 316719
agugaucuucccuaguggu

SEQ ID NO: 435146 - RNA, 19 nt, Artificial Sequence
  Description of Artificial Sequence: Synthetic oligonucleotide
  Antisense Strand to SEQ ID NO: 435145
accacuagggaagaucacu

SEQ ID NO: 435147 - RNA, 19 nt, Artificial Sequence
  Description of Artificial Sequence: Synthetic oligonucleotide
  Sense strand starting at position 2522 of SEQ ID NO: 316719
ucaugauggucacugucua

SEQ ID NO: 435148 - RNA, 19 nt, Artificial Sequence
  Description of Artificial Sequence: Synthetic oligonucleotide
  Antisense Strand to SEQ ID NO: 435147
uagacagugaccaucauga

SEQ ID NO: 435149 - RNA, 19 nt, Artificial Sequence
  Description of Artificial Sequence: Synthetic oligonucleotide
  Sense strand starting at position 2523 of SEQ ID NO: 316719
caugauggucacugucuaa

SEQ ID NO: 435150 - RNA, 19 nt, Artificial Sequence
  Description of Artificial Sequence: Synthetic oligonucleotide
  Antisense Strand to SEQ ID NO: 435149
uuagacagugaccaucaug

SEQ ID NO: 435151 - RNA, 19 nt, Artificial Sequence
  Description of Artificial Sequence: Synthetic oligonucleotide
  Sense strand starting at position 2526 of SEQ ID NO: 316719
gauggucacugucuaaaca

SEQ ID NO: 435152 - RNA, 19 nt, Artificial Sequence
  Description of Artificial Sequence: Synthetic oligonucleotide
  Antisense Strand to SEQ ID NO: 435151
uguuuagacagugaccauc

SEQ ID NO: 435153 - RNA, 19 nt, Artificial Sequence
  Description of Artificial Sequence: Synthetic oligonucleotide
  Sense strand starting at position 2527 of SEQ ID NO: 316719
auggucacugucuaaacaa

SEQ ID NO: 435154 - RNA, 19 nt, Artificial Sequence
  Description of Artificial Sequence: Synthetic oligonucleotide
  Antisense Strand to SEQ ID NO: 435153
uuguuuagacagugaccau

SEQ ID NO: 435155 - RNA, 19 nt, Artificial Sequence
  Description of Artificial Sequence: Synthetic oligonucleotide
  Sense strand starting at position 2640 of SEQ ID NO: 316719
uccaguugguuuccugaga

SEQ ID NO: 435156 - RNA, 19 nt, Artificial Sequence
  Description of Artificial Sequence: Synthetic oligonucleotide
  Antisense Strand to SEQ ID NO: 435155
ucucaggaaaccaacugga

SEQ ID NO: 435157 - RNA, 19 nt, Artificial Sequence
  Description of Artificial Sequence: Synthetic oligonucleotide
  Sense strand starting at position 2670 of SEQ ID NO: 316719
ucagcugcuggauauauga

SEQ ID NO: 435158 - RNA, 19 nt, Artificial Sequence
  Description of Artificial Sequence: Synthetic oligonucleotide
  Antisense Strand to SEQ ID NO: 435157
ucauauauccagcagcuga

SEQ ID NO: 435159 - RNA, 19 nt, Artificial Sequence
  Description of Artificial Sequence: Synthetic oligonucleotide
  Sense strand starting at position 2672 of SEQ ID NO: 316719
agcugcuggauauaugaga

SEQ ID NO: 435160 - RNA, 19 nt, Artificial Sequence
  Description of Artificial Sequence: Synthetic oligonucleotide
  Antisense Strand to SEQ ID NO: 435159
ucucauauauccagcagcu

SEQ ID NO: 435161 - RNA, 19 nt, Artificial Sequence
  Description of Artificial Sequence: Synthetic oligonucleotide
  Sense strand starting at position 2692 of SEQ ID NO: 316719
gggauugucacaggugauu

SEQ ID NO: 435162 - RNA, 19 nt, Artificial Sequence
  Description of Artificial Sequence: Synthetic oligonucleotide
  Antisense Strand to SEQ ID NO: 435161
aaucaccugugacaauccc

SEQ ID NO: 435163 - RNA, 19 nt, Artificial Sequence
  Description of Artificial Sequence: Synthetic oligonucleotide
  Sense strand starting at position 2697 of SEQ ID NO: 316719
ugucacaggugauuaagaa

SEQ ID NO: 435164 - RNA, 19 nt, Artificial Sequence
  Description of Artificial Sequence: Synthetic oligonucleotide
  Antisense Strand to SEQ ID NO: 435163
uucuuaaucaccugugaca

SEQ ID NO: 435165 - RNA, 19 nt, Artificial Sequence
  Description of Artificial Sequence: Synthetic oligonucleotide
  Sense strand starting at position 2779 of SEQ ID NO: 316719
uggugagucccugagacuu

SEQ ID NO: 435166 - RNA, 19 nt, Artificial Sequence
  Description of Artificial Sequence: Synthetic oligonucleotide
  Antisense Strand to SEQ ID NO: 435165
aagucucagggacucacca

SEQ ID NO: 435167 - RNA, 19 nt, Artificial Sequence
  Description of Artificial Sequence: Synthetic oligonucleotide
  Sense strand starting at position 2785 of SEQ ID NO: 316719
gucccugagacuugcugaa

SEQ ID NO: 435168 - RNA, 19 nt, Artificial Sequence
  Description of Artificial Sequence: Synthetic oligonucleotide
  Antisense Strand to SEQ ID NO: 435167
uucagcaagucucagggac

SEQ ID NO: 435169 - RNA, 19 nt, Artificial Sequence
  Description of Artificial Sequence: Synthetic oligonucleotide
  Sense strand starting at position 2850 of SEQ ID NO: 316719
agaggaauuugugaauuaa

SEQ ID NO: 435170 - RNA, 19 nt, Artificial Sequence
  Description of Artificial Sequence: Synthetic oligonucleotide
  Antisense Strand to SEQ ID NO: 435169
uuaauucacaaauuccucu

SEQ ID NO: 435171 - RNA, 19 nt, Artificial Sequence
  Description of Artificial Sequence: Synthetic oligonucleotide
  Sense strand starting at position 3317 of SEQ ID NO: 316719
ggagauaauugacauacag

SEQ ID NO: 435172 - RNA, 19 nt, Artificial Sequence
  Description of Artificial Sequence: Synthetic oligonucleotide
  Antisense Strand to SEQ ID NO: 435171
cuguaugucaauuaucucc

SEQ ID NO: 435173 - RNA, 19 nt, Artificial Sequence
  Description of Artificial Sequence: Synthetic oligonucleotide
  Sense strand starting at position 3362 of SEQ ID NO: 316719
aagggaguguuugugauug

SEQ ID NO: 435174 - RNA, 19 nt, Artificial Sequence
  Description of Artificial Sequence: Synthetic oligonucleotide
  Antisense Strand to SEQ ID NO: 435173
caaucacaaacacucccuu

SEQ ID NO: 435175 - RNA, 19 nt, Artificial Sequence
  Description of Artificial Sequence: Synthetic oligonucleotide
  Sense strand starting at position 3632 of SEQ ID NO: 316719
auggaaaguuccucaggcu

SEQ ID NO: 435176 - RNA, 19 nt, Artificial Sequence
  Description of Artificial Sequence: Synthetic oligonucleotide
  Antisense Strand to SEQ ID NO: 435175
agccugaggaacuuuccau

SEQ ID NO: 435177 - RNA, 19 nt, Artificial Sequence
  Description of Artificial Sequence: Synthetic oligonucleotide
  Sense strand starting at position 3633 of SEQ ID NO: 316719
uggaaaguuccucaggcuu

SEQ ID NO: 435178 - RNA, 19 nt, Artificial Sequence
  Description of Artificial Sequence: Synthetic oligonucleotide
  Antisense Strand to SEQ ID NO: 435177
aagccugaggaacuuucca

SEQ ID NO: 435179 - RNA, 19 nt, Artificial Sequence
  Description of Artificial Sequence: Synthetic oligonucleotide
  Sense strand starting at position 3640 of SEQ ID NO: 316719
uuccucaggcuugauguua

SEQ ID NO: 435180 - RNA, 19 nt, Artificial Sequence
  Description of Artificial Sequence: Synthetic oligonucleotide
  Antisense Strand to SEQ ID NO: 435179
uaacaucaagccugaggaa

SEQ ID NO: 435181 - RNA, 19 nt, Artificial Sequence
  Description of Artificial Sequence: Synthetic oligonucleotide
  Sense strand starting at position 3735 of SEQ ID NO: 316719
aggacaaauugaguuccuu

SEQ ID NO: 435182 - RNA, 19 nt, Artificial Sequence
  Description of Artificial Sequence: Synthetic oligonucleotide
  Antisense Strand to SEQ ID NO: 435181
aaggaacucaauuuguccu

SEQ ID NO: 435183 - RNA, 19 nt, Artificial Sequence
  Description of Artificial Sequence: Synthetic oligonucleotide
  Sense strand starting at position 3801 of SEQ ID NO: 316719
gugucagacacuggucaag

SEQ ID NO: 435184 - RNA, 19 nt, Artificial Sequence
  Description of Artificial Sequence: Synthetic oligonucleotide
  Antisense Strand to SEQ ID NO: 435183
cuugaccagugucugacac

SEQ ID NO: 435185 - RNA, 19 nt, Artificial Sequence
  Description of Artificial Sequence: Synthetic oligonucleotide
  Sense strand starting at position 3853 of SEQ ID NO: 316719
uggaacuuauaguuuagga

SEQ ID NO: 435186 - RNA, 19 nt, Artificial Sequence
  Description of Artificial Sequence: Synthetic oligonucleotide
  Antisense Strand to SEQ ID NO: 435185
uccuaaacuauaaguucca

SEQ ID NO: 435187 - RNA, 19 nt, Artificial Sequence
  Description of Artificial Sequence: Synthetic oligonucleotide
  Sense strand starting at position 3960 of SEQ ID NO: 316719
acaaacacagucuguaauu

SEQ ID NO: 435188 - RNA, 19 nt, Artificial Sequence
  Description of Artificial Sequence: Synthetic oligonucleotide
  Antisense Strand to SEQ ID NO: 435187
aauuacagacuguguuugu

SEQ ID NO: 435189 - RNA, 19 nt, Artificial Sequence
  Description of Artificial Sequence: Synthetic oligonucleotide
  Sense strand starting at position 39 of SEQ ID NO: 316720
aggauuauaaugugucuga

SEQ ID NO: 435190 - RNA, 19 nt, Artificial Sequence
  Description of Artificial Sequence: Synthetic oligonucleotide
  Antisense Strand to SEQ ID NO: 435189
ucagacacauuauaauccu

SEQ ID NO: 435191 - RNA, 19 nt, Artificial Sequence
  Description of Artificial Sequence: Synthetic oligonucleotide
  Sense strand starting at position 40 of SEQ ID NO: 316720
ggauuauaaugugucugau

SEQ ID NO: 435192 - RNA, 19 nt, Artificial Sequence
  Description of Artificial Sequence: Synthetic oligonucleotide
  Antisense Strand to SEQ ID NO: 435191
aucagacacauuauaaucc

SEQ ID NO: 435193 - RNA, 19 nt, Artificial Sequence
  Description of Artificial Sequence: Synthetic oligonucleotide
  Sense strand starting at position 361 of SEQ ID NO: 316720
gguuuaaaucuggguccac

SEQ ID NO: 435194 - RNA, 19 nt, Artificial Sequence
  Description of Artificial Sequence: Synthetic oligonucleotide
  Antisense Strand to SEQ ID NO: 435193
guggacccagauuuaaacc

SEQ ID NO: 435195 - RNA, 19 nt, Artificial Sequence
  Description of Artificial Sequence: Synthetic oligonucleotide
  Sense strand starting at position 362 of SEQ ID NO: 316720
guuuaaaucuggguccaca

SEQ ID NO: 435196 - RNA, 19 nt, Artificial Sequence
  Description of Artificial Sequence: Synthetic oligonucleotide
  Antisense Strand to SEQ ID NO: 435195
uguggacccagauuuaaac

SEQ ID NO: 435197 - RNA, 19 nt, Artificial Sequence
  Description of Artificial Sequence: Synthetic oligonucleotide
  Sense strand starting at position 442 of SEQ ID NO: 316720
auaugaaguccugagcuau

SEQ ID NO: 435198 - RNA, 19 nt, Artificial Sequence
  Description of Artificial Sequence: Synthetic oligonucleotide
  Antisense Strand to SEQ ID NO: 435197
auagcucaggacuucauau

SEQ ID NO: 435199 - RNA, 19 nt, Artificial Sequence
  Description of Artificial Sequence: Synthetic oligonucleotide
  Sense strand starting at position 688 of SEQ ID NO: 316720
gguuguuacaaggaauguu

SEQ ID NO: 435200 - RNA, 19 nt, Artificial Sequence
  Description of Artificial Sequence: Synthetic oligonucleotide
  Antisense Strand to SEQ ID NO: 435199
aacauuccuuguaacaacc

SEQ ID NO: 435201 - RNA, 19 nt, Artificial Sequence
  Description of Artificial Sequence: Synthetic oligonucleotide
  Sense strand starting at position 691 of SEQ ID NO: 316720
uguuacaaggaauguuauu

SEQ ID NO: 435202 - RNA, 19 nt, Artificial Sequence
  Description of Artificial Sequence: Synthetic oligonucleotide
  Antisense Strand to SEQ ID NO: 435201
aauaacauuccuuguaaca

SEQ ID NO: 435203 - RNA, 19 nt, Artificial Sequence
  Description of Artificial Sequence: Synthetic oligonucleotide
  Sense strand starting at position 696 of SEQ ID NO: 316720
caaggaauguuauuauaug

SEQ ID NO: 435204 - RNA, 19 nt, Artificial Sequence
  Description of Artificial Sequence: Synthetic oligonucleotide
  Antisense Strand to SEQ ID NO: 435203
cauauaauaacauuccuug

SEQ ID NO: 435205 - RNA, 19 nt, Artificial Sequence
  Description of Artificial Sequence: Synthetic oligonucleotide
  Sense strand starting at position 729 of SEQ ID NO: 316720
acgguccuagcacauaaua

SEQ ID NO: 435206 - RNA, 19 nt, Artificial Sequence
  Description of Artificial Sequence: Synthetic oligonucleotide
  Antisense Strand to SEQ ID NO: 435205
uauuaugugcuaggaccgu

SEQ ID NO: 435207 - RNA, 19 nt, Artificial Sequence
  Description of Artificial Sequence: Synthetic oligonucleotide
  Sense strand starting at position 767 of SEQ ID NO: 316720
gguuauagucucuacagac

SEQ ID NO: 435208 - RNA, 19 nt, Artificial Sequence
  Description of Artificial Sequence: Synthetic oligonucleotide
  Antisense Strand to SEQ ID NO: 435207
gucuguagagacuauaacc

SEQ ID NO: 435209 - RNA, 19 nt, Artificial Sequence
  Description of Artificial Sequence: Synthetic oligonucleotide
  Sense strand starting at position 798 of SEQ ID NO: 316720
cuguuauuguauuucuagu

SEQ ID NO: 435210 - RNA, 19 nt, Artificial Sequence
  Description of Artificial Sequence: Synthetic oligonucleotide
  Antisense Strand to SEQ ID NO: 435209
acuagaaauacaauaacag

SEQ ID NO: 435211 - RNA, 19 nt, Artificial Sequence
  Description of Artificial Sequence: Synthetic oligonucleotide
  Sense strand starting at position 804 of SEQ ID NO: 316720
uuguauuucuaguuaagca

SEQ ID NO: 435212 - RNA, 19 nt, Artificial Sequence
  Description of Artificial Sequence: Synthetic oligonucleotide
  Antisense Strand to SEQ ID NO: 435211
ugcuuaacuagaaauacaa

SEQ ID NO: 435213 - RNA, 19 nt, Artificial Sequence
  Description of Artificial Sequence: Synthetic oligonucleotide
  Sense strand starting at position 976 of SEQ ID NO: 316720
cuggucuuccuagaaugca

SEQ ID NO: 435214 - RNA, 19 nt, Artificial Sequence
  Description of Artificial Sequence: Synthetic oligonucleotide
  Antisense Strand to SEQ ID NO: 435213
ugcauucuaggaagaccag

SEQ ID NO: 435215 - RNA, 19 nt, Artificial Sequence
  Description of Artificial Sequence: Synthetic oligonucleotide
  Sense strand starting at position 1006 of SEQ ID NO: 316720
gaaggaugccuauaccgau

SEQ ID NO: 435216 - RNA, 19 nt, Artificial Sequence
  Description of Artificial Sequence: Synthetic oligonucleotide
  Antisense Strand to SEQ ID NO: 435215
aucgguauaggcauccuuc

SEQ ID NO: 435217 - RNA, 19 nt, Artificial Sequence
  Description of Artificial Sequence: Synthetic oligonucleotide
  Sense strand starting at position 1040 of SEQ ID NO: 316720
aguuaagcccucuaagaau

SEQ ID NO: 435218 - RNA, 19 nt, Artificial Sequence
  Description of Artificial Sequence: Synthetic oligonucleotide
  Antisense Strand to SEQ ID NO: 435217
auucuuagagggcuuaacu

SEQ ID NO: 435219 - RNA, 19 nt, Artificial Sequence
  Description of Artificial Sequence: Synthetic oligonucleotide
  Sense strand starting at position 1152 of SEQ ID NO: 316720
uacuguagugguuacagaa

SEQ ID NO: 435220 - RNA, 19 nt, Artificial Sequence
  Description of Artificial Sequence: Synthetic oligonucleotide
  Antisense Strand to SEQ ID NO: 435219
uucuguaaccacuacagua

SEQ ID NO: 435221 - RNA, 19 nt, Artificial Sequence
  Description of Artificial Sequence: Synthetic oligonucleotide
  Sense strand starting at position 1179 of SEQ ID NO: 316720
aucguaguaaaguaugaga

SEQ ID NO: 435222 - RNA, 19 nt, Artificial Sequence
  Description of Artificial Sequence: Synthetic oligonucleotide
  Antisense Strand to SEQ ID NO: 435221
ucucauacuuuacuacgau

SEQ ID NO: 435223 - RNA, 19 nt, Artificial Sequence
  Description of Artificial Sequence: Synthetic oligonucleotide
  Sense strand starting at position 1181 of SEQ ID NO: 316720
cguaguaaaguaugagaau

SEQ ID NO: 435224 - RNA, 19 nt, Artificial Sequence
  Description of Artificial Sequence: Synthetic oligonucleotide
  Antisense Strand to SEQ ID NO: 435223
auucucauacuuuacuacg

SEQ ID NO: 435225 - RNA, 19 nt, Artificial Sequence
  Description of Artificial Sequence: Synthetic oligonucleotide
  Sense strand starting at position 1580 of SEQ ID NO: 316720
gaaugucagguauguaauc

SEQ ID NO: 435226 - RNA, 19 nt, Artificial Sequence
  Description of Artificial Sequence: Synthetic oligonucleotide
  Antisense Strand to SEQ ID NO: 435225
gauuacauaccugacauuc

SEQ ID NO: 435227 - RNA, 19 nt, Artificial Sequence
  Description of Artificial Sequence: Synthetic oligonucleotide
  Sense strand starting at position 1627 of SEQ ID NO: 316720
gaaccauugguuggcuuaa

SEQ ID NO: 435228 - RNA, 19 nt, Artificial Sequence
  Description of Artificial Sequence: Synthetic oligonucleotide
  Antisense Strand to SEQ ID NO: 435227
uuaagccaaccaaugguuc

SEQ ID NO: 435229 - RNA, 19 nt, Artificial Sequence
  Description of Artificial Sequence: Synthetic oligonucleotide
  Sense strand starting at position 1790 of SEQ ID NO: 316720
gcuuaauagucacuggaug

SEQ ID NO: 435230 - RNA, 19 nt, Artificial Sequence
  Description of Artificial Sequence: Synthetic oligonucleotide
  Antisense Strand to SEQ ID NO: 435229
cauccagugacuauuaagc

SEQ ID NO: 435231 - RNA, 19 nt, Artificial Sequence
  Description of Artificial Sequence: Synthetic oligonucleotide
  Sense strand starting at position 1791 of SEQ ID NO: 316720
cuuaauagucacuggauga

SEQ ID NO: 435232 - RNA, 19 nt, Artificial Sequence
  Description of Artificial Sequence: Synthetic oligonucleotide
  Antisense Strand to SEQ ID NO: 435231
ucauccagugacuauuaag

SEQ ID NO: 435233 - RNA, 19 nt, Artificial Sequence
  Description of Artificial Sequence: Synthetic oligonucleotide
  Sense strand starting at position 2226 of SEQ ID NO: 316720
gaaucugaauccuuagagu

SEQ ID NO: 435234 - RNA, 19 nt, Artificial Sequence
  Description of Artificial Sequence: Synthetic oligonucleotide
  Antisense Strand to SEQ ID NO: 435233
acucuaaggauucagauuc

SEQ ID NO: 435235 - RNA, 19 nt, Artificial Sequence
  Description of Artificial Sequence: Synthetic oligonucleotide
  Sense strand starting at position 2237 of SEQ ID NO: 316720
cuuagagugguccaaccuu

SEQ ID NO: 435236 - RNA, 19 nt, Artificial Sequence
  Description of Artificial Sequence: Synthetic oligonucleotide
  Antisense Strand to SEQ ID NO: 435235
aagguuggaccacucuaag

SEQ ID NO: 435237 - RNA, 19 nt, Artificial Sequence
  Description of Artificial Sequence: Synthetic oligonucleotide
  Sense strand starting at position 2263 of SEQ ID NO: 316720
aggugucuacuagaggcaa

SEQ ID NO: 435238 - RNA, 19 nt, Artificial Sequence
  Description of Artificial Sequence: Synthetic oligonucleotide
  Antisense Strand to SEQ ID NO: 435237
uugccucuaguagacaccu

SEQ ID NO: 435239 - RNA, 19 nt, Artificial Sequence
  Description of Artificial Sequence: Synthetic oligonucleotide
  Sense strand starting at position 2426 of SEQ ID NO: 316720
ucccgauugucuccaagaa

SEQ ID NO: 435240 - RNA, 19 nt, Artificial Sequence
  Description of Artificial Sequence: Synthetic oligonucleotide
  Antisense Strand to SEQ ID NO: 435239
uucuuggagacaaucggga

SEQ ID NO: 435241 - RNA, 19 nt, Artificial Sequence
  Description of Artificial Sequence: Synthetic oligonucleotide
  Sense strand starting at position 2427 of SEQ ID NO: 316720
cccgauugucuccaagaag

SEQ ID NO: 435242 - RNA, 19 nt, Artificial Sequence
  Description of Artificial Sequence: Synthetic oligonucleotide
  Antisense Strand to SEQ ID NO: 435241
cuucuuggagacaaucggg

SEQ ID NO: 435243 - RNA, 19 nt, Artificial Sequence
  Description of Artificial Sequence: Synthetic oligonucleotide
  Sense strand starting at position 2534 of SEQ ID NO: 316720
aguguagucccugaaccag

SEQ ID NO: 435244 - RNA, 19 nt, Artificial Sequence
  Description of Artificial Sequence: Synthetic oligonucleotide
  Antisense Strand to SEQ ID NO: 435243
cugguucagggacuacacu

SEQ ID NO: 435245 - RNA, 19 nt, Artificial Sequence
  Description of Artificial Sequence: Synthetic oligonucleotide
  Sense strand starting at position 2648 of SEQ ID NO: 316720
gguaauuccuaugcacaua

SEQ ID NO: 435246 - RNA, 19 nt, Artificial Sequence
  Description of Artificial Sequence: Synthetic oligonucleotide
  Antisense Strand to SEQ ID NO: 435245
uaugugcauaggaauuacc

SEQ ID NO: 435247 - RNA, 19 nt, Artificial Sequence
  Description of Artificial Sequence: Synthetic oligonucleotide
  Sense strand starting at position 2729 of SEQ ID NO: 316720
ggucuuauuccucauuccu

SEQ ID NO: 435248 - RNA, 19 nt, Artificial Sequence
  Description of Artificial Sequence: Synthetic oligonucleotide
  Antisense Strand to SEQ ID NO: 435247
aggaaugaggaauaagacc

SEQ ID NO: 435249 - RNA, 19 nt, Artificial Sequence
  Description of Artificial Sequence: Synthetic oligonucleotide
  Sense strand starting at position 2802 of SEQ ID NO: 316720
ccucauguuguggaacaua

SEQ ID NO: 435250 - RNA, 19 nt, Artificial Sequence
  Description of Artificial Sequence: Synthetic oligonucleotide
  Antisense Strand to SEQ ID NO: 435249
uauguuccacaacaugagg

SEQ ID NO: 435251 - RNA, 19 nt, Artificial Sequence
  Description of Artificial Sequence: Synthetic oligonucleotide
  Sense strand starting at position 2812 of SEQ ID NO: 316720
uggaacauauccgccaaua

SEQ ID NO: 435252 - RNA, 19 nt, Artificial Sequence
  Description of Artificial Sequence: Synthetic oligonucleotide
  Antisense Strand to SEQ ID NO: 435251
uauuggcggauauguucca

SEQ ID NO: 435253 - RNA, 19 nt, Artificial Sequence
  Description of Artificial Sequence: Synthetic oligonucleotide
  Sense strand starting at position 2814 of SEQ ID NO: 316720
gaacauauccgccaauagu

SEQ ID NO: 435254 - RNA, 19 nt, Artificial Sequence
  Description of Artificial Sequence: Synthetic oligonucleotide
  Antisense Strand to SEQ ID NO: 435253
acuauuggcggauauguuc

SEQ ID NO: 435255 - RNA, 19 nt, Artificial Sequence
  Description of Artificial Sequence: Synthetic oligonucleotide
  Sense strand starting at position 2824 of SEQ ID NO: 316720
gccaauaguuccuugagag

SEQ ID NO: 435256 - RNA, 19 nt, Artificial Sequence
  Description of Artificial Sequence: Synthetic oligonucleotide
  Antisense Strand to SEQ ID NO: 435255
cucucaaggaacuauuggc

SEQ ID NO: 435257 - RNA, 19 nt, Artificial Sequence
  Description of Artificial Sequence: Synthetic oligonucleotide
  Sense strand starting at position 2825 of SEQ ID NO: 316720
ccaauaguuccuugagaga

SEQ ID NO: 435258 - RNA, 19 nt, Artificial Sequence
  Description of Artificial Sequence: Synthetic oligonucleotide
  Antisense Strand to SEQ ID NO: 435257
ucucucaaggaacuauugg

SEQ ID NO: 435259 - RNA, 19 nt, Artificial Sequence
  Description of Artificial Sequence: Synthetic oligonucleotide
  Sense strand starting at position 2974 of SEQ ID NO: 316720
cuuccagaauuguuaagaa

SEQ ID NO: 435260 - RNA, 19 nt, Artificial Sequence
  Description of Artificial Sequence: Synthetic oligonucleotide
  Antisense Strand to SEQ ID NO: 435259
uucuuaacaauucuggaag

SEQ ID NO: 435261 - RNA, 19 nt, Artificial Sequence
  Description of Artificial Sequence: Synthetic oligonucleotide
  Sense strand starting at position 2986 of SEQ ID NO: 316720
uuaagaaacuaugucguua

SEQ ID NO: 435262 - RNA, 19 nt, Artificial Sequence
  Description of Artificial Sequence: Synthetic oligonucleotide
  Antisense Strand to SEQ ID NO: 435261
uaacgacauaguuucuuaa

SEQ ID NO: 435263 - RNA, 19 nt, Artificial Sequence
  Description of Artificial Sequence: Synthetic oligonucleotide
  Sense strand starting at position 3000 of SEQ ID NO: 316720
cguuauauuuccuucuccu

SEQ ID NO: 435264 - RNA, 19 nt, Artificial Sequence
  Description of Artificial Sequence: Synthetic oligonucleotide
  Antisense Strand to SEQ ID NO: 435263
aggagaaggaaauauaacg

SEQ ID NO: 435265 - RNA, 19 nt, Artificial Sequence
  Description of Artificial Sequence: Synthetic oligonucleotide
  Sense strand starting at position 3791 of SEQ ID NO: 316720
cuuuauuucucagugcucu

SEQ ID NO: 435266 - RNA, 19 nt, Artificial Sequence
  Description of Artificial Sequence: Synthetic oligonucleotide
  Antisense Strand to SEQ ID NO: 435265
agagcacugagaaauaaag

SEQ ID NO: 435267 - RNA, 19 nt, Artificial Sequence
  Description of Artificial Sequence: Synthetic oligonucleotide
  Sense strand starting at position 3864 of SEQ ID NO: 316720
uuuaucucugaagauguca

SEQ ID NO: 435268 - RNA, 19 nt, Artificial Sequence
  Description of Artificial Sequence: Synthetic oligonucleotide
  Antisense Strand to SEQ ID NO: 435267
ugacaucuucagagauaaa

SEQ ID NO: 435269 - RNA, 19 nt, Artificial Sequence
  Description of Artificial Sequence: Synthetic oligonucleotide
  Sense strand starting at position 53 of SEQ ID NO: 316721
cccucagaggauuguugua

SEQ ID NO: 435270 - RNA, 19 nt, Artificial Sequence
  Description of Artificial Sequence: Synthetic oligonucleotide
  Antisense Strand to SEQ ID NO: 435269
uacaacaauccucugaggg

SEQ ID NO: 435271 - RNA, 19 nt, Artificial Sequence
  Description of Artificial Sequence: Synthetic oligonucleotide
  Sense strand starting at position 55 of SEQ ID NO: 316721
cucagaggauuguuguaag

SEQ ID NO: 435272 - RNA, 19 nt, Artificial Sequence
  Description of Artificial Sequence: Synthetic oligonucleotide
  Antisense Strand to SEQ ID NO: 435271
cuuacaacaauccucugag

SEQ ID NO: 435273 - RNA, 19 nt, Artificial Sequence
  Description of Artificial Sequence: Synthetic oligonucleotide
  Sense strand starting at position 58 of SEQ ID NO: 316721
agaggauuguuguaaggau

SEQ ID NO: 435274 - RNA, 19 nt, Artificial Sequence
  Description of Artificial Sequence: Synthetic oligonucleotide
  Antisense Strand to SEQ ID NO: 435273
auccuuacaacaauccucu

SEQ ID NO: 435275 - RNA, 19 nt, Artificial Sequence
  Description of Artificial Sequence: Synthetic oligonucleotide
  Sense strand starting at position 112 of SEQ ID NO: 316721
auauuuaucuaggagccau

SEQ ID NO: 435276 - RNA, 19 nt, Artificial Sequence
  Description of Artificial Sequence: Synthetic oligonucleotide
  Antisense Strand to SEQ ID NO: 435275
auggcuccuagauaaauau

SEQ ID NO: 435277 - RNA, 19 nt, Artificial Sequence
  Description of Artificial Sequence: Synthetic oligonucleotide
  Sense strand starting at position 172 of SEQ ID NO: 316721
auauaugugccauacauug

SEQ ID NO: 435278 - RNA, 19 nt, Artificial Sequence
  Description of Artificial Sequence: Synthetic oligonucleotide
  Antisense Strand to SEQ ID NO: 435277
caauguauggcacauauau

SEQ ID NO: 435279 - RNA, 19 nt, Artificial Sequence
  Description of Artificial Sequence: Synthetic oligonucleotide
  Sense strand starting at position 358 of SEQ ID NO: 316721
ggucuugauuuagaagaua

SEQ ID NO: 435280 - RNA, 19 nt, Artificial Sequence
  Description of Artificial Sequence: Synthetic oligonucleotide
  Antisense Strand to SEQ ID NO: 435279
uaucuucuaaaucaagacc

SEQ ID NO: 435281 - RNA, 19 nt, Artificial Sequence
  Description of Artificial Sequence: Synthetic oligonucleotide
  Sense strand starting at position 369 of SEQ ID NO: 316721
agaagauauuucugaauag

SEQ ID NO: 435282 - RNA, 19 nt, Artificial Sequence
  Description of Artificial Sequence: Synthetic oligonucleotide
  Antisense Strand to SEQ ID NO: 435281
cuauucagaaauaucuucu

SEQ ID NO: 435283 - RNA, 19 nt, Artificial Sequence
  Description of Artificial Sequence: Synthetic oligonucleotide
  Sense strand starting at position 742 of SEQ ID NO: 316721
aguuuagguguucaccagu

SEQ ID NO: 435284 - RNA, 19 nt, Artificial Sequence
  Description of Artificial Sequence: Synthetic oligonucleotide
  Antisense Strand to SEQ ID NO: 435283
acuggugaacaccuaaacu

SEQ ID NO: 435285 - RNA, 19 nt, Artificial Sequence
  Description of Artificial Sequence: Synthetic oligonucleotide
  Sense strand starting at position 748 of SEQ ID NO: 316721
gguguucaccagugaacug

SEQ ID NO: 435286 - RNA, 19 nt, Artificial Sequence
  Description of Artificial Sequence: Synthetic oligonucleotide
  Antisense Strand to SEQ ID NO: 435285
caguucacuggugaacacc

SEQ ID NO: 435287 - RNA, 19 nt, Artificial Sequence
  Description of Artificial Sequence: Synthetic oligonucleotide
  Sense strand starting at position 798 of SEQ ID NO: 316721
acacaaagaucagaaguga

SEQ ID NO: 435288 - RNA, 19 nt, Artificial Sequence
  Description of Artificial Sequence: Synthetic oligonucleotide
  Antisense Strand to SEQ ID NO: 435287
ucacuucugaucuuugugu

SEQ ID NO: 435289 - RNA, 19 nt, Artificial Sequence
  Description of Artificial Sequence: Synthetic oligonucleotide
  Sense strand starting at position 806 of SEQ ID NO: 316721
aucagaagugauggcauau

SEQ ID NO: 435290 - RNA, 19 nt, Artificial Sequence
  Description of Artificial Sequence: Synthetic oligonucleotide
  Antisense Strand to SEQ ID NO: 435289
auaugccaucacuucugau

SEQ ID NO: 435291 - RNA, 19 nt, Artificial Sequence
  Description of Artificial Sequence: Synthetic oligonucleotide
  Sense strand starting at position 825 of SEQ ID NO: 316721
accauacaugacuguguaa

SEQ ID NO: 435292 - RNA, 19 nt, Artificial Sequence
  Description of Artificial Sequence: Synthetic oligonucleotide
  Antisense Strand to SEQ ID NO: 435291
uuacacagucauguauggu

SEQ ID NO: 435293 - RNA, 19 nt, Artificial Sequence
  Description of Artificial Sequence: Synthetic oligonucleotide
  Sense strand starting at position 828 of SEQ ID NO: 316721
auacaugacuguguaacua

SEQ ID NO: 435294 - RNA, 19 nt, Artificial Sequence
  Description of Artificial Sequence: Synthetic oligonucleotide
  Antisense Strand to SEQ ID NO: 435293
uaguuacacagucauguau

SEQ ID NO: 435295 - RNA, 19 nt, Artificial Sequence
  Description of Artificial Sequence: Synthetic oligonucleotide
  Sense strand starting at position 832 of SEQ ID NO: 316721
augacuguguaacuaguau

SEQ ID NO: 435296 - RNA, 19 nt, Artificial Sequence
  Description of Artificial Sequence: Synthetic oligonucleotide
  Antisense Strand to SEQ ID NO: 435295
auacuaguuacacagucau

SEQ ID NO: 435297 - RNA, 19 nt, Artificial Sequence
  Description of Artificial Sequence: Synthetic oligonucleotide
  Sense strand starting at position 862 of SEQ ID NO: 316721
uaggguaaaugcucauaaa

SEQ ID NO: 435298 - RNA, 19 nt, Artificial Sequence
  Description of Artificial Sequence: Synthetic oligonucleotide
  Antisense Strand to SEQ ID NO: 435297
uuuaugagcauuuacccua

SEQ ID NO: 435299 - RNA, 19 nt, Artificial Sequence
  Description of Artificial Sequence: Synthetic oligonucleotide
  Sense strand starting at position 932 of SEQ ID NO: 316721
gagugacucuggguuaacu

SEQ ID NO: 435300 - RNA, 19 nt, Artificial Sequence
  Description of Artificial Sequence: Synthetic oligonucleotide
  Antisense Strand to SEQ ID NO: 435299
aguuaacccagagucacuc

SEQ ID NO: 435301 - RNA, 19 nt, Artificial Sequence
  Description of Artificial Sequence: Synthetic oligonucleotide
  Sense strand starting at position 941 of SEQ ID NO: 316721
uggguuaacuugucuggau

SEQ ID NO: 435302 - RNA, 19 nt, Artificial Sequence
  Description of Artificial Sequence: Synthetic oligonucleotide
  Antisense Strand to SEQ ID NO: 435301
auccagacaaguuaaccca

SEQ ID NO: 435303 - RNA, 19 nt, Artificial Sequence
  Description of Artificial Sequence: Synthetic oligonucleotide
  Sense strand starting at position 942 of SEQ ID NO: 316721
ggguuaacuugucuggauc

SEQ ID NO: 435304 - RNA, 19 nt, Artificial Sequence
  Description of Artificial Sequence: Synthetic oligonucleotide
  Antisense Strand to SEQ ID NO: 435303
gauccagacaaguuaaccc

SEQ ID NO: 435305 - RNA, 19 nt, Artificial Sequence
  Description of Artificial Sequence: Synthetic oligonucleotide
  Sense strand starting at position 943 of SEQ ID NO: 316721
gguuaacuugucuggaucu

SEQ ID NO: 435306 - RNA, 19 nt, Artificial Sequence
  Description of Artificial Sequence: Synthetic oligonucleotide
  Antisense Strand to SEQ ID NO: 435305
agauccagacaaguuaacc

SEQ ID NO: 435307 - RNA, 19 nt, Artificial Sequence
  Description of Artificial Sequence: Synthetic oligonucleotide
  Sense strand starting at position 945 of SEQ ID NO: 316721
uuaacuugucuggaucuua

SEQ ID NO: 435308 - RNA, 19 nt, Artificial Sequence
  Description of Artificial Sequence: Synthetic oligonucleotide
  Antisense Strand to SEQ ID NO: 435307
uaagauccagacaaguuaa

SEQ ID NO: 435309 - RNA, 19 nt, Artificial Sequence
  Description of Artificial Sequence: Synthetic oligonucleotide
  Sense strand starting at position 971 of SEQ ID NO: 316721
guaaacuagcaaugugucu

SEQ ID NO: 435310 - RNA, 19 nt, Artificial Sequence
  Description of Artificial Sequence: Synthetic oligonucleotide
  Antisense Strand to SEQ ID NO: 435309
agacacauugcuaguuuac

SEQ ID NO: 435311 - RNA, 19 nt, Artificial Sequence
  Description of Artificial Sequence: Synthetic oligonucleotide
  Sense strand starting at position 986 of SEQ ID NO: 316721
gucugcuucgccuaucuca

SEQ ID NO: 435312 - RNA, 19 nt, Artificial Sequence
  Description of Artificial Sequence: Synthetic oligonucleotide
  Antisense Strand to SEQ ID NO: 435311
ugagauaggcgaagcagac

SEQ ID NO: 435313 - RNA, 19 nt, Artificial Sequence
  Description of Artificial Sequence: Synthetic oligonucleotide
  Sense strand starting at position 1001 of SEQ ID NO: 316721
cucauaggauacuugugau

SEQ ID NO: 435314 - RNA, 19 nt, Artificial Sequence
  Description of Artificial Sequence: Synthetic oligonucleotide
  Antisense Strand to SEQ ID NO: 435313
aucacaaguauccuaugag

SEQ ID NO: 435315 - RNA, 19 nt, Artificial Sequence
  Description of Artificial Sequence: Synthetic oligonucleotide
  Sense strand starting at position 1005 of SEQ ID NO: 316721
uaggauacuugugaucaaa

SEQ ID NO: 435316 - RNA, 19 nt, Artificial Sequence
  Description of Artificial Sequence: Synthetic oligonucleotide
  Antisense Strand to SEQ ID NO: 435315
uuugaucacaaguauccua

SEQ ID NO: 435317 - RNA, 19 nt, Artificial Sequence
  Description of Artificial Sequence: Synthetic oligonucleotide
  Sense strand starting at position 1007 of SEQ ID NO: 316721
ggauacuugugaucaaaug

SEQ ID NO: 435318 - RNA, 19 nt, Artificial Sequence
  Description of Artificial Sequence: Synthetic oligonucleotide
  Antisense Strand to SEQ ID NO: 435317
cauuugaucacaaguaucc

SEQ ID NO: 435319 - RNA, 19 nt, Artificial Sequence
  Description of Artificial Sequence: Synthetic oligonucleotide
  Sense strand starting at position 1040 of SEQ ID NO: 316721
uguaucuggcgcuaauaaa

SEQ ID NO: 435320 - RNA, 19 nt, Artificial Sequence
  Description of Artificial Sequence: Synthetic oligonucleotide
  Antisense Strand to SEQ ID NO: 435319
uuuauuagcgccagauaca

SEQ ID NO: 435321 - RNA, 19 nt, Artificial Sequence
  Description of Artificial Sequence: Synthetic oligonucleotide
  Sense strand starting at position 1058 of SEQ ID NO: 316721
aacgguaauuuaugagaca

SEQ ID NO: 435322 - RNA, 19 nt, Artificial Sequence
  Description of Artificial Sequence: Synthetic oligonucleotide
  Antisense Strand to SEQ ID NO: 435321
ugucucauaaauuaccguu

SEQ ID NO: 435323 - RNA, 19 nt, Artificial Sequence
  Description of Artificial Sequence: Synthetic oligonucleotide
  Sense strand starting at position 1061 of SEQ ID NO: 316721
gguaauuuaugagacacag

SEQ ID NO: 435324 - RNA, 19 nt, Artificial Sequence
  Description of Artificial Sequence: Synthetic oligonucleotide
  Antisense Strand to SEQ ID NO: 435323
cugugucucauaaauuacc

SEQ ID NO: 435325 - RNA, 19 nt, Artificial Sequence
  Description of Artificial Sequence: Synthetic oligonucleotide
  Sense strand starting at position 1106 of SEQ ID NO: 316721
caagccuaauaguagagau

SEQ ID NO: 435326 - RNA, 19 nt, Artificial Sequence
  Description of Artificial Sequence: Synthetic oligonucleotide
  Antisense Strand to SEQ ID NO: 435325
aucucuacuauuaggcuug

SEQ ID NO: 435327 - RNA, 19 nt, Artificial Sequence
  Description of Artificial Sequence: Synthetic oligonucleotide
  Sense strand starting at position 1204 of SEQ ID NO: 316721
cuuccuugugacgaaagga

SEQ ID NO: 435328 - RNA, 19 nt, Artificial Sequence
  Description of Artificial Sequence: Synthetic oligonucleotide
  Antisense Strand to SEQ ID NO: 435327
uccuuucgucacaaggaag

SEQ ID NO: 435329 - RNA, 19 nt, Artificial Sequence
  Description of Artificial Sequence: Synthetic oligonucleotide
  Sense strand starting at position 1214 of SEQ ID NO: 316721
acgaaaggagcuggucauu

SEQ ID NO: 435330 - RNA, 19 nt, Artificial Sequence
  Description of Artificial Sequence: Synthetic oligonucleotide
  Antisense Strand to SEQ ID NO: 435329
aaugaccagcuccuuucgu

SEQ ID NO: 435331 - RNA, 19 nt, Artificial Sequence
  Description of Artificial Sequence: Synthetic oligonucleotide
  Sense strand starting at position 1279 of SEQ ID NO: 316721
ggcucugcugagugacauu

SEQ ID NO: 435332 - RNA, 19 nt, Artificial Sequence
  Description of Artificial Sequence: Synthetic oligonucleotide
  Antisense Strand to SEQ ID NO: 435331
aaugucacucagcagagcc

SEQ ID NO: 435333 - RNA, 19 nt, Artificial Sequence
  Description of Artificial Sequence: Synthetic oligonucleotide
  Sense strand starting at position 1421 of SEQ ID NO: 316721
uuugcauuuagccgagcua

SEQ ID NO: 435334 - RNA, 19 nt, Artificial Sequence
  Description of Artificial Sequence: Synthetic oligonucleotide
  Antisense Strand to SEQ ID NO: 435333
uagcucggcuaaaugcaaa

SEQ ID NO: 435335 - RNA, 19 nt, Artificial Sequence
  Description of Artificial Sequence: Synthetic oligonucleotide
  Sense strand starting at position 2124 of SEQ ID NO: 316721
agcaggugucgcgagaguu

SEQ ID NO: 435336 - RNA, 19 nt, Artificial Sequence
  Description of Artificial Sequence: Synthetic oligonucleotide
  Antisense Strand to SEQ ID NO: 435335
aacucucgcgacaccugcu

SEQ ID NO: 435337 - RNA, 19 nt, Artificial Sequence
  Description of Artificial Sequence: Synthetic oligonucleotide
  Sense strand starting at position 2125 of SEQ ID NO: 316721
gcaggugucgcgagaguug

SEQ ID NO: 435338 - RNA, 19 nt, Artificial Sequence
  Description of Artificial Sequence: Synthetic oligonucleotide
  Antisense Strand to SEQ ID NO: 435337
caacucucgcgacaccugc

SEQ ID NO: 435339 - RNA, 19 nt, Artificial Sequence
  Description of Artificial Sequence: Synthetic oligonucleotide
  Sense strand starting at position 2153 of SEQ ID NO: 316721
cgccuuguagggaguguaa

SEQ ID NO: 435340 - RNA, 19 nt, Artificial Sequence
  Description of Artificial Sequence: Synthetic oligonucleotide
  Antisense Strand to SEQ ID NO: 435339
uuacacucccuacaaggcg

SEQ ID NO: 435341 - RNA, 19 nt, Artificial Sequence
  Description of Artificial Sequence: Synthetic oligonucleotide
  Sense strand starting at position 2370 of SEQ ID NO: 316721
ugugugagccgaggagauu

SEQ ID NO: 435342 - RNA, 19 nt, Artificial Sequence
  Description of Artificial Sequence: Synthetic oligonucleotide
  Antisense Strand to SEQ ID NO: 435341
aaucuccucggcucacaca

SEQ ID NO: 435343 - RNA, 19 nt, Artificial Sequence
  Description of Artificial Sequence: Synthetic oligonucleotide
  Sense strand starting at position 2379 of SEQ ID NO: 316721
cgaggagauucgcucccaa

SEQ ID NO: 435344 - RNA, 19 nt, Artificial Sequence
  Description of Artificial Sequence: Synthetic oligonucleotide
  Antisense Strand to SEQ ID NO: 435343
uugggagcgaaucuccucg

SEQ ID NO: 435345 - RNA, 19 nt, Artificial Sequence
  Description of Artificial Sequence: Synthetic oligonucleotide
  Sense strand starting at position 3329 of SEQ ID NO: 316721
uggagaaccuuucugucaa

SEQ ID NO: 435346 - RNA, 19 nt, Artificial Sequence
  Description of Artificial Sequence: Synthetic oligonucleotide
  Antisense Strand to SEQ ID NO: 435345
uugacagaaagguucucca

SEQ ID NO: 435347 - RNA, 19 nt, Artificial Sequence
  Description of Artificial Sequence: Synthetic oligonucleotide
  Sense strand starting at position 3592 of SEQ ID NO: 316721
cucacucuuugggaccaua

SEQ ID NO: 435348 - RNA, 19 nt, Artificial Sequence
  Description of Artificial Sequence: Synthetic oligonucleotide
  Antisense Strand to SEQ ID NO: 435347
uauggucccaaagagugag

SEQ ID NO: 435349 - RNA, 19 nt, Artificial Sequence
  Description of Artificial Sequence: Synthetic oligonucleotide
  Sense strand starting at position 199 of SEQ ID NO: 316722
uuacaaauggcuugacaga

SEQ ID NO: 435350 - RNA, 19 nt, Artificial Sequence
  Description of Artificial Sequence: Synthetic oligonucleotide
  Antisense Strand to SEQ ID NO: 435349
ucugucaagccauuuguaa

SEQ ID NO: 435351 - RNA, 19 nt, Artificial Sequence
  Description of Artificial Sequence: Synthetic oligonucleotide
  Sense strand starting at position 540 of SEQ ID NO: 316722
agaagaagugacugccuau

SEQ ID NO: 435352 - RNA, 19 nt, Artificial Sequence
  Description of Artificial Sequence: Synthetic oligonucleotide
  Antisense Strand to SEQ ID NO: 435351
auaggcagucacuucuucu

SEQ ID NO: 435353 - RNA, 19 nt, Artificial Sequence
  Description of Artificial Sequence: Synthetic oligonucleotide
  Sense strand starting at position 543 of SEQ ID NO: 316722
agaagugacugccuaucaa

SEQ ID NO: 435354 - RNA, 19 nt, Artificial Sequence
  Description of Artificial Sequence: Synthetic oligonucleotide
  Antisense Strand to SEQ ID NO: 435353
uugauaggcagucacuucu

SEQ ID NO: 435355 - RNA, 19 nt, Artificial Sequence
  Description of Artificial Sequence: Synthetic oligonucleotide
  Sense strand starting at position 603 of SEQ ID NO: 316722
aggaguuaacagugaguga

SEQ ID NO: 435356 - RNA, 19 nt, Artificial Sequence
  Description of Artificial Sequence: Synthetic oligonucleotide
  Antisense Strand to SEQ ID NO: 435355
ucacucacuguuaacuccu

SEQ ID NO: 435357 - RNA, 19 nt, Artificial Sequence
  Description of Artificial Sequence: Synthetic oligonucleotide
  Sense strand starting at position 607 of SEQ ID NO: 316722
guuaacagugagugaacaa

SEQ ID NO: 435358 - RNA, 19 nt, Artificial Sequence
  Description of Artificial Sequence: Synthetic oligonucleotide
  Antisense Strand to SEQ ID NO: 435357
uuguucacucacuguuaac

SEQ ID NO: 435359 - RNA, 19 nt, Artificial Sequence
  Description of Artificial Sequence: Synthetic oligonucleotide
  Sense strand starting at position 933 of SEQ ID NO: 316722
gggagguaacgguggauaa

SEQ ID NO: 435360 - RNA, 19 nt, Artificial Sequence
  Description of Artificial Sequence: Synthetic oligonucleotide
  Antisense Strand to SEQ ID NO: 435359
uuauccaccguuaccuccc

SEQ ID NO: 435361 - RNA, 19 nt, Artificial Sequence
  Description of Artificial Sequence: Synthetic oligonucleotide
  Sense strand starting at position 934 of SEQ ID NO: 316722
ggagguaacgguggauaaa

SEQ ID NO: 435362 - RNA, 19 nt, Artificial Sequence
  Description of Artificial Sequence: Synthetic oligonucleotide
  Antisense Strand to SEQ ID NO: 435361
uuuauccaccguuaccucc

SEQ ID NO: 435363 - RNA, 19 nt, Artificial Sequence
  Description of Artificial Sequence: Synthetic oligonucleotide
  Sense strand starting at position 950 of SEQ ID NO: 316722
aaaguuggcguuuacugaa

SEQ ID NO: 435364 - RNA, 19 nt, Artificial Sequence
  Description of Artificial Sequence: Synthetic oligonucleotide
  Antisense Strand to SEQ ID NO: 435363
uucaguaaacgccaacuuu

SEQ ID NO: 435365 - RNA, 19 nt, Artificial Sequence
  Description of Artificial Sequence: Synthetic oligonucleotide
  Sense strand starting at position 996 of SEQ ID NO: 316722
uggguaagaagcuguuaag

SEQ ID NO: 435366 - RNA, 19 nt, Artificial Sequence
  Description of Artificial Sequence: Synthetic oligonucleotide
  Antisense Strand to SEQ ID NO: 435365
cuuaacagcuucuuaccca

SEQ ID NO: 435367 - RNA, 19 nt, Artificial Sequence
  Description of Artificial Sequence: Synthetic oligonucleotide
  Sense strand starting at position 1028 of SEQ ID NO: 316722
acauguuuaguuugagaca

SEQ ID NO: 435368 - RNA, 19 nt, Artificial Sequence
  Description of Artificial Sequence: Synthetic oligonucleotide
  Antisense Strand to SEQ ID NO: 435367
ugucucaaacuaaacaugu

SEQ ID NO: 435369 - RNA, 19 nt, Artificial Sequence
  Description of Artificial Sequence: Synthetic oligonucleotide
  Sense strand starting at position 1066 of SEQ ID NO: 316722
guuaaacagcuguauagua

SEQ ID NO: 435370 - RNA, 19 nt, Artificial Sequence
  Description of Artificial Sequence: Synthetic oligonucleotide
  Antisense Strand to SEQ ID NO: 435369
uacuauacagcuguuuaac

SEQ ID NO: 435371 - RNA, 19 nt, Artificial Sequence
  Description of Artificial Sequence: Synthetic oligonucleotide
  Sense strand starting at position 1170 of SEQ ID NO: 316722
gguuacuaauggucccaaa

SEQ ID NO: 435372 - RNA, 19 nt, Artificial Sequence
  Description of Artificial Sequence: Synthetic oligonucleotide
  Antisense Strand to SEQ ID NO: 435371
uuugggaccauuaguaacc

SEQ ID NO: 435373 - RNA, 19 nt, Artificial Sequence
  Description of Artificial Sequence: Synthetic oligonucleotide
  Sense strand starting at position 1312 of SEQ ID NO: 316722
cuccacacuucuuuggaga

SEQ ID NO: 435374 - RNA, 19 nt, Artificial Sequence
  Description of Artificial Sequence: Synthetic oligonucleotide
  Antisense Strand to SEQ ID NO: 435373
ucuccaaagaaguguggag

SEQ ID NO: 435375 - RNA, 19 nt, Artificial Sequence
  Description of Artificial Sequence: Synthetic oligonucleotide
  Sense strand starting at position 1469 of SEQ ID NO: 316722
agcaaaugaucucuaagcu

SEQ ID NO: 435376 - RNA, 19 nt, Artificial Sequence
  Description of Artificial Sequence: Synthetic oligonucleotide
  Antisense Strand to SEQ ID NO: 435375
agcuuagagaucauuugcu

SEQ ID NO: 435377 - RNA, 19 nt, Artificial Sequence
  Description of Artificial Sequence: Synthetic oligonucleotide
  Sense strand starting at position 1470 of SEQ ID NO: 316722
gcaaaugaucucuaagcuc

SEQ ID NO: 435378 - RNA, 19 nt, Artificial Sequence
  Description of Artificial Sequence: Synthetic oligonucleotide
  Antisense Strand to SEQ ID NO: 435377
gagcuuagagaucauuugc

SEQ ID NO: 435379 - RNA, 19 nt, Artificial Sequence
  Description of Artificial Sequence: Synthetic oligonucleotide
  Sense strand starting at position 1513 of SEQ ID NO: 316722
agauacucaccauggcaaa

SEQ ID NO: 435380 - RNA, 19 nt, Artificial Sequence
  Description of Artificial Sequence: Synthetic oligonucleotide
  Antisense Strand to SEQ ID NO: 435379
uuugccauggugaguaucu

SEQ ID NO: 435381 - RNA, 19 nt, Artificial Sequence
  Description of Artificial Sequence: Synthetic oligonucleotide
  Sense strand starting at position 2071 of SEQ ID NO: 316722
uggacuccucccugaaacu

SEQ ID NO: 435382 - RNA, 19 nt, Artificial Sequence
  Description of Artificial Sequence: Synthetic oligonucleotide
  Antisense Strand to SEQ ID NO: 435381
aguuucagggaggagucca

SEQ ID NO: 435383 - RNA, 19 nt, Artificial Sequence
  Description of Artificial Sequence: Synthetic oligonucleotide
  Sense strand starting at position 2296 of SEQ ID NO: 316722
gggaguggguuuaagaaua

SEQ ID NO: 435384 - RNA, 19 nt, Artificial Sequence
  Description of Artificial Sequence: Synthetic oligonucleotide
  Antisense Strand to SEQ ID NO: 435383
uauucuuaaacccacuccc

SEQ ID NO: 435385 - RNA, 19 nt, Artificial Sequence
  Description of Artificial Sequence: Synthetic oligonucleotide
  Sense strand starting at position 2647 of SEQ ID NO: 316722
guuauuugacuuugagugu

SEQ ID NO: 435386 - RNA, 19 nt, Artificial Sequence
  Description of Artificial Sequence: Synthetic oligonucleotide
  Antisense Strand to SEQ ID NO: 435385
acacucaaagucaaauaac

SEQ ID NO: 435387 - RNA, 19 nt, Artificial Sequence
  Description of Artificial Sequence: Synthetic oligonucleotide
  Sense strand starting at position 2704 of SEQ ID NO: 316722
gaccuauacugccuggauu

SEQ ID NO: 435388 - RNA, 19 nt, Artificial Sequence
  Description of Artificial Sequence: Synthetic oligonucleotide
  Antisense Strand to SEQ ID NO: 435387
aauccaggcaguauagguc

SEQ ID NO: 435389 - RNA, 19 nt, Artificial Sequence
  Description of Artificial Sequence: Synthetic oligonucleotide
  Sense strand starting at position 2760 of SEQ ID NO: 316722
gucacauuaugauuccuga

SEQ ID NO: 435390 - RNA, 19 nt, Artificial Sequence
  Description of Artificial Sequence: Synthetic oligonucleotide
  Antisense Strand to SEQ ID NO: 435389
ucaggaaucauaaugugac

SEQ ID NO: 435391 - RNA, 19 nt, Artificial Sequence
  Description of Artificial Sequence: Synthetic oligonucleotide
  Sense strand starting at position 2795 of SEQ ID NO: 316722
cgggcacccagacauauaa

SEQ ID NO: 435392 - RNA, 19 nt, Artificial Sequence
  Description of Artificial Sequence: Synthetic oligonucleotide
  Antisense Strand to SEQ ID NO: 435391
uuauaugucugggugcccg

SEQ ID NO: 435393 - RNA, 19 nt, Artificial Sequence
  Description of Artificial Sequence: Synthetic oligonucleotide
  Sense strand starting at position 2806 of SEQ ID NO: 316722
acauauaagugguucucuu

SEQ ID NO: 435394 - RNA, 19 nt, Artificial Sequence
  Description of Artificial Sequence: Synthetic oligonucleotide
  Antisense Strand to SEQ ID NO: 435393
aagagaaccacuuauaugu

SEQ ID NO: 435395 - RNA, 19 nt, Artificial Sequence
  Description of Artificial Sequence: Synthetic oligonucleotide
  Sense strand starting at position 2819 of SEQ ID NO: 316722
ucucuuggugcauaguaaa

SEQ ID NO: 435396 - RNA, 19 nt, Artificial Sequence
  Description of Artificial Sequence: Synthetic oligonucleotide
  Antisense Strand to SEQ ID NO: 435395
uuuacuaugcaccaagaga

SEQ ID NO: 435397 - RNA, 19 nt, Artificial Sequence
  Description of Artificial Sequence: Synthetic oligonucleotide
  Sense strand starting at position 2826 of SEQ ID NO: 316722
gugcauaguaaauggagau

SEQ ID NO: 435398 - RNA, 19 nt, Artificial Sequence
  Description of Artificial Sequence: Synthetic oligonucleotide
  Antisense Strand to SEQ ID NO: 435397
aucuccauuuacuaugcac

SEQ ID NO: 435399 - RNA, 19 nt, Artificial Sequence
  Description of Artificial Sequence: Synthetic oligonucleotide
  Sense strand starting at position 2827 of SEQ ID NO: 316722
ugcauaguaaauggagaua

SEQ ID NO: 435400 - RNA, 19 nt, Artificial Sequence
  Description of Artificial Sequence: Synthetic oligonucleotide
  Antisense Strand to SEQ ID NO: 435399
uaucuccauuuacuaugca

SEQ ID NO: 435401 - RNA, 19 nt, Artificial Sequence
  Description of Artificial Sequence: Synthetic oligonucleotide
  Sense strand starting at position 2838 of SEQ ID NO: 316722
uggagauaagacuguaguu

SEQ ID NO: 435402 - RNA, 19 nt, Artificial Sequence
  Description of Artificial Sequence: Synthetic oligonucleotide
  Antisense Strand to SEQ ID NO: 435401
aacuacagucuuaucucca

SEQ ID NO: 435403 - RNA, 19 nt, Artificial Sequence
  Description of Artificial Sequence: Synthetic oligonucleotide
  Sense strand starting at position 2840 of SEQ ID NO: 316722
gagauaagacuguaguugu

SEQ ID NO: 435404 - RNA, 19 nt, Artificial Sequence
  Description of Artificial Sequence: Synthetic oligonucleotide
  Antisense Strand to SEQ ID NO: 435403
acaacuacagucuuaucuc

SEQ ID NO: 435405 - RNA, 19 nt, Artificial Sequence
  Description of Artificial Sequence: Synthetic oligonucleotide
  Sense strand starting at position 2945 of SEQ ID NO: 316722
gagugaauugucuaagguu

SEQ ID NO: 435406 - RNA, 19 nt, Artificial Sequence
  Description of Artificial Sequence: Synthetic oligonucleotide
  Antisense Strand to SEQ ID NO: 435405
aaccuuagacaauucacuc

SEQ ID NO: 435407 - RNA, 19 nt, Artificial Sequence
  Description of Artificial Sequence: Synthetic oligonucleotide
  Sense strand starting at position 2951 of SEQ ID NO: 316722
auugucuaagguuacuaaa

SEQ ID NO: 435408 - RNA, 19 nt, Artificial Sequence
  Description of Artificial Sequence: Synthetic oligonucleotide
  Antisense Strand to SEQ ID NO: 435407
uuuaguaaccuuagacaau

SEQ ID NO: 435409 - RNA, 19 nt, Artificial Sequence
  Description of Artificial Sequence: Synthetic oligonucleotide
  Sense strand starting at position 3132 of SEQ ID NO: 316722
agggccauuaccugagaau

SEQ ID NO: 435410 - RNA, 19 nt, Artificial Sequence
  Description of Artificial Sequence: Synthetic oligonucleotide
  Antisense Strand to SEQ ID NO: 435409
auucucagguaauggcccu

SEQ ID NO: 435411 - RNA, 19 nt, Artificial Sequence
  Description of Artificial Sequence: Synthetic oligonucleotide
  Sense strand starting at position 3167 of SEQ ID NO: 316722
uguaauacagauugucuga

SEQ ID NO: 435412 - RNA, 19 nt, Artificial Sequence
  Description of Artificial Sequence: Synthetic oligonucleotide
  Antisense Strand to SEQ ID NO: 435411
ucagacaaucuguauuaca

SEQ ID NO: 435413 - RNA, 19 nt, Artificial Sequence
  Description of Artificial Sequence: Synthetic oligonucleotide
  Sense strand starting at position 3320 of SEQ ID NO: 316722
guuauugaaguaggauuga

SEQ ID NO: 435414 - RNA, 19 nt, Artificial Sequence
  Description of Artificial Sequence: Synthetic oligonucleotide
  Antisense Strand to SEQ ID NO: 435413
ucaauccuacuucaauaac

SEQ ID NO: 435415 - RNA, 19 nt, Artificial Sequence
  Description of Artificial Sequence: Synthetic oligonucleotide
  Sense strand starting at position 3349 of SEQ ID NO: 316722
uugagauuauuaguguuga

SEQ ID NO: 435416 - RNA, 19 nt, Artificial Sequence
  Description of Artificial Sequence: Synthetic oligonucleotide
  Antisense Strand to SEQ ID NO: 435415
ucaacacuaauaaucucaa

SEQ ID NO: 435417 - RNA, 19 nt, Artificial Sequence
  Description of Artificial Sequence: Synthetic oligonucleotide
  Sense strand starting at position 3357 of SEQ ID NO: 316722
auuaguguugaagaagcau

SEQ ID NO: 435418 - RNA, 19 nt, Artificial Sequence
  Description of Artificial Sequence: Synthetic oligonucleotide
  Antisense Strand to SEQ ID NO: 435417
augcuucuucaacacuaau

SEQ ID NO: 435419 - RNA, 19 nt, Artificial Sequence
  Description of Artificial Sequence: Synthetic oligonucleotide
  Sense strand starting at position 3363 of SEQ ID NO: 316722
guugaagaagcaugacaua

SEQ ID NO: 435420 - RNA, 19 nt, Artificial Sequence
  Description of Artificial Sequence: Synthetic oligonucleotide
  Antisense Strand to SEQ ID NO: 435419
uaugucaugcuucuucaac

SEQ ID NO: 435421 - RNA, 19 nt, Artificial Sequence
  Description of Artificial Sequence: Synthetic oligonucleotide
  Sense strand starting at position 3448 of SEQ ID NO: 316722
ggauguugacaguaugauc

SEQ ID NO: 435422 - RNA, 19 nt, Artificial Sequence
  Description of Artificial Sequence: Synthetic oligonucleotide
  Antisense Strand to SEQ ID NO: 435421
gaucauacugucaacaucc

SEQ ID NO: 435423 - RNA, 19 nt, Artificial Sequence
  Description of Artificial Sequence: Synthetic oligonucleotide
  Sense strand starting at position 3456 of SEQ ID NO: 316722
acaguaugaucuguucuag

SEQ ID NO: 435424 - RNA, 19 nt, Artificial Sequence
  Description of Artificial Sequence: Synthetic oligonucleotide
  Antisense Strand to SEQ ID NO: 435423
cuagaacagaucauacugu

SEQ ID NO: 435425 - RNA, 19 nt, Artificial Sequence
  Description of Artificial Sequence: Synthetic oligonucleotide
  Sense strand starting at position 3584 of SEQ ID NO: 316722
ucccacugauuguugauua

SEQ ID NO: 435426 - RNA, 19 nt, Artificial Sequence
  Description of Artificial Sequence: Synthetic oligonucleotide
  Antisense Strand to SEQ ID NO: 435425
uaaucaacaaucaguggga

SEQ ID NO: 435427 - RNA, 19 nt, Artificial Sequence
  Description of Artificial Sequence: Synthetic oligonucleotide
  Sense strand starting at position 3592 of SEQ ID NO: 316722
auuguugauuauuccacau

SEQ ID NO: 435428 - RNA, 19 nt, Artificial Sequence
  Description of Artificial Sequence: Synthetic oligonucleotide
  Antisense Strand to SEQ ID NO: 435427
auguggaauaaucaacaau

SEQ ID NO: 435429 - RNA, 19 nt, Artificial Sequence
  Description of Artificial Sequence: Synthetic oligonucleotide
  Sense strand starting at position 436 of SEQ ID NO: 316723
gggagaugaugaugaauuu

SEQ ID NO: 435430 - RNA, 19 nt, Artificial Sequence
  Description of Artificial Sequence: Synthetic oligonucleotide
  Antisense Strand to SEQ ID NO: 435429
aaauucaucaucaucuccc

SEQ ID NO: 435431 - RNA, 19 nt, Artificial Sequence
  Description of Artificial Sequence: Synthetic oligonucleotide
  Sense strand starting at position 503 of SEQ ID NO: 316723
ccaguauauccaugugaua

SEQ ID NO: 435432 - RNA, 19 nt, Artificial Sequence
  Description of Artificial Sequence: Synthetic oligonucleotide
  Antisense Strand to SEQ ID NO: 435431
uaucacauggauauacugg

SEQ ID NO: 435433 - RNA, 19 nt, Artificial Sequence
  Description of Artificial Sequence: Synthetic oligonucleotide
  Sense strand starting at position 610 of SEQ ID NO: 316723
cuggaaauauauguguuua

SEQ ID NO: 435434 - RNA, 19 nt, Artificial Sequence
  Description of Artificial Sequence: Synthetic oligonucleotide
  Antisense Strand to SEQ ID NO: 435433
uaaacacauauauuuccag

SEQ ID NO: 435435 - RNA, 19 nt, Artificial Sequence
  Description of Artificial Sequence: Synthetic oligonucleotide
  Sense strand starting at position 612 of SEQ ID NO: 316723
ggaaauauauguguuuauc

SEQ ID NO: 435436 - RNA, 19 nt, Artificial Sequence
  Description of Artificial Sequence: Synthetic oligonucleotide
  Antisense Strand to SEQ ID NO: 435435
gauaaacacauauauuucc

SEQ ID NO: 435437 - RNA, 19 nt, Artificial Sequence
  Description of Artificial Sequence: Synthetic oligonucleotide
  Sense strand starting at position 1454 of SEQ ID NO: 316723
guuguacuaucaucauaac

SEQ ID NO: 435438 - RNA, 19 nt, Artificial Sequence
  Description of Artificial Sequence: Synthetic oligonucleotide
  Antisense Strand to SEQ ID NO: 435437
guuaugaugauaguacaac

SEQ ID NO: 435439 - RNA, 19 nt, Artificial Sequence
  Description of Artificial Sequence: Synthetic oligonucleotide
  Sense strand starting at position 1879 of SEQ ID NO: 316723
agaucaaggcagugaauga

SEQ ID NO: 435440 - RNA, 19 nt, Artificial Sequence
  Description of Artificial Sequence: Synthetic oligonucleotide
  Antisense Strand to SEQ ID NO: 435439
ucauucacugccuugaucu

SEQ ID NO: 435441 - RNA, 19 nt, Artificial Sequence
  Description of Artificial Sequence: Synthetic oligonucleotide
  Sense strand starting at position 1947 of SEQ ID NO: 316723
cucuacauucuguaauggu

SEQ ID NO: 435442 - RNA, 19 nt, Artificial Sequence
  Description of Artificial Sequence: Synthetic oligonucleotide
  Antisense Strand to SEQ ID NO: 435441
accauuacagaauguagag

SEQ ID NO: 435443 - RNA, 19 nt, Artificial Sequence
  Description of Artificial Sequence: Synthetic oligonucleotide
  Sense strand starting at position 1985 of SEQ ID NO: 316723
uuauuagacuggucaucuu

SEQ ID NO: 435444 - RNA, 19 nt, Artificial Sequence
  Description of Artificial Sequence: Synthetic oligonucleotide
  Antisense Strand to SEQ ID NO: 435443
aagaugaccagucuaauaa

SEQ ID NO: 435445 - RNA, 19 nt, Artificial Sequence
  Description of Artificial Sequence: Synthetic oligonucleotide
  Sense strand starting at position 2109 of SEQ ID NO: 316723
agaguauuaaguuauguuc

SEQ ID NO: 435446 - RNA, 19 nt, Artificial Sequence
  Description of Artificial Sequence: Synthetic oligonucleotide
  Antisense Strand to SEQ ID NO: 435445
gaacauaacuuaauacucu

SEQ ID NO: 435447 - RNA, 19 nt, Artificial Sequence
  Description of Artificial Sequence: Synthetic oligonucleotide
  Sense strand starting at position 2323 of SEQ ID NO: 316723
cacuauguugcccagugaa

SEQ ID NO: 435448 - RNA, 19 nt, Artificial Sequence
  Description of Artificial Sequence: Synthetic oligonucleotide
  Antisense Strand to SEQ ID NO: 435447
uucacugggcaacauagug

SEQ ID NO: 435449 - RNA, 19 nt, Artificial Sequence
  Description of Artificial Sequence: Synthetic oligonucleotide
  Sense strand starting at position 2424 of SEQ ID NO: 316723
uuaaguguucuuuaaagga

SEQ ID NO: 435450 - RNA, 19 nt, Artificial Sequence
  Description of Artificial Sequence: Synthetic oligonucleotide
  Antisense Strand to SEQ ID NO: 435449
uccuuuaaagaacacuuaa

SEQ ID NO: 435451 - RNA, 19 nt, Artificial Sequence
  Description of Artificial Sequence: Synthetic oligonucleotide
  Sense strand starting at position 2428 of SEQ ID NO: 316723
guguucuuuaaaggagaga

SEQ ID NO: 435452 - RNA, 19 nt, Artificial Sequence
  Description of Artificial Sequence: Synthetic oligonucleotide
  Antisense Strand to SEQ ID NO: 435451
ucucuccuuuaaagaacac

SEQ ID NO: 435453 - RNA, 19 nt, Artificial Sequence
  Description of Artificial Sequence: Synthetic oligonucleotide
  Sense strand starting at position 2488 of SEQ ID NO: 316723
cagugucuuccucauggaa

SEQ ID NO: 435454 - RNA, 19 nt, Artificial Sequence
  Description of Artificial Sequence: Synthetic oligonucleotide
  Antisense Strand to SEQ ID NO: 435453
uuccaugaggaagacacug

SEQ ID NO: 435455 - RNA, 19 nt, Artificial Sequence
  Description of Artificial Sequence: Synthetic oligonucleotide
  Sense strand starting at position 2491 of SEQ ID NO: 316723
ugucuuccucauggaagaa

SEQ ID NO: 435456 - RNA, 19 nt, Artificial Sequence
  Description of Artificial Sequence: Synthetic oligonucleotide
  Antisense Strand to SEQ ID NO: 435455
uucuuccaugaggaagaca

SEQ ID NO: 435457 - RNA, 19 nt, Artificial Sequence
  Description of Artificial Sequence: Synthetic oligonucleotide
  Sense strand starting at position 2612 of SEQ ID NO: 316723
guaugauaccagugggauc

SEQ ID NO: 435458 - RNA, 19 nt, Artificial Sequence
  Description of Artificial Sequence: Synthetic oligonucleotide
  Antisense Strand to SEQ ID NO: 435457
gaucccacugguaucauac

SEQ ID NO: 435459 - RNA, 19 nt, Artificial Sequence
  Description of Artificial Sequence: Synthetic oligonucleotide
  Sense strand starting at position 2647 of SEQ ID NO: 316723
uacucuuagcagggauacu

SEQ ID NO: 435460 - RNA, 19 nt, Artificial Sequence
  Description of Artificial Sequence: Synthetic oligonucleotide
  Antisense Strand to SEQ ID NO: 435459
aguaucccugcuaagagua

SEQ ID NO: 435461 - RNA, 19 nt, Artificial Sequence
  Description of Artificial Sequence: Synthetic oligonucleotide
  Sense strand starting at position 2683 of SEQ ID NO: 316723
guacuaguaauggauaugu

SEQ ID NO: 435462 - RNA, 19 nt, Artificial Sequence
  Description of Artificial Sequence: Synthetic oligonucleotide
  Antisense Strand to SEQ ID NO: 435461
acauauccauuacuaguac

SEQ ID NO: 435463 - RNA, 19 nt, Artificial Sequence
  Description of Artificial Sequence: Synthetic oligonucleotide
  Sense strand starting at position 2849 of SEQ ID NO: 316723
auaacagagcaaugaaguu

SEQ ID NO: 435464 - RNA, 19 nt, Artificial Sequence
  Description of Artificial Sequence: Synthetic oligonucleotide
  Antisense Strand to SEQ ID NO: 435463
aacuucauugcucuguuau

SEQ ID NO: 435465 - RNA, 19 nt, Artificial Sequence
  Description of Artificial Sequence: Synthetic oligonucleotide
  Sense strand starting at position 2928 of SEQ ID NO: 316723
cagaacuggcugugaacau

SEQ ID NO: 435466 - RNA, 19 nt, Artificial Sequence
  Description of Artificial Sequence: Synthetic oligonucleotide
  Antisense Strand to SEQ ID NO: 435465
auguucacagccaguucug

SEQ ID NO: 435467 - RNA, 19 nt, Artificial Sequence
  Description of Artificial Sequence: Synthetic oligonucleotide
  Sense strand starting at position 3005 of SEQ ID NO: 316723
acaugucuguacuuauaca

SEQ ID NO: 435468 - RNA, 19 nt, Artificial Sequence
  Description of Artificial Sequence: Synthetic oligonucleotide
  Antisense Strand to SEQ ID NO: 435467
uguauaaguacagacaugu

SEQ ID NO: 435469 - RNA, 19 nt, Artificial Sequence
  Description of Artificial Sequence: Synthetic oligonucleotide
  Sense strand starting at position 3144 of SEQ ID NO: 316723
cagaguuuaguaggcacaa

SEQ ID NO: 435470 - RNA, 19 nt, Artificial Sequence
  Description of Artificial Sequence: Synthetic oligonucleotide
  Antisense Strand to SEQ ID NO: 435469
uugugccuacuaaacucug

SEQ ID NO: 435471 - RNA, 19 nt, Artificial Sequence
  Description of Artificial Sequence: Synthetic oligonucleotide
  Sense strand starting at position 3145 of SEQ ID NO: 316723
agaguuuaguaggcacaaa

SEQ ID NO: 435472 - RNA, 19 nt, Artificial Sequence
  Description of Artificial Sequence: Synthetic oligonucleotide
  Antisense Strand to SEQ ID NO: 435471
uuugugccuacuaaacucu

SEQ ID NO: 435473 - RNA, 19 nt, Artificial Sequence
  Description of Artificial Sequence: Synthetic oligonucleotide
  Sense strand starting at position 3236 of SEQ ID NO: 316723
uuuauugaaagguguuaga

SEQ ID NO: 435474 - RNA, 19 nt, Artificial Sequence
  Description of Artificial Sequence: Synthetic oligonucleotide
  Antisense Strand to SEQ ID NO: 435473
ucuaacaccuuucaauaaa

SEQ ID NO: 435475 - RNA, 19 nt, Artificial Sequence
  Description of Artificial Sequence: Synthetic oligonucleotide
  Sense strand starting at position 3247 of SEQ ID NO: 316723
guguuagagaggcagucau

SEQ ID NO: 435476 - RNA, 19 nt, Artificial Sequence
  Description of Artificial Sequence: Synthetic oligonucleotide
  Antisense Strand to SEQ ID NO: 435475
augacugccucucuaacac

SEQ ID NO: 435477 - RNA, 19 nt, Artificial Sequence
  Description of Artificial Sequence: Synthetic oligonucleotide
  Sense strand starting at position 3254 of SEQ ID NO: 316723
agaggcagucauugaggau

SEQ ID NO: 435478 - RNA, 19 nt, Artificial Sequence
  Description of Artificial Sequence: Synthetic oligonucleotide
  Antisense Strand to SEQ ID NO: 435477
auccucaaugacugccucu

SEQ ID NO: 435479 - RNA, 19 nt, Artificial Sequence
  Description of Artificial Sequence: Synthetic oligonucleotide
  Sense strand starting at position 3315 of SEQ ID NO: 316723
auaagauuauagguuucca

SEQ ID NO: 435480 - RNA, 19 nt, Artificial Sequence
  Description of Artificial Sequence: Synthetic oligonucleotide
  Antisense Strand to SEQ ID NO: 435479
uggaaaccuauaaucuuau

SEQ ID NO: 435481 - RNA, 19 nt, Artificial Sequence
  Description of Artificial Sequence: Synthetic oligonucleotide
  Sense strand starting at position 3319 of SEQ ID NO: 316723
gauuauagguuuccaagca

SEQ ID NO: 435482 - RNA, 19 nt, Artificial Sequence
  Description of Artificial Sequence: Synthetic oligonucleotide
  Antisense Strand to SEQ ID NO: 435481
ugcuuggaaaccuauaauc

SEQ ID NO: 435483 - RNA, 19 nt, Artificial Sequence
  Description of Artificial Sequence: Synthetic oligonucleotide
  Sense strand starting at position 3340 of SEQ ID NO: 316723
ggaaaccugugcuuggaau

SEQ ID NO: 435484 - RNA, 19 nt, Artificial Sequence
  Description of Artificial Sequence: Synthetic oligonucleotide
  Antisense Strand to SEQ ID NO: 435483
auuccaagcacagguuucc

SEQ ID NO: 435485 - RNA, 19 nt, Artificial Sequence
  Description of Artificial Sequence: Synthetic oligonucleotide
  Sense strand starting at position 3342 of SEQ ID NO: 316723
aaaccugugcuuggaauua

SEQ ID NO: 435486 - RNA, 19 nt, Artificial Sequence
  Description of Artificial Sequence: Synthetic oligonucleotide
  Antisense Strand to SEQ ID NO: 435485
uaauuccaagcacagguuu

SEQ ID NO: 435487 - RNA, 19 nt, Artificial Sequence
  Description of Artificial Sequence: Synthetic oligonucleotide
  Sense strand starting at position 3408 of SEQ ID NO: 316723
ggaugcuaaggugaucauu

SEQ ID NO: 435488 - RNA, 19 nt, Artificial Sequence
  Description of Artificial Sequence: Synthetic oligonucleotide
  Antisense Strand to SEQ ID NO: 435487
aaugaucaccuuagcaucc

SEQ ID NO: 435489 - RNA, 19 nt, Artificial Sequence
  Description of Artificial Sequence: Synthetic oligonucleotide
  Sense strand starting at position 3414 of SEQ ID NO: 316723
uaaggugaucauugcuaua

SEQ ID NO: 435490 - RNA, 19 nt, Artificial Sequence
  Description of Artificial Sequence: Synthetic oligonucleotide
  Antisense Strand to SEQ ID NO: 435489
uauagcaaugaucaccuua

SEQ ID NO: 435491 - RNA, 19 nt, Artificial Sequence
  Description of Artificial Sequence: Synthetic oligonucleotide
  Sense strand starting at position 3416 of SEQ ID NO: 316723
aggugaucauugcuauaua

SEQ ID NO: 435492 - RNA, 19 nt, Artificial Sequence
  Description of Artificial Sequence: Synthetic oligonucleotide
  Antisense Strand to SEQ ID NO: 435491
uauauagcaaugaucaccu

SEQ ID NO: 435493 - RNA, 19 nt, Artificial Sequence
  Description of Artificial Sequence: Synthetic oligonucleotide
  Sense strand starting at position 3455 of SEQ ID NO: 316723
gacuuauaagugugacaaa

SEQ ID NO: 435494 - RNA, 19 nt, Artificial Sequence
  Description of Artificial Sequence: Synthetic oligonucleotide
  Antisense Strand to SEQ ID NO: 435493
uuugucacacuuauaaguc

SEQ ID NO: 435495 - RNA, 19 nt, Artificial Sequence
  Description of Artificial Sequence: Synthetic oligonucleotide
  Sense strand starting at position 3486 of SEQ ID NO: 316723
aacagaaguuauucuugga

SEQ ID NO: 435496 - RNA, 19 nt, Artificial Sequence
  Description of Artificial Sequence: Synthetic oligonucleotide
  Antisense Strand to SEQ ID NO: 435495
uccaagaauaacuucuguu

SEQ ID NO: 435497 - RNA, 19 nt, Artificial Sequence
  Description of Artificial Sequence: Synthetic oligonucleotide
  Sense strand starting at position 3490 of SEQ ID NO: 316723
gaaguuauucuuggaagau

SEQ ID NO: 435498 - RNA, 19 nt, Artificial Sequence
  Description of Artificial Sequence: Synthetic oligonucleotide
  Antisense Strand to SEQ ID NO: 435497
aucuuccaagaauaacuuc

SEQ ID NO: 435499 - RNA, 19 nt, Artificial Sequence
  Description of Artificial Sequence: Synthetic oligonucleotide
  Sense strand starting at position 3590 of SEQ ID NO: 316723
guuggaaaguuuguugaaa

SEQ ID NO: 435500 - RNA, 19 nt, Artificial Sequence
  Description of Artificial Sequence: Synthetic oligonucleotide
  Antisense Strand to SEQ ID NO: 435499
uuucaacaaacuuuccaac

SEQ ID NO: 435501 - RNA, 19 nt, Artificial Sequence
  Description of Artificial Sequence: Synthetic oligonucleotide
  Sense strand starting at position 3664 of SEQ ID NO: 316723
uguuuauggcaucagauca

SEQ ID NO: 435502 - RNA, 19 nt, Artificial Sequence
  Description of Artificial Sequence: Synthetic oligonucleotide
  Antisense Strand to SEQ ID NO: 435501
ugaucugaugccauaaaca

SEQ ID NO: 435503 - RNA, 19 nt, Artificial Sequence
  Description of Artificial Sequence: Synthetic oligonucleotide
  Sense strand starting at position 3768 of SEQ ID NO: 316723
cucggaguuuacucaagga

SEQ ID NO: 435504 - RNA, 19 nt, Artificial Sequence
  Description of Artificial Sequence: Synthetic oligonucleotide
  Antisense Strand to SEQ ID NO: 435503
uccuugaguaaacuccgag

SEQ ID NO: 435505 - RNA, 19 nt, Artificial Sequence
  Description of Artificial Sequence: Synthetic oligonucleotide
  Sense strand starting at position 3815 of SEQ ID NO: 316723
gggaauguggcuuaaggca

SEQ ID NO: 435506 - RNA, 19 nt, Artificial Sequence
  Description of Artificial Sequence: Synthetic oligonucleotide
  Antisense Strand to SEQ ID NO: 435505
ugccuuaagccacauuccc

SEQ ID NO: 435507 - RNA, 19 nt, Artificial Sequence
  Description of Artificial Sequence: Synthetic oligonucleotide
  Sense strand starting at position 3868 of SEQ ID NO: 316723
uauaaauaugccuguugga

SEQ ID NO: 435508 - RNA, 19 nt, Artificial Sequence
  Description of Artificial Sequence: Synthetic oligonucleotide
  Antisense Strand to SEQ ID NO: 435507
uccaacaggcauauuuaua

SEQ ID NO: 435509 - RNA, 19 nt, Artificial Sequence
  Description of Artificial Sequence: Synthetic oligonucleotide
  Sense strand starting at position 245 of SEQ ID NO: 316724
auuagugaugucuacauaa

SEQ ID NO: 435510 - RNA, 19 nt, Artificial Sequence
  Description of Artificial Sequence: Synthetic oligonucleotide
  Antisense Strand to SEQ ID NO: 435509
uuauguagacaucacuaau

SEQ ID NO: 435511 - RNA, 19 nt, Artificial Sequence
  Description of Artificial Sequence: Synthetic oligonucleotide
  Sense strand starting at position 511 of SEQ ID NO: 316724
uuauuugcuugagucacuu

SEQ ID NO: 435512 - RNA, 19 nt, Artificial Sequence
  Description of Artificial Sequence: Synthetic oligonucleotide
  Antisense Strand to SEQ ID NO: 435511
aagugacucaagcaaauaa

SEQ ID NO: 435513 - RNA, 19 nt, Artificial Sequence
  Description of Artificial Sequence: Synthetic oligonucleotide
  Sense strand starting at position 519 of SEQ ID NO: 316724
uugagucacuuucucuuau

SEQ ID NO: 435514 - RNA, 19 nt, Artificial Sequence
  Description of Artificial Sequence: Synthetic oligonucleotide
  Antisense Strand to SEQ ID NO: 435513
auaagagaaagugacucaa

SEQ ID NO: 435515 - RNA, 19 nt, Artificial Sequence
  Description of Artificial Sequence: Synthetic oligonucleotide
  Sense strand starting at position 520 of SEQ ID NO: 316724
ugagucacuuucucuuaua

SEQ ID NO: 435516 - RNA, 19 nt, Artificial Sequence
  Description of Artificial Sequence: Synthetic oligonucleotide
  Antisense Strand to SEQ ID NO: 435515
uauaagagaaagugacuca

SEQ ID NO: 435517 - RNA, 19 nt, Artificial Sequence
  Description of Artificial Sequence: Synthetic oligonucleotide
  Sense strand starting at position 530 of SEQ ID NO: 316724
ucucuuauauugucacaga

SEQ ID NO: 435518 - RNA, 19 nt, Artificial Sequence
  Description of Artificial Sequence: Synthetic oligonucleotide
  Antisense Strand to SEQ ID NO: 435517
ucugugacaauauaagaga

SEQ ID NO: 435519 - RNA, 19 nt, Artificial Sequence
  Description of Artificial Sequence: Synthetic oligonucleotide
  Sense strand starting at position 560 of SEQ ID NO: 316724
acuccacguggugaucaaa

SEQ ID NO: 435520 - RNA, 19 nt, Artificial Sequence
  Description of Artificial Sequence: Synthetic oligonucleotide
  Antisense Strand to SEQ ID NO: 435519
uuugaucaccacguggagu

SEQ ID NO: 435521 - RNA, 19 nt, Artificial Sequence
  Description of Artificial Sequence: Synthetic oligonucleotide
  Sense strand starting at position 740 of SEQ ID NO: 316724
agguauuaauuguccuaac

SEQ ID NO: 435522 - RNA, 19 nt, Artificial Sequence
  Description of Artificial Sequence: Synthetic oligonucleotide
  Antisense Strand to SEQ ID NO: 435521
guuaggacaauuaauaccu

SEQ ID NO: 435523 - RNA, 19 nt, Artificial Sequence
  Description of Artificial Sequence: Synthetic oligonucleotide
  Sense strand starting at position 741 of SEQ ID NO: 316724
gguauuaauuguccuaaca

SEQ ID NO: 435524 - RNA, 19 nt, Artificial Sequence
  Description of Artificial Sequence: Synthetic oligonucleotide
  Antisense Strand to SEQ ID NO: 435523
uguuaggacaauuaauacc

SEQ ID NO: 435525 - RNA, 19 nt, Artificial Sequence
  Description of Artificial Sequence: Synthetic oligonucleotide
  Sense strand starting at position 756 of SEQ ID NO: 316724
aacaguacaggcuguaaua

SEQ ID NO: 435526 - RNA, 19 nt, Artificial Sequence
  Description of Artificial Sequence: Synthetic oligonucleotide
  Antisense Strand to SEQ ID NO: 435525
uauuacagccuguacuguu

SEQ ID NO: 435527 - RNA, 19 nt, Artificial Sequence
  Description of Artificial Sequence: Synthetic oligonucleotide
  Sense strand starting at position 758 of SEQ ID NO: 316724
caguacaggcuguaauaaa

SEQ ID NO: 435528 - RNA, 19 nt, Artificial Sequence
  Description of Artificial Sequence: Synthetic oligonucleotide
  Antisense Strand to SEQ ID NO: 435527
uuuauuacagccuguacug

SEQ ID NO: 435529 - RNA, 19 nt, Artificial Sequence
  Description of Artificial Sequence: Synthetic oligonucleotide
  Sense strand starting at position 802 of SEQ ID NO: 316724
uccuuaaugugagucuaaa

SEQ ID NO: 435530 - RNA, 19 nt, Artificial Sequence
  Description of Artificial Sequence: Synthetic oligonucleotide
  Antisense Strand to SEQ ID NO: 435529
uuuagacucacauuaagga

SEQ ID NO: 435531 - RNA, 19 nt, Artificial Sequence
  Description of Artificial Sequence: Synthetic oligonucleotide
  Sense strand starting at position 1093 of SEQ ID NO: 316724
aucuguauuuaugaagaac

SEQ ID NO: 435532 - RNA, 19 nt, Artificial Sequence
  Description of Artificial Sequence: Synthetic oligonucleotide
  Antisense Strand to SEQ ID NO: 435531
guucuucauaaauacagau

SEQ ID NO: 435533 - RNA, 19 nt, Artificial Sequence
  Description of Artificial Sequence: Synthetic oligonucleotide
  Sense strand starting at position 1117 of SEQ ID NO: 316724
cugggagagucccugucaa

SEQ ID NO: 435534 - RNA, 19 nt, Artificial Sequence
  Description of Artificial Sequence: Synthetic oligonucleotide
  Antisense Strand to SEQ ID NO: 435533
uugacagggacucucccag

SEQ ID NO: 435535 - RNA, 19 nt, Artificial Sequence
  Description of Artificial Sequence: Synthetic oligonucleotide
  Sense strand starting at position 1311 of SEQ ID NO: 316724
guguuuacaagugaggcuu

SEQ ID NO: 435536 - RNA, 19 nt, Artificial Sequence
  Description of Artificial Sequence: Synthetic oligonucleotide
  Antisense Strand to SEQ ID NO: 435535
aagccucacuuguaaacac

SEQ ID NO: 435537 - RNA, 19 nt, Artificial Sequence
  Description of Artificial Sequence: Synthetic oligonucleotide
  Sense strand starting at position 2232 of SEQ ID NO: 316724
accguuagagagugugaga

SEQ ID NO: 435538 - RNA, 19 nt, Artificial Sequence
  Description of Artificial Sequence: Synthetic oligonucleotide
  Antisense Strand to SEQ ID NO: 435537
ucucacacucucuaacggu

SEQ ID NO: 435539 - RNA, 19 nt, Artificial Sequence
  Description of Artificial Sequence: Synthetic oligonucleotide
  Sense strand starting at position 2306 of SEQ ID NO: 316724
cugcguauaagagauugua

SEQ ID NO: 435540 - RNA, 19 nt, Artificial Sequence
  Description of Artificial Sequence: Synthetic oligonucleotide
  Antisense Strand to SEQ ID NO: 435539
uacaaucucuuauacgcag

SEQ ID NO: 435541 - RNA, 19 nt, Artificial Sequence
  Description of Artificial Sequence: Synthetic oligonucleotide
  Sense strand starting at position 2314 of SEQ ID NO: 316724
aagagauuguaugcacuuu

SEQ ID NO: 435542 - RNA, 19 nt, Artificial Sequence
  Description of Artificial Sequence: Synthetic oligonucleotide
  Antisense Strand to SEQ ID NO: 435541
aaagugcauacaaucucuu

SEQ ID NO: 435543 - RNA, 19 nt, Artificial Sequence
  Description of Artificial Sequence: Synthetic oligonucleotide
  Sense strand starting at position 2622 of SEQ ID NO: 316724
agagauugagauuguaugu

SEQ ID NO: 435544 - RNA, 19 nt, Artificial Sequence
  Description of Artificial Sequence: Synthetic oligonucleotide
  Antisense Strand to SEQ ID NO: 435543
acauacaaucucaaucucu

SEQ ID NO: 435545 - RNA, 19 nt, Artificial Sequence
  Description of Artificial Sequence: Synthetic oligonucleotide
  Sense strand starting at position 2627 of SEQ ID NO: 316724
uugagauuguauguguaug

SEQ ID NO: 435546 - RNA, 19 nt, Artificial Sequence
  Description of Artificial Sequence: Synthetic oligonucleotide
  Antisense Strand to SEQ ID NO: 435545
cauacacauacaaucucaa

SEQ ID NO: 435547 - RNA, 19 nt, Artificial Sequence
  Description of Artificial Sequence: Synthetic oligonucleotide
  Sense strand starting at position 2710 of SEQ ID NO: 316724
agagaaauuacuuguguga

SEQ ID NO: 435548 - RNA, 19 nt, Artificial Sequence
  Description of Artificial Sequence: Synthetic oligonucleotide
  Antisense Strand to SEQ ID NO: 435547
ucacacaaguaauuucucu

SEQ ID NO: 435549 - RNA, 19 nt, Artificial Sequence
  Description of Artificial Sequence: Synthetic oligonucleotide
  Sense strand starting at position 2713 of SEQ ID NO: 316724
gaaauuacuugugugagag

SEQ ID NO: 435550 - RNA, 19 nt, Artificial Sequence
  Description of Artificial Sequence: Synthetic oligonucleotide
  Antisense Strand to SEQ ID NO: 435549
cucucacacaaguaauuuc

SEQ ID NO: 435551 - RNA, 19 nt, Artificial Sequence
  Description of Artificial Sequence: Synthetic oligonucleotide
  Sense strand starting at position 2714 of SEQ ID NO: 316724
aaauuacuugugugagaga

SEQ ID NO: 435552 - RNA, 19 nt, Artificial Sequence
  Description of Artificial Sequence: Synthetic oligonucleotide
  Antisense Strand to SEQ ID NO: 435551
ucucucacacaaguaauuu

SEQ ID NO: 435553 - RNA, 19 nt, Artificial Sequence
  Description of Artificial Sequence: Synthetic oligonucleotide
  Sense strand starting at position 2759 of SEQ ID NO: 316724
gcauuuguauaagagauua

SEQ ID NO: 435554 - RNA, 19 nt, Artificial Sequence
  Description of Artificial Sequence: Synthetic oligonucleotide
  Antisense Strand to SEQ ID NO: 435553
uaaucucuuauacaaaugc

SEQ ID NO: 435555 - RNA, 19 nt, Artificial Sequence
  Description of Artificial Sequence: Synthetic oligonucleotide
  Sense strand starting at position 2785 of SEQ ID NO: 316724
uggguuuguaugugagaga

SEQ ID NO: 435556 - RNA, 19 nt, Artificial Sequence
  Description of Artificial Sequence: Synthetic oligonucleotide
  Antisense Strand to SEQ ID NO: 435555
ucucucacauacaaaccca

SEQ ID NO: 435557 - RNA, 19 nt, Artificial Sequence
  Description of Artificial Sequence: Synthetic oligonucleotide
  Sense strand starting at position 2938 of SEQ ID NO: 316724
acugaaggucuguguauuu

SEQ ID NO: 435558 - RNA, 19 nt, Artificial Sequence
  Description of Artificial Sequence: Synthetic oligonucleotide
  Antisense Strand to SEQ ID NO: 435557
aaauacacagaccuucagu

SEQ ID NO: 435559 - RNA, 19 nt, Artificial Sequence
  Description of Artificial Sequence: Synthetic oligonucleotide
  Sense strand starting at position 3017 of SEQ ID NO: 316724
ugguguaucaaaugaugua

SEQ ID NO: 435560 - RNA, 19 nt, Artificial Sequence
  Description of Artificial Sequence: Synthetic oligonucleotide
  Antisense Strand to SEQ ID NO: 435559
uacaucauuugauacacca

SEQ ID NO: 435561 - RNA, 19 nt, Artificial Sequence
  Description of Artificial Sequence: Synthetic oligonucleotide
  Sense strand starting at position 3018 of SEQ ID NO: 316724
gguguaucaaaugauguau

SEQ ID NO: 435562 - RNA, 19 nt, Artificial Sequence
  Description of Artificial Sequence: Synthetic oligonucleotide
  Antisense Strand to SEQ ID NO: 435561
auacaucauuugauacacc

SEQ ID NO: 435563 - RNA, 19 nt, Artificial Sequence
  Description of Artificial Sequence: Synthetic oligonucleotide
  Sense strand starting at position 3029 of SEQ ID NO: 316724
ugauguaucuuucuguaac

SEQ ID NO: 435564 - RNA, 19 nt, Artificial Sequence
  Description of Artificial Sequence: Synthetic oligonucleotide
  Antisense Strand to SEQ ID NO: 435563
guuacagaaagauacauca

SEQ ID NO: 435565 - RNA, 19 nt, Artificial Sequence
  Description of Artificial Sequence: Synthetic oligonucleotide
  Sense strand starting at position 3039 of SEQ ID NO: 316724
uucuguaacuggguaagaa

SEQ ID NO: 435566 - RNA, 19 nt, Artificial Sequence
  Description of Artificial Sequence: Synthetic oligonucleotide
  Antisense Strand to SEQ ID NO: 435565
uucuuacccaguuacagaa

SEQ ID NO: 435567 - RNA, 19 nt, Artificial Sequence
  Description of Artificial Sequence: Synthetic oligonucleotide
  Sense strand starting at position 3048 of SEQ ID NO: 316724
uggguaagaauaugucuuu

SEQ ID NO: 435568 - RNA, 19 nt, Artificial Sequence
  Description of Artificial Sequence: Synthetic oligonucleotide
  Antisense Strand to SEQ ID NO: 435567
aaagacauauucuuaccca

SEQ ID NO: 435569 - RNA, 19 nt, Artificial Sequence
  Description of Artificial Sequence: Synthetic oligonucleotide
  Sense strand starting at position 3051 of SEQ ID NO: 316724
guaagaauaugucuuucuc

SEQ ID NO: 435570 - RNA, 19 nt, Artificial Sequence
  Description of Artificial Sequence: Synthetic oligonucleotide
  Antisense Strand to SEQ ID NO: 435569
gagaaagacauauucuuac

SEQ ID NO: 435571 - RNA, 19 nt, Artificial Sequence
  Description of Artificial Sequence: Synthetic oligonucleotide
  Sense strand starting at position 3055 of SEQ ID NO: 316724
gaauaugucuuucucagug

SEQ ID NO: 435572 - RNA, 19 nt, Artificial Sequence
  Description of Artificial Sequence: Synthetic oligonucleotide
  Antisense Strand to SEQ ID NO: 435571
cacugagaaagacauauuc

SEQ ID NO: 435573 - RNA, 19 nt, Artificial Sequence
  Description of Artificial Sequence: Synthetic oligonucleotide
  Sense strand starting at position 3143 of SEQ ID NO: 316724
auggaaggguguuuaaaua

SEQ ID NO: 435574 - RNA, 19 nt, Artificial Sequence
  Description of Artificial Sequence: Synthetic oligonucleotide
  Antisense Strand to SEQ ID NO: 435573
uauuuaaacacccuuccau

SEQ ID NO: 435575 - RNA, 19 nt, Artificial Sequence
  Description of Artificial Sequence: Synthetic oligonucleotide
  Sense strand starting at position 3190 of SEQ ID NO: 316724
uuaucuguacauugggaaa

SEQ ID NO: 435576 - RNA, 19 nt, Artificial Sequence
  Description of Artificial Sequence: Synthetic oligonucleotide
  Antisense Strand to SEQ ID NO: 435575
uuucccaauguacagauaa

SEQ ID NO: 435577 - RNA, 19 nt, Artificial Sequence
  Description of Artificial Sequence: Synthetic oligonucleotide
  Sense strand starting at position 3208 of SEQ ID NO: 316724
aacgauggguuauuguaca

SEQ ID NO: 435578 - RNA, 19 nt, Artificial Sequence
  Description of Artificial Sequence: Synthetic oligonucleotide
  Antisense Strand to SEQ ID NO: 435577
uguacaauaacccaucguu

SEQ ID NO: 435579 - RNA, 19 nt, Artificial Sequence
  Description of Artificial Sequence: Synthetic oligonucleotide
  Sense strand starting at position 3213 of SEQ ID NO: 316724
uggguuauuguacagguaa

SEQ ID NO: 435580 - RNA, 19 nt, Artificial Sequence
  Description of Artificial Sequence: Synthetic oligonucleotide
  Antisense Strand to SEQ ID NO: 435579
uuaccuguacaauaaccca

SEQ ID NO: 435581 - RNA, 19 nt, Artificial Sequence
  Description of Artificial Sequence: Synthetic oligonucleotide
  Sense strand starting at position 3285 of SEQ ID NO: 316724
agaguuauuugggaucuuc

SEQ ID NO: 435582 - RNA, 19 nt, Artificial Sequence
  Description of Artificial Sequence: Synthetic oligonucleotide
  Antisense Strand to SEQ ID NO: 435581
gaagaucccaaauaacucu

SEQ ID NO: 435583 - RNA, 19 nt, Artificial Sequence
  Description of Artificial Sequence: Synthetic oligonucleotide
  Sense strand starting at position 3393 of SEQ ID NO: 316724
aggagauucucagucuuuc

SEQ ID NO: 435584 - RNA, 19 nt, Artificial Sequence
  Description of Artificial Sequence: Synthetic oligonucleotide
  Antisense Strand to SEQ ID NO: 435583
gaaagacugagaaucuccu

SEQ ID NO: 435585 - RNA, 19 nt, Artificial Sequence
  Description of Artificial Sequence: Synthetic oligonucleotide
  Sense strand starting at position 3520 of SEQ ID NO: 316724
acacaugguuucucacaca

SEQ ID NO: 435586 - RNA, 19 nt, Artificial Sequence
  Description of Artificial Sequence: Synthetic oligonucleotide
  Antisense Strand to SEQ ID NO: 435585
ugugugagaaaccaugugu

SEQ ID NO: 435587 - RNA, 19 nt, Artificial Sequence
  Description of Artificial Sequence: Synthetic oligonucleotide
  Sense strand starting at position 3592 of SEQ ID NO: 316724
uaugccguuggauaucaaa

SEQ ID NO: 435588 - RNA, 19 nt, Artificial Sequence
  Description of Artificial Sequence: Synthetic oligonucleotide
  Antisense Strand to SEQ ID NO: 435587
uuugauauccaacggcaua

SEQ ID NO: 435589 - RNA, 19 nt, Artificial Sequence
  Description of Artificial Sequence: Synthetic oligonucleotide
  Sense strand starting at position 261 of SEQ ID NO: 316725
ucacuuagauuggcaagga

SEQ ID NO: 435590 - RNA, 19 nt, Artificial Sequence
  Description of Artificial Sequence: Synthetic oligonucleotide
  Antisense Strand to SEQ ID NO: 435589
uccuugccaaucuaaguga

SEQ ID NO: 435591 - RNA, 19 nt, Artificial Sequence
  Description of Artificial Sequence: Synthetic oligonucleotide
  Sense strand starting at position 338 of SEQ ID NO: 316725
gcuagugaggcauaauuga

SEQ ID NO: 435592 - RNA, 19 nt, Artificial Sequence
  Description of Artificial Sequence: Synthetic oligonucleotide
  Antisense Strand to SEQ ID NO: 435591
ucaauuaugccucacuagc

SEQ ID NO: 435593 - RNA, 19 nt, Artificial Sequence
  Description of Artificial Sequence: Synthetic oligonucleotide
  Sense strand starting at position 355 of SEQ ID NO: 316725
gauauagccucugugaaga

SEQ ID NO: 435594 - RNA, 19 nt, Artificial Sequence
  Description of Artificial Sequence: Synthetic oligonucleotide
  Antisense Strand to SEQ ID NO: 435593
ucuucacagaggcuauauc

SEQ ID NO: 435595 - RNA, 19 nt, Artificial Sequence
  Description of Artificial Sequence: Synthetic oligonucleotide
  Sense strand starting at position 360 of SEQ ID NO: 316725
agccucugugaagagcaau

SEQ ID NO: 435596 - RNA, 19 nt, Artificial Sequence
  Description of Artificial Sequence: Synthetic oligonucleotide
  Antisense Strand to SEQ ID NO: 435595
auugcucuucacagaggcu

SEQ ID NO: 435597 - RNA, 19 nt, Artificial Sequence
  Description of Artificial Sequence: Synthetic oligonucleotide
  Sense strand starting at position 368 of SEQ ID NO: 316725
ugaagagcaauacgucaau

SEQ ID NO: 435598 - RNA, 19 nt, Artificial Sequence
  Description of Artificial Sequence: Synthetic oligonucleotide
  Antisense Strand to SEQ ID NO: 435597
auugacguauugcucuuca

SEQ ID NO: 435599 - RNA, 19 nt, Artificial Sequence
  Description of Artificial Sequence: Synthetic oligonucleotide
  Sense strand starting at position 371 of SEQ ID NO: 316725
agagcaauacgucaauauc

SEQ ID NO: 435600 - RNA, 19 nt, Artificial Sequence
  Description of Artificial Sequence: Synthetic oligonucleotide
  Antisense Strand to SEQ ID NO: 435599
gauauugacguauugcucu

SEQ ID NO: 435601 - RNA, 19 nt, Artificial Sequence
  Description of Artificial Sequence: Synthetic oligonucleotide
  Sense strand starting at position 374 of SEQ ID NO: 316725
gcaauacgucaauaucuau

SEQ ID NO: 435602 - RNA, 19 nt, Artificial Sequence
  Description of Artificial Sequence: Synthetic oligonucleotide
  Antisense Strand to SEQ ID NO: 435601
auagauauugacguauugc

SEQ ID NO: 435603 - RNA, 19 nt, Artificial Sequence
  Description of Artificial Sequence: Synthetic oligonucleotide
  Sense strand starting at position 470 of SEQ ID NO: 316725
gacauaagcguugaggaua

SEQ ID NO: 435604 - RNA, 19 nt, Artificial Sequence
  Description of Artificial Sequence: Synthetic oligonucleotide
  Antisense Strand to SEQ ID NO: 435603
uauccucaacgcuuauguc

SEQ ID NO: 435605 - RNA, 19 nt, Artificial Sequence
  Description of Artificial Sequence: Synthetic oligonucleotide
  Sense strand starting at position 744 of SEQ ID NO: 316725
ccaagaaacgagugguaac

SEQ ID NO: 435606 - RNA, 19 nt, Artificial Sequence
  Description of Artificial Sequence: Synthetic oligonucleotide
  Antisense Strand to SEQ ID NO: 435605
guuaccacucguuucuugg

SEQ ID NO: 435607 - RNA, 19 nt, Artificial Sequence
  Description of Artificial Sequence: Synthetic oligonucleotide
  Sense strand starting at position 766 of SEQ ID NO: 316725
gguugcuucccugaaggga

SEQ ID NO: 435608 - RNA, 19 nt, Artificial Sequence
  Description of Artificial Sequence: Synthetic oligonucleotide
  Antisense Strand to SEQ ID NO: 435607
ucccuucagggaagcaacc

SEQ ID NO: 435609 - RNA, 19 nt, Artificial Sequence
  Description of Artificial Sequence: Synthetic oligonucleotide
  Sense strand starting at position 785 of SEQ ID NO: 316725
auuaucugccugcagauau

SEQ ID NO: 435610 - RNA, 19 nt, Artificial Sequence
  Description of Artificial Sequence: Synthetic oligonucleotide
  Antisense Strand to SEQ ID NO: 435609
auaucugcaggcagauaau

SEQ ID NO: 435611 - RNA, 19 nt, Artificial Sequence
  Description of Artificial Sequence: Synthetic oligonucleotide
  Sense strand starting at position 1281 of SEQ ID NO: 316725
auuauauaugcugaacguu

SEQ ID NO: 435612 - RNA, 19 nt, Artificial Sequence
  Description of Artificial Sequence: Synthetic oligonucleotide
  Antisense Strand to SEQ ID NO: 435611
aacguucagcauauauaau

SEQ ID NO: 435613 - RNA, 19 nt, Artificial Sequence
  Description of Artificial Sequence: Synthetic oligonucleotide
  Sense strand starting at position 1486 of SEQ ID NO: 316725
uuaucuuuaccuggaaaga

SEQ ID NO: 435614 - RNA, 19 nt, Artificial Sequence
  Description of Artificial Sequence: Synthetic oligonucleotide
  Antisense Strand to SEQ ID NO: 435613
ucuuuccagguaaagauaa

SEQ ID NO: 435615 - RNA, 19 nt, Artificial Sequence
  Description of Artificial Sequence: Synthetic oligonucleotide
  Sense strand starting at position 1870 of SEQ ID NO: 316725
cgacgaaaggaaugucaga

SEQ ID NO: 435616 - RNA, 19 nt, Artificial Sequence
  Description of Artificial Sequence: Synthetic oligonucleotide
  Antisense Strand to SEQ ID NO: 435615
ucugacauuccuuucgucg

SEQ ID NO: 435617 - RNA, 19 nt, Artificial Sequence
  Description of Artificial Sequence: Synthetic oligonucleotide
  Sense strand starting at position 2110 of SEQ ID NO: 316725
guuccacuaaaguaugagu

SEQ ID NO: 435618 - RNA, 19 nt, Artificial Sequence
  Description of Artificial Sequence: Synthetic oligonucleotide
  Antisense Strand to SEQ ID NO: 435617
acucauacuuuaguggaac

SEQ ID NO: 435619 - RNA, 19 nt, Artificial Sequence
  Description of Artificial Sequence: Synthetic oligonucleotide
  Sense strand starting at position 2123 of SEQ ID NO: 316725
augagugguuuccuagaag

SEQ ID NO: 435620 - RNA, 19 nt, Artificial Sequence
  Description of Artificial Sequence: Synthetic oligonucleotide
  Antisense Strand to SEQ ID NO: 435619
cuucuaggaaaccacucau

SEQ ID NO: 435621 - RNA, 19 nt, Artificial Sequence
  Description of Artificial Sequence: Synthetic oligonucleotide
  Sense strand starting at position 2253 of SEQ ID NO: 316725
aggcuaacuggccauauaa

SEQ ID NO: 435622 - RNA, 19 nt, Artificial Sequence
  Description of Artificial Sequence: Synthetic oligonucleotide
  Antisense Strand to SEQ ID NO: 435621
uuauauggccaguuagccu

SEQ ID NO: 435623 - RNA, 19 nt, Artificial Sequence
  Description of Artificial Sequence: Synthetic oligonucleotide
  Sense strand starting at position 2593 of SEQ ID NO: 316725
auuaaaugguggcuugaca

SEQ ID NO: 435624 - RNA, 19 nt, Artificial Sequence
  Description of Artificial Sequence: Synthetic oligonucleotide
  Antisense Strand to SEQ ID NO: 435623
ugucaagccaccauuuaau

SEQ ID NO: 435625 - RNA, 19 nt, Artificial Sequence
  Description of Artificial Sequence: Synthetic oligonucleotide
  Sense strand starting at position 2631 of SEQ ID NO: 316725
auacauuucugcuugucau

SEQ ID NO: 435626 - RNA, 19 nt, Artificial Sequence
  Description of Artificial Sequence: Synthetic oligonucleotide
  Antisense Strand to SEQ ID NO: 435625
augacaagcagaaauguau

SEQ ID NO: 435627 - RNA, 19 nt, Artificial Sequence
  Description of Artificial Sequence: Synthetic oligonucleotide
  Sense strand starting at position 3116 of SEQ ID NO: 316725
caguuauagccagaaggua

SEQ ID NO: 435628 - RNA, 19 nt, Artificial Sequence
  Description of Artificial Sequence: Synthetic oligonucleotide
  Antisense Strand to SEQ ID NO: 435627
uaccuucuggcuauaacug

SEQ ID NO: 435629 - RNA, 19 nt, Artificial Sequence
  Description of Artificial Sequence: Synthetic oligonucleotide
  Sense strand starting at position 3153 of SEQ ID NO: 316725
ggguguaagcguagaguua

SEQ ID NO: 435630 - RNA, 19 nt, Artificial Sequence
  Description of Artificial Sequence: Synthetic oligonucleotide
  Antisense Strand to SEQ ID NO: 435629
uaacucuacgcuuacaccc

SEQ ID NO: 435631 - RNA, 19 nt, Artificial Sequence
  Description of Artificial Sequence: Synthetic oligonucleotide
  Sense strand starting at position 3181 of SEQ ID NO: 316725
uuauuuauuugaugccaag

SEQ ID NO: 435632 - RNA, 19 nt, Artificial Sequence
  Description of Artificial Sequence: Synthetic oligonucleotide
  Antisense Strand to SEQ ID NO: 435631
cuuggcaucaaauaaauaa

SEQ ID NO: 435633 - RNA, 19 nt, Artificial Sequence
  Description of Artificial Sequence: Synthetic oligonucleotide
  Sense strand starting at position 3221 of SEQ ID NO: 316725
gguucaaaugugggagaag

SEQ ID NO: 435634 - RNA, 19 nt, Artificial Sequence
  Description of Artificial Sequence: Synthetic oligonucleotide
  Antisense Strand to SEQ ID NO: 435633
cuucucccacauuugaacc

SEQ ID NO: 435635 - RNA, 19 nt, Artificial Sequence
  Description of Artificial Sequence: Synthetic oligonucleotide
  Sense strand starting at position 3242 of SEQ ID NO: 316725
acaagcaaguccuuggaga

SEQ ID NO: 435636 - RNA, 19 nt, Artificial Sequence
  Description of Artificial Sequence: Synthetic oligonucleotide
  Antisense Strand to SEQ ID NO: 435635
ucuccaaggacuugcuugu

SEQ ID NO: 435637 - RNA, 19 nt, Artificial Sequence
  Description of Artificial Sequence: Synthetic oligonucleotide
  Sense strand starting at position 3253 of SEQ ID NO: 316725
cuuggagagucagugagau

SEQ ID NO: 435638 - RNA, 19 nt, Artificial Sequence
  Description of Artificial Sequence: Synthetic oligonucleotide
  Antisense Strand to SEQ ID NO: 435637
aucucacugacucuccaag

SEQ ID NO: 435639 - RNA, 19 nt, Artificial Sequence
  Description of Artificial Sequence: Synthetic oligonucleotide
  Sense strand starting at position 3255 of SEQ ID NO: 316725
uggagagucagugagaugu

SEQ ID NO: 435640 - RNA, 19 nt, Artificial Sequence
  Description of Artificial Sequence: Synthetic oligonucleotide
  Antisense Strand to SEQ ID NO: 435639
acaucucacugacucucca

SEQ ID NO: 435641 - RNA, 19 nt, Artificial Sequence
  Description of Artificial Sequence: Synthetic oligonucleotide
  Sense strand starting at position 3341 of SEQ ID NO: 316725
agcuauaacguuuauacaa

SEQ ID NO: 435642 - RNA, 19 nt, Artificial Sequence
  Description of Artificial Sequence: Synthetic oligonucleotide
  Antisense Strand to SEQ ID NO: 435641
uuguauaaacguuauagcu

SEQ ID NO: 435643 - RNA, 19 nt, Artificial Sequence
  Description of Artificial Sequence: Synthetic oligonucleotide
  Sense strand starting at position 3473 of SEQ ID NO: 316725
acagcuagucuuuagagga

SEQ ID NO: 435644 - RNA, 19 nt, Artificial Sequence
  Description of Artificial Sequence: Synthetic oligonucleotide
  Antisense Strand to SEQ ID NO: 435643
uccucuaaagacuagcugu

SEQ ID NO: 435645 - RNA, 19 nt, Artificial Sequence
  Description of Artificial Sequence: Synthetic oligonucleotide
  Sense strand starting at position 3493 of SEQ ID NO: 316725
gggaccaucucauucuauu

SEQ ID NO: 435646 - RNA, 19 nt, Artificial Sequence
  Description of Artificial Sequence: Synthetic oligonucleotide
  Antisense Strand to SEQ ID NO: 435645
aauagaaugagaugguccc

SEQ ID NO: 435647 - RNA, 19 nt, Artificial Sequence
  Description of Artificial Sequence: Synthetic oligonucleotide
  Sense strand starting at position 3505 of SEQ ID NO: 316725
uucuauuaacagugaguau

SEQ ID NO: 435648 - RNA, 19 nt, Artificial Sequence
  Description of Artificial Sequence: Synthetic oligonucleotide
  Antisense Strand to SEQ ID NO: 435647
auacucacuguuaauagaa

SEQ ID NO: 435649 - RNA, 19 nt, Artificial Sequence
  Description of Artificial Sequence: Synthetic oligonucleotide
  Sense strand starting at position 3508 of SEQ ID NO: 316725
uauuaacagugaguauuga

SEQ ID NO: 435650 - RNA, 19 nt, Artificial Sequence
  Description of Artificial Sequence: Synthetic oligonucleotide
  Antisense Strand to SEQ ID NO: 435649
ucaauacucacuguuaaua

SEQ ID NO: 435651 - RNA, 19 nt, Artificial Sequence
  Description of Artificial Sequence: Synthetic oligonucleotide
  Sense strand starting at position 3582 of SEQ ID NO: 316725
aacacauaucgcuaagguu

SEQ ID NO: 435652 - RNA, 19 nt, Artificial Sequence
  Description of Artificial Sequence: Synthetic oligonucleotide
  Antisense Strand to SEQ ID NO: 435651
aaccuuagcgauauguguu

SEQ ID NO: 435653 - RNA, 19 nt, Artificial Sequence
  Description of Artificial Sequence: Synthetic oligonucleotide
  Sense strand starting at position 3597 of SEQ ID NO: 316725
gguuacuuuguuuauauga

SEQ ID NO: 435654 - RNA, 19 nt, Artificial Sequence
  Description of Artificial Sequence: Synthetic oligonucleotide
  Antisense Strand to SEQ ID NO: 435653
ucauauaaacaaaguaacc

SEQ ID NO: 435655 - RNA, 19 nt, Artificial Sequence
  Description of Artificial Sequence: Synthetic oligonucleotide
  Sense strand starting at position 3615 of SEQ ID NO: 316725
acauuaugaguacgggaca

SEQ ID NO: 435656 - RNA, 19 nt, Artificial Sequence
  Description of Artificial Sequence: Synthetic oligonucleotide
  Antisense Strand to SEQ ID NO: 435655
ugucccguacucauaaugu

SEQ ID NO: 435657 - RNA, 19 nt, Artificial Sequence
  Description of Artificial Sequence: Synthetic oligonucleotide
  Sense strand starting at position 3640 of SEQ ID NO: 316725
cucuuaagccguuaaacag

SEQ ID NO: 435658 - RNA, 19 nt, Artificial Sequence
  Description of Artificial Sequence: Synthetic oligonucleotide
  Antisense Strand to SEQ ID NO: 435657
cuguuuaacggcuuaagag

SEQ ID NO: 435659 - RNA, 19 nt, Artificial Sequence
  Description of Artificial Sequence: Synthetic oligonucleotide
  Sense strand starting at position 3871 of SEQ ID NO: 316725
guaaucuauccacaaaugu

SEQ ID NO: 435660 - RNA, 19 nt, Artificial Sequence
  Description of Artificial Sequence: Synthetic oligonucleotide
  Antisense Strand to SEQ ID NO: 435659
acauuuguggauagauuac

SEQ ID NO: 435661 - RNA, 19 nt, Artificial Sequence
  Description of Artificial Sequence: Synthetic oligonucleotide
  Sense strand starting at position 3935 of SEQ ID NO: 316725
uuccuuauauuugaggaaa

SEQ ID NO: 435662 - RNA, 19 nt, Artificial Sequence
  Description of Artificial Sequence: Synthetic oligonucleotide
  Antisense Strand to SEQ ID NO: 435661
uuuccucaaauauaaggaa

SEQ ID NO: 435663 - RNA, 19 nt, Artificial Sequence
  Description of Artificial Sequence: Synthetic oligonucleotide
  Sense strand starting at position 3937 of SEQ ID NO: 316725
ccuuauauuugaggaaaca

SEQ ID NO: 435664 - RNA, 19 nt, Artificial Sequence
  Description of Artificial Sequence: Synthetic oligonucleotide
  Antisense Strand to SEQ ID NO: 435663
uguuuccucaaauauaagg

SEQ ID NO: 435665 - RNA, 19 nt, Artificial Sequence
  Description of Artificial Sequence: Synthetic oligonucleotide
  Sense strand starting at position 3953 of SEQ ID NO: 316725
acaagcuuaucuuugaaga

SEQ ID NO: 435666 - RNA, 19 nt, Artificial Sequence
  Description of Artificial Sequence: Synthetic oligonucleotide
  Antisense Strand to SEQ ID NO: 435665
ucuucaaagauaagcuugu

SEQ ID NO: 435667 - RNA, 19 nt, Artificial Sequence
  Description of Artificial Sequence: Synthetic oligonucleotide
  Sense strand starting at position 3976 of SEQ ID NO: 316725
gcugcugaauuugcaagau

SEQ ID NO: 435668 - RNA, 19 nt, Artificial Sequence
  Description of Artificial Sequence: Synthetic oligonucleotide
  Antisense Strand to SEQ ID NO: 435667
aucuugcaaauucagcagc

SEQ ID NO: 435669 - RNA, 19 nt, Artificial Sequence
  Description of Artificial Sequence: Synthetic oligonucleotide
  Sense strand starting at position 140 of SEQ ID NO: 316726
auuaaaugguggcuugaca

SEQ ID NO: 435670 - RNA, 19 nt, Artificial Sequence
  Description of Artificial Sequence: Synthetic oligonucleotide
  Antisense Strand to SEQ ID NO: 435669
ugucaagccaccauuuaau

SEQ ID NO: 435671 - RNA, 19 nt, Artificial Sequence
  Description of Artificial Sequence: Synthetic oligonucleotide
  Sense strand starting at position 178 of SEQ ID NO: 316726
auacauuucugcuugucau

SEQ ID NO: 435672 - RNA, 19 nt, Artificial Sequence
  Description of Artificial Sequence: Synthetic oligonucleotide
  Antisense Strand to SEQ ID NO: 435671
augacaagcagaaauguau

SEQ ID NO: 435673 - RNA, 19 nt, Artificial Sequence
  Description of Artificial Sequence: Synthetic oligonucleotide
  Sense strand starting at position 663 of SEQ ID NO: 316726
caguuauagccagaaggua

SEQ ID NO: 435674 - RNA, 19 nt, Artificial Sequence
  Description of Artificial Sequence: Synthetic oligonucleotide
  Antisense Strand to SEQ ID NO: 435673
uaccuucuggcuauaacug

SEQ ID NO: 435675 - RNA, 19 nt, Artificial Sequence
  Description of Artificial Sequence: Synthetic oligonucleotide
  Sense strand starting at position 700 of SEQ ID NO: 316726
ggguguaagcguagaguua

SEQ ID NO: 435676 - RNA, 19 nt, Artificial Sequence
  Description of Artificial Sequence: Synthetic oligonucleotide
  Antisense Strand to SEQ ID NO: 435675
uaacucuacgcuuacaccc

SEQ ID NO: 435677 - RNA, 19 nt, Artificial Sequence
  Description of Artificial Sequence: Synthetic oligonucleotide
  Sense strand starting at position 728 of SEQ ID NO: 316726
uuauuuauuugaugccaag

SEQ ID NO: 435678 - RNA, 19 nt, Artificial Sequence
  Description of Artificial Sequence: Synthetic oligonucleotide
  Antisense Strand to SEQ ID NO: 435677
cuuggcaucaaauaaauaa

SEQ ID NO: 435679 - RNA, 19 nt, Artificial Sequence
  Description of Artificial Sequence: Synthetic oligonucleotide
  Sense strand starting at position 768 of SEQ ID NO: 316726
gguucaaaugugggagaag

SEQ ID NO: 435680 - RNA, 19 nt, Artificial Sequence
  Description of Artificial Sequence: Synthetic oligonucleotide
  Antisense Strand to SEQ ID NO: 435679
cuucucccacauuugaacc

SEQ ID NO: 435681 - RNA, 19 nt, Artificial Sequence
  Description of Artificial Sequence: Synthetic oligonucleotide
  Sense strand starting at position 789 of SEQ ID NO: 316726
acaagcaaguccuuggaga

SEQ ID NO: 435682 - RNA, 19 nt, Artificial Sequence
  Description of Artificial Sequence: Synthetic oligonucleotide
  Antisense Strand to SEQ ID NO: 435681
ucuccaaggacuugcuugu

SEQ ID NO: 435683 - RNA, 19 nt, Artificial Sequence
  Description of Artificial Sequence: Synthetic oligonucleotide
  Sense strand starting at position 800 of SEQ ID NO: 316726
cuuggagagucagugagau

SEQ ID NO: 435684 - RNA, 19 nt, Artificial Sequence
  Description of Artificial Sequence: Synthetic oligonucleotide
  Antisense Strand to SEQ ID NO: 435683
aucucacugacucuccaag

SEQ ID NO: 435685 - RNA, 19 nt, Artificial Sequence
  Description of Artificial Sequence: Synthetic oligonucleotide
  Sense strand starting at position 802 of SEQ ID NO: 316726
uggagagucagugagaugu

SEQ ID NO: 435686 - RNA, 19 nt, Artificial Sequence
  Description of Artificial Sequence: Synthetic oligonucleotide
  Antisense Strand to SEQ ID NO: 435685
acaucucacugacucucca

SEQ ID NO: 435687 - RNA, 19 nt, Artificial Sequence
  Description of Artificial Sequence: Synthetic oligonucleotide
  Sense strand starting at position 888 of SEQ ID NO: 316726
agcuauaacguuuauacaa

SEQ ID NO: 435688 - RNA, 19 nt, Artificial Sequence
  Description of Artificial Sequence: Synthetic oligonucleotide
  Antisense Strand to SEQ ID NO: 435687
uuguauaaacguuauagcu

SEQ ID NO: 435689 - RNA, 19 nt, Artificial Sequence
  Description of Artificial Sequence: Synthetic oligonucleotide
  Sense strand starting at position 1020 of SEQ ID NO: 316726
acagcuagucuuuagagga

SEQ ID NO: 435690 - RNA, 19 nt, Artificial Sequence
  Description of Artificial Sequence: Synthetic oligonucleotide
  Antisense Strand to SEQ ID NO: 435689
uccucuaaagacuagcugu

SEQ ID NO: 435691 - RNA, 19 nt, Artificial Sequence
  Description of Artificial Sequence: Synthetic oligonucleotide
  Sense strand starting at position 1040 of SEQ ID NO: 316726
gggaccaucucauucuauu

SEQ ID NO: 435692 - RNA, 19 nt, Artificial Sequence
  Description of Artificial Sequence: Synthetic oligonucleotide
  Antisense Strand to SEQ ID NO: 435691
aauagaaugagaugguccc

SEQ ID NO: 435693 - RNA, 19 nt, Artificial Sequence
  Description of Artificial Sequence: Synthetic oligonucleotide
  Sense strand starting at position 1055 of SEQ ID NO: 316726
uauuaacagugaguauuga

SEQ ID NO: 435694 - RNA, 19 nt, Artificial Sequence
  Description of Artificial Sequence: Synthetic oligonucleotide
  Antisense Strand to SEQ ID NO: 435693
ucaauacucacuguuaaua

SEQ ID NO: 435695 - RNA, 19 nt, Artificial Sequence
  Description of Artificial Sequence: Synthetic oligonucleotide
  Sense strand starting at position 1129 of SEQ ID NO: 316726
aacacauaucgcuaagguu

SEQ ID NO: 435696 - RNA, 19 nt, Artificial Sequence
  Description of Artificial Sequence: Synthetic oligonucleotide
  Antisense Strand to SEQ ID NO: 435695
aaccuuagcgauauguguu

SEQ ID NO: 435697 - RNA, 19 nt, Artificial Sequence
  Description of Artificial Sequence: Synthetic oligonucleotide
  Sense strand starting at position 1144 of SEQ ID NO: 316726
gguuacuuuguuuauauga

SEQ ID NO: 435698 - RNA, 19 nt, Artificial Sequence
  Description of Artificial Sequence: Synthetic oligonucleotide
  Antisense Strand to SEQ ID NO: 435697
ucauauaaacaaaguaacc

SEQ ID NO: 435699 - RNA, 19 nt, Artificial Sequence
  Description of Artificial Sequence: Synthetic oligonucleotide
  Sense strand starting at position 1162 of SEQ ID NO: 316726
acauuaugaguacgggaca

SEQ ID NO: 435700 - RNA, 19 nt, Artificial Sequence
  Description of Artificial Sequence: Synthetic oligonucleotide
  Antisense Strand to SEQ ID NO: 435699
ugucccguacucauaaugu

SEQ ID NO: 435701 - RNA, 19 nt, Artificial Sequence
  Description of Artificial Sequence: Synthetic oligonucleotide
  Sense strand starting at position 1418 of SEQ ID NO: 316726
guaaucuauccacaaaugu

SEQ ID NO: 435702 - RNA, 19 nt, Artificial Sequence
  Description of Artificial Sequence: Synthetic oligonucleotide
  Antisense Strand to SEQ ID NO: 435701
acauuuguggauagauuac

SEQ ID NO: 435703 - RNA, 19 nt, Artificial Sequence
  Description of Artificial Sequence: Synthetic oligonucleotide
  Sense strand starting at position 1482 of SEQ ID NO: 316726
uuccuuauauuugaggaaa

SEQ ID NO: 435704 - RNA, 19 nt, Artificial Sequence
  Description of Artificial Sequence: Synthetic oligonucleotide
  Antisense Strand to SEQ ID NO: 435703
uuuccucaaauauaaggaa

SEQ ID NO: 435705 - RNA, 19 nt, Artificial Sequence
  Description of Artificial Sequence: Synthetic oligonucleotide
  Sense strand starting at position 1500 of SEQ ID NO: 316726
acaagcuuaucuuugaaga

SEQ ID NO: 435706 - RNA, 19 nt, Artificial Sequence
  Description of Artificial Sequence: Synthetic oligonucleotide
  Antisense Strand to SEQ ID NO: 435705
ucuucaaagauaagcuugu

SEQ ID NO: 435707 - RNA, 19 nt, Artificial Sequence
  Description of Artificial Sequence: Synthetic oligonucleotide
  Sense strand starting at position 1523 of SEQ ID NO: 316726
gcugcugaauuugcaagau

SEQ ID NO: 435708 - RNA, 19 nt, Artificial Sequence
  Description of Artificial Sequence: Synthetic oligonucleotide
  Antisense Strand to SEQ ID NO: 435707
aucuugcaaauucagcagc

SEQ ID NO: 435709 - RNA, 19 nt, Artificial Sequence
  Description of Artificial Sequence: Synthetic oligonucleotide
  Sense strand starting at position 2418 of SEQ ID NO: 316726
uguagaugccgcgugagua

SEQ ID NO: 435710 - RNA, 19 nt, Artificial Sequence
  Description of Artificial Sequence: Synthetic oligonucleotide
  Antisense Strand to SEQ ID NO: 435709
uacucacgcggcaucuaca

SEQ ID NO: 435711 - RNA, 19 nt, Artificial Sequence
  Description of Artificial Sequence: Synthetic oligonucleotide
  Sense strand starting at position 2517 of SEQ ID NO: 316726
ugucuuucagaggaaggua

SEQ ID NO: 435712 - RNA, 19 nt, Artificial Sequence
  Description of Artificial Sequence: Synthetic oligonucleotide
  Antisense Strand to SEQ ID NO: 435711
uaccuuccucugaaagaca

SEQ ID NO: 435713 - RNA, 19 nt, Artificial Sequence
  Description of Artificial Sequence: Synthetic oligonucleotide
  Sense strand starting at position 2529 of SEQ ID NO: 316726
gaagguaaagguggugaaa

SEQ ID NO: 435714 - RNA, 19 nt, Artificial Sequence
  Description of Artificial Sequence: Synthetic oligonucleotide
  Antisense Strand to SEQ ID NO: 435713
uuucaccaccuuuaccuuc

SEQ ID NO: 435715 - RNA, 19 nt, Artificial Sequence
  Description of Artificial Sequence: Synthetic oligonucleotide
  Sense strand starting at position 2540 of SEQ ID NO: 316726
uggugaaagcucuaaacua

SEQ ID NO: 435716 - RNA, 19 nt, Artificial Sequence
  Description of Artificial Sequence: Synthetic oligonucleotide
  Antisense Strand to SEQ ID NO: 435715
uaguuuagagcuuucacca

SEQ ID NO: 435717 - RNA, 19 nt, Artificial Sequence
  Description of Artificial Sequence: Synthetic oligonucleotide
  Sense strand starting at position 2567 of SEQ ID NO: 316726
ucgaaauggcugcagaaau

SEQ ID NO: 435718 - RNA, 19 nt, Artificial Sequence
  Description of Artificial Sequence: Synthetic oligonucleotide
  Antisense Strand to SEQ ID NO: 435717
auuucugcagccauuucga

SEQ ID NO: 435719 - RNA, 19 nt, Artificial Sequence
  Description of Artificial Sequence: Synthetic oligonucleotide
  Sense strand starting at position 2748 of SEQ ID NO: 316726
gauguuauacgugaggaug

SEQ ID NO: 435720 - RNA, 19 nt, Artificial Sequence
  Description of Artificial Sequence: Synthetic oligonucleotide
  Antisense Strand to SEQ ID NO: 435719
cauccucacguauaacauc

SEQ ID NO: 435721 - RNA, 19 nt, Artificial Sequence
  Description of Artificial Sequence: Synthetic oligonucleotide
  Sense strand starting at position 2813 of SEQ ID NO: 316726
agaauucuacuagacgcua

SEQ ID NO: 435722 - RNA, 19 nt, Artificial Sequence
  Description of Artificial Sequence: Synthetic oligonucleotide
  Antisense Strand to SEQ ID NO: 435721
uagcgucuaguagaauucu

SEQ ID NO: 435723 - RNA, 19 nt, Artificial Sequence
  Description of Artificial Sequence: Synthetic oligonucleotide
  Sense strand starting at position 2818 of SEQ ID NO: 316726
ucuacuagacgcuaaacau

SEQ ID NO: 435724 - RNA, 19 nt, Artificial Sequence
  Description of Artificial Sequence: Synthetic oligonucleotide
  Antisense Strand to SEQ ID NO: 435723
auguuuagcgucuaguaga

SEQ ID NO: 435725 - RNA, 19 nt, Artificial Sequence
  Description of Artificial Sequence: Synthetic oligonucleotide
  Sense strand starting at position 2922 of SEQ ID NO: 316726
acagcucucuggccauuua

SEQ ID NO: 435726 - RNA, 19 nt, Artificial Sequence
  Description of Artificial Sequence: Synthetic oligonucleotide
  Antisense Strand to SEQ ID NO: 435725
uaaauggccagagagcugu

SEQ ID NO: 435727 - RNA, 19 nt, Artificial Sequence
  Description of Artificial Sequence: Synthetic oligonucleotide
  Sense strand starting at position 3113 of SEQ ID NO: 316726
cucauaggguuguuggaaa

SEQ ID NO: 435728 - RNA, 19 nt, Artificial Sequence
  Description of Artificial Sequence: Synthetic oligonucleotide
  Antisense Strand to SEQ ID NO: 435727
uuuccaacaacccuaugag

SEQ ID NO: 435729 - RNA, 19 nt, Artificial Sequence
  Description of Artificial Sequence: Synthetic oligonucleotide
  Sense strand starting at position 3160 of SEQ ID NO: 316726
gauuuagaauaguaucuga

SEQ ID NO: 435730 - RNA, 19 nt, Artificial Sequence
  Description of Artificial Sequence: Synthetic oligonucleotide
  Antisense Strand to SEQ ID NO: 435729
ucagauacuauucuaaauc

SEQ ID NO: 435731 - RNA, 19 nt, Artificial Sequence
  Description of Artificial Sequence: Synthetic oligonucleotide
  Sense strand starting at position 3338 of SEQ ID NO: 316726
aggaauaugcuuuguuaaa

SEQ ID NO: 435732 - RNA, 19 nt, Artificial Sequence
  Description of Artificial Sequence: Synthetic oligonucleotide
  Antisense Strand to SEQ ID NO: 435731
uuuaacaaagcauauuccu

SEQ ID NO: 435733 - RNA, 19 nt, Artificial Sequence
  Description of Artificial Sequence: Synthetic oligonucleotide
  Sense strand starting at position 3340 of SEQ ID NO: 316726
gaauaugcuuuguuaaaga

SEQ ID NO: 435734 - RNA, 19 nt, Artificial Sequence
  Description of Artificial Sequence: Synthetic oligonucleotide
  Antisense Strand to SEQ ID NO: 435733
ucuuuaacaaagcauauuc

SEQ ID NO: 435735 - RNA, 19 nt, Artificial Sequence
  Description of Artificial Sequence: Synthetic oligonucleotide
  Sense strand starting at position 3502 of SEQ ID NO: 316726
cauugcauggguuauagga

SEQ ID NO: 435736 - RNA, 19 nt, Artificial Sequence
  Description of Artificial Sequence: Synthetic oligonucleotide
  Antisense Strand to SEQ ID NO: 435735
uccuauaacccaugcaaug

SEQ ID NO: 435737 - RNA, 19 nt, Artificial Sequence
  Description of Artificial Sequence: Synthetic oligonucleotide
  Sense strand starting at position 3527 of SEQ ID NO: 316726
uugagaguggcaugaucaa

SEQ ID NO: 435738 - RNA, 19 nt, Artificial Sequence
  Description of Artificial Sequence: Synthetic oligonucleotide
  Antisense Strand to SEQ ID NO: 435737
uugaucaugccacucucaa

SEQ ID NO: 435739 - RNA, 19 nt, Artificial Sequence
  Description of Artificial Sequence: Synthetic oligonucleotide
  Sense strand starting at position 3580 of SEQ ID NO: 316726
gggaauaugcauuauagca

SEQ ID NO: 435740 - RNA, 19 nt, Artificial Sequence
  Description of Artificial Sequence: Synthetic oligonucleotide
  Antisense Strand to SEQ ID NO: 435739
ugcuauaaugcauauuccc

SEQ ID NO: 435741 - RNA, 19 nt, Artificial Sequence
  Description of Artificial Sequence: Synthetic oligonucleotide
  Sense strand starting at position 3766 of SEQ ID NO: 316726
auuauagaccagugguuaa

SEQ ID NO: 435742 - RNA, 19 nt, Artificial Sequence
  Description of Artificial Sequence: Synthetic oligonucleotide
  Antisense Strand to SEQ ID NO: 435741
uuaaccacuggucuauaau

SEQ ID NO: 435743 - RNA, 19 nt, Artificial Sequence
  Description of Artificial Sequence: Synthetic oligonucleotide
  Sense strand starting at position 3769 of SEQ ID NO: 316726
auagaccagugguuaagaa

SEQ ID NO: 435744 - RNA, 19 nt, Artificial Sequence
  Description of Artificial Sequence: Synthetic oligonucleotide
  Antisense Strand to SEQ ID NO: 435743
uucuuaaccacuggucuau

SEQ ID NO: 435745 - RNA, 19 nt, Artificial Sequence
  Description of Artificial Sequence: Synthetic oligonucleotide
  Sense strand starting at position 3789 of SEQ ID NO: 316726
ucagucagccucuggauuu

SEQ ID NO: 435746 - RNA, 19 nt, Artificial Sequence
  Description of Artificial Sequence: Synthetic oligonucleotide
  Antisense Strand to SEQ ID NO: 435745
aaauccagaggcugacuga

SEQ ID NO: 435747 - RNA, 19 nt, Artificial Sequence
  Description of Artificial Sequence: Synthetic oligonucleotide
  Sense strand starting at position 3983 of SEQ ID NO: 316726
acauauuaagugcauggua

SEQ ID NO: 435748 - RNA, 19 nt, Artificial Sequence
  Description of Artificial Sequence: Synthetic oligonucleotide
  Antisense Strand to SEQ ID NO: 435747
uaccaugcacuuaauaugu

SEQ ID NO: 435749 - RNA, 19 nt, Artificial Sequence
  Description of Artificial Sequence: Synthetic oligonucleotide
  Sense strand starting at position 14 of SEQ ID NO: 316727
uguguaugugucuugugua

SEQ ID NO: 435750 - RNA, 19 nt, Artificial Sequence
  Description of Artificial Sequence: Synthetic oligonucleotide
  Antisense Strand to SEQ ID NO: 435749
uacacaagacacauacaca

SEQ ID NO: 435751 - RNA, 19 nt, Artificial Sequence
  Description of Artificial Sequence: Synthetic oligonucleotide
  Sense strand starting at position 132 of SEQ ID NO: 316727
aggucuaaauacguacuaa

SEQ ID NO: 435752 - RNA, 19 nt, Artificial Sequence
  Description of Artificial Sequence: Synthetic oligonucleotide
  Antisense Strand to SEQ ID NO: 435751
uuaguacguauuuagaccu

SEQ ID NO: 435753 - RNA, 19 nt, Artificial Sequence
  Description of Artificial Sequence: Synthetic oligonucleotide
  Sense strand starting at position 211 of SEQ ID NO: 316727
uuuauaaucccguagggaa

SEQ ID NO: 435754 - RNA, 19 nt, Artificial Sequence
  Description of Artificial Sequence: Synthetic oligonucleotide
  Antisense Strand to SEQ ID NO: 435753
uucccuacgggauuauaaa

SEQ ID NO: 435755 - RNA, 19 nt, Artificial Sequence
  Description of Artificial Sequence: Synthetic oligonucleotide
  Sense strand starting at position 269 of SEQ ID NO: 316727
ucagcugaugccuaaucaa

SEQ ID NO: 435756 - RNA, 19 nt, Artificial Sequence
  Description of Artificial Sequence: Synthetic oligonucleotide
  Antisense Strand to SEQ ID NO: 435755
uugauuaggcaucagcuga

SEQ ID NO: 435757 - RNA, 19 nt, Artificial Sequence
  Description of Artificial Sequence: Synthetic oligonucleotide
  Sense strand starting at position 363 of SEQ ID NO: 316727
augcguucacuggaugaca

SEQ ID NO: 435758 - RNA, 19 nt, Artificial Sequence
  Description of Artificial Sequence: Synthetic oligonucleotide
  Antisense Strand to SEQ ID NO: 435757
ugucauccagugaacgcau

SEQ ID NO: 435759 - RNA, 19 nt, Artificial Sequence
  Description of Artificial Sequence: Synthetic oligonucleotide
  Sense strand starting at position 462 of SEQ ID NO: 316727
ugcagagaucaagguacga

SEQ ID NO: 435760 - RNA, 19 nt, Artificial Sequence
  Description of Artificial Sequence: Synthetic oligonucleotide
  Antisense Strand to SEQ ID NO: 435759
ucguaccuugaucucugca

SEQ ID NO: 435761 - RNA, 19 nt, Artificial Sequence
  Description of Artificial Sequence: Synthetic oligonucleotide
  Sense strand starting at position 525 of SEQ ID NO: 316727
ccacgucuucuugauugga

SEQ ID NO: 435762 - RNA, 19 nt, Artificial Sequence
  Description of Artificial Sequence: Synthetic oligonucleotide
  Antisense Strand to SEQ ID NO: 435761
uccaaucaagaagacgugg

SEQ ID NO: 435763 - RNA, 19 nt, Artificial Sequence
  Description of Artificial Sequence: Synthetic oligonucleotide
  Sense strand starting at position 659 of SEQ ID NO: 316727
guagacguggaguaucuaa

SEQ ID NO: 435764 - RNA, 19 nt, Artificial Sequence
  Description of Artificial Sequence: Synthetic oligonucleotide
  Antisense Strand to SEQ ID NO: 435763
uuagauacuccacgucuac

SEQ ID NO: 435765 - RNA, 19 nt, Artificial Sequence
  Description of Artificial Sequence: Synthetic oligonucleotide
  Sense strand starting at position 738 of SEQ ID NO: 316727
ccgagucuagccuuugcau

SEQ ID NO: 435766 - RNA, 19 nt, Artificial Sequence
  Description of Artificial Sequence: Synthetic oligonucleotide
  Antisense Strand to SEQ ID NO: 435765
augcaaaggcuagacucgg

SEQ ID NO: 435767 - RNA, 19 nt, Artificial Sequence
  Description of Artificial Sequence: Synthetic oligonucleotide
  Sense strand starting at position 739 of SEQ ID NO: 316727
cgagucuagccuuugcauu

SEQ ID NO: 435768 - RNA, 19 nt, Artificial Sequence
  Description of Artificial Sequence: Synthetic oligonucleotide
  Antisense Strand to SEQ ID NO: 435767
aaugcaaaggcuagacucg

SEQ ID NO: 435769 - RNA, 19 nt, Artificial Sequence
  Description of Artificial Sequence: Synthetic oligonucleotide
  Sense strand starting at position 740 of SEQ ID NO: 316727
gagucuagccuuugcauuu

SEQ ID NO: 435770 - RNA, 19 nt, Artificial Sequence
  Description of Artificial Sequence: Synthetic oligonucleotide
  Antisense Strand to SEQ ID NO: 435769
aaaugcaaaggcuagacuc

SEQ ID NO: 435771 - RNA, 19 nt, Artificial Sequence
  Description of Artificial Sequence: Synthetic oligonucleotide
  Sense strand starting at position 766 of SEQ ID NO: 316727
acaggacugugacuuugau

SEQ ID NO: 435772 - RNA, 19 nt, Artificial Sequence
  Description of Artificial Sequence: Synthetic oligonucleotide
  Antisense Strand to SEQ ID NO: 435771
aucaaagucacaguccugu

SEQ ID NO: 435773 - RNA, 19 nt, Artificial Sequence
  Description of Artificial Sequence: Synthetic oligonucleotide
  Sense strand starting at position 772 of SEQ ID NO: 316727
cugugacuuugaucaaacu

SEQ ID NO: 435774 - RNA, 19 nt, Artificial Sequence
  Description of Artificial Sequence: Synthetic oligonucleotide
  Antisense Strand to SEQ ID NO: 435773
aguuugaucaaagucacag

SEQ ID NO: 435775 - RNA, 19 nt, Artificial Sequence
  Description of Artificial Sequence: Synthetic oligonucleotide
  Sense strand starting at position 773 of SEQ ID NO: 316727
ugugacuuugaucaaacuu

SEQ ID NO: 435776 - RNA, 19 nt, Artificial Sequence
  Description of Artificial Sequence: Synthetic oligonucleotide
  Antisense Strand to SEQ ID NO: 435775
aaguuugaucaaagucaca

SEQ ID NO: 435777 - RNA, 19 nt, Artificial Sequence
  Description of Artificial Sequence: Synthetic oligonucleotide
  Sense strand starting at position 826 of SEQ ID NO: 316727
uguuguaaagaccaaguaa

SEQ ID NO: 435778 - RNA, 19 nt, Artificial Sequence
  Description of Artificial Sequence: Synthetic oligonucleotide
  Antisense Strand to SEQ ID NO: 435777
uuacuuggucuuuacaaca

SEQ ID NO: 435779 - RNA, 19 nt, Artificial Sequence
  Description of Artificial Sequence: Synthetic oligonucleotide
  Sense strand starting at position 1102 of SEQ ID NO: 316727
gaguuauuacgguaugauu

SEQ ID NO: 435780 - RNA, 19 nt, Artificial Sequence
  Description of Artificial Sequence: Synthetic oligonucleotide
  Antisense Strand to SEQ ID NO: 435779
aaucauaccguaauaacuc

SEQ ID NO: 435781 - RNA, 19 nt, Artificial Sequence
  Description of Artificial Sequence: Synthetic oligonucleotide
  Sense strand starting at position 1104 of SEQ ID NO: 316727
guuauuacgguaugauuuc

SEQ ID NO: 435782 - RNA, 19 nt, Artificial Sequence
  Description of Artificial Sequence: Synthetic oligonucleotide
  Antisense Strand to SEQ ID NO: 435781
gaaaucauaccguaauaac

SEQ ID NO: 435783 - RNA, 19 nt, Artificial Sequence
  Description of Artificial Sequence: Synthetic oligonucleotide
  Sense strand starting at position 1111 of SEQ ID NO: 316727
cgguaugauuucguuacau

SEQ ID NO: 435784 - RNA, 19 nt, Artificial Sequence
  Description of Artificial Sequence: Synthetic oligonucleotide
  Antisense Strand to SEQ ID NO: 435783
auguaacgaaaucauaccg

SEQ ID NO: 435785 - RNA, 19 nt, Artificial Sequence
  Description of Artificial Sequence: Synthetic oligonucleotide
  Sense strand starting at position 1125 of SEQ ID NO: 316727
uacauaggugccugaugga

SEQ ID NO: 435786 - RNA, 19 nt, Artificial Sequence
  Description of Artificial Sequence: Synthetic oligonucleotide
  Antisense Strand to SEQ ID NO: 435785
uccaucaggcaccuaugua

SEQ ID NO: 435787 - RNA, 19 nt, Artificial Sequence
  Description of Artificial Sequence: Synthetic oligonucleotide
  Sense strand starting at position 1251 of SEQ ID NO: 316727
gucagaaaguccuuaauaa

SEQ ID NO: 435788 - RNA, 19 nt, Artificial Sequence
  Description of Artificial Sequence: Synthetic oligonucleotide
  Antisense Strand to SEQ ID NO: 435787
uuauuaaggacuuucugac

SEQ ID NO: 435789 - RNA, 19 nt, Artificial Sequence
  Description of Artificial Sequence: Synthetic oligonucleotide
  Sense strand starting at position 1378 of SEQ ID NO: 316727
uuucgucauccugagacaa

SEQ ID NO: 435790 - RNA, 19 nt, Artificial Sequence
  Description of Artificial Sequence: Synthetic oligonucleotide
  Antisense Strand to SEQ ID NO: 435789
uugucucaggaugacgaaa

SEQ ID NO: 435791 - RNA, 19 nt, Artificial Sequence
  Description of Artificial Sequence: Synthetic oligonucleotide
  Sense strand starting at position 2176 of SEQ ID NO: 316727
gccagaccuuuccugggaa

SEQ ID NO: 435792 - RNA, 19 nt, Artificial Sequence
  Description of Artificial Sequence: Synthetic oligonucleotide
  Antisense Strand to SEQ ID NO: 435791
uucccaggaaaggucuggc

SEQ ID NO: 435793 - RNA, 19 nt, Artificial Sequence
  Description of Artificial Sequence: Synthetic oligonucleotide
  Sense strand starting at position 2245 of SEQ ID NO: 316727
gcgggcgccauuuaaagaa

SEQ ID NO: 435794 - RNA, 19 nt, Artificial Sequence
  Description of Artificial Sequence: Synthetic oligonucleotide
  Antisense Strand to SEQ ID NO: 435793
uucuuuaaauggcgcccgc

SEQ ID NO: 435795 - RNA, 19 nt, Artificial Sequence
  Description of Artificial Sequence: Synthetic oligonucleotide
  Sense strand starting at position 2415 of SEQ ID NO: 316727
cguuauuacgcugugguga

SEQ ID NO: 435796 - RNA, 19 nt, Artificial Sequence
  Description of Artificial Sequence: Synthetic oligonucleotide
  Antisense Strand to SEQ ID NO: 435795
ucaccacagcguaauaacg

SEQ ID NO: 435797 - RNA, 19 nt, Artificial Sequence
  Description of Artificial Sequence: Synthetic oligonucleotide
  Sense strand starting at position 2479 of SEQ ID NO: 316727
gucaaaugaaacgagcuua

SEQ ID NO: 435798 - RNA, 19 nt, Artificial Sequence
  Description of Artificial Sequence: Synthetic oligonucleotide
  Antisense Strand to SEQ ID NO: 435797
uaagcucguuucauuugac

SEQ ID NO: 435799 - RNA, 19 nt, Artificial Sequence
  Description of Artificial Sequence: Synthetic oligonucleotide
  Sense strand starting at position 2527 of SEQ ID NO: 316727
ucagaacugguuuggaauu

SEQ ID NO: 435800 - RNA, 19 nt, Artificial Sequence
  Description of Artificial Sequence: Synthetic oligonucleotide
  Antisense Strand to SEQ ID NO: 435799
aauuccaaaccaguucuga

SEQ ID NO: 435801 - RNA, 19 nt, Artificial Sequence
  Description of Artificial Sequence: Synthetic oligonucleotide
  Sense strand starting at position 2573 of SEQ ID NO: 316727
uaagauuucgcaugucacu

SEQ ID NO: 435802 - RNA, 19 nt, Artificial Sequence
  Description of Artificial Sequence: Synthetic oligonucleotide
  Antisense Strand to SEQ ID NO: 435801
agugacaugcgaaaucuua

SEQ ID NO: 435803 - RNA, 19 nt, Artificial Sequence
  Description of Artificial Sequence: Synthetic oligonucleotide
  Sense strand starting at position 2625 of SEQ ID NO: 316727
aggauaaugcucuaugucu

SEQ ID NO: 435804 - RNA, 19 nt, Artificial Sequence
  Description of Artificial Sequence: Synthetic oligonucleotide
  Antisense Strand to SEQ ID NO: 435803
agacauagagcauuauccu

SEQ ID NO: 435805 - RNA, 19 nt, Artificial Sequence
  Description of Artificial Sequence: Synthetic oligonucleotide
  Sense strand starting at position 2664 of SEQ ID NO: 316727
gaaagauccugcccugaga

SEQ ID NO: 435806 - RNA, 19 nt, Artificial Sequence
  Description of Artificial Sequence: Synthetic oligonucleotide
  Antisense Strand to SEQ ID NO: 435805
ucucagggcaggaucuuuc

SEQ ID NO: 435807 - RNA, 19 nt, Artificial Sequence
  Description of Artificial Sequence: Synthetic oligonucleotide
  Sense strand starting at position 2694 of SEQ ID NO: 316727
gugauaaaugccuaauuga

SEQ ID NO: 435808 - RNA, 19 nt, Artificial Sequence
  Description of Artificial Sequence: Synthetic oligonucleotide
  Antisense Strand to SEQ ID NO: 435807
ucaauuaggcauuuaucac

SEQ ID NO: 435809 - RNA, 19 nt, Artificial Sequence
  Description of Artificial Sequence: Synthetic oligonucleotide
  Sense strand starting at position 2707 of SEQ ID NO: 316727
aauugauugugagccuaaa

SEQ ID NO: 435810 - RNA, 19 nt, Artificial Sequence
  Description of Artificial Sequence: Synthetic oligonucleotide
  Antisense Strand to SEQ ID NO: 435809
uuuaggcucacaaucaauu

SEQ ID NO: 435811 - RNA, 19 nt, Artificial Sequence
  Description of Artificial Sequence: Synthetic oligonucleotide
  Sense strand starting at position 2740 of SEQ ID NO: 316727
auagguaagagcgauacua

SEQ ID NO: 435812 - RNA, 19 nt, Artificial Sequence
  Description of Artificial Sequence: Synthetic oligonucleotide
  Antisense Strand to SEQ ID NO: 435811
uaguaucgcucuuaccuau

SEQ ID NO: 435813 - RNA, 19 nt, Artificial Sequence
  Description of Artificial Sequence: Synthetic oligonucleotide
  Sense strand starting at position 2742 of SEQ ID NO: 316727
agguaagagcgauacuacu

SEQ ID NO: 435814 - RNA, 19 nt, Artificial Sequence
  Description of Artificial Sequence: Synthetic oligonucleotide
  Antisense Strand to SEQ ID NO: 435813
aguaguaucgcucuuaccu

SEQ ID NO: 435815 - RNA, 19 nt, Artificial Sequence
  Description of Artificial Sequence: Synthetic oligonucleotide
  Sense strand starting at position 3213 of SEQ ID NO: 316727
ugauccuucugauuagagu

SEQ ID NO: 435816 - RNA, 19 nt, Artificial Sequence
  Description of Artificial Sequence: Synthetic oligonucleotide
  Antisense Strand to SEQ ID NO: 435815
acucuaaucagaaggauca

SEQ ID NO: 435817 - RNA, 19 nt, Artificial Sequence
  Description of Artificial Sequence: Synthetic oligonucleotide
  Sense strand starting at position 3395 of SEQ ID NO: 316727
cccucaauggacugugaga

SEQ ID NO: 435818 - RNA, 19 nt, Artificial Sequence
  Description of Artificial Sequence: Synthetic oligonucleotide
  Antisense Strand to SEQ ID NO: 435817
ucucacaguccauugaggg

SEQ ID NO: 435819 - RNA, 19 nt, Artificial Sequence
  Description of Artificial Sequence: Synthetic oligonucleotide
  Sense strand starting at position 3408 of SEQ ID NO: 316727
gugagaccaguguacuaca

SEQ ID NO: 435820 - RNA, 19 nt, Artificial Sequence
  Description of Artificial Sequence: Synthetic oligonucleotide
  Antisense Strand to SEQ ID NO: 435819
uguaguacacuggucucac

SEQ ID NO: 435821 - RNA, 19 nt, Artificial Sequence
  Description of Artificial Sequence: Synthetic oligonucleotide
  Sense strand starting at position 3844 of SEQ ID NO: 316727
aguguaagaagguauuauu

SEQ ID NO: 435822 - RNA, 19 nt, Artificial Sequence
  Description of Artificial Sequence: Synthetic oligonucleotide
  Antisense Strand to SEQ ID NO: 435821
aauaauaccuucuuacacu

SEQ ID NO: 435823 - RNA, 19 nt, Artificial Sequence
  Description of Artificial Sequence: Synthetic oligonucleotide
  Sense strand starting at position 3921 of SEQ ID NO: 316727
gugugugcucaggcucaau

SEQ ID NO: 435824 - RNA, 19 nt, Artificial Sequence
  Description of Artificial Sequence: Synthetic oligonucleotide
  Antisense Strand to SEQ ID NO: 435823
auugagccugagcacacac

SEQ ID NO: 435825 - RNA, 19 nt, Artificial Sequence
  Description of Artificial Sequence: Synthetic oligonucleotide
  Sense strand starting at position 3947 of SEQ ID NO: 316727
ccuuaacaaugggucuaaa

SEQ ID NO: 435826 - RNA, 19 nt, Artificial Sequence
  Description of Artificial Sequence: Synthetic oligonucleotide
  Antisense Strand to SEQ ID NO: 435825
uuuagacccauuguuaagg

SEQ ID NO: 435827 - RNA, 19 nt, Artificial Sequence
  Description of Artificial Sequence: Synthetic oligonucleotide
  Sense strand starting at position 3977 of SEQ ID NO: 316727
gcacuuucuuaggugauuu

SEQ ID NO: 435828 - RNA, 19 nt, Artificial Sequence
  Description of Artificial Sequence: Synthetic oligonucleotide
  Antisense Strand to SEQ ID NO: 435827
aaaucaccuaagaaagugc

SEQ ID NO: 435829 - RNA, 19 nt, Artificial Sequence
  Description of Artificial Sequence: Synthetic oligonucleotide
  Sense strand starting at position 192 of SEQ ID NO: 316728
uggugaauacaugguccua

SEQ ID NO: 435830 - RNA, 19 nt, Artificial Sequence
  Description of Artificial Sequence: Synthetic oligonucleotide
  Antisense Strand to SEQ ID NO: 435829
uaggaccauguauucacca

SEQ ID NO: 435831 - RNA, 19 nt, Artificial Sequence
  Description of Artificial Sequence: Synthetic oligonucleotide
  Sense strand starting at position 194 of SEQ ID NO: 316728
gugaauacaugguccuauu

SEQ ID NO: 435832 - RNA, 19 nt, Artificial Sequence
  Description of Artificial Sequence: Synthetic oligonucleotide
  Antisense Strand to SEQ ID NO: 435831
aauaggaccauguauucac

SEQ ID NO: 435833 - RNA, 19 nt, Artificial Sequence
  Description of Artificial Sequence: Synthetic oligonucleotide
  Sense strand starting at position 288 of SEQ ID NO: 316728
acgagauuguaggauuuca

SEQ ID NO: 435834 - RNA, 19 nt, Artificial Sequence
  Description of Artificial Sequence: Synthetic oligonucleotide
  Antisense Strand to SEQ ID NO: 435833
ugaaauccuacaaucucgu

SEQ ID NO: 435835 - RNA, 19 nt, Artificial Sequence
  Description of Artificial Sequence: Synthetic oligonucleotide
  Sense strand starting at position 1301 of SEQ ID NO: 316728
uugugaaaguuaccucaga

SEQ ID NO: 435836 - RNA, 19 nt, Artificial Sequence
  Description of Artificial Sequence: Synthetic oligonucleotide
  Antisense Strand to SEQ ID NO: 435835
ucugagguaacuuucacaa

SEQ ID NO: 435837 - RNA, 19 nt, Artificial Sequence
  Description of Artificial Sequence: Synthetic oligonucleotide
  Sense strand starting at position 1302 of SEQ ID NO: 316728
ugugaaaguuaccucagau

SEQ ID NO: 435838 - RNA, 19 nt, Artificial Sequence
  Description of Artificial Sequence: Synthetic oligonucleotide
  Antisense Strand to SEQ ID NO: 435837
aucugagguaacuuucaca

SEQ ID NO: 435839 - RNA, 19 nt, Artificial Sequence
  Description of Artificial Sequence: Synthetic oligonucleotide
  Sense strand starting at position 1334 of SEQ ID NO: 316728
cuguguuaaagacauguuu

SEQ ID NO: 435840 - RNA, 19 nt, Artificial Sequence
  Description of Artificial Sequence: Synthetic oligonucleotide
  Antisense Strand to SEQ ID NO: 435839
aaacaugucuuuaacacag

SEQ ID NO: 435841 - RNA, 19 nt, Artificial Sequence
  Description of Artificial Sequence: Synthetic oligonucleotide
  Sense strand starting at position 1340 of SEQ ID NO: 316728
uaaagacauguuuauggca

SEQ ID NO: 435842 - RNA, 19 nt, Artificial Sequence
  Description of Artificial Sequence: Synthetic oligonucleotide
  Antisense Strand to SEQ ID NO: 435841
ugccauaaacaugucuuua

SEQ ID NO: 435843 - RNA, 19 nt, Artificial Sequence
  Description of Artificial Sequence: Synthetic oligonucleotide
  Sense strand starting at position 1348 of SEQ ID NO: 316728
uguuuauggcaacaagaug

SEQ ID NO: 435844 - RNA, 19 nt, Artificial Sequence
  Description of Artificial Sequence: Synthetic oligonucleotide
  Antisense Strand to SEQ ID NO: 435843
caucuuguugccauaaaca

SEQ ID NO: 435845 - RNA, 19 nt, Artificial Sequence
  Description of Artificial Sequence: Synthetic oligonucleotide
  Sense strand starting at position 1375 of SEQ ID NO: 316728
cagacugagugggcauaau

SEQ ID NO: 435846 - RNA, 19 nt, Artificial Sequence
  Description of Artificial Sequence: Synthetic oligonucleotide
  Antisense Strand to SEQ ID NO: 435845
auuaugcccacucagucug

SEQ ID NO: 435847 - RNA, 19 nt, Artificial Sequence
  Description of Artificial Sequence: Synthetic oligonucleotide
  Sense strand starting at position 1386 of SEQ ID NO: 316728
ggcauaaugagauagcagu

SEQ ID NO: 435848 - RNA, 19 nt, Artificial Sequence
  Description of Artificial Sequence: Synthetic oligonucleotide
  Antisense Strand to SEQ ID NO: 435847
acugcuaucucauuaugcc

SEQ ID NO: 435849 - RNA, 19 nt, Artificial Sequence
  Description of Artificial Sequence: Synthetic oligonucleotide
  Sense strand starting at position 1527 of SEQ ID NO: 316728
uggugaaacccucaucuuu

SEQ ID NO: 435850 - RNA, 19 nt, Artificial Sequence
  Description of Artificial Sequence: Synthetic oligonucleotide
  Antisense Strand to SEQ ID NO: 435849
aaagaugaggguuucacca

SEQ ID NO: 435851 - RNA, 19 nt, Artificial Sequence
  Description of Artificial Sequence: Synthetic oligonucleotide
  Sense strand starting at position 1812 of SEQ ID NO: 316728
uuuagaucuccuugugaaa

SEQ ID NO: 435852 - RNA, 19 nt, Artificial Sequence
  Description of Artificial Sequence: Synthetic oligonucleotide
  Antisense Strand to SEQ ID NO: 435851
uuucacaaggagaucuaaa

SEQ ID NO: 435853 - RNA, 19 nt, Artificial Sequence
  Description of Artificial Sequence: Synthetic oligonucleotide
  Sense strand starting at position 1896 of SEQ ID NO: 316728
ugguaugauacagaugcca

SEQ ID NO: 435854 - RNA, 19 nt, Artificial Sequence
  Description of Artificial Sequence: Synthetic oligonucleotide
  Antisense Strand to SEQ ID NO: 435853
uggcaucuguaucauacca

SEQ ID NO: 435855 - RNA, 19 nt, Artificial Sequence
  Description of Artificial Sequence: Synthetic oligonucleotide
  Sense strand starting at position 1898 of SEQ ID NO: 316728
guaugauacagaugccaug

SEQ ID NO: 435856 - RNA, 19 nt, Artificial Sequence
  Description of Artificial Sequence: Synthetic oligonucleotide
  Antisense Strand to SEQ ID NO: 435855
cauggcaucuguaucauac

SEQ ID NO: 435857 - RNA, 19 nt, Artificial Sequence
  Description of Artificial Sequence: Synthetic oligonucleotide
  Sense strand starting at position 2043 of SEQ ID NO: 316728
gcuaaugacucuuuaugac

SEQ ID NO: 435858 - RNA, 19 nt, Artificial Sequence
  Description of Artificial Sequence: Synthetic oligonucleotide
  Antisense Strand to SEQ ID NO: 435857
gucauaaagagucauuagc

SEQ ID NO: 435859 - RNA, 19 nt, Artificial Sequence
  Description of Artificial Sequence: Synthetic oligonucleotide
  Sense strand starting at position 2067 of SEQ ID NO: 316728
gauagaauguuccuccuug

SEQ ID NO: 435860 - RNA, 19 nt, Artificial Sequence
  Description of Artificial Sequence: Synthetic oligonucleotide
  Antisense Strand to SEQ ID NO: 435859
caaggaggaacauucuauc

SEQ ID NO: 435861 - RNA, 19 nt, Artificial Sequence
  Description of Artificial Sequence: Synthetic oligonucleotide
  Sense strand starting at position 2227 of SEQ ID NO: 316728
gcuuaugucccagauaauc

SEQ ID NO: 435862 - RNA, 19 nt, Artificial Sequence
  Description of Artificial Sequence: Synthetic oligonucleotide
  Antisense Strand to SEQ ID NO: 435861
gauuaucugggacauaagc

SEQ ID NO: 435863 - RNA, 19 nt, Artificial Sequence
  Description of Artificial Sequence: Synthetic oligonucleotide
  Sense strand starting at position 2475 of SEQ ID NO: 316728
agugcuugugcuuugguca

SEQ ID NO: 435864 - RNA, 19 nt, Artificial Sequence
  Description of Artificial Sequence: Synthetic oligonucleotide
  Antisense Strand to SEQ ID NO: 435863
ugaccaaagcacaagcacu

SEQ ID NO: 435865 - RNA, 19 nt, Artificial Sequence
  Description of Artificial Sequence: Synthetic oligonucleotide
  Sense strand starting at position 2494 of SEQ ID NO: 316728
ugucaauuuaccugugguu

SEQ ID NO: 435866 - RNA, 19 nt, Artificial Sequence
  Description of Artificial Sequence: Synthetic oligonucleotide
  Antisense Strand to SEQ ID NO: 435865
aaccacagguaaauugaca

SEQ ID NO: 435867 - RNA, 19 nt, Artificial Sequence
  Description of Artificial Sequence: Synthetic oligonucleotide
  Sense strand starting at position 2496 of SEQ ID NO: 316728
ucaauuuaccugugguucu

SEQ ID NO: 435868 - RNA, 19 nt, Artificial Sequence
  Description of Artificial Sequence: Synthetic oligonucleotide
  Antisense Strand to SEQ ID NO: 435867
agaaccacagguaaauuga

SEQ ID NO: 435869 - RNA, 19 nt, Artificial Sequence
  Description of Artificial Sequence: Synthetic oligonucleotide
  Sense strand starting at position 2624 of SEQ ID NO: 316728
ucugcucuuccaggaggau

SEQ ID NO: 435870 - RNA, 19 nt, Artificial Sequence
  Description of Artificial Sequence: Synthetic oligonucleotide
  Antisense Strand to SEQ ID NO: 435869
auccuccuggaagagcaga

SEQ ID NO: 435871 - RNA, 19 nt, Artificial Sequence
  Description of Artificial Sequence: Synthetic oligonucleotide
  Sense strand starting at position 2768 of SEQ ID NO: 316728
aucugacuucuaggaguuu

SEQ ID NO: 435872 - RNA, 19 nt, Artificial Sequence
  Description of Artificial Sequence: Synthetic oligonucleotide
  Antisense Strand to SEQ ID NO: 435871
aaacuccuagaagucagau

SEQ ID NO: 435873 - RNA, 19 nt, Artificial Sequence
  Description of Artificial Sequence: Synthetic oligonucleotide
  Sense strand starting at position 2821 of SEQ ID NO: 316728
cagagacuuguaugcaaua

SEQ ID NO: 435874 - RNA, 19 nt, Artificial Sequence
  Description of Artificial Sequence: Synthetic oligonucleotide
  Antisense Strand to SEQ ID NO: 435873
uauugcauacaagucucug

SEQ ID NO: 435875 - RNA, 19 nt, Artificial Sequence
  Description of Artificial Sequence: Synthetic oligonucleotide
  Sense strand starting at position 2822 of SEQ ID NO: 316728
agagacuuguaugcaauaa

SEQ ID NO: 435876 - RNA, 19 nt, Artificial Sequence
  Description of Artificial Sequence: Synthetic oligonucleotide
  Antisense Strand to SEQ ID NO: 435875
uuauugcauacaagucucu

SEQ ID NO: 435877 - RNA, 19 nt, Artificial Sequence
  Description of Artificial Sequence: Synthetic oligonucleotide
  Sense strand starting at position 2826 of SEQ ID NO: 316728
acuuguaugcaauaaauag

SEQ ID NO: 435878 - RNA, 19 nt, Artificial Sequence
  Description of Artificial Sequence: Synthetic oligonucleotide
  Antisense Strand to SEQ ID NO: 435877
cuauuuauugcauacaagu

SEQ ID NO: 435879 - RNA, 19 nt, Artificial Sequence
  Description of Artificial Sequence: Synthetic oligonucleotide
  Sense strand starting at position 2845 of SEQ ID NO: 316728
uuaauagauguuuguggga

SEQ ID NO: 435880 - RNA, 19 nt, Artificial Sequence
  Description of Artificial Sequence: Synthetic oligonucleotide
  Antisense Strand to SEQ ID NO: 435879
ucccacaaacaucuauuaa

SEQ ID NO: 435881 - RNA, 19 nt, Artificial Sequence
  Description of Artificial Sequence: Synthetic oligonucleotide
  Sense strand starting at position 2871 of SEQ ID NO: 316728
uuguaugaacaguaauucu

SEQ ID NO: 435882 - RNA, 19 nt, Artificial Sequence
  Description of Artificial Sequence: Synthetic oligonucleotide
  Antisense Strand to SEQ ID NO: 435881
agaauuacuguucauacaa

SEQ ID NO: 435883 - RNA, 19 nt, Artificial Sequence
  Description of Artificial Sequence: Synthetic oligonucleotide
  Sense strand starting at position 2899 of SEQ ID NO: 316728
agaaauauaucggcuaccu

SEQ ID NO: 435884 - RNA, 19 nt, Artificial Sequence
  Description of Artificial Sequence: Synthetic oligonucleotide
  Antisense Strand to SEQ ID NO: 435883
agguagccgauauauuucu

SEQ ID NO: 435885 - RNA, 19 nt, Artificial Sequence
  Description of Artificial Sequence: Synthetic oligonucleotide
  Sense strand starting at position 2971 of SEQ ID NO: 316728
uauggaguugucuacugua

SEQ ID NO: 435886 - RNA, 19 nt, Artificial Sequence
  Description of Artificial Sequence: Synthetic oligonucleotide
  Antisense Strand to SEQ ID NO: 435885
uacaguagacaacuccaua

SEQ ID NO: 435887 - RNA, 19 nt, Artificial Sequence
  Description of Artificial Sequence: Synthetic oligonucleotide
  Sense strand starting at position 3041 of SEQ ID NO: 316728
ucuggaaaggcuuacagua

SEQ ID NO: 435888 - RNA, 19 nt, Artificial Sequence
  Description of Artificial Sequence: Synthetic oligonucleotide
  Antisense Strand to SEQ ID NO: 435887
uacuguaagccuuuccaga

SEQ ID NO: 435889 - RNA, 19 nt, Artificial Sequence
  Description of Artificial Sequence: Synthetic oligonucleotide
  Sense strand starting at position 3060 of SEQ ID NO: 316728
ggcuuaugguaggcaaaga

SEQ ID NO: 435890 - RNA, 19 nt, Artificial Sequence
  Description of Artificial Sequence: Synthetic oligonucleotide
  Antisense Strand to SEQ ID NO: 435889
ucuuugccuaccauaagcc

SEQ ID NO: 435891 - RNA, 19 nt, Artificial Sequence
  Description of Artificial Sequence: Synthetic oligonucleotide
  Sense strand starting at position 3133 of SEQ ID NO: 316728
gaaggacugucagcagaca

SEQ ID NO: 435892 - RNA, 19 nt, Artificial Sequence
  Description of Artificial Sequence: Synthetic oligonucleotide
  Antisense Strand to SEQ ID NO: 435891
ugucugcugacaguccuuc

SEQ ID NO: 435893 - RNA, 19 nt, Artificial Sequence
  Description of Artificial Sequence: Synthetic oligonucleotide
  Sense strand starting at position 3236 of SEQ ID NO: 316728
gccuaugucagguacugaa

SEQ ID NO: 435894 - RNA, 19 nt, Artificial Sequence
  Description of Artificial Sequence: Synthetic oligonucleotide
  Antisense Strand to SEQ ID NO: 435893
uucaguaccugacauaggc

SEQ ID NO: 435895 - RNA, 19 nt, Artificial Sequence
  Description of Artificial Sequence: Synthetic oligonucleotide
  Sense strand starting at position 3243 of SEQ ID NO: 316728
ucagguacugaaugaggua

SEQ ID NO: 435896 - RNA, 19 nt, Artificial Sequence
  Description of Artificial Sequence: Synthetic oligonucleotide
  Antisense Strand to SEQ ID NO: 435895
uaccucauucaguaccuga

SEQ ID NO: 435897 - RNA, 19 nt, Artificial Sequence
  Description of Artificial Sequence: Synthetic oligonucleotide
  Sense strand starting at position 3458 of SEQ ID NO: 316728
uguauuauacaagagugcu

SEQ ID NO: 435898 - RNA, 19 nt, Artificial Sequence
  Description of Artificial Sequence: Synthetic oligonucleotide
  Antisense Strand to SEQ ID NO: 435897
agcacucuuguauaauaca

SEQ ID NO: 435899 - RNA, 19 nt, Artificial Sequence
  Description of Artificial Sequence: Synthetic oligonucleotide
  Sense strand starting at position 3464 of SEQ ID NO: 316728
auacaagagugcuucucau

SEQ ID NO: 435900 - RNA, 19 nt, Artificial Sequence
  Description of Artificial Sequence: Synthetic oligonucleotide
  Antisense Strand to SEQ ID NO: 435899
augagaagcacucuuguau

SEQ ID NO: 435901 - RNA, 19 nt, Artificial Sequence
  Description of Artificial Sequence: Synthetic oligonucleotide
  Sense strand starting at position 3548 of SEQ ID NO: 316728
gucgcuguuguguuacuga

SEQ ID NO: 435902 - RNA, 19 nt, Artificial Sequence
  Description of Artificial Sequence: Synthetic oligonucleotide
  Antisense Strand to SEQ ID NO: 435901
ucaguaacacaacagcgac

SEQ ID NO: 435903 - RNA, 19 nt, Artificial Sequence
  Description of Artificial Sequence: Synthetic oligonucleotide
  Sense strand starting at position 3587 of SEQ ID NO: 316728
gguucugaccugcauuaug

SEQ ID NO: 435904 - RNA, 19 nt, Artificial Sequence
  Description of Artificial Sequence: Synthetic oligonucleotide
  Antisense Strand to SEQ ID NO: 435903
cauaaugcaggucagaacc

SEQ ID NO: 435905 - RNA, 19 nt, Artificial Sequence
  Description of Artificial Sequence: Synthetic oligonucleotide
  Sense strand starting at position 3700 of SEQ ID NO: 316728
cuaucucuagcugaaagua

SEQ ID NO: 435906 - RNA, 19 nt, Artificial Sequence
  Description of Artificial Sequence: Synthetic oligonucleotide
  Antisense Strand to SEQ ID NO: 435905
uacuuucagcuagagauag

SEQ ID NO: 435907 - RNA, 19 nt, Artificial Sequence
  Description of Artificial Sequence: Synthetic oligonucleotide
  Sense strand starting at position 3710 of SEQ ID NO: 316728
cugaaaguaucuuucuuug

SEQ ID NO: 435908 - RNA, 19 nt, Artificial Sequence
  Description of Artificial Sequence: Synthetic oligonucleotide
  Antisense Strand to SEQ ID NO: 435907
caaagaaagauacuuucag

SEQ ID NO: 435909 - RNA, 19 nt, Artificial Sequence
  Description of Artificial Sequence: Synthetic oligonucleotide
  Sense strand starting at position 338 of SEQ ID NO: 316729
gacacuaagcgccagauau

SEQ ID NO: 435910 - RNA, 19 nt, Artificial Sequence
  Description of Artificial Sequence: Synthetic oligonucleotide
  Antisense Strand to SEQ ID NO: 435909
auaucuggcgcuuaguguc

SEQ ID NO: 435911 - RNA, 19 nt, Artificial Sequence
  Description of Artificial Sequence: Synthetic oligonucleotide
  Sense strand starting at position 348 of SEQ ID NO: 316729
gccagauauaucugagaga

SEQ ID NO: 435912 - RNA, 19 nt, Artificial Sequence
  Description of Artificial Sequence: Synthetic oligonucleotide
  Antisense Strand to SEQ ID NO: 435911
ucucucagauauaucuggc

SEQ ID NO: 435913 - RNA, 19 nt, Artificial Sequence
  Description of Artificial Sequence: Synthetic oligonucleotide
  Sense strand starting at position 351 of SEQ ID NO: 316729
agauauaucugagagauuu

SEQ ID NO: 435914 - RNA, 19 nt, Artificial Sequence
  Description of Artificial Sequence: Synthetic oligonucleotide
  Antisense Strand to SEQ ID NO: 435913
aaaucucucagauauaucu

SEQ ID NO: 435915 - RNA, 19 nt, Artificial Sequence
  Description of Artificial Sequence: Synthetic oligonucleotide
  Sense strand starting at position 405 of SEQ ID NO: 316729
ugggcauugaccugugaac

SEQ ID NO: 435916 - RNA, 19 nt, Artificial Sequence
  Description of Artificial Sequence: Synthetic oligonucleotide
  Antisense Strand to SEQ ID NO: 435915
guucacaggucaaugccca

SEQ ID NO: 435917 - RNA, 19 nt, Artificial Sequence
  Description of Artificial Sequence: Synthetic oligonucleotide
  Sense strand starting at position 407 of SEQ ID NO: 316729
ggcauugaccugugaacac

SEQ ID NO: 435918 - RNA, 19 nt, Artificial Sequence
  Description of Artificial Sequence: Synthetic oligonucleotide
  Antisense Strand to SEQ ID NO: 435917
guguucacaggucaaugcc

SEQ ID NO: 435919 - RNA, 19 nt, Artificial Sequence
  Description of Artificial Sequence: Synthetic oligonucleotide
  Sense strand starting at position 582 of SEQ ID NO: 316729
aguguuccucaauaacaca

SEQ ID NO: 435920 - RNA, 19 nt, Artificial Sequence
  Description of Artificial Sequence: Synthetic oligonucleotide
  Antisense Strand to SEQ ID NO: 435919
uguguuauugaggaacacu

SEQ ID NO: 435921 - RNA, 19 nt, Artificial Sequence
  Description of Artificial Sequence: Synthetic oligonucleotide
  Sense strand starting at position 659 of SEQ ID NO: 316729
gguuaagcacucuagucau

SEQ ID NO: 435922 - RNA, 19 nt, Artificial Sequence
  Description of Artificial Sequence: Synthetic oligonucleotide
  Antisense Strand to SEQ ID NO: 435921
augacuagagugcuuaacc

SEQ ID NO: 435923 - RNA, 19 nt, Artificial Sequence
  Description of Artificial Sequence: Synthetic oligonucleotide
  Sense strand starting at position 729 of SEQ ID NO: 316729
guuuccaaucugcaggaaa

SEQ ID NO: 435924 - RNA, 19 nt, Artificial Sequence
  Description of Artificial Sequence: Synthetic oligonucleotide
  Antisense Strand to SEQ ID NO: 435923
uuuccugcagauuggaaac

SEQ ID NO: 435925 - RNA, 19 nt, Artificial Sequence
  Description of Artificial Sequence: Synthetic oligonucleotide
  Sense strand starting at position 759 of SEQ ID NO: 316729
agaacucucccagguuaca

SEQ ID NO: 435926 - RNA, 19 nt, Artificial Sequence
  Description of Artificial Sequence: Synthetic oligonucleotide
  Antisense Strand to SEQ ID NO: 435925
uguaaccugggagaguucu

SEQ ID NO: 435927 - RNA, 19 nt, Artificial Sequence
  Description of Artificial Sequence: Synthetic oligonucleotide
  Sense strand starting at position 1091 of SEQ ID NO: 316729
cucuaagucccauggaaag

SEQ ID NO: 435928 - RNA, 19 nt, Artificial Sequence
  Description of Artificial Sequence: Synthetic oligonucleotide
  Antisense Strand to SEQ ID NO: 435927
cuuuccaugggacuuagag

SEQ ID NO: 435929 - RNA, 19 nt, Artificial Sequence
  Description of Artificial Sequence: Synthetic oligonucleotide
  Sense strand starting at position 1194 of SEQ ID NO: 316729
acuauucuccgaugggaaa

SEQ ID NO: 435930 - RNA, 19 nt, Artificial Sequence
  Description of Artificial Sequence: Synthetic oligonucleotide
  Antisense Strand to SEQ ID NO: 435929
uuucccaucggagaauagu

SEQ ID NO: 435931 - RNA, 19 nt, Artificial Sequence
  Description of Artificial Sequence: Synthetic oligonucleotide
  Sense strand starting at position 1195 of SEQ ID NO: 316729
cuauucuccgaugggaaag

SEQ ID NO: 435932 - RNA, 19 nt, Artificial Sequence
  Description of Artificial Sequence: Synthetic oligonucleotide
  Antisense Strand to SEQ ID NO: 435931
cuuucccaucggagaauag

SEQ ID NO: 435933 - RNA, 19 nt, Artificial Sequence
  Description of Artificial Sequence: Synthetic oligonucleotide
  Sense strand starting at position 1263 of SEQ ID NO: 316729
guuacugcggaugauugaa

SEQ ID NO: 435934 - RNA, 19 nt, Artificial Sequence
  Description of Artificial Sequence: Synthetic oligonucleotide
  Antisense Strand to SEQ ID NO: 435933
uucaaucauccgcaguaac

SEQ ID NO: 435935 - RNA, 19 nt, Artificial Sequence
  Description of Artificial Sequence: Synthetic oligonucleotide
  Sense strand starting at position 1843 of SEQ ID NO: 316729
gccuccuaacgccagaaau

SEQ ID NO: 435936 - RNA, 19 nt, Artificial Sequence
  Description of Artificial Sequence: Synthetic oligonucleotide
  Antisense Strand to SEQ ID NO: 435935
auuucuggcguuaggaggc

SEQ ID NO: 435937 - RNA, 19 nt, Artificial Sequence
  Description of Artificial Sequence: Synthetic oligonucleotide
  Sense strand starting at position 2633 of SEQ ID NO: 316729
auuaauaucuaggcuaaag

SEQ ID NO: 435938 - RNA, 19 nt, Artificial Sequence
  Description of Artificial Sequence: Synthetic oligonucleotide
  Antisense Strand to SEQ ID NO: 435937
cuuuagccuagauauuaau

SEQ ID NO: 435939 - RNA, 19 nt, Artificial Sequence
  Description of Artificial Sequence: Synthetic oligonucleotide
  Sense strand starting at position 2795 of SEQ ID NO: 316729
aaucguauuugcccaguuu

SEQ ID NO: 435940 - RNA, 19 nt, Artificial Sequence
  Description of Artificial Sequence: Synthetic oligonucleotide
  Antisense Strand to SEQ ID NO: 435939
aaacugggcaaauacgauu

SEQ ID NO: 435941 - RNA, 19 nt, Artificial Sequence
  Description of Artificial Sequence: Synthetic oligonucleotide
  Sense strand starting at position 2870 of SEQ ID NO: 316729
gaaauugaagucugaucug

SEQ ID NO: 435942 - RNA, 19 nt, Artificial Sequence
  Description of Artificial Sequence: Synthetic oligonucleotide
  Antisense Strand to SEQ ID NO: 435941
cagaucagacuucaauuuc

SEQ ID NO: 435943 - RNA, 19 nt, Artificial Sequence
  Description of Artificial Sequence: Synthetic oligonucleotide
  Sense strand starting at position 2873 of SEQ ID NO: 316729
auugaagucugaucuguca

SEQ ID NO: 435944 - RNA, 19 nt, Artificial Sequence
  Description of Artificial Sequence: Synthetic oligonucleotide
  Antisense Strand to SEQ ID NO: 435943
ugacagaucagacuucaau

SEQ ID NO: 435945 - RNA, 19 nt, Artificial Sequence
  Description of Artificial Sequence: Synthetic oligonucleotide
  Sense strand starting at position 2876 of SEQ ID NO: 316729
gaagucugaucugucacau

SEQ ID NO: 435946 - RNA, 19 nt, Artificial Sequence
  Description of Artificial Sequence: Synthetic oligonucleotide
  Antisense Strand to SEQ ID NO: 435945
augugacagaucagacuuc

SEQ ID NO: 435947 - RNA, 19 nt, Artificial Sequence
  Description of Artificial Sequence: Synthetic oligonucleotide
  Sense strand starting at position 2886 of SEQ ID NO: 316729
cugucacaucaugguuaac

SEQ ID NO: 435948 - RNA, 19 nt, Artificial Sequence
  Description of Artificial Sequence: Synthetic oligonucleotide
  Antisense Strand to SEQ ID NO: 435947
guuaaccaugaugugacag

SEQ ID NO: 435949 - RNA, 19 nt, Artificial Sequence
  Description of Artificial Sequence: Synthetic oligonucleotide
  Sense strand starting at position 2888 of SEQ ID NO: 316729
gucacaucaugguuaacau

SEQ ID NO: 435950 - RNA, 19 nt, Artificial Sequence
  Description of Artificial Sequence: Synthetic oligonucleotide
  Antisense Strand to SEQ ID NO: 435949
auguuaaccaugaugugac

SEQ ID NO: 435951 - RNA, 19 nt, Artificial Sequence
  Description of Artificial Sequence: Synthetic oligonucleotide
  Sense strand starting at position 2907 of SEQ ID NO: 316729
ucauauguugaccaaguca

SEQ ID NO: 435952 - RNA, 19 nt, Artificial Sequence
  Description of Artificial Sequence: Synthetic oligonucleotide
  Antisense Strand to SEQ ID NO: 435951
ugacuuggucaacauauga

SEQ ID NO: 435953 - RNA, 19 nt, Artificial Sequence
  Description of Artificial Sequence: Synthetic oligonucleotide
  Sense strand starting at position 3297 of SEQ ID NO: 316729
auggguauucugugaacca

SEQ ID NO: 435954 - RNA, 19 nt, Artificial Sequence
  Description of Artificial Sequence: Synthetic oligonucleotide
  Antisense Strand to SEQ ID NO: 435953
ugguucacagaauacccau

SEQ ID NO: 435955 - RNA, 19 nt, Artificial Sequence
  Description of Artificial Sequence: Synthetic oligonucleotide
  Sense strand starting at position 3308 of SEQ ID NO: 316729
gugaaccaucgugacagau

SEQ ID NO: 435956 - RNA, 19 nt, Artificial Sequence
  Description of Artificial Sequence: Synthetic oligonucleotide
  Antisense Strand to SEQ ID NO: 435955
aucugucacgaugguucac

SEQ ID NO: 435957 - RNA, 19 nt, Artificial Sequence
  Description of Artificial Sequence: Synthetic oligonucleotide
  Sense strand starting at position 3314 of SEQ ID NO: 316729
caucgugacagaugaaguu

SEQ ID NO: 435958 - RNA, 19 nt, Artificial Sequence
  Description of Artificial Sequence: Synthetic oligonucleotide
  Antisense Strand to SEQ ID NO: 435957
aacuucaucugucacgaug

SEQ ID NO: 435959 - RNA, 19 nt, Artificial Sequence
  Description of Artificial Sequence: Synthetic oligonucleotide
  Sense strand starting at position 3324 of SEQ ID NO: 316729
gaugaaguuggauggucuu

SEQ ID NO: 435960 - RNA, 19 nt, Artificial Sequence
  Description of Artificial Sequence: Synthetic oligonucleotide
  Antisense Strand to SEQ ID NO: 435959
aagaccauccaacuucauc

SEQ ID NO: 435961 - RNA, 19 nt, Artificial Sequence
  Description of Artificial Sequence: Synthetic oligonucleotide
  Sense strand starting at position 3363 of SEQ ID NO: 316729
uuuguuguugucguuaauu

SEQ ID NO: 435962 - RNA, 19 nt, Artificial Sequence
  Description of Artificial Sequence: Synthetic oligonucleotide
  Antisense Strand to SEQ ID NO: 435961
aauuaacgacaacaacaaa

SEQ ID NO: 435963 - RNA, 19 nt, Artificial Sequence
  Description of Artificial Sequence: Synthetic oligonucleotide
  Sense strand starting at position 3416 of SEQ ID NO: 316729
ugucauaacuggcuuaauu

SEQ ID NO: 435964 - RNA, 19 nt, Artificial Sequence
  Description of Artificial Sequence: Synthetic oligonucleotide
  Antisense Strand to SEQ ID NO: 435963
aauuaagccaguuaugaca

SEQ ID NO: 435965 - RNA, 19 nt, Artificial Sequence
  Description of Artificial Sequence: Synthetic oligonucleotide
  Sense strand starting at position 3465 of SEQ ID NO: 316729
gugauagaaucauuaaguc

SEQ ID NO: 435966 - RNA, 19 nt, Artificial Sequence
  Description of Artificial Sequence: Synthetic oligonucleotide
  Antisense Strand to SEQ ID NO: 435965
gacuuaaugauucuaucac

SEQ ID NO: 435967 - RNA, 19 nt, Artificial Sequence
  Description of Artificial Sequence: Synthetic oligonucleotide
  Sense strand starting at position 3536 of SEQ ID NO: 316729
uuguuaaauuuggcuucca

SEQ ID NO: 435968 - RNA, 19 nt, Artificial Sequence
  Description of Artificial Sequence: Synthetic oligonucleotide
  Antisense Strand to SEQ ID NO: 435967
uggaagccaaauuuaacaa

SEQ ID NO: 435969 - RNA, 19 nt, Artificial Sequence
  Description of Artificial Sequence: Synthetic oligonucleotide
  Sense strand starting at position 3537 of SEQ ID NO: 316729
uguuaaauuuggcuuccau

SEQ ID NO: 435970 - RNA, 19 nt, Artificial Sequence
  Description of Artificial Sequence: Synthetic oligonucleotide
  Antisense Strand to SEQ ID NO: 435969
auggaagccaaauuuaaca

SEQ ID NO: 435971 - RNA, 19 nt, Artificial Sequence
  Description of Artificial Sequence: Synthetic oligonucleotide
  Sense strand starting at position 3611 of SEQ ID NO: 316729
gcacuuaauguauggauaa

SEQ ID NO: 435972 - RNA, 19 nt, Artificial Sequence
  Description of Artificial Sequence: Synthetic oligonucleotide
  Antisense Strand to SEQ ID NO: 435971
uuauccauacauuaagugc

SEQ ID NO: 435973 - RNA, 19 nt, Artificial Sequence
  Description of Artificial Sequence: Synthetic oligonucleotide
  Sense strand starting at position 3621 of SEQ ID NO: 316729
uauggauaagaugguguuu

SEQ ID NO: 435974 - RNA, 19 nt, Artificial Sequence
  Description of Artificial Sequence: Synthetic oligonucleotide
  Antisense Strand to SEQ ID NO: 435973
aaacaccaucuuauccaua

SEQ ID NO: 435975 - RNA, 19 nt, Artificial Sequence
  Description of Artificial Sequence: Synthetic oligonucleotide
  Sense strand starting at position 3626 of SEQ ID NO: 316729
auaagaugguguuuggaac

SEQ ID NO: 435976 - RNA, 19 nt, Artificial Sequence
  Description of Artificial Sequence: Synthetic oligonucleotide
  Antisense Strand to SEQ ID NO: 435975
guuccaaacaccaucuuau

SEQ ID NO: 435977 - RNA, 19 nt, Artificial Sequence
  Description of Artificial Sequence: Synthetic oligonucleotide
  Sense strand starting at position 3643 of SEQ ID NO: 316729
acguuaaaguagucagaug

SEQ ID NO: 435978 - RNA, 19 nt, Artificial Sequence
  Description of Artificial Sequence: Synthetic oligonucleotide
  Antisense Strand to SEQ ID NO: 435977
caucugacuacuuuaacgu

SEQ ID NO: 435979 - RNA, 19 nt, Artificial Sequence
  Description of Artificial Sequence: Synthetic oligonucleotide
  Sense strand starting at position 3806 of SEQ ID NO: 316729
ccaucagugugacuuugau

SEQ ID NO: 435980 - RNA, 19 nt, Artificial Sequence
  Description of Artificial Sequence: Synthetic oligonucleotide
  Antisense Strand to SEQ ID NO: 435979
aucaaagucacacugaugg

SEQ ID NO: 435981 - RNA, 19 nt, Artificial Sequence
  Description of Artificial Sequence: Synthetic oligonucleotide
  Sense strand starting at position 3814 of SEQ ID NO: 316729
gugacuuugauauggugau

SEQ ID NO: 435982 - RNA, 19 nt, Artificial Sequence
  Description of Artificial Sequence: Synthetic oligonucleotide
  Antisense Strand to SEQ ID NO: 435981
aucaccauaucaaagucac

SEQ ID NO: 435983 - RNA, 19 nt, Artificial Sequence
  Description of Artificial Sequence: Synthetic oligonucleotide
  Sense strand starting at position 3818 of SEQ ID NO: 316729
cuuugauauggugaugcua

SEQ ID NO: 435984 - RNA, 19 nt, Artificial Sequence
  Description of Artificial Sequence: Synthetic oligonucleotide
  Antisense Strand to SEQ ID NO: 435983
uagcaucaccauaucaaag

SEQ ID NO: 435985 - RNA, 19 nt, Artificial Sequence
  Description of Artificial Sequence: Synthetic oligonucleotide
  Sense strand starting at position 3902 of SEQ ID NO: 316729
ugagauaucagauguguuu

SEQ ID NO: 435986 - RNA, 19 nt, Artificial Sequence
  Description of Artificial Sequence: Synthetic oligonucleotide
  Antisense Strand to SEQ ID NO: 435985
aaacacaucugauaucuca

SEQ ID NO: 435987 - RNA, 19 nt, Artificial Sequence
  Description of Artificial Sequence: Synthetic oligonucleotide
  Sense strand starting at position 3951 of SEQ ID NO: 316729
uuuccaauccuuuggagaa

SEQ ID NO: 435988 - RNA, 19 nt, Artificial Sequence
  Description of Artificial Sequence: Synthetic oligonucleotide
  Antisense Strand to SEQ ID NO: 435987
uucuccaaaggauuggaaa

SEQ ID NO: 435989 - RNA, 19 nt, Artificial Sequence
  Description of Artificial Sequence: Synthetic oligonucleotide
  Sense strand starting at position 61 of SEQ ID NO: 316730
agagcucuauuugaggaga

SEQ ID NO: 435990 - RNA, 19 nt, Artificial Sequence
  Description of Artificial Sequence: Synthetic oligonucleotide
  Antisense Strand to SEQ ID NO: 435989
ucuccucaaauagagcucu

SEQ ID NO: 435991 - RNA, 19 nt, Artificial Sequence
  Description of Artificial Sequence: Synthetic oligonucleotide
  Sense strand starting at position 72 of SEQ ID NO: 316730
ugaggagagcuuuggaaac

SEQ ID NO: 435992 - RNA, 19 nt, Artificial Sequence
  Description of Artificial Sequence: Synthetic oligonucleotide
  Antisense Strand to SEQ ID NO: 435991
guuuccaaagcucuccuca

SEQ ID NO: 435993 - RNA, 19 nt, Artificial Sequence
  Description of Artificial Sequence: Synthetic oligonucleotide
  Sense strand starting at position 458 of SEQ ID NO: 316730
uggccaguaucacugaguu

SEQ ID NO: 435994 - RNA, 19 nt, Artificial Sequence
  Description of Artificial Sequence: Synthetic oligonucleotide
  Antisense Strand to SEQ ID NO: 435993
aacucagugauacuggcca

SEQ ID NO: 435995 - RNA, 19 nt, Artificial Sequence
  Description of Artificial Sequence: Synthetic oligonucleotide
  Sense strand starting at position 965 of SEQ ID NO: 316730
uuuaaaugcugucucagaa

SEQ ID NO: 435996 - RNA, 19 nt, Artificial Sequence
  Description of Artificial Sequence: Synthetic oligonucleotide
  Antisense Strand to SEQ ID NO: 435995
uucugagacagcauuuaaa

SEQ ID NO: 435997 - RNA, 19 nt, Artificial Sequence
  Description of Artificial Sequence: Synthetic oligonucleotide
  Sense strand starting at position 1046 of SEQ ID NO: 316730
aacaauguaucuucgagau

SEQ ID NO: 435998 - RNA, 19 nt, Artificial Sequence
  Description of Artificial Sequence: Synthetic oligonucleotide
  Antisense Strand to SEQ ID NO: 435997
aucucgaagauacauuguu

SEQ ID NO: 435999 - RNA, 19 nt, Artificial Sequence
  Description of Artificial Sequence: Synthetic oligonucleotide
  Sense strand starting at position 1050 of SEQ ID NO: 316730
auguaucuucgagauaucu

SEQ ID NO: 436000 - RNA, 19 nt, Artificial Sequence
  Description of Artificial Sequence: Synthetic oligonucleotide
  Antisense Strand to SEQ ID NO: 435999
agauaucucgaagauacau

SEQ ID NO: 436001 - RNA, 19 nt, Artificial Sequence
  Description of Artificial Sequence: Synthetic oligonucleotide
  Sense strand starting at position 1098 of SEQ ID NO: 316730
uguagaaguaauuggauau

SEQ ID NO: 436002 - RNA, 19 nt, Artificial Sequence
  Description of Artificial Sequence: Synthetic oligonucleotide
  Antisense Strand to SEQ ID NO: 436001
auauccaauuacuucuaca

SEQ ID NO: 436003 - RNA, 19 nt, Artificial Sequence
  Description of Artificial Sequence: Synthetic oligonucleotide
  Sense strand starting at position 1099 of SEQ ID NO: 316730
guagaaguaauuggauauc

SEQ ID NO: 436004 - RNA, 19 nt, Artificial Sequence
  Description of Artificial Sequence: Synthetic oligonucleotide
  Antisense Strand to SEQ ID NO: 436003
gauauccaauuacuucuac

SEQ ID NO: 436005 - RNA, 19 nt, Artificial Sequence
  Description of Artificial Sequence: Synthetic oligonucleotide
  Sense strand starting at position 1247 of SEQ ID NO: 316730
cuuggacgcaaauguaaau

SEQ ID NO: 436006 - RNA, 19 nt, Artificial Sequence
  Description of Artificial Sequence: Synthetic oligonucleotide
  Antisense Strand to SEQ ID NO: 436005
auuuacauuugcguccaag

SEQ ID NO: 436007 - RNA, 19 nt, Artificial Sequence
  Description of Artificial Sequence: Synthetic oligonucleotide
  Sense strand starting at position 1390 of SEQ ID NO: 316730
cgagauuccuauucucaua

SEQ ID NO: 436008 - RNA, 19 nt, Artificial Sequence
  Description of Artificial Sequence: Synthetic oligonucleotide
  Antisense Strand to SEQ ID NO: 436007
uaugagaauaggaaucucg

SEQ ID NO: 436009 - RNA, 19 nt, Artificial Sequence
  Description of Artificial Sequence: Synthetic oligonucleotide
  Sense strand starting at position 1481 of SEQ ID NO: 316730
gucucuugaggucaagagu

SEQ ID NO: 436010 - RNA, 19 nt, Artificial Sequence
  Description of Artificial Sequence: Synthetic oligonucleotide
  Antisense Strand to SEQ ID NO: 436009
acucuugaccucaagagac

SEQ ID NO: 436011 - RNA, 19 nt, Artificial Sequence
  Description of Artificial Sequence: Synthetic oligonucleotide
  Sense strand starting at position 1536 of SEQ ID NO: 316730
cgcccuacuccacaaagua

SEQ ID NO: 436012 - RNA, 19 nt, Artificial Sequence
  Description of Artificial Sequence: Synthetic oligonucleotide
  Antisense Strand to SEQ ID NO: 436011
uacuuuguggaguagggcg

SEQ ID NO: 436013 - RNA, 19 nt, Artificial Sequence
  Description of Artificial Sequence: Synthetic oligonucleotide
  Sense strand starting at position 1844 of SEQ ID NO: 316730
ccacuauucguccauagag

SEQ ID NO: 436014 - RNA, 19 nt, Artificial Sequence
  Description of Artificial Sequence: Synthetic oligonucleotide
  Antisense Strand to SEQ ID NO: 436013
cucuauggacgaauagugg

SEQ ID NO: 436015 - RNA, 19 nt, Artificial Sequence
  Description of Artificial Sequence: Synthetic oligonucleotide
  Sense strand starting at position 1846 of SEQ ID NO: 316730
acuauucguccauagagaa

SEQ ID NO: 436016 - RNA, 19 nt, Artificial Sequence
  Description of Artificial Sequence: Synthetic oligonucleotide
  Antisense Strand to SEQ ID NO: 436015
uucucuauggacgaauagu

SEQ ID NO: 436017 - RNA, 19 nt, Artificial Sequence
  Description of Artificial Sequence: Synthetic oligonucleotide
  Sense strand starting at position 2145 of SEQ ID NO: 316730
gaguuuaagguuuacuaca

SEQ ID NO: 436018 - RNA, 19 nt, Artificial Sequence
  Description of Artificial Sequence: Synthetic oligonucleotide
  Antisense Strand to SEQ ID NO: 436017
uguaguaaaccuuaaacuc

SEQ ID NO: 436019 - RNA, 19 nt, Artificial Sequence
  Description of Artificial Sequence: Synthetic oligonucleotide
  Sense strand starting at position 2147 of SEQ ID NO: 316730
guuuaagguuuacuacaaa

SEQ ID NO: 436020 - RNA, 19 nt, Artificial Sequence
  Description of Artificial Sequence: Synthetic oligonucleotide
  Antisense Strand to SEQ ID NO: 436019
uuuguaguaaaccuuaaac

SEQ ID NO: 436021 - RNA, 19 nt, Artificial Sequence
  Description of Artificial Sequence: Synthetic oligonucleotide
  Sense strand starting at position 2255 of SEQ ID NO: 316730
ccuugacucuccguaugaa

SEQ ID NO: 436022 - RNA, 19 nt, Artificial Sequence
  Description of Artificial Sequence: Synthetic oligonucleotide
  Antisense Strand to SEQ ID NO: 436021
uucauacggagagucaagg

SEQ ID NO: 436023 - RNA, 19 nt, Artificial Sequence
  Description of Artificial Sequence: Synthetic oligonucleotide
  Sense strand starting at position 2256 of SEQ ID NO: 316730
cuugacucuccguaugaag

SEQ ID NO: 436024 - RNA, 19 nt, Artificial Sequence
  Description of Artificial Sequence: Synthetic oligonucleotide
  Antisense Strand to SEQ ID NO: 436023
cuucauacggagagucaag

SEQ ID NO: 436025 - RNA, 19 nt, Artificial Sequence
  Description of Artificial Sequence: Synthetic oligonucleotide
  Sense strand starting at position 2267 of SEQ ID NO: 316730
guaugaagugcucacaaau

SEQ ID NO: 436026 - RNA, 19 nt, Artificial Sequence
  Description of Artificial Sequence: Synthetic oligonucleotide
  Antisense Strand to SEQ ID NO: 436025
auuugugagcacuucauac

SEQ ID NO: 436027 - RNA, 19 nt, Artificial Sequence
  Description of Artificial Sequence: Synthetic oligonucleotide
  Sense strand starting at position 2299 of SEQ ID NO: 316730
acaagaucucaucgauuac

SEQ ID NO: 436028 - RNA, 19 nt, Artificial Sequence
  Description of Artificial Sequence: Synthetic oligonucleotide
  Antisense Strand to SEQ ID NO: 436027
guaaucgaugagaucuugu

SEQ ID NO: 436029 - RNA, 19 nt, Artificial Sequence
  Description of Artificial Sequence: Synthetic oligonucleotide
  Sense strand starting at position 2324 of SEQ ID NO: 316730
auuuaucuguuggaaauga

SEQ ID NO: 436030 - RNA, 19 nt, Artificial Sequence
  Description of Artificial Sequence: Synthetic oligonucleotide
  Antisense Strand to SEQ ID NO: 436029
ucauuuccaacagauaaau

SEQ ID NO: 436031 - RNA, 19 nt, Artificial Sequence
  Description of Artificial Sequence: Synthetic oligonucleotide
  Sense strand starting at position 2352 of SEQ ID NO: 316730
uacuguacgguguauuaua

SEQ ID NO: 436032 - RNA, 19 nt, Artificial Sequence
  Description of Artificial Sequence: Synthetic oligonucleotide
  Antisense Strand to SEQ ID NO: 436031
uauaauacaccguacagua

SEQ ID NO: 436033 - RNA, 19 nt, Artificial Sequence
  Description of Artificial Sequence: Synthetic oligonucleotide
  Sense strand starting at position 2386 of SEQ ID NO: 316730
ugagaaguucaggguagau

SEQ ID NO: 436034 - RNA, 19 nt, Artificial Sequence
  Description of Artificial Sequence: Synthetic oligonucleotide
  Antisense Strand to SEQ ID NO: 436033
aucuacccugaacuucuca

SEQ ID NO: 436035 - RNA, 19 nt, Artificial Sequence
  Description of Artificial Sequence: Synthetic oligonucleotide
  Sense strand starting at position 2471 of SEQ ID NO: 316730
auugucccuuauguugaaa

SEQ ID NO: 436036 - RNA, 19 nt, Artificial Sequence
  Description of Artificial Sequence: Synthetic oligonucleotide
  Antisense Strand to SEQ ID NO: 436035
uuucaacauaagggacaau

SEQ ID NO: 436037 - RNA, 19 nt, Artificial Sequence
  Description of Artificial Sequence: Synthetic oligonucleotide
  Sense strand starting at position 2509 of SEQ ID NO: 316730
uguacaacacauugaggua

SEQ ID NO: 436038 - RNA, 19 nt, Artificial Sequence
  Description of Artificial Sequence: Synthetic oligonucleotide
  Antisense Strand to SEQ ID NO: 436037
uaccucaauguguuguaca

SEQ ID NO: 436039 - RNA, 19 nt, Artificial Sequence
  Description of Artificial Sequence: Synthetic oligonucleotide
  Sense strand starting at position 2532 of SEQ ID NO: 316730
ccuacaacucuugagguuu

SEQ ID NO: 436040 - RNA, 19 nt, Artificial Sequence
  Description of Artificial Sequence: Synthetic oligonucleotide
  Antisense Strand to SEQ ID NO: 436039
aaaccucaagaguuguagg

SEQ ID NO: 436041 - RNA, 19 nt, Artificial Sequence
  Description of Artificial Sequence: Synthetic oligonucleotide
  Sense strand starting at position 2568 of SEQ ID NO: 316730
acauaauaagugugucacu

SEQ ID NO: 436042 - RNA, 19 nt, Artificial Sequence
  Description of Artificial Sequence: Synthetic oligonucleotide
  Antisense Strand to SEQ ID NO: 436041
agugacacacuuauuaugu

SEQ ID NO: 436043 - RNA, 19 nt, Artificial Sequence
  Description of Artificial Sequence: Synthetic oligonucleotide
  Sense strand starting at position 2573 of SEQ ID NO: 316730
auaagugugucacuggcaa

SEQ ID NO: 436044 - RNA, 19 nt, Artificial Sequence
  Description of Artificial Sequence: Synthetic oligonucleotide
  Antisense Strand to SEQ ID NO: 436043
uugccagugacacacuuau

SEQ ID NO: 436045 - RNA, 19 nt, Artificial Sequence
  Description of Artificial Sequence: Synthetic oligonucleotide
  Sense strand starting at position 2676 of SEQ ID NO: 316730
aguauuuguuaacagguau

SEQ ID NO: 436046 - RNA, 19 nt, Artificial Sequence
  Description of Artificial Sequence: Synthetic oligonucleotide
  Antisense Strand to SEQ ID NO: 436045
auaccuguuaacaaauacu

SEQ ID NO: 436047 - RNA, 19 nt, Artificial Sequence
  Description of Artificial Sequence: Synthetic oligonucleotide
  Sense strand starting at position 2702 of SEQ ID NO: 316730
cucugagcuuucuuuggaa

SEQ ID NO: 436048 - RNA, 19 nt, Artificial Sequence
  Description of Artificial Sequence: Synthetic oligonucleotide
  Antisense Strand to SEQ ID NO: 436047
uuccaaagaaagcucagag

SEQ ID NO: 436049 - RNA, 19 nt, Artificial Sequence
  Description of Artificial Sequence: Synthetic oligonucleotide
  Sense strand starting at position 2704 of SEQ ID NO: 316730
cugagcuuucuuuggaaau

SEQ ID NO: 436050 - RNA, 19 nt, Artificial Sequence
  Description of Artificial Sequence: Synthetic oligonucleotide
  Antisense Strand to SEQ ID NO: 436049
auuuccaaagaaagcucag

SEQ ID NO: 436051 - RNA, 19 nt, Artificial Sequence
  Description of Artificial Sequence: Synthetic oligonucleotide
  Sense strand starting at position 2864 of SEQ ID NO: 316730
auguucuuggcucacuaua

SEQ ID NO: 436052 - RNA, 19 nt, Artificial Sequence
  Description of Artificial Sequence: Synthetic oligonucleotide
  Antisense Strand to SEQ ID NO: 436051
uauagugagccaagaacau

SEQ ID NO: 436053 - RNA, 19 nt, Artificial Sequence
  Description of Artificial Sequence: Synthetic oligonucleotide
  Sense strand starting at position 2866 of SEQ ID NO: 316730
guucuuggcucacuauaac

SEQ ID NO: 436054 - RNA, 19 nt, Artificial Sequence
  Description of Artificial Sequence: Synthetic oligonucleotide
  Antisense Strand to SEQ ID NO: 436053
guuauagugagccaagaac

SEQ ID NO: 436055 - RNA, 19 nt, Artificial Sequence
  Description of Artificial Sequence: Synthetic oligonucleotide
  Sense strand starting at position 3221 of SEQ ID NO: 316730
gggcauacauaagugaaga

SEQ ID NO: 436056 - RNA, 19 nt, Artificial Sequence
  Description of Artificial Sequence: Synthetic oligonucleotide
  Antisense Strand to SEQ ID NO: 436055
ucuucacuuauguaugccc

SEQ ID NO: 436057 - RNA, 19 nt, Artificial Sequence
  Description of Artificial Sequence: Synthetic oligonucleotide
  Sense strand starting at position 3222 of SEQ ID NO: 316730
ggcauacauaagugaagaa

SEQ ID NO: 436058 - RNA, 19 nt, Artificial Sequence
  Description of Artificial Sequence: Synthetic oligonucleotide
  Antisense Strand to SEQ ID NO: 436057
uucuucacuuauguaugcc

SEQ ID NO: 436059 - RNA, 19 nt, Artificial Sequence
  Description of Artificial Sequence: Synthetic oligonucleotide
  Sense strand starting at position 3249 of SEQ ID NO: 316730
uuggguuaguccucacagu

SEQ ID NO: 436060 - RNA, 19 nt, Artificial Sequence
  Description of Artificial Sequence: Synthetic oligonucleotide
  Antisense Strand to SEQ ID NO: 436059
acugugaggacuaacccaa

SEQ ID NO: 436061 - RNA, 19 nt, Artificial Sequence
  Description of Artificial Sequence: Synthetic oligonucleotide
  Sense strand starting at position 3250 of SEQ ID NO: 316730
uggguuaguccucacaguu

SEQ ID NO: 436062 - RNA, 19 nt, Artificial Sequence
  Description of Artificial Sequence: Synthetic oligonucleotide
  Antisense Strand to SEQ ID NO: 436061
aacugugaggacuaaccca

SEQ ID NO: 436063 - RNA, 19 nt, Artificial Sequence
  Description of Artificial Sequence: Synthetic oligonucleotide
  Sense strand starting at position 3625 of SEQ ID NO: 316730
ugcuuauuaagauggaguc

SEQ ID NO: 436064 - RNA, 19 nt, Artificial Sequence
  Description of Artificial Sequence: Synthetic oligonucleotide
  Antisense Strand to SEQ ID NO: 436063
gacuccaucuuaauaagca

SEQ ID NO: 436065 - RNA, 19 nt, Artificial Sequence
  Description of Artificial Sequence: Synthetic oligonucleotide
  Sense strand starting at position 3626 of SEQ ID NO: 316730
gcuuauuaagauggagucu

SEQ ID NO: 436066 - RNA, 19 nt, Artificial Sequence
  Description of Artificial Sequence: Synthetic oligonucleotide
  Antisense Strand to SEQ ID NO: 436065
agacuccaucuuaauaagc

SEQ ID NO: 436067 - RNA, 19 nt, Artificial Sequence
  Description of Artificial Sequence: Synthetic oligonucleotide
  Sense strand starting at position 3974 of SEQ ID NO: 316730
ggcucaccugagcaugaau

SEQ ID NO: 436068 - RNA, 19 nt, Artificial Sequence
  Description of Artificial Sequence: Synthetic oligonucleotide
  Antisense Strand to SEQ ID NO: 436067
auucaugcucaggugagcc

SEQ ID NO: 436069 - RNA, 19 nt, Artificial Sequence
  Description of Artificial Sequence: Synthetic oligonucleotide
  Sense strand starting at position 580 of SEQ ID NO: 316731
ucuggaguguucccaagaa

SEQ ID NO: 436070 - RNA, 19 nt, Artificial Sequence
  Description of Artificial Sequence: Synthetic oligonucleotide
  Antisense Strand to SEQ ID NO: 436069
uucuugggaacacuccaga

SEQ ID NO: 436071 - RNA, 19 nt, Artificial Sequence
  Description of Artificial Sequence: Synthetic oligonucleotide
  Sense strand starting at position 663 of SEQ ID NO: 316731
ucucccuuuccaggaagaa

SEQ ID NO: 436072 - RNA, 19 nt, Artificial Sequence
  Description of Artificial Sequence: Synthetic oligonucleotide
  Antisense Strand to SEQ ID NO: 436071
uucuuccuggaaagggaga

SEQ ID NO: 436073 - RNA, 19 nt, Artificial Sequence
  Description of Artificial Sequence: Synthetic oligonucleotide
  Sense strand starting at position 898 of SEQ ID NO: 316731
ccuggauugggcugacagu

SEQ ID NO: 436074 - RNA, 19 nt, Artificial Sequence
  Description of Artificial Sequence: Synthetic oligonucleotide
  Antisense Strand to SEQ ID NO: 436073
acugucagcccaauccagg

SEQ ID NO: 436075 - RNA, 19 nt, Artificial Sequence
  Description of Artificial Sequence: Synthetic oligonucleotide
  Sense strand starting at position 1029 of SEQ ID NO: 316731
gggcgucucauaggugaga

SEQ ID NO: 436076 - RNA, 19 nt, Artificial Sequence
  Description of Artificial Sequence: Synthetic oligonucleotide
  Antisense Strand to SEQ ID NO: 436075
ucucaccuaugagacgccc

SEQ ID NO: 436077 - RNA, 19 nt, Artificial Sequence
  Description of Artificial Sequence: Synthetic oligonucleotide
  Sense strand starting at position 1031 of SEQ ID NO: 316731
gcgucucauaggugagaca

SEQ ID NO: 436078 - RNA, 19 nt, Artificial Sequence
  Description of Artificial Sequence: Synthetic oligonucleotide
  Antisense Strand to SEQ ID NO: 436077
ugucucaccuaugagacgc

SEQ ID NO: 436079 - RNA, 19 nt, Artificial Sequence
  Description of Artificial Sequence: Synthetic oligonucleotide
  Sense strand starting at position 2091 of SEQ ID NO: 316731
cgacgucgucgucauggaa

SEQ ID NO: 436080 - RNA, 19 nt, Artificial Sequence
  Description of Artificial Sequence: Synthetic oligonucleotide
  Antisense Strand to SEQ ID NO: 436079
uuccaugacgacgacgucg

SEQ ID NO: 436081 - RNA, 19 nt, Artificial Sequence
  Description of Artificial Sequence: Synthetic oligonucleotide
  Sense strand starting at position 2129 of SEQ ID NO: 316731
gcggguuuagaggaaccua

SEQ ID NO: 436082 - RNA, 19 nt, Artificial Sequence
  Description of Artificial Sequence: Synthetic oligonucleotide
  Antisense Strand to SEQ ID NO: 436081
uagguuccucuaaacccgc

SEQ ID NO: 436083 - RNA, 19 nt, Artificial Sequence
  Description of Artificial Sequence: Synthetic oligonucleotide
  Sense strand starting at position 2308 of SEQ ID NO: 316731
ugggaaaucuguggcugga

SEQ ID NO: 436084 - RNA, 19 nt, Artificial Sequence
  Description of Artificial Sequence: Synthetic oligonucleotide
  Antisense Strand to SEQ ID NO: 436083
uccagccacagauuuccca

SEQ ID NO: 436085 - RNA, 19 nt, Artificial Sequence
  Description of Artificial Sequence: Synthetic oligonucleotide
  Sense strand starting at position 2679 of SEQ ID NO: 316731
cgauuucagucccgugaac

SEQ ID NO: 436086 - RNA, 19 nt, Artificial Sequence
  Description of Artificial Sequence: Synthetic oligonucleotide
  Antisense Strand to SEQ ID NO: 436085
guucacgggacugaaaucg

SEQ ID NO: 436087 - RNA, 19 nt, Artificial Sequence
  Description of Artificial Sequence: Synthetic oligonucleotide
  Sense strand starting at position 2690 of SEQ ID NO: 316731
ccgugaacucagggcuguu

SEQ ID NO: 436088 - RNA, 19 nt, Artificial Sequence
  Description of Artificial Sequence: Synthetic oligonucleotide
  Antisense Strand to SEQ ID NO: 436087
aacagcccugaguucacgg

SEQ ID NO: 436089 - RNA, 19 nt, Artificial Sequence
  Description of Artificial Sequence: Synthetic oligonucleotide
  Sense strand starting at position 2699 of SEQ ID NO: 316731
cagggcuguuggccuuaaa

SEQ ID NO: 436090 - RNA, 19 nt, Artificial Sequence
  Description of Artificial Sequence: Synthetic oligonucleotide
  Antisense Strand to SEQ ID NO: 436089
uuuaaggccaacagcccug

SEQ ID NO: 436091 - RNA, 19 nt, Artificial Sequence
  Description of Artificial Sequence: Synthetic oligonucleotide
  Sense strand starting at position 2702 of SEQ ID NO: 316731
ggcuguuggccuuaaagag

SEQ ID NO: 436092 - RNA, 19 nt, Artificial Sequence
  Description of Artificial Sequence: Synthetic oligonucleotide
  Antisense Strand to SEQ ID NO: 436091
cucuuuaaggccaacagcc

SEQ ID NO: 436093 - RNA, 19 nt, Artificial Sequence
  Description of Artificial Sequence: Synthetic oligonucleotide
  Sense strand starting at position 3093 of SEQ ID NO: 316731
gguggucuucccggcacaa

SEQ ID NO: 436094 - RNA, 19 nt, Artificial Sequence
  Description of Artificial Sequence: Synthetic oligonucleotide
  Antisense Strand to SEQ ID NO: 436093
uugugccgggaagaccacc

SEQ ID NO: 436095 - RNA, 19 nt, Artificial Sequence
  Description of Artificial Sequence: Synthetic oligonucleotide
  Sense strand starting at position 3132 of SEQ ID NO: 316731
ugcuucucgcguggucaga

SEQ ID NO: 436096 - RNA, 19 nt, Artificial Sequence
  Description of Artificial Sequence: Synthetic oligonucleotide
  Antisense Strand to SEQ ID NO: 436095
ucugaccacgcgagaagca

SEQ ID NO: 436097 - RNA, 19 nt, Artificial Sequence
  Description of Artificial Sequence: Synthetic oligonucleotide
  Sense strand starting at position 3177 of SEQ ID NO: 316731
guguccugacccuaagagu

SEQ ID NO: 436098 - RNA, 19 nt, Artificial Sequence
  Description of Artificial Sequence: Synthetic oligonucleotide
  Antisense Strand to SEQ ID NO: 436097
acucuuagggucaggacac

SEQ ID NO: 436099 - RNA, 19 nt, Artificial Sequence
  Description of Artificial Sequence: Synthetic oligonucleotide
  Sense strand starting at position 523 of SEQ ID NO: 316732
ucuggaguguucccaagaa

SEQ ID NO: 436100 - RNA, 19 nt, Artificial Sequence
  Description of Artificial Sequence: Synthetic oligonucleotide
  Antisense Strand to SEQ ID NO: 436099
uucuugggaacacuccaga

SEQ ID NO: 436101 - RNA, 19 nt, Artificial Sequence
  Description of Artificial Sequence: Synthetic oligonucleotide
  Sense strand starting at position 606 of SEQ ID NO: 316732
ucucccuuuccaggaagaa

SEQ ID NO: 436102 - RNA, 19 nt, Artificial Sequence
  Description of Artificial Sequence: Synthetic oligonucleotide
  Antisense Strand to SEQ ID NO: 436101
uucuuccuggaaagggaga

SEQ ID NO: 436103 - RNA, 19 nt, Artificial Sequence
  Description of Artificial Sequence: Synthetic oligonucleotide
  Sense strand starting at position 841 of SEQ ID NO: 316732
ccuggauugggcugacagu

SEQ ID NO: 436104 - RNA, 19 nt, Artificial Sequence
  Description of Artificial Sequence: Synthetic oligonucleotide
  Antisense Strand to SEQ ID NO: 436103
acugucagcccaauccagg

SEQ ID NO: 436105 - RNA, 19 nt, Artificial Sequence
  Description of Artificial Sequence: Synthetic oligonucleotide
  Sense strand starting at position 972 of SEQ ID NO: 316732
gggcgucucauaggugaga

SEQ ID NO: 436106 - RNA, 19 nt, Artificial Sequence
  Description of Artificial Sequence: Synthetic oligonucleotide
  Antisense Strand to SEQ ID NO: 436105
ucucaccuaugagacgccc

SEQ ID NO: 436107 - RNA, 19 nt, Artificial Sequence
  Description of Artificial Sequence: Synthetic oligonucleotide
  Sense strand starting at position 974 of SEQ ID NO: 316732
gcgucucauaggugagaca

SEQ ID NO: 436108 - RNA, 19 nt, Artificial Sequence
  Description of Artificial Sequence: Synthetic oligonucleotide
  Antisense Strand to SEQ ID NO: 436107
ugucucaccuaugagacgc

SEQ ID NO: 436109 - RNA, 19 nt, Artificial Sequence
  Description of Artificial Sequence: Synthetic oligonucleotide
  Sense strand starting at position 2034 of SEQ ID NO: 316732
cgacgucgucgucauggaa

SEQ ID NO: 436110 - RNA, 19 nt, Artificial Sequence
  Description of Artificial Sequence: Synthetic oligonucleotide
  Antisense Strand to SEQ ID NO: 436109
uuccaugacgacgacgucg

SEQ ID NO: 436111 - RNA, 19 nt, Artificial Sequence
  Description of Artificial Sequence: Synthetic oligonucleotide
  Sense strand starting at position 2072 of SEQ ID NO: 316732
gcggguuuagaggaaccua

SEQ ID NO: 436112 - RNA, 19 nt, Artificial Sequence
  Description of Artificial Sequence: Synthetic oligonucleotide
  Antisense Strand to SEQ ID NO: 436111
uagguuccucuaaacccgc

SEQ ID NO: 436113 - RNA, 19 nt, Artificial Sequence
  Description of Artificial Sequence: Synthetic oligonucleotide
  Sense strand starting at position 2251 of SEQ ID NO: 316732
ugggaaaucuguggcugga

SEQ ID NO: 436114 - RNA, 19 nt, Artificial Sequence
  Description of Artificial Sequence: Synthetic oligonucleotide
  Antisense Strand to SEQ ID NO: 436113
uccagccacagauuuccca

SEQ ID NO: 436115 - RNA, 19 nt, Artificial Sequence
  Description of Artificial Sequence: Synthetic oligonucleotide
  Sense strand starting at position 2622 of SEQ ID NO: 316732
cgauuucagucccgugaac

SEQ ID NO: 436116 - RNA, 19 nt, Artificial Sequence
  Description of Artificial Sequence: Synthetic oligonucleotide
  Antisense Strand to SEQ ID NO: 436115
guucacgggacugaaaucg

SEQ ID NO: 436117 - RNA, 19 nt, Artificial Sequence
  Description of Artificial Sequence: Synthetic oligonucleotide
  Sense strand starting at position 2633 of SEQ ID NO: 316732
ccgugaacucagggcuguu

SEQ ID NO: 436118 - RNA, 19 nt, Artificial Sequence
  Description of Artificial Sequence: Synthetic oligonucleotide
  Antisense Strand to SEQ ID NO: 436117
aacagcccugaguucacgg

SEQ ID NO: 436119 - RNA, 19 nt, Artificial Sequence
  Description of Artificial Sequence: Synthetic oligonucleotide
  Sense strand starting at position 2642 of SEQ ID NO: 316732
cagggcuguuggccuuaaa

SEQ ID NO: 436120 - RNA, 19 nt, Artificial Sequence
  Description of Artificial Sequence: Synthetic oligonucleotide
  Antisense Strand to SEQ ID NO: 436119
uuuaaggccaacagcccug

SEQ ID NO: 436121 - RNA, 19 nt, Artificial Sequence
  Description of Artificial Sequence: Synthetic oligonucleotide
  Sense strand starting at position 2645 of SEQ ID NO: 316732
ggcuguuggccuuaaagag

SEQ ID NO: 436122 - RNA, 19 nt, Artificial Sequence
  Description of Artificial Sequence: Synthetic oligonucleotide
  Antisense Strand to SEQ ID NO: 436121
cucuuuaaggccaacagcc

SEQ ID NO: 436123 - RNA, 19 nt, Artificial Sequence
  Description of Artificial Sequence: Synthetic oligonucleotide
  Sense strand starting at position 3036 of SEQ ID NO: 316732
gguggucuucccggcacaa

SEQ ID NO: 436124 - RNA, 19 nt, Artificial Sequence
  Description of Artificial Sequence: Synthetic oligonucleotide
  Antisense Strand to SEQ ID NO: 436123
uugugccgggaagaccacc

SEQ ID NO: 436125 - RNA, 19 nt, Artificial Sequence
  Description of Artificial Sequence: Synthetic oligonucleotide
  Sense strand starting at position 3075 of SEQ ID NO: 316732
ugcuucucgcguggucaga

SEQ ID NO: 436126 - RNA, 19 nt, Artificial Sequence
  Description of Artificial Sequence: Synthetic oligonucleotide
  Antisense Strand to SEQ ID NO: 436125
ucugaccacgcgagaagca

SEQ ID NO: 436127 - RNA, 19 nt, Artificial Sequence
  Description of Artificial Sequence: Synthetic oligonucleotide
  Sense strand starting at position 3120 of SEQ ID NO: 316732
guguccugacccuaagagu

SEQ ID NO: 436128 - RNA, 19 nt, Artificial Sequence
  Description of Artificial Sequence: Synthetic oligonucleotide
  Antisense Strand to SEQ ID NO: 436127
acucuuagggucaggacac

SEQ ID NO: 436129 - RNA, 19 nt, Artificial Sequence
  Description of Artificial Sequence: Synthetic oligonucleotide
  Sense strand starting at position 3964 of SEQ ID NO: 316732
gcugguuccuuuggauguu

SEQ ID NO: 436130 - RNA, 19 nt, Artificial Sequence
  Description of Artificial Sequence: Synthetic oligonucleotide
  Antisense Strand to SEQ ID NO: 436129
aacauccaaaggaaccagc

SEQ ID NO: 436131 - RNA, 19 nt, Artificial Sequence
  Description of Artificial Sequence: Synthetic oligonucleotide
  Sense strand starting at position 3983 of SEQ ID NO: 316732
guuucuguuuccuuccuaa

SEQ ID NO: 436132 - RNA, 19 nt, Artificial Sequence
  Description of Artificial Sequence: Synthetic oligonucleotide
  Antisense Strand to SEQ ID NO: 436131
uuaggaaggaaacagaaac

SEQ ID NO: 436133 - RNA, 19 nt, Artificial Sequence
  Description of Artificial Sequence: Synthetic oligonucleotide
  Sense strand starting at position 190 of SEQ ID NO: 316733
guaaauggaucuguuugga

SEQ ID NO: 436134 - RNA, 19 nt, Artificial Sequence
  Description of Artificial Sequence: Synthetic oligonucleotide
  Antisense Strand to SEQ ID NO: 436133
uccaaacagauccauuuac

SEQ ID NO: 436135 - RNA, 19 nt, Artificial Sequence
  Description of Artificial Sequence: Synthetic oligonucleotide
  Sense strand starting at position 193 of SEQ ID NO: 316733
aauggaucuguuuggauac

SEQ ID NO: 436136 - RNA, 19 nt, Artificial Sequence
  Description of Artificial Sequence: Synthetic oligonucleotide
  Antisense Strand to SEQ ID NO: 436135
guauccaaacagauccauu

SEQ ID NO: 436137 - RNA, 19 nt, Artificial Sequence
  Description of Artificial Sequence: Synthetic oligonucleotide
  Sense strand starting at position 356 of SEQ ID NO: 316733
aggugacuaggucauaagu

SEQ ID NO: 436138 - RNA, 19 nt, Artificial Sequence
  Description of Artificial Sequence: Synthetic oligonucleotide
  Antisense Strand to SEQ ID NO: 436137
acuuaugaccuagucaccu

SEQ ID NO: 436139 - RNA, 19 nt, Artificial Sequence
  Description of Artificial Sequence: Synthetic oligonucleotide
  Sense strand starting at position 362 of SEQ ID NO: 316733
cuaggucauaaguguggaa

SEQ ID NO: 436140 - RNA, 19 nt, Artificial Sequence
  Description of Artificial Sequence: Synthetic oligonucleotide
  Antisense Strand to SEQ ID NO: 436139
uuccacacuuaugaccuag

SEQ ID NO: 436141 - RNA, 19 nt, Artificial Sequence
  Description of Artificial Sequence: Synthetic oligonucleotide
  Sense strand starting at position 396 of SEQ ID NO: 316733
uaaucauaugagcagguua

SEQ ID NO: 436142 - RNA, 19 nt, Artificial Sequence
  Description of Artificial Sequence: Synthetic oligonucleotide
  Antisense Strand to SEQ ID NO: 436141
uaaccugcucauaugauua

SEQ ID NO: 436143 - RNA, 19 nt, Artificial Sequence
  Description of Artificial Sequence: Synthetic oligonucleotide
  Sense strand starting at position 398 of SEQ ID NO: 316733
aucauaugagcagguuagu

SEQ ID NO: 436144 - RNA, 19 nt, Artificial Sequence
  Description of Artificial Sequence: Synthetic oligonucleotide
  Antisense Strand to SEQ ID NO: 436143
acuaaccugcucauaugau

SEQ ID NO: 436145 - RNA, 19 nt, Artificial Sequence
  Description of Artificial Sequence: Synthetic oligonucleotide
  Sense strand starting at position 401 of SEQ ID NO: 316733
auaugagcagguuaguuau

SEQ ID NO: 436146 - RNA, 19 nt, Artificial Sequence
  Description of Artificial Sequence: Synthetic oligonucleotide
  Antisense Strand to SEQ ID NO: 436145
auaacuaaccugcucauau

SEQ ID NO: 436147 - RNA, 19 nt, Artificial Sequence
  Description of Artificial Sequence: Synthetic oligonucleotide
  Sense strand starting at position 407 of SEQ ID NO: 316733
gcagguuaguuaucucaag

SEQ ID NO: 436148 - RNA, 19 nt, Artificial Sequence
  Description of Artificial Sequence: Synthetic oligonucleotide
  Antisense Strand to SEQ ID NO: 436147
cuugagauaacuaaccugc

SEQ ID NO: 436149 - RNA, 19 nt, Artificial Sequence
  Description of Artificial Sequence: Synthetic oligonucleotide
  Sense strand starting at position 421 of SEQ ID NO: 316733
ucaagaggaggcuguuuau

SEQ ID NO: 436150 - RNA, 19 nt, Artificial Sequence
  Description of Artificial Sequence: Synthetic oligonucleotide
  Antisense Strand to SEQ ID NO: 436149
auaaacagccuccucuuga

SEQ ID NO: 436151 - RNA, 19 nt, Artificial Sequence
  Description of Artificial Sequence: Synthetic oligonucleotide
  Sense strand starting at position 424 of SEQ ID NO: 316733
agaggaggcuguuuauaaa

SEQ ID NO: 436152 - RNA, 19 nt, Artificial Sequence
  Description of Artificial Sequence: Synthetic oligonucleotide
  Antisense Strand to SEQ ID NO: 436151
uuuauaaacagccuccucu

SEQ ID NO: 436153 - RNA, 19 nt, Artificial Sequence
  Description of Artificial Sequence: Synthetic oligonucleotide
  Sense strand starting at position 693 of SEQ ID NO: 316733
guagcaaagggauguccaa

SEQ ID NO: 436154 - RNA, 19 nt, Artificial Sequence
  Description of Artificial Sequence: Synthetic oligonucleotide
  Antisense Strand to SEQ ID NO: 436153
uuggacaucccuuugcuac

SEQ ID NO: 436155 - RNA, 19 nt, Artificial Sequence
  Description of Artificial Sequence: Synthetic oligonucleotide
  Sense strand starting at position 724 of SEQ ID NO: 316733
gucaauauacuugagaguu

SEQ ID NO: 436156 - RNA, 19 nt, Artificial Sequence
  Description of Artificial Sequence: Synthetic oligonucleotide
  Antisense Strand to SEQ ID NO: 436155
aacucucaaguauauugac

SEQ ID NO: 436157 - RNA, 19 nt, Artificial Sequence
  Description of Artificial Sequence: Synthetic oligonucleotide
  Sense strand starting at position 757 of SEQ ID NO: 316733
gaaauuauacuuuguugga

SEQ ID NO: 436158 - RNA, 19 nt, Artificial Sequence
  Description of Artificial Sequence: Synthetic oligonucleotide
  Antisense Strand to SEQ ID NO: 436157
uccaacaaaguauaauuuc

SEQ ID NO: 436159 - RNA, 19 nt, Artificial Sequence
  Description of Artificial Sequence: Synthetic oligonucleotide
  Sense strand starting at position 761 of SEQ ID NO: 316733
uuauacuuuguuggacuaa

SEQ ID NO: 436160 - RNA, 19 nt, Artificial Sequence
  Description of Artificial Sequence: Synthetic oligonucleotide
  Antisense Strand to SEQ ID NO: 436159
uuaguccaacaaaguauaa

SEQ ID NO: 436161 - RNA, 19 nt, Artificial Sequence
  Description of Artificial Sequence: Synthetic oligonucleotide
  Sense strand starting at position 839 of SEQ ID NO: 316733
uuugaugauuuggaaaggu

SEQ ID NO: 436162 - RNA, 19 nt, Artificial Sequence
  Description of Artificial Sequence: Synthetic oligonucleotide
  Antisense Strand to SEQ ID NO: 436161
accuuuccaaaucaucaaa

SEQ ID NO: 436163 - RNA, 19 nt, Artificial Sequence
  Description of Artificial Sequence: Synthetic oligonucleotide
  Sense strand starting at position 885 of SEQ ID NO: 316733
caggguauuauguggguua

SEQ ID NO: 436164 - RNA, 19 nt, Artificial Sequence
  Description of Artificial Sequence: Synthetic oligonucleotide
  Antisense Strand to SEQ ID NO: 436163
uaacccacauaauacccug

SEQ ID NO: 436165 - RNA, 19 nt, Artificial Sequence
  Description of Artificial Sequence: Synthetic oligonucleotide
  Sense strand starting at position 888 of SEQ ID NO: 316733
gguauuauguggguuauug

SEQ ID NO: 436166 - RNA, 19 nt, Artificial Sequence
  Description of Artificial Sequence: Synthetic oligonucleotide
  Antisense Strand to SEQ ID NO: 436165
caauaacccacauaauacc

SEQ ID NO: 436167 - RNA, 19 nt, Artificial Sequence
  Description of Artificial Sequence: Synthetic oligonucleotide
  Sense strand starting at position 1240 of SEQ ID NO: 316733
uuacuuugugcugauuacu

SEQ ID NO: 436168 - RNA, 19 nt, Artificial Sequence
  Description of Artificial Sequence: Synthetic oligonucleotide
  Antisense Strand to SEQ ID NO: 436167
aguaaucagcacaaaguaa

SEQ ID NO: 436169 - RNA, 19 nt, Artificial Sequence
  Description of Artificial Sequence: Synthetic oligonucleotide
  Sense strand starting at position 1243 of SEQ ID NO: 316733
cuuugugcugauuacuuau

SEQ ID NO: 436170 - RNA, 19 nt, Artificial Sequence
  Description of Artificial Sequence: Synthetic oligonucleotide
  Antisense Strand to SEQ ID NO: 436169
auaaguaaucagcacaaag

SEQ ID NO: 436171 - RNA, 19 nt, Artificial Sequence
  Description of Artificial Sequence: Synthetic oligonucleotide
  Sense strand starting at position 1304 of SEQ ID NO: 316733
ugauuaugggcuuaucaca

SEQ ID NO: 436172 - RNA, 19 nt, Artificial Sequence
  Description of Artificial Sequence: Synthetic oligonucleotide
  Antisense Strand to SEQ ID NO: 436171
ugugauaagcccauaauca

SEQ ID NO: 436173 - RNA, 19 nt, Artificial Sequence
  Description of Artificial Sequence: Synthetic oligonucleotide
  Sense strand starting at position 1543 of SEQ ID NO: 316733
ggacuagguaguuauaugu

SEQ ID NO: 436174 - RNA, 19 nt, Artificial Sequence
  Description of Artificial Sequence: Synthetic oligonucleotide
  Antisense Strand to SEQ ID NO: 436173
acauauaacuaccuagucc

SEQ ID NO: 436175 - RNA, 19 nt, Artificial Sequence
  Description of Artificial Sequence: Synthetic oligonucleotide
  Sense strand starting at position 1583 of SEQ ID NO: 316733
agaauaggaucauaauuuc

SEQ ID NO: 436176 - RNA, 19 nt, Artificial Sequence
  Description of Artificial Sequence: Synthetic oligonucleotide
  Antisense Strand to SEQ ID NO: 436175
gaaauuaugauccuauucu

SEQ ID NO: 436177 - RNA, 19 nt, Artificial Sequence
  Description of Artificial Sequence: Synthetic oligonucleotide
  Sense strand starting at position 1661 of SEQ ID NO: 316733
gguuaaagucuaugaaguc

SEQ ID NO: 436178 - RNA, 19 nt, Artificial Sequence
  Description of Artificial Sequence: Synthetic oligonucleotide
  Antisense Strand to SEQ ID NO: 436177
gacuucauagacuuuaacc

SEQ ID NO: 436179 - RNA, 19 nt, Artificial Sequence
  Description of Artificial Sequence: Synthetic oligonucleotide
  Sense strand starting at position 1678 of SEQ ID NO: 316733
ucucucagggucuacaaua

SEQ ID NO: 436180 - RNA, 19 nt, Artificial Sequence
  Description of Artificial Sequence: Synthetic oligonucleotide
  Antisense Strand to SEQ ID NO: 436179
uauuguagacccugagaga

SEQ ID NO: 436181 - RNA, 19 nt, Artificial Sequence
  Description of Artificial Sequence: Synthetic oligonucleotide
  Sense strand starting at position 1710 of SEQ ID NO: 316733
agagcacucuugucuauuu

SEQ ID NO: 436182 - RNA, 19 nt, Artificial Sequence
  Description of Artificial Sequence: Synthetic oligonucleotide
  Antisense Strand to SEQ ID NO: 436181
aaauagacaagagugcucu

SEQ ID NO: 436183 - RNA, 19 nt, Artificial Sequence
  Description of Artificial Sequence: Synthetic oligonucleotide
  Sense strand starting at position 1732 of SEQ ID NO: 316733
gugauauauccaggugcaa

SEQ ID NO: 436184 - RNA, 19 nt, Artificial Sequence
  Description of Artificial Sequence: Synthetic oligonucleotide
  Antisense Strand to SEQ ID NO: 436183
uugcaccuggauauaucac

SEQ ID NO: 436185 - RNA, 19 nt, Artificial Sequence
  Description of Artificial Sequence: Synthetic oligonucleotide
  Sense strand starting at position 1984 of SEQ ID NO: 316733
guagaaguagugugacaua

SEQ ID NO: 436186 - RNA, 19 nt, Artificial Sequence
  Description of Artificial Sequence: Synthetic oligonucleotide
  Antisense Strand to SEQ ID NO: 436185
uaugucacacuacuucuac

SEQ ID NO: 436187 - RNA, 19 nt, Artificial Sequence
  Description of Artificial Sequence: Synthetic oligonucleotide
  Sense strand starting at position 1989 of SEQ ID NO: 316733
aguagugugacauaacuac

SEQ ID NO: 436188 - RNA, 19 nt, Artificial Sequence
  Description of Artificial Sequence: Synthetic oligonucleotide
  Antisense Strand to SEQ ID NO: 436187
guaguuaugucacacuacu

SEQ ID NO: 436189 - RNA, 19 nt, Artificial Sequence
  Description of Artificial Sequence: Synthetic oligonucleotide
  Sense strand starting at position 1993 of SEQ ID NO: 316733
gugugacauaacuacgaac

SEQ ID NO: 436190 - RNA, 19 nt, Artificial Sequence
  Description of Artificial Sequence: Synthetic oligonucleotide
  Antisense Strand to SEQ ID NO: 436189
guucguaguuaugucacac

SEQ ID NO: 436191 - RNA, 19 nt, Artificial Sequence
  Description of Artificial Sequence: Synthetic oligonucleotide
  Sense strand starting at position 2034 of SEQ ID NO: 316733
ucaaguccucugcauaaug

SEQ ID NO: 436192 - RNA, 19 nt, Artificial Sequence
  Description of Artificial Sequence: Synthetic oligonucleotide
  Antisense Strand to SEQ ID NO: 436191
cauuaugcagaggacuuga

SEQ ID NO: 436193 - RNA, 19 nt, Artificial Sequence
  Description of Artificial Sequence: Synthetic oligonucleotide
  Sense strand starting at position 2148 of SEQ ID NO: 316733
uagauauaguugccaagca

SEQ ID NO: 436194 - RNA, 19 nt, Artificial Sequence
  Description of Artificial Sequence: Synthetic oligonucleotide
  Antisense Strand to SEQ ID NO: 436193
ugcuuggcaacuauaucua

SEQ ID NO: 436195 - RNA, 19 nt, Artificial Sequence
  Description of Artificial Sequence: Synthetic oligonucleotide
  Sense strand starting at position 2337 of SEQ ID NO: 316733
ugcuaucaugaauaaagca

SEQ ID NO: 436196 - RNA, 19 nt, Artificial Sequence
  Description of Artificial Sequence: Synthetic oligonucleotide
  Antisense Strand to SEQ ID NO: 436195
ugcuuuauucaugauagca

SEQ ID NO: 436197 - RNA, 19 nt, Artificial Sequence
  Description of Artificial Sequence: Synthetic oligonucleotide
  Sense strand starting at position 2345 of SEQ ID NO: 316733
ugaauaaagcaguaauucu

SEQ ID NO: 436198 - RNA, 19 nt, Artificial Sequence
  Description of Artificial Sequence: Synthetic oligonucleotide
  Antisense Strand to SEQ ID NO: 436197
agaauuacugcuuuauuca

SEQ ID NO: 436199 - RNA, 19 nt, Artificial Sequence
  Description of Artificial Sequence: Synthetic oligonucleotide
  Sense strand starting at position 2435 of SEQ ID NO: 316733
ccuccaagugucuggaaga

SEQ ID NO: 436200 - RNA, 19 nt, Artificial Sequence
  Description of Artificial Sequence: Synthetic oligonucleotide
  Antisense Strand to SEQ ID NO: 436199
ucuuccagacacuuggagg

SEQ ID NO: 436201 - RNA, 19 nt, Artificial Sequence
  Description of Artificial Sequence: Synthetic oligonucleotide
  Sense strand starting at position 2456 of SEQ ID NO: 316733
acaugaacugcuuguaaug

SEQ ID NO: 436202 - RNA, 19 nt, Artificial Sequence
  Description of Artificial Sequence: Synthetic oligonucleotide
  Antisense Strand to SEQ ID NO: 436201
cauuacaagcaguucaugu

SEQ ID NO: 436203 - RNA, 19 nt, Artificial Sequence
  Description of Artificial Sequence: Synthetic oligonucleotide
  Sense strand starting at position 2504 of SEQ ID NO: 316733
ucauaugucacagaguagu

SEQ ID NO: 436204 - RNA, 19 nt, Artificial Sequence
  Description of Artificial Sequence: Synthetic oligonucleotide
  Antisense Strand to SEQ ID NO: 436203
acuacucugugacauauga

SEQ ID NO: 436205 - RNA, 19 nt, Artificial Sequence
  Description of Artificial Sequence: Synthetic oligonucleotide
  Sense strand starting at position 2651 of SEQ ID NO: 316733
aagcuuaauccuggaggau

SEQ ID NO: 436206 - RNA, 19 nt, Artificial Sequence
  Description of Artificial Sequence: Synthetic oligonucleotide
  Antisense Strand to SEQ ID NO: 436205
auccuccaggauuaagcuu

SEQ ID NO: 436207 - RNA, 19 nt, Artificial Sequence
  Description of Artificial Sequence: Synthetic oligonucleotide
  Sense strand starting at position 3937 of SEQ ID NO: 316733
guugaaagaagucauaggu

SEQ ID NO: 436208 - RNA, 19 nt, Artificial Sequence
  Description of Artificial Sequence: Synthetic oligonucleotide
  Antisense Strand to SEQ ID NO: 436207
accuaugacuucuuucaac

SEQ ID NO: 436209 - RNA, 19 nt, Artificial Sequence
  Description of Artificial Sequence: Synthetic oligonucleotide
  Sense strand starting at position 3943 of SEQ ID NO: 316733
agaagucauaggugacaca

SEQ ID NO: 436210 - RNA, 19 nt, Artificial Sequence
  Description of Artificial Sequence: Synthetic oligonucleotide
  Antisense Strand to SEQ ID NO: 436209
ugugucaccuaugacuucu

SEQ ID NO: 436211 - RNA, 19 nt, Artificial Sequence
  Description of Artificial Sequence: Synthetic oligonucleotide
  Sense strand starting at position 3976 of SEQ ID NO: 316733
caucacauugcucagggau

SEQ ID NO: 436212 - RNA, 19 nt, Artificial Sequence
  Description of Artificial Sequence: Synthetic oligonucleotide
  Antisense Strand to SEQ ID NO: 436211
aucccugagcaaugugaug

SEQ ID NO: 436213 - RNA, 19 nt, Artificial Sequence
  Description of Artificial Sequence: Synthetic oligonucleotide
  Sense strand starting at position 158 of SEQ ID NO: 316734
gcauccaaucaaugaaaug

SEQ ID NO: 436214 - RNA, 19 nt, Artificial Sequence
  Description of Artificial Sequence: Synthetic oligonucleotide
  Antisense Strand to SEQ ID NO: 436213
cauuucauugauuggaugc

SEQ ID NO: 436215 - RNA, 19 nt, Artificial Sequence
  Description of Artificial Sequence: Synthetic oligonucleotide
  Sense strand starting at position 264 of SEQ ID NO: 316734
aggucauauucuccuagaa

SEQ ID NO: 436216 - RNA, 19 nt, Artificial Sequence
  Description of Artificial Sequence: Synthetic oligonucleotide
  Antisense Strand to SEQ ID NO: 436215
uucuaggagaauaugaccu

SEQ ID NO: 436217 - RNA, 19 nt, Artificial Sequence
  Description of Artificial Sequence: Synthetic oligonucleotide
  Sense strand starting at position 311 of SEQ ID NO: 316734
agggauuuguugaggcagu

SEQ ID NO: 436218 - RNA, 19 nt, Artificial Sequence
  Description of Artificial Sequence: Synthetic oligonucleotide
  Antisense Strand to SEQ ID NO: 436217
acugccucaacaaaucccu

SEQ ID NO: 436219 - RNA, 19 nt, Artificial Sequence
  Description of Artificial Sequence: Synthetic oligonucleotide
  Sense strand starting at position 401 of SEQ ID NO: 316734
guaucaucuugggugacac

SEQ ID NO: 436220 - RNA, 19 nt, Artificial Sequence
  Description of Artificial Sequence: Synthetic oligonucleotide
  Antisense Strand to SEQ ID NO: 436219
gugucacccaagaugauac

SEQ ID NO: 436221 - RNA, 19 nt, Artificial Sequence
  Description of Artificial Sequence: Synthetic oligonucleotide
  Sense strand starting at position 474 of SEQ ID NO: 316734
guuuguccucuccaaggca

SEQ ID NO: 436222 - RNA, 19 nt, Artificial Sequence
  Description of Artificial Sequence: Synthetic oligonucleotide
  Antisense Strand to SEQ ID NO: 436221
ugccuuggagaggacaaac

SEQ ID NO: 436223 - RNA, 19 nt, Artificial Sequence
  Description of Artificial Sequence: Synthetic oligonucleotide
  Sense strand starting at position 506 of SEQ ID NO: 316734
uuuguauucccacaauggu

SEQ ID NO: 436224 - RNA, 19 nt, Artificial Sequence
  Description of Artificial Sequence: Synthetic oligonucleotide
  Antisense Strand to SEQ ID NO: 436223
accauugugggaauacaaa

SEQ ID NO: 436225 - RNA, 19 nt, Artificial Sequence
  Description of Artificial Sequence: Synthetic oligonucleotide
  Sense strand starting at position 561 of SEQ ID NO: 316734
cugagaaugaguugccaag

SEQ ID NO: 436226 - RNA, 19 nt, Artificial Sequence
  Description of Artificial Sequence: Synthetic oligonucleotide
  Antisense Strand to SEQ ID NO: 436225
cuuggcaacucauucucag

SEQ ID NO: 436227 - RNA, 19 nt, Artificial Sequence
  Description of Artificial Sequence: Synthetic oligonucleotide
  Sense strand starting at position 563 of SEQ ID NO: 316734
gagaaugaguugccaaguu

SEQ ID NO: 436228 - RNA, 19 nt, Artificial Sequence
  Description of Artificial Sequence: Synthetic oligonucleotide
  Antisense Strand to SEQ ID NO: 436227
aacuuggcaacucauucuc

SEQ ID NO: 436229 - RNA, 19 nt, Artificial Sequence
  Description of Artificial Sequence: Synthetic oligonucleotide
  Sense strand starting at position 790 of SEQ ID NO: 316734
ucauguagacuccaugauc

SEQ ID NO: 436230 - RNA, 19 nt, Artificial Sequence
  Description of Artificial Sequence: Synthetic oligonucleotide
  Antisense Strand to SEQ ID NO: 436229
gaucauggagucuacauga

SEQ ID NO: 436231 - RNA, 19 nt, Artificial Sequence
  Description of Artificial Sequence: Synthetic oligonucleotide
  Sense strand starting at position 1127 of SEQ ID NO: 316734
aagagaucagucugaacuu

SEQ ID NO: 436232 - RNA, 19 nt, Artificial Sequence
  Description of Artificial Sequence: Synthetic oligonucleotide
  Antisense Strand to SEQ ID NO: 436231
aaguucagacugaucucuu

SEQ ID NO: 436233 - RNA, 19 nt, Artificial Sequence
  Description of Artificial Sequence: Synthetic oligonucleotide
  Sense strand starting at position 1184 of SEQ ID NO: 316734
agauguccucccuacacua

SEQ ID NO: 436234 - RNA, 19 nt, Artificial Sequence
  Description of Artificial Sequence: Synthetic oligonucleotide
  Antisense Strand to SEQ ID NO: 436233
uaguguagggaggacaucu

SEQ ID NO: 436235 - RNA, 19 nt, Artificial Sequence
  Description of Artificial Sequence: Synthetic oligonucleotide
  Sense strand starting at position 1214 of SEQ ID NO: 316734
agguucuuaucaucaagga

SEQ ID NO: 436236 - RNA, 19 nt, Artificial Sequence
  Description of Artificial Sequence: Synthetic oligonucleotide
  Antisense Strand to SEQ ID NO: 436235
uccuugaugauaagaaccu

SEQ ID NO: 436237 - RNA, 19 nt, Artificial Sequence
  Description of Artificial Sequence: Synthetic oligonucleotide
  Sense strand starting at position 1540 of SEQ ID NO: 316734
guauucuucugucccaaca

SEQ ID NO: 436238 - RNA, 19 nt, Artificial Sequence
  Description of Artificial Sequence: Synthetic oligonucleotide
  Antisense Strand to SEQ ID NO: 436237
uguugggacagaagaauac

SEQ ID NO: 436239 - RNA, 19 nt, Artificial Sequence
  Description of Artificial Sequence: Synthetic oligonucleotide
  Sense strand starting at position 1553 of SEQ ID NO: 316734
ccaacaguuucuguccuaa

SEQ ID NO: 436240 - RNA, 19 nt, Artificial Sequence
  Description of Artificial Sequence: Synthetic oligonucleotide
  Antisense Strand to SEQ ID NO: 436239
uuaggacagaaacuguugg

SEQ ID NO: 436241 - RNA, 19 nt, Artificial Sequence
  Description of Artificial Sequence: Synthetic oligonucleotide
  Sense strand starting at position 1639 of SEQ ID NO: 316734
ggaagaaaguaggaauucu

SEQ ID NO: 436242 - RNA, 19 nt, Artificial Sequence
  Description of Artificial Sequence: Synthetic oligonucleotide
  Antisense Strand to SEQ ID NO: 436241
agaauuccuacuuucuucc

SEQ ID NO: 436243 - RNA, 19 nt, Artificial Sequence
  Description of Artificial Sequence: Synthetic oligonucleotide
  Sense strand starting at position 2029 of SEQ ID NO: 316734
agcagauggccaugaaagu

SEQ ID NO: 436244 - RNA, 19 nt, Artificial Sequence
  Description of Artificial Sequence: Synthetic oligonucleotide
  Antisense Strand to SEQ ID NO: 436243
acuuucauggccaucugcu

SEQ ID NO: 436245 - RNA, 19 nt, Artificial Sequence
  Description of Artificial Sequence: Synthetic oligonucleotide
  Sense strand starting at position 2040 of SEQ ID NO: 316734
augaaagugaccuguaguu

SEQ ID NO: 436246 - RNA, 19 nt, Artificial Sequence
  Description of Artificial Sequence: Synthetic oligonucleotide
  Antisense Strand to SEQ ID NO: 436245
aacuacaggucacuuucau

SEQ ID NO: 436247 - RNA, 19 nt, Artificial Sequence
  Description of Artificial Sequence: Synthetic oligonucleotide
  Sense strand starting at position 2122 of SEQ ID NO: 316734
ggcaaugggccauagcaau

SEQ ID NO: 436248 - RNA, 19 nt, Artificial Sequence
  Description of Artificial Sequence: Synthetic oligonucleotide
  Antisense Strand to SEQ ID NO: 436247
auugcuauggcccauugcc

SEQ ID NO: 436249 - RNA, 19 nt, Artificial Sequence
  Description of Artificial Sequence: Synthetic oligonucleotide
  Sense strand starting at position 2133 of SEQ ID NO: 316734
auagcaauggccuggaagu

SEQ ID NO: 436250 - RNA, 19 nt, Artificial Sequence
  Description of Artificial Sequence: Synthetic oligonucleotide
  Antisense Strand to SEQ ID NO: 436249
acuuccaggccauugcuau

SEQ ID NO: 436251 - RNA, 19 nt, Artificial Sequence
  Description of Artificial Sequence: Synthetic oligonucleotide
  Sense strand starting at position 2134 of SEQ ID NO: 316734
uagcaauggccuggaaguu

SEQ ID NO: 436252 - RNA, 19 nt, Artificial Sequence
  Description of Artificial Sequence: Synthetic oligonucleotide
  Antisense Strand to SEQ ID NO: 436251
aacuuccaggccauugcua

SEQ ID NO: 436253 - RNA, 19 nt, Artificial Sequence
  Description of Artificial Sequence: Synthetic oligonucleotide
  Sense strand starting at position 2135 of SEQ ID NO: 316734
agcaauggccuggaaguua

SEQ ID NO: 436254 - RNA, 19 nt, Artificial Sequence
  Description of Artificial Sequence: Synthetic oligonucleotide
  Antisense Strand to SEQ ID NO: 436253
uaacuuccaggccauugcu

SEQ ID NO: 436255 - RNA, 19 nt, Artificial Sequence
  Description of Artificial Sequence: Synthetic oligonucleotide
  Sense strand starting at position 2152 of SEQ ID NO: 316734
uaccauauaugguucugga

SEQ ID NO: 436256 - RNA, 19 nt, Artificial Sequence
  Description of Artificial Sequence: Synthetic oligonucleotide
  Antisense Strand to SEQ ID NO: 436255
uccagaaccauauauggua

SEQ ID NO: 436257 - RNA, 19 nt, Artificial Sequence
  Description of Artificial Sequence: Synthetic oligonucleotide
  Sense strand starting at position 2185 of SEQ ID NO: 316734
uuuccagaauguucugaau

SEQ ID NO: 436258 - RNA, 19 nt, Artificial Sequence
  Description of Artificial Sequence: Synthetic oligonucleotide
  Antisense Strand to SEQ ID NO: 436257
auucagaacauucuggaaa

SEQ ID NO: 436259 - RNA, 19 nt, Artificial Sequence
  Description of Artificial Sequence: Synthetic oligonucleotide
  Sense strand starting at position 2468 of SEQ ID NO: 316734
auaagagcuuggcuuugua

SEQ ID NO: 436260 - RNA, 19 nt, Artificial Sequence
  Description of Artificial Sequence: Synthetic oligonucleotide
  Antisense Strand to SEQ ID NO: 436259
uacaaagccaagcucuuau

SEQ ID NO: 436261 - RNA, 19 nt, Artificial Sequence
  Description of Artificial Sequence: Synthetic oligonucleotide
  Sense strand starting at position 2477 of SEQ ID NO: 316734
uggcuuuguaaucagugaa

SEQ ID NO: 436262 - RNA, 19 nt, Artificial Sequence
  Description of Artificial Sequence: Synthetic oligonucleotide
  Antisense Strand to SEQ ID NO: 436261
uucacugauuacaaagcca

SEQ ID NO: 436263 - RNA, 19 nt, Artificial Sequence
  Description of Artificial Sequence: Synthetic oligonucleotide
  Sense strand starting at position 2556 of SEQ ID NO: 316734
uagccagcucuccaggauu

SEQ ID NO: 436264 - RNA, 19 nt, Artificial Sequence
  Description of Artificial Sequence: Synthetic oligonucleotide
  Antisense Strand to SEQ ID NO: 436263
aauccuggagagcuggcua

SEQ ID NO: 436265 - RNA, 19 nt, Artificial Sequence
  Description of Artificial Sequence: Synthetic oligonucleotide
  Sense strand starting at position 2581 of SEQ ID NO: 316734
caagaagugucucuuugua

SEQ ID NO: 436266 - RNA, 19 nt, Artificial Sequence
  Description of Artificial Sequence: Synthetic oligonucleotide
  Antisense Strand to SEQ ID NO: 436265
uacaaagagacacuucuug

SEQ ID NO: 436267 - RNA, 19 nt, Artificial Sequence
  Description of Artificial Sequence: Synthetic oligonucleotide
  Sense strand starting at position 2583 of SEQ ID NO: 316734
agaagugucucuuuguaug

SEQ ID NO: 436268 - RNA, 19 nt, Artificial Sequence
  Description of Artificial Sequence: Synthetic oligonucleotide
  Antisense Strand to SEQ ID NO: 436267
cauacaaagagacacuucu

SEQ ID NO: 436269 - RNA, 19 nt, Artificial Sequence
  Description of Artificial Sequence: Synthetic oligonucleotide
  Sense strand starting at position 2585 of SEQ ID NO: 316734
aagugucucuuuguaugaa

SEQ ID NO: 436270 - RNA, 19 nt, Artificial Sequence
  Description of Artificial Sequence: Synthetic oligonucleotide
  Antisense Strand to SEQ ID NO: 436269
uucauacaaagagacacuu

SEQ ID NO: 436271 - RNA, 19 nt, Artificial Sequence
  Description of Artificial Sequence: Synthetic oligonucleotide
  Sense strand starting at position 2628 of SEQ ID NO: 316734
gucguaauugucucagccu

SEQ ID NO: 436272 - RNA, 19 nt, Artificial Sequence
  Description of Artificial Sequence: Synthetic oligonucleotide
  Antisense Strand to SEQ ID NO: 436271
aggcugagacaauuacgac

SEQ ID NO: 436273 - RNA, 19 nt, Artificial Sequence
  Description of Artificial Sequence: Synthetic oligonucleotide
  Sense strand starting at position 2643 of SEQ ID NO: 316734
gccuuuguugcccuguuaa

SEQ ID NO: 436274 - RNA, 19 nt, Artificial Sequence
  Description of Artificial Sequence: Synthetic oligonucleotide
  Antisense Strand to SEQ ID NO: 436273
uuaacagggcaacaaaggc

SEQ ID NO: 436275 - RNA, 19 nt, Artificial Sequence
  Description of Artificial Sequence: Synthetic oligonucleotide
  Sense strand starting at position 2682 of SEQ ID NO: 316734
uuagguauccuuggaggaa

SEQ ID NO: 436276 - RNA, 19 nt, Artificial Sequence
  Description of Artificial Sequence: Synthetic oligonucleotide
  Antisense Strand to SEQ ID NO: 436275
uuccuccaaggauaccuaa

SEQ ID NO: 436277 - RNA, 19 nt, Artificial Sequence
  Description of Artificial Sequence: Synthetic oligonucleotide
  Sense strand starting at position 2685 of SEQ ID NO: 316734
gguauccuuggaggaaacu

SEQ ID NO: 436278 - RNA, 19 nt, Artificial Sequence
  Description of Artificial Sequence: Synthetic oligonucleotide
  Antisense Strand to SEQ ID NO: 436277
aguuuccuccaaggauacc

SEQ ID NO: 436279 - RNA, 19 nt, Artificial Sequence
  Description of Artificial Sequence: Synthetic oligonucleotide
  Sense strand starting at position 2873 of SEQ ID NO: 316734
cuaaguaacuguccuauug

SEQ ID NO: 436280 - RNA, 19 nt, Artificial Sequence
  Description of Artificial Sequence: Synthetic oligonucleotide
  Antisense Strand to SEQ ID NO: 436279
caauaggacaguuacuuag

SEQ ID NO: 436281 - RNA, 19 nt, Artificial Sequence
  Description of Artificial Sequence: Synthetic oligonucleotide
  Sense strand starting at position 2888 of SEQ ID NO: 316734
auugguaccuaugugaaga

SEQ ID NO: 436282 - RNA, 19 nt, Artificial Sequence
  Description of Artificial Sequence: Synthetic oligonucleotide
  Antisense Strand to SEQ ID NO: 436281
ucuucacauagguaccaau

SEQ ID NO: 436283 - RNA, 19 nt, Artificial Sequence
  Description of Artificial Sequence: Synthetic oligonucleotide
  Sense strand starting at position 2889 of SEQ ID NO: 316734
uugguaccuaugugaagau

SEQ ID NO: 436284 - RNA, 19 nt, Artificial Sequence
  Description of Artificial Sequence: Synthetic oligonucleotide
  Antisense Strand to SEQ ID NO: 436283
aucuucacauagguaccaa

SEQ ID NO: 436285 - RNA, 19 nt, Artificial Sequence
  Description of Artificial Sequence: Synthetic oligonucleotide
  Sense strand starting at position 3020 of SEQ ID NO: 316734
cuacuuaaaguuugcugau

SEQ ID NO: 436286 - RNA, 19 nt, Artificial Sequence
  Description of Artificial Sequence: Synthetic oligonucleotide
  Antisense Strand to SEQ ID NO: 436285
aucagcaaacuuuaaguag

SEQ ID NO: 436287 - RNA, 19 nt, Artificial Sequence
  Description of Artificial Sequence: Synthetic oligonucleotide
  Sense strand starting at position 3166 of SEQ ID NO: 316734
uaaugcacgucauuuagca

SEQ ID NO: 436288 - RNA, 19 nt, Artificial Sequence
  Description of Artificial Sequence: Synthetic oligonucleotide
  Antisense Strand to SEQ ID NO: 436287
ugcuaaaugacgugcauua

SEQ ID NO: 436289 - RNA, 19 nt, Artificial Sequence
  Description of Artificial Sequence: Synthetic oligonucleotide
  Sense strand starting at position 3170 of SEQ ID NO: 316734
gcacgucauuuagcaugaa

SEQ ID NO: 436290 - RNA, 19 nt, Artificial Sequence
  Description of Artificial Sequence: Synthetic oligonucleotide
  Antisense Strand to SEQ ID NO: 436289
uucaugcuaaaugacgugc

SEQ ID NO: 436291 - RNA, 19 nt, Artificial Sequence
  Description of Artificial Sequence: Synthetic oligonucleotide
  Sense strand starting at position 3173 of SEQ ID NO: 316734
cgucauuuagcaugaacuc

SEQ ID NO: 436292 - RNA, 19 nt, Artificial Sequence
  Description of Artificial Sequence: Synthetic oligonucleotide
  Antisense Strand to SEQ ID NO: 436291
gaguucaugcuaaaugacg

SEQ ID NO: 436293 - RNA, 19 nt, Artificial Sequence
  Description of Artificial Sequence: Synthetic oligonucleotide
  Sense strand starting at position 46 of SEQ ID NO: 316735
ugauguauauguuuacaga

SEQ ID NO: 436294 - RNA, 19 nt, Artificial Sequence
  Description of Artificial Sequence: Synthetic oligonucleotide
  Antisense Strand to SEQ ID NO: 436293
ucuguaaacauauacauca

SEQ ID NO: 436295 - RNA, 19 nt, Artificial Sequence
  Description of Artificial Sequence: Synthetic oligonucleotide
  Sense strand starting at position 49 of SEQ ID NO: 316735
uguauauguuuacagaaca

SEQ ID NO: 436296 - RNA, 19 nt, Artificial Sequence
  Description of Artificial Sequence: Synthetic oligonucleotide
  Antisense Strand to SEQ ID NO: 436295
uguucuguaaacauauaca

SEQ ID NO: 436297 - RNA, 19 nt, Artificial Sequence
  Description of Artificial Sequence: Synthetic oligonucleotide
  Sense strand starting at position 105 of SEQ ID NO: 316735
uugcuuuaguuuguaucua

SEQ ID NO: 436298 - RNA, 19 nt, Artificial Sequence
  Description of Artificial Sequence: Synthetic oligonucleotide
  Antisense Strand to SEQ ID NO: 436297
uagauacaaacuaaagcaa

SEQ ID NO: 436299 - RNA, 19 nt, Artificial Sequence
  Description of Artificial Sequence: Synthetic oligonucleotide
  Sense strand starting at position 193 of SEQ ID NO: 316735
ucuuaauucuuauaugagg

SEQ ID NO: 436300 - RNA, 19 nt, Artificial Sequence
  Description of Artificial Sequence: Synthetic oligonucleotide
  Antisense Strand to SEQ ID NO: 436299
ccucauauaagaauuaaga

SEQ ID NO: 436301 - RNA, 19 nt, Artificial Sequence
  Description of Artificial Sequence: Synthetic oligonucleotide
  Sense strand starting at position 491 of SEQ ID NO: 316735
uugaaacuuugugauacua

SEQ ID NO: 436302 - RNA, 19 nt, Artificial Sequence
  Description of Artificial Sequence: Synthetic oligonucleotide
  Antisense Strand to SEQ ID NO: 436301
uaguaucacaaaguuucaa

SEQ ID NO: 436303 - RNA, 19 nt, Artificial Sequence
  Description of Artificial Sequence: Synthetic oligonucleotide
  Sense strand starting at position 537 of SEQ ID NO: 316735
uucuaaguuuccguaaauc

SEQ ID NO: 436304 - RNA, 19 nt, Artificial Sequence
  Description of Artificial Sequence: Synthetic oligonucleotide
  Antisense Strand to SEQ ID NO: 436303
gauuuacggaaacuuagaa

SEQ ID NO: 436305 - RNA, 19 nt, Artificial Sequence
  Description of Artificial Sequence: Synthetic oligonucleotide
  Sense strand starting at position 545 of SEQ ID NO: 316735
uuccguaaaucuguuacau

SEQ ID NO: 436306 - RNA, 19 nt, Artificial Sequence
  Description of Artificial Sequence: Synthetic oligonucleotide
  Antisense Strand to SEQ ID NO: 436305
auguaacagauuuacggaa

SEQ ID NO: 436307 - RNA, 19 nt, Artificial Sequence
  Description of Artificial Sequence: Synthetic oligonucleotide
  Sense strand starting at position 584 of SEQ ID NO: 316735
ugcauuuauugagucgaau

SEQ ID NO: 436308 - RNA, 19 nt, Artificial Sequence
  Description of Artificial Sequence: Synthetic oligonucleotide
  Antisense Strand to SEQ ID NO: 436307
auucgacucaauaaaugca

SEQ ID NO: 436309 - RNA, 19 nt, Artificial Sequence
  Description of Artificial Sequence: Synthetic oligonucleotide
  Sense strand starting at position 596 of SEQ ID NO: 316735
gucgaauacuugccuuaaa

SEQ ID NO: 436310 - RNA, 19 nt, Artificial Sequence
  Description of Artificial Sequence: Synthetic oligonucleotide
  Antisense Strand to SEQ ID NO: 436309
uuuaaggcaaguauucgac

SEQ ID NO: 436311 - RNA, 19 nt, Artificial Sequence
  Description of Artificial Sequence: Synthetic oligonucleotide
  Sense strand starting at position 597 of SEQ ID NO: 316735
ucgaauacuugccuuaaau

SEQ ID NO: 436312 - RNA, 19 nt, Artificial Sequence
  Description of Artificial Sequence: Synthetic oligonucleotide
  Antisense Strand to SEQ ID NO: 436311
auuuaaggcaaguauucga

SEQ ID NO: 436313 - RNA, 19 nt, Artificial Sequence
  Description of Artificial Sequence: Synthetic oligonucleotide
  Sense strand starting at position 1984 of SEQ ID NO: 316735
agcaguguucaucagagug

SEQ ID NO: 436314 - RNA, 19 nt, Artificial Sequence
  Description of Artificial Sequence: Synthetic oligonucleotide
  Antisense Strand to SEQ ID NO: 436313
cacucugaugaacacugcu

SEQ ID NO: 436315 - RNA, 19 nt, Artificial Sequence
  Description of Artificial Sequence: Synthetic oligonucleotide
  Sense strand starting at position 1992 of SEQ ID NO: 316735
ucaucagagugauuaaagc

SEQ ID NO: 436316 - RNA, 19 nt, Artificial Sequence
  Description of Artificial Sequence: Synthetic oligonucleotide
  Antisense Strand to SEQ ID NO: 436315
gcuuuaaucacucugauga

SEQ ID NO: 436317 - RNA, 19 nt, Artificial Sequence
  Description of Artificial Sequence: Synthetic oligonucleotide
  Sense strand starting at position 2000 of SEQ ID NO: 316735
gugauuaaagcuuggguca

SEQ ID NO: 436318 - RNA, 19 nt, Artificial Sequence
  Description of Artificial Sequence: Synthetic oligonucleotide
  Antisense Strand to SEQ ID NO: 436317
ugacccaagcuuuaaucac

SEQ ID NO: 436319 - RNA, 19 nt, Artificial Sequence
  Description of Artificial Sequence: Synthetic oligonucleotide
  Sense strand starting at position 2001 of SEQ ID NO: 316735
ugauuaaagcuugggucau

SEQ ID NO: 436320 - RNA, 19 nt, Artificial Sequence
  Description of Artificial Sequence: Synthetic oligonucleotide
  Antisense Strand to SEQ ID NO: 436319
augacccaagcuuuaauca

SEQ ID NO: 436321 - RNA, 19 nt, Artificial Sequence
  Description of Artificial Sequence: Synthetic oligonucleotide
  Sense strand starting at position 2011 of SEQ ID NO: 316735
uugggucaucauggugauu

SEQ ID NO: 436322 - RNA, 19 nt, Artificial Sequence
  Description of Artificial Sequence: Synthetic oligonucleotide
  Antisense Strand to SEQ ID NO: 436321
aaucaccaugaugacccaa

SEQ ID NO: 436323 - RNA, 19 nt, Artificial Sequence
  Description of Artificial Sequence: Synthetic oligonucleotide
  Sense strand starting at position 2014 of SEQ ID NO: 316735
ggucaucauggugauuguu

SEQ ID NO: 436324 - RNA, 19 nt, Artificial Sequence
  Description of Artificial Sequence: Synthetic oligonucleotide
  Antisense Strand to SEQ ID NO: 436323
aacaaucaccaugaugacc

SEQ ID NO: 436325 - RNA, 19 nt, Artificial Sequence
  Description of Artificial Sequence: Synthetic oligonucleotide
  Sense strand starting at position 2029 of SEQ ID NO: 316735
uguugcaucaacuauggga

SEQ ID NO: 436326 - RNA, 19 nt, Artificial Sequence
  Description of Artificial Sequence: Synthetic oligonucleotide
  Antisense Strand to SEQ ID NO: 436325
ucccauaguugaugcaaca

SEQ ID NO: 436327 - RNA, 19 nt, Artificial Sequence
  Description of Artificial Sequence: Synthetic oligonucleotide
  Sense strand starting at position 2046 of SEQ ID NO: 316735
gagcaaugucacugggucu

SEQ ID NO: 436328 - RNA, 19 nt, Artificial Sequence
  Description of Artificial Sequence: Synthetic oligonucleotide
  Antisense Strand to SEQ ID NO: 436327
agacccagugacauugcuc

SEQ ID NO: 436329 - RNA, 19 nt, Artificial Sequence
  Description of Artificial Sequence: Synthetic oligonucleotide
  Sense strand starting at position 2072 of SEQ ID NO: 316735
gguuguuucuaggcugcga

SEQ ID NO: 436330 - RNA, 19 nt, Artificial Sequence
  Description of Artificial Sequence: Synthetic oligonucleotide
  Antisense Strand to SEQ ID NO: 436329
ucgcagccuagaaacaacc

SEQ ID NO: 436331 - RNA, 19 nt, Artificial Sequence
  Description of Artificial Sequence: Synthetic oligonucleotide
  Sense strand starting at position 2073 of SEQ ID NO: 316735
guuguuucuaggcugcgau

SEQ ID NO: 436332 - RNA, 19 nt, Artificial Sequence
  Description of Artificial Sequence: Synthetic oligonucleotide
  Antisense Strand to SEQ ID NO: 436331
aucgcagccuagaaacaac

SEQ ID NO: 436333 - RNA, 19 nt, Artificial Sequence
  Description of Artificial Sequence: Synthetic oligonucleotide
  Sense strand starting at position 2080 of SEQ ID NO: 316735
cuaggcugcgauugguuau

SEQ ID NO: 436334 - RNA, 19 nt, Artificial Sequence
  Description of Artificial Sequence: Synthetic oligonucleotide
  Antisense Strand to SEQ ID NO: 436333
auaaccaaucgcagccuag

SEQ ID NO: 436335 - RNA, 19 nt, Artificial Sequence
  Description of Artificial Sequence: Synthetic oligonucleotide
  Sense strand starting at position 2083 of SEQ ID NO: 316735
ggcugcgauugguuaucua

SEQ ID NO: 436336 - RNA, 19 nt, Artificial Sequence
  Description of Artificial Sequence: Synthetic oligonucleotide
  Antisense Strand to SEQ ID NO: 436335
uagauaaccaaucgcagcc

SEQ ID NO: 436337 - RNA, 19 nt, Artificial Sequence
  Description of Artificial Sequence: Synthetic oligonucleotide
  Sense strand starting at position 2086 of SEQ ID NO: 316735
ugcgauugguuaucuaauu

SEQ ID NO: 436338 - RNA, 19 nt, Artificial Sequence
  Description of Artificial Sequence: Synthetic oligonucleotide
  Antisense Strand to SEQ ID NO: 436337
aauuagauaaccaaucgca

SEQ ID NO: 436339 - RNA, 19 nt, Artificial Sequence
  Description of Artificial Sequence: Synthetic oligonucleotide
  Sense strand starting at position 2087 of SEQ ID NO: 316735
gcgauugguuaucuaauug

SEQ ID NO: 436340 - RNA, 19 nt, Artificial Sequence
  Description of Artificial Sequence: Synthetic oligonucleotide
  Antisense Strand to SEQ ID NO: 436339
caauuagauaaccaaucgc

SEQ ID NO: 436341 - RNA, 19 nt, Artificial Sequence
  Description of Artificial Sequence: Synthetic oligonucleotide
  Sense strand starting at position 2092 of SEQ ID NO: 316735
ugguuaucuaauugcagga

SEQ ID NO: 436342 - RNA, 19 nt, Artificial Sequence
  Description of Artificial Sequence: Synthetic oligonucleotide
  Antisense Strand to SEQ ID NO: 436341
uccugcaauuagauaacca

SEQ ID NO: 436343 - RNA, 19 nt, Artificial Sequence
  Description of Artificial Sequence: Synthetic oligonucleotide
  Sense strand starting at position 2094 of SEQ ID NO: 316735
guuaucuaauugcaggaau

SEQ ID NO: 436344 - RNA, 19 nt, Artificial Sequence
  Description of Artificial Sequence: Synthetic oligonucleotide
  Antisense Strand to SEQ ID NO: 436343
auuccugcaauuagauaac

SEQ ID NO: 436345 - RNA, 19 nt, Artificial Sequence
  Description of Artificial Sequence: Synthetic oligonucleotide
  Sense strand starting at position 2130 of SEQ ID NO: 316735
uagaguccgcucugauuau

SEQ ID NO: 436346 - RNA, 19 nt, Artificial Sequence
  Description of Artificial Sequence: Synthetic oligonucleotide
  Antisense Strand to SEQ ID NO: 436345
auaaucagagcggacucua

SEQ ID NO: 436347 - RNA, 19 nt, Artificial Sequence
  Description of Artificial Sequence: Synthetic oligonucleotide
  Sense strand starting at position 2134 of SEQ ID NO: 316735
guccgcucugauuaugaaa

SEQ ID NO: 436348 - RNA, 19 nt, Artificial Sequence
  Description of Artificial Sequence: Synthetic oligonucleotide
  Antisense Strand to SEQ ID NO: 436347
uuucauaaucagagcggac

SEQ ID NO: 436349 - RNA, 19 nt, Artificial Sequence
  Description of Artificial Sequence: Synthetic oligonucleotide
  Sense strand starting at position 2199 of SEQ ID NO: 316735
ccauguuucuguuuauaag

SEQ ID NO: 436350 - RNA, 19 nt, Artificial Sequence
  Description of Artificial Sequence: Synthetic oligonucleotide
  Antisense Strand to SEQ ID NO: 436349
cuuauaaacagaaacaugg

SEQ ID NO: 436351 - RNA, 19 nt, Artificial Sequence
  Description of Artificial Sequence: Synthetic oligonucleotide
  Sense strand starting at position 2221 of SEQ ID NO: 316735
aaugucuccugauauagag

SEQ ID NO: 436352 - RNA, 19 nt, Artificial Sequence
  Description of Artificial Sequence: Synthetic oligonucleotide
  Antisense Strand to SEQ ID NO: 436351
cucuauaucaggagacauu

SEQ ID NO: 436353 - RNA, 19 nt, Artificial Sequence
  Description of Artificial Sequence: Synthetic oligonucleotide
  Sense strand starting at position 2229 of SEQ ID NO: 316735
cugauauagagcuaggguu

SEQ ID NO: 436354 - RNA, 19 nt, Artificial Sequence
  Description of Artificial Sequence: Synthetic oligonucleotide
  Antisense Strand to SEQ ID NO: 436353
aacccuagcucuauaucag

SEQ ID NO: 436355 - RNA, 19 nt, Artificial Sequence
  Description of Artificial Sequence: Synthetic oligonucleotide
  Sense strand starting at position 2237 of SEQ ID NO: 316735
gagcuaggguuacuugaaa

SEQ ID NO: 436356 - RNA, 19 nt, Artificial Sequence
  Description of Artificial Sequence: Synthetic oligonucleotide
  Antisense Strand to SEQ ID NO: 436355
uuucaaguaacccuagcuc

SEQ ID NO: 436357 - RNA, 19 nt, Artificial Sequence
  Description of Artificial Sequence: Synthetic oligonucleotide
  Sense strand starting at position 2288 of SEQ ID NO: 316735
gguuuagaauuaguaagga

SEQ ID NO: 436358 - RNA, 19 nt, Artificial Sequence
  Description of Artificial Sequence: Synthetic oligonucleotide
  Antisense Strand to SEQ ID NO: 436357
uccuuacuaauucuaaacc

SEQ ID NO: 436359 - RNA, 19 nt, Artificial Sequence
  Description of Artificial Sequence: Synthetic oligonucleotide
  Sense strand starting at position 2318 of SEQ ID NO: 316735
gccacaaguuuaucagcau

SEQ ID NO: 436360 - RNA, 19 nt, Artificial Sequence
  Description of Artificial Sequence: Synthetic oligonucleotide
  Antisense Strand to SEQ ID NO: 436359
augcugauaaacuuguggc

SEQ ID NO: 436361 - RNA, 19 nt, Artificial Sequence
  Description of Artificial Sequence: Synthetic oligonucleotide
  Sense strand starting at position 2338 of SEQ ID NO: 316735
agcuuaaagucgucuaucu

SEQ ID NO: 436362 - RNA, 19 nt, Artificial Sequence
  Description of Artificial Sequence: Synthetic oligonucleotide
  Antisense Strand to SEQ ID NO: 436361
agauagacgacuuuaagcu

SEQ ID NO: 436363 - RNA, 19 nt, Artificial Sequence
  Description of Artificial Sequence: Synthetic oligonucleotide
  Sense strand starting at position 2340 of SEQ ID NO: 316735
cuuaaagucgucuaucuuc

SEQ ID NO: 436364 - RNA, 19 nt, Artificial Sequence
  Description of Artificial Sequence: Synthetic oligonucleotide
  Antisense Strand to SEQ ID NO: 436363
gaagauagacgacuuuaag

SEQ ID NO: 436365 - RNA, 19 nt, Artificial Sequence
  Description of Artificial Sequence: Synthetic oligonucleotide
  Sense strand starting at position 2458 of SEQ ID NO: 316735
caguaaguauagcuacaga

SEQ ID NO: 436366 - RNA, 19 nt, Artificial Sequence
  Description of Artificial Sequence: Synthetic oligonucleotide
  Antisense Strand to SEQ ID NO: 436365
ucuguagcuauacuuacug

SEQ ID NO: 436367 - RNA, 19 nt, Artificial Sequence
  Description of Artificial Sequence: Synthetic oligonucleotide
  Sense strand starting at position 2463 of SEQ ID NO: 316735
aguauagcuacagaaggua

SEQ ID NO: 436368 - RNA, 19 nt, Artificial Sequence
  Description of Artificial Sequence: Synthetic oligonucleotide
  Antisense Strand to SEQ ID NO: 436367
uaccuucuguagcuauacu

SEQ ID NO: 436369 - RNA, 19 nt, Artificial Sequence
  Description of Artificial Sequence: Synthetic oligonucleotide
  Sense strand starting at position 2471 of SEQ ID NO: 316735
uacagaagguaauuaggua

SEQ ID NO: 436370 - RNA, 19 nt, Artificial Sequence
  Description of Artificial Sequence: Synthetic oligonucleotide
  Antisense Strand to SEQ ID NO: 436369
uaccuaauuaccuucugua

SEQ ID NO: 436371 - RNA, 19 nt, Artificial Sequence
  Description of Artificial Sequence: Synthetic oligonucleotide
  Sense strand starting at position 2499 of SEQ ID NO: 316735
ucaguuaguucccuuauuc

SEQ ID NO: 436372 - RNA, 19 nt, Artificial Sequence
  Description of Artificial Sequence: Synthetic oligonucleotide
  Antisense Strand to SEQ ID NO: 436371
gaauaagggaacuaacuga

SEQ ID NO: 436373 - RNA, 19 nt, Artificial Sequence
  Description of Artificial Sequence: Synthetic oligonucleotide
  Sense strand starting at position 24 of SEQ ID NO: 316736
cugcucuuccgacauauuc

SEQ ID NO: 436374 - RNA, 19 nt, Artificial Sequence
  Description of Artificial Sequence: Synthetic oligonucleotide
  Antisense Strand to SEQ ID NO: 436373
gaauaugucggaagagcag

SEQ ID NO: 436375 - RNA, 19 nt, Artificial Sequence
  Description of Artificial Sequence: Synthetic oligonucleotide
  Sense strand starting at position 32 of SEQ ID NO: 316736
ccgacauauucuccauguu

SEQ ID NO: 436376 - RNA, 19 nt, Artificial Sequence
  Description of Artificial Sequence: Synthetic oligonucleotide
  Antisense Strand to SEQ ID NO: 436375
aacauggagaauaugucgg

SEQ ID NO: 436377 - RNA, 19 nt, Artificial Sequence
  Description of Artificial Sequence: Synthetic oligonucleotide
  Sense strand starting at position 33 of SEQ ID NO: 316736
cgacauauucuccauguuu

SEQ ID NO: 436378 - RNA, 19 nt, Artificial Sequence
  Description of Artificial Sequence: Synthetic oligonucleotide
  Antisense Strand to SEQ ID NO: 436377
aaacauggagaauaugucg

SEQ ID NO: 436379 - RNA, 19 nt, Artificial Sequence
  Description of Artificial Sequence: Synthetic oligonucleotide
  Sense strand starting at position 252 of SEQ ID NO: 316736
uugcauaaguccucaguag

SEQ ID NO: 436380 - RNA, 19 nt, Artificial Sequence
  Description of Artificial Sequence: Synthetic oligonucleotide
  Antisense Strand to SEQ ID NO: 436379
cuacugaggacuuaugcaa

SEQ ID NO: 436381 - RNA, 19 nt, Artificial Sequence
  Description of Artificial Sequence: Synthetic oligonucleotide
  Sense strand starting at position 352 of SEQ ID NO: 316736
gcuuaagagcgcucucagu

SEQ ID NO: 436382 - RNA, 19 nt, Artificial Sequence
  Description of Artificial Sequence: Synthetic oligonucleotide
  Antisense Strand to SEQ ID NO: 436381
acugagagcgcucuuaagc

SEQ ID NO: 436383 - RNA, 19 nt, Artificial Sequence
  Description of Artificial Sequence: Synthetic oligonucleotide
  Sense strand starting at position 432 of SEQ ID NO: 316736
acguaaauccuaggaagaa

SEQ ID NO: 436384 - RNA, 19 nt, Artificial Sequence
  Description of Artificial Sequence: Synthetic oligonucleotide
  Antisense Strand to SEQ ID NO: 436383
uucuuccuaggauuuacgu

SEQ ID NO: 436385 - RNA, 19 nt, Artificial Sequence
  Description of Artificial Sequence: Synthetic oligonucleotide
  Sense strand starting at position 448 of SEQ ID NO: 316736
gaaugauggugagcgguaa

SEQ ID NO: 436386 - RNA, 19 nt, Artificial Sequence
  Description of Artificial Sequence: Synthetic oligonucleotide
  Antisense Strand to SEQ ID NO: 436385
uuaccgcucaccaucauuc

SEQ ID NO: 436387 - RNA, 19 nt, Artificial Sequence
  Description of Artificial Sequence: Synthetic oligonucleotide
  Sense strand starting at position 449 of SEQ ID NO: 316736
aaugauggugagcgguaau

SEQ ID NO: 436388 - RNA, 19 nt, Artificial Sequence
  Description of Artificial Sequence: Synthetic oligonucleotide
  Antisense Strand to SEQ ID NO: 436387
auuaccgcucaccaucauu

SEQ ID NO: 436389 - RNA, 19 nt, Artificial Sequence
  Description of Artificial Sequence: Synthetic oligonucleotide
  Sense strand starting at position 462 of SEQ ID NO: 316736
gguaaucuggugcaaagaa

SEQ ID NO: 436390 - RNA, 19 nt, Artificial Sequence
  Description of Artificial Sequence: Synthetic oligonucleotide
  Antisense Strand to SEQ ID NO: 436389
uucuuugcaccagauuacc

SEQ ID NO: 436391 - RNA, 19 nt, Artificial Sequence
  Description of Artificial Sequence: Synthetic oligonucleotide
  Sense strand starting at position 540 of SEQ ID NO: 316736
acaacuacuggaugcgaaa

SEQ ID NO: 436392 - RNA, 19 nt, Artificial Sequence
  Description of Artificial Sequence: Synthetic oligonucleotide
  Antisense Strand to SEQ ID NO: 436391
uuucgcauccaguaguugu

SEQ ID NO: 436393 - RNA, 19 nt, Artificial Sequence
  Description of Artificial Sequence: Synthetic oligonucleotide
  Sense strand starting at position 554 of SEQ ID NO: 316736
cgaaauagacucuaugcca

SEQ ID NO: 436394 - RNA, 19 nt, Artificial Sequence
  Description of Artificial Sequence: Synthetic oligonucleotide
  Antisense Strand to SEQ ID NO: 436393
uggcauagagucuauuucg

SEQ ID NO: 436395 - RNA, 19 nt, Artificial Sequence
  Description of Artificial Sequence: Synthetic oligonucleotide
  Sense strand starting at position 574 of SEQ ID NO: 316736
guugaacuuucggcaucaa

SEQ ID NO: 436396 - RNA, 19 nt, Artificial Sequence
  Description of Artificial Sequence: Synthetic oligonucleotide
  Antisense Strand to SEQ ID NO: 436395
uugaugccgaaaguucaac

SEQ ID NO: 436397 - RNA, 19 nt, Artificial Sequence
  Description of Artificial Sequence: Synthetic oligonucleotide
  Sense strand starting at position 575 of SEQ ID NO: 316736
uugaacuuucggcaucaau

SEQ ID NO: 436398 - RNA, 19 nt, Artificial Sequence
  Description of Artificial Sequence: Synthetic oligonucleotide
  Antisense Strand to SEQ ID NO: 436397
auugaugccgaaaguucaa

SEQ ID NO: 436399 - RNA, 19 nt, Artificial Sequence
  Description of Artificial Sequence: Synthetic oligonucleotide
  Sense strand starting at position 612 of SEQ ID NO: 316736
ggcugugaguucucaucag

SEQ ID NO: 436400 - RNA, 19 nt, Artificial Sequence
  Description of Artificial Sequence: Synthetic oligonucleotide
  Antisense Strand to SEQ ID NO: 436399
cugaugagaacucacagcc

SEQ ID NO: 436401 - RNA, 19 nt, Artificial Sequence
  Description of Artificial Sequence: Synthetic oligonucleotide
  Sense strand starting at position 616 of SEQ ID NO: 316736
gugaguucucaucaguacc

SEQ ID NO: 436402 - RNA, 19 nt, Artificial Sequence
  Description of Artificial Sequence: Synthetic oligonucleotide
  Antisense Strand to SEQ ID NO: 436401
gguacugaugagaacucac

SEQ ID NO: 436403 - RNA, 19 nt, Artificial Sequence
  Description of Artificial Sequence: Synthetic oligonucleotide
  Sense strand starting at position 624 of SEQ ID NO: 316736
ucaucaguaccugggucau

SEQ ID NO: 436404 - RNA, 19 nt, Artificial Sequence
  Description of Artificial Sequence: Synthetic oligonucleotide
  Antisense Strand to SEQ ID NO: 436403
augacccagguacugauga

SEQ ID NO: 436405 - RNA, 19 nt, Artificial Sequence
  Description of Artificial Sequence: Synthetic oligonucleotide
  Sense strand starting at position 785 of SEQ ID NO: 316736
aacugcagagaucguaaau

SEQ ID NO: 436406 - RNA, 19 nt, Artificial Sequence
  Description of Artificial Sequence: Synthetic oligonucleotide
  Antisense Strand to SEQ ID NO: 436405
auuuacgaucucugcaguu

SEQ ID NO: 436407 - RNA, 19 nt, Artificial Sequence
  Description of Artificial Sequence: Synthetic oligonucleotide
  Sense strand starting at position 1061 of SEQ ID NO: 316736
gggcaaaggugcuuacuuu

SEQ ID NO: 436408 - RNA, 19 nt, Artificial Sequence
  Description of Artificial Sequence: Synthetic oligonucleotide
  Antisense Strand to SEQ ID NO: 436407
aaaguaagcaccuuugccc

SEQ ID NO: 436409 - RNA, 19 nt, Artificial Sequence
  Description of Artificial Sequence: Synthetic oligonucleotide
  Sense strand starting at position 1248 of SEQ ID NO: 316736
uuacuuuccugguccgaaa

SEQ ID NO: 436410 - RNA, 19 nt, Artificial Sequence
  Description of Artificial Sequence: Synthetic oligonucleotide
  Antisense Strand to SEQ ID NO: 436409
uuucggaccaggaaaguaa

SEQ ID NO: 436411 - RNA, 19 nt, Artificial Sequence
  Description of Artificial Sequence: Synthetic oligonucleotide
  Sense strand starting at position 2072 of SEQ ID NO: 316736
uggagguuugggugaauga

SEQ ID NO: 436412 - RNA, 19 nt, Artificial Sequence
  Description of Artificial Sequence: Synthetic oligonucleotide
  Antisense Strand to SEQ ID NO: 436411
ucauucacccaaaccucca

SEQ ID NO: 436413 - RNA, 19 nt, Artificial Sequence
  Description of Artificial Sequence: Synthetic oligonucleotide
  Sense strand starting at position 2082 of SEQ ID NO: 316736
ggugaaugaggcgagaagu

SEQ ID NO: 436414 - RNA, 19 nt, Artificial Sequence
  Description of Artificial Sequence: Synthetic oligonucleotide
  Antisense Strand to SEQ ID NO: 436413
acuucucgccucauucacc

SEQ ID NO: 436415 - RNA, 19 nt, Artificial Sequence
  Description of Artificial Sequence: Synthetic oligonucleotide
  Sense strand starting at position 2126 of SEQ ID NO: 316736
agagaaggcugccucaauc

SEQ ID NO: 436416 - RNA, 19 nt, Artificial Sequence
  Description of Artificial Sequence: Synthetic oligonucleotide
  Antisense Strand to SEQ ID NO: 436415
gauugaggcagccuucucu

SEQ ID NO: 436417 - RNA, 19 nt, Artificial Sequence
  Description of Artificial Sequence: Synthetic oligonucleotide
  Sense strand starting at position 2730 of SEQ ID NO: 316736
gcgaauucucgcgauauuu

SEQ ID NO: 436418 - RNA, 19 nt, Artificial Sequence
  Description of Artificial Sequence: Synthetic oligonucleotide
  Antisense Strand to SEQ ID NO: 436417
aaauaucgcgagaauucgc

SEQ ID NO: 436419 - RNA, 19 nt, Artificial Sequence
  Description of Artificial Sequence: Synthetic oligonucleotide
  Sense strand starting at position 2738 of SEQ ID NO: 316736
ucgcgauauuucccacucu

SEQ ID NO: 436420 - RNA, 19 nt, Artificial Sequence
  Description of Artificial Sequence: Synthetic oligonucleotide
  Antisense Strand to SEQ ID NO: 436419
agagugggaaauaucgcga

SEQ ID NO: 436421 - RNA, 19 nt, Artificial Sequence
  Description of Artificial Sequence: Synthetic oligonucleotide
  Sense strand starting at position 2935 of SEQ ID NO: 316736
guaaauggcuaucuggaaa

SEQ ID NO: 436422 - RNA, 19 nt, Artificial Sequence
  Description of Artificial Sequence: Synthetic oligonucleotide
  Antisense Strand to SEQ ID NO: 436421
uuuccagauagccauuuac

SEQ ID NO: 436423 - RNA, 19 nt, Artificial Sequence
  Description of Artificial Sequence: Synthetic oligonucleotide
  Sense strand starting at position 2977 of SEQ ID NO: 316736
uguccuucccuuuagcaua

SEQ ID NO: 436424 - RNA, 19 nt, Artificial Sequence
  Description of Artificial Sequence: Synthetic oligonucleotide
  Antisense Strand to SEQ ID NO: 436423
uaugcuaaagggaaggaca

SEQ ID NO: 436425 - RNA, 19 nt, Artificial Sequence
  Description of Artificial Sequence: Synthetic oligonucleotide
  Sense strand starting at position 3061 of SEQ ID NO: 316736
ugccgauugcuagaacaac

SEQ ID NO: 436426 - RNA, 19 nt, Artificial Sequence
  Description of Artificial Sequence: Synthetic oligonucleotide
  Antisense Strand to SEQ ID NO: 436425
guuguucuagcaaucggca

SEQ ID NO: 436427 - RNA, 19 nt, Artificial Sequence
  Description of Artificial Sequence: Synthetic oligonucleotide
  Sense strand starting at position 3225 of SEQ ID NO: 316736
ugcuaauuugcucguggua

SEQ ID NO: 436428 - RNA, 19 nt, Artificial Sequence
  Description of Artificial Sequence: Synthetic oligonucleotide
  Antisense Strand to SEQ ID NO: 436427
uaccacgagcaaauuagca

SEQ ID NO: 436429 - RNA, 19 nt, Artificial Sequence
  Description of Artificial Sequence: Synthetic oligonucleotide
  Sense strand starting at position 3228 of SEQ ID NO: 316736
uaauuugcucgugguauua

SEQ ID NO: 436430 - RNA, 19 nt, Artificial Sequence
  Description of Artificial Sequence: Synthetic oligonucleotide
  Antisense Strand to SEQ ID NO: 436429
uaauaccacgagcaaauua

SEQ ID NO: 436431 - RNA, 19 nt, Artificial Sequence
  Description of Artificial Sequence: Synthetic oligonucleotide
  Sense strand starting at position 3353 of SEQ ID NO: 316736
uaauguuacuuugugguca

SEQ ID NO: 436432 - RNA, 19 nt, Artificial Sequence
  Description of Artificial Sequence: Synthetic oligonucleotide
  Antisense Strand to SEQ ID NO: 436431
ugaccacaaaguaacauua

SEQ ID NO: 436433 - RNA, 19 nt, Artificial Sequence
  Description of Artificial Sequence: Synthetic oligonucleotide
  Sense strand starting at position 3357 of SEQ ID NO: 316736
guuacuuuguggucauaga

SEQ ID NO: 436434 - RNA, 19 nt, Artificial Sequence
  Description of Artificial Sequence: Synthetic oligonucleotide
  Antisense Strand to SEQ ID NO: 436433
ucuaugaccacaaaguaac

SEQ ID NO: 436435 - RNA, 19 nt, Artificial Sequence
  Description of Artificial Sequence: Synthetic oligonucleotide
  Sense strand starting at position 3358 of SEQ ID NO: 316736
uuacuuuguggucauagau

SEQ ID NO: 436436 - RNA, 19 nt, Artificial Sequence
  Description of Artificial Sequence: Synthetic oligonucleotide
  Antisense Strand to SEQ ID NO: 436435
aucuaugaccacaaaguaa

SEQ ID NO: 436437 - RNA, 19 nt, Artificial Sequence
  Description of Artificial Sequence: Synthetic oligonucleotide
  Sense strand starting at position 3367 of SEQ ID NO: 316736
ggucauagauaauccuaau

SEQ ID NO: 436438 - RNA, 19 nt, Artificial Sequence
  Description of Artificial Sequence: Synthetic oligonucleotide
  Antisense Strand to SEQ ID NO: 436437
auuaggauuaucuaugacc

SEQ ID NO: 436439 - RNA, 19 nt, Artificial Sequence
  Description of Artificial Sequence: Synthetic oligonucleotide
  Sense strand starting at position 3414 of SEQ ID NO: 316736
cugccaaugagugagcuuu

SEQ ID NO: 436440 - RNA, 19 nt, Artificial Sequence
  Description of Artificial Sequence: Synthetic oligonucleotide
  Antisense Strand to SEQ ID NO: 436439
aaagcucacucauuggcag

SEQ ID NO: 436441 - RNA, 19 nt, Artificial Sequence
  Description of Artificial Sequence: Synthetic oligonucleotide
  Sense strand starting at position 3641 of SEQ ID NO: 316736
uuuggucuuggcuaaagau

SEQ ID NO: 436442 - RNA, 19 nt, Artificial Sequence
  Description of Artificial Sequence: Synthetic oligonucleotide
  Antisense Strand to SEQ ID NO: 436441
aucuuuagccaagaccaaa

SEQ ID NO: 436443 - RNA, 19 nt, Artificial Sequence
  Description of Artificial Sequence: Synthetic oligonucleotide
  Sense strand starting at position 3651 of SEQ ID NO: 316736
gcuaaagauuuguaauauc

SEQ ID NO: 436444 - RNA, 19 nt, Artificial Sequence
  Description of Artificial Sequence: Synthetic oligonucleotide
  Antisense Strand to SEQ ID NO: 436443
gauauuacaaaucuuuagc

SEQ ID NO: 436445 - RNA, 19 nt, Artificial Sequence
  Description of Artificial Sequence: Synthetic oligonucleotide
  Sense strand starting at position 3686 of SEQ ID NO: 316736
guggcuccaaggugauaau

SEQ ID NO: 436446 - RNA, 19 nt, Artificial Sequence
  Description of Artificial Sequence: Synthetic oligonucleotide
  Antisense Strand to SEQ ID NO: 436445
auuaucaccuuggagccac

SEQ ID NO: 436447 - RNA, 19 nt, Artificial Sequence
  Description of Artificial Sequence: Synthetic oligonucleotide
  Sense strand starting at position 3724 of SEQ ID NO: 316736
cccugaaucuaagaaugaa

SEQ ID NO: 436448 - RNA, 19 nt, Artificial Sequence
  Description of Artificial Sequence: Synthetic oligonucleotide
  Antisense Strand to SEQ ID NO: 436447
uucauucuuagauucaggg

SEQ ID NO: 436449 - RNA, 19 nt, Artificial Sequence
  Description of Artificial Sequence: Synthetic oligonucleotide
  Sense strand starting at position 3886 of SEQ ID NO: 316736
guuauaauuguggaguaca

SEQ ID NO: 436450 - RNA, 19 nt, Artificial Sequence
  Description of Artificial Sequence: Synthetic oligonucleotide
  Antisense Strand to SEQ ID NO: 436449
uguacuccacaauuauaac

SEQ ID NO: 436451 - RNA, 19 nt, Artificial Sequence
  Description of Artificial Sequence: Synthetic oligonucleotide
  Sense strand starting at position 3932 of SEQ ID NO: 316736
acugauguauuauuagaca

SEQ ID NO: 436452 - RNA, 19 nt, Artificial Sequence
  Description of Artificial Sequence: Synthetic oligonucleotide
  Antisense Strand to SEQ ID NO: 436451
ugucuaauaauacaucagu

SEQ ID NO: 436453 - RNA, 19 nt, Artificial Sequence
  Description of Artificial Sequence: Synthetic oligonucleotide
  Sense strand starting at position 22 of SEQ ID NO: 316737
ggcugugauagagaugauu

SEQ ID NO: 436454 - RNA, 19 nt, Artificial Sequence
  Description of Artificial Sequence: Synthetic oligonucleotide
  Antisense Strand to SEQ ID NO: 436453
aaucaucucuaucacagcc

SEQ ID NO: 436455 - RNA, 19 nt, Artificial Sequence
  Description of Artificial Sequence: Synthetic oligonucleotide
  Sense strand starting at position 59 of SEQ ID NO: 316737
uuuagagauuauguaacca

SEQ ID NO: 436456 - RNA, 19 nt, Artificial Sequence
  Description of Artificial Sequence: Synthetic oligonucleotide
  Antisense Strand to SEQ ID NO: 436455
ugguuacauaaucucuaaa

SEQ ID NO: 436457 - RNA, 19 nt, Artificial Sequence
  Description of Artificial Sequence: Synthetic oligonucleotide
  Sense strand starting at position 109 of SEQ ID NO: 316737
uuugauacagucuggucua

SEQ ID NO: 436458 - RNA, 19 nt, Artificial Sequence
  Description of Artificial Sequence: Synthetic oligonucleotide
  Antisense Strand to SEQ ID NO: 436457
uagaccagacuguaucaaa

SEQ ID NO: 436459 - RNA, 19 nt, Artificial Sequence
  Description of Artificial Sequence: Synthetic oligonucleotide
  Sense strand starting at position 187 of SEQ ID NO: 316737
guaugucaccucuaccauu

SEQ ID NO: 436460 - RNA, 19 nt, Artificial Sequence
  Description of Artificial Sequence: Synthetic oligonucleotide
  Antisense Strand to SEQ ID NO: 436459
aaugguagaggugacauac

SEQ ID NO: 436461 - RNA, 19 nt, Artificial Sequence
  Description of Artificial Sequence: Synthetic oligonucleotide
  Sense strand starting at position 382 of SEQ ID NO: 316737
gcaaaucuagcagggaaga

SEQ ID NO: 436462 - RNA, 19 nt, Artificial Sequence
  Description of Artificial Sequence: Synthetic oligonucleotide
  Antisense Strand to SEQ ID NO: 436461
ucuucccugcuagauuugc

SEQ ID NO: 436463 - RNA, 19 nt, Artificial Sequence
  Description of Artificial Sequence: Synthetic oligonucleotide
  Sense strand starting at position 392 of SEQ ID NO: 316737
cagggaagauaguaaacaa

SEQ ID NO: 436464 - RNA, 19 nt, Artificial Sequence
  Description of Artificial Sequence: Synthetic oligonucleotide
  Antisense Strand to SEQ ID NO: 436463
uuguuuacuaucuucccug

SEQ ID NO: 436465 - RNA, 19 nt, Artificial Sequence
  Description of Artificial Sequence: Synthetic oligonucleotide
  Sense strand starting at position 536 of SEQ ID NO: 316737
aaaugugauggcgggagaa

SEQ ID NO: 436466 - RNA, 19 nt, Artificial Sequence
  Description of Artificial Sequence: Synthetic oligonucleotide
  Antisense Strand to SEQ ID NO: 436465
uucucccgccaucacauuu

SEQ ID NO: 436467 - RNA, 19 nt, Artificial Sequence
  Description of Artificial Sequence: Synthetic oligonucleotide
  Sense strand starting at position 576 of SEQ ID NO: 316737
ggcagacacuagguaugaa

SEQ ID NO: 436468 - RNA, 19 nt, Artificial Sequence
  Description of Artificial Sequence: Synthetic oligonucleotide
  Antisense Strand to SEQ ID NO: 436467
uucauaccuagugucugcc

SEQ ID NO: 436469 - RNA, 19 nt, Artificial Sequence
  Description of Artificial Sequence: Synthetic oligonucleotide
  Sense strand starting at position 586 of SEQ ID NO: 316737
agguaugaaggucagcauu

SEQ ID NO: 436470 - RNA, 19 nt, Artificial Sequence
  Description of Artificial Sequence: Synthetic oligonucleotide
  Antisense Strand to SEQ ID NO: 436469
aaugcugaccuucauaccu

SEQ ID NO: 436471 - RNA, 19 nt, Artificial Sequence
  Description of Artificial Sequence: Synthetic oligonucleotide
  Sense strand starting at position 674 of SEQ ID NO: 316737
ggguuuguuagccauauua

SEQ ID NO: 436472 - RNA, 19 nt, Artificial Sequence
  Description of Artificial Sequence: Synthetic oligonucleotide
  Antisense Strand to SEQ ID NO: 436471
uaauauggcuaacaaaccc

SEQ ID NO: 436473 - RNA, 19 nt, Artificial Sequence
  Description of Artificial Sequence: Synthetic oligonucleotide
  Sense strand starting at position 676 of SEQ ID NO: 316737
guuuguuagccauauuaag

SEQ ID NO: 436474 - RNA, 19 nt, Artificial Sequence
  Description of Artificial Sequence: Synthetic oligonucleotide
  Antisense Strand to SEQ ID NO: 436473
cuuaauauggcuaacaaac

SEQ ID NO: 436475 - RNA, 19 nt, Artificial Sequence
  Description of Artificial Sequence: Synthetic oligonucleotide
  Sense strand starting at position 979 of SEQ ID NO: 316737
gugccacuuacugagaaug

SEQ ID NO: 436476 - RNA, 19 nt, Artificial Sequence
  Description of Artificial Sequence: Synthetic oligonucleotide
  Antisense Strand to SEQ ID NO: 436475
cauucucaguaaguggcac

SEQ ID NO: 436477 - RNA, 19 nt, Artificial Sequence
  Description of Artificial Sequence: Synthetic oligonucleotide
  Sense strand starting at position 1192 of SEQ ID NO: 316737
gcaacuaucucucuggaag

SEQ ID NO: 436478 - RNA, 19 nt, Artificial Sequence
  Description of Artificial Sequence: Synthetic oligonucleotide
  Antisense Strand to SEQ ID NO: 436477
cuuccagagagauaguugc

SEQ ID NO: 436479 - RNA, 19 nt, Artificial Sequence
  Description of Artificial Sequence: Synthetic oligonucleotide
  Sense strand starting at position 1221 of SEQ ID NO: 316737
cauugucaacccgggauaa

SEQ ID NO: 436480 - RNA, 19 nt, Artificial Sequence
  Description of Artificial Sequence: Synthetic oligonucleotide
  Antisense Strand to SEQ ID NO: 436479
uuaucccggguugacaaug

SEQ ID NO: 436481 - RNA, 19 nt, Artificial Sequence
  Description of Artificial Sequence: Synthetic oligonucleotide
  Sense strand starting at position 1222 of SEQ ID NO: 316737
auugucaacccgggauaau

SEQ ID NO: 436482 - RNA, 19 nt, Artificial Sequence
  Description of Artificial Sequence: Synthetic oligonucleotide
  Antisense Strand to SEQ ID NO: 436481
auuaucccggguugacaau

SEQ ID NO: 436483 - RNA, 19 nt, Artificial Sequence
  Description of Artificial Sequence: Synthetic oligonucleotide
  Sense strand starting at position 1223 of SEQ ID NO: 316737
uugucaacccgggauaauc

SEQ ID NO: 436484 - RNA, 19 nt, Artificial Sequence
  Description of Artificial Sequence: Synthetic oligonucleotide
  Antisense Strand to SEQ ID NO: 436483
gauuaucccggguugacaa

SEQ ID NO: 436485 - RNA, 19 nt, Artificial Sequence
  Description of Artificial Sequence: Synthetic oligonucleotide
  Sense strand starting at position 1635 of SEQ ID NO: 316737
gaggccuuuccuuagguua

SEQ ID NO: 436486 - RNA, 19 nt, Artificial Sequence
  Description of Artificial Sequence: Synthetic oligonucleotide
  Antisense Strand to SEQ ID NO: 436485
uaaccuaaggaaaggccuc

SEQ ID NO: 436487 - RNA, 19 nt, Artificial Sequence
  Description of Artificial Sequence: Synthetic oligonucleotide
  Sense strand starting at position 2431 of SEQ ID NO: 316737
ccgguaauuucugucuccu

SEQ ID NO: 436488 - RNA, 19 nt, Artificial Sequence
  Description of Artificial Sequence: Synthetic oligonucleotide
  Antisense Strand to SEQ ID NO: 436487
aggagacagaaauuaccgg

SEQ ID NO: 436489 - RNA, 19 nt, Artificial Sequence
  Description of Artificial Sequence: Synthetic oligonucleotide
  Sense strand starting at position 2433 of SEQ ID NO: 316737
gguaauuucugucuccucu

SEQ ID NO: 436490 - RNA, 19 nt, Artificial Sequence
  Description of Artificial Sequence: Synthetic oligonucleotide
  Antisense Strand to SEQ ID NO: 436489
agaggagacagaaauuacc

SEQ ID NO: 436491 - RNA, 19 nt, Artificial Sequence
  Description of Artificial Sequence: Synthetic oligonucleotide
  Sense strand starting at position 2530 of SEQ ID NO: 316737
ggugccaggcuagaaauaa

SEQ ID NO: 436492 - RNA, 19 nt, Artificial Sequence
  Description of Artificial Sequence: Synthetic oligonucleotide
  Antisense Strand to SEQ ID NO: 436491
uuauuucuagccuggcacc

SEQ ID NO: 436493 - RNA, 19 nt, Artificial Sequence
  Description of Artificial Sequence: Synthetic oligonucleotide
  Sense strand starting at position 2672 of SEQ ID NO: 316737
guagucagagccugacaca

SEQ ID NO: 436494 - RNA, 19 nt, Artificial Sequence
  Description of Artificial Sequence: Synthetic oligonucleotide
  Antisense Strand to SEQ ID NO: 436493
ugugucaggcucugacuac

SEQ ID NO: 436495 - RNA, 19 nt, Artificial Sequence
  Description of Artificial Sequence: Synthetic oligonucleotide
  Sense strand starting at position 2711 of SEQ ID NO: 316737
aucauaguaguguacuuaa

SEQ ID NO: 436496 - RNA, 19 nt, Artificial Sequence
  Description of Artificial Sequence: Synthetic oligonucleotide
  Antisense Strand to SEQ ID NO: 436495
uuaaguacacuacuaugau

SEQ ID NO: 436497 - RNA, 19 nt, Artificial Sequence
  Description of Artificial Sequence: Synthetic oligonucleotide
  Sense strand starting at position 2869 of SEQ ID NO: 316737
agagguccuucugcaaaga

SEQ ID NO: 436498 - RNA, 19 nt, Artificial Sequence
  Description of Artificial Sequence: Synthetic oligonucleotide
  Antisense Strand to SEQ ID NO: 436497
ucuuugcagaaggaccucu

SEQ ID NO: 436499 - RNA, 19 nt, Artificial Sequence
  Description of Artificial Sequence: Synthetic oligonucleotide
  Sense strand starting at position 2882 of SEQ ID NO: 316737
caaagacggcgucaauuaa

SEQ ID NO: 436500 - RNA, 19 nt, Artificial Sequence
  Description of Artificial Sequence: Synthetic oligonucleotide
  Antisense Strand to SEQ ID NO: 436499
uuaauugacgccgucuuug

SEQ ID NO: 436501 - RNA, 19 nt, Artificial Sequence
  Description of Artificial Sequence: Synthetic oligonucleotide
  Sense strand starting at position 2946 of SEQ ID NO: 316737
gaguccuguggugagaacu

SEQ ID NO: 436502 - RNA, 19 nt, Artificial Sequence
  Description of Artificial Sequence: Synthetic oligonucleotide
  Antisense Strand to SEQ ID NO: 436501
aguucucaccacaggacuc

SEQ ID NO: 436503 - RNA, 19 nt, Artificial Sequence
  Description of Artificial Sequence: Synthetic oligonucleotide
  Sense strand starting at position 2952 of SEQ ID NO: 316737
uguggugagaacugguaau

SEQ ID NO: 436504 - RNA, 19 nt, Artificial Sequence
  Description of Artificial Sequence: Synthetic oligonucleotide
  Antisense Strand to SEQ ID NO: 436503
auuaccaguucucaccaca

SEQ ID NO: 436505 - RNA, 19 nt, Artificial Sequence
  Description of Artificial Sequence: Synthetic oligonucleotide
  Sense strand starting at position 2971 of SEQ ID NO: 316737
ggaagagagugcuuguuug

SEQ ID NO: 436506 - RNA, 19 nt, Artificial Sequence
  Description of Artificial Sequence: Synthetic oligonucleotide
  Antisense Strand to SEQ ID NO: 436505
caaacaagcacucucuucc

SEQ ID NO: 436507 - RNA, 19 nt, Artificial Sequence
  Description of Artificial Sequence: Synthetic oligonucleotide
  Sense strand starting at position 3053 of SEQ ID NO: 316737
uggcaaaugccuuaugaaa

SEQ ID NO: 436508 - RNA, 19 nt, Artificial Sequence
  Description of Artificial Sequence: Synthetic oligonucleotide
  Antisense Strand to SEQ ID NO: 436507
uuucauaaggcauuugcca

SEQ ID NO: 436509 - RNA, 19 nt, Artificial Sequence
  Description of Artificial Sequence: Synthetic oligonucleotide
  Sense strand starting at position 3109 of SEQ ID NO: 316737
augguuacgucaauggugu

SEQ ID NO: 436510 - RNA, 19 nt, Artificial Sequence
  Description of Artificial Sequence: Synthetic oligonucleotide
  Antisense Strand to SEQ ID NO: 436509
acaccauugacguaaccau

SEQ ID NO: 436511 - RNA, 19 nt, Artificial Sequence
  Description of Artificial Sequence: Synthetic oligonucleotide
  Sense strand starting at position 3189 of SEQ ID NO: 316737
ugaagcaaacugugaauca

SEQ ID NO: 436512 - RNA, 19 nt, Artificial Sequence
  Description of Artificial Sequence: Synthetic oligonucleotide
  Antisense Strand to SEQ ID NO: 436511
ugauucacaguuugcuuca

SEQ ID NO: 436513 - RNA, 19 nt, Artificial Sequence
  Description of Artificial Sequence: Synthetic oligonucleotide
  Sense strand starting at position 3240 of SEQ ID NO: 316737
cacgacauucugcaucaga

SEQ ID NO: 436514 - RNA, 19 nt, Artificial Sequence
  Description of Artificial Sequence: Synthetic oligonucleotide
  Antisense Strand to SEQ ID NO: 436513
ucugaugcagaaugucgug

SEQ ID NO: 436515 - RNA, 19 nt, Artificial Sequence
  Description of Artificial Sequence: Synthetic oligonucleotide
  Sense strand starting at position 3346 of SEQ ID NO: 316737
ggacuauauucugcacaga

SEQ ID NO: 436516 - RNA, 19 nt, Artificial Sequence
  Description of Artificial Sequence: Synthetic oligonucleotide
  Antisense Strand to SEQ ID NO: 436515
ucugugcagaauauagucc

SEQ ID NO: 436517 - RNA, 19 nt, Artificial Sequence
  Description of Artificial Sequence: Synthetic oligonucleotide
  Sense strand starting at position 3453 of SEQ ID NO: 316737
ucaacaaucccucgggaua

SEQ ID NO: 436518 - RNA, 19 nt, Artificial Sequence
  Description of Artificial Sequence: Synthetic oligonucleotide
  Antisense Strand to SEQ ID NO: 436517
uaucccgagggauuguuga

SEQ ID NO: 436519 - RNA, 19 nt, Artificial Sequence
  Description of Artificial Sequence: Synthetic oligonucleotide
  Sense strand starting at position 3454 of SEQ ID NO: 316737
caacaaucccucgggauag

SEQ ID NO: 436520 - RNA, 19 nt, Artificial Sequence
  Description of Artificial Sequence: Synthetic oligonucleotide
  Antisense Strand to SEQ ID NO: 436519
cuaucccgagggauuguug

SEQ ID NO: 436521 - RNA, 19 nt, Artificial Sequence
  Description of Artificial Sequence: Synthetic oligonucleotide
  Sense strand starting at position 3504 of SEQ ID NO: 316737
gagguuaaggccgaguuua

SEQ ID NO: 436522 - RNA, 19 nt, Artificial Sequence
  Description of Artificial Sequence: Synthetic oligonucleotide
  Antisense Strand to SEQ ID NO: 436521
uaaacucggccuuaaccuc

SEQ ID NO: 436523 - RNA, 19 nt, Artificial Sequence
  Description of Artificial Sequence: Synthetic oligonucleotide
  Sense strand starting at position 3515 of SEQ ID NO: 316737
cgaguuuaaagagguuaag

SEQ ID NO: 436524 - RNA, 19 nt, Artificial Sequence
  Description of Artificial Sequence: Synthetic oligonucleotide
  Antisense Strand to SEQ ID NO: 436523
cuuaaccucuuuaaacucg

SEQ ID NO: 436525 - RNA, 19 nt, Artificial Sequence
  Description of Artificial Sequence: Synthetic oligonucleotide
  Sense strand starting at position 3840 of SEQ ID NO: 316737
aguaguuugcuguugcuaa

SEQ ID NO: 436526 - RNA, 19 nt, Artificial Sequence
  Description of Artificial Sequence: Synthetic oligonucleotide
  Antisense Strand to SEQ ID NO: 436525
uuagcaacagcaaacuacu

SEQ ID NO: 436527 - RNA, 19 nt, Artificial Sequence
  Description of Artificial Sequence: Synthetic oligonucleotide
  Sense strand starting at position 3921 of SEQ ID NO: 316737
uccugaauugagugaacac

SEQ ID NO: 436528 - RNA, 19 nt, Artificial Sequence
  Description of Artificial Sequence: Synthetic oligonucleotide
  Antisense Strand to SEQ ID NO: 436527
guguucacucaauucagga

SEQ ID NO: 436529 - RNA, 19 nt, Artificial Sequence
  Description of Artificial Sequence: Synthetic oligonucleotide
  Sense strand starting at position 3928 of SEQ ID NO: 316737
uugagugaacaccaauguu

SEQ ID NO: 436530 - RNA, 19 nt, Artificial Sequence
  Description of Artificial Sequence: Synthetic oligonucleotide
  Antisense Strand to SEQ ID NO: 436529
aacauugguguucacucaa

SEQ ID NO: 436531 - RNA, 19 nt, Artificial Sequence
  Description of Artificial Sequence: Synthetic oligonucleotide
  Sense strand starting at position 3931 of SEQ ID NO: 316737
agugaacaccaauguuuga

SEQ ID NO: 436532 - RNA, 19 nt, Artificial Sequence
  Description of Artificial Sequence: Synthetic oligonucleotide
  Antisense Strand to SEQ ID NO: 436531
ucaaacauugguguucacu

SEQ ID NO: 436533 - RNA, 19 nt, Artificial Sequence
  Description of Artificial Sequence: Synthetic oligonucleotide
  Sense strand starting at position 133 of SEQ ID NO: 316738
ucuuccuuugcaggauaau

SEQ ID NO: 436534 - RNA, 19 nt, Artificial Sequence
  Description of Artificial Sequence: Synthetic oligonucleotide
  Antisense Strand to SEQ ID NO: 436533
auuauccugcaaaggaaga

SEQ ID NO: 436535 - RNA, 19 nt, Artificial Sequence
  Description of Artificial Sequence: Synthetic oligonucleotide
  Sense strand starting at position 134 of SEQ ID NO: 316738
cuuccuuugcaggauaaug

SEQ ID NO: 436536 - RNA, 19 nt, Artificial Sequence
  Description of Artificial Sequence: Synthetic oligonucleotide
  Antisense Strand to SEQ ID NO: 436535
cauuauccugcaaaggaag

SEQ ID NO: 436537 - RNA, 19 nt, Artificial Sequence
  Description of Artificial Sequence: Synthetic oligonucleotide
  Sense strand starting at position 136 of SEQ ID NO: 316738
uccuuugcaggauaaugua

SEQ ID NO: 436538 - RNA, 19 nt, Artificial Sequence
  Description of Artificial Sequence: Synthetic oligonucleotide
  Antisense Strand to SEQ ID NO: 436537
uacauuauccugcaaagga

SEQ ID NO: 436539 - RNA, 19 nt, Artificial Sequence
  Description of Artificial Sequence: Synthetic oligonucleotide
  Sense strand starting at position 173 of SEQ ID NO: 316738
cuuaaaucagcuuagguuu

SEQ ID NO: 436540 - RNA, 19 nt, Artificial Sequence
  Description of Artificial Sequence: Synthetic oligonucleotide
  Antisense Strand to SEQ ID NO: 436539
aaaccuaagcugauuuaag

SEQ ID NO: 436541 - RNA, 19 nt, Artificial Sequence
  Description of Artificial Sequence: Synthetic oligonucleotide
  Sense strand starting at position 447 of SEQ ID NO: 316738
ccggcuaccuuucuaaacu

SEQ ID NO: 436542 - RNA, 19 nt, Artificial Sequence
  Description of Artificial Sequence: Synthetic oligonucleotide
  Antisense Strand to SEQ ID NO: 436541
aguuuagaaagguagccgg

SEQ ID NO: 436543 - RNA, 19 nt, Artificial Sequence
  Description of Artificial Sequence: Synthetic oligonucleotide
  Sense strand starting at position 481 of SEQ ID NO: 316738
aacgacuucggucauucua

SEQ ID NO: 436544 - RNA, 19 nt, Artificial Sequence
  Description of Artificial Sequence: Synthetic oligonucleotide
  Antisense Strand to SEQ ID NO: 436543
uagaaugaccgaagucguu

SEQ ID NO: 436545 - RNA, 19 nt, Artificial Sequence
  Description of Artificial Sequence: Synthetic oligonucleotide
  Sense strand starting at position 566 of SEQ ID NO: 316738
uuaguaacccuauguagag

SEQ ID NO: 436546 - RNA, 19 nt, Artificial Sequence
  Description of Artificial Sequence: Synthetic oligonucleotide
  Antisense Strand to SEQ ID NO: 436545
cucuacauaggguuacuaa

SEQ ID NO: 436547 - RNA, 19 nt, Artificial Sequence
  Description of Artificial Sequence: Synthetic oligonucleotide
  Sense strand starting at position 717 of SEQ ID NO: 316738
ggacaaggcuaccuaucua

SEQ ID NO: 436548 - RNA, 19 nt, Artificial Sequence
  Description of Artificial Sequence: Synthetic oligonucleotide
  Antisense Strand to SEQ ID NO: 436547
uagauagguagccuugucc

SEQ ID NO: 436549 - RNA, 19 nt, Artificial Sequence
  Description of Artificial Sequence: Synthetic oligonucleotide
  Sense strand starting at position 1048 of SEQ ID NO: 316738
uaguuaggcuggucgagaa

SEQ ID NO: 436550 - RNA, 19 nt, Artificial Sequence
  Description of Artificial Sequence: Synthetic oligonucleotide
  Antisense Strand to SEQ ID NO: 436549
uucucgaccagccuaacua

SEQ ID NO: 436551 - RNA, 19 nt, Artificial Sequence
  Description of Artificial Sequence: Synthetic oligonucleotide
  Sense strand starting at position 1196 of SEQ ID NO: 316738
guuucuaaacuuuaccagu

SEQ ID NO: 436552 - RNA, 19 nt, Artificial Sequence
  Description of Artificial Sequence: Synthetic oligonucleotide
  Antisense Strand to SEQ ID NO: 436551
acugguaaaguuuagaaac

SEQ ID NO: 436553 - RNA, 19 nt, Artificial Sequence
  Description of Artificial Sequence: Synthetic oligonucleotide
  Sense strand starting at position 1243 of SEQ ID NO: 316738
aguugauuacuuugcagaa

SEQ ID NO: 436554 - RNA, 19 nt, Artificial Sequence
  Description of Artificial Sequence: Synthetic oligonucleotide
  Antisense Strand to SEQ ID NO: 436553
uucugcaaaguaaucaacu

SEQ ID NO: 436555 - RNA, 19 nt, Artificial Sequence
  Description of Artificial Sequence: Synthetic oligonucleotide
  Sense strand starting at position 1244 of SEQ ID NO: 316738
guugauuacuuugcagaaa

SEQ ID NO: 436556 - RNA, 19 nt, Artificial Sequence
  Description of Artificial Sequence: Synthetic oligonucleotide
  Antisense Strand to SEQ ID NO: 436555
uuucugcaaaguaaucaac

SEQ ID NO: 436557 - RNA, 19 nt, Artificial Sequence
  Description of Artificial Sequence: Synthetic oligonucleotide
  Sense strand starting at position 1301 of SEQ ID NO: 316738
gcagguuuccuggaugaag

SEQ ID NO: 436558 - RNA, 19 nt, Artificial Sequence
  Description of Artificial Sequence: Synthetic oligonucleotide
  Antisense Strand to SEQ ID NO: 436557
cuucauccaggaaaccugc

SEQ ID NO: 436559 - RNA, 19 nt, Artificial Sequence
  Description of Artificial Sequence: Synthetic oligonucleotide
  Sense strand starting at position 1426 of SEQ ID NO: 316738
ucauuaugacucggcggaa

SEQ ID NO: 436560 - RNA, 19 nt, Artificial Sequence
  Description of Artificial Sequence: Synthetic oligonucleotide
  Antisense Strand to SEQ ID NO: 436559
uuccgccgagucauaauga

SEQ ID NO: 436561 - RNA, 19 nt, Artificial Sequence
  Description of Artificial Sequence: Synthetic oligonucleotide
  Sense strand starting at position 1429 of SEQ ID NO: 316738
uuaugacucggcggaacaa

SEQ ID NO: 436562 - RNA, 19 nt, Artificial Sequence
  Description of Artificial Sequence: Synthetic oligonucleotide
  Antisense Strand to SEQ ID NO: 436561
uuguuccgccgagucauaa

SEQ ID NO: 436563 - RNA, 19 nt, Artificial Sequence
  Description of Artificial Sequence: Synthetic oligonucleotide
  Sense strand starting at position 2088 of SEQ ID NO: 316738
ugguccuucccagaguuaa

SEQ ID NO: 436564 - RNA, 19 nt, Artificial Sequence
  Description of Artificial Sequence: Synthetic oligonucleotide
  Antisense Strand to SEQ ID NO: 436563
uuaacucugggaaggacca

SEQ ID NO: 436565 - RNA, 19 nt, Artificial Sequence
  Description of Artificial Sequence: Synthetic oligonucleotide
  Sense strand starting at position 2101 of SEQ ID NO: 316738
aguuaaagcuccucccagu

SEQ ID NO: 436566 - RNA, 19 nt, Artificial Sequence
  Description of Artificial Sequence: Synthetic oligonucleotide
  Antisense Strand to SEQ ID NO: 436565
acugggaggagcuuuaacu

SEQ ID NO: 436567 - RNA, 19 nt, Artificial Sequence
  Description of Artificial Sequence: Synthetic oligonucleotide
  Sense strand starting at position 2344 of SEQ ID NO: 316738
guacuuucuagagguacag

SEQ ID NO: 436568 - RNA, 19 nt, Artificial Sequence
  Description of Artificial Sequence: Synthetic oligonucleotide
  Antisense Strand to SEQ ID NO: 436567
cuguaccucuagaaaguac

SEQ ID NO: 436569 - RNA, 19 nt, Artificial Sequence
  Description of Artificial Sequence: Synthetic oligonucleotide
  Sense strand starting at position 2386 of SEQ ID NO: 316738
agcagauacugccuguauu

SEQ ID NO: 436570 - RNA, 19 nt, Artificial Sequence
  Description of Artificial Sequence: Synthetic oligonucleotide
  Antisense Strand to SEQ ID NO: 436569
aauacaggcaguaucugcu

SEQ ID NO: 436571 - RNA, 19 nt, Artificial Sequence
  Description of Artificial Sequence: Synthetic oligonucleotide
  Sense strand starting at position 2387 of SEQ ID NO: 316738
gcagauacugccuguauuu

SEQ ID NO: 436572 - RNA, 19 nt, Artificial Sequence
  Description of Artificial Sequence: Synthetic oligonucleotide
  Antisense Strand to SEQ ID NO: 436571
aaauacaggcaguaucugc

SEQ ID NO: 436573 - RNA, 19 nt, Artificial Sequence
  Description of Artificial Sequence: Synthetic oligonucleotide
  Sense strand starting at position 2578 of SEQ ID NO: 316738
ccauaagcccuguaugugu

SEQ ID NO: 436574 - RNA, 19 nt, Artificial Sequence
  Description of Artificial Sequence: Synthetic oligonucleotide
  Antisense Strand to SEQ ID NO: 436573
acacauacagggcuuaugg

SEQ ID NO: 436575 - RNA, 19 nt, Artificial Sequence
  Description of Artificial Sequence: Synthetic oligonucleotide
  Sense strand starting at position 2591 of SEQ ID NO: 316738
auguguuuggacuguucca

SEQ ID NO: 436576 - RNA, 19 nt, Artificial Sequence
  Description of Artificial Sequence: Synthetic oligonucleotide
  Antisense Strand to SEQ ID NO: 436575
uggaacaguccaaacacau

SEQ ID NO: 436577 - RNA, 19 nt, Artificial Sequence
  Description of Artificial Sequence: Synthetic oligonucleotide
  Sense strand starting at position 2642 of SEQ ID NO: 316738
gccucccuauuccuggaaa

SEQ ID NO: 436578 - RNA, 19 nt, Artificial Sequence
  Description of Artificial Sequence: Synthetic oligonucleotide
  Antisense Strand to SEQ ID NO: 436577
uuuccaggaauagggaggc

SEQ ID NO: 436579 - RNA, 19 nt, Artificial Sequence
  Description of Artificial Sequence: Synthetic oligonucleotide
  Sense strand starting at position 2700 of SEQ ID NO: 316738
gccucuaaguguccaaaug

SEQ ID NO: 436580 - RNA, 19 nt, Artificial Sequence
  Description of Artificial Sequence: Synthetic oligonucleotide
  Antisense Strand to SEQ ID NO: 436579
cauuuggacacuuagaggc

SEQ ID NO: 436581 - RNA, 19 nt, Artificial Sequence
  Description of Artificial Sequence: Synthetic oligonucleotide
  Sense strand starting at position 2755 of SEQ ID NO: 316738
augauuaaguuagugagga

SEQ ID NO: 436582 - RNA, 19 nt, Artificial Sequence
  Description of Artificial Sequence: Synthetic oligonucleotide
  Antisense Strand to SEQ ID NO: 436581
uccucacuaacuuaaucau

SEQ ID NO: 436583 - RNA, 19 nt, Artificial Sequence
  Description of Artificial Sequence: Synthetic oligonucleotide
  Sense strand starting at position 2772 of SEQ ID NO: 316738
gaaguaauguugguaggca

SEQ ID NO: 436584 - RNA, 19 nt, Artificial Sequence
  Description of Artificial Sequence: Synthetic oligonucleotide
  Antisense Strand to SEQ ID NO: 436583
ugccuaccaacauuacuuc

SEQ ID NO: 436585 - RNA, 19 nt, Artificial Sequence
  Description of Artificial Sequence: Synthetic oligonucleotide
  Sense strand starting at position 2776 of SEQ ID NO: 316738
uaauguugguaggcagaaa

SEQ ID NO: 436586 - RNA, 19 nt, Artificial Sequence
  Description of Artificial Sequence: Synthetic oligonucleotide
  Antisense Strand to SEQ ID NO: 436585
uuucugccuaccaacauua

SEQ ID NO: 436587 - RNA, 19 nt, Artificial Sequence
  Description of Artificial Sequence: Synthetic oligonucleotide
  Sense strand starting at position 2950 of SEQ ID NO: 316738
gaaaguucuaguuggucug

SEQ ID NO: 436588 - RNA, 19 nt, Artificial Sequence
  Description of Artificial Sequence: Synthetic oligonucleotide
  Antisense Strand to SEQ ID NO: 436587
cagaccaacuagaacuuuc

SEQ ID NO: 436589 - RNA, 19 nt, Artificial Sequence
  Description of Artificial Sequence: Synthetic oligonucleotide
  Sense strand starting at position 2953 of SEQ ID NO: 316738
aguucuaguuggucuggau

SEQ ID NO: 436590 - RNA, 19 nt, Artificial Sequence
  Description of Artificial Sequence: Synthetic oligonucleotide
  Antisense Strand to SEQ ID NO: 436589
auccagaccaacuagaacu

SEQ ID NO: 436591 - RNA, 19 nt, Artificial Sequence
  Description of Artificial Sequence: Synthetic oligonucleotide
  Sense strand starting at position 2957 of SEQ ID NO: 316738
cuaguuggucuggauagaa

SEQ ID NO: 436592 - RNA, 19 nt, Artificial Sequence
  Description of Artificial Sequence: Synthetic oligonucleotide
  Antisense Strand to SEQ ID NO: 436591
uucuauccagaccaacuag

SEQ ID NO: 436593 - RNA, 19 nt, Artificial Sequence
  Description of Artificial Sequence: Synthetic oligonucleotide
  Sense strand starting at position 3099 of SEQ ID NO: 316738
agaggaugguuccugaggu

SEQ ID NO: 436594 - RNA, 19 nt, Artificial Sequence
  Description of Artificial Sequence: Synthetic oligonucleotide
  Antisense Strand to SEQ ID NO: 436593
accucaggaaccauccucu

SEQ ID NO: 436595 - RNA, 19 nt, Artificial Sequence
  Description of Artificial Sequence: Synthetic oligonucleotide
  Sense strand starting at position 3185 of SEQ ID NO: 316738
ugcaucagguuauccagau

SEQ ID NO: 436596 - RNA, 19 nt, Artificial Sequence
  Description of Artificial Sequence: Synthetic oligonucleotide
  Antisense Strand to SEQ ID NO: 436595
aucuggauaaccugaugca

SEQ ID NO: 436597 - RNA, 19 nt, Artificial Sequence
  Description of Artificial Sequence: Synthetic oligonucleotide
  Sense strand starting at position 3186 of SEQ ID NO: 316738
gcaucagguuauccagauc

SEQ ID NO: 436598 - RNA, 19 nt, Artificial Sequence
  Description of Artificial Sequence: Synthetic oligonucleotide
  Antisense Strand to SEQ ID NO: 436597
gaucuggauaaccugaugc

SEQ ID NO: 436599 - RNA, 19 nt, Artificial Sequence
  Description of Artificial Sequence: Synthetic oligonucleotide
  Sense strand starting at position 3381 of SEQ ID NO: 316738
ccaccauguccagguuaau

SEQ ID NO: 436600 - RNA, 19 nt, Artificial Sequence
  Description of Artificial Sequence: Synthetic oligonucleotide
  Antisense Strand to SEQ ID NO: 436599
auuaaccuggacauggugg

SEQ ID NO: 436601 - RNA, 19 nt, Artificial Sequence
  Description of Artificial Sequence: Synthetic oligonucleotide
  Sense strand starting at position 3573 of SEQ ID NO: 316738
ggaagaagauuccaucuaa

SEQ ID NO: 436602 - RNA, 19 nt, Artificial Sequence
  Description of Artificial Sequence: Synthetic oligonucleotide
  Antisense Strand to SEQ ID NO: 436601
uuagauggaaucuucuucc

SEQ ID NO: 436603 - RNA, 19 nt, Artificial Sequence
  Description of Artificial Sequence: Synthetic oligonucleotide
  Sense strand starting at position 3795 of SEQ ID NO: 316738
uacagcauggcuuagagaa

SEQ ID NO: 436604 - RNA, 19 nt, Artificial Sequence
  Description of Artificial Sequence: Synthetic oligonucleotide
  Antisense Strand to SEQ ID NO: 436603
uucucuaagccaugcugua

SEQ ID NO: 436605 - RNA, 19 nt, Artificial Sequence
  Description of Artificial Sequence: Synthetic oligonucleotide
  Sense strand starting at position 3832 of SEQ ID NO: 316738
gagcucuagugcucagaag

SEQ ID NO: 436606 - RNA, 19 nt, Artificial Sequence
  Description of Artificial Sequence: Synthetic oligonucleotide
  Antisense Strand to SEQ ID NO: 436605
cuucugagcacuagagcuc

SEQ ID NO: 436607 - RNA, 19 nt, Artificial Sequence
  Description of Artificial Sequence: Synthetic oligonucleotide
  Sense strand starting at position 3907 of SEQ ID NO: 316738
uucugauagagauguacag

SEQ ID NO: 436608 - RNA, 19 nt, Artificial Sequence
  Description of Artificial Sequence: Synthetic oligonucleotide
  Antisense Strand to SEQ ID NO: 436607
cuguacaucucuaucagaa

SEQ ID NO: 436609 - RNA, 19 nt, Artificial Sequence
  Description of Artificial Sequence: Synthetic oligonucleotide
  Sense strand starting at position 3934 of SEQ ID NO: 316738
gcuguuaucgugcuugcua

SEQ ID NO: 436610 - RNA, 19 nt, Artificial Sequence
  Description of Artificial Sequence: Synthetic oligonucleotide
  Antisense Strand to SEQ ID NO: 436609
uagcaagcacgauaacagc

SEQ ID NO: 436611 - RNA, 19 nt, Artificial Sequence
  Description of Artificial Sequence: Synthetic oligonucleotide
  Sense strand starting at position 3937 of SEQ ID NO: 316738
guuaucgugcuugcuaaca

SEQ ID NO: 436612 - RNA, 19 nt, Artificial Sequence
  Description of Artificial Sequence: Synthetic oligonucleotide
  Antisense Strand to SEQ ID NO: 436611
uguuagcaagcacgauaac

SEQ ID NO: 436613 - RNA, 19 nt, Artificial Sequence
  Description of Artificial Sequence: Synthetic oligonucleotide
  Sense strand starting at position 175 of SEQ ID NO: 316739
ucugucugaccuugauaaa

SEQ ID NO: 436614 - RNA, 19 nt, Artificial Sequence
  Description of Artificial Sequence: Synthetic oligonucleotide
  Antisense Strand to SEQ ID NO: 436613
uuuaucaaggucagacaga

SEQ ID NO: 436615 - RNA, 19 nt, Artificial Sequence
  Description of Artificial Sequence: Synthetic oligonucleotide
  Sense strand starting at position 176 of SEQ ID NO: 316739
cugucugaccuugauaaau

SEQ ID NO: 436616 - RNA, 19 nt, Artificial Sequence
  Description of Artificial Sequence: Synthetic oligonucleotide
  Antisense Strand to SEQ ID NO: 436615
auuuaucaaggucagacag

SEQ ID NO: 436617 - RNA, 19 nt, Artificial Sequence
  Description of Artificial Sequence: Synthetic oligonucleotide
  Sense strand starting at position 178 of SEQ ID NO: 316739
gucugaccuugauaaauau

SEQ ID NO: 436618 - RNA, 19 nt, Artificial Sequence
  Description of Artificial Sequence: Synthetic oligonucleotide
  Antisense Strand to SEQ ID NO: 436617
auauuuaucaaggucagac

SEQ ID NO: 436619 - RNA, 19 nt, Artificial Sequence
  Description of Artificial Sequence: Synthetic oligonucleotide
  Sense strand starting at position 215 of SEQ ID NO: 316739
ccaucaagccuuuggaaac

SEQ ID NO: 436620 - RNA, 19 nt, Artificial Sequence
  Description of Artificial Sequence: Synthetic oligonucleotide
  Antisense Strand to SEQ ID NO: 436619
guuuccaaaggcuugaugg

SEQ ID NO: 436621 - RNA, 19 nt, Artificial Sequence
  Description of Artificial Sequence: Synthetic oligonucleotide
  Sense strand starting at position 352 of SEQ ID NO: 316739
gaagacuuguguccacaac

SEQ ID NO: 436622 - RNA, 19 nt, Artificial Sequence
  Description of Artificial Sequence: Synthetic oligonucleotide
  Antisense Strand to SEQ ID NO: 436621
guuguggacacaagucuuc

SEQ ID NO: 436623 - RNA, 19 nt, Artificial Sequence
  Description of Artificial Sequence: Synthetic oligonucleotide
  Sense strand starting at position 464 of SEQ ID NO: 316739
uuguuagaaugguaaggaa

SEQ ID NO: 436624 - RNA, 19 nt, Artificial Sequence
  Description of Artificial Sequence: Synthetic oligonucleotide
  Antisense Strand to SEQ ID NO: 436623
uuccuuaccauucuaacaa

SEQ ID NO: 436625 - RNA, 19 nt, Artificial Sequence
  Description of Artificial Sequence: Synthetic oligonucleotide
  Sense strand starting at position 467 of SEQ ID NO: 316739
uuagaaugguaaggaauau

SEQ ID NO: 436626 - RNA, 19 nt, Artificial Sequence
  Description of Artificial Sequence: Synthetic oligonucleotide
  Antisense Strand to SEQ ID NO: 436625
auauuccuuaccauucuaa

SEQ ID NO: 436627 - RNA, 19 nt, Artificial Sequence
  Description of Artificial Sequence: Synthetic oligonucleotide
  Sense strand starting at position 473 of SEQ ID NO: 316739
ugguaaggaauaugagcuu

SEQ ID NO: 436628 - RNA, 19 nt, Artificial Sequence
  Description of Artificial Sequence: Synthetic oligonucleotide
  Antisense Strand to SEQ ID NO: 436627
aagcucauauuccuuacca

SEQ ID NO: 436629 - RNA, 19 nt, Artificial Sequence
  Description of Artificial Sequence: Synthetic oligonucleotide
  Sense strand starting at position 822 of SEQ ID NO: 316739
ccucccugauaguaaauga

SEQ ID NO: 436630 - RNA, 19 nt, Artificial Sequence
  Description of Artificial Sequence: Synthetic oligonucleotide
  Antisense Strand to SEQ ID NO: 436629
ucauuuacuaucagggagg

SEQ ID NO: 436631 - RNA, 19 nt, Artificial Sequence
  Description of Artificial Sequence: Synthetic oligonucleotide
  Sense strand starting at position 852 of SEQ ID NO: 316739
guccauucuggugauuaaa

SEQ ID NO: 436632 - RNA, 19 nt, Artificial Sequence
  Description of Artificial Sequence: Synthetic oligonucleotide
  Antisense Strand to SEQ ID NO: 436631
uuuaaucaccagaauggac

SEQ ID NO: 436633 - RNA, 19 nt, Artificial Sequence
  Description of Artificial Sequence: Synthetic oligonucleotide
  Sense strand starting at position 854 of SEQ ID NO: 316739
ccauucuggugauuaaaca

SEQ ID NO: 436634 - RNA, 19 nt, Artificial Sequence
  Description of Artificial Sequence: Synthetic oligonucleotide
  Antisense Strand to SEQ ID NO: 436633
uguuuaaucaccagaaugg

SEQ ID NO: 436635 - RNA, 19 nt, Artificial Sequence
  Description of Artificial Sequence: Synthetic oligonucleotide
  Sense strand starting at position 950 of SEQ ID NO: 316739
ucauaauaagccggaaaua

SEQ ID NO: 436636 - RNA, 19 nt, Artificial Sequence
  Description of Artificial Sequence: Synthetic oligonucleotide
  Antisense Strand to SEQ ID NO: 436635
uauuuccggcuuauuauga

SEQ ID NO: 436637 - RNA, 19 nt, Artificial Sequence
  Description of Artificial Sequence: Synthetic oligonucleotide
  Sense strand starting at position 1432 of SEQ ID NO: 316739
ggcauucugcgaggcauag

SEQ ID NO: 436638 - RNA, 19 nt, Artificial Sequence
  Description of Artificial Sequence: Synthetic oligonucleotide
  Antisense Strand to SEQ ID NO: 436637
cuaugccucgcagaaugcc

SEQ ID NO: 436639 - RNA, 19 nt, Artificial Sequence
  Description of Artificial Sequence: Synthetic oligonucleotide
  Sense strand starting at position 1458 of SEQ ID NO: 316739
gcggguuucugcacgagac

SEQ ID NO: 436640 - RNA, 19 nt, Artificial Sequence
  Description of Artificial Sequence: Synthetic oligonucleotide
  Antisense Strand to SEQ ID NO: 436639
gucucgugcagaaacccgc

SEQ ID NO: 436641 - RNA, 19 nt, Artificial Sequence
  Description of Artificial Sequence: Synthetic oligonucleotide
  Sense strand starting at position 1779 of SEQ ID NO: 316739
gucacaaacucggaggaaa

SEQ ID NO: 436642 - RNA, 19 nt, Artificial Sequence
  Description of Artificial Sequence: Synthetic oligonucleotide
  Antisense Strand to SEQ ID NO: 436641
uuuccuccgaguuugugac

SEQ ID NO: 436643 - RNA, 19 nt, Artificial Sequence
  Description of Artificial Sequence: Synthetic oligonucleotide
  Sense strand starting at position 2092 of SEQ ID NO: 316739
accuguagucuugacgcau

SEQ ID NO: 436644 - RNA, 19 nt, Artificial Sequence
  Description of Artificial Sequence: Synthetic oligonucleotide
  Antisense Strand to SEQ ID NO: 436643
augcgucaagacuacaggu

SEQ ID NO: 436645 - RNA, 19 nt, Artificial Sequence
  Description of Artificial Sequence: Synthetic oligonucleotide
  Sense strand starting at position 2096 of SEQ ID NO: 316739
guagucuugacgcaugaga

SEQ ID NO: 436646 - RNA, 19 nt, Artificial Sequence
  Description of Artificial Sequence: Synthetic oligonucleotide
  Antisense Strand to SEQ ID NO: 436645
ucucaugcgucaagacuac

SEQ ID NO: 436647 - RNA, 19 nt, Artificial Sequence
  Description of Artificial Sequence: Synthetic oligonucleotide
  Sense strand starting at position 2187 of SEQ ID NO: 316739
ggucauaucagucgggauu

SEQ ID NO: 436648 - RNA, 19 nt, Artificial Sequence
  Description of Artificial Sequence: Synthetic oligonucleotide
  Antisense Strand to SEQ ID NO: 436647
aaucccgacugauaugacc

SEQ ID NO: 436649 - RNA, 19 nt, Artificial Sequence
  Description of Artificial Sequence: Synthetic oligonucleotide
  Sense strand starting at position 2188 of SEQ ID NO: 316739
gucauaucagucgggauuc

SEQ ID NO: 436650 - RNA, 19 nt, Artificial Sequence
  Description of Artificial Sequence: Synthetic oligonucleotide
  Antisense Strand to SEQ ID NO: 436649
gaaucccgacugauaugac

SEQ ID NO: 436651 - RNA, 19 nt, Artificial Sequence
  Description of Artificial Sequence: Synthetic oligonucleotide
  Sense strand starting at position 2190 of SEQ ID NO: 316739
cauaucagucgggauucga

SEQ ID NO: 436652 - RNA, 19 nt, Artificial Sequence
  Description of Artificial Sequence: Synthetic oligonucleotide
  Antisense Strand to SEQ ID NO: 436651
ucgaaucccgacugauaug

SEQ ID NO: 436653 - RNA, 19 nt, Artificial Sequence
  Description of Artificial Sequence: Synthetic oligonucleotide
  Sense strand starting at position 2263 of SEQ ID NO: 316739
cugggcuuucccuggcaaa

SEQ ID NO: 436654 - RNA, 19 nt, Artificial Sequence
  Description of Artificial Sequence: Synthetic oligonucleotide
  Antisense Strand to SEQ ID NO: 436653
uuugccagggaaagcccag

SEQ ID NO: 436655 - RNA, 19 nt, Artificial Sequence
  Description of Artificial Sequence: Synthetic oligonucleotide
  Sense strand starting at position 2504 of SEQ ID NO: 316739
accauucaucgcgaagggu

SEQ ID NO: 436656 - RNA, 19 nt, Artificial Sequence
  Description of Artificial Sequence: Synthetic oligonucleotide
  Antisense Strand to SEQ ID NO: 436655
acccuucgcgaugaauggu

SEQ ID NO: 436657 - RNA, 19 nt, Artificial Sequence
  Description of Artificial Sequence: Synthetic oligonucleotide
  Sense strand starting at position 2512 of SEQ ID NO: 316739
ucgcgaagggugucgugaa

SEQ ID NO: 436658 - RNA, 19 nt, Artificial Sequence
  Description of Artificial Sequence: Synthetic oligonucleotide
  Antisense Strand to SEQ ID NO: 436657
uucacgacacccuucgcga

SEQ ID NO: 436659 - RNA, 19 nt, Artificial Sequence
  Description of Artificial Sequence: Synthetic oligonucleotide
  Sense strand starting at position 2519 of SEQ ID NO: 316739
gggugucgugaagaugaau

SEQ ID NO: 436660 - RNA, 19 nt, Artificial Sequence
  Description of Artificial Sequence: Synthetic oligonucleotide
  Antisense Strand to SEQ ID NO: 436659
auucaucuucacgacaccc

SEQ ID NO: 436661 - RNA, 19 nt, Artificial Sequence
  Description of Artificial Sequence: Synthetic oligonucleotide
  Sense strand starting at position 2530 of SEQ ID NO: 316739
agaugaaugcccugucgaa

SEQ ID NO: 436662 - RNA, 19 nt, Artificial Sequence
  Description of Artificial Sequence: Synthetic oligonucleotide
  Antisense Strand to SEQ ID NO: 436661
uucgacagggcauucaucu

SEQ ID NO: 436663 - RNA, 19 nt, Artificial Sequence
  Description of Artificial Sequence: Synthetic oligonucleotide
  Sense strand starting at position 2584 of SEQ ID NO: 316739
augauugaauagucuugca

SEQ ID NO: 436664 - RNA, 19 nt, Artificial Sequence
  Description of Artificial Sequence: Synthetic oligonucleotide
  Antisense Strand to SEQ ID NO: 436663
ugcaagacuauucaaucau

SEQ ID NO: 436665 - RNA, 19 nt, Artificial Sequence
  Description of Artificial Sequence: Synthetic oligonucleotide
  Sense strand starting at position 2592 of SEQ ID NO: 316739
auagucuugcaagaucuau

SEQ ID NO: 436666 - RNA, 19 nt, Artificial Sequence
  Description of Artificial Sequence: Synthetic oligonucleotide
  Antisense Strand to SEQ ID NO: 436665
auagaucuugcaagacuau

SEQ ID NO: 436667 - RNA, 19 nt, Artificial Sequence
  Description of Artificial Sequence: Synthetic oligonucleotide
  Sense strand starting at position 2598 of SEQ ID NO: 316739
uugcaagaucuaugaaaca

SEQ ID NO: 436668 - RNA, 19 nt, Artificial Sequence
  Description of Artificial Sequence: Synthetic oligonucleotide
  Antisense Strand to SEQ ID NO: 436667
uguuucauagaucuugcaa

SEQ ID NO: 436669 - RNA, 19 nt, Artificial Sequence
  Description of Artificial Sequence: Synthetic oligonucleotide
  Sense strand starting at position 2670 of SEQ ID NO: 316739
uguacugggugcucugaga

SEQ ID NO: 436670 - RNA, 19 nt, Artificial Sequence
  Description of Artificial Sequence: Synthetic oligonucleotide
  Antisense Strand to SEQ ID NO: 436669
ucucagagcacccaguaca

SEQ ID NO: 436671 - RNA, 19 nt, Artificial Sequence
  Description of Artificial Sequence: Synthetic oligonucleotide
  Sense strand starting at position 2679 of SEQ ID NO: 316739
ugcucugagaguuaauaag

SEQ ID NO: 436672 - RNA, 19 nt, Artificial Sequence
  Description of Artificial Sequence: Synthetic oligonucleotide
  Antisense Strand to SEQ ID NO: 436671
cuuauuaacucucagagca

SEQ ID NO: 436673 - RNA, 19 nt, Artificial Sequence
  Description of Artificial Sequence: Synthetic oligonucleotide
  Sense strand starting at position 2712 of SEQ ID NO: 316739
guuuguuacaauuauagug

SEQ ID NO: 436674 - RNA, 19 nt, Artificial Sequence
  Description of Artificial Sequence: Synthetic oligonucleotide
  Antisense Strand to SEQ ID NO: 436673
cacuauaauuguaacaaac

SEQ ID NO: 436675 - RNA, 19 nt, Artificial Sequence
  Description of Artificial Sequence: Synthetic oligonucleotide
  Sense strand starting at position 2896 of SEQ ID NO: 316739
acacaagagcuccgagaaa

SEQ ID NO: 436676 - RNA, 19 nt, Artificial Sequence
  Description of Artificial Sequence: Synthetic oligonucleotide
  Antisense Strand to SEQ ID NO: 436675
uuucucggagcucuugugu

SEQ ID NO: 436677 - RNA, 19 nt, Artificial Sequence
  Description of Artificial Sequence: Synthetic oligonucleotide
  Sense strand starting at position 3160 of SEQ ID NO: 316739
uaaauuaggucaguggaaa

SEQ ID NO: 436678 - RNA, 19 nt, Artificial Sequence
  Description of Artificial Sequence: Synthetic oligonucleotide
  Antisense Strand to SEQ ID NO: 436677
uuuccacugaccuaauuua

SEQ ID NO: 436679 - RNA, 19 nt, Artificial Sequence
  Description of Artificial Sequence: Synthetic oligonucleotide
  Sense strand starting at position 3284 of SEQ ID NO: 316739
agugguaauuucuguaaga

SEQ ID NO: 436680 - RNA, 19 nt, Artificial Sequence
  Description of Artificial Sequence: Synthetic oligonucleotide
  Antisense Strand to SEQ ID NO: 436679
ucuuacagaaauuaccacu

SEQ ID NO: 436681 - RNA, 19 nt, Artificial Sequence
  Description of Artificial Sequence: Synthetic oligonucleotide
  Sense strand starting at position 3313 of SEQ ID NO: 316739
cugguuaugcagcagagaa

SEQ ID NO: 436682 - RNA, 19 nt, Artificial Sequence
  Description of Artificial Sequence: Synthetic oligonucleotide
  Antisense Strand to SEQ ID NO: 436681
uucucugcugcauaaccag

SEQ ID NO: 436683 - RNA, 19 nt, Artificial Sequence
  Description of Artificial Sequence: Synthetic oligonucleotide
  Sense strand starting at position 3561 of SEQ ID NO: 316739
ugaggaaauuugggauggu

SEQ ID NO: 436684 - RNA, 19 nt, Artificial Sequence
  Description of Artificial Sequence: Synthetic oligonucleotide
  Antisense Strand to SEQ ID NO: 436683
accaucccaaauuuccuca

SEQ ID NO: 436685 - RNA, 19 nt, Artificial Sequence
  Description of Artificial Sequence: Synthetic oligonucleotide
  Sense strand starting at position 3580 of SEQ ID NO: 316739
gcuauauuauagucagcuu

SEQ ID NO: 436686 - RNA, 19 nt, Artificial Sequence
  Description of Artificial Sequence: Synthetic oligonucleotide
  Antisense Strand to SEQ ID NO: 436685
aagcugacuauaauauagc

SEQ ID NO: 436687 - RNA, 19 nt, Artificial Sequence
  Description of Artificial Sequence: Synthetic oligonucleotide
  Sense strand starting at position 3625 of SEQ ID NO: 316739
ggccuuuaacugcagaagu

SEQ ID NO: 436688 - RNA, 19 nt, Artificial Sequence
  Description of Artificial Sequence: Synthetic oligonucleotide
  Antisense Strand to SEQ ID NO: 436687
acuucugcaguuaaaggcc

SEQ ID NO: 436689 - RNA, 19 nt, Artificial Sequence
  Description of Artificial Sequence: Synthetic oligonucleotide
  Sense strand starting at position 3627 of SEQ ID NO: 316739
ccuuuaacugcagaaguaa

SEQ ID NO: 436690 - RNA, 19 nt, Artificial Sequence
  Description of Artificial Sequence: Synthetic oligonucleotide
  Antisense Strand to SEQ ID NO: 436689
uuacuucugcaguuaaagg

SEQ ID NO: 436691 - RNA, 19 nt, Artificial Sequence
  Description of Artificial Sequence: Synthetic oligonucleotide
  Sense strand starting at position 3655 of SEQ ID NO: 316739
agcugcauuuaagaacuau

SEQ ID NO: 436692 - RNA, 19 nt, Artificial Sequence
  Description of Artificial Sequence: Synthetic oligonucleotide
  Antisense Strand to SEQ ID NO: 436691
auaguucuuaaaugcagcu

SEQ ID NO: 436693 - RNA, 19 nt, Artificial Sequence
  Description of Artificial Sequence: Synthetic oligonucleotide
  Sense strand starting at position 101 of SEQ ID NO: 316740
gguuuauaggaagaguggu

SEQ ID NO: 436694 - RNA, 19 nt, Artificial Sequence
  Description of Artificial Sequence: Synthetic oligonucleotide
  Antisense Strand to SEQ ID NO: 436693
accacucuuccuauaaacc

SEQ ID NO: 436695 - RNA, 19 nt, Artificial Sequence
  Description of Artificial Sequence: Synthetic oligonucleotide
  Sense strand starting at position 107 of SEQ ID NO: 316740
uaggaagagugguccacau

SEQ ID NO: 436696 - RNA, 19 nt, Artificial Sequence
  Description of Artificial Sequence: Synthetic oligonucleotide
  Antisense Strand to SEQ ID NO: 436695
auguggaccacucuuccua

SEQ ID NO: 436697 - RNA, 19 nt, Artificial Sequence
  Description of Artificial Sequence: Synthetic oligonucleotide
  Sense strand starting at position 127 of SEQ ID NO: 316740
uuucuuugccaaggaauau

SEQ ID NO: 436698 - RNA, 19 nt, Artificial Sequence
  Description of Artificial Sequence: Synthetic oligonucleotide
  Antisense Strand to SEQ ID NO: 436697
auauuccuuggcaaagaaa

SEQ ID NO: 436699 - RNA, 19 nt, Artificial Sequence
  Description of Artificial Sequence: Synthetic oligonucleotide
  Sense strand starting at position 182 of SEQ ID NO: 316740
cugugugaucuuggaacaa

SEQ ID NO: 436700 - RNA, 19 nt, Artificial Sequence
  Description of Artificial Sequence: Synthetic oligonucleotide
  Antisense Strand to SEQ ID NO: 436699
uuguuccaagaucacacag

SEQ ID NO: 436701 - RNA, 19 nt, Artificial Sequence
  Description of Artificial Sequence: Synthetic oligonucleotide
  Sense strand starting at position 299 of SEQ ID NO: 316740
gaugaaauguguguaguaa

SEQ ID NO: 436702 - RNA, 19 nt, Artificial Sequence
  Description of Artificial Sequence: Synthetic oligonucleotide
  Antisense Strand to SEQ ID NO: 436701
uuacuacacacauuucauc

SEQ ID NO: 436703 - RNA, 19 nt, Artificial Sequence
  Description of Artificial Sequence: Synthetic oligonucleotide
  Sense strand starting at position 300 of SEQ ID NO: 316740
augaaauguguguaguaaa

SEQ ID NO: 436704 - RNA, 19 nt, Artificial Sequence
  Description of Artificial Sequence: Synthetic oligonucleotide
  Antisense Strand to SEQ ID NO: 436703
uuuacuacacacauuucau

SEQ ID NO: 436705 - RNA, 19 nt, Artificial Sequence
  Description of Artificial Sequence: Synthetic oligonucleotide
  Sense strand starting at position 602 of SEQ ID NO: 316740
acuucuacccaugaguauu

SEQ ID NO: 436706 - RNA, 19 nt, Artificial Sequence
  Description of Artificial Sequence: Synthetic oligonucleotide
  Antisense Strand to SEQ ID NO: 436705
aauacucauggguagaagu

SEQ ID NO: 436707 - RNA, 19 nt, Artificial Sequence
  Description of Artificial Sequence: Synthetic oligonucleotide
  Sense strand starting at position 753 of SEQ ID NO: 316740
uaagguuagugaccaauag

SEQ ID NO: 436708 - RNA, 19 nt, Artificial Sequence
  Description of Artificial Sequence: Synthetic oligonucleotide
  Antisense Strand to SEQ ID NO: 436707
cuauuggucacuaaccuua

SEQ ID NO: 436709 - RNA, 19 nt, Artificial Sequence
  Description of Artificial Sequence: Synthetic oligonucleotide
  Sense strand starting at position 757 of SEQ ID NO: 316740
guuagugaccaauagcuuu

SEQ ID NO: 436710 - RNA, 19 nt, Artificial Sequence
  Description of Artificial Sequence: Synthetic oligonucleotide
  Antisense Strand to SEQ ID NO: 436709
aaagcuauuggucacuaac

SEQ ID NO: 436711 - RNA, 19 nt, Artificial Sequence
  Description of Artificial Sequence: Synthetic oligonucleotide
  Sense strand starting at position 760 of SEQ ID NO: 316740
agugaccaauagcuuuaua

SEQ ID NO: 436712 - RNA, 19 nt, Artificial Sequence
  Description of Artificial Sequence: Synthetic oligonucleotide
  Antisense Strand to SEQ ID NO: 436711
uauaaagcuauuggucacu

SEQ ID NO: 436713 - RNA, 19 nt, Artificial Sequence
  Description of Artificial Sequence: Synthetic oligonucleotide
  Sense strand starting at position 785 of SEQ ID NO: 316740
uuuaaucagcucgauauaa

SEQ ID NO: 436714 - RNA, 19 nt, Artificial Sequence
  Description of Artificial Sequence: Synthetic oligonucleotide
  Antisense Strand to SEQ ID NO: 436713
uuauaucgagcugauuaaa

SEQ ID NO: 436715 - RNA, 19 nt, Artificial Sequence
  Description of Artificial Sequence: Synthetic oligonucleotide
  Sense strand starting at position 812 of SEQ ID NO: 316740
ggccuugaagaguacacau

SEQ ID NO: 436716 - RNA, 19 nt, Artificial Sequence
  Description of Artificial Sequence: Synthetic oligonucleotide
  Antisense Strand to SEQ ID NO: 436715
auguguacucuucaaggcc

SEQ ID NO: 436717 - RNA, 19 nt, Artificial Sequence
  Description of Artificial Sequence: Synthetic oligonucleotide
  Sense strand starting at position 825 of SEQ ID NO: 316740
acacaugaguaccauauuu

SEQ ID NO: 436718 - RNA, 19 nt, Artificial Sequence
  Description of Artificial Sequence: Synthetic oligonucleotide
  Antisense Strand to SEQ ID NO: 436717
aaauaugguacucaugugu

SEQ ID NO: 436719 - RNA, 19 nt, Artificial Sequence
  Description of Artificial Sequence: Synthetic oligonucleotide
  Sense strand starting at position 856 of SEQ ID NO: 316740
gugauauaugaccagugca

SEQ ID NO: 436720 - RNA, 19 nt, Artificial Sequence
  Description of Artificial Sequence: Synthetic oligonucleotide
  Antisense Strand to SEQ ID NO: 436719
ugcacuggucauauaucac

SEQ ID NO: 436721 - RNA, 19 nt, Artificial Sequence
  Description of Artificial Sequence: Synthetic oligonucleotide
  Sense strand starting at position 1029 of SEQ ID NO: 316740
agucuaauuuauguuugca

SEQ ID NO: 436722 - RNA, 19 nt, Artificial Sequence
  Description of Artificial Sequence: Synthetic oligonucleotide
  Antisense Strand to SEQ ID NO: 436721
ugcaaacauaaauuagacu

SEQ ID NO: 436723 - RNA, 19 nt, Artificial Sequence
  Description of Artificial Sequence: Synthetic oligonucleotide
  Sense strand starting at position 1081 of SEQ ID NO: 316740
guugaugcuccauaaaugu

SEQ ID NO: 436724 - RNA, 19 nt, Artificial Sequence
  Description of Artificial Sequence: Synthetic oligonucleotide
  Antisense Strand to SEQ ID NO: 436723
acauuuauggagcaucaac

SEQ ID NO: 436725 - RNA, 19 nt, Artificial Sequence
  Description of Artificial Sequence: Synthetic oligonucleotide
  Sense strand starting at position 1088 of SEQ ID NO: 316740
cuccauaaauguuugaaug

SEQ ID NO: 436726 - RNA, 19 nt, Artificial Sequence
  Description of Artificial Sequence: Synthetic oligonucleotide
  Antisense Strand to SEQ ID NO: 436725
cauucaaacauuuauggag

SEQ ID NO: 436727 - RNA, 19 nt, Artificial Sequence
  Description of Artificial Sequence: Synthetic oligonucleotide
  Sense strand starting at position 1089 of SEQ ID NO: 316740
uccauaaauguuugaauga

SEQ ID NO: 436728 - RNA, 19 nt, Artificial Sequence
  Description of Artificial Sequence: Synthetic oligonucleotide
  Antisense Strand to SEQ ID NO: 436727
ucauucaaacauuuaugga

SEQ ID NO: 436729 - RNA, 19 nt, Artificial Sequence
  Description of Artificial Sequence: Synthetic oligonucleotide
  Sense strand starting at position 1118 of SEQ ID NO: 316740
aagugagcucuaggauaua

SEQ ID NO: 436730 - RNA, 19 nt, Artificial Sequence
  Description of Artificial Sequence: Synthetic oligonucleotide
  Antisense Strand to SEQ ID NO: 436729
uauauccuagagcucacuu

SEQ ID NO: 436731 - RNA, 19 nt, Artificial Sequence
  Description of Artificial Sequence: Synthetic oligonucleotide
  Sense strand starting at position 1367 of SEQ ID NO: 316740
ucuugaagucuuuggaaag

SEQ ID NO: 436732 - RNA, 19 nt, Artificial Sequence
  Description of Artificial Sequence: Synthetic oligonucleotide
  Antisense Strand to SEQ ID NO: 436731
cuuuccaaagacuucaaga

SEQ ID NO: 436733 - RNA, 19 nt, Artificial Sequence
  Description of Artificial Sequence: Synthetic oligonucleotide
  Sense strand starting at position 1563 of SEQ ID NO: 316740
uugugaugaacuggacuua

SEQ ID NO: 436734 - RNA, 19 nt, Artificial Sequence
  Description of Artificial Sequence: Synthetic oligonucleotide
  Antisense Strand to SEQ ID NO: 436733
uaaguccaguucaucacaa

SEQ ID NO: 436735 - RNA, 19 nt, Artificial Sequence
  Description of Artificial Sequence: Synthetic oligonucleotide
  Sense strand starting at position 1629 of SEQ ID NO: 316740
caaguaauggucuauguuc

SEQ ID NO: 436736 - RNA, 19 nt, Artificial Sequence
  Description of Artificial Sequence: Synthetic oligonucleotide
  Antisense Strand to SEQ ID NO: 436735
gaacauagaccauuacuug

SEQ ID NO: 436737 - RNA, 19 nt, Artificial Sequence
  Description of Artificial Sequence: Synthetic oligonucleotide
  Sense strand starting at position 1761 of SEQ ID NO: 316740
acaggaaaucacuguugca

SEQ ID NO: 436738 - RNA, 19 nt, Artificial Sequence
  Description of Artificial Sequence: Synthetic oligonucleotide
  Antisense Strand to SEQ ID NO: 436737
ugcaacagugauuuccugu

SEQ ID NO: 436739 - RNA, 19 nt, Artificial Sequence
  Description of Artificial Sequence: Synthetic oligonucleotide
  Sense strand starting at position 2045 of SEQ ID NO: 316740
ggcuacuuccaguagugga

SEQ ID NO: 436740 - RNA, 19 nt, Artificial Sequence
  Description of Artificial Sequence: Synthetic oligonucleotide
  Antisense Strand to SEQ ID NO: 436739
uccacuacuggaaguagcc

SEQ ID NO: 436741 - RNA, 19 nt, Artificial Sequence
  Description of Artificial Sequence: Synthetic oligonucleotide
  Sense strand starting at position 2127 of SEQ ID NO: 316740
augagcagcacuggaaauu

SEQ ID NO: 436742 - RNA, 19 nt, Artificial Sequence
  Description of Artificial Sequence: Synthetic oligonucleotide
  Antisense Strand to SEQ ID NO: 436741
aauuuccagugcugcucau

SEQ ID NO: 436743 - RNA, 19 nt, Artificial Sequence
  Description of Artificial Sequence: Synthetic oligonucleotide
  Sense strand starting at position 2128 of SEQ ID NO: 316740
ugagcagcacuggaaauua

SEQ ID NO: 436744 - RNA, 19 nt, Artificial Sequence
  Description of Artificial Sequence: Synthetic oligonucleotide
  Antisense Strand to SEQ ID NO: 436743
uaauuuccagugcugcuca

SEQ ID NO: 436745 - RNA, 19 nt, Artificial Sequence
  Description of Artificial Sequence: Synthetic oligonucleotide
  Sense strand starting at position 2355 of SEQ ID NO: 316740
gaagguugaacgcacaagu

SEQ ID NO: 436746 - RNA, 19 nt, Artificial Sequence
  Description of Artificial Sequence: Synthetic oligonucleotide
  Antisense Strand to SEQ ID NO: 436745
acuugugcguucaaccuuc

SEQ ID NO: 436747 - RNA, 19 nt, Artificial Sequence
  Description of Artificial Sequence: Synthetic oligonucleotide
  Sense strand starting at position 2660 of SEQ ID NO: 316740
agccuugauccuggagaaa

SEQ ID NO: 436748 - RNA, 19 nt, Artificial Sequence
  Description of Artificial Sequence: Synthetic oligonucleotide
  Antisense Strand to SEQ ID NO: 436747
uuucuccaggaucaaggcu

SEQ ID NO: 436749 - RNA, 19 nt, Artificial Sequence
  Description of Artificial Sequence: Synthetic oligonucleotide
  Sense strand starting at position 2671 of SEQ ID NO: 316740
uggagaaacugauucuccu

SEQ ID NO: 436750 - RNA, 19 nt, Artificial Sequence
  Description of Artificial Sequence: Synthetic oligonucleotide
  Antisense Strand to SEQ ID NO: 436749
aggagaaucaguuucucca

SEQ ID NO: 436751 - RNA, 19 nt, Artificial Sequence
  Description of Artificial Sequence: Synthetic oligonucleotide
  Sense strand starting at position 2935 of SEQ ID NO: 316740
accuauuccuuccugggaa

SEQ ID NO: 436752 - RNA, 19 nt, Artificial Sequence
  Description of Artificial Sequence: Synthetic oligonucleotide
  Antisense Strand to SEQ ID NO: 436751
uucccaggaaggaauaggu

SEQ ID NO: 436753 - RNA, 19 nt, Artificial Sequence
  Description of Artificial Sequence: Synthetic oligonucleotide
  Sense strand starting at position 3044 of SEQ ID NO: 316740
ugccauguucuaugauuug

SEQ ID NO: 436754 - RNA, 19 nt, Artificial Sequence
  Description of Artificial Sequence: Synthetic oligonucleotide
  Antisense Strand to SEQ ID NO: 436753
caaaucauagaacauggca

SEQ ID NO: 436755 - RNA, 19 nt, Artificial Sequence
  Description of Artificial Sequence: Synthetic oligonucleotide
  Sense strand starting at position 3192 of SEQ ID NO: 316740
aggaguggauuccuuauaa

SEQ ID NO: 436756 - RNA, 19 nt, Artificial Sequence
  Description of Artificial Sequence: Synthetic oligonucleotide
  Antisense Strand to SEQ ID NO: 436755
uuauaaggaauccacuccu

SEQ ID NO: 436757 - RNA, 19 nt, Artificial Sequence
  Description of Artificial Sequence: Synthetic oligonucleotide
  Sense strand starting at position 3213 of SEQ ID NO: 316740
gaaugaauuuggccucguu

SEQ ID NO: 436758 - RNA, 19 nt, Artificial Sequence
  Description of Artificial Sequence: Synthetic oligonucleotide
  Antisense Strand to SEQ ID NO: 436757
aacgaggccaaauucauuc

SEQ ID NO: 436759 - RNA, 19 nt, Artificial Sequence
  Description of Artificial Sequence: Synthetic oligonucleotide
  Sense strand starting at position 3436 of SEQ ID NO: 316740
cuuguuucuagggaucugu

SEQ ID NO: 436760 - RNA, 19 nt, Artificial Sequence
  Description of Artificial Sequence: Synthetic oligonucleotide
  Antisense Strand to SEQ ID NO: 436759
acagaucccuagaaacaag

SEQ ID NO: 436761 - RNA, 19 nt, Artificial Sequence
  Description of Artificial Sequence: Synthetic oligonucleotide
  Sense strand starting at position 3440 of SEQ ID NO: 316740
uuucuagggaucuguuaag

SEQ ID NO: 436762 - RNA, 19 nt, Artificial Sequence
  Description of Artificial Sequence: Synthetic oligonucleotide
  Antisense Strand to SEQ ID NO: 436761
cuuaacagaucccuagaaa

SEQ ID NO: 436763 - RNA, 19 nt, Artificial Sequence
  Description of Artificial Sequence: Synthetic oligonucleotide
  Sense strand starting at position 3446 of SEQ ID NO: 316740
gggaucuguuaaguauaaa

SEQ ID NO: 436764 - RNA, 19 nt, Artificial Sequence
  Description of Artificial Sequence: Synthetic oligonucleotide
  Antisense Strand to SEQ ID NO: 436763
uuuauacuuaacagauccc

SEQ ID NO: 436765 - RNA, 19 nt, Artificial Sequence
  Description of Artificial Sequence: Synthetic oligonucleotide
  Sense strand starting at position 3476 of SEQ ID NO: 316740
gugccaaucauguuugugu

SEQ ID NO: 436766 - RNA, 19 nt, Artificial Sequence
  Description of Artificial Sequence: Synthetic oligonucleotide
  Antisense Strand to SEQ ID NO: 436765
acacaaacaugauuggcac

SEQ ID NO: 436767 - RNA, 19 nt, Artificial Sequence
  Description of Artificial Sequence: Synthetic oligonucleotide
  Sense strand starting at position 3569 of SEQ ID NO: 316740
ugucaauguauuuguguuu

SEQ ID NO: 436768 - RNA, 19 nt, Artificial Sequence
  Description of Artificial Sequence: Synthetic oligonucleotide
  Antisense Strand to SEQ ID NO: 436767
aaacacaaauacauugaca

SEQ ID NO: 436769 - RNA, 19 nt, Artificial Sequence
  Description of Artificial Sequence: Synthetic oligonucleotide
  Sense strand starting at position 3590 of SEQ ID NO: 316740
gucucuguacguguaugua

SEQ ID NO: 436770 - RNA, 19 nt, Artificial Sequence
  Description of Artificial Sequence: Synthetic oligonucleotide
  Antisense Strand to SEQ ID NO: 436769
uacauacacguacagagac

SEQ ID NO: 436771 - RNA, 19 nt, Artificial Sequence
  Description of Artificial Sequence: Synthetic oligonucleotide
  Sense strand starting at position 3820 of SEQ ID NO: 316740
aagucauuagagugagauc

SEQ ID NO: 436772 - RNA, 19 nt, Artificial Sequence
  Description of Artificial Sequence: Synthetic oligonucleotide
  Antisense Strand to SEQ ID NO: 436771
gaucucacucuaaugacuu

SEQ ID NO: 436773 - RNA, 19 nt, Artificial Sequence
  Description of Artificial Sequence: Synthetic oligonucleotide
  Sense strand starting at position 27 of SEQ ID NO: 316741
agcaucagaugggaaauau

SEQ ID NO: 436774 - RNA, 19 nt, Artificial Sequence
  Description of Artificial Sequence: Synthetic oligonucleotide
  Antisense Strand to SEQ ID NO: 436773
auauuucccaucugaugcu

SEQ ID NO: 436775 - RNA, 19 nt, Artificial Sequence
  Description of Artificial Sequence: Synthetic oligonucleotide
  Sense strand starting at position 62 of SEQ ID NO: 316741
aggugauaauuugagaaag

SEQ ID NO: 436776 - RNA, 19 nt, Artificial Sequence
  Description of Artificial Sequence: Synthetic oligonucleotide
  Antisense Strand to SEQ ID NO: 436775
cuuucucaaauuaucaccu

SEQ ID NO: 436777 - RNA, 19 nt, Artificial Sequence
  Description of Artificial Sequence: Synthetic oligonucleotide
  Sense strand starting at position 106 of SEQ ID NO: 316741
aaugcuacucaacguguua

SEQ ID NO: 436778 - RNA, 19 nt, Artificial Sequence
  Description of Artificial Sequence: Synthetic oligonucleotide
  Antisense Strand to SEQ ID NO: 436777
uaacacguugaguagcauu

SEQ ID NO: 436779 - RNA, 19 nt, Artificial Sequence
  Description of Artificial Sequence: Synthetic oligonucleotide
  Sense strand starting at position 117 of SEQ ID NO: 316741
acguguuaaauggacuuaa

SEQ ID NO: 436780 - RNA, 19 nt, Artificial Sequence
  Description of Artificial Sequence: Synthetic oligonucleotide
  Antisense Strand to SEQ ID NO: 436779
uuaaguccauuuaacacgu

SEQ ID NO: 436781 - RNA, 19 nt, Artificial Sequence
  Description of Artificial Sequence: Synthetic oligonucleotide
  Sense strand starting at position 513 of SEQ ID NO: 316741
uuugguaucucuuugacua

SEQ ID NO: 436782 - RNA, 19 nt, Artificial Sequence
  Description of Artificial Sequence: Synthetic oligonucleotide
  Antisense Strand to SEQ ID NO: 436781
uagucaaagagauaccaaa

SEQ ID NO: 436783 - RNA, 19 nt, Artificial Sequence
  Description of Artificial Sequence: Synthetic oligonucleotide
  Sense strand starting at position 514 of SEQ ID NO: 316741
uugguaucucuuugacuac

SEQ ID NO: 436784 - RNA, 19 nt, Artificial Sequence
  Description of Artificial Sequence: Synthetic oligonucleotide
  Antisense Strand to SEQ ID NO: 436783
guagucaaagagauaccaa

SEQ ID NO: 436785 - RNA, 19 nt, Artificial Sequence
  Description of Artificial Sequence: Synthetic oligonucleotide
  Sense strand starting at position 517 of SEQ ID NO: 316741
guaucucuuugacuacaca

SEQ ID NO: 436786 - RNA, 19 nt, Artificial Sequence
  Description of Artificial Sequence: Synthetic oligonucleotide
  Antisense Strand to SEQ ID NO: 436785
uguguagucaaagagauac

SEQ ID NO: 436787 - RNA, 19 nt, Artificial Sequence
  Description of Artificial Sequence: Synthetic oligonucleotide
  Sense strand starting at position 680 of SEQ ID NO: 316741
ucaaacauuccuggaauug

SEQ ID NO: 436788 - RNA, 19 nt, Artificial Sequence
  Description of Artificial Sequence: Synthetic oligonucleotide
  Antisense Strand to SEQ ID NO: 436787
caauuccaggaauguuuga

SEQ ID NO: 436789 - RNA, 19 nt, Artificial Sequence
  Description of Artificial Sequence: Synthetic oligonucleotide
  Sense strand starting at position 863 of SEQ ID NO: 316741
agagaaucacacugcuuac

SEQ ID NO: 436790 - RNA, 19 nt, Artificial Sequence
  Description of Artificial Sequence: Synthetic oligonucleotide
  Antisense Strand to SEQ ID NO: 436789
guaagcagugugauucucu

SEQ ID NO: 436791 - RNA, 19 nt, Artificial Sequence
  Description of Artificial Sequence: Synthetic oligonucleotide
  Sense strand starting at position 986 of SEQ ID NO: 316741
gaaggcuuuggcugucuuu

SEQ ID NO: 436792 - RNA, 19 nt, Artificial Sequence
  Description of Artificial Sequence: Synthetic oligonucleotide
  Antisense Strand to SEQ ID NO: 436791
aaagacagccaaagccuuc

SEQ ID NO: 436793 - RNA, 19 nt, Artificial Sequence
  Description of Artificial Sequence: Synthetic oligonucleotide
  Sense strand starting at position 1005 of SEQ ID NO: 316741
ccucaucugggucagaguu

SEQ ID NO: 436794 - RNA, 19 nt, Artificial Sequence
  Description of Artificial Sequence: Synthetic oligonucleotide
  Antisense Strand to SEQ ID NO: 436793
aacucugacccagaugagg

SEQ ID NO: 436795 - RNA, 19 nt, Artificial Sequence
  Description of Artificial Sequence: Synthetic oligonucleotide
  Sense strand starting at position 1694 of SEQ ID NO: 316741
gccaaaguuguccaacgca

SEQ ID NO: 436796 - RNA, 19 nt, Artificial Sequence
  Description of Artificial Sequence: Synthetic oligonucleotide
  Antisense Strand to SEQ ID NO: 436795
ugcguuggacaacuuuggc

SEQ ID NO: 436797 - RNA, 19 nt, Artificial Sequence
  Description of Artificial Sequence: Synthetic oligonucleotide
  Sense strand starting at position 1697 of SEQ ID NO: 316741
aaaguuguccaacgcaaac

SEQ ID NO: 436798 - RNA, 19 nt, Artificial Sequence
  Description of Artificial Sequence: Synthetic oligonucleotide
  Antisense Strand to SEQ ID NO: 436797
guuugcguuggacaacuuu

SEQ ID NO: 436799 - RNA, 19 nt, Artificial Sequence
  Description of Artificial Sequence: Synthetic oligonucleotide
  Sense strand starting at position 2159 of SEQ ID NO: 316741
cuccuucuccagcagaaga

SEQ ID NO: 436800 - RNA, 19 nt, Artificial Sequence
  Description of Artificial Sequence: Synthetic oligonucleotide
  Antisense Strand to SEQ ID NO: 436799
ucuucugcuggagaaggag

SEQ ID NO: 436801 - RNA, 19 nt, Artificial Sequence
  Description of Artificial Sequence: Synthetic oligonucleotide
  Sense strand starting at position 2211 of SEQ ID NO: 316741
ccuugcgagcucuagauuu

SEQ ID NO: 436802 - RNA, 19 nt, Artificial Sequence
  Description of Artificial Sequence: Synthetic oligonucleotide
  Antisense Strand to SEQ ID NO: 436801
aaaucuagagcucgcaagg

SEQ ID NO: 436803 - RNA, 19 nt, Artificial Sequence
  Description of Artificial Sequence: Synthetic oligonucleotide
  Sense strand starting at position 2513 of SEQ ID NO: 316741
agguuuguaguucacggua

SEQ ID NO: 436804 - RNA, 19 nt, Artificial Sequence
  Description of Artificial Sequence: Synthetic oligonucleotide
  Antisense Strand to SEQ ID NO: 436803
uaccgugaacuacaaaccu

SEQ ID NO: 436805 - RNA, 19 nt, Artificial Sequence
  Description of Artificial Sequence: Synthetic oligonucleotide
  Sense strand starting at position 2556 of SEQ ID NO: 316741
gggaaaguaucucccacag

SEQ ID NO: 436806 - RNA, 19 nt, Artificial Sequence
  Description of Artificial Sequence: Synthetic oligonucleotide
  Antisense Strand to SEQ ID NO: 436805
cugugggagauacuuuccc

SEQ ID NO: 436807 - RNA, 19 nt, Artificial Sequence
  Description of Artificial Sequence: Synthetic oligonucleotide
  Sense strand starting at position 2625 of SEQ ID NO: 316741
gguauugaguucuucuaac

SEQ ID NO: 436808 - RNA, 19 nt, Artificial Sequence
  Description of Artificial Sequence: Synthetic oligonucleotide
  Antisense Strand to SEQ ID NO: 436807
guuagaagaacucaauacc

SEQ ID NO: 436809 - RNA, 19 nt, Artificial Sequence
  Description of Artificial Sequence: Synthetic oligonucleotide
  Sense strand starting at position 2637 of SEQ ID NO: 316741
uucuaacuacugggaaauc

SEQ ID NO: 436810 - RNA, 19 nt, Artificial Sequence
  Description of Artificial Sequence: Synthetic oligonucleotide
  Antisense Strand to SEQ ID NO: 436809
gauuucccaguaguuagaa

SEQ ID NO: 436811 - RNA, 19 nt, Artificial Sequence
  Description of Artificial Sequence: Synthetic oligonucleotide
  Sense strand starting at position 2647 of SEQ ID NO: 316741
ugggaaaucggaugcuuug

SEQ ID NO: 436812 - RNA, 19 nt, Artificial Sequence
  Description of Artificial Sequence: Synthetic oligonucleotide
  Antisense Strand to SEQ ID NO: 436811
caaagcauccgauuuccca

SEQ ID NO: 436813 - RNA, 19 nt, Artificial Sequence
  Description of Artificial Sequence: Synthetic oligonucleotide
  Sense strand starting at position 2700 of SEQ ID NO: 316741
ggcauuaaagagcaaccua

SEQ ID NO: 436814 - RNA, 19 nt, Artificial Sequence
  Description of Artificial Sequence: Synthetic oligonucleotide
  Antisense Strand to SEQ ID NO: 436813
uagguugcucuuuaaugcc

SEQ ID NO: 436815 - RNA, 19 nt, Artificial Sequence
  Description of Artificial Sequence: Synthetic oligonucleotide
  Sense strand starting at position 2727 of SEQ ID NO: 316741
acaguaggguuguuagaua

SEQ ID NO: 436816 - RNA, 19 nt, Artificial Sequence
  Description of Artificial Sequence: Synthetic oligonucleotide
  Antisense Strand to SEQ ID NO: 436815
uaucuaacaacccuacugu

SEQ ID NO: 436817 - RNA, 19 nt, Artificial Sequence
  Description of Artificial Sequence: Synthetic oligonucleotide
  Sense strand starting at position 2778 of SEQ ID NO: 316741
agauacaaauagugaagua

SEQ ID NO: 436818 - RNA, 19 nt, Artificial Sequence
  Description of Artificial Sequence: Synthetic oligonucleotide
  Antisense Strand to SEQ ID NO: 436817
uacuucacuauuuguaucu

SEQ ID NO: 436819 - RNA, 19 nt, Artificial Sequence
  Description of Artificial Sequence: Synthetic oligonucleotide
  Sense strand starting at position 2788 of SEQ ID NO: 316741
agugaaguaugucccaaau

SEQ ID NO: 436820 - RNA, 19 nt, Artificial Sequence
  Description of Artificial Sequence: Synthetic oligonucleotide
  Antisense Strand to SEQ ID NO: 436819
auuugggacauacuucacu

SEQ ID NO: 436821 - RNA, 19 nt, Artificial Sequence
  Description of Artificial Sequence: Synthetic oligonucleotide
  Sense strand starting at position 2808 of SEQ ID NO: 316741
uugcaugggucacauuuau

SEQ ID NO: 436822 - RNA, 19 nt, Artificial Sequence
  Description of Artificial Sequence: Synthetic oligonucleotide
  Antisense Strand to SEQ ID NO: 436821
auaaaugugacccaugcaa

SEQ ID NO: 436823 - RNA, 19 nt, Artificial Sequence
  Description of Artificial Sequence: Synthetic oligonucleotide
  Sense strand starting at position 2838 of SEQ ID NO: 316741
ugaaauaucugggauauac

SEQ ID NO: 436824 - RNA, 19 nt, Artificial Sequence
  Description of Artificial Sequence: Synthetic oligonucleotide
  Antisense Strand to SEQ ID NO: 436823
guauaucccagauauuuca

SEQ ID NO: 436825 - RNA, 19 nt, Artificial Sequence
  Description of Artificial Sequence: Synthetic oligonucleotide
  Sense strand starting at position 2864 of SEQ ID NO: 316741
uuugguguuuaucugaauu

SEQ ID NO: 436826 - RNA, 19 nt, Artificial Sequence
  Description of Artificial Sequence: Synthetic oligonucleotide
  Antisense Strand to SEQ ID NO: 436825
aauucagauaaacaccaaa

SEQ ID NO: 436827 - RNA, 19 nt, Artificial Sequence
  Description of Artificial Sequence: Synthetic oligonucleotide
  Sense strand starting at position 2987 of SEQ ID NO: 316741
gcgguaaucuccuuuccuu

SEQ ID NO: 436828 - RNA, 19 nt, Artificial Sequence
  Description of Artificial Sequence: Synthetic oligonucleotide
  Antisense Strand to SEQ ID NO: 436827
aaggaaaggagauuaccgc

SEQ ID NO: 436829 - RNA, 19 nt, Artificial Sequence
  Description of Artificial Sequence: Synthetic oligonucleotide
  Sense strand starting at position 3014 of SEQ ID NO: 316741
gggaaagaaucacaaguuu

SEQ ID NO: 436830 - RNA, 19 nt, Artificial Sequence
  Description of Artificial Sequence: Synthetic oligonucleotide
  Antisense Strand to SEQ ID NO: 436829
aaacuugugauucuuuccc

SEQ ID NO: 436831 - RNA, 19 nt, Artificial Sequence
  Description of Artificial Sequence: Synthetic oligonucleotide
  Sense strand starting at position 3078 of SEQ ID NO: 316741
uguuaacuagcaugucuuu

SEQ ID NO: 436832 - RNA, 19 nt, Artificial Sequence
  Description of Artificial Sequence: Synthetic oligonucleotide
  Antisense Strand to SEQ ID NO: 436831
aaagacaugcuaguuaaca

SEQ ID NO: 436833 - RNA, 19 nt, Artificial Sequence
  Description of Artificial Sequence: Synthetic oligonucleotide
  Sense strand starting at position 3189 of SEQ ID NO: 316741
uagcuagugcuccaaguga

SEQ ID NO: 436834 - RNA, 19 nt, Artificial Sequence
  Description of Artificial Sequence: Synthetic oligonucleotide
  Antisense Strand to SEQ ID NO: 436833
ucacuuggagcacuagcua

SEQ ID NO: 436835 - RNA, 19 nt, Artificial Sequence
  Description of Artificial Sequence: Synthetic oligonucleotide
  Sense strand starting at position 3202 of SEQ ID NO: 316741
aagugaaagaagcguguau

SEQ ID NO: 436836 - RNA, 19 nt, Artificial Sequence
  Description of Artificial Sequence: Synthetic oligonucleotide
  Antisense Strand to SEQ ID NO: 436835
auacacgcuucuuucacuu

SEQ ID NO: 436837 - RNA, 19 nt, Artificial Sequence
  Description of Artificial Sequence: Synthetic oligonucleotide
  Sense strand starting at position 3204 of SEQ ID NO: 316741
gugaaagaagcguguauuu

SEQ ID NO: 436838 - RNA, 19 nt, Artificial Sequence
  Description of Artificial Sequence: Synthetic oligonucleotide
  Antisense Strand to SEQ ID NO: 436837
aaauacacgcuucuuucac

SEQ ID NO: 436839 - RNA, 19 nt, Artificial Sequence
  Description of Artificial Sequence: Synthetic oligonucleotide
  Sense strand starting at position 3235 of SEQ ID NO: 316741
ugugaaggguucuuguuua

SEQ ID NO: 436840 - RNA, 19 nt, Artificial Sequence
  Description of Artificial Sequence: Synthetic oligonucleotide
  Antisense Strand to SEQ ID NO: 436839
uaaacaagaacccuucaca

SEQ ID NO: 436841 - RNA, 19 nt, Artificial Sequence
  Description of Artificial Sequence: Synthetic oligonucleotide
  Sense strand starting at position 3239 of SEQ ID NO: 316741
aaggguucuuguuuaauac

SEQ ID NO: 436842 - RNA, 19 nt, Artificial Sequence
  Description of Artificial Sequence: Synthetic oligonucleotide
  Antisense Strand to SEQ ID NO: 436841
guauuaaacaagaacccuu

SEQ ID NO: 436843 - RNA, 19 nt, Artificial Sequence
  Description of Artificial Sequence: Synthetic oligonucleotide
  Sense strand starting at position 3240 of SEQ ID NO: 316741
aggguucuuguuuaauaca

SEQ ID NO: 436844 - RNA, 19 nt, Artificial Sequence
  Description of Artificial Sequence: Synthetic oligonucleotide
  Antisense Strand to SEQ ID NO: 436843
uguauuaaacaagaacccu

SEQ ID NO: 436845 - RNA, 19 nt, Artificial Sequence
  Description of Artificial Sequence: Synthetic oligonucleotide
  Sense strand starting at position 3321 of SEQ ID NO: 316741
uagguucugaaagguguaa

SEQ ID NO: 436846 - RNA, 19 nt, Artificial Sequence
  Description of Artificial Sequence: Synthetic oligonucleotide
  Antisense Strand to SEQ ID NO: 436845
uuacaccuuucagaaccua

SEQ ID NO: 436847 - RNA, 19 nt, Artificial Sequence
  Description of Artificial Sequence: Synthetic oligonucleotide
  Sense strand starting at position 3412 of SEQ ID NO: 316741
gaagaaucuugauaaugug

SEQ ID NO: 436848 - RNA, 19 nt, Artificial Sequence
  Description of Artificial Sequence: Synthetic oligonucleotide
  Antisense Strand to SEQ ID NO: 436847
cacauuaucaagauucuuc

SEQ ID NO: 436849 - RNA, 19 nt, Artificial Sequence
  Description of Artificial Sequence: Synthetic oligonucleotide
  Sense strand starting at position 3418 of SEQ ID NO: 316741
ucuugauaauguguccuga

SEQ ID NO: 436850 - RNA, 19 nt, Artificial Sequence
  Description of Artificial Sequence: Synthetic oligonucleotide
  Antisense Strand to SEQ ID NO: 436849
ucaggacacauuaucaaga

SEQ ID NO: 436851 - RNA, 19 nt, Artificial Sequence
  Description of Artificial Sequence: Synthetic oligonucleotide
  Sense strand starting at position 3688 of SEQ ID NO: 316741
ucucacuggccucagaaau

SEQ ID NO: 436852 - RNA, 19 nt, Artificial Sequence
  Description of Artificial Sequence: Synthetic oligonucleotide
  Antisense Strand to SEQ ID NO: 436851
auuucugaggccagugaga

SEQ ID NO: 436853 - RNA, 19 nt, Artificial Sequence
  Description of Artificial Sequence: Synthetic oligonucleotide
  Sense strand starting at position 59 of SEQ ID NO: 316742
gaagaucuugcauggugga

SEQ ID NO: 436854 - RNA, 19 nt, Artificial Sequence
  Description of Artificial Sequence: Synthetic oligonucleotide
  Antisense Strand to SEQ ID NO: 436853
uccaccaugcaagaucuuc

SEQ ID NO: 436855 - RNA, 19 nt, Artificial Sequence
  Description of Artificial Sequence: Synthetic oligonucleotide
  Sense strand starting at position 120 of SEQ ID NO: 316742
gcacuuuggcaucaggauu

SEQ ID NO: 436856 - RNA, 19 nt, Artificial Sequence
  Description of Artificial Sequence: Synthetic oligonucleotide
  Antisense Strand to SEQ ID NO: 436855
aauccugaugccaaagugc

SEQ ID NO: 436857 - RNA, 19 nt, Artificial Sequence
  Description of Artificial Sequence: Synthetic oligonucleotide
  Sense strand starting at position 128 of SEQ ID NO: 316742
gcaucaggauugcccauau

SEQ ID NO: 436858 - RNA, 19 nt, Artificial Sequence
  Description of Artificial Sequence: Synthetic oligonucleotide
  Antisense Strand to SEQ ID NO: 436857
auaugggcaauccugaugc

SEQ ID NO: 436859 - RNA, 19 nt, Artificial Sequence
  Description of Artificial Sequence: Synthetic oligonucleotide
  Sense strand starting at position 335 of SEQ ID NO: 316742
uaauuuauguggugcuuga

SEQ ID NO: 436860 - RNA, 19 nt, Artificial Sequence
  Description of Artificial Sequence: Synthetic oligonucleotide
  Antisense Strand to SEQ ID NO: 436859
ucaagcaccacauaaauua

SEQ ID NO: 436861 - RNA, 19 nt, Artificial Sequence
  Description of Artificial Sequence: Synthetic oligonucleotide
  Sense strand starting at position 348 of SEQ ID NO: 316742
gcuugaaagcuuuagcuau

SEQ ID NO: 436862 - RNA, 19 nt, Artificial Sequence
  Description of Artificial Sequence: Synthetic oligonucleotide
  Antisense Strand to SEQ ID NO: 436861
auagcuaaagcuuucaagc

SEQ ID NO: 436863 - RNA, 19 nt, Artificial Sequence
  Description of Artificial Sequence: Synthetic oligonucleotide
  Sense strand starting at position 350 of SEQ ID NO: 316742
uugaaagcuuuagcuaugu

SEQ ID NO: 436864 - RNA, 19 nt, Artificial Sequence
  Description of Artificial Sequence: Synthetic oligonucleotide
  Antisense Strand to SEQ ID NO: 436863
acauagcuaaagcuuucaa

SEQ ID NO: 436865 - RNA, 19 nt, Artificial Sequence
  Description of Artificial Sequence: Synthetic oligonucleotide
  Sense strand starting at position 356 of SEQ ID NO: 316742
gcuuuagcuauguggcuau

SEQ ID NO: 436866 - RNA, 19 nt, Artificial Sequence
  Description of Artificial Sequence: Synthetic oligonucleotide
  Antisense Strand to SEQ ID NO: 436865
auagccacauagcuaaagc

SEQ ID NO: 436867 - RNA, 19 nt, Artificial Sequence
  Description of Artificial Sequence: Synthetic oligonucleotide
  Sense strand starting at position 397 of SEQ ID NO: 316742
uauccuguaguccguaaau

SEQ ID NO: 436868 - RNA, 19 nt, Artificial Sequence
  Description of Artificial Sequence: Synthetic oligonucleotide
  Antisense Strand to SEQ ID NO: 436867
auuuacggacuacaggaua

SEQ ID NO: 436869 - RNA, 19 nt, Artificial Sequence
  Description of Artificial Sequence: Synthetic oligonucleotide
  Sense strand starting at position 399 of SEQ ID NO: 316742
uccuguaguccguaaauau

SEQ ID NO: 436870 - RNA, 19 nt, Artificial Sequence
  Description of Artificial Sequence: Synthetic oligonucleotide
  Antisense Strand to SEQ ID NO: 436869
auauuuacggacuacagga

SEQ ID NO: 436871 - RNA, 19 nt, Artificial Sequence
  Description of Artificial Sequence: Synthetic oligonucleotide
  Sense strand starting at position 545 of SEQ ID NO: 316742
guaguauuugcauagcuuc

SEQ ID NO: 436872 - RNA, 19 nt, Artificial Sequence
  Description of Artificial Sequence: Synthetic oligonucleotide
  Antisense Strand to SEQ ID NO: 436871
gaagcuaugcaaauacuac

SEQ ID NO: 436873 - RNA, 19 nt, Artificial Sequence
  Description of Artificial Sequence: Synthetic oligonucleotide
  Sense strand starting at position 594 of SEQ ID NO: 316742
ucucucgauuacuuguaau

SEQ ID NO: 436874 - RNA, 19 nt, Artificial Sequence
  Description of Artificial Sequence: Synthetic oligonucleotide
  Antisense Strand to SEQ ID NO: 436873
auuacaaguaaucgagaga

SEQ ID NO: 436875 - RNA, 19 nt, Artificial Sequence
  Description of Artificial Sequence: Synthetic oligonucleotide
  Sense strand starting at position 885 of SEQ ID NO: 316742
gcugaaugcccgcuccauu

SEQ ID NO: 436876 - RNA, 19 nt, Artificial Sequence
  Description of Artificial Sequence: Synthetic oligonucleotide
  Antisense Strand to SEQ ID NO: 436875
aauggagcgggcauucagc

SEQ ID NO: 436877 - RNA, 19 nt, Artificial Sequence
  Description of Artificial Sequence: Synthetic oligonucleotide
  Sense strand starting at position 945 of SEQ ID NO: 316742
cccguuuccuuaucugcaa

SEQ ID NO: 436878 - RNA, 19 nt, Artificial Sequence
  Description of Artificial Sequence: Synthetic oligonucleotide
  Antisense Strand to SEQ ID NO: 436877
uugcagauaaggaaacggg

SEQ ID NO: 436879 - RNA, 19 nt, Artificial Sequence
  Description of Artificial Sequence: Synthetic oligonucleotide
  Sense strand starting at position 1021 of SEQ ID NO: 316742
uccauuacgugcuuagaac

SEQ ID NO: 436880 - RNA, 19 nt, Artificial Sequence
  Description of Artificial Sequence: Synthetic oligonucleotide
  Antisense Strand to SEQ ID NO: 436879
guucuaagcacguaaugga

SEQ ID NO: 436881 - RNA, 19 nt, Artificial Sequence
  Description of Artificial Sequence: Synthetic oligonucleotide
  Sense strand starting at position 1022 of SEQ ID NO: 316742
ccauuacgugcuuagaaca

SEQ ID NO: 436882 - RNA, 19 nt, Artificial Sequence
  Description of Artificial Sequence: Synthetic oligonucleotide
  Antisense Strand to SEQ ID NO: 436881
uguucuaagcacguaaugg

SEQ ID NO: 436883 - RNA, 19 nt, Artificial Sequence
  Description of Artificial Sequence: Synthetic oligonucleotide
  Sense strand starting at position 1071 of SEQ ID NO: 316742
gcugcuguccgugucauca

SEQ ID NO: 436884 - RNA, 19 nt, Artificial Sequence
  Description of Artificial Sequence: Synthetic oligonucleotide
  Antisense Strand to SEQ ID NO: 436883
ugaugacacggacagcagc

SEQ ID NO: 436885 - RNA, 19 nt, Artificial Sequence
  Description of Artificial Sequence: Synthetic oligonucleotide
  Sense strand starting at position 1138 of SEQ ID NO: 316742
gccgccuguguauaguuaa

SEQ ID NO: 436886 - RNA, 19 nt, Artificial Sequence
  Description of Artificial Sequence: Synthetic oligonucleotide
  Antisense Strand to SEQ ID NO: 436885
uuaacuauacacaggcggc

SEQ ID NO: 436887 - RNA, 19 nt, Artificial Sequence
  Description of Artificial Sequence: Synthetic oligonucleotide
  Sense strand starting at position 1220 of SEQ ID NO: 316742
cgaagaauuuaggaucuug

SEQ ID NO: 436888 - RNA, 19 nt, Artificial Sequence
  Description of Artificial Sequence: Synthetic oligonucleotide
  Antisense Strand to SEQ ID NO: 436887
caagauccuaaauucuucg

SEQ ID NO: 436889 - RNA, 19 nt, Artificial Sequence
  Description of Artificial Sequence: Synthetic oligonucleotide
  Sense strand starting at position 1987 of SEQ ID NO: 316742
gcauccugucgccagguaa

SEQ ID NO: 436890 - RNA, 19 nt, Artificial Sequence
  Description of Artificial Sequence: Synthetic oligonucleotide
  Antisense Strand to SEQ ID NO: 436889
uuaccuggcgacaggaugc

SEQ ID NO: 436891 - RNA, 19 nt, Artificial Sequence
  Description of Artificial Sequence: Synthetic oligonucleotide
  Sense strand starting at position 2110 of SEQ ID NO: 316742
ccgagagcuucccugggaa

SEQ ID NO: 436892 - RNA, 19 nt, Artificial Sequence
  Description of Artificial Sequence: Synthetic oligonucleotide
  Antisense Strand to SEQ ID NO: 436891
uucccagggaagcucucgg

SEQ ID NO: 436893 - RNA, 19 nt, Artificial Sequence
  Description of Artificial Sequence: Synthetic oligonucleotide
  Sense strand starting at position 2357 of SEQ ID NO: 316742
gcaucccucagaggaguuu

SEQ ID NO: 436894 - RNA, 19 nt, Artificial Sequence
  Description of Artificial Sequence: Synthetic oligonucleotide
  Antisense Strand to SEQ ID NO: 436893
aaacuccucugagggaugc

SEQ ID NO: 436895 - RNA, 19 nt, Artificial Sequence
  Description of Artificial Sequence: Synthetic oligonucleotide
  Sense strand starting at position 2403 of SEQ ID NO: 316742
gaccaauauugugaaagga

SEQ ID NO: 436896 - RNA, 19 nt, Artificial Sequence
  Description of Artificial Sequence: Synthetic oligonucleotide
  Antisense Strand to SEQ ID NO: 436895
uccuuucacaauauugguc

SEQ ID NO: 436897 - RNA, 19 nt, Artificial Sequence
  Description of Artificial Sequence: Synthetic oligonucleotide
  Sense strand starting at position 2497 of SEQ ID NO: 316742
ucaugaaagcugugggaag

SEQ ID NO: 436898 - RNA, 19 nt, Artificial Sequence
  Description of Artificial Sequence: Synthetic oligonucleotide
  Antisense Strand to SEQ ID NO: 436897
cuucccacagcuuucauga

SEQ ID NO: 436899 - RNA, 19 nt, Artificial Sequence
  Description of Artificial Sequence: Synthetic oligonucleotide
  Sense strand starting at position 2521 of SEQ ID NO: 316742
gugggcuuccuuugucuaa

SEQ ID NO: 436900 - RNA, 19 nt, Artificial Sequence
  Description of Artificial Sequence: Synthetic oligonucleotide
  Antisense Strand to SEQ ID NO: 436899
uuagacaaaggaagcccac

SEQ ID NO: 436901 - RNA, 19 nt, Artificial Sequence
  Description of Artificial Sequence: Synthetic oligonucleotide
  Sense strand starting at position 2525 of SEQ ID NO: 316742
gcuuccuuugucuaagcau

SEQ ID NO: 436902 - RNA, 19 nt, Artificial Sequence
  Description of Artificial Sequence: Synthetic oligonucleotide
  Antisense Strand to SEQ ID NO: 436901
augcuuagacaaaggaagc

SEQ ID NO: 436903 - RNA, 19 nt, Artificial Sequence
  Description of Artificial Sequence: Synthetic oligonucleotide
  Sense strand starting at position 2528 of SEQ ID NO: 316742
uccuuugucuaagcauguu

SEQ ID NO: 436904 - RNA, 19 nt, Artificial Sequence
  Description of Artificial Sequence: Synthetic oligonucleotide
  Antisense Strand to SEQ ID NO: 436903
aacaugcuuagacaaagga

SEQ ID NO: 436905 - RNA, 19 nt, Artificial Sequence
  Description of Artificial Sequence: Synthetic oligonucleotide
  Sense strand starting at position 2531 of SEQ ID NO: 316742
uuugucuaagcauguuaau

SEQ ID NO: 436906 - RNA, 19 nt, Artificial Sequence
  Description of Artificial Sequence: Synthetic oligonucleotide
  Antisense Strand to SEQ ID NO: 436905
auuaacaugcuuagacaaa

SEQ ID NO: 436907 - RNA, 19 nt, Artificial Sequence
  Description of Artificial Sequence: Synthetic oligonucleotide
  Sense strand starting at position 2561 of SEQ ID NO: 316742
ugguguaucacgugcagga

SEQ ID NO: 436908 - RNA, 19 nt, Artificial Sequence
  Description of Artificial Sequence: Synthetic oligonucleotide
  Antisense Strand to SEQ ID NO: 436907
uccugcacgugauacacca

SEQ ID NO: 436909 - RNA, 19 nt, Artificial Sequence
  Description of Artificial Sequence: Synthetic oligonucleotide
  Sense strand starting at position 2563 of SEQ ID NO: 316742
guguaucacgugcaggauu

SEQ ID NO: 436910 - RNA, 19 nt, Artificial Sequence
  Description of Artificial Sequence: Synthetic oligonucleotide
  Antisense Strand to SEQ ID NO: 436909
aauccugcacgugauacac

SEQ ID NO: 436911 - RNA, 19 nt, Artificial Sequence
  Description of Artificial Sequence: Synthetic oligonucleotide
  Sense strand starting at position 2664 of SEQ ID NO: 316742
aauggugcucuuuaaaguu

SEQ ID NO: 436912 - RNA, 19 nt, Artificial Sequence
  Description of Artificial Sequence: Synthetic oligonucleotide
  Antisense Strand to SEQ ID NO: 436911
aacuuuaaagagcaccauu

SEQ ID NO: 436913 - RNA, 19 nt, Artificial Sequence
  Description of Artificial Sequence: Synthetic oligonucleotide
  Sense strand starting at position 2832 of SEQ ID NO: 316742
ugaaacuucuuaugauagu

SEQ ID NO: 436914 - RNA, 19 nt, Artificial Sequence
  Description of Artificial Sequence: Synthetic oligonucleotide
  Antisense Strand to SEQ ID NO: 436913
acuaucauaagaaguuuca

SEQ ID NO: 436915 - RNA, 19 nt, Artificial Sequence
  Description of Artificial Sequence: Synthetic oligonucleotide
  Sense strand starting at position 3305 of SEQ ID NO: 316742
gcugcagugagucgacaua

SEQ ID NO: 436916 - RNA, 19 nt, Artificial Sequence
  Description of Artificial Sequence: Synthetic oligonucleotide
  Antisense Strand to SEQ ID NO: 436915
uaugucgacucacugcagc

SEQ ID NO: 436917 - RNA, 19 nt, Artificial Sequence
  Description of Artificial Sequence: Synthetic oligonucleotide
  Sense strand starting at position 3422 of SEQ ID NO: 316742
auuugacuuucuuguggca

SEQ ID NO: 436918 - RNA, 19 nt, Artificial Sequence
  Description of Artificial Sequence: Synthetic oligonucleotide
  Antisense Strand to SEQ ID NO: 436917
ugccacaagaaagucaaau

SEQ ID NO: 436919 - RNA, 19 nt, Artificial Sequence
  Description of Artificial Sequence: Synthetic oligonucleotide
  Sense strand starting at position 3434 of SEQ ID NO: 316742
uguggcauuguagacaauu

SEQ ID NO: 436920 - RNA, 19 nt, Artificial Sequence
  Description of Artificial Sequence: Synthetic oligonucleotide
  Antisense Strand to SEQ ID NO: 436919
aauugucuacaaugccaca

SEQ ID NO: 436921 - RNA, 19 nt, Artificial Sequence
  Description of Artificial Sequence: Synthetic oligonucleotide
  Sense strand starting at position 3482 of SEQ ID NO: 316742
gucugcauugcugauugau

SEQ ID NO: 436922 - RNA, 19 nt, Artificial Sequence
  Description of Artificial Sequence: Synthetic oligonucleotide
  Antisense Strand to SEQ ID NO: 436921
aucaaucagcaaugcagac

SEQ ID NO: 436923 - RNA, 19 nt, Artificial Sequence
  Description of Artificial Sequence: Synthetic oligonucleotide
  Sense strand starting at position 3484 of SEQ ID NO: 316742
cugcauugcugauugauau

SEQ ID NO: 436924 - RNA, 19 nt, Artificial Sequence
  Description of Artificial Sequence: Synthetic oligonucleotide
  Antisense Strand to SEQ ID NO: 436923
auaucaaucagcaaugcag

SEQ ID NO: 436925 - RNA, 19 nt, Artificial Sequence
  Description of Artificial Sequence: Synthetic oligonucleotide
  Sense strand starting at position 3485 of SEQ ID NO: 316742
ugcauugcugauugauauu

SEQ ID NO: 436926 - RNA, 19 nt, Artificial Sequence
  Description of Artificial Sequence: Synthetic oligonucleotide
  Antisense Strand to SEQ ID NO: 436925
aauaucaaucagcaaugca

SEQ ID NO: 436927 - RNA, 19 nt, Artificial Sequence
  Description of Artificial Sequence: Synthetic oligonucleotide
  Sense strand starting at position 3488 of SEQ ID NO: 316742
auugcugauugauauugau

SEQ ID NO: 436928 - RNA, 19 nt, Artificial Sequence
  Description of Artificial Sequence: Synthetic oligonucleotide
  Antisense Strand to SEQ ID NO: 436927
aucaauaucaaucagcaau

SEQ ID NO: 436929 - RNA, 19 nt, Artificial Sequence
  Description of Artificial Sequence: Synthetic oligonucleotide
  Sense strand starting at position 3623 of SEQ ID NO: 316742
cugcaaaccuugcaaagau

SEQ ID NO: 436930 - RNA, 19 nt, Artificial Sequence
  Description of Artificial Sequence: Synthetic oligonucleotide
  Antisense Strand to SEQ ID NO: 436929
aucuuugcaagguuugcag

SEQ ID NO: 436931 - RNA, 19 nt, Artificial Sequence
  Description of Artificial Sequence: Synthetic oligonucleotide
  Sense strand starting at position 3804 of SEQ ID NO: 316742
gaaagagaugggcgauaug

SEQ ID NO: 436932 - RNA, 19 nt, Artificial Sequence
  Description of Artificial Sequence: Synthetic oligonucleotide
  Antisense Strand to SEQ ID NO: 436931
cauaucgcccaucucuuuc

SEQ ID NO: 436933 - RNA, 19 nt, Artificial Sequence
  Description of Artificial Sequence: Synthetic oligonucleotide
  Sense strand starting at position 23 of SEQ ID NO: 316743
ugugaaguuaaggagguau

SEQ ID NO: 436934 - RNA, 19 nt, Artificial Sequence
  Description of Artificial Sequence: Synthetic oligonucleotide
  Antisense Strand to SEQ ID NO: 436933
auaccuccuuaacuucaca

SEQ ID NO: 436935 - RNA, 19 nt, Artificial Sequence
  Description of Artificial Sequence: Synthetic oligonucleotide
  Sense strand starting at position 25 of SEQ ID NO: 316743
ugaaguuaaggagguauua

SEQ ID NO: 436936 - RNA, 19 nt, Artificial Sequence
  Description of Artificial Sequence: Synthetic oligonucleotide
  Antisense Strand to SEQ ID NO: 436935
uaauaccuccuuaacuuca

SEQ ID NO: 436937 - RNA, 19 nt, Artificial Sequence
  Description of Artificial Sequence: Synthetic oligonucleotide
  Sense strand starting at position 47 of SEQ ID NO: 316743
uggagaaacucugcuggga

SEQ ID NO: 436938 - RNA, 19 nt, Artificial Sequence
  Description of Artificial Sequence: Synthetic oligonucleotide
  Antisense Strand to SEQ ID NO: 436937
ucccagcagaguuucucca

SEQ ID NO: 436939 - RNA, 19 nt, Artificial Sequence
  Description of Artificial Sequence: Synthetic oligonucleotide
  Sense strand starting at position 155 of SEQ ID NO: 316743
guguauaggcccuggaaua

SEQ ID NO: 436940 - RNA, 19 nt, Artificial Sequence
  Description of Artificial Sequence: Synthetic oligonucleotide
  Antisense Strand to SEQ ID NO: 436939
uauuccagggccuauacac

SEQ ID NO: 436941 - RNA, 19 nt, Artificial Sequence
  Description of Artificial Sequence: Synthetic oligonucleotide
  Sense strand starting at position 156 of SEQ ID NO: 316743
uguauaggcccuggaauaa

SEQ ID NO: 436942 - RNA, 19 nt, Artificial Sequence
  Description of Artificial Sequence: Synthetic oligonucleotide
  Antisense Strand to SEQ ID NO: 436941
uuauuccagggccuauaca

SEQ ID NO: 436943 - RNA, 19 nt, Artificial Sequence
  Description of Artificial Sequence: Synthetic oligonucleotide
  Sense strand starting at position 204 of SEQ ID NO: 316743
ggaagccuauuguuacaau

SEQ ID NO: 436944 - RNA, 19 nt, Artificial Sequence
  Description of Artificial Sequence: Synthetic oligonucleotide
  Antisense Strand to SEQ ID NO: 436943
auuguaacaauaggcuucc

SEQ ID NO: 436945 - RNA, 19 nt, Artificial Sequence
  Description of Artificial Sequence: Synthetic oligonucleotide
  Sense strand starting at position 365 of SEQ ID NO: 316743
ccaggaguucuuugagggu

SEQ ID NO: 436946 - RNA, 19 nt, Artificial Sequence
  Description of Artificial Sequence: Synthetic oligonucleotide
  Antisense Strand to SEQ ID NO: 436945
acccucaaagaacuccugg

SEQ ID NO: 436947 - RNA, 19 nt, Artificial Sequence
  Description of Artificial Sequence: Synthetic oligonucleotide
  Sense strand starting at position 454 of SEQ ID NO: 316743
cugauaugcaauuguugga

SEQ ID NO: 436948 - RNA, 19 nt, Artificial Sequence
  Description of Artificial Sequence: Synthetic oligonucleotide
  Antisense Strand to SEQ ID NO: 436947
uccaacaauugcauaucag

SEQ ID NO: 436949 - RNA, 19 nt, Artificial Sequence
  Description of Artificial Sequence: Synthetic oligonucleotide
  Sense strand starting at position 541 of SEQ ID NO: 316743
cuugacuacuaaguaugau

SEQ ID NO: 436950 - RNA, 19 nt, Artificial Sequence
  Description of Artificial Sequence: Synthetic oligonucleotide
  Antisense Strand to SEQ ID NO: 436949
aucauacuuaguagucaag

SEQ ID NO: 436951 - RNA, 19 nt, Artificial Sequence
  Description of Artificial Sequence: Synthetic oligonucleotide
  Sense strand starting at position 901 of SEQ ID NO: 316743
uugugugcacaggauuaaa

SEQ ID NO: 436952 - RNA, 19 nt, Artificial Sequence
  Description of Artificial Sequence: Synthetic oligonucleotide
  Antisense Strand to SEQ ID NO: 436951
uuuaauccugugcacacaa

SEQ ID NO: 436953 - RNA, 19 nt, Artificial Sequence
  Description of Artificial Sequence: Synthetic oligonucleotide
  Sense strand starting at position 949 of SEQ ID NO: 316743
ggagcuugguucucagaag

SEQ ID NO: 436954 - RNA, 19 nt, Artificial Sequence
  Description of Artificial Sequence: Synthetic oligonucleotide
  Antisense Strand to SEQ ID NO: 436953
cuucugagaaccaagcucc

SEQ ID NO: 436955 - RNA, 19 nt, Artificial Sequence
  Description of Artificial Sequence: Synthetic oligonucleotide
  Sense strand starting at position 1301 of SEQ ID NO: 316743
augguaggccugcaguaaa

SEQ ID NO: 436956 - RNA, 19 nt, Artificial Sequence
  Description of Artificial Sequence: Synthetic oligonucleotide
  Antisense Strand to SEQ ID NO: 436955
uuuacugcaggccuaccau

SEQ ID NO: 436957 - RNA, 19 nt, Artificial Sequence
  Description of Artificial Sequence: Synthetic oligonucleotide
  Sense strand starting at position 1319 of SEQ ID NO: 316743
acacguguugauugaauug

SEQ ID NO: 436958 - RNA, 19 nt, Artificial Sequence
  Description of Artificial Sequence: Synthetic oligonucleotide
  Antisense Strand to SEQ ID NO: 436957
caauucaaucaacacgugu

SEQ ID NO: 436959 - RNA, 19 nt, Artificial Sequence
  Description of Artificial Sequence: Synthetic oligonucleotide
  Sense strand starting at position 1324 of SEQ ID NO: 316743
uguugauugaauugagcaa

SEQ ID NO: 436960 - RNA, 19 nt, Artificial Sequence
  Description of Artificial Sequence: Synthetic oligonucleotide
  Antisense Strand to SEQ ID NO: 436959
uugcucaauucaaucaaca

SEQ ID NO: 436961 - RNA, 19 nt, Artificial Sequence
  Description of Artificial Sequence: Synthetic oligonucleotide
  Sense strand starting at position 1488 of SEQ ID NO: 316743
auuguuuggcuccacaaca

SEQ ID NO: 436962 - RNA, 19 nt, Artificial Sequence
  Description of Artificial Sequence: Synthetic oligonucleotide
  Antisense Strand to SEQ ID NO: 436961
uguuguggagccaaacaau

SEQ ID NO: 436963 - RNA, 19 nt, Artificial Sequence
  Description of Artificial Sequence: Synthetic oligonucleotide
  Sense strand starting at position 2393 of SEQ ID NO: 316743
cgcagaugugccuuuggca

SEQ ID NO: 436964 - RNA, 19 nt, Artificial Sequence
  Description of Artificial Sequence: Synthetic oligonucleotide
  Antisense Strand to SEQ ID NO: 436963
ugccaaaggcacaucugcg

SEQ ID NO: 436965 - RNA, 19 nt, Artificial Sequence
  Description of Artificial Sequence: Synthetic oligonucleotide
  Sense strand starting at position 2462 of SEQ ID NO: 316743
uguugaacgcaagaaugaa

SEQ ID NO: 436966 - RNA, 19 nt, Artificial Sequence
  Description of Artificial Sequence: Synthetic oligonucleotide
  Antisense Strand to SEQ ID NO: 436965
uucauucuugcguucaaca

SEQ ID NO: 436967 - RNA, 19 nt, Artificial Sequence
  Description of Artificial Sequence: Synthetic oligonucleotide
  Sense strand starting at position 2640 of SEQ ID NO: 316743
ugguuagcauggguugaga

SEQ ID NO: 436968 - RNA, 19 nt, Artificial Sequence
  Description of Artificial Sequence: Synthetic oligonucleotide
  Antisense Strand to SEQ ID NO: 436967
ucucaacccaugcuaacca

SEQ ID NO: 436969 - RNA, 19 nt, Artificial Sequence
  Description of Artificial Sequence: Synthetic oligonucleotide
  Sense strand starting at position 2642 of SEQ ID NO: 316743
guuagcauggguugagaga

SEQ ID NO: 436970 - RNA, 19 nt, Artificial Sequence
  Description of Artificial Sequence: Synthetic oligonucleotide
  Antisense Strand to SEQ ID NO: 436969
ucucucaacccaugcuaac

SEQ ID NO: 436971 - RNA, 19 nt, Artificial Sequence
  Description of Artificial Sequence: Synthetic oligonucleotide
  Sense strand starting at position 2651 of SEQ ID NO: 316743
gguugagagaggugucaaa

SEQ ID NO: 436972 - RNA, 19 nt, Artificial Sequence
  Description of Artificial Sequence: Synthetic oligonucleotide
  Antisense Strand to SEQ ID NO: 436971
uuugacaccucucucaacc

SEQ ID NO: 436973 - RNA, 19 nt, Artificial Sequence
  Description of Artificial Sequence: Synthetic oligonucleotide
  Sense strand starting at position 2838 of SEQ ID NO: 316743
uuggcauuaagcugagacu

SEQ ID NO: 436974 - RNA, 19 nt, Artificial Sequence
  Description of Artificial Sequence: Synthetic oligonucleotide
  Antisense Strand to SEQ ID NO: 436973
agucucagcuuaaugccaa

SEQ ID NO: 436975 - RNA, 19 nt, Artificial Sequence
  Description of Artificial Sequence: Synthetic oligonucleotide
  Sense strand starting at position 2839 of SEQ ID NO: 316743
uggcauuaagcugagacuu

SEQ ID NO: 436976 - RNA, 19 nt, Artificial Sequence
  Description of Artificial Sequence: Synthetic oligonucleotide
  Antisense Strand to SEQ ID NO: 436975
aagucucagcuuaaugcca

SEQ ID NO: 436977 - RNA, 19 nt, Artificial Sequence
  Description of Artificial Sequence: Synthetic oligonucleotide
  Sense strand starting at position 2847 of SEQ ID NO: 316743
agcugagacuucuccuaag

SEQ ID NO: 436978 - RNA, 19 nt, Artificial Sequence
  Description of Artificial Sequence: Synthetic oligonucleotide
  Antisense Strand to SEQ ID NO: 436977
cuuaggagaagucucagcu

SEQ ID NO: 436979 - RNA, 19 nt, Artificial Sequence
  Description of Artificial Sequence: Synthetic oligonucleotide
  Sense strand starting at position 3038 of SEQ ID NO: 316743
uugugaacccauuguacag

SEQ ID NO: 436980 - RNA, 19 nt, Artificial Sequence
  Description of Artificial Sequence: Synthetic oligonucleotide
  Antisense Strand to SEQ ID NO: 436979
cuguacaauggguucacaa

SEQ ID NO: 436981 - RNA, 19 nt, Artificial Sequence
  Description of Artificial Sequence: Synthetic oligonucleotide
  Sense strand starting at position 3050 of SEQ ID NO: 316743
uguacaguuguggaagcau

SEQ ID NO: 436982 - RNA, 19 nt, Artificial Sequence
  Description of Artificial Sequence: Synthetic oligonucleotide
  Antisense Strand to SEQ ID NO: 436981
augcuuccacaacuguaca

SEQ ID NO: 436983 - RNA, 19 nt, Artificial Sequence
  Description of Artificial Sequence: Synthetic oligonucleotide
  Sense strand starting at position 3059 of SEQ ID NO: 316743
guggaagcaucauuaccaa

SEQ ID NO: 436984 - RNA, 19 nt, Artificial Sequence
  Description of Artificial Sequence: Synthetic oligonucleotide
  Antisense Strand to SEQ ID NO: 436983
uugguaaugaugcuuccac

SEQ ID NO: 436985 - RNA, 19 nt, Artificial Sequence
  Description of Artificial Sequence: Synthetic oligonucleotide
  Sense strand starting at position 3100 of SEQ ID NO: 316743
ccuguugauccuggaucaa

SEQ ID NO: 436986 - RNA, 19 nt, Artificial Sequence
  Description of Artificial Sequence: Synthetic oligonucleotide
  Antisense Strand to SEQ ID NO: 436985
uugauccaggaucaacagg

SEQ ID NO: 436987 - RNA, 19 nt, Artificial Sequence
  Description of Artificial Sequence: Synthetic oligonucleotide
  Sense strand starting at position 3112 of SEQ ID NO: 316743
ggaucaacccugugaaaug

SEQ ID NO: 436988 - RNA, 19 nt, Artificial Sequence
  Description of Artificial Sequence: Synthetic oligonucleotide
  Antisense Strand to SEQ ID NO: 436987
cauuucacaggguugaucc

SEQ ID NO: 436989 - RNA, 19 nt, Artificial Sequence
  Description of Artificial Sequence: Synthetic oligonucleotide
  Sense strand starting at position 3119 of SEQ ID NO: 316743
cccugugaaauggauguua

SEQ ID NO: 436990 - RNA, 19 nt, Artificial Sequence
  Description of Artificial Sequence: Synthetic oligonucleotide
  Antisense Strand to SEQ ID NO: 436989
uaacauccauuucacaggg

SEQ ID NO: 436991 - RNA, 19 nt, Artificial Sequence
  Description of Artificial Sequence: Synthetic oligonucleotide
  Sense strand starting at position 3121 of SEQ ID NO: 316743
cugugaaauggauguuauc

SEQ ID NO: 436992 - RNA, 19 nt, Artificial Sequence
  Description of Artificial Sequence: Synthetic oligonucleotide
  Antisense Strand to SEQ ID NO: 436991
gauaacauccauuucacag

SEQ ID NO: 436993 - RNA, 19 nt, Artificial Sequence
  Description of Artificial Sequence: Synthetic oligonucleotide
  Sense strand starting at position 3164 of SEQ ID NO: 316743
aggccugaaacguggagaa

SEQ ID NO: 436994 - RNA, 19 nt, Artificial Sequence
  Description of Artificial Sequence: Synthetic oligonucleotide
  Antisense Strand to SEQ ID NO: 436993
uucuccacguuucaggccu

SEQ ID NO: 436995 - RNA, 19 nt, Artificial Sequence
  Description of Artificial Sequence: Synthetic oligonucleotide
  Sense strand starting at position 3166 of SEQ ID NO: 316743
gccugaaacguggagaaac

SEQ ID NO: 436996 - RNA, 19 nt, Artificial Sequence
  Description of Artificial Sequence: Synthetic oligonucleotide
  Antisense Strand to SEQ ID NO: 436995
guuucuccacguuucaggc

SEQ ID NO: 436997 - RNA, 19 nt, Artificial Sequence
  Description of Artificial Sequence: Synthetic oligonucleotide
  Sense strand starting at position 3234 of SEQ ID NO: 316743
gaaguaucaccuugaaagu

SEQ ID NO: 436998 - RNA, 19 nt, Artificial Sequence
  Description of Artificial Sequence: Synthetic oligonucleotide
  Antisense Strand to SEQ ID NO: 436997
acuuucaaggugauacuuc

SEQ ID NO: 436999 - RNA, 19 nt, Artificial Sequence
  Description of Artificial Sequence: Synthetic oligonucleotide
  Sense strand starting at position 3276 of SEQ ID NO: 316743
augauagacuguuugcaaa

SEQ ID NO: 437000 - RNA, 19 nt, Artificial Sequence
  Description of Artificial Sequence: Synthetic oligonucleotide
  Antisense Strand to SEQ ID NO: 436999
uuugcaaacagucuaucau

SEQ ID NO: 437001 - RNA, 19 nt, Artificial Sequence
  Description of Artificial Sequence: Synthetic oligonucleotide
  Sense strand starting at position 3367 of SEQ ID NO: 316743
acuugcuuugaccaaagca

SEQ ID NO: 437002 - RNA, 19 nt, Artificial Sequence
  Description of Artificial Sequence: Synthetic oligonucleotide
  Antisense Strand to SEQ ID NO: 437001
ugcuuuggucaaagcaagu

SEQ ID NO: 437003 - RNA, 19 nt, Artificial Sequence
  Description of Artificial Sequence: Synthetic oligonucleotide
  Sense strand starting at position 3447 of SEQ ID NO: 316743
gcaauugugcauuaggauu

SEQ ID NO: 437004 - RNA, 19 nt, Artificial Sequence
  Description of Artificial Sequence: Synthetic oligonucleotide
  Antisense Strand to SEQ ID NO: 437003
aauccuaaugcacaauugc

SEQ ID NO: 437005 - RNA, 19 nt, Artificial Sequence
  Description of Artificial Sequence: Synthetic oligonucleotide
  Sense strand starting at position 3495 of SEQ ID NO: 316743
guaaauaagcuccgaauag

SEQ ID NO: 437006 - RNA, 19 nt, Artificial Sequence
  Description of Artificial Sequence: Synthetic oligonucleotide
  Antisense Strand to SEQ ID NO: 437005
cuauucggagcuuauuuac

SEQ ID NO: 437007 - RNA, 19 nt, Artificial Sequence
  Description of Artificial Sequence: Synthetic oligonucleotide
  Sense strand starting at position 3554 of SEQ ID NO: 316743
ucaccagaugugugaguga

SEQ ID NO: 437008 - RNA, 19 nt, Artificial Sequence
  Description of Artificial Sequence: Synthetic oligonucleotide
  Antisense Strand to SEQ ID NO: 437007
ucacucacacaucugguga

SEQ ID NO: 437009 - RNA, 19 nt, Artificial Sequence
  Description of Artificial Sequence: Synthetic oligonucleotide
  Sense strand starting at position 3753 of SEQ ID NO: 316743
ggcgauuugcuagguauca

SEQ ID NO: 437010 - RNA, 19 nt, Artificial Sequence
  Description of Artificial Sequence: Synthetic oligonucleotide
  Antisense Strand to SEQ ID NO: 437009
ugauaccuagcaaaucgcc

SEQ ID NO: 437011 - RNA, 19 nt, Artificial Sequence
  Description of Artificial Sequence: Synthetic oligonucleotide
  Sense strand starting at position 3754 of SEQ ID NO: 316743
gcgauuugcuagguaucaa

SEQ ID NO: 437012 - RNA, 19 nt, Artificial Sequence
  Description of Artificial Sequence: Synthetic oligonucleotide
  Antisense Strand to SEQ ID NO: 437011
uugauaccuagcaaaucgc

SEQ ID NO: 437013 - RNA, 19 nt, Artificial Sequence
  Description of Artificial Sequence: Synthetic oligonucleotide
  Sense strand starting at position 17 of SEQ ID NO: 316744
cuagucugagcugaaaugu

SEQ ID NO: 437014 - RNA, 19 nt, Artificial Sequence
  Description of Artificial Sequence: Synthetic oligonucleotide
  Antisense Strand to SEQ ID NO: 437013
acauuucagcucagacuag

SEQ ID NO: 437015 - RNA, 19 nt, Artificial Sequence
  Description of Artificial Sequence: Synthetic oligonucleotide
  Sense strand starting at position 132 of SEQ ID NO: 316744
aaggauauuugugaucuac

SEQ ID NO: 437016 - RNA, 19 nt, Artificial Sequence
  Description of Artificial Sequence: Synthetic oligonucleotide
  Antisense Strand to SEQ ID NO: 437015
guagaucacaaauauccuu

SEQ ID NO: 437017 - RNA, 19 nt, Artificial Sequence
  Description of Artificial Sequence: Synthetic oligonucleotide
  Sense strand starting at position 142 of SEQ ID NO: 316744
gugaucuacugaguuaaau

SEQ ID NO: 437018 - RNA, 19 nt, Artificial Sequence
  Description of Artificial Sequence: Synthetic oligonucleotide
  Antisense Strand to SEQ ID NO: 437017
auuuaacucaguagaucac

SEQ ID NO: 437019 - RNA, 19 nt, Artificial Sequence
  Description of Artificial Sequence: Synthetic oligonucleotide
  Sense strand starting at position 290 of SEQ ID NO: 316744
cuaaauugugagggauggu

SEQ ID NO: 437020 - RNA, 19 nt, Artificial Sequence
  Description of Artificial Sequence: Synthetic oligonucleotide
  Antisense Strand to SEQ ID NO: 437019
accaucccucacaauuuag

SEQ ID NO: 437021 - RNA, 19 nt, Artificial Sequence
  Description of Artificial Sequence: Synthetic oligonucleotide
  Sense strand starting at position 331 of SEQ ID NO: 316744
gugaauucuggaggaguca

SEQ ID NO: 437022 - RNA, 19 nt, Artificial Sequence
  Description of Artificial Sequence: Synthetic oligonucleotide
  Antisense Strand to SEQ ID NO: 437021
ugacuccuccagaauucac

SEQ ID NO: 437023 - RNA, 19 nt, Artificial Sequence
  Description of Artificial Sequence: Synthetic oligonucleotide
  Sense strand starting at position 701 of SEQ ID NO: 316744
cugguuguccaacacucau

SEQ ID NO: 437024 - RNA, 19 nt, Artificial Sequence
  Description of Artificial Sequence: Synthetic oligonucleotide
  Antisense Strand to SEQ ID NO: 437023
augaguguuggacaaccag

SEQ ID NO: 437025 - RNA, 19 nt, Artificial Sequence
  Description of Artificial Sequence: Synthetic oligonucleotide
  Sense strand starting at position 940 of SEQ ID NO: 316744
agaaauacugugcagcaua

SEQ ID NO: 437026 - RNA, 19 nt, Artificial Sequence
  Description of Artificial Sequence: Synthetic oligonucleotide
  Antisense Strand to SEQ ID NO: 437025
uaugcugcacaguauuucu

SEQ ID NO: 437027 - RNA, 19 nt, Artificial Sequence
  Description of Artificial Sequence: Synthetic oligonucleotide
  Sense strand starting at position 975 of SEQ ID NO: 316744
guguaaggaaccugggaua

SEQ ID NO: 437028 - RNA, 19 nt, Artificial Sequence
  Description of Artificial Sequence: Synthetic oligonucleotide
  Antisense Strand to SEQ ID NO: 437027
uaucccagguuccuuacac

SEQ ID NO: 437029 - RNA, 19 nt, Artificial Sequence
  Description of Artificial Sequence: Synthetic oligonucleotide
  Sense strand starting at position 978 of SEQ ID NO: 316744
uaaggaaccugggauauuu

SEQ ID NO: 437030 - RNA, 19 nt, Artificial Sequence
  Description of Artificial Sequence: Synthetic oligonucleotide
  Antisense Strand to SEQ ID NO: 437029
aaauaucccagguuccuua

SEQ ID NO: 437031 - RNA, 19 nt, Artificial Sequence
  Description of Artificial Sequence: Synthetic oligonucleotide
  Sense strand starting at position 1015 of SEQ ID NO: 316744
cuuaguauugagggucaau

SEQ ID NO: 437032 - RNA, 19 nt, Artificial Sequence
  Description of Artificial Sequence: Synthetic oligonucleotide
  Antisense Strand to SEQ ID NO: 437031
auugacccucaauacuaag

SEQ ID NO: 437033 - RNA, 19 nt, Artificial Sequence
  Description of Artificial Sequence: Synthetic oligonucleotide
  Sense strand starting at position 1018 of SEQ ID NO: 316744
aguauugagggucaaucuu

SEQ ID NO: 437034 - RNA, 19 nt, Artificial Sequence
  Description of Artificial Sequence: Synthetic oligonucleotide
  Antisense Strand to SEQ ID NO: 437033
aagauugacccucaauacu

SEQ ID NO: 437035 - RNA, 19 nt, Artificial Sequence
  Description of Artificial Sequence: Synthetic oligonucleotide
  Sense strand starting at position 1134 of SEQ ID NO: 316744
aggaaaugucugcaaguga

SEQ ID NO: 437036 - RNA, 19 nt, Artificial Sequence
  Description of Artificial Sequence: Synthetic oligonucleotide
  Antisense Strand to SEQ ID NO: 437035
ucacuugcagacauuuccu

SEQ ID NO: 437037 - RNA, 19 nt, Artificial Sequence
  Description of Artificial Sequence: Synthetic oligonucleotide
  Sense strand starting at position 1187 of SEQ ID NO: 316744
acagacagggucugcuaua

SEQ ID NO: 437038 - RNA, 19 nt, Artificial Sequence
  Description of Artificial Sequence: Synthetic oligonucleotide
  Antisense Strand to SEQ ID NO: 437037
uauagcagacccugucugu

SEQ ID NO: 437039 - RNA, 19 nt, Artificial Sequence
  Description of Artificial Sequence: Synthetic oligonucleotide
  Sense strand starting at position 1192 of SEQ ID NO: 316744
cagggucugcuauaccuua

SEQ ID NO: 437040 - RNA, 19 nt, Artificial Sequence
  Description of Artificial Sequence: Synthetic oligonucleotide
  Antisense Strand to SEQ ID NO: 437039
uaagguauagcagacccug

SEQ ID NO: 437041 - RNA, 19 nt, Artificial Sequence
  Description of Artificial Sequence: Synthetic oligonucleotide
  Sense strand starting at position 1197 of SEQ ID NO: 316744
ucugcuauaccuuagaaga

SEQ ID NO: 437042 - RNA, 19 nt, Artificial Sequence
  Description of Artificial Sequence: Synthetic oligonucleotide
  Antisense Strand to SEQ ID NO: 437041
ucuucuaagguauagcaga

SEQ ID NO: 437043 - RNA, 19 nt, Artificial Sequence
  Description of Artificial Sequence: Synthetic oligonucleotide
  Sense strand starting at position 1249 of SEQ ID NO: 316744
ggcaauaguccugaucuac

SEQ ID NO: 437044 - RNA, 19 nt, Artificial Sequence
  Description of Artificial Sequence: Synthetic oligonucleotide
  Antisense Strand to SEQ ID NO: 437043
guagaucaggacuauugcc

SEQ ID NO: 437045 - RNA, 19 nt, Artificial Sequence
  Description of Artificial Sequence: Synthetic oligonucleotide
  Sense strand starting at position 1268 of SEQ ID NO: 316744
uggaucaagccuuacuuga

SEQ ID NO: 437046 - RNA, 19 nt, Artificial Sequence
  Description of Artificial Sequence: Synthetic oligonucleotide
  Antisense Strand to SEQ ID NO: 437045
ucaaguaaggcuugaucca

SEQ ID NO: 437047 - RNA, 19 nt, Artificial Sequence
  Description of Artificial Sequence: Synthetic oligonucleotide
  Sense strand starting at position 1407 of SEQ ID NO: 316744
uccuacaauugagcagauu

SEQ ID NO: 437048 - RNA, 19 nt, Artificial Sequence
  Description of Artificial Sequence: Synthetic oligonucleotide
  Antisense Strand to SEQ ID NO: 437047
aaucugcucaauuguagga

SEQ ID NO: 437049 - RNA, 19 nt, Artificial Sequence
  Description of Artificial Sequence: Synthetic oligonucleotide
  Sense strand starting at position 1514 of SEQ ID NO: 316744
ggaggaguugcaugggaug

SEQ ID NO: 437050 - RNA, 19 nt, Artificial Sequence
  Description of Artificial Sequence: Synthetic oligonucleotide
  Antisense Strand to SEQ ID NO: 437049
caucccaugcaacuccucc

SEQ ID NO: 437051 - RNA, 19 nt, Artificial Sequence
  Description of Artificial Sequence: Synthetic oligonucleotide
  Sense strand starting at position 1660 of SEQ ID NO: 316744
uguuaauuccgguaaacug

SEQ ID NO: 437052 - RNA, 19 nt, Artificial Sequence
  Description of Artificial Sequence: Synthetic oligonucleotide
  Antisense Strand to SEQ ID NO: 437051
caguuuaccggaauuaaca

SEQ ID NO: 437053 - RNA, 19 nt, Artificial Sequence
  Description of Artificial Sequence: Synthetic oligonucleotide
  Sense strand starting at position 1691 of SEQ ID NO: 316744
aaucuuguuguggaagcaa

SEQ ID NO: 437054 - RNA, 19 nt, Artificial Sequence
  Description of Artificial Sequence: Synthetic oligonucleotide
  Antisense Strand to SEQ ID NO: 437053
uugcuuccacaacaagauu

SEQ ID NO: 437055 - RNA, 19 nt, Artificial Sequence
  Description of Artificial Sequence: Synthetic oligonucleotide
  Sense strand starting at position 1728 of SEQ ID NO: 316744
cuuugaugcacagggaauu

SEQ ID NO: 437056 - RNA, 19 nt, Artificial Sequence
  Description of Artificial Sequence: Synthetic oligonucleotide
  Antisense Strand to SEQ ID NO: 437055
aauucccugugcaucaaag

SEQ ID NO: 437057 - RNA, 19 nt, Artificial Sequence
  Description of Artificial Sequence: Synthetic oligonucleotide
  Sense strand starting at position 1809 of SEQ ID NO: 316744
aguaauuguguccauaaau

SEQ ID NO: 437058 - RNA, 19 nt, Artificial Sequence
  Description of Artificial Sequence: Synthetic oligonucleotide
  Antisense Strand to SEQ ID NO: 437057
auuuauggacacaauuacu

SEQ ID NO: 437059 - RNA, 19 nt, Artificial Sequence
  Description of Artificial Sequence: Synthetic oligonucleotide
  Sense strand starting at position 1882 of SEQ ID NO: 316744
ucacaagguuuaguggauu

SEQ ID NO: 437060 - RNA, 19 nt, Artificial Sequence
  Description of Artificial Sequence: Synthetic oligonucleotide
  Antisense Strand to SEQ ID NO: 437059
aauccacuaaaccuuguga

SEQ ID NO: 437061 - RNA, 19 nt, Artificial Sequence
  Description of Artificial Sequence: Synthetic oligonucleotide
  Sense strand starting at position 2329 of SEQ ID NO: 316744
aggugaauucuacagcaac

SEQ ID NO: 437062 - RNA, 19 nt, Artificial Sequence
  Description of Artificial Sequence: Synthetic oligonucleotide
  Antisense Strand to SEQ ID NO: 437061
guugcuguagaauucaccu

SEQ ID NO: 437063 - RNA, 19 nt, Artificial Sequence
  Description of Artificial Sequence: Synthetic oligonucleotide
  Sense strand starting at position 2585 of SEQ ID NO: 316744
cagggacuuugggucauua

SEQ ID NO: 437064 - RNA, 19 nt, Artificial Sequence
  Description of Artificial Sequence: Synthetic oligonucleotide
  Antisense Strand to SEQ ID NO: 437063
uaaugacccaaagucccug

SEQ ID NO: 437065 - RNA, 19 nt, Artificial Sequence
  Description of Artificial Sequence: Synthetic oligonucleotide
  Sense strand starting at position 2589 of SEQ ID NO: 316744
gacuuugggucauuauaag

SEQ ID NO: 437066 - RNA, 19 nt, Artificial Sequence
  Description of Artificial Sequence: Synthetic oligonucleotide
  Antisense Strand to SEQ ID NO: 437065
cuuauaaugacccaaaguc

SEQ ID NO: 437067 - RNA, 19 nt, Artificial Sequence
  Description of Artificial Sequence: Synthetic oligonucleotide
  Sense strand starting at position 2705 of SEQ ID NO: 316744
uguaauuuacggugcuauc

SEQ ID NO: 437068 - RNA, 19 nt, Artificial Sequence
  Description of Artificial Sequence: Synthetic oligonucleotide
  Antisense Strand to SEQ ID NO: 437067
gauagcaccguaaauuaca

SEQ ID NO: 437069 - RNA, 19 nt, Artificial Sequence
  Description of Artificial Sequence: Synthetic oligonucleotide
  Sense strand starting at position 2841 of SEQ ID NO: 316744
uaaguauagcuugaaacug

SEQ ID NO: 437070 - RNA, 19 nt, Artificial Sequence
  Description of Artificial Sequence: Synthetic oligonucleotide
  Antisense Strand to SEQ ID NO: 437069
caguuucaagcuauacuua

SEQ ID NO: 437071 - RNA, 19 nt, Artificial Sequence
  Description of Artificial Sequence: Synthetic oligonucleotide
  Sense strand starting at position 2867 of SEQ ID NO: 316744
gccagaucccacuauugug

SEQ ID NO: 437072 - RNA, 19 nt, Artificial Sequence
  Description of Artificial Sequence: Synthetic oligonucleotide
  Antisense Strand to SEQ ID NO: 437071
cacaauagugggaucuggc

SEQ ID NO: 437073 - RNA, 19 nt, Artificial Sequence
  Description of Artificial Sequence: Synthetic oligonucleotide
  Sense strand starting at position 2899 of SEQ ID NO: 316744
cauuguugagacugaaauu

SEQ ID NO: 437074 - RNA, 19 nt, Artificial Sequence
  Description of Artificial Sequence: Synthetic oligonucleotide
  Antisense Strand to SEQ ID NO: 437073
aauuucagucucaacaaug

SEQ ID NO: 437075 - RNA, 19 nt, Artificial Sequence
  Description of Artificial Sequence: Synthetic oligonucleotide
  Sense strand starting at position 2910 of SEQ ID NO: 316744
cugaaauugcacugggaug

SEQ ID NO: 437076 - RNA, 19 nt, Artificial Sequence
  Description of Artificial Sequence: Synthetic oligonucleotide
  Antisense Strand to SEQ ID NO: 437075
caucccagugcaauuucag

SEQ ID NO: 437077 - RNA, 19 nt, Artificial Sequence
  Description of Artificial Sequence: Synthetic oligonucleotide
  Sense strand starting at position 2912 of SEQ ID NO: 316744
gaaauugcacugggauguu

SEQ ID NO: 437078 - RNA, 19 nt, Artificial Sequence
  Description of Artificial Sequence: Synthetic oligonucleotide
  Antisense Strand to SEQ ID NO: 437077
aacaucccagugcaauuuc

SEQ ID NO: 437079 - RNA, 19 nt, Artificial Sequence
  Description of Artificial Sequence: Synthetic oligonucleotide
  Sense strand starting at position 3004 of SEQ ID NO: 316744
cagggagaauuguucuucu

SEQ ID NO: 437080 - RNA, 19 nt, Artificial Sequence
  Description of Artificial Sequence: Synthetic oligonucleotide
  Antisense Strand to SEQ ID NO: 437079
agaagaacaauucucccug

SEQ ID NO: 437081 - RNA, 19 nt, Artificial Sequence
  Description of Artificial Sequence: Synthetic oligonucleotide
  Sense strand starting at position 3150 of SEQ ID NO: 316744
agcaaagaagguugaaauu

SEQ ID NO: 437082 - RNA, 19 nt, Artificial Sequence
  Description of Artificial Sequence: Synthetic oligonucleotide
  Antisense Strand to SEQ ID NO: 437081
aauuucaaccuucuuugcu

SEQ ID NO: 437083 - RNA, 19 nt, Artificial Sequence
  Description of Artificial Sequence: Synthetic oligonucleotide
  Sense strand starting at position 3257 of SEQ ID NO: 316744
auaguuacucucugauaug

SEQ ID NO: 437084 - RNA, 19 nt, Artificial Sequence
  Description of Artificial Sequence: Synthetic oligonucleotide
  Antisense Strand to SEQ ID NO: 437083
cauaucagagaguaacuau

SEQ ID NO: 437085 - RNA, 19 nt, Artificial Sequence
  Description of Artificial Sequence: Synthetic oligonucleotide
  Sense strand starting at position 3444 of SEQ ID NO: 316744
ggaguuucccaacacaagu

SEQ ID NO: 437086 - RNA, 19 nt, Artificial Sequence
  Description of Artificial Sequence: Synthetic oligonucleotide
  Antisense Strand to SEQ ID NO: 437085
acuuguguugggaaacucc

SEQ ID NO: 437087 - RNA, 19 nt, Artificial Sequence
  Description of Artificial Sequence: Synthetic oligonucleotide
  Sense strand starting at position 3625 of SEQ ID NO: 316744
uccuauucucaagguagau

SEQ ID NO: 437088 - RNA, 19 nt, Artificial Sequence
  Description of Artificial Sequence: Synthetic oligonucleotide
  Antisense Strand to SEQ ID NO: 437087
aucuaccuugagaauagga

SEQ ID NO: 437089 - RNA, 19 nt, Artificial Sequence
  Description of Artificial Sequence: Synthetic oligonucleotide
  Sense strand starting at position 3809 of SEQ ID NO: 316744
cccauaugcccauauguau

SEQ ID NO: 437090 - RNA, 19 nt, Artificial Sequence
  Description of Artificial Sequence: Synthetic oligonucleotide
  Antisense Strand to SEQ ID NO: 437089
auacauaugggcauauggg

SEQ ID NO: 437091 - RNA, 19 nt, Artificial Sequence
  Description of Artificial Sequence: Synthetic oligonucleotide
  Sense strand starting at position 3920 of SEQ ID NO: 316744
guucauaugcuaggagaug

SEQ ID NO: 437092 - RNA, 19 nt, Artificial Sequence
  Description of Artificial Sequence: Synthetic oligonucleotide
  Antisense Strand to SEQ ID NO: 437091
caucuccuagcauaugaac

SEQ ID NO: 437093 - RNA, 19 nt, Artificial Sequence
  Description of Artificial Sequence: Synthetic oligonucleotide
  Sense strand starting at position 54 of SEQ ID NO: 316745
gccucugcugaggauucua

SEQ ID NO: 437094 - RNA, 19 nt, Artificial Sequence
  Description of Artificial Sequence: Synthetic oligonucleotide
  Antisense Strand to SEQ ID NO: 437093
uagaauccucagcagaggc

SEQ ID NO: 437095 - RNA, 19 nt, Artificial Sequence
  Description of Artificial Sequence: Synthetic oligonucleotide
  Sense strand starting at position 122 of SEQ ID NO: 316745
agugucuacaacuggugaa

SEQ ID NO: 437096 - RNA, 19 nt, Artificial Sequence
  Description of Artificial Sequence: Synthetic oligonucleotide
  Antisense Strand to SEQ ID NO: 437095
uucaccaguuguagacacu

SEQ ID NO: 437097 - RNA, 19 nt, Artificial Sequence
  Description of Artificial Sequence: Synthetic oligonucleotide
  Sense strand starting at position 134 of SEQ ID NO: 316745
uggugaagaucuucaaggu

SEQ ID NO: 437098 - RNA, 19 nt, Artificial Sequence
  Description of Artificial Sequence: Synthetic oligonucleotide
  Antisense Strand to SEQ ID NO: 437097
accuugaagaucuucacca

SEQ ID NO: 437099 - RNA, 19 nt, Artificial Sequence
  Description of Artificial Sequence: Synthetic oligonucleotide
  Sense strand starting at position 135 of SEQ ID NO: 316745
ggugaagaucuucaagguu

SEQ ID NO: 437100 - RNA, 19 nt, Artificial Sequence
  Description of Artificial Sequence: Synthetic oligonucleotide
  Antisense Strand to SEQ ID NO: 437099
aaccuugaagaucuucacc

SEQ ID NO: 437101 - RNA, 19 nt, Artificial Sequence
  Description of Artificial Sequence: Synthetic oligonucleotide
  Sense strand starting at position 297 of SEQ ID NO: 316745
agguaauggcacugaauag

SEQ ID NO: 437102 - RNA, 19 nt, Artificial Sequence
  Description of Artificial Sequence: Synthetic oligonucleotide
  Antisense Strand to SEQ ID NO: 437101
cuauucagugccauuaccu

SEQ ID NO: 437103 - RNA, 19 nt, Artificial Sequence
  Description of Artificial Sequence: Synthetic oligonucleotide
  Sense strand starting at position 325 of SEQ ID NO: 316745
uauuaugugcaugacaaag

SEQ ID NO: 437104 - RNA, 19 nt, Artificial Sequence
  Description of Artificial Sequence: Synthetic oligonucleotide
  Antisense Strand to SEQ ID NO: 437103
cuuugucaugcacauaaua

SEQ ID NO: 437105 - RNA, 19 nt, Artificial Sequence
  Description of Artificial Sequence: Synthetic oligonucleotide
  Sense strand starting at position 331 of SEQ ID NO: 316745
gugcaugacaaaggagaau

SEQ ID NO: 437106 - RNA, 19 nt, Artificial Sequence
  Description of Artificial Sequence: Synthetic oligonucleotide
  Antisense Strand to SEQ ID NO: 437105
auucuccuuugucaugcac

SEQ ID NO: 437107 - RNA, 19 nt, Artificial Sequence
  Description of Artificial Sequence: Synthetic oligonucleotide
  Sense strand starting at position 691 of SEQ ID NO: 316745
cagucauguugauuaaugu

SEQ ID NO: 437108 - RNA, 19 nt, Artificial Sequence
  Description of Artificial Sequence: Synthetic oligonucleotide
  Antisense Strand to SEQ ID NO: 437107
acauuaaucaacaugacug

SEQ ID NO: 437109 - RNA, 19 nt, Artificial Sequence
  Description of Artificial Sequence: Synthetic oligonucleotide
  Sense strand starting at position 692 of SEQ ID NO: 316745
agucauguugauuaaugua

SEQ ID NO: 437110 - RNA, 19 nt, Artificial Sequence
  Description of Artificial Sequence: Synthetic oligonucleotide
  Antisense Strand to SEQ ID NO: 437109
uacauuaaucaacaugacu

SEQ ID NO: 437111 - RNA, 19 nt, Artificial Sequence
  Description of Artificial Sequence: Synthetic oligonucleotide
  Sense strand starting at position 716 of SEQ ID NO: 316745
acuuaacuugccuauugga

SEQ ID NO: 437112 - RNA, 19 nt, Artificial Sequence
  Description of Artificial Sequence: Synthetic oligonucleotide
  Antisense Strand to SEQ ID NO: 437111
uccaauaggcaaguuaagu

SEQ ID NO: 437113 - RNA, 19 nt, Artificial Sequence
  Description of Artificial Sequence: Synthetic oligonucleotide
  Sense strand starting at position 870 of SEQ ID NO: 316745
acaagaaagcacggguuaa

SEQ ID NO: 437114 - RNA, 19 nt, Artificial Sequence
  Description of Artificial Sequence: Synthetic oligonucleotide
  Antisense Strand to SEQ ID NO: 437113
uuaacccgugcuuucuugu

SEQ ID NO: 437115 - RNA, 19 nt, Artificial Sequence
  Description of Artificial Sequence: Synthetic oligonucleotide
  Sense strand starting at position 919 of SEQ ID NO: 316745
gccagagagcauuaacuaa

SEQ ID NO: 437116 - RNA, 19 nt, Artificial Sequence
  Description of Artificial Sequence: Synthetic oligonucleotide
  Antisense Strand to SEQ ID NO: 437115
uuaguuaaugcucucuggc

SEQ ID NO: 437117 - RNA, 19 nt, Artificial Sequence
  Description of Artificial Sequence: Synthetic oligonucleotide
  Sense strand starting at position 945 of SEQ ID NO: 316745
ugcagugcacuugaaguua

SEQ ID NO: 437118 - RNA, 19 nt, Artificial Sequence
  Description of Artificial Sequence: Synthetic oligonucleotide
  Antisense Strand to SEQ ID NO: 437117
uaacuucaagugcacugca

SEQ ID NO: 437119 - RNA, 19 nt, Artificial Sequence
  Description of Artificial Sequence: Synthetic oligonucleotide
  Sense strand starting at position 1051 of SEQ ID NO: 316745
cugcaaacgcaguaauaau

SEQ ID NO: 437120 - RNA, 19 nt, Artificial Sequence
  Description of Artificial Sequence: Synthetic oligonucleotide
  Antisense Strand to SEQ ID NO: 437119
auuauuacugcguuugcag

SEQ ID NO: 437121 - RNA, 19 nt, Artificial Sequence
  Description of Artificial Sequence: Synthetic oligonucleotide
  Sense strand starting at position 1062 of SEQ ID NO: 316745
guaauaaugggaggcuuua

SEQ ID NO: 437122 - RNA, 19 nt, Artificial Sequence
  Description of Artificial Sequence: Synthetic oligonucleotide
  Antisense Strand to SEQ ID NO: 437121
uaaagccucccauuauuac

SEQ ID NO: 437123 - RNA, 19 nt, Artificial Sequence
  Description of Artificial Sequence: Synthetic oligonucleotide
  Sense strand starting at position 1071 of SEQ ID NO: 316745
ggaggcuuuaacggacaau

SEQ ID NO: 437124 - RNA, 19 nt, Artificial Sequence
  Description of Artificial Sequence: Synthetic oligonucleotide
  Antisense Strand to SEQ ID NO: 437123
auuguccguuaaagccucc

SEQ ID NO: 437125 - RNA, 19 nt, Artificial Sequence
  Description of Artificial Sequence: Synthetic oligonucleotide
  Sense strand starting at position 1074 of SEQ ID NO: 316745
ggcuuuaacggacaauuag

SEQ ID NO: 437126 - RNA, 19 nt, Artificial Sequence
  Description of Artificial Sequence: Synthetic oligonucleotide
  Antisense Strand to SEQ ID NO: 437125
cuaauuguccguuaaagcc

SEQ ID NO: 437127 - RNA, 19 nt, Artificial Sequence
  Description of Artificial Sequence: Synthetic oligonucleotide
  Sense strand starting at position 1252 of SEQ ID NO: 316745
agucauauucuagggcaca

SEQ ID NO: 437128 - RNA, 19 nt, Artificial Sequence
  Description of Artificial Sequence: Synthetic oligonucleotide
  Antisense Strand to SEQ ID NO: 437127
ugugcccuagaauaugacu

SEQ ID NO: 437129 - RNA, 19 nt, Artificial Sequence
  Description of Artificial Sequence: Synthetic oligonucleotide
  Sense strand starting at position 1383 of SEQ ID NO: 316745
aggucuuucuaccuggaaa

SEQ ID NO: 437130 - RNA, 19 nt, Artificial Sequence
  Description of Artificial Sequence: Synthetic oligonucleotide
  Antisense Strand to SEQ ID NO: 437129
uuuccagguagaaagaccu

SEQ ID NO: 437131 - RNA, 19 nt, Artificial Sequence
  Description of Artificial Sequence: Synthetic oligonucleotide
  Sense strand starting at position 1385 of SEQ ID NO: 316745
gucuuucuaccuggaaauu

SEQ ID NO: 437132 - RNA, 19 nt, Artificial Sequence
  Description of Artificial Sequence: Synthetic oligonucleotide
  Antisense Strand to SEQ ID NO: 437131
aauuuccagguagaaagac

SEQ ID NO: 437133 - RNA, 19 nt, Artificial Sequence
  Description of Artificial Sequence: Synthetic oligonucleotide
  Sense strand starting at position 1421 of SEQ ID NO: 316745
acaacucuugugugauaag

SEQ ID NO: 437134 - RNA, 19 nt, Artificial Sequence
  Description of Artificial Sequence: Synthetic oligonucleotide
  Antisense Strand to SEQ ID NO: 437133
cuuaucacacaagaguugu

SEQ ID NO: 437135 - RNA, 19 nt, Artificial Sequence
  Description of Artificial Sequence: Synthetic oligonucleotide
  Sense strand starting at position 1428 of SEQ ID NO: 316745
uugugugauaagggaaaca

SEQ ID NO: 437136 - RNA, 19 nt, Artificial Sequence
  Description of Artificial Sequence: Synthetic oligonucleotide
  Antisense Strand to SEQ ID NO: 437135
uguuucccuuaucacacaa

SEQ ID NO: 437137 - RNA, 19 nt, Artificial Sequence
  Description of Artificial Sequence: Synthetic oligonucleotide
  Sense strand starting at position 1588 of SEQ ID NO: 316745
ucauuaagugucuaacaca

SEQ ID NO: 437138 - RNA, 19 nt, Artificial Sequence
  Description of Artificial Sequence: Synthetic oligonucleotide
  Antisense Strand to SEQ ID NO: 437137
uguguuagacacuuaauga

SEQ ID NO: 437139 - RNA, 19 nt, Artificial Sequence
  Description of Artificial Sequence: Synthetic oligonucleotide
  Sense strand starting at position 1826 of SEQ ID NO: 316745
ucaugauuguaagcauaaa

SEQ ID NO: 437140 - RNA, 19 nt, Artificial Sequence
  Description of Artificial Sequence: Synthetic oligonucleotide
  Antisense Strand to SEQ ID NO: 437139
uuuaugcuuacaaucauga

SEQ ID NO: 437141 - RNA, 19 nt, Artificial Sequence
  Description of Artificial Sequence: Synthetic oligonucleotide
  Sense strand starting at position 1983 of SEQ ID NO: 316745
ccuuaauaugcuucgugcu

SEQ ID NO: 437142 - RNA, 19 nt, Artificial Sequence
  Description of Artificial Sequence: Synthetic oligonucleotide
  Antisense Strand to SEQ ID NO: 437141
agcacgaagcauauuaagg

SEQ ID NO: 437143 - RNA, 19 nt, Artificial Sequence
  Description of Artificial Sequence: Synthetic oligonucleotide
  Sense strand starting at position 2060 of SEQ ID NO: 316745
auagaauguuagucaagau

SEQ ID NO: 437144 - RNA, 19 nt, Artificial Sequence
  Description of Artificial Sequence: Synthetic oligonucleotide
  Antisense Strand to SEQ ID NO: 437143
aucuugacuaacauucuau

SEQ ID NO: 437145 - RNA, 19 nt, Artificial Sequence
  Description of Artificial Sequence: Synthetic oligonucleotide
  Sense strand starting at position 2064 of SEQ ID NO: 316745
aauguuagucaagauugcu

SEQ ID NO: 437146 - RNA, 19 nt, Artificial Sequence
  Description of Artificial Sequence: Synthetic oligonucleotide
  Antisense Strand to SEQ ID NO: 437145
agcaaucuugacuaacauu

SEQ ID NO: 437147 - RNA, 19 nt, Artificial Sequence
  Description of Artificial Sequence: Synthetic oligonucleotide
  Sense strand starting at position 2072 of SEQ ID NO: 316745
ucaagauugcuaggcaauu

SEQ ID NO: 437148 - RNA, 19 nt, Artificial Sequence
  Description of Artificial Sequence: Synthetic oligonucleotide
  Antisense Strand to SEQ ID NO: 437147
aauugccuagcaaucuuga

SEQ ID NO: 437149 - RNA, 19 nt, Artificial Sequence
  Description of Artificial Sequence: Synthetic oligonucleotide
  Sense strand starting at position 2189 of SEQ ID NO: 316745
ugcuguguacaagaaggau

SEQ ID NO: 437150 - RNA, 19 nt, Artificial Sequence
  Description of Artificial Sequence: Synthetic oligonucleotide
  Antisense Strand to SEQ ID NO: 437149
auccuucuuguacacagca

SEQ ID NO: 437151 - RNA, 19 nt, Artificial Sequence
  Description of Artificial Sequence: Synthetic oligonucleotide
  Sense strand starting at position 2244 of SEQ ID NO: 316745
guuguauaacuuuacugau

SEQ ID NO: 437152 - RNA, 19 nt, Artificial Sequence
  Description of Artificial Sequence: Synthetic oligonucleotide
  Antisense Strand to SEQ ID NO: 437151
aucaguaaaguuauacaac

SEQ ID NO: 437153 - RNA, 19 nt, Artificial Sequence
  Description of Artificial Sequence: Synthetic oligonucleotide
  Sense strand starting at position 2319 of SEQ ID NO: 316745
ucaaauugcugaguaaugu

SEQ ID NO: 437154 - RNA, 19 nt, Artificial Sequence
  Description of Artificial Sequence: Synthetic oligonucleotide
  Antisense Strand to SEQ ID NO: 437153
acauuacucagcaauuuga

SEQ ID NO: 437155 - RNA, 19 nt, Artificial Sequence
  Description of Artificial Sequence: Synthetic oligonucleotide
  Sense strand starting at position 2320 of SEQ ID NO: 316745
caaauugcugaguaauguu

SEQ ID NO: 437156 - RNA, 19 nt, Artificial Sequence
  Description of Artificial Sequence: Synthetic oligonucleotide
  Antisense Strand to SEQ ID NO: 437155
aacauuacucagcaauuug

SEQ ID NO: 437157 - RNA, 19 nt, Artificial Sequence
  Description of Artificial Sequence: Synthetic oligonucleotide
  Sense strand starting at position 2328 of SEQ ID NO: 316745
ugaguaauguuaucaugaa

SEQ ID NO: 437158 - RNA, 19 nt, Artificial Sequence
  Description of Artificial Sequence: Synthetic oligonucleotide
  Antisense Strand to SEQ ID NO: 437157
uucaugauaacauuacuca

SEQ ID NO: 437159 - RNA, 19 nt, Artificial Sequence
  Description of Artificial Sequence: Synthetic oligonucleotide
  Sense strand starting at position 2370 of SEQ ID NO: 316745
aggaaugaguaggacagau

SEQ ID NO: 437160 - RNA, 19 nt, Artificial Sequence
  Description of Artificial Sequence: Synthetic oligonucleotide
  Antisense Strand to SEQ ID NO: 437159
aucuguccuacucauuccu

SEQ ID NO: 437161 - RNA, 19 nt, Artificial Sequence
  Description of Artificial Sequence: Synthetic oligonucleotide
  Sense strand starting at position 2444 of SEQ ID NO: 316745
uaguauuaagcaggaaaca

SEQ ID NO: 437162 - RNA, 19 nt, Artificial Sequence
  Description of Artificial Sequence: Synthetic oligonucleotide
  Antisense Strand to SEQ ID NO: 437161
uguuuccugcuuaauacua

SEQ ID NO: 437163 - RNA, 19 nt, Artificial Sequence
  Description of Artificial Sequence: Synthetic oligonucleotide
  Sense strand starting at position 2529 of SEQ ID NO: 316745
aagguuuggcuuuagaaua

SEQ ID NO: 437164 - RNA, 19 nt, Artificial Sequence
  Description of Artificial Sequence: Synthetic oligonucleotide
  Antisense Strand to SEQ ID NO: 437163
uauucuaaagccaaaccuu

SEQ ID NO: 437165 - RNA, 19 nt, Artificial Sequence
  Description of Artificial Sequence: Synthetic oligonucleotide
  Sense strand starting at position 2571 of SEQ ID NO: 316745
ucuacuucgacguaagaug

SEQ ID NO: 437166 - RNA, 19 nt, Artificial Sequence
  Description of Artificial Sequence: Synthetic oligonucleotide
  Antisense Strand to SEQ ID NO: 437165
caucuuacgucgaaguaga

SEQ ID NO: 437167 - RNA, 19 nt, Artificial Sequence
  Description of Artificial Sequence: Synthetic oligonucleotide
  Sense strand starting at position 3747 of SEQ ID NO: 316745
acuguuuauuuguaaagag

SEQ ID NO: 437168 - RNA, 19 nt, Artificial Sequence
  Description of Artificial Sequence: Synthetic oligonucleotide
  Antisense Strand to SEQ ID NO: 437167
cucuuuacaaauaaacagu

SEQ ID NO: 437169 - RNA, 19 nt, Artificial Sequence
  Description of Artificial Sequence: Synthetic oligonucleotide
  Sense strand starting at position 3759 of SEQ ID NO: 316745
uaaagaggaugcuuaguau

SEQ ID NO: 437170 - RNA, 19 nt, Artificial Sequence
  Description of Artificial Sequence: Synthetic oligonucleotide
  Antisense Strand to SEQ ID NO: 437169
auacuaagcauccucuuua

SEQ ID NO: 437171 - RNA, 19 nt, Artificial Sequence
  Description of Artificial Sequence: Synthetic oligonucleotide
  Sense strand starting at position 3896 of SEQ ID NO: 316745
uggucaagucaucaguguu

SEQ ID NO: 437172 - RNA, 19 nt, Artificial Sequence
  Description of Artificial Sequence: Synthetic oligonucleotide
  Antisense Strand to SEQ ID NO: 437171
aacacugaugacuugacca

SEQ ID NO: 437173 - RNA, 19 nt, Artificial Sequence
  Description of Artificial Sequence: Synthetic oligonucleotide
  Sense strand starting at position 23 of SEQ ID NO: 316746
agaagucaguuacauuaaa

SEQ ID NO: 437174 - RNA, 19 nt, Artificial Sequence
  Description of Artificial Sequence: Synthetic oligonucleotide
  Antisense Strand to SEQ ID NO: 437173
uuuaauguaacugacuucu

SEQ ID NO: 437175 - RNA, 19 nt, Artificial Sequence
  Description of Artificial Sequence: Synthetic oligonucleotide
  Sense strand starting at position 115 of SEQ ID NO: 316746
agcacugauuuggaagcua

SEQ ID NO: 437176 - RNA, 19 nt, Artificial Sequence
  Description of Artificial Sequence: Synthetic oligonucleotide
  Antisense Strand to SEQ ID NO: 437175
uagcuuccaaaucagugcu

SEQ ID NO: 437177 - RNA, 19 nt, Artificial Sequence
  Description of Artificial Sequence: Synthetic oligonucleotide
  Sense strand starting at position 246 of SEQ ID NO: 316746
ugcagacucuucucaucga

SEQ ID NO: 437178 - RNA, 19 nt, Artificial Sequence
  Description of Artificial Sequence: Synthetic oligonucleotide
  Antisense Strand to SEQ ID NO: 437177
ucgaugagaagagucugca

SEQ ID NO: 437179 - RNA, 19 nt, Artificial Sequence
  Description of Artificial Sequence: Synthetic oligonucleotide
  Sense strand starting at position 247 of SEQ ID NO: 316746
gcagacucuucucaucgau

SEQ ID NO: 437180 - RNA, 19 nt, Artificial Sequence
  Description of Artificial Sequence: Synthetic oligonucleotide
  Antisense Strand to SEQ ID NO: 437179
aucgaugagaagagucugc

SEQ ID NO: 437181 - RNA, 19 nt, Artificial Sequence
  Description of Artificial Sequence: Synthetic oligonucleotide
  Sense strand starting at position 249 of SEQ ID NO: 316746
agacucuucucaucgaucu

SEQ ID NO: 437182 - RNA, 19 nt, Artificial Sequence
  Description of Artificial Sequence: Synthetic oligonucleotide
  Antisense Strand to SEQ ID NO: 437181
agaucgaugagaagagucu

SEQ ID NO: 437183 - RNA, 19 nt, Artificial Sequence
  Description of Artificial Sequence: Synthetic oligonucleotide
  Sense strand starting at position 415 of SEQ ID NO: 316746
agaagugaguccuugccua

SEQ ID NO: 437184 - RNA, 19 nt, Artificial Sequence
  Description of Artificial Sequence: Synthetic oligonucleotide
  Antisense Strand to SEQ ID NO: 437183
uaggcaaggacucacuucu

SEQ ID NO: 437185 - RNA, 19 nt, Artificial Sequence
  Description of Artificial Sequence: Synthetic oligonucleotide
  Sense strand starting at position 419 of SEQ ID NO: 316746
gugaguccuugccuagaag

SEQ ID NO: 437186 - RNA, 19 nt, Artificial Sequence
  Description of Artificial Sequence: Synthetic oligonucleotide
  Antisense Strand to SEQ ID NO: 437185
cuucuaggcaaggacucac

SEQ ID NO: 437187 - RNA, 19 nt, Artificial Sequence
  Description of Artificial Sequence: Synthetic oligonucleotide
  Sense strand starting at position 487 of SEQ ID NO: 316746
gcuugcuucgucuugguca

SEQ ID NO: 437188 - RNA, 19 nt, Artificial Sequence
  Description of Artificial Sequence: Synthetic oligonucleotide
  Antisense Strand to SEQ ID NO: 437187
ugaccaagacgaagcaagc

SEQ ID NO: 437189 - RNA, 19 nt, Artificial Sequence
  Description of Artificial Sequence: Synthetic oligonucleotide
  Sense strand starting at position 534 of SEQ ID NO: 316746
cucgauuucugccagcugu

SEQ ID NO: 437190 - RNA, 19 nt, Artificial Sequence
  Description of Artificial Sequence: Synthetic oligonucleotide
  Antisense Strand to SEQ ID NO: 437189
acagcuggcagaaaucgag

SEQ ID NO: 437191 - RNA, 19 nt, Artificial Sequence
  Description of Artificial Sequence: Synthetic oligonucleotide
  Sense strand starting at position 563 of SEQ ID NO: 316746
acgcguucuccauguccau

SEQ ID NO: 437192 - RNA, 19 nt, Artificial Sequence
  Description of Artificial Sequence: Synthetic oligonucleotide
  Antisense Strand to SEQ ID NO: 437191
auggacauggagaacgcgu

SEQ ID NO: 437193 - RNA, 19 nt, Artificial Sequence
  Description of Artificial Sequence: Synthetic oligonucleotide
  Sense strand starting at position 603 of SEQ ID NO: 316746
guggguuauuacuugcaca

SEQ ID NO: 437194 - RNA, 19 nt, Artificial Sequence
  Description of Artificial Sequence: Synthetic oligonucleotide
  Antisense Strand to SEQ ID NO: 437193
ugugcaaguaauaacccac

SEQ ID NO: 437195 - RNA, 19 nt, Artificial Sequence
  Description of Artificial Sequence: Synthetic oligonucleotide
  Sense strand starting at position 685 of SEQ ID NO: 316746
aagguuugguucucaaucu

SEQ ID NO: 437196 - RNA, 19 nt, Artificial Sequence
  Description of Artificial Sequence: Synthetic oligonucleotide
  Antisense Strand to SEQ ID NO: 437195
agauugagaaccaaaccuu

SEQ ID NO: 437197 - RNA, 19 nt, Artificial Sequence
  Description of Artificial Sequence: Synthetic oligonucleotide
  Sense strand starting at position 686 of SEQ ID NO: 316746
agguuugguucucaaucuu

SEQ ID NO: 437198 - RNA, 19 nt, Artificial Sequence
  Description of Artificial Sequence: Synthetic oligonucleotide
  Antisense Strand to SEQ ID NO: 437197
aagauugagaaccaaaccu

SEQ ID NO: 437199 - RNA, 19 nt, Artificial Sequence
  Description of Artificial Sequence: Synthetic oligonucleotide
  Sense strand starting at position 1179 of SEQ ID NO: 316746
gaucuugugcugcagguau

SEQ ID NO: 437200 - RNA, 19 nt, Artificial Sequence
  Description of Artificial Sequence: Synthetic oligonucleotide
  Antisense Strand to SEQ ID NO: 437199
auaccugcagcacaagauc

SEQ ID NO: 437201 - RNA, 19 nt, Artificial Sequence
  Description of Artificial Sequence: Synthetic oligonucleotide
  Sense strand starting at position 1841 of SEQ ID NO: 316746
cagagcuggccuugaucuu

SEQ ID NO: 437202 - RNA, 19 nt, Artificial Sequence
  Description of Artificial Sequence: Synthetic oligonucleotide
  Antisense Strand to SEQ ID NO: 437201
aagaucaaggccagcucug

SEQ ID NO: 437203 - RNA, 19 nt, Artificial Sequence
  Description of Artificial Sequence: Synthetic oligonucleotide
  Sense strand starting at position 1907 of SEQ ID NO: 316746
gguccuuagugugcucaga

SEQ ID NO: 437204 - RNA, 19 nt, Artificial Sequence
  Description of Artificial Sequence: Synthetic oligonucleotide
  Antisense Strand to SEQ ID NO: 437203
ucugagcacacuaaggacc

SEQ ID NO: 437205 - RNA, 19 nt, Artificial Sequence
  Description of Artificial Sequence: Synthetic oligonucleotide
  Sense strand starting at position 2106 of SEQ ID NO: 316746
gacgauaggcgagauugau

SEQ ID NO: 437206 - RNA, 19 nt, Artificial Sequence
  Description of Artificial Sequence: Synthetic oligonucleotide
  Antisense Strand to SEQ ID NO: 437205
aucaaucucgccuaucguc

SEQ ID NO: 437207 - RNA, 19 nt, Artificial Sequence
  Description of Artificial Sequence: Synthetic oligonucleotide
  Sense strand starting at position 2112 of SEQ ID NO: 316746
aggcgagauugauuggaag

SEQ ID NO: 437208 - RNA, 19 nt, Artificial Sequence
  Description of Artificial Sequence: Synthetic oligonucleotide
  Antisense Strand to SEQ ID NO: 437207
cuuccaaucaaucucgccu

SEQ ID NO: 437209 - RNA, 19 nt, Artificial Sequence
  Description of Artificial Sequence: Synthetic oligonucleotide
  Sense strand starting at position 3181 of SEQ ID NO: 316746
uuaccugaguucguggaga

SEQ ID NO: 437210 - RNA, 19 nt, Artificial Sequence
  Description of Artificial Sequence: Synthetic oligonucleotide
  Antisense Strand to SEQ ID NO: 437209
ucuccacgaacucagguaa

SEQ ID NO: 437211 - RNA, 19 nt, Artificial Sequence
  Description of Artificial Sequence: Synthetic oligonucleotide
  Sense strand starting at position 3183 of SEQ ID NO: 316746
accugaguucguggagaca

SEQ ID NO: 437212 - RNA, 19 nt, Artificial Sequence
  Description of Artificial Sequence: Synthetic oligonucleotide
  Antisense Strand to SEQ ID NO: 437211
ugucuccacgaacucaggu

SEQ ID NO: 437213 - RNA, 19 nt, Artificial Sequence
  Description of Artificial Sequence: Synthetic oligonucleotide
  Sense strand starting at position 3298 of SEQ ID NO: 316746
guuugcuuucugucacugu

SEQ ID NO: 437214 - RNA, 19 nt, Artificial Sequence
  Description of Artificial Sequence: Synthetic oligonucleotide
  Antisense Strand to SEQ ID NO: 437213
acagugacagaaagcaaac

SEQ ID NO: 437215 - RNA, 19 nt, Artificial Sequence
  Description of Artificial Sequence: Synthetic oligonucleotide
  Sense strand starting at position 3361 of SEQ ID NO: 316746
gguagcgugccugguuuau

SEQ ID NO: 437216 - RNA, 19 nt, Artificial Sequence
  Description of Artificial Sequence: Synthetic oligonucleotide
  Antisense Strand to SEQ ID NO: 437215
auaaaccaggcacgcuacc

SEQ ID NO: 437217 - RNA, 19 nt, Artificial Sequence
  Description of Artificial Sequence: Synthetic oligonucleotide
  Sense strand starting at position 3405 of SEQ ID NO: 316746
uugugcgaauggucaguaa

SEQ ID NO: 437218 - RNA, 19 nt, Artificial Sequence
  Description of Artificial Sequence: Synthetic oligonucleotide
  Antisense Strand to SEQ ID NO: 437217
uuacugaccauucgcacaa

SEQ ID NO: 437219 - RNA, 19 nt, Artificial Sequence
  Description of Artificial Sequence: Synthetic oligonucleotide
  Sense strand starting at position 3408 of SEQ ID NO: 316746
ugcgaauggucaguaaaga

SEQ ID NO: 437220 - RNA, 19 nt, Artificial Sequence
  Description of Artificial Sequence: Synthetic oligonucleotide
  Antisense Strand to SEQ ID NO: 437219
ucuuuacugaccauucgca

SEQ ID NO: 437221 - RNA, 19 nt, Artificial Sequence
  Description of Artificial Sequence: Synthetic oligonucleotide
  Sense strand starting at position 3409 of SEQ ID NO: 316746
gcgaauggucaguaaagaa

SEQ ID NO: 437222 - RNA, 19 nt, Artificial Sequence
  Description of Artificial Sequence: Synthetic oligonucleotide
  Antisense Strand to SEQ ID NO: 437221
uucuuuacugaccauucgc

SEQ ID NO: 437223 - RNA, 19 nt, Artificial Sequence
  Description of Artificial Sequence: Synthetic oligonucleotide
  Sense strand starting at position 3473 of SEQ ID NO: 316746
ucucuuuaccuuugagguu

SEQ ID NO: 437224 - RNA, 19 nt, Artificial Sequence
  Description of Artificial Sequence: Synthetic oligonucleotide
  Antisense Strand to SEQ ID NO: 437223
aaccucaaagguaaagaga

SEQ ID NO: 437225 - RNA, 19 nt, Artificial Sequence
  Description of Artificial Sequence: Synthetic oligonucleotide
  Sense strand starting at position 3474 of SEQ ID NO: 316746
cucuuuaccuuugagguuu

SEQ ID NO: 437226 - RNA, 19 nt, Artificial Sequence
  Description of Artificial Sequence: Synthetic oligonucleotide
  Antisense Strand to SEQ ID NO: 437225
aaaccucaaagguaaagag

SEQ ID NO: 437227 - RNA, 19 nt, Artificial Sequence
  Description of Artificial Sequence: Synthetic oligonucleotide
  Sense strand starting at position 3482 of SEQ ID NO: 316746
cuuugagguuucuguagag

SEQ ID NO: 437228 - RNA, 19 nt, Artificial Sequence
  Description of Artificial Sequence: Synthetic oligonucleotide
  Antisense Strand to SEQ ID NO: 437227
cucuacagaaaccucaaag

SEQ ID NO: 437229 - RNA, 19 nt, Artificial Sequence
  Description of Artificial Sequence: Synthetic oligonucleotide
  Sense strand starting at position 3565 of SEQ ID NO: 316746
uagguucuguccuugagag

SEQ ID NO: 437230 - RNA, 19 nt, Artificial Sequence
  Description of Artificial Sequence: Synthetic oligonucleotide
  Antisense Strand to SEQ ID NO: 437229
cucucaaggacagaaccua

SEQ ID NO: 437231 - RNA, 19 nt, Artificial Sequence
  Description of Artificial Sequence: Synthetic oligonucleotide
  Sense strand starting at position 3566 of SEQ ID NO: 316746
agguucuguccuugagaga

SEQ ID NO: 437232 - RNA, 19 nt, Artificial Sequence
  Description of Artificial Sequence: Synthetic oligonucleotide
  Antisense Strand to SEQ ID NO: 437231
ucucucaaggacagaaccu

SEQ ID NO: 437233 - RNA, 19 nt, Artificial Sequence
  Description of Artificial Sequence: Synthetic oligonucleotide
  Sense strand starting at position 3567 of SEQ ID NO: 316746
gguucuguccuugagagag

SEQ ID NO: 437234 - RNA, 19 nt, Artificial Sequence
  Description of Artificial Sequence: Synthetic oligonucleotide
  Antisense Strand to SEQ ID NO: 437233
cucucucaaggacagaacc

SEQ ID NO: 437235 - RNA, 19 nt, Artificial Sequence
  Description of Artificial Sequence: Synthetic oligonucleotide
  Sense strand starting at position 3637 of SEQ ID NO: 316746
uugcauccguauuagaaag

SEQ ID NO: 437236 - RNA, 19 nt, Artificial Sequence
  Description of Artificial Sequence: Synthetic oligonucleotide
  Antisense Strand to SEQ ID NO: 437235
cuuucuaauacggaugcaa

SEQ ID NO: 437237 - RNA, 19 nt, Artificial Sequence
  Description of Artificial Sequence: Synthetic oligonucleotide
  Sense strand starting at position 3668 of SEQ ID NO: 316746
agccguauucccgcucaua

SEQ ID NO: 437238 - RNA, 19 nt, Artificial Sequence
  Description of Artificial Sequence: Synthetic oligonucleotide
  Antisense Strand to SEQ ID NO: 437237
uaugagcgggaauacggcu

SEQ ID NO: 437239 - RNA, 19 nt, Artificial Sequence
  Description of Artificial Sequence: Synthetic oligonucleotide
  Sense strand starting at position 3669 of SEQ ID NO: 316746
gccguauucccgcucauaa

SEQ ID NO: 437240 - RNA, 19 nt, Artificial Sequence
  Description of Artificial Sequence: Synthetic oligonucleotide
  Antisense Strand to SEQ ID NO: 437239
uuaugagcgggaauacggc

SEQ ID NO: 437241 - RNA, 19 nt, Artificial Sequence
  Description of Artificial Sequence: Synthetic oligonucleotide
  Sense strand starting at position 3749 of SEQ ID NO: 316746
gcgcccuuagcuuuccaga

SEQ ID NO: 437242 - RNA, 19 nt, Artificial Sequence
  Description of Artificial Sequence: Synthetic oligonucleotide
  Antisense Strand to SEQ ID NO: 437241
ucuggaaagcuaagggcgc

SEQ ID NO: 437243 - RNA, 19 nt, Artificial Sequence
  Description of Artificial Sequence: Synthetic oligonucleotide
  Sense strand starting at position 3751 of SEQ ID NO: 316746
gcccuuagcuuuccagagu

SEQ ID NO: 437244 - RNA, 19 nt, Artificial Sequence
  Description of Artificial Sequence: Synthetic oligonucleotide
  Antisense Strand to SEQ ID NO: 437243
acucuggaaagcuaagggc

SEQ ID NO: 437245 - RNA, 19 nt, Artificial Sequence
  Description of Artificial Sequence: Synthetic oligonucleotide
  Sense strand starting at position 3754 of SEQ ID NO: 316746
cuuagcuuuccagagucuu

SEQ ID NO: 437246 - RNA, 19 nt, Artificial Sequence
  Description of Artificial Sequence: Synthetic oligonucleotide
  Antisense Strand to SEQ ID NO: 437245
aagacucuggaaagcuaag

SEQ ID NO: 437247 - RNA, 19 nt, Artificial Sequence
  Description of Artificial Sequence: Synthetic oligonucleotide
  Sense strand starting at position 3864 of SEQ ID NO: 316746
uugcuuuccuuuccugagu

SEQ ID NO: 437248 - RNA, 19 nt, Artificial Sequence
  Description of Artificial Sequence: Synthetic oligonucleotide
  Antisense Strand to SEQ ID NO: 437247
acucaggaaaggaaagcaa

SEQ ID NO: 437249 - RNA, 19 nt, Artificial Sequence
  Description of Artificial Sequence: Synthetic oligonucleotide
  Sense strand starting at position 3939 of SEQ ID NO: 316746
cccaacuccuuagagaaga

SEQ ID NO: 437250 - RNA, 19 nt, Artificial Sequence
  Description of Artificial Sequence: Synthetic oligonucleotide
  Antisense Strand to SEQ ID NO: 437249
ucuucucuaaggaguuggg

SEQ ID NO: 437251 - RNA, 19 nt, Artificial Sequence
  Description of Artificial Sequence: Synthetic oligonucleotide
  Sense strand starting at position 3952 of SEQ ID NO: 316746
agaagaugcuccuuuacaa

SEQ ID NO: 437252 - RNA, 19 nt, Artificial Sequence
  Description of Artificial Sequence: Synthetic oligonucleotide
  Antisense Strand to SEQ ID NO: 437251
uuguaaaggagcaucuucu

SEQ ID NO: 437253 - RNA, 19 nt, Artificial Sequence
  Description of Artificial Sequence: Synthetic oligonucleotide
  Sense strand starting at position 8 of SEQ ID NO: 316747
cauagagugguugggagau

SEQ ID NO: 437254 - RNA, 19 nt, Artificial Sequence
  Description of Artificial Sequence: Synthetic oligonucleotide
  Antisense Strand to SEQ ID NO: 437253
aucucccaaccacucuaug

SEQ ID NO: 437255 - RNA, 19 nt, Artificial Sequence
  Description of Artificial Sequence: Synthetic oligonucleotide
  Sense strand starting at position 14 of SEQ ID NO: 316747
gugguugggagauaaggua

SEQ ID NO: 437256 - RNA, 19 nt, Artificial Sequence
  Description of Artificial Sequence: Synthetic oligonucleotide
  Antisense Strand to SEQ ID NO: 437255
uaccuuaucucccaaccac

SEQ ID NO: 437257 - RNA, 19 nt, Artificial Sequence
  Description of Artificial Sequence: Synthetic oligonucleotide
  Sense strand starting at position 135 of SEQ ID NO: 316747
ggcaaagagcuauauaucu

SEQ ID NO: 437258 - RNA, 19 nt, Artificial Sequence
  Description of Artificial Sequence: Synthetic oligonucleotide
  Antisense Strand to SEQ ID NO: 437257
agauauauagcucuuugcc

SEQ ID NO: 437259 - RNA, 19 nt, Artificial Sequence
  Description of Artificial Sequence: Synthetic oligonucleotide
  Sense strand starting at position 287 of SEQ ID NO: 316747
agugaauccugagaagaga

SEQ ID NO: 437260 - RNA, 19 nt, Artificial Sequence
  Description of Artificial Sequence: Synthetic oligonucleotide
  Antisense Strand to SEQ ID NO: 437259
ucucuucucaggauucacu

SEQ ID NO: 437261 - RNA, 19 nt, Artificial Sequence
  Description of Artificial Sequence: Synthetic oligonucleotide
  Sense strand starting at position 308 of SEQ ID NO: 316747
cugaaacugcgauagaacu

SEQ ID NO: 437262 - RNA, 19 nt, Artificial Sequence
  Description of Artificial Sequence: Synthetic oligonucleotide
  Antisense Strand to SEQ ID NO: 437261
aguucuaucgcaguuucag

SEQ ID NO: 437263 - RNA, 19 nt, Artificial Sequence
  Description of Artificial Sequence: Synthetic oligonucleotide
  Sense strand starting at position 417 of SEQ ID NO: 316747
gacucaaguuguguauaga

SEQ ID NO: 437264 - RNA, 19 nt, Artificial Sequence
  Description of Artificial Sequence: Synthetic oligonucleotide
  Antisense Strand to SEQ ID NO: 437263
ucuauacacaacuugaguc

SEQ ID NO: 437265 - RNA, 19 nt, Artificial Sequence
  Description of Artificial Sequence: Synthetic oligonucleotide
  Sense strand starting at position 418 of SEQ ID NO: 316747
acucaaguuguguauagau

SEQ ID NO: 437266 - RNA, 19 nt, Artificial Sequence
  Description of Artificial Sequence: Synthetic oligonucleotide
  Antisense Strand to SEQ ID NO: 437265
aucuauacacaacuugagu

SEQ ID NO: 437267 - RNA, 19 nt, Artificial Sequence
  Description of Artificial Sequence: Synthetic oligonucleotide
  Sense strand starting at position 420 of SEQ ID NO: 316747
ucaaguuguguauagauca

SEQ ID NO: 437268 - RNA, 19 nt, Artificial Sequence
  Description of Artificial Sequence: Synthetic oligonucleotide
  Antisense Strand to SEQ ID NO: 437267
ugaucuauacacaacuuga

SEQ ID NO: 437269 - RNA, 19 nt, Artificial Sequence
  Description of Artificial Sequence: Synthetic oligonucleotide
  Sense strand starting at position 474 of SEQ ID NO: 316747
agcuuaaagucacuucuga

SEQ ID NO: 437270 - RNA, 19 nt, Artificial Sequence
  Description of Artificial Sequence: Synthetic oligonucleotide
  Antisense Strand to SEQ ID NO: 437269
ucagaagugacuuuaagcu

SEQ ID NO: 437271 - RNA, 19 nt, Artificial Sequence
  Description of Artificial Sequence: Synthetic oligonucleotide
  Sense strand starting at position 634 of SEQ ID NO: 316747
guauaaggaugacugucaa

SEQ ID NO: 437272 - RNA, 19 nt, Artificial Sequence
  Description of Artificial Sequence: Synthetic oligonucleotide
  Antisense Strand to SEQ ID NO: 437271
uugacagucauccuuauac

SEQ ID NO: 437273 - RNA, 19 nt, Artificial Sequence
  Description of Artificial Sequence: Synthetic oligonucleotide
  Sense strand starting at position 724 of SEQ ID NO: 316747
cuuugcugugauugucaga

SEQ ID NO: 437274 - RNA, 19 nt, Artificial Sequence
  Description of Artificial Sequence: Synthetic oligonucleotide
  Antisense Strand to SEQ ID NO: 437273
ucugacaaucacagcaaag

SEQ ID NO: 437275 - RNA, 19 nt, Artificial Sequence
  Description of Artificial Sequence: Synthetic oligonucleotide
  Sense strand starting at position 804 of SEQ ID NO: 316747
gcaacuuacccaugaagua

SEQ ID NO: 437276 - RNA, 19 nt, Artificial Sequence
  Description of Artificial Sequence: Synthetic oligonucleotide
  Antisense Strand to SEQ ID NO: 437275
uacuucauggguaaguugc

SEQ ID NO: 437277 - RNA, 19 nt, Artificial Sequence
  Description of Artificial Sequence: Synthetic oligonucleotide
  Sense strand starting at position 841 of SEQ ID NO: 316747
ggcgcucccgaagaugaaa

SEQ ID NO: 437278 - RNA, 19 nt, Artificial Sequence
  Description of Artificial Sequence: Synthetic oligonucleotide
  Antisense Strand to SEQ ID NO: 437277
uuucaucuucgggagcgcc

SEQ ID NO: 437279 - RNA, 19 nt, Artificial Sequence
  Description of Artificial Sequence: Synthetic oligonucleotide
  Sense strand starting at position 852 of SEQ ID NO: 316747
agaugaaauccuugagcag

SEQ ID NO: 437280 - RNA, 19 nt, Artificial Sequence
  Description of Artificial Sequence: Synthetic oligonucleotide
  Antisense Strand to SEQ ID NO: 437279
cugcucaaggauuucaucu

SEQ ID NO: 437281 - RNA, 19 nt, Artificial Sequence
  Description of Artificial Sequence: Synthetic oligonucleotide
  Sense strand starting at position 1188 of SEQ ID NO: 316747
gauuccuguccuggcaaca

SEQ ID NO: 437282 - RNA, 19 nt, Artificial Sequence
  Description of Artificial Sequence: Synthetic oligonucleotide
  Antisense Strand to SEQ ID NO: 437281
uguugccaggacaggaauc

SEQ ID NO: 437283 - RNA, 19 nt, Artificial Sequence
  Description of Artificial Sequence: Synthetic oligonucleotide
  Sense strand starting at position 1254 of SEQ ID NO: 316747
uuagaagguugguuuguua

SEQ ID NO: 437284 - RNA, 19 nt, Artificial Sequence
  Description of Artificial Sequence: Synthetic oligonucleotide
  Antisense Strand to SEQ ID NO: 437283
uaacaaaccaaccuucuaa

SEQ ID NO: 437285 - RNA, 19 nt, Artificial Sequence
  Description of Artificial Sequence: Synthetic oligonucleotide
  Sense strand starting at position 1257 of SEQ ID NO: 316747
gaagguugguuuguuaaag

SEQ ID NO: 437286 - RNA, 19 nt, Artificial Sequence
  Description of Artificial Sequence: Synthetic oligonucleotide
  Antisense Strand to SEQ ID NO: 437285
cuuuaacaaaccaaccuuc

SEQ ID NO: 437287 - RNA, 19 nt, Artificial Sequence
  Description of Artificial Sequence: Synthetic oligonucleotide
  Sense strand starting at position 1313 of SEQ ID NO: 316747
uccucaagugaacagugau

SEQ ID NO: 437288 - RNA, 19 nt, Artificial Sequence
  Description of Artificial Sequence: Synthetic oligonucleotide
  Antisense Strand to SEQ ID NO: 437287
aucacuguucacuugagga

SEQ ID NO: 437289 - RNA, 19 nt, Artificial Sequence
  Description of Artificial Sequence: Synthetic oligonucleotide
  Sense strand starting at position 1319 of SEQ ID NO: 316747
agugaacagugaucacuuu

SEQ ID NO: 437290 - RNA, 19 nt, Artificial Sequence
  Description of Artificial Sequence: Synthetic oligonucleotide
  Antisense Strand to SEQ ID NO: 437289
aaagugaucacuguucacu

SEQ ID NO: 437291 - RNA, 19 nt, Artificial Sequence
  Description of Artificial Sequence: Synthetic oligonucleotide
  Sense strand starting at position 1632 of SEQ ID NO: 316747
ucacaaugacuugguuaua

SEQ ID NO: 437292 - RNA, 19 nt, Artificial Sequence
  Description of Artificial Sequence: Synthetic oligonucleotide
  Antisense Strand to SEQ ID NO: 437291
uauaaccaagucauuguga

SEQ ID NO: 437293 - RNA, 19 nt, Artificial Sequence
  Description of Artificial Sequence: Synthetic oligonucleotide
  Sense strand starting at position 1802 of SEQ ID NO: 316747
gagugauguugcuuccauu

SEQ ID NO: 437294 - RNA, 19 nt, Artificial Sequence
  Description of Artificial Sequence: Synthetic oligonucleotide
  Antisense Strand to SEQ ID NO: 437293
aauggaagcaacaucacuc

SEQ ID NO: 437295 - RNA, 19 nt, Artificial Sequence
  Description of Artificial Sequence: Synthetic oligonucleotide
  Sense strand starting at position 1900 of SEQ ID NO: 316747
ccggcucauuccucuaaug

SEQ ID NO: 437296 - RNA, 19 nt, Artificial Sequence
  Description of Artificial Sequence: Synthetic oligonucleotide
  Antisense Strand to SEQ ID NO: 437295
cauuagaggaaugagccgg

SEQ ID NO: 437297 - RNA, 19 nt, Artificial Sequence
  Description of Artificial Sequence: Synthetic oligonucleotide
  Sense strand starting at position 1902 of SEQ ID NO: 316747
ggcucauuccucuaaugac

SEQ ID NO: 437298 - RNA, 19 nt, Artificial Sequence
  Description of Artificial Sequence: Synthetic oligonucleotide
  Antisense Strand to SEQ ID NO: 437297
gucauuagaggaaugagcc

SEQ ID NO: 437299 - RNA, 19 nt, Artificial Sequence
  Description of Artificial Sequence: Synthetic oligonucleotide
  Sense strand starting at position 2155 of SEQ ID NO: 316747
cuggcuacccguuaaccau

SEQ ID NO: 437300 - RNA, 19 nt, Artificial Sequence
  Description of Artificial Sequence: Synthetic oligonucleotide
  Antisense Strand to SEQ ID NO: 437299
augguuaacggguagccag

SEQ ID NO: 437301 - RNA, 19 nt, Artificial Sequence
  Description of Artificial Sequence: Synthetic oligonucleotide
  Sense strand starting at position 2246 of SEQ ID NO: 316747
ccaguacuccucuauauag

SEQ ID NO: 437302 - RNA, 19 nt, Artificial Sequence
  Description of Artificial Sequence: Synthetic oligonucleotide
  Antisense Strand to SEQ ID NO: 437301
cuauauagaggaguacugg

SEQ ID NO: 437303 - RNA, 19 nt, Artificial Sequence
  Description of Artificial Sequence: Synthetic oligonucleotide
  Sense strand starting at position 2336 of SEQ ID NO: 316747
cgguaacagauccgauaau

SEQ ID NO: 437304 - RNA, 19 nt, Artificial Sequence
  Description of Artificial Sequence: Synthetic oligonucleotide
  Antisense Strand to SEQ ID NO: 437303
auuaucggaucuguuaccg

SEQ ID NO: 437305 - RNA, 19 nt, Artificial Sequence
  Description of Artificial Sequence: Synthetic oligonucleotide
  Sense strand starting at position 2390 of SEQ ID NO: 316747
uguucuaccuccuuauaga

SEQ ID NO: 437306 - RNA, 19 nt, Artificial Sequence
  Description of Artificial Sequence: Synthetic oligonucleotide
  Antisense Strand to SEQ ID NO: 437305
ucuauaaggagguagaaca

SEQ ID NO: 437307 - RNA, 19 nt, Artificial Sequence
  Description of Artificial Sequence: Synthetic oligonucleotide
  Sense strand starting at position 2515 of SEQ ID NO: 316747
guggucucugcccuuguua

SEQ ID NO: 437308 - RNA, 19 nt, Artificial Sequence
  Description of Artificial Sequence: Synthetic oligonucleotide
  Antisense Strand to SEQ ID NO: 437307
uaacaagggcagagaccac

SEQ ID NO: 437309 - RNA, 19 nt, Artificial Sequence
  Description of Artificial Sequence: Synthetic oligonucleotide
  Sense strand starting at position 2526 of SEQ ID NO: 316747
ccuuguuaacuaggauuga

SEQ ID NO: 437310 - RNA, 19 nt, Artificial Sequence
  Description of Artificial Sequence: Synthetic oligonucleotide
  Antisense Strand to SEQ ID NO: 437309
ucaauccuaguuaacaagg

SEQ ID NO: 437311 - RNA, 19 nt, Artificial Sequence
  Description of Artificial Sequence: Synthetic oligonucleotide
  Sense strand starting at position 2670 of SEQ ID NO: 316747
cuagcaugucagcaaauaa

SEQ ID NO: 437312 - RNA, 19 nt, Artificial Sequence
  Description of Artificial Sequence: Synthetic oligonucleotide
  Antisense Strand to SEQ ID NO: 437311
uuauuugcugacaugcuag

SEQ ID NO: 437313 - RNA, 19 nt, Artificial Sequence
  Description of Artificial Sequence: Synthetic oligonucleotide
  Sense strand starting at position 2680 of SEQ ID NO: 316747
agcaaauaaugagcagaau

SEQ ID NO: 437314 - RNA, 19 nt, Artificial Sequence
  Description of Artificial Sequence: Synthetic oligonucleotide
  Antisense Strand to SEQ ID NO: 437313
auucugcucauuauuugcu

SEQ ID NO: 437315 - RNA, 19 nt, Artificial Sequence
  Description of Artificial Sequence: Synthetic oligonucleotide
  Sense strand starting at position 3112 of SEQ ID NO: 316747
gggacugugaucugagacu

SEQ ID NO: 437316 - RNA, 19 nt, Artificial Sequence
  Description of Artificial Sequence: Synthetic oligonucleotide
  Antisense Strand to SEQ ID NO: 437315
agucucagaucacaguccc

SEQ ID NO: 437317 - RNA, 19 nt, Artificial Sequence
  Description of Artificial Sequence: Synthetic oligonucleotide
  Sense strand starting at position 3118 of SEQ ID NO: 316747
gugaucugagacugaacca

SEQ ID NO: 437318 - RNA, 19 nt, Artificial Sequence
  Description of Artificial Sequence: Synthetic oligonucleotide
  Antisense Strand to SEQ ID NO: 437317
ugguucagucucagaucac

SEQ ID NO: 437319 - RNA, 19 nt, Artificial Sequence
  Description of Artificial Sequence: Synthetic oligonucleotide
  Sense strand starting at position 3341 of SEQ ID NO: 316747
cuggguguuccaugaagcu

SEQ ID NO: 437320 - RNA, 19 nt, Artificial Sequence
  Description of Artificial Sequence: Synthetic oligonucleotide
  Antisense Strand to SEQ ID NO: 437319
agcuucauggaacacccag

SEQ ID NO: 437321 - RNA, 19 nt, Artificial Sequence
  Description of Artificial Sequence: Synthetic oligonucleotide
  Sense strand starting at position 3431 of SEQ ID NO: 316747
gacgacaauggcugugaaa

SEQ ID NO: 437322 - RNA, 19 nt, Artificial Sequence
  Description of Artificial Sequence: Synthetic oligonucleotide
  Antisense Strand to SEQ ID NO: 437321
uuucacagccauugucguc

SEQ ID NO: 437323 - RNA, 19 nt, Artificial Sequence
  Description of Artificial Sequence: Synthetic oligonucleotide
  Sense strand starting at position 3478 of SEQ ID NO: 316747
ugcugagacuugguccauu

SEQ ID NO: 437324 - RNA, 19 nt, Artificial Sequence
  Description of Artificial Sequence: Synthetic oligonucleotide
  Antisense Strand to SEQ ID NO: 437323
aauggaccaagucucagca

SEQ ID NO: 437325 - RNA, 19 nt, Artificial Sequence
  Description of Artificial Sequence: Synthetic oligonucleotide
  Sense strand starting at position 3676 of SEQ ID NO: 316747
ggcauuuagucacagaaac

SEQ ID NO: 437326 - RNA, 19 nt, Artificial Sequence
  Description of Artificial Sequence: Synthetic oligonucleotide
  Antisense Strand to SEQ ID NO: 437325
guuucugugacuaaaugcc

SEQ ID NO: 437327 - RNA, 19 nt, Artificial Sequence
  Description of Artificial Sequence: Synthetic oligonucleotide
  Sense strand starting at position 3714 of SEQ ID NO: 316747
ggagaagcuguggauguua

SEQ ID NO: 437328 - RNA, 19 nt, Artificial Sequence
  Description of Artificial Sequence: Synthetic oligonucleotide
  Antisense Strand to SEQ ID NO: 437327
uaacauccacagcuucucc

SEQ ID NO: 437329 - RNA, 19 nt, Artificial Sequence
  Description of Artificial Sequence: Synthetic oligonucleotide
  Sense strand starting at position 3725 of SEQ ID NO: 316747
ggauguuauugggaggaca

SEQ ID NO: 437330 - RNA, 19 nt, Artificial Sequence
  Description of Artificial Sequence: Synthetic oligonucleotide
  Antisense Strand to SEQ ID NO: 437329
uguccucccaauaacaucc

SEQ ID NO: 437331 - RNA, 19 nt, Artificial Sequence
  Description of Artificial Sequence: Synthetic oligonucleotide
  Sense strand starting at position 3788 of SEQ ID NO: 316747
gguuaccugcuaggaaaua

SEQ ID NO: 437332 - RNA, 19 nt, Artificial Sequence
  Description of Artificial Sequence: Synthetic oligonucleotide
  Antisense Strand to SEQ ID NO: 437331
uauuuccuagcagguaacc

SEQ ID NO: 437333 - RNA, 19 nt, Artificial Sequence
  Description of Artificial Sequence: Synthetic oligonucleotide
  Sense strand starting at position 75 of SEQ ID NO: 316748
aagagacguuauguaauca

SEQ ID NO: 437334 - RNA, 19 nt, Artificial Sequence
  Description of Artificial Sequence: Synthetic oligonucleotide
  Antisense Strand to SEQ ID NO: 437333
ugauuacauaacgucucuu

SEQ ID NO: 437335 - RNA, 19 nt, Artificial Sequence
  Description of Artificial Sequence: Synthetic oligonucleotide
  Sense strand starting at position 79 of SEQ ID NO: 316748
gacguuauguaaucacaau

SEQ ID NO: 437336 - RNA, 19 nt, Artificial Sequence
  Description of Artificial Sequence: Synthetic oligonucleotide
  Antisense Strand to SEQ ID NO: 437335
auugugauuacauaacguc

SEQ ID NO: 437337 - RNA, 19 nt, Artificial Sequence
  Description of Artificial Sequence: Synthetic oligonucleotide
  Sense strand starting at position 127 of SEQ ID NO: 316748
agugauauauaagugaguu

SEQ ID NO: 437338 - RNA, 19 nt, Artificial Sequence
  Description of Artificial Sequence: Synthetic oligonucleotide
  Antisense Strand to SEQ ID NO: 437337
aacucacuuauauaucacu

SEQ ID NO: 437339 - RNA, 19 nt, Artificial Sequence
  Description of Artificial Sequence: Synthetic oligonucleotide
  Sense strand starting at position 128 of SEQ ID NO: 316748
gugauauauaagugaguua

SEQ ID NO: 437340 - RNA, 19 nt, Artificial Sequence
  Description of Artificial Sequence: Synthetic oligonucleotide
  Antisense Strand to SEQ ID NO: 437339
uaacucacuuauauaucac

SEQ ID NO: 437341 - RNA, 19 nt, Artificial Sequence
  Description of Artificial Sequence: Synthetic oligonucleotide
  Sense strand starting at position 179 of SEQ ID NO: 316748
acacauuuaugggaucaga

SEQ ID NO: 437342 - RNA, 19 nt, Artificial Sequence
  Description of Artificial Sequence: Synthetic oligonucleotide
  Antisense Strand to SEQ ID NO: 437341
ucugaucccauaaaugugu

SEQ ID NO: 437343 - RNA, 19 nt, Artificial Sequence
  Description of Artificial Sequence: Synthetic oligonucleotide
  Sense strand starting at position 231 of SEQ ID NO: 316748
gauugaugugacuggcagu

SEQ ID NO: 437344 - RNA, 19 nt, Artificial Sequence
  Description of Artificial Sequence: Synthetic oligonucleotide
  Antisense Strand to SEQ ID NO: 437343
acugccagucacaucaauc

SEQ ID NO: 437345 - RNA, 19 nt, Artificial Sequence
  Description of Artificial Sequence: Synthetic oligonucleotide
  Sense strand starting at position 280 of SEQ ID NO: 316748
uuuguaugucaccaaguca

SEQ ID NO: 437346 - RNA, 19 nt, Artificial Sequence
  Description of Artificial Sequence: Synthetic oligonucleotide
  Antisense Strand to SEQ ID NO: 437345
ugacuuggugacauacaaa

SEQ ID NO: 437347 - RNA, 19 nt, Artificial Sequence
  Description of Artificial Sequence: Synthetic oligonucleotide
  Sense strand starting at position 305 of SEQ ID NO: 316748
agcugugagaucugagaua

SEQ ID NO: 437348 - RNA, 19 nt, Artificial Sequence
  Description of Artificial Sequence: Synthetic oligonucleotide
  Antisense Strand to SEQ ID NO: 437347
uaucucagaucucacagcu

SEQ ID NO: 437349 - RNA, 19 nt, Artificial Sequence
  Description of Artificial Sequence: Synthetic oligonucleotide
  Sense strand starting at position 435 of SEQ ID NO: 316748
accguaauuccacacagau

SEQ ID NO: 437350 - RNA, 19 nt, Artificial Sequence
  Description of Artificial Sequence: Synthetic oligonucleotide
  Antisense Strand to SEQ ID NO: 437349
aucuguguggaauuacggu

SEQ ID NO: 437351 - RNA, 19 nt, Artificial Sequence
  Description of Artificial Sequence: Synthetic oligonucleotide
  Sense strand starting at position 524 of SEQ ID NO: 316748
guaaacuaauggcugaauu

SEQ ID NO: 437352 - RNA, 19 nt, Artificial Sequence
  Description of Artificial Sequence: Synthetic oligonucleotide
  Antisense Strand to SEQ ID NO: 437351
aauucagccauuaguuuac

SEQ ID NO: 437353 - RNA, 19 nt, Artificial Sequence
  Description of Artificial Sequence: Synthetic oligonucleotide
  Sense strand starting at position 645 of SEQ ID NO: 316748
acuguuugcuuuccaagga

SEQ ID NO: 437354 - RNA, 19 nt, Artificial Sequence
  Description of Artificial Sequence: Synthetic oligonucleotide
  Antisense Strand to SEQ ID NO: 437353
uccuuggaaagcaaacagu

SEQ ID NO: 437355 - RNA, 19 nt, Artificial Sequence
  Description of Artificial Sequence: Synthetic oligonucleotide
  Sense strand starting at position 668 of SEQ ID NO: 316748
cggugacaugcucaucauu

SEQ ID NO: 437356 - RNA, 19 nt, Artificial Sequence
  Description of Artificial Sequence: Synthetic oligonucleotide
  Antisense Strand to SEQ ID NO: 437355
aaugaugagcaugucaccg

SEQ ID NO: 437357 - RNA, 19 nt, Artificial Sequence
  Description of Artificial Sequence: Synthetic oligonucleotide
  Sense strand starting at position 733 of SEQ ID NO: 316748
uggcuuugagccuacuagu

SEQ ID NO: 437358 - RNA, 19 nt, Artificial Sequence
  Description of Artificial Sequence: Synthetic oligonucleotide
  Antisense Strand to SEQ ID NO: 437357
acuaguaggcucaaagcca

SEQ ID NO: 437359 - RNA, 19 nt, Artificial Sequence
  Description of Artificial Sequence: Synthetic oligonucleotide
  Sense strand starting at position 857 of SEQ ID NO: 316748
aagggauguucccauuugu

SEQ ID NO: 437360 - RNA, 19 nt, Artificial Sequence
  Description of Artificial Sequence: Synthetic oligonucleotide
  Antisense Strand to SEQ ID NO: 437359
acaaaugggaacaucccuu

SEQ ID NO: 437361 - RNA, 19 nt, Artificial Sequence
  Description of Artificial Sequence: Synthetic oligonucleotide
  Sense strand starting at position 963 of SEQ ID NO: 316748
aggccaauacgugacaagu

SEQ ID NO: 437362 - RNA, 19 nt, Artificial Sequence
  Description of Artificial Sequence: Synthetic oligonucleotide
  Antisense Strand to SEQ ID NO: 437361
acuugucacguauuggccu

SEQ ID NO: 437363 - RNA, 19 nt, Artificial Sequence
  Description of Artificial Sequence: Synthetic oligonucleotide
  Sense strand starting at position 1141 of SEQ ID NO: 316748
gucagaguccuacagcagu

SEQ ID NO: 437364 - RNA, 19 nt, Artificial Sequence
  Description of Artificial Sequence: Synthetic oligonucleotide
  Antisense Strand to SEQ ID NO: 437363
acugcuguaggacucugac

SEQ ID NO: 437365 - RNA, 19 nt, Artificial Sequence
  Description of Artificial Sequence: Synthetic oligonucleotide
  Sense strand starting at position 1197 of SEQ ID NO: 316748
gagcgaagacuacacguuu

SEQ ID NO: 437366 - RNA, 19 nt, Artificial Sequence
  Description of Artificial Sequence: Synthetic oligonucleotide
  Antisense Strand to SEQ ID NO: 437365
aaacguguagucuucgcuc

SEQ ID NO: 437367 - RNA, 19 nt, Artificial Sequence
  Description of Artificial Sequence: Synthetic oligonucleotide
  Sense strand starting at position 1319 of SEQ ID NO: 316748
gaacuccuacuguggcaaa

SEQ ID NO: 437368 - RNA, 19 nt, Artificial Sequence
  Description of Artificial Sequence: Synthetic oligonucleotide
  Antisense Strand to SEQ ID NO: 437367
uuugccacaguaggaguuc

SEQ ID NO: 437369 - RNA, 19 nt, Artificial Sequence
  Description of Artificial Sequence: Synthetic oligonucleotide
  Sense strand starting at position 1460 of SEQ ID NO: 316748
gcagauaucccgcaucccu

SEQ ID NO: 437370 - RNA, 19 nt, Artificial Sequence
  Description of Artificial Sequence: Synthetic oligonucleotide
  Antisense Strand to SEQ ID NO: 437369
agggaugcgggauaucugc

SEQ ID NO: 437371 - RNA, 19 nt, Artificial Sequence
  Description of Artificial Sequence: Synthetic oligonucleotide
  Sense strand starting at position 1593 of SEQ ID NO: 316748
gguugauauucuccugguc

SEQ ID NO: 437372 - RNA, 19 nt, Artificial Sequence
  Description of Artificial Sequence: Synthetic oligonucleotide
  Antisense Strand to SEQ ID NO: 437371
gaccaggagaauaucaacc

SEQ ID NO: 437373 - RNA, 19 nt, Artificial Sequence
  Description of Artificial Sequence: Synthetic oligonucleotide
  Sense strand starting at position 1978 of SEQ ID NO: 316748
guaucccgcgacuauugaa

SEQ ID NO: 437374 - RNA, 19 nt, Artificial Sequence
  Description of Artificial Sequence: Synthetic oligonucleotide
  Antisense Strand to SEQ ID NO: 437373
uucaauagucgcgggauac

SEQ ID NO: 437375 - RNA, 19 nt, Artificial Sequence
  Description of Artificial Sequence: Synthetic oligonucleotide
  Sense strand starting at position 1986 of SEQ ID NO: 316748
cgacuauugaaauggacca

SEQ ID NO: 437376 - RNA, 19 nt, Artificial Sequence
  Description of Artificial Sequence: Synthetic oligonucleotide
  Antisense Strand to SEQ ID NO: 437375
ugguccauuucaauagucg

SEQ ID NO: 437377 - RNA, 19 nt, Artificial Sequence
  Description of Artificial Sequence: Synthetic oligonucleotide
  Sense strand starting at position 2310 of SEQ ID NO: 316748
uaguuagcuuaagugacuu

SEQ ID NO: 437378 - RNA, 19 nt, Artificial Sequence
  Description of Artificial Sequence: Synthetic oligonucleotide
  Antisense Strand to SEQ ID NO: 437377
aagucacuuaagcuaacua

SEQ ID NO: 437379 - RNA, 19 nt, Artificial Sequence
  Description of Artificial Sequence: Synthetic oligonucleotide
  Sense strand starting at position 2415 of SEQ ID NO: 316748
gucauaugguuguuaggau

SEQ ID NO: 437380 - RNA, 19 nt, Artificial Sequence
  Description of Artificial Sequence: Synthetic oligonucleotide
  Antisense Strand to SEQ ID NO: 437379
auccuaacaaccauaugac

SEQ ID NO: 437381 - RNA, 19 nt, Artificial Sequence
  Description of Artificial Sequence: Synthetic oligonucleotide
  Sense strand starting at position 2488 of SEQ ID NO: 316748
aagugucaagacuguaaug

SEQ ID NO: 437382 - RNA, 19 nt, Artificial Sequence
  Description of Artificial Sequence: Synthetic oligonucleotide
  Antisense Strand to SEQ ID NO: 437381
cauuacagucuugacacuu

SEQ ID NO: 437383 - RNA, 19 nt, Artificial Sequence
  Description of Artificial Sequence: Synthetic oligonucleotide
  Sense strand starting at position 2490 of SEQ ID NO: 316748
gugucaagacuguaauguc

SEQ ID NO: 437384 - RNA, 19 nt, Artificial Sequence
  Description of Artificial Sequence: Synthetic oligonucleotide
  Antisense Strand to SEQ ID NO: 437383
gacauuacagucuugacac

SEQ ID NO: 437385 - RNA, 19 nt, Artificial Sequence
  Description of Artificial Sequence: Synthetic oligonucleotide
  Sense strand starting at position 2498 of SEQ ID NO: 316748
acuguaaugucaucuuaac

SEQ ID NO: 437386 - RNA, 19 nt, Artificial Sequence
  Description of Artificial Sequence: Synthetic oligonucleotide
  Antisense Strand to SEQ ID NO: 437385
guuaagaugacauuacagu

SEQ ID NO: 437387 - RNA, 19 nt, Artificial Sequence
  Description of Artificial Sequence: Synthetic oligonucleotide
  Sense strand starting at position 2720 of SEQ ID NO: 316748
acguucuagugaccuagau

SEQ ID NO: 437388 - RNA, 19 nt, Artificial Sequence
  Description of Artificial Sequence: Synthetic oligonucleotide
  Antisense Strand to SEQ ID NO: 437387
aucuaggucacuagaacgu

SEQ ID NO: 437389 - RNA, 19 nt, Artificial Sequence
  Description of Artificial Sequence: Synthetic oligonucleotide
  Sense strand starting at position 2972 of SEQ ID NO: 316748
uuccauuaucuguaugcca

SEQ ID NO: 437390 - RNA, 19 nt, Artificial Sequence
  Description of Artificial Sequence: Synthetic oligonucleotide
  Antisense Strand to SEQ ID NO: 437389
uggcauacagauaauggaa

SEQ ID NO: 437391 - RNA, 19 nt, Artificial Sequence
  Description of Artificial Sequence: Synthetic oligonucleotide
  Sense strand starting at position 3116 of SEQ ID NO: 316748
cuaagauggcaucacuauu

SEQ ID NO: 437392 - RNA, 19 nt, Artificial Sequence
  Description of Artificial Sequence: Synthetic oligonucleotide
  Antisense Strand to SEQ ID NO: 437391
aauagugaugccaucuuag

SEQ ID NO: 437393 - RNA, 19 nt, Artificial Sequence
  Description of Artificial Sequence: Synthetic oligonucleotide
  Sense strand starting at position 3175 of SEQ ID NO: 316748
guuacagcaugucuaauua

SEQ ID NO: 437394 - RNA, 19 nt, Artificial Sequence
  Description of Artificial Sequence: Synthetic oligonucleotide
  Antisense Strand to SEQ ID NO: 437393
uaauuagacaugcuguaac

SEQ ID NO: 437395 - RNA, 19 nt, Artificial Sequence
  Description of Artificial Sequence: Synthetic oligonucleotide
  Sense strand starting at position 3346 of SEQ ID NO: 316748
aaacaauugguagguuauu

SEQ ID NO: 437396 - RNA, 19 nt, Artificial Sequence
  Description of Artificial Sequence: Synthetic oligonucleotide
  Antisense Strand to SEQ ID NO: 437395
aauaaccuaccaauuguuu

SEQ ID NO: 437397 - RNA, 19 nt, Artificial Sequence
  Description of Artificial Sequence: Synthetic oligonucleotide
  Sense strand starting at position 3444 of SEQ ID NO: 316748
auauuagcauguccucuua

SEQ ID NO: 437398 - RNA, 19 nt, Artificial Sequence
  Description of Artificial Sequence: Synthetic oligonucleotide
  Antisense Strand to SEQ ID NO: 437397
uaagaggacaugcuaauau

SEQ ID NO: 437399 - RNA, 19 nt, Artificial Sequence
  Description of Artificial Sequence: Synthetic oligonucleotide
  Sense strand starting at position 3573 of SEQ ID NO: 316748
gcggucuacauguuuaugu

SEQ ID NO: 437400 - RNA, 19 nt, Artificial Sequence
  Description of Artificial Sequence: Synthetic oligonucleotide
  Antisense Strand to SEQ ID NO: 437399
acauaaacauguagaccgc

SEQ ID NO: 437401 - RNA, 19 nt, Artificial Sequence
  Description of Artificial Sequence: Synthetic oligonucleotide
  Sense strand starting at position 3592 of SEQ ID NO: 316748
guuuauguaccuuguaaua

SEQ ID NO: 437402 - RNA, 19 nt, Artificial Sequence
  Description of Artificial Sequence: Synthetic oligonucleotide
  Antisense Strand to SEQ ID NO: 437401
uauuacaagguacauaaac

SEQ ID NO: 437403 - RNA, 19 nt, Artificial Sequence
  Description of Artificial Sequence: Synthetic oligonucleotide
  Sense strand starting at position 3919 of SEQ ID NO: 316748
uuuguaugucaugcugcau

SEQ ID NO: 437404 - RNA, 19 nt, Artificial Sequence
  Description of Artificial Sequence: Synthetic oligonucleotide
  Antisense Strand to SEQ ID NO: 437403
augcagcaugacauacaaa

SEQ ID NO: 437405 - RNA, 19 nt, Artificial Sequence
  Description of Artificial Sequence: Synthetic oligonucleotide
  Sense strand starting at position 3922 of SEQ ID NO: 316748
guaugucaugcugcaucga

SEQ ID NO: 437406 - RNA, 19 nt, Artificial Sequence
  Description of Artificial Sequence: Synthetic oligonucleotide
  Antisense Strand to SEQ ID NO: 437405
ucgaugcagcaugacauac

SEQ ID NO: 437407 - RNA, 19 nt, Artificial Sequence
  Description of Artificial Sequence: Synthetic oligonucleotide
  Sense strand starting at position 3930 of SEQ ID NO: 316748
ugcugcaucgaagaaugaa

SEQ ID NO: 437408 - RNA, 19 nt, Artificial Sequence
  Description of Artificial Sequence: Synthetic oligonucleotide
  Antisense Strand to SEQ ID NO: 437407
uucauucuucgaugcagca

SEQ ID NO: 437409 - RNA, 19 nt, Artificial Sequence
  Description of Artificial Sequence: Synthetic oligonucleotide
  Sense strand starting at position 3962 of SEQ ID NO: 316748
ggucauaacuguccagaau

SEQ ID NO: 437410 - RNA, 19 nt, Artificial Sequence
  Description of Artificial Sequence: Synthetic oligonucleotide
  Antisense Strand to SEQ ID NO: 437409
auucuggacaguuaugacc

SEQ ID NO: 437411 - RNA, 19 nt, Artificial Sequence
  Description of Artificial Sequence: Synthetic oligonucleotide
  Sense strand starting at position 3963 of SEQ ID NO: 316748
gucauaacuguccagaauu

SEQ ID NO: 437412 - RNA, 19 nt, Artificial Sequence
  Description of Artificial Sequence: Synthetic oligonucleotide
  Antisense Strand to SEQ ID NO: 437411
aauucuggacaguuaugac

SEQ ID NO: 437413 - RNA, 19 nt, Artificial Sequence
  Description of Artificial Sequence: Synthetic oligonucleotide
  Sense strand starting at position 25 of SEQ ID NO: 316749
gacguaaaucacugcuucu

SEQ ID NO: 437414 - RNA, 19 nt, Artificial Sequence
  Description of Artificial Sequence: Synthetic oligonucleotide
  Antisense Strand to SEQ ID NO: 437413
agaagcagugauuuacguc

SEQ ID NO: 437415 - RNA, 19 nt, Artificial Sequence
  Description of Artificial Sequence: Synthetic oligonucleotide
  Sense strand starting at position 94 of SEQ ID NO: 316749
guugcaagauuucagagag

SEQ ID NO: 437416 - RNA, 19 nt, Artificial Sequence
  Description of Artificial Sequence: Synthetic oligonucleotide
  Antisense Strand to SEQ ID NO: 437415
cucucugaaaucuugcaac

SEQ ID NO: 437417 - RNA, 19 nt, Artificial Sequence
  Description of Artificial Sequence: Synthetic oligonucleotide
  Sense strand starting at position 380 of SEQ ID NO: 316749
agcauuaaccuguaauaag

SEQ ID NO: 437418 - RNA, 19 nt, Artificial Sequence
  Description of Artificial Sequence: Synthetic oligonucleotide
  Antisense Strand to SEQ ID NO: 437417
cuuauuacagguuaaugcu

SEQ ID NO: 437419 - RNA, 19 nt, Artificial Sequence
  Description of Artificial Sequence: Synthetic oligonucleotide
  Sense strand starting at position 401 of SEQ ID NO: 316749
uuaucuugguacuccagaa

SEQ ID NO: 437420 - RNA, 19 nt, Artificial Sequence
  Description of Artificial Sequence: Synthetic oligonucleotide
  Antisense Strand to SEQ ID NO: 437419
uucuggaguaccaagauaa

SEQ ID NO: 437421 - RNA, 19 nt, Artificial Sequence
  Description of Artificial Sequence: Synthetic oligonucleotide
  Sense strand starting at position 442 of SEQ ID NO: 316749
gcaggcuuuagucaugauu

SEQ ID NO: 437422 - RNA, 19 nt, Artificial Sequence
  Description of Artificial Sequence: Synthetic oligonucleotide
  Antisense Strand to SEQ ID NO: 437421
aaucaugacuaaagccugc

SEQ ID NO: 437423 - RNA, 19 nt, Artificial Sequence
  Description of Artificial Sequence: Synthetic oligonucleotide
  Sense strand starting at position 919 of SEQ ID NO: 316749
ggccucuuggcguuucaca

SEQ ID NO: 437424 - RNA, 19 nt, Artificial Sequence
  Description of Artificial Sequence: Synthetic oligonucleotide
  Antisense Strand to SEQ ID NO: 437423
ugugaaacgccaagaggcc

SEQ ID NO: 437425 - RNA, 19 nt, Artificial Sequence
  Description of Artificial Sequence: Synthetic oligonucleotide
  Sense strand starting at position 1092 of SEQ ID NO: 316749
gagucucgcgacugaacaa

SEQ ID NO: 437426 - RNA, 19 nt, Artificial Sequence
  Description of Artificial Sequence: Synthetic oligonucleotide
  Antisense Strand to SEQ ID NO: 437425
uuguucagucgcgagacuc

SEQ ID NO: 437427 - RNA, 19 nt, Artificial Sequence
  Description of Artificial Sequence: Synthetic oligonucleotide
  Sense strand starting at position 1399 of SEQ ID NO: 316749
cugucaauucgagaagcac

SEQ ID NO: 437428 - RNA, 19 nt, Artificial Sequence
  Description of Artificial Sequence: Synthetic oligonucleotide
  Antisense Strand to SEQ ID NO: 437427
gugcuucucgaauugacag

SEQ ID NO: 437429 - RNA, 19 nt, Artificial Sequence
  Description of Artificial Sequence: Synthetic oligonucleotide
  Sense strand starting at position 2193 of SEQ ID NO: 316749
ggcuuauuccgcgauugau

SEQ ID NO: 437430 - RNA, 19 nt, Artificial Sequence
  Description of Artificial Sequence: Synthetic oligonucleotide
  Antisense Strand to SEQ ID NO: 437429
aucaaucgcggaauaagcc

SEQ ID NO: 437431 - RNA, 19 nt, Artificial Sequence
  Description of Artificial Sequence: Synthetic oligonucleotide
  Sense strand starting at position 2247 of SEQ ID NO: 316749
aggagaucguuucuggucu

SEQ ID NO: 437432 - RNA, 19 nt, Artificial Sequence
  Description of Artificial Sequence: Synthetic oligonucleotide
  Antisense Strand to SEQ ID NO: 437431
agaccagaaacgaucuccu

SEQ ID NO: 437433 - RNA, 19 nt, Artificial Sequence
  Description of Artificial Sequence: Synthetic oligonucleotide
  Sense strand starting at position 2398 of SEQ ID NO: 316749
uggauuggcuaacuuauca

SEQ ID NO: 437434 - RNA, 19 nt, Artificial Sequence
  Description of Artificial Sequence: Synthetic oligonucleotide
  Antisense Strand to SEQ ID NO: 437433
ugauaaguuagccaaucca

SEQ ID NO: 437435 - RNA, 19 nt, Artificial Sequence
  Description of Artificial Sequence: Synthetic oligonucleotide
  Sense strand starting at position 2519 of SEQ ID NO: 316749
cggagaagguauucaguua

SEQ ID NO: 437436 - RNA, 19 nt, Artificial Sequence
  Description of Artificial Sequence: Synthetic oligonucleotide
  Antisense Strand to SEQ ID NO: 437435
uaacugaauaccuucuccg

SEQ ID NO: 437437 - RNA, 19 nt, Artificial Sequence
  Description of Artificial Sequence: Synthetic oligonucleotide
  Sense strand starting at position 2619 of SEQ ID NO: 316749
acagcuaaccuuugugaca

SEQ ID NO: 437438 - RNA, 19 nt, Artificial Sequence
  Description of Artificial Sequence: Synthetic oligonucleotide
  Antisense Strand to SEQ ID NO: 437437
ugucacaaagguuagcugu

SEQ ID NO: 437439 - RNA, 19 nt, Artificial Sequence
  Description of Artificial Sequence: Synthetic oligonucleotide
  Sense strand starting at position 2881 of SEQ ID NO: 316749
gcugcauuacaguauucuu

SEQ ID NO: 437440 - RNA, 19 nt, Artificial Sequence
  Description of Artificial Sequence: Synthetic oligonucleotide
  Antisense Strand to SEQ ID NO: 437439
aagaauacuguaaugcagc

SEQ ID NO: 437441 - RNA, 19 nt, Artificial Sequence
  Description of Artificial Sequence: Synthetic oligonucleotide
  Sense strand starting at position 2889 of SEQ ID NO: 316749
acaguauucuuucuaguuc

SEQ ID NO: 437442 - RNA, 19 nt, Artificial Sequence
  Description of Artificial Sequence: Synthetic oligonucleotide
  Antisense Strand to SEQ ID NO: 437441
gaacuagaaagaauacugu

SEQ ID NO: 437443 - RNA, 19 nt, Artificial Sequence
  Description of Artificial Sequence: Synthetic oligonucleotide
  Sense strand starting at position 2901 of SEQ ID NO: 316749
cuaguucugugucuuggaa

SEQ ID NO: 437444 - RNA, 19 nt, Artificial Sequence
  Description of Artificial Sequence: Synthetic oligonucleotide
  Antisense Strand to SEQ ID NO: 437443
uuccaagacacagaacuag

SEQ ID NO: 437445 - RNA, 19 nt, Artificial Sequence
  Description of Artificial Sequence: Synthetic oligonucleotide
  Sense strand starting at position 3076 of SEQ ID NO: 316749
gguccuugguaacccauaa

SEQ ID NO: 437446 - RNA, 19 nt, Artificial Sequence
  Description of Artificial Sequence: Synthetic oligonucleotide
  Antisense Strand to SEQ ID NO: 437445
uuauggguuaccaaggacc

SEQ ID NO: 437447 - RNA, 19 nt, Artificial Sequence
  Description of Artificial Sequence: Synthetic oligonucleotide
  Sense strand starting at position 3124 of SEQ ID NO: 316749
guuguuauuauaggcgaca

SEQ ID NO: 437448 - RNA, 19 nt, Artificial Sequence
  Description of Artificial Sequence: Synthetic oligonucleotide
  Antisense Strand to SEQ ID NO: 437447
ugucgccuauaauaacaac

SEQ ID NO: 437449 - RNA, 19 nt, Artificial Sequence
  Description of Artificial Sequence: Synthetic oligonucleotide
  Sense strand starting at position 3227 of SEQ ID NO: 316749
gguugacugcccuggaaca

SEQ ID NO: 437450 - RNA, 19 nt, Artificial Sequence
  Description of Artificial Sequence: Synthetic oligonucleotide
  Antisense Strand to SEQ ID NO: 437449
uguuccagggcagucaacc

SEQ ID NO: 437451 - RNA, 19 nt, Artificial Sequence
  Description of Artificial Sequence: Synthetic oligonucleotide
  Sense strand starting at position 3228 of SEQ ID NO: 316749
guugacugcccuggaacau

SEQ ID NO: 437452 - RNA, 19 nt, Artificial Sequence
  Description of Artificial Sequence: Synthetic oligonucleotide
  Antisense Strand to SEQ ID NO: 437451
auguuccagggcagucaac

SEQ ID NO: 437453 - RNA, 19 nt, Artificial Sequence
  Description of Artificial Sequence: Synthetic oligonucleotide
  Sense strand starting at position 3229 of SEQ ID NO: 316749
uugacugcccuggaacauu

SEQ ID NO: 437454 - RNA, 19 nt, Artificial Sequence
  Description of Artificial Sequence: Synthetic oligonucleotide
  Antisense Strand to SEQ ID NO: 437453
aauguuccagggcagucaa

SEQ ID NO: 437455 - RNA, 19 nt, Artificial Sequence
  Description of Artificial Sequence: Synthetic oligonucleotide
  Sense strand starting at position 3280 of SEQ ID NO: 316749
aauaccauauucgugaguu

SEQ ID NO: 437456 - RNA, 19 nt, Artificial Sequence
  Description of Artificial Sequence: Synthetic oligonucleotide
  Antisense Strand to SEQ ID NO: 437455
aacucacgaauaugguauu

SEQ ID NO: 437457 - RNA, 19 nt, Artificial Sequence
  Description of Artificial Sequence: Synthetic oligonucleotide
  Sense strand starting at position 3282 of SEQ ID NO: 316749
uaccauauucgugaguucu

SEQ ID NO: 437458 - RNA, 19 nt, Artificial Sequence
  Description of Artificial Sequence: Synthetic oligonucleotide
  Antisense Strand to SEQ ID NO: 437457
agaacucacgaauauggua

SEQ ID NO: 437459 - RNA, 19 nt, Artificial Sequence
  Description of Artificial Sequence: Synthetic oligonucleotide
  Sense strand starting at position 3284 of SEQ ID NO: 316749
ccauauucgugaguucuaa

SEQ ID NO: 437460 - RNA, 19 nt, Artificial Sequence
  Description of Artificial Sequence: Synthetic oligonucleotide
  Antisense Strand to SEQ ID NO: 437459
uuagaacucacgaauaugg

SEQ ID NO: 437461 - RNA, 19 nt, Artificial Sequence
  Description of Artificial Sequence: Synthetic oligonucleotide
  Sense strand starting at position 3311 of SEQ ID NO: 316749
aucagauagucccugggaa

SEQ ID NO: 437462 - RNA, 19 nt, Artificial Sequence
  Description of Artificial Sequence: Synthetic oligonucleotide
  Antisense Strand to SEQ ID NO: 437461
uucccagggacuaucugau

SEQ ID NO: 437463 - RNA, 19 nt, Artificial Sequence
  Description of Artificial Sequence: Synthetic oligonucleotide
  Sense strand starting at position 3312 of SEQ ID NO: 316749
ucagauagucccugggaag

SEQ ID NO: 437464 - RNA, 19 nt, Artificial Sequence
  Description of Artificial Sequence: Synthetic oligonucleotide
  Antisense Strand to SEQ ID NO: 437463
cuucccagggacuaucuga

SEQ ID NO: 437465 - RNA, 19 nt, Artificial Sequence
  Description of Artificial Sequence: Synthetic oligonucleotide
  Sense strand starting at position 3315 of SEQ ID NO: 316749
gauagucccugggaagaga

SEQ ID NO: 437466 - RNA, 19 nt, Artificial Sequence
  Description of Artificial Sequence: Synthetic oligonucleotide
  Antisense Strand to SEQ ID NO: 437465
ucucuucccagggacuauc

SEQ ID NO: 437467 - RNA, 19 nt, Artificial Sequence
  Description of Artificial Sequence: Synthetic oligonucleotide
  Sense strand starting at position 3457 of SEQ ID NO: 316749
cuaggucccuuugcauauu

SEQ ID NO: 437468 - RNA, 19 nt, Artificial Sequence
  Description of Artificial Sequence: Synthetic oligonucleotide
  Antisense Strand to SEQ ID NO: 437467
aauaugcaaagggaccuag

SEQ ID NO: 437469 - RNA, 19 nt, Artificial Sequence
  Description of Artificial Sequence: Synthetic oligonucleotide
  Sense strand starting at position 3468 of SEQ ID NO: 316749
ugcauauuagcucggacua

SEQ ID NO: 437470 - RNA, 19 nt, Artificial Sequence
  Description of Artificial Sequence: Synthetic oligonucleotide
  Antisense Strand to SEQ ID NO: 437469
uaguccgagcuaauaugca

SEQ ID NO: 437471 - RNA, 19 nt, Artificial Sequence
  Description of Artificial Sequence: Synthetic oligonucleotide
  Sense strand starting at position 3469 of SEQ ID NO: 316749
gcauauuagcucggacuaa

SEQ ID NO: 437472 - RNA, 19 nt, Artificial Sequence
  Description of Artificial Sequence: Synthetic oligonucleotide
  Antisense Strand to SEQ ID NO: 437471
uuaguccgagcuaauaugc

SEQ ID NO: 437473 - RNA, 19 nt, Artificial Sequence
  Description of Artificial Sequence: Synthetic oligonucleotide
  Sense strand starting at position 3695 of SEQ ID NO: 316749
aucaucuugcuggaaaucu

SEQ ID NO: 437474 - RNA, 19 nt, Artificial Sequence
  Description of Artificial Sequence: Synthetic oligonucleotide
  Antisense Strand to SEQ ID NO: 437473
agauuuccagcaagaugau

SEQ ID NO: 437475 - RNA, 19 nt, Artificial Sequence
  Description of Artificial Sequence: Synthetic oligonucleotide
  Sense strand starting at position 3703 of SEQ ID NO: 316749
gcuggaaaucuaugcugau

SEQ ID NO: 437476 - RNA, 19 nt, Artificial Sequence
  Description of Artificial Sequence: Synthetic oligonucleotide
  Antisense Strand to SEQ ID NO: 437475
aucagcauagauuuccagc

SEQ ID NO: 437477 - RNA, 19 nt, Artificial Sequence
  Description of Artificial Sequence: Synthetic oligonucleotide
  Sense strand starting at position 3704 of SEQ ID NO: 316749
cuggaaaucuaugcugaua

SEQ ID NO: 437478 - RNA, 19 nt, Artificial Sequence
  Description of Artificial Sequence: Synthetic oligonucleotide
  Antisense Strand to SEQ ID NO: 437477
uaucagcauagauuuccag

SEQ ID NO: 437479 - RNA, 19 nt, Artificial Sequence
  Description of Artificial Sequence: Synthetic oligonucleotide
  Sense strand starting at position 3780 of SEQ ID NO: 316749
gaugacagcucauuguaca

SEQ ID NO: 437480 - RNA, 19 nt, Artificial Sequence
  Description of Artificial Sequence: Synthetic oligonucleotide
  Antisense Strand to SEQ ID NO: 437479
uguacaaugagcugucauc

SEQ ID NO: 437481 - RNA, 19 nt, Artificial Sequence
  Description of Artificial Sequence: Synthetic oligonucleotide
  Sense strand starting at position 3869 of SEQ ID NO: 316749
aaaugaagaguuugugauc

SEQ ID NO: 437482 - RNA, 19 nt, Artificial Sequence
  Description of Artificial Sequence: Synthetic oligonucleotide
  Antisense Strand to SEQ ID NO: 437481
gaucacaaacucuucauuu

SEQ ID NO: 437483 - RNA, 19 nt, Artificial Sequence
  Description of Artificial Sequence: Synthetic oligonucleotide
  Sense strand starting at position 3870 of SEQ ID NO: 316749
aaugaagaguuugugauca

SEQ ID NO: 437484 - RNA, 19 nt, Artificial Sequence
  Description of Artificial Sequence: Synthetic oligonucleotide
  Antisense Strand to SEQ ID NO: 437483
ugaucacaaacucuucauu

SEQ ID NO: 437485 - RNA, 19 nt, Artificial Sequence
  Description of Artificial Sequence: Synthetic oligonucleotide
  Sense strand starting at position 3874 of SEQ ID NO: 316749
aagaguuugugaucaaagc

SEQ ID NO: 437486 - RNA, 19 nt, Artificial Sequence
  Description of Artificial Sequence: Synthetic oligonucleotide
  Antisense Strand to SEQ ID NO: 437485
gcuuugaucacaaacucuu

SEQ ID NO: 437487 - RNA, 19 nt, Artificial Sequence
  Description of Artificial Sequence: Synthetic oligonucleotide
  Sense strand starting at position 3875 of SEQ ID NO: 316749
agaguuugugaucaaagca

SEQ ID NO: 437488 - RNA, 19 nt, Artificial Sequence
  Description of Artificial Sequence: Synthetic oligonucleotide
  Antisense Strand to SEQ ID NO: 437487
ugcuuugaucacaaacucu

SEQ ID NO: 437489 - RNA, 19 nt, Artificial Sequence
  Description of Artificial Sequence: Synthetic oligonucleotide
  Sense strand starting at position 3882 of SEQ ID NO: 316749
gugaucaaagcaugaagga

SEQ ID NO: 437490 - RNA, 19 nt, Artificial Sequence
  Description of Artificial Sequence: Synthetic oligonucleotide
  Antisense Strand to SEQ ID NO: 437489
uccuucaugcuuugaucac

SEQ ID NO: 437491 - RNA, 19 nt, Artificial Sequence
  Description of Artificial Sequence: Synthetic oligonucleotide
  Sense strand starting at position 3959 of SEQ ID NO: 316749
uuauaagugaugugaaaga

SEQ ID NO: 437492 - RNA, 19 nt, Artificial Sequence
  Description of Artificial Sequence: Synthetic oligonucleotide
  Antisense Strand to SEQ ID NO: 437491
ucuuucacaucacuuauaa

SEQ ID NO: 437493 - RNA, 19 nt, Artificial Sequence
  Description of Artificial Sequence: Synthetic oligonucleotide
  Sense strand starting at position 239 of SEQ ID NO: 316750
ccuguaacugcagaucauu

SEQ ID NO: 437494 - RNA, 19 nt, Artificial Sequence
  Description of Artificial Sequence: Synthetic oligonucleotide
  Antisense Strand to SEQ ID NO: 437493
aaugaucugcaguuacagg

SEQ ID NO: 437495 - RNA, 19 nt, Artificial Sequence
  Description of Artificial Sequence: Synthetic oligonucleotide
  Sense strand starting at position 275 of SEQ ID NO: 316750
acacaugcugacuguauua

SEQ ID NO: 437496 - RNA, 19 nt, Artificial Sequence
  Description of Artificial Sequence: Synthetic oligonucleotide
  Antisense Strand to SEQ ID NO: 437495
uaauacagucagcaugugu

SEQ ID NO: 437497 - RNA, 19 nt, Artificial Sequence
  Description of Artificial Sequence: Synthetic oligonucleotide
  Sense strand starting at position 277 of SEQ ID NO: 316750
acaugcugacuguauuagu

SEQ ID NO: 437498 - RNA, 19 nt, Artificial Sequence
  Description of Artificial Sequence: Synthetic oligonucleotide
  Antisense Strand to SEQ ID NO: 437497
acuaauacagucagcaugu

SEQ ID NO: 437499 - RNA, 19 nt, Artificial Sequence
  Description of Artificial Sequence: Synthetic oligonucleotide
  Sense strand starting at position 312 of SEQ ID NO: 316750
ucaagaaauuucuaguaga

SEQ ID NO: 437500 - RNA, 19 nt, Artificial Sequence
  Description of Artificial Sequence: Synthetic oligonucleotide
  Antisense Strand to SEQ ID NO: 437499
ucuacuagaaauuucuuga

SEQ ID NO: 437501 - RNA, 19 nt, Artificial Sequence
  Description of Artificial Sequence: Synthetic oligonucleotide
  Sense strand starting at position 336 of SEQ ID NO: 316750
ucagaaucucucggagauu

SEQ ID NO: 437502 - RNA, 19 nt, Artificial Sequence
  Description of Artificial Sequence: Synthetic oligonucleotide
  Antisense Strand to SEQ ID NO: 437501
aaucuccgagagauucuga

SEQ ID NO: 437503 - RNA, 19 nt, Artificial Sequence
  Description of Artificial Sequence: Synthetic oligonucleotide
  Sense strand starting at position 381 of SEQ ID NO: 316750
aucuauuccguccauuauu

SEQ ID NO: 437504 - RNA, 19 nt, Artificial Sequence
  Description of Artificial Sequence: Synthetic oligonucleotide
  Antisense Strand to SEQ ID NO: 437503
aauaauggacggaauagau

SEQ ID NO: 437505 - RNA, 19 nt, Artificial Sequence
  Description of Artificial Sequence: Synthetic oligonucleotide
  Sense strand starting at position 462 of SEQ ID NO: 316750
agcagauaacacugcuauu

SEQ ID NO: 437506 - RNA, 19 nt, Artificial Sequence
  Description of Artificial Sequence: Synthetic oligonucleotide
  Antisense Strand to SEQ ID NO: 437505
aauagcaguguuaucugcu

SEQ ID NO: 437507 - RNA, 19 nt, Artificial Sequence
  Description of Artificial Sequence: Synthetic oligonucleotide
  Sense strand starting at position 566 of SEQ ID NO: 316750
ggagaaaguuaaucuugug

SEQ ID NO: 437508 - RNA, 19 nt, Artificial Sequence
  Description of Artificial Sequence: Synthetic oligonucleotide
  Antisense Strand to SEQ ID NO: 437507
cacaagauuaacuuucucc

SEQ ID NO: 437509 - RNA, 19 nt, Artificial Sequence
  Description of Artificial Sequence: Synthetic oligonucleotide
  Sense strand starting at position 663 of SEQ ID NO: 316750
aggagaaugccuggcagau

SEQ ID NO: 437510 - RNA, 19 nt, Artificial Sequence
  Description of Artificial Sequence: Synthetic oligonucleotide
  Antisense Strand to SEQ ID NO: 437509
aucugccaggcauucuccu

SEQ ID NO: 437511 - RNA, 19 nt, Artificial Sequence
  Description of Artificial Sequence: Synthetic oligonucleotide
  Sense strand starting at position 667 of SEQ ID NO: 316750
gaaugccuggcagauaaua

SEQ ID NO: 437512 - RNA, 19 nt, Artificial Sequence
  Description of Artificial Sequence: Synthetic oligonucleotide
  Antisense Strand to SEQ ID NO: 437511
uauuaucugccaggcauuc

SEQ ID NO: 437513 - RNA, 19 nt, Artificial Sequence
  Description of Artificial Sequence: Synthetic oligonucleotide
  Sense strand starting at position 1111 of SEQ ID NO: 316750
cggagaaucguucaaccug

SEQ ID NO: 437514 - RNA, 19 nt, Artificial Sequence
  Description of Artificial Sequence: Synthetic oligonucleotide
  Antisense Strand to SEQ ID NO: 437513
cagguugaacgauucuccg

SEQ ID NO: 437515 - RNA, 19 nt, Artificial Sequence
  Description of Artificial Sequence: Synthetic oligonucleotide
  Sense strand starting at position 1146 of SEQ ID NO: 316750
cccuucuuuguguauuaac

SEQ ID NO: 437516 - RNA, 19 nt, Artificial Sequence
  Description of Artificial Sequence: Synthetic oligonucleotide
  Antisense Strand to SEQ ID NO: 437515
guuaauacacaaagaaggg

SEQ ID NO: 437517 - RNA, 19 nt, Artificial Sequence
  Description of Artificial Sequence: Synthetic oligonucleotide
  Sense strand starting at position 1203 of SEQ ID NO: 316750
cuaauuugccgcugccaca

SEQ ID NO: 437518 - RNA, 19 nt, Artificial Sequence
  Description of Artificial Sequence: Synthetic oligonucleotide
  Antisense Strand to SEQ ID NO: 437517
uguggcagcggcaaauuag

SEQ ID NO: 437519 - RNA, 19 nt, Artificial Sequence
  Description of Artificial Sequence: Synthetic oligonucleotide
  Sense strand starting at position 1226 of SEQ ID NO: 316750
aaaguuacucgcugacaga

SEQ ID NO: 437520 - RNA, 19 nt, Artificial Sequence
  Description of Artificial Sequence: Synthetic oligonucleotide
  Antisense Strand to SEQ ID NO: 437519
ucugucagcgaguaacuuu

SEQ ID NO: 437521 - RNA, 19 nt, Artificial Sequence
  Description of Artificial Sequence: Synthetic oligonucleotide
  Sense strand starting at position 1227 of SEQ ID NO: 316750
aaguuacucgcugacagaa

SEQ ID NO: 437522 - RNA, 19 nt, Artificial Sequence
  Description of Artificial Sequence: Synthetic oligonucleotide
  Antisense Strand to SEQ ID NO: 437521
uucugucagcgaguaacuu

SEQ ID NO: 437523 - RNA, 19 nt, Artificial Sequence
  Description of Artificial Sequence: Synthetic oligonucleotide
  Sense strand starting at position 1735 of SEQ ID NO: 316750
gaauuaguuccaugaugac

SEQ ID NO: 437524 - RNA, 19 nt, Artificial Sequence
  Description of Artificial Sequence: Synthetic oligonucleotide
  Antisense Strand to SEQ ID NO: 437523
gucaucauggaacuaauuc

SEQ ID NO: 437525 - RNA, 19 nt, Artificial Sequence
  Description of Artificial Sequence: Synthetic oligonucleotide
  Sense strand starting at position 2532 of SEQ ID NO: 316750
uacugaucucuugggugga

SEQ ID NO: 437526 - RNA, 19 nt, Artificial Sequence
  Description of Artificial Sequence: Synthetic oligonucleotide
  Antisense Strand to SEQ ID NO: 437525
uccacccaagagaucagua

SEQ ID NO: 437527 - RNA, 19 nt, Artificial Sequence
  Description of Artificial Sequence: Synthetic oligonucleotide
  Sense strand starting at position 2534 of SEQ ID NO: 316750
cugaucucuuggguggaga

SEQ ID NO: 437528 - RNA, 19 nt, Artificial Sequence
  Description of Artificial Sequence: Synthetic oligonucleotide
  Antisense Strand to SEQ ID NO: 437527
ucuccacccaagagaucag

SEQ ID NO: 437529 - RNA, 19 nt, Artificial Sequence
  Description of Artificial Sequence: Synthetic oligonucleotide
  Sense strand starting at position 2535 of SEQ ID NO: 316750
ugaucucuuggguggagau

SEQ ID NO: 437530 - RNA, 19 nt, Artificial Sequence
  Description of Artificial Sequence: Synthetic oligonucleotide
  Antisense Strand to SEQ ID NO: 437529
aucuccacccaagagauca

SEQ ID NO: 437531 - RNA, 19 nt, Artificial Sequence
  Description of Artificial Sequence: Synthetic oligonucleotide
  Sense strand starting at position 2585 of SEQ ID NO: 316750
cguguucuuaccguugaca

SEQ ID NO: 437532 - RNA, 19 nt, Artificial Sequence
  Description of Artificial Sequence: Synthetic oligonucleotide
  Antisense Strand to SEQ ID NO: 437531
ugucaacgguaagaacacg

SEQ ID NO: 437533 - RNA, 19 nt, Artificial Sequence
  Description of Artificial Sequence: Synthetic oligonucleotide
  Sense strand starting at position 2594 of SEQ ID NO: 316750
accguugacauguaaauag

SEQ ID NO: 437534 - RNA, 19 nt, Artificial Sequence
  Description of Artificial Sequence: Synthetic oligonucleotide
  Antisense Strand to SEQ ID NO: 437533
cuauuuacaugucaacggu

SEQ ID NO: 437535 - RNA, 19 nt, Artificial Sequence
  Description of Artificial Sequence: Synthetic oligonucleotide
  Sense strand starting at position 2693 of SEQ ID NO: 316750
aucaaaucaugggugcuua

SEQ ID NO: 437536 - RNA, 19 nt, Artificial Sequence
  Description of Artificial Sequence: Synthetic oligonucleotide
  Antisense Strand to SEQ ID NO: 437535
uaagcacccaugauuugau

SEQ ID NO: 437537 - RNA, 19 nt, Artificial Sequence
  Description of Artificial Sequence: Synthetic oligonucleotide
  Sense strand starting at position 2694 of SEQ ID NO: 316750
ucaaaucaugggugcuuaa

SEQ ID NO: 437538 - RNA, 19 nt, Artificial Sequence
  Description of Artificial Sequence: Synthetic oligonucleotide
  Antisense Strand to SEQ ID NO: 437537
uuaagcacccaugauuuga

SEQ ID NO: 437539 - RNA, 19 nt, Artificial Sequence
  Description of Artificial Sequence: Synthetic oligonucleotide
  Sense strand starting at position 2706 of SEQ ID NO: 316750
ugcuuaaggccucagugaa

SEQ ID NO: 437540 - RNA, 19 nt, Artificial Sequence
  Description of Artificial Sequence: Synthetic oligonucleotide
  Antisense Strand to SEQ ID NO: 437539
uucacugaggccuuaagca

SEQ ID NO: 437541 - RNA, 19 nt, Artificial Sequence
  Description of Artificial Sequence: Synthetic oligonucleotide
  Sense strand starting at position 2751 of SEQ ID NO: 316750
gaggaaccugcuuggcaau

SEQ ID NO: 437542 - RNA, 19 nt, Artificial Sequence
  Description of Artificial Sequence: Synthetic oligonucleotide
  Antisense Strand to SEQ ID NO: 437541
auugccaagcagguuccuc

SEQ ID NO: 437543 - RNA, 19 nt, Artificial Sequence
  Description of Artificial Sequence: Synthetic oligonucleotide
  Sense strand starting at position 2794 of SEQ ID NO: 316750
aaccaacacgucugaguau

SEQ ID NO: 437544 - RNA, 19 nt, Artificial Sequence
  Description of Artificial Sequence: Synthetic oligonucleotide
  Antisense Strand to SEQ ID NO: 437543
auacucagacguguugguu

SEQ ID NO: 437545 - RNA, 19 nt, Artificial Sequence
  Description of Artificial Sequence: Synthetic oligonucleotide
  Sense strand starting at position 2801 of SEQ ID NO: 316750
acgucugaguauuuccgaa

SEQ ID NO: 437546 - RNA, 19 nt, Artificial Sequence
  Description of Artificial Sequence: Synthetic oligonucleotide
  Antisense Strand to SEQ ID NO: 437545
uucggaaauacucagacgu

SEQ ID NO: 437547 - RNA, 19 nt, Artificial Sequence
  Description of Artificial Sequence: Synthetic oligonucleotide
  Sense strand starting at position 2805 of SEQ ID NO: 316750
cugaguauuuccgaauagg

SEQ ID NO: 437548 - RNA, 19 nt, Artificial Sequence
  Description of Artificial Sequence: Synthetic oligonucleotide
  Antisense Strand to SEQ ID NO: 437547
ccuauucggaaauacucag

SEQ ID NO: 437549 - RNA, 19 nt, Artificial Sequence
  Description of Artificial Sequence: Synthetic oligonucleotide
  Sense strand starting at position 2852 of SEQ ID NO: 316750
uggugacauaaauggguuu

SEQ ID NO: 437550 - RNA, 19 nt, Artificial Sequence
  Description of Artificial Sequence: Synthetic oligonucleotide
  Antisense Strand to SEQ ID NO: 437549
aaacccauuuaugucacca

SEQ ID NO: 437551 - RNA, 19 nt, Artificial Sequence
  Description of Artificial Sequence: Synthetic oligonucleotide
  Sense strand starting at position 3147 of SEQ ID NO: 316750
gaggauaaccauugagcua

SEQ ID NO: 437552 - RNA, 19 nt, Artificial Sequence
  Description of Artificial Sequence: Synthetic oligonucleotide
  Antisense Strand to SEQ ID NO: 437551
uagcucaaugguuauccuc

SEQ ID NO: 437553 - RNA, 19 nt, Artificial Sequence
  Description of Artificial Sequence: Synthetic oligonucleotide
  Sense strand starting at position 3271 of SEQ ID NO: 316750
ccucuaucccuguguauaa

SEQ ID NO: 437554 - RNA, 19 nt, Artificial Sequence
  Description of Artificial Sequence: Synthetic oligonucleotide
  Antisense Strand to SEQ ID NO: 437553
uuauacacagggauagagg

SEQ ID NO: 437555 - RNA, 19 nt, Artificial Sequence
  Description of Artificial Sequence: Synthetic oligonucleotide
  Sense strand starting at position 3272 of SEQ ID NO: 316750
cucuaucccuguguauaaa

SEQ ID NO: 437556 - RNA, 19 nt, Artificial Sequence
  Description of Artificial Sequence: Synthetic oligonucleotide
  Antisense Strand to SEQ ID NO: 437555
uuuauacacagggauagag

SEQ ID NO: 437557 - RNA, 19 nt, Artificial Sequence
  Description of Artificial Sequence: Synthetic oligonucleotide
  Sense strand starting at position 3728 of SEQ ID NO: 316750
acuguagcauuucugcaua

SEQ ID NO: 437558 - RNA, 19 nt, Artificial Sequence
  Description of Artificial Sequence: Synthetic oligonucleotide
  Antisense Strand to SEQ ID NO: 437557
uaugcagaaaugcuacagu

SEQ ID NO: 437559 - RNA, 19 nt, Artificial Sequence
  Description of Artificial Sequence: Synthetic oligonucleotide
  Sense strand starting at position 3730 of SEQ ID NO: 316750
uguagcauuucugcauaau

SEQ ID NO: 437560 - RNA, 19 nt, Artificial Sequence
  Description of Artificial Sequence: Synthetic oligonucleotide
  Antisense Strand to SEQ ID NO: 437559
auuaugcagaaaugcuaca

SEQ ID NO: 437561 - RNA, 19 nt, Artificial Sequence
  Description of Artificial Sequence: Synthetic oligonucleotide
  Sense strand starting at position 3748 of SEQ ID NO: 316750
uacuauugagaguguaaca

SEQ ID NO: 437562 - RNA, 19 nt, Artificial Sequence
  Description of Artificial Sequence: Synthetic oligonucleotide
  Antisense Strand to SEQ ID NO: 437561
uguuacacucucaauagua

SEQ ID NO: 437563 - RNA, 19 nt, Artificial Sequence
  Description of Artificial Sequence: Synthetic oligonucleotide
  Sense strand starting at position 3758 of SEQ ID NO: 316750
aguguaacauaauuccauu

SEQ ID NO: 437564 - RNA, 19 nt, Artificial Sequence
  Description of Artificial Sequence: Synthetic oligonucleotide
  Antisense Strand to SEQ ID NO: 437563
aauggaauuauguuacacu

SEQ ID NO: 437565 - RNA, 19 nt, Artificial Sequence
  Description of Artificial Sequence: Synthetic oligonucleotide
  Sense strand starting at position 3774 of SEQ ID NO: 316750
auuguuagaccaugaaauu

SEQ ID NO: 437566 - RNA, 19 nt, Artificial Sequence
  Description of Artificial Sequence: Synthetic oligonucleotide
  Antisense Strand to SEQ ID NO: 437565
aauuucauggucuaacaau

SEQ ID NO: 437567 - RNA, 19 nt, Artificial Sequence
  Description of Artificial Sequence: Synthetic oligonucleotide
  Sense strand starting at position 3783 of SEQ ID NO: 316750
ccaugaaauugcuucugau

SEQ ID NO: 437568 - RNA, 19 nt, Artificial Sequence
  Description of Artificial Sequence: Synthetic oligonucleotide
  Antisense Strand to SEQ ID NO: 437567
aucagaagcaauuucaugg

SEQ ID NO: 437569 - RNA, 19 nt, Artificial Sequence
  Description of Artificial Sequence: Synthetic oligonucleotide
  Sense strand starting at position 3887 of SEQ ID NO: 316750
uuacaaacguuagcauuau

SEQ ID NO: 437570 - RNA, 19 nt, Artificial Sequence
  Description of Artificial Sequence: Synthetic oligonucleotide
  Antisense Strand to SEQ ID NO: 437569
auaaugcuaacguuuguaa

SEQ ID NO: 437571 - RNA, 19 nt, Artificial Sequence
  Description of Artificial Sequence: Synthetic oligonucleotide
  Sense strand starting at position 3968 of SEQ ID NO: 316750
gugauacaucuauguacaa

SEQ ID NO: 437572 - RNA, 19 nt, Artificial Sequence
  Description of Artificial Sequence: Synthetic oligonucleotide
  Antisense Strand to SEQ ID NO: 437571
uuguacauagauguaucac

SEQ ID NO: 437573 - RNA, 19 nt, Artificial Sequence
  Description of Artificial Sequence: Synthetic oligonucleotide
  Sense strand starting at position 598 of SEQ ID NO: 316751
uguaauuuguggccauggu

SEQ ID NO: 437574 - RNA, 19 nt, Artificial Sequence
  Description of Artificial Sequence: Synthetic oligonucleotide
  Antisense Strand to SEQ ID NO: 437573
accauggccacaaauuaca

SEQ ID NO: 437575 - RNA, 19 nt, Artificial Sequence
  Description of Artificial Sequence: Synthetic oligonucleotide
  Sense strand starting at position 657 of SEQ ID NO: 316751
aacucaggguaguuauuau

SEQ ID NO: 437576 - RNA, 19 nt, Artificial Sequence
  Description of Artificial Sequence: Synthetic oligonucleotide
  Antisense Strand to SEQ ID NO: 437575
auaauaacuacccugaguu

SEQ ID NO: 437577 - RNA, 19 nt, Artificial Sequence
  Description of Artificial Sequence: Synthetic oligonucleotide
  Sense strand starting at position 687 of SEQ ID NO: 316751
acagcucuuggugaaacua

SEQ ID NO: 437578 - RNA, 19 nt, Artificial Sequence
  Description of Artificial Sequence: Synthetic oligonucleotide
  Antisense Strand to SEQ ID NO: 437577
uaguuucaccaagagcugu

SEQ ID NO: 437579 - RNA, 19 nt, Artificial Sequence
  Description of Artificial Sequence: Synthetic oligonucleotide
  Sense strand starting at position 1128 of SEQ ID NO: 316751
acgaaucaauguguuauua

SEQ ID NO: 437580 - RNA, 19 nt, Artificial Sequence
  Description of Artificial Sequence: Synthetic oligonucleotide
  Antisense Strand to SEQ ID NO: 437579
uaauaacacauugauucgu

SEQ ID NO: 437581 - RNA, 19 nt, Artificial Sequence
  Description of Artificial Sequence: Synthetic oligonucleotide
  Sense strand starting at position 1139 of SEQ ID NO: 316751
uguuauuaucacgacuuaa

SEQ ID NO: 437582 - RNA, 19 nt, Artificial Sequence
  Description of Artificial Sequence: Synthetic oligonucleotide
  Antisense Strand to SEQ ID NO: 437581
uuaagucgugauaauaaca

SEQ ID NO: 437583 - RNA, 19 nt, Artificial Sequence
  Description of Artificial Sequence: Synthetic oligonucleotide
  Sense strand starting at position 1179 of SEQ ID NO: 316751
ccaugaaagcuauauaagc

SEQ ID NO: 437584 - RNA, 19 nt, Artificial Sequence
  Description of Artificial Sequence: Synthetic oligonucleotide
  Antisense Strand to SEQ ID NO: 437583
gcuuauauagcuuucaugg

SEQ ID NO: 437585 - RNA, 19 nt, Artificial Sequence
  Description of Artificial Sequence: Synthetic oligonucleotide
  Sense strand starting at position 1235 of SEQ ID NO: 316751
uuccguuaagucgugcaau

SEQ ID NO: 437586 - RNA, 19 nt, Artificial Sequence
  Description of Artificial Sequence: Synthetic oligonucleotide
  Antisense Strand to SEQ ID NO: 437585
auugcacgacuuaacggaa

SEQ ID NO: 437587 - RNA, 19 nt, Artificial Sequence
  Description of Artificial Sequence: Synthetic oligonucleotide
  Sense strand starting at position 1237 of SEQ ID NO: 316751
ccguuaagucgugcaauaa

SEQ ID NO: 437588 - RNA, 19 nt, Artificial Sequence
  Description of Artificial Sequence: Synthetic oligonucleotide
  Antisense Strand to SEQ ID NO: 437587
uuauugcacgacuuaacgg

SEQ ID NO: 437589 - RNA, 19 nt, Artificial Sequence
  Description of Artificial Sequence: Synthetic oligonucleotide
  Sense strand starting at position 2185 of SEQ ID NO: 316751
auaagagguauccguugga

SEQ ID NO: 437590 - RNA, 19 nt, Artificial Sequence
  Description of Artificial Sequence: Synthetic oligonucleotide
  Antisense Strand to SEQ ID NO: 437589
uccaacggauaccucuuau

SEQ ID NO: 437591 - RNA, 19 nt, Artificial Sequence
  Description of Artificial Sequence: Synthetic oligonucleotide
  Sense strand starting at position 2262 of SEQ ID NO: 316751
ugggaaucccgagacaguu

SEQ ID NO: 437592 - RNA, 19 nt, Artificial Sequence
  Description of Artificial Sequence: Synthetic oligonucleotide
  Antisense Strand to SEQ ID NO: 437591
aacugucucgggauuccca

SEQ ID NO: 437593 - RNA, 19 nt, Artificial Sequence
  Description of Artificial Sequence: Synthetic oligonucleotide
  Sense strand starting at position 2396 of SEQ ID NO: 316751
gugugugaugcguuaaacg

SEQ ID NO: 437594 - RNA, 19 nt, Artificial Sequence
  Description of Artificial Sequence: Synthetic oligonucleotide
  Antisense Strand to SEQ ID NO: 437593
cguuuaacgcaucacacac

SEQ ID NO: 437595 - RNA, 19 nt, Artificial Sequence
  Description of Artificial Sequence: Synthetic oligonucleotide
  Sense strand starting at position 2398 of SEQ ID NO: 316751
gugugaugcguuaaacgau

SEQ ID NO: 437596 - RNA, 19 nt, Artificial Sequence
  Description of Artificial Sequence: Synthetic oligonucleotide
  Antisense Strand to SEQ ID NO: 437595
aucguuuaacgcaucacac

SEQ ID NO: 437597 - RNA, 19 nt, Artificial Sequence
  Description of Artificial Sequence: Synthetic oligonucleotide
  Sense strand starting at position 2404 of SEQ ID NO: 316751
ugcguuaaacgauauuaag

SEQ ID NO: 437598 - RNA, 19 nt, Artificial Sequence
  Description of Artificial Sequence: Synthetic oligonucleotide
  Antisense Strand to SEQ ID NO: 437597
cuuaauaucguuuaacgca

SEQ ID NO: 437599 - RNA, 19 nt, Artificial Sequence
  Description of Artificial Sequence: Synthetic oligonucleotide
  Sense strand starting at position 2446 of SEQ ID NO: 316751
cgaggcgacgaugauuaaa

SEQ ID NO: 437600 - RNA, 19 nt, Artificial Sequence
  Description of Artificial Sequence: Synthetic oligonucleotide
  Antisense Strand to SEQ ID NO: 437599
uuuaaucaucgucgccucg

SEQ ID NO: 437601 - RNA, 19 nt, Artificial Sequence
  Description of Artificial Sequence: Synthetic oligonucleotide
  Sense strand starting at position 2555 of SEQ ID NO: 316751
augagauuauugccacaag

SEQ ID NO: 437602 - RNA, 19 nt, Artificial Sequence
  Description of Artificial Sequence: Synthetic oligonucleotide
  Antisense Strand to SEQ ID NO: 437601
cuuguggcaauaaucucau

SEQ ID NO: 437603 - RNA, 19 nt, Artificial Sequence
  Description of Artificial Sequence: Synthetic oligonucleotide
  Sense strand starting at position 2576 of SEQ ID NO: 316751
gccaaagauuggcuauaga

SEQ ID NO: 437604 - RNA, 19 nt, Artificial Sequence
  Description of Artificial Sequence: Synthetic oligonucleotide
  Antisense Strand to SEQ ID NO: 437603
ucuauagccaaucuuuggc

SEQ ID NO: 437605 - RNA, 19 nt, Artificial Sequence
  Description of Artificial Sequence: Synthetic oligonucleotide
  Sense strand starting at position 2585 of SEQ ID NO: 316751
uggcuauagagaugacaac

SEQ ID NO: 437606 - RNA, 19 nt, Artificial Sequence
  Description of Artificial Sequence: Synthetic oligonucleotide
  Antisense Strand to SEQ ID NO: 437605
guugucaucucuauagcca

SEQ ID NO: 437607 - RNA, 19 nt, Artificial Sequence
  Description of Artificial Sequence: Synthetic oligonucleotide
  Sense strand starting at position 2608 of SEQ ID NO: 316751
ccgggcucucuagaagguu

SEQ ID NO: 437608 - RNA, 19 nt, Artificial Sequence
  Description of Artificial Sequence: Synthetic oligonucleotide
  Antisense Strand to SEQ ID NO: 437607
aaccuucuagagagcccgg

SEQ ID NO: 437609 - RNA, 19 nt, Artificial Sequence
  Description of Artificial Sequence: Synthetic oligonucleotide
  Sense strand starting at position 2639 of SEQ ID NO: 316751
uggcauuugaguuggccua

SEQ ID NO: 437610 - RNA, 19 nt, Artificial Sequence
  Description of Artificial Sequence: Synthetic oligonucleotide
  Antisense Strand to SEQ ID NO: 437609
uaggccaacucaaaugcca

SEQ ID NO: 437611 - RNA, 19 nt, Artificial Sequence
  Description of Artificial Sequence: Synthetic oligonucleotide
  Sense strand starting at position 2640 of SEQ ID NO: 316751
ggcauuugaguuggccuau

SEQ ID NO: 437612 - RNA, 19 nt, Artificial Sequence
  Description of Artificial Sequence: Synthetic oligonucleotide
  Antisense Strand to SEQ ID NO: 437611
auaggccaacucaaaugcc

SEQ ID NO: 437613 - RNA, 19 nt, Artificial Sequence
  Description of Artificial Sequence: Synthetic oligonucleotide
  Sense strand starting at position 2700 of SEQ ID NO: 316751
gggugguggugaguuauaa

SEQ ID NO: 437614 - RNA, 19 nt, Artificial Sequence
  Description of Artificial Sequence: Synthetic oligonucleotide
  Antisense Strand to SEQ ID NO: 437613
uuauaacucaccaccaccc

SEQ ID NO: 437615 - RNA, 19 nt, Artificial Sequence
  Description of Artificial Sequence: Synthetic oligonucleotide
  Sense strand starting at position 2790 of SEQ ID NO: 316751
gaggacagaugcguggaua

SEQ ID NO: 437616 - RNA, 19 nt, Artificial Sequence
  Description of Artificial Sequence: Synthetic oligonucleotide
  Antisense Strand to SEQ ID NO: 437615
uauccacgcaucuguccuc

SEQ ID NO: 437617 - RNA, 19 nt, Artificial Sequence
  Description of Artificial Sequence: Synthetic oligonucleotide
  Sense strand starting at position 2793 of SEQ ID NO: 316751
gacagaugcguggauaggu

SEQ ID NO: 437618 - RNA, 19 nt, Artificial Sequence
  Description of Artificial Sequence: Synthetic oligonucleotide
  Antisense Strand to SEQ ID NO: 437617
accuauccacgcaucuguc

SEQ ID NO: 437619 - RNA, 19 nt, Artificial Sequence
  Description of Artificial Sequence: Synthetic oligonucleotide
  Sense strand starting at position 2809 of SEQ ID NO: 316751
gguuguaguguggaaggaa

SEQ ID NO: 437620 - RNA, 19 nt, Artificial Sequence
  Description of Artificial Sequence: Synthetic oligonucleotide
  Antisense Strand to SEQ ID NO: 437619
uuccuuccacacuacaacc

SEQ ID NO: 437621 - RNA, 19 nt, Artificial Sequence
  Description of Artificial Sequence: Synthetic oligonucleotide
  Sense strand starting at position 2829 of SEQ ID NO: 316751
gggauuauaguaggcuuaa

SEQ ID NO: 437622 - RNA, 19 nt, Artificial Sequence
  Description of Artificial Sequence: Synthetic oligonucleotide
  Antisense Strand to SEQ ID NO: 437621
uuaagccuacuauaauccc

SEQ ID NO: 437623 - RNA, 19 nt, Artificial Sequence
  Description of Artificial Sequence: Synthetic oligonucleotide
  Sense strand starting at position 2830 of SEQ ID NO: 316751
ggauuauaguaggcuuaau

SEQ ID NO: 437624 - RNA, 19 nt, Artificial Sequence
  Description of Artificial Sequence: Synthetic oligonucleotide
  Antisense Strand to SEQ ID NO: 437623
auuaagccuacuauaaucc

SEQ ID NO: 437625 - RNA, 19 nt, Artificial Sequence
  Description of Artificial Sequence: Synthetic oligonucleotide
  Sense strand starting at position 2840 of SEQ ID NO: 316751
aggcuuaauucgguggaua

SEQ ID NO: 437626 - RNA, 19 nt, Artificial Sequence
  Description of Artificial Sequence: Synthetic oligonucleotide
  Antisense Strand to SEQ ID NO: 437625
uauccaccgaauuaagccu

SEQ ID NO: 437627 - RNA, 19 nt, Artificial Sequence
  Description of Artificial Sequence: Synthetic oligonucleotide
  Sense strand starting at position 2841 of SEQ ID NO: 316751
ggcuuaauucgguggauag

SEQ ID NO: 437628 - RNA, 19 nt, Artificial Sequence
  Description of Artificial Sequence: Synthetic oligonucleotide
  Antisense Strand to SEQ ID NO: 437627
cuauccaccgaauuaagcc

SEQ ID NO: 437629 - RNA, 19 nt, Artificial Sequence
  Description of Artificial Sequence: Synthetic oligonucleotide
  Sense strand starting at position 2877 of SEQ ID NO: 316751
uuuguaagcugagcaaaga

SEQ ID NO: 437630 - RNA, 19 nt, Artificial Sequence
  Description of Artificial Sequence: Synthetic oligonucleotide
  Antisense Strand to SEQ ID NO: 437629
ucuuugcucagcuuacaaa

SEQ ID NO: 437631 - RNA, 19 nt, Artificial Sequence
  Description of Artificial Sequence: Synthetic oligonucleotide
  Sense strand starting at position 2996 of SEQ ID NO: 316751
agguuacuguuacuggaaa

SEQ ID NO: 437632 - RNA, 19 nt, Artificial Sequence
  Description of Artificial Sequence: Synthetic oligonucleotide
  Antisense Strand to SEQ ID NO: 437631
uuuccaguaacaguaaccu

SEQ ID NO: 437633 - RNA, 19 nt, Artificial Sequence
  Description of Artificial Sequence: Synthetic oligonucleotide
  Sense strand starting at position 3276 of SEQ ID NO: 316751
gacagaucagcuggcacaa

SEQ ID NO: 437634 - RNA, 19 nt, Artificial Sequence
  Description of Artificial Sequence: Synthetic oligonucleotide
  Antisense Strand to SEQ ID NO: 437633
uugugccagcugaucuguc

SEQ ID NO: 437635 - RNA, 19 nt, Artificial Sequence
  Description of Artificial Sequence: Synthetic oligonucleotide
  Sense strand starting at position 3289 of SEQ ID NO: 316751
gcacaaguugauuacaacu

SEQ ID NO: 437636 - RNA, 19 nt, Artificial Sequence
  Description of Artificial Sequence: Synthetic oligonucleotide
  Antisense Strand to SEQ ID NO: 437635
aguuguaaucaacuugugc

SEQ ID NO: 437637 - RNA, 19 nt, Artificial Sequence
  Description of Artificial Sequence: Synthetic oligonucleotide
  Sense strand starting at position 3314 of SEQ ID NO: 316751
agacaagcuccuuggaagu

SEQ ID NO: 437638 - RNA, 19 nt, Artificial Sequence
  Description of Artificial Sequence: Synthetic oligonucleotide
  Antisense Strand to SEQ ID NO: 437637
acuuccaaggagcuugucu

SEQ ID NO: 437639 - RNA, 19 nt, Artificial Sequence
  Description of Artificial Sequence: Synthetic oligonucleotide
  Sense strand starting at position 3380 of SEQ ID NO: 316751
uaccuuagucauuagguga

SEQ ID NO: 437640 - RNA, 19 nt, Artificial Sequence
  Description of Artificial Sequence: Synthetic oligonucleotide
  Antisense Strand to SEQ ID NO: 437639
ucaccuaaugacuaaggua

SEQ ID NO: 437641 - RNA, 19 nt, Artificial Sequence
  Description of Artificial Sequence: Synthetic oligonucleotide
  Sense strand starting at position 3383 of SEQ ID NO: 316751
cuuagucauuaggugaaau

SEQ ID NO: 437642 - RNA, 19 nt, Artificial Sequence
  Description of Artificial Sequence: Synthetic oligonucleotide
  Antisense Strand to SEQ ID NO: 437641
auuucaccuaaugacuaag

SEQ ID NO: 437643 - RNA, 19 nt, Artificial Sequence
  Description of Artificial Sequence: Synthetic oligonucleotide
  Sense strand starting at position 3557 of SEQ ID NO: 316751
cuagguaguggguauauau

SEQ ID NO: 437644 - RNA, 19 nt, Artificial Sequence
  Description of Artificial Sequence: Synthetic oligonucleotide
  Antisense Strand to SEQ ID NO: 437643
auauauacccacuaccuag

SEQ ID NO: 437645 - RNA, 19 nt, Artificial Sequence
  Description of Artificial Sequence: Synthetic oligonucleotide
  Sense strand starting at position 3731 of SEQ ID NO: 316751
ucagaagcuugucuaccau

SEQ ID NO: 437646 - RNA, 19 nt, Artificial Sequence
  Description of Artificial Sequence: Synthetic oligonucleotide
  Antisense Strand to SEQ ID NO: 437645
augguagacaagcuucuga

SEQ ID NO: 437647 - RNA, 19 nt, Artificial Sequence
  Description of Artificial Sequence: Synthetic oligonucleotide
  Sense strand starting at position 3782 of SEQ ID NO: 316751
aggcauucuguugaggaga

SEQ ID NO: 437648 - RNA, 19 nt, Artificial Sequence
  Description of Artificial Sequence: Synthetic oligonucleotide
  Antisense Strand to SEQ ID NO: 437647
ucuccucaacagaaugccu

SEQ ID NO: 437649 - RNA, 19 nt, Artificial Sequence
  Description of Artificial Sequence: Synthetic oligonucleotide
  Sense strand starting at position 3933 of SEQ ID NO: 316751
uucggauuguagccagaua

SEQ ID NO: 437650 - RNA, 19 nt, Artificial Sequence
  Description of Artificial Sequence: Synthetic oligonucleotide
  Antisense Strand to SEQ ID NO: 437649
uaucuggcuacaauccgaa

SEQ ID NO: 437651 - RNA, 19 nt, Artificial Sequence
  Description of Artificial Sequence: Synthetic oligonucleotide
  Sense strand starting at position 3934 of SEQ ID NO: 316751
ucggauuguagccagauaa

SEQ ID NO: 437652 - RNA, 19 nt, Artificial Sequence
  Description of Artificial Sequence: Synthetic oligonucleotide
  Antisense Strand to SEQ ID NO: 437651
uuaucuggcuacaauccga

SEQ ID NO: 437653 - RNA, 19 nt, Artificial Sequence
  Description of Artificial Sequence: Synthetic oligonucleotide
  Sense strand starting at position 336 of SEQ ID NO: 316752
ccagcuuuacuuuaaacgu

SEQ ID NO: 437654 - RNA, 19 nt, Artificial Sequence
  Description of Artificial Sequence: Synthetic oligonucleotide
  Antisense Strand to SEQ ID NO: 437653
acguuuaaaguaaagcugg

SEQ ID NO: 437655 - RNA, 19 nt, Artificial Sequence
  Description of Artificial Sequence: Synthetic oligonucleotide
  Sense strand starting at position 344 of SEQ ID NO: 316752
acuuuaaacguguacacau

SEQ ID NO: 437656 - RNA, 19 nt, Artificial Sequence
  Description of Artificial Sequence: Synthetic oligonucleotide
  Antisense Strand to SEQ ID NO: 437655
auguguacacguuuaaagu

SEQ ID NO: 437657 - RNA, 19 nt, Artificial Sequence
  Description of Artificial Sequence: Synthetic oligonucleotide
  Sense strand starting at position 445 of SEQ ID NO: 316752
agaaaugaaagcuguugaa

SEQ ID NO: 437658 - RNA, 19 nt, Artificial Sequence
  Description of Artificial Sequence: Synthetic oligonucleotide
  Antisense Strand to SEQ ID NO: 437657
uucaacagcuuucauuucu

SEQ ID NO: 437659 - RNA, 19 nt, Artificial Sequence
  Description of Artificial Sequence: Synthetic oligonucleotide
  Sense strand starting at position 458 of SEQ ID NO: 316752
guugaaaccaaguagguau

SEQ ID NO: 437660 - RNA, 19 nt, Artificial Sequence
  Description of Artificial Sequence: Synthetic oligonucleotide
  Antisense Strand to SEQ ID NO: 437659
auaccuacuugguuucaac

SEQ ID NO: 437661 - RNA, 19 nt, Artificial Sequence
  Description of Artificial Sequence: Synthetic oligonucleotide
  Sense strand starting at position 550 of SEQ ID NO: 316752
gggcaaagaaucuguaacu

SEQ ID NO: 437662 - RNA, 19 nt, Artificial Sequence
  Description of Artificial Sequence: Synthetic oligonucleotide
  Antisense Strand to SEQ ID NO: 437661
aguuacagauucuuugccc

SEQ ID NO: 437663 - RNA, 19 nt, Artificial Sequence
  Description of Artificial Sequence: Synthetic oligonucleotide
  Sense strand starting at position 551 of SEQ ID NO: 316752
ggcaaagaaucuguaacuu

SEQ ID NO: 437664 - RNA, 19 nt, Artificial Sequence
  Description of Artificial Sequence: Synthetic oligonucleotide
  Antisense Strand to SEQ ID NO: 437663
aaguuacagauucuuugcc

SEQ ID NO: 437665 - RNA, 19 nt, Artificial Sequence
  Description of Artificial Sequence: Synthetic oligonucleotide
  Sense strand starting at position 960 of SEQ ID NO: 316752
ugacuuucugcucagguga

SEQ ID NO: 437666 - RNA, 19 nt, Artificial Sequence
  Description of Artificial Sequence: Synthetic oligonucleotide
  Antisense Strand to SEQ ID NO: 437665
ucaccugagcagaaaguca

SEQ ID NO: 437667 - RNA, 19 nt, Artificial Sequence
  Description of Artificial Sequence: Synthetic oligonucleotide
  Sense strand starting at position 1130 of SEQ ID NO: 316752
gcuuccaauccaggaaacu

SEQ ID NO: 437668 - RNA, 19 nt, Artificial Sequence
  Description of Artificial Sequence: Synthetic oligonucleotide
  Antisense Strand to SEQ ID NO: 437667
aguuuccuggauuggaagc

SEQ ID NO: 437669 - RNA, 19 nt, Artificial Sequence
  Description of Artificial Sequence: Synthetic oligonucleotide
  Sense strand starting at position 2622 of SEQ ID NO: 316752
gcuucuuuccuuuaagcag

SEQ ID NO: 437670 - RNA, 19 nt, Artificial Sequence
  Description of Artificial Sequence: Synthetic oligonucleotide
  Antisense Strand to SEQ ID NO: 437669
cugcuuaaaggaaagaagc

SEQ ID NO: 437671 - RNA, 19 nt, Artificial Sequence
  Description of Artificial Sequence: Synthetic oligonucleotide
  Sense strand starting at position 2667 of SEQ ID NO: 316752
gcaaucaauucuguaagau

SEQ ID NO: 437672 - RNA, 19 nt, Artificial Sequence
  Description of Artificial Sequence: Synthetic oligonucleotide
  Antisense Strand to SEQ ID NO: 437671
aucuuacagaauugauugc

SEQ ID NO: 437673 - RNA, 19 nt, Artificial Sequence
  Description of Artificial Sequence: Synthetic oligonucleotide
  Sense strand starting at position 2700 of SEQ ID NO: 316752
gacuguguccgagagugga

SEQ ID NO: 437674 - RNA, 19 nt, Artificial Sequence
  Description of Artificial Sequence: Synthetic oligonucleotide
  Antisense Strand to SEQ ID NO: 437673
uccacucucggacacaguc

SEQ ID NO: 437675 - RNA, 19 nt, Artificial Sequence
  Description of Artificial Sequence: Synthetic oligonucleotide
  Sense strand starting at position 2715 of SEQ ID NO: 316752
uggaacuuguguuccuaca

SEQ ID NO: 437676 - RNA, 19 nt, Artificial Sequence
  Description of Artificial Sequence: Synthetic oligonucleotide
  Antisense Strand to SEQ ID NO: 437675
uguaggaacacaaguucca

SEQ ID NO: 437677 - RNA, 19 nt, Artificial Sequence
  Description of Artificial Sequence: Synthetic oligonucleotide
  Sense strand starting at position 2717 of SEQ ID NO: 316752
gaacuuguguuccuacaag

SEQ ID NO: 437678 - RNA, 19 nt, Artificial Sequence
  Description of Artificial Sequence: Synthetic oligonucleotide
  Antisense Strand to SEQ ID NO: 437677
cuuguaggaacacaaguuc

SEQ ID NO: 437679 - RNA, 19 nt, Artificial Sequence
  Description of Artificial Sequence: Synthetic oligonucleotide
  Sense strand starting at position 2780 of SEQ ID NO: 316752
uugacaucauuugacugau

SEQ ID NO: 437680 - RNA, 19 nt, Artificial Sequence
  Description of Artificial Sequence: Synthetic oligonucleotide
  Antisense Strand to SEQ ID NO: 437679
aucagucaaaugaugucaa

SEQ ID NO: 437681 - RNA, 19 nt, Artificial Sequence
  Description of Artificial Sequence: Synthetic oligonucleotide
  Sense strand starting at position 2852 of SEQ ID NO: 316752
gguucuguugccuacauaa

SEQ ID NO: 437682 - RNA, 19 nt, Artificial Sequence
  Description of Artificial Sequence: Synthetic oligonucleotide
  Antisense Strand to SEQ ID NO: 437681
uuauguaggcaacagaacc

SEQ ID NO: 437683 - RNA, 19 nt, Artificial Sequence
  Description of Artificial Sequence: Synthetic oligonucleotide
  Sense strand starting at position 2921 of SEQ ID NO: 316752
gguuuacacuaaguacuga

SEQ ID NO: 437684 - RNA, 19 nt, Artificial Sequence
  Description of Artificial Sequence: Synthetic oligonucleotide
  Antisense Strand to SEQ ID NO: 437683
ucaguacuuaguguaaacc

SEQ ID NO: 437685 - RNA, 19 nt, Artificial Sequence
  Description of Artificial Sequence: Synthetic oligonucleotide
  Sense strand starting at position 3074 of SEQ ID NO: 316752
cccauucugguagaaugua

SEQ ID NO: 437686 - RNA, 19 nt, Artificial Sequence
  Description of Artificial Sequence: Synthetic oligonucleotide
  Antisense Strand to SEQ ID NO: 437685
uacauucuaccagaauggg

SEQ ID NO: 437687 - RNA, 19 nt, Artificial Sequence
  Description of Artificial Sequence: Synthetic oligonucleotide
  Sense strand starting at position 3293 of SEQ ID NO: 316752
ucuaacuggcuaugaucua

SEQ ID NO: 437688 - RNA, 19 nt, Artificial Sequence
  Description of Artificial Sequence: Synthetic oligonucleotide
  Antisense Strand to SEQ ID NO: 437687
uagaucauagccaguuaga

SEQ ID NO: 437689 - RNA, 19 nt, Artificial Sequence
  Description of Artificial Sequence: Synthetic oligonucleotide
  Sense strand starting at position 3315 of SEQ ID NO: 316752
ucugaaaugugguuauauu

SEQ ID NO: 437690 - RNA, 19 nt, Artificial Sequence
  Description of Artificial Sequence: Synthetic oligonucleotide
  Antisense Strand to SEQ ID NO: 437689
aauauaaccacauuucaga

SEQ ID NO: 437691 - RNA, 19 nt, Artificial Sequence
  Description of Artificial Sequence: Synthetic oligonucleotide
  Sense strand starting at position 3316 of SEQ ID NO: 316752
cugaaaugugguuauauug

SEQ ID NO: 437692 - RNA, 19 nt, Artificial Sequence
  Description of Artificial Sequence: Synthetic oligonucleotide
  Antisense Strand to SEQ ID NO: 437691
caauauaaccacauuucag

SEQ ID NO: 437693 - RNA, 19 nt, Artificial Sequence
  Description of Artificial Sequence: Synthetic oligonucleotide
  Sense strand starting at position 3322 of SEQ ID NO: 316752
ugugguuauauugggaaua

SEQ ID NO: 437694 - RNA, 19 nt, Artificial Sequence
  Description of Artificial Sequence: Synthetic oligonucleotide
  Antisense Strand to SEQ ID NO: 437693
uauucccaauauaaccaca

SEQ ID NO: 437695 - RNA, 19 nt, Artificial Sequence
  Description of Artificial Sequence: Synthetic oligonucleotide
  Sense strand starting at position 3360 of SEQ ID NO: 316752
aaaugaaucugagugguca

SEQ ID NO: 437696 - RNA, 19 nt, Artificial Sequence
  Description of Artificial Sequence: Synthetic oligonucleotide
  Antisense Strand to SEQ ID NO: 437695
ugaccacucagauucauuu

SEQ ID NO: 437697 - RNA, 19 nt, Artificial Sequence
  Description of Artificial Sequence: Synthetic oligonucleotide
  Sense strand starting at position 3361 of SEQ ID NO: 316752
aaugaaucugaguggucaa

SEQ ID NO: 437698 - RNA, 19 nt, Artificial Sequence
  Description of Artificial Sequence: Synthetic oligonucleotide
  Antisense Strand to SEQ ID NO: 437697
uugaccacucagauucauu

SEQ ID NO: 437699 - RNA, 19 nt, Artificial Sequence
  Description of Artificial Sequence: Synthetic oligonucleotide
  Sense strand starting at position 3362 of SEQ ID NO: 316752
augaaucugaguggucaau

SEQ ID NO: 437700 - RNA, 19 nt, Artificial Sequence
  Description of Artificial Sequence: Synthetic oligonucleotide
  Antisense Strand to SEQ ID NO: 437699
auugaccacucagauucau

SEQ ID NO: 437701 - RNA, 19 nt, Artificial Sequence
  Description of Artificial Sequence: Synthetic oligonucleotide
  Sense strand starting at position 3364 of SEQ ID NO: 316752
gaaucugaguggucaaugu

SEQ ID NO: 437702 - RNA, 19 nt, Artificial Sequence
  Description of Artificial Sequence: Synthetic oligonucleotide
  Antisense Strand to SEQ ID NO: 437701
acauugaccacucagauuc

SEQ ID NO: 437703 - RNA, 19 nt, Artificial Sequence
  Description of Artificial Sequence: Synthetic oligonucleotide
  Sense strand starting at position 3368 of SEQ ID NO: 316752
cugaguggucaauguauau

SEQ ID NO: 437704 - RNA, 19 nt, Artificial Sequence
  Description of Artificial Sequence: Synthetic oligonucleotide
  Antisense Strand to SEQ ID NO: 437703
auauacauugaccacucag

SEQ ID NO: 437705 - RNA, 19 nt, Artificial Sequence
  Description of Artificial Sequence: Synthetic oligonucleotide
  Sense strand starting at position 3372 of SEQ ID NO: 316752
guggucaauguauauuaca

SEQ ID NO: 437706 - RNA, 19 nt, Artificial Sequence
  Description of Artificial Sequence: Synthetic oligonucleotide
  Antisense Strand to SEQ ID NO: 437705
uguaauauacauugaccac

SEQ ID NO: 437707 - RNA, 19 nt, Artificial Sequence
  Description of Artificial Sequence: Synthetic oligonucleotide
  Sense strand starting at position 3413 of SEQ ID NO: 316752
gggagacaauuauaggaaa

SEQ ID NO: 437708 - RNA, 19 nt, Artificial Sequence
  Description of Artificial Sequence: Synthetic oligonucleotide
  Antisense Strand to SEQ ID NO: 437707
uuuccuauaauugucuccc

SEQ ID NO: 437709 - RNA, 19 nt, Artificial Sequence
  Description of Artificial Sequence: Synthetic oligonucleotide
  Sense strand starting at position 3416 of SEQ ID NO: 316752
agacaauuauaggaaacau

SEQ ID NO: 437710 - RNA, 19 nt, Artificial Sequence
  Description of Artificial Sequence: Synthetic oligonucleotide
  Antisense Strand to SEQ ID NO: 437709
auguuuccuauaauugucu

SEQ ID NO: 437711 - RNA, 19 nt, Artificial Sequence
  Description of Artificial Sequence: Synthetic oligonucleotide
  Sense strand starting at position 3639 of SEQ ID NO: 316752
ucauacagaguuuagcaaa

SEQ ID NO: 437712 - RNA, 19 nt, Artificial Sequence
  Description of Artificial Sequence: Synthetic oligonucleotide
  Antisense Strand to SEQ ID NO: 437711
uuugcuaaacucuguauga

SEQ ID NO: 437713 - RNA, 19 nt, Artificial Sequence
  Description of Artificial Sequence: Synthetic oligonucleotide
  Sense strand starting at position 3671 of SEQ ID NO: 316752
uuaagcaugugaucaagac

SEQ ID NO: 437714 - RNA, 19 nt, Artificial Sequence
  Description of Artificial Sequence: Synthetic oligonucleotide
  Antisense Strand to SEQ ID NO: 437713
gucuugaucacaugcuuaa

SEQ ID NO: 437715 - RNA, 19 nt, Artificial Sequence
  Description of Artificial Sequence: Synthetic oligonucleotide
  Sense strand starting at position 3675 of SEQ ID NO: 316752
gcaugugaucaagaccuaa

SEQ ID NO: 437716 - RNA, 19 nt, Artificial Sequence
  Description of Artificial Sequence: Synthetic oligonucleotide
  Antisense Strand to SEQ ID NO: 437715
uuaggucuugaucacaugc

SEQ ID NO: 437717 - RNA, 19 nt, Artificial Sequence
  Description of Artificial Sequence: Synthetic oligonucleotide
  Sense strand starting at position 3703 of SEQ ID NO: 316752
gauauuaaggagugugaua

SEQ ID NO: 437718 - RNA, 19 nt, Artificial Sequence
  Description of Artificial Sequence: Synthetic oligonucleotide
  Antisense Strand to SEQ ID NO: 437717
uaucacacuccuuaauauc

SEQ ID NO: 437719 - RNA, 19 nt, Artificial Sequence
  Description of Artificial Sequence: Synthetic oligonucleotide
  Sense strand starting at position 3705 of SEQ ID NO: 316752
uauuaaggagugugauaaa

SEQ ID NO: 437720 - RNA, 19 nt, Artificial Sequence
  Description of Artificial Sequence: Synthetic oligonucleotide
  Antisense Strand to SEQ ID NO: 437719
uuuaucacacuccuuaaua

SEQ ID NO: 437721 - RNA, 19 nt, Artificial Sequence
  Description of Artificial Sequence: Synthetic oligonucleotide
  Sense strand starting at position 3754 of SEQ ID NO: 316752
ugggacaggugcgugaaua

SEQ ID NO: 437722 - RNA, 19 nt, Artificial Sequence
  Description of Artificial Sequence: Synthetic oligonucleotide
  Antisense Strand to SEQ ID NO: 437721
uauucacgcaccuguccca

SEQ ID NO: 437723 - RNA, 19 nt, Artificial Sequence
  Description of Artificial Sequence: Synthetic oligonucleotide
  Sense strand starting at position 3783 of SEQ ID NO: 316752
auaaguauauaggccauua

SEQ ID NO: 437724 - RNA, 19 nt, Artificial Sequence
  Description of Artificial Sequence: Synthetic oligonucleotide
  Antisense Strand to SEQ ID NO: 437723
uaauggccuauauacuuau

SEQ ID NO: 437725 - RNA, 19 nt, Artificial Sequence
  Description of Artificial Sequence: Synthetic oligonucleotide
  Sense strand starting at position 3846 of SEQ ID NO: 316752
gcauauugggauugauagu

SEQ ID NO: 437726 - RNA, 19 nt, Artificial Sequence
  Description of Artificial Sequence: Synthetic oligonucleotide
  Antisense Strand to SEQ ID NO: 437725
acuaucaaucccaauaugc

SEQ ID NO: 437727 - RNA, 19 nt, Artificial Sequence
  Description of Artificial Sequence: Synthetic oligonucleotide
  Sense strand starting at position 3859 of SEQ ID NO: 316752
gauagugugcccuauggga

SEQ ID NO: 437728 - RNA, 19 nt, Artificial Sequence
  Description of Artificial Sequence: Synthetic oligonucleotide
  Antisense Strand to SEQ ID NO: 437727
ucccauagggcacacuauc

SEQ ID NO: 437729 - RNA, 19 nt, Artificial Sequence
  Description of Artificial Sequence: Synthetic oligonucleotide
  Sense strand starting at position 3932 of SEQ ID NO: 316752
guguguagauaaccuaaga

SEQ ID NO: 437730 - RNA, 19 nt, Artificial Sequence
  Description of Artificial Sequence: Synthetic oligonucleotide
  Antisense Strand to SEQ ID NO: 437729
ucuuagguuaucuacacac

SEQ ID NO: 437731 - RNA, 19 nt, Artificial Sequence
  Description of Artificial Sequence: Synthetic oligonucleotide
  Sense strand starting at position 3977 of SEQ ID NO: 316752
ggaacucaaucugucuuau

SEQ ID NO: 437732 - RNA, 19 nt, Artificial Sequence
  Description of Artificial Sequence: Synthetic oligonucleotide
  Antisense Strand to SEQ ID NO: 437731
auaagacagauugaguucc

SEQ ID NO: 437733 - RNA, 19 nt, Artificial Sequence
  Description of Artificial Sequence: Synthetic oligonucleotide
  Sense strand starting at position 319 of SEQ ID NO: 316753
auuagaguccuagaugcaa

SEQ ID NO: 437734 - RNA, 19 nt, Artificial Sequence
  Description of Artificial Sequence: Synthetic oligonucleotide
  Antisense Strand to SEQ ID NO: 437733
uugcaucuaggacucuaau

SEQ ID NO: 437735 - RNA, 19 nt, Artificial Sequence
  Description of Artificial Sequence: Synthetic oligonucleotide
  Sense strand starting at position 467 of SEQ ID NO: 316753
guuauuaucccagguggaa

SEQ ID NO: 437736 - RNA, 19 nt, Artificial Sequence
  Description of Artificial Sequence: Synthetic oligonucleotide
  Antisense Strand to SEQ ID NO: 437735
uuccaccugggauaauaac

SEQ ID NO: 437737 - RNA, 19 nt, Artificial Sequence
  Description of Artificial Sequence: Synthetic oligonucleotide
  Sense strand starting at position 522 of SEQ ID NO: 316753
acagauuguuucgcccuua

SEQ ID NO: 437738 - RNA, 19 nt, Artificial Sequence
  Description of Artificial Sequence: Synthetic oligonucleotide
  Antisense Strand to SEQ ID NO: 437737
uaagggcgaaacaaucugu

SEQ ID NO: 437739 - RNA, 19 nt, Artificial Sequence
  Description of Artificial Sequence: Synthetic oligonucleotide
  Sense strand starting at position 523 of SEQ ID NO: 316753
cagauuguuucgcccuuaa

SEQ ID NO: 437740 - RNA, 19 nt, Artificial Sequence
  Description of Artificial Sequence: Synthetic oligonucleotide
  Antisense Strand to SEQ ID NO: 437739
uuaagggcgaaacaaucug

SEQ ID NO: 437741 - RNA, 19 nt, Artificial Sequence
  Description of Artificial Sequence: Synthetic oligonucleotide
  Sense strand starting at position 527 of SEQ ID NO: 316753
uuguuucgcccuuaagaaa

SEQ ID NO: 437742 - RNA, 19 nt, Artificial Sequence
  Description of Artificial Sequence: Synthetic oligonucleotide
  Antisense Strand to SEQ ID NO: 437741
uuucuuaagggcgaaacaa

SEQ ID NO: 437743 - RNA, 19 nt, Artificial Sequence
  Description of Artificial Sequence: Synthetic oligonucleotide
  Sense strand starting at position 555 of SEQ ID NO: 316753
guccuugaugcagaauauc

SEQ ID NO: 437744 - RNA, 19 nt, Artificial Sequence
  Description of Artificial Sequence: Synthetic oligonucleotide
  Antisense Strand to SEQ ID NO: 437743
gauauucugcaucaaggac

SEQ ID NO: 437745 - RNA, 19 nt, Artificial Sequence
  Description of Artificial Sequence: Synthetic oligonucleotide
  Sense strand starting at position 936 of SEQ ID NO: 316753
guggcaugcaucugaaguc

SEQ ID NO: 437746 - RNA, 19 nt, Artificial Sequence
  Description of Artificial Sequence: Synthetic oligonucleotide
  Antisense Strand to SEQ ID NO: 437745
gacuucagaugcaugccac

SEQ ID NO: 437747 - RNA, 19 nt, Artificial Sequence
  Description of Artificial Sequence: Synthetic oligonucleotide
  Sense strand starting at position 1117 of SEQ ID NO: 316753
uguaaauuugaaugcuguu

SEQ ID NO: 437748 - RNA, 19 nt, Artificial Sequence
  Description of Artificial Sequence: Synthetic oligonucleotide
  Antisense Strand to SEQ ID NO: 437747
aacagcauucaaauuuaca

SEQ ID NO: 437749 - RNA, 19 nt, Artificial Sequence
  Description of Artificial Sequence: Synthetic oligonucleotide
  Sense strand starting at position 1168 of SEQ ID NO: 316753
cuucuucugaguuaggguu

SEQ ID NO: 437750 - RNA, 19 nt, Artificial Sequence
  Description of Artificial Sequence: Synthetic oligonucleotide
  Antisense Strand to SEQ ID NO: 437749
aacccuaacucagaagaag

SEQ ID NO: 437751 - RNA, 19 nt, Artificial Sequence
  Description of Artificial Sequence: Synthetic oligonucleotide
  Sense strand starting at position 1228 of SEQ ID NO: 316753
caucuugucccuugguaag

SEQ ID NO: 437752 - RNA, 19 nt, Artificial Sequence
  Description of Artificial Sequence: Synthetic oligonucleotide
  Antisense Strand to SEQ ID NO: 437751
cuuaccaagggacaagaug

SEQ ID NO: 437753 - RNA, 19 nt, Artificial Sequence
  Description of Artificial Sequence: Synthetic oligonucleotide
  Sense strand starting at position 1261 of SEQ ID NO: 316753
guauaugaauuauugacag

SEQ ID NO: 437754 - RNA, 19 nt, Artificial Sequence
  Description of Artificial Sequence: Synthetic oligonucleotide
  Antisense Strand to SEQ ID NO: 437753
cugucaauaauucauauac

SEQ ID NO: 437755 - RNA, 19 nt, Artificial Sequence
  Description of Artificial Sequence: Synthetic oligonucleotide
  Sense strand starting at position 1265 of SEQ ID NO: 316753
augaauuauugacagagcu

SEQ ID NO: 437756 - RNA, 19 nt, Artificial Sequence
  Description of Artificial Sequence: Synthetic oligonucleotide
  Antisense Strand to SEQ ID NO: 437755
agcucugucaauaauucau

SEQ ID NO: 437757 - RNA, 19 nt, Artificial Sequence
  Description of Artificial Sequence: Synthetic oligonucleotide
  Sense strand starting at position 1451 of SEQ ID NO: 316753
aggauuaugaaaugugagu

SEQ ID NO: 437758 - RNA, 19 nt, Artificial Sequence
  Description of Artificial Sequence: Synthetic oligonucleotide
  Antisense Strand to SEQ ID NO: 437757
acucacauuucauaauccu

SEQ ID NO: 437759 - RNA, 19 nt, Artificial Sequence
  Description of Artificial Sequence: Synthetic oligonucleotide
  Sense strand starting at position 1453 of SEQ ID NO: 316753
gauuaugaaaugugaguga

SEQ ID NO: 437760 - RNA, 19 nt, Artificial Sequence
  Description of Artificial Sequence: Synthetic oligonucleotide
  Antisense Strand to SEQ ID NO: 437759
ucacucacauuucauaauc

SEQ ID NO: 437761 - RNA, 19 nt, Artificial Sequence
  Description of Artificial Sequence: Synthetic oligonucleotide
  Sense strand starting at position 1526 of SEQ ID NO: 316753
ggguucgaguguuuauguu

SEQ ID NO: 437762 - RNA, 19 nt, Artificial Sequence
  Description of Artificial Sequence: Synthetic oligonucleotide
  Antisense Strand to SEQ ID NO: 437761
aacauaaacacucgaaccc

SEQ ID NO: 437763 - RNA, 19 nt, Artificial Sequence
  Description of Artificial Sequence: Synthetic oligonucleotide
  Sense strand starting at position 1532 of SEQ ID NO: 316753
gaguguuuauguuccuguu

SEQ ID NO: 437764 - RNA, 19 nt, Artificial Sequence
  Description of Artificial Sequence: Synthetic oligonucleotide
  Antisense Strand to SEQ ID NO: 437763
aacaggaacauaaacacuc

SEQ ID NO: 437765 - RNA, 19 nt, Artificial Sequence
  Description of Artificial Sequence: Synthetic oligonucleotide
  Sense strand starting at position 1544 of SEQ ID NO: 316753
uccuguuuccagggcuagu

SEQ ID NO: 437766 - RNA, 19 nt, Artificial Sequence
  Description of Artificial Sequence: Synthetic oligonucleotide
  Antisense Strand to SEQ ID NO: 437765
acuagcccuggaaacagga

SEQ ID NO: 437767 - RNA, 19 nt, Artificial Sequence
  Description of Artificial Sequence: Synthetic oligonucleotide
  Sense strand starting at position 1562 of SEQ ID NO: 316753
uggaucauugcaugaaaua

SEQ ID NO: 437768 - RNA, 19 nt, Artificial Sequence
  Description of Artificial Sequence: Synthetic oligonucleotide
  Antisense Strand to SEQ ID NO: 437767
uauuucaugcaaugaucca

SEQ ID NO: 437769 - RNA, 19 nt, Artificial Sequence
  Description of Artificial Sequence: Synthetic oligonucleotide
  Sense strand starting at position 1653 of SEQ ID NO: 316753
ccaguugucccagaugcua

SEQ ID NO: 437770 - RNA, 19 nt, Artificial Sequence
  Description of Artificial Sequence: Synthetic oligonucleotide
  Antisense Strand to SEQ ID NO: 437769
uagcaucugggacaacugg

SEQ ID NO: 437771 - RNA, 19 nt, Artificial Sequence
  Description of Artificial Sequence: Synthetic oligonucleotide
  Sense strand starting at position 1655 of SEQ ID NO: 316753
aguugucccagaugcuaga

SEQ ID NO: 437772 - RNA, 19 nt, Artificial Sequence
  Description of Artificial Sequence: Synthetic oligonucleotide
  Antisense Strand to SEQ ID NO: 437771
ucuagcaucugggacaacu

SEQ ID NO: 437773 - RNA, 19 nt, Artificial Sequence
  Description of Artificial Sequence: Synthetic oligonucleotide
  Sense strand starting at position 2121 of SEQ ID NO: 316753
gaggaaacauaauggucau

SEQ ID NO: 437774 - RNA, 19 nt, Artificial Sequence
  Description of Artificial Sequence: Synthetic oligonucleotide
  Antisense Strand to SEQ ID NO: 437773
augaccauuauguuuccuc

SEQ ID NO: 437775 - RNA, 19 nt, Artificial Sequence
  Description of Artificial Sequence: Synthetic oligonucleotide
  Sense strand starting at position 2160 of SEQ ID NO: 316753
cagccauaacuggguuaaa

SEQ ID NO: 437776 - RNA, 19 nt, Artificial Sequence
  Description of Artificial Sequence: Synthetic oligonucleotide
  Antisense Strand to SEQ ID NO: 437775
uuuaacccaguuauggcug

SEQ ID NO: 437777 - RNA, 19 nt, Artificial Sequence
  Description of Artificial Sequence: Synthetic oligonucleotide
  Sense strand starting at position 2257 of SEQ ID NO: 316753
gccucaaauuuauugugua

SEQ ID NO: 437778 - RNA, 19 nt, Artificial Sequence
  Description of Artificial Sequence: Synthetic oligonucleotide
  Antisense Strand to SEQ ID NO: 437777
uacacaauaaauuugaggc

SEQ ID NO: 437779 - RNA, 19 nt, Artificial Sequence
  Description of Artificial Sequence: Synthetic oligonucleotide
  Sense strand starting at position 2258 of SEQ ID NO: 316753
ccucaaauuuauuguguau

SEQ ID NO: 437780 - RNA, 19 nt, Artificial Sequence
  Description of Artificial Sequence: Synthetic oligonucleotide
  Antisense Strand to SEQ ID NO: 437779
auacacaauaaauuugagg

SEQ ID NO: 437781 - RNA, 19 nt, Artificial Sequence
  Description of Artificial Sequence: Synthetic oligonucleotide
  Sense strand starting at position 2267 of SEQ ID NO: 316753
uauuguguauaagauggaa

SEQ ID NO: 437782 - RNA, 19 nt, Artificial Sequence
  Description of Artificial Sequence: Synthetic oligonucleotide
  Antisense Strand to SEQ ID NO: 437781
uuccaucuuauacacaaua

SEQ ID NO: 437783 - RNA, 19 nt, Artificial Sequence
  Description of Artificial Sequence: Synthetic oligonucleotide
  Sense strand starting at position 2269 of SEQ ID NO: 316753
uuguguauaagauggaaau

SEQ ID NO: 437784 - RNA, 19 nt, Artificial Sequence
  Description of Artificial Sequence: Synthetic oligonucleotide
  Antisense Strand to SEQ ID NO: 437783
auuuccaucuuauacacaa

SEQ ID NO: 437785 - RNA, 19 nt, Artificial Sequence
  Description of Artificial Sequence: Synthetic oligonucleotide
  Sense strand starting at position 2270 of SEQ ID NO: 316753
uguguauaagauggaaaua

SEQ ID NO: 437786 - RNA, 19 nt, Artificial Sequence
  Description of Artificial Sequence: Synthetic oligonucleotide
  Antisense Strand to SEQ ID NO: 437785
uauuuccaucuuauacaca

SEQ ID NO: 437787 - RNA, 19 nt, Artificial Sequence
  Description of Artificial Sequence: Synthetic oligonucleotide
  Sense strand starting at position 2341 of SEQ ID NO: 316753
auaaauaacuuagcagagu

SEQ ID NO: 437788 - RNA, 19 nt, Artificial Sequence
  Description of Artificial Sequence: Synthetic oligonucleotide
  Antisense Strand to SEQ ID NO: 437787
acucugcuaaguuauuuau

SEQ ID NO: 437789 - RNA, 19 nt, Artificial Sequence
  Description of Artificial Sequence: Synthetic oligonucleotide
  Sense strand starting at position 2352 of SEQ ID NO: 316753
agcagaguaucugucagau

SEQ ID NO: 437790 - RNA, 19 nt, Artificial Sequence
  Description of Artificial Sequence: Synthetic oligonucleotide
  Antisense Strand to SEQ ID NO: 437789
aucugacagauacucugcu

SEQ ID NO: 437791 - RNA, 19 nt, Artificial Sequence
  Description of Artificial Sequence: Synthetic oligonucleotide
  Sense strand starting at position 2354 of SEQ ID NO: 316753
cagaguaucugucagauaa

SEQ ID NO: 437792 - RNA, 19 nt, Artificial Sequence
  Description of Artificial Sequence: Synthetic oligonucleotide
  Antisense Strand to SEQ ID NO: 437791
uuaucugacagauacucug

SEQ ID NO: 437793 - RNA, 19 nt, Artificial Sequence
  Description of Artificial Sequence: Synthetic oligonucleotide
  Sense strand starting at position 2356 of SEQ ID NO: 316753
gaguaucugucagauaaua

SEQ ID NO: 437794 - RNA, 19 nt, Artificial Sequence
  Description of Artificial Sequence: Synthetic oligonucleotide
  Antisense Strand to SEQ ID NO: 437793
uauuaucugacagauacuc

SEQ ID NO: 437795 - RNA, 19 nt, Artificial Sequence
  Description of Artificial Sequence: Synthetic oligonucleotide
  Sense strand starting at position 2457 of SEQ ID NO: 316753
ggucucacagaauguauca

SEQ ID NO: 437796 - RNA, 19 nt, Artificial Sequence
  Description of Artificial Sequence: Synthetic oligonucleotide
  Antisense Strand to SEQ ID NO: 437795
ugauacauucugugagacc

SEQ ID NO: 437797 - RNA, 19 nt, Artificial Sequence
  Description of Artificial Sequence: Synthetic oligonucleotide
  Sense strand starting at position 2462 of SEQ ID NO: 316753
cacagaauguaucaaugga

SEQ ID NO: 437798 - RNA, 19 nt, Artificial Sequence
  Description of Artificial Sequence: Synthetic oligonucleotide
  Antisense Strand to SEQ ID NO: 437797
uccauugauacauucugug

SEQ ID NO: 437799 - RNA, 19 nt, Artificial Sequence
  Description of Artificial Sequence: Synthetic oligonucleotide
  Sense strand starting at position 3061 of SEQ ID NO: 316753
ucucaagauuaagaaguaa

SEQ ID NO: 437800 - RNA, 19 nt, Artificial Sequence
  Description of Artificial Sequence: Synthetic oligonucleotide
  Antisense Strand to SEQ ID NO: 437799
uuacuucuuaaucuugaga

SEQ ID NO: 437801 - RNA, 19 nt, Artificial Sequence
  Description of Artificial Sequence: Synthetic oligonucleotide
  Sense strand starting at position 3098 of SEQ ID NO: 316753
agaaacaacguauguaaga

SEQ ID NO: 437802 - RNA, 19 nt, Artificial Sequence
  Description of Artificial Sequence: Synthetic oligonucleotide
  Antisense Strand to SEQ ID NO: 437801
ucuuacauacguuguuucu

SEQ ID NO: 437803 - RNA, 19 nt, Artificial Sequence
  Description of Artificial Sequence: Synthetic oligonucleotide
  Sense strand starting at position 3099 of SEQ ID NO: 316753
gaaacaacguauguaagaa

SEQ ID NO: 437804 - RNA, 19 nt, Artificial Sequence
  Description of Artificial Sequence: Synthetic oligonucleotide
  Antisense Strand to SEQ ID NO: 437803
uucuuacauacguuguuuc

SEQ ID NO: 437805 - RNA, 19 nt, Artificial Sequence
  Description of Artificial Sequence: Synthetic oligonucleotide
  Sense strand starting at position 3107 of SEQ ID NO: 316753
guauguaagaaaggcauaa

SEQ ID NO: 437806 - RNA, 19 nt, Artificial Sequence
  Description of Artificial Sequence: Synthetic oligonucleotide
  Antisense Strand to SEQ ID NO: 437805
uuaugccuuucuuacauac

SEQ ID NO: 437807 - RNA, 19 nt, Artificial Sequence
  Description of Artificial Sequence: Synthetic oligonucleotide
  Sense strand starting at position 3158 of SEQ ID NO: 316753
uuauguuguuaugugcuaa

SEQ ID NO: 437808 - RNA, 19 nt, Artificial Sequence
  Description of Artificial Sequence: Synthetic oligonucleotide
  Antisense Strand to SEQ ID NO: 437807
uuagcacauaacaacauaa

SEQ ID NO: 437809 - RNA, 19 nt, Artificial Sequence
  Description of Artificial Sequence: Synthetic oligonucleotide
  Sense strand starting at position 3181 of SEQ ID NO: 316753
ccaagaucucagugcauca

SEQ ID NO: 437810 - RNA, 19 nt, Artificial Sequence
  Description of Artificial Sequence: Synthetic oligonucleotide
  Antisense Strand to SEQ ID NO: 437809
ugaugcacugagaucuugg

SEQ ID NO: 437811 - RNA, 19 nt, Artificial Sequence
  Description of Artificial Sequence: Synthetic oligonucleotide
  Sense strand starting at position 3858 of SEQ ID NO: 316753
cgugucaugucucuuuaua

SEQ ID NO: 437812 - RNA, 19 nt, Artificial Sequence
  Description of Artificial Sequence: Synthetic oligonucleotide
  Antisense Strand to SEQ ID NO: 437811
uauaaagagacaugacacg

SEQ ID NO: 437813 - RNA, 19 nt, Artificial Sequence
  Description of Artificial Sequence: Synthetic oligonucleotide
  Sense strand starting at position 298 of SEQ ID NO: 316754
uagaucacugucuggaaca

SEQ ID NO: 437814 - RNA, 19 nt, Artificial Sequence
  Description of Artificial Sequence: Synthetic oligonucleotide
  Antisense Strand to SEQ ID NO: 437813
uguuccagacagugaucua

SEQ ID NO: 437815 - RNA, 19 nt, Artificial Sequence
  Description of Artificial Sequence: Synthetic oligonucleotide
  Sense strand starting at position 321 of SEQ ID NO: 316754
gggugcucaacagauacuu

SEQ ID NO: 437816 - RNA, 19 nt, Artificial Sequence
  Description of Artificial Sequence: Synthetic oligonucleotide
  Antisense Strand to SEQ ID NO: 437815
aaguaucuguugagcaccc

SEQ ID NO: 437817 - RNA, 19 nt, Artificial Sequence
  Description of Artificial Sequence: Synthetic oligonucleotide
  Sense strand starting at position 401 of SEQ ID NO: 316754
gguuacaucuaguuuauga

SEQ ID NO: 437818 - RNA, 19 nt, Artificial Sequence
  Description of Artificial Sequence: Synthetic oligonucleotide
  Antisense Strand to SEQ ID NO: 437817
ucauaaacuagauguaacc

SEQ ID NO: 437819 - RNA, 19 nt, Artificial Sequence
  Description of Artificial Sequence: Synthetic oligonucleotide
  Sense strand starting at position 420 of SEQ ID NO: 316754
aauacuaugggcugucaaa

SEQ ID NO: 437820 - RNA, 19 nt, Artificial Sequence
  Description of Artificial Sequence: Synthetic oligonucleotide
  Antisense Strand to SEQ ID NO: 437819
uuugacagcccauaguauu

SEQ ID NO: 437821 - RNA, 19 nt, Artificial Sequence
  Description of Artificial Sequence: Synthetic oligonucleotide
  Sense strand starting at position 508 of SEQ ID NO: 316754
uaaugagguugcuuucuaa

SEQ ID NO: 437822 - RNA, 19 nt, Artificial Sequence
  Description of Artificial Sequence: Synthetic oligonucleotide
  Antisense Strand to SEQ ID NO: 437821
uuagaaagcaaccucauua

SEQ ID NO: 437823 - RNA, 19 nt, Artificial Sequence
  Description of Artificial Sequence: Synthetic oligonucleotide
  Sense strand starting at position 729 of SEQ ID NO: 316754
cguuuccucggauugcuua

SEQ ID NO: 437824 - RNA, 19 nt, Artificial Sequence
  Description of Artificial Sequence: Synthetic oligonucleotide
  Antisense Strand to SEQ ID NO: 437823
uaagcaauccgaggaaacg

SEQ ID NO: 437825 - RNA, 19 nt, Artificial Sequence
  Description of Artificial Sequence: Synthetic oligonucleotide
  Sense strand starting at position 884 of SEQ ID NO: 316754
gguuguucccuuuaggaga

SEQ ID NO: 437826 - RNA, 19 nt, Artificial Sequence
  Description of Artificial Sequence: Synthetic oligonucleotide
  Antisense Strand to SEQ ID NO: 437825
ucuccuaaagggaacaacc

SEQ ID NO: 437827 - RNA, 19 nt, Artificial Sequence
  Description of Artificial Sequence: Synthetic oligonucleotide
  Sense strand starting at position 891 of SEQ ID NO: 316754
cccuuuaggagagguuagu

SEQ ID NO: 437828 - RNA, 19 nt, Artificial Sequence
  Description of Artificial Sequence: Synthetic oligonucleotide
  Antisense Strand to SEQ ID NO: 437827
acuaaccucuccuaaaggg

SEQ ID NO: 437829 - RNA, 19 nt, Artificial Sequence
  Description of Artificial Sequence: Synthetic oligonucleotide
  Sense strand starting at position 900 of SEQ ID NO: 316754
agagguuaguagcuggaaa

SEQ ID NO: 437830 - RNA, 19 nt, Artificial Sequence
  Description of Artificial Sequence: Synthetic oligonucleotide
  Antisense Strand to SEQ ID NO: 437829
uuuccagcuacuaaccucu

SEQ ID NO: 437831 - RNA, 19 nt, Artificial Sequence
  Description of Artificial Sequence: Synthetic oligonucleotide
  Sense strand starting at position 901 of SEQ ID NO: 316754
gagguuaguagcuggaaag

SEQ ID NO: 437832 - RNA, 19 nt, Artificial Sequence
  Description of Artificial Sequence: Synthetic oligonucleotide
  Antisense Strand to SEQ ID NO: 437831
cuuuccagcuacuaaccuc

SEQ ID NO: 437833 - RNA, 19 nt, Artificial Sequence
  Description of Artificial Sequence: Synthetic oligonucleotide
  Sense strand starting at position 989 of SEQ ID NO: 316754
aguugcugcgccuuaucau

SEQ ID NO: 437834 - RNA, 19 nt, Artificial Sequence
  Description of Artificial Sequence: Synthetic oligonucleotide
  Antisense Strand to SEQ ID NO: 437833
augauaaggcgcagcaacu

SEQ ID NO: 437835 - RNA, 19 nt, Artificial Sequence
  Description of Artificial Sequence: Synthetic oligonucleotide
  Sense strand starting at position 1000 of SEQ ID NO: 316754
cuuaucaucuaaguaaugu

SEQ ID NO: 437836 - RNA, 19 nt, Artificial Sequence
  Description of Artificial Sequence: Synthetic oligonucleotide
  Antisense Strand to SEQ ID NO: 437835
acauuacuuagaugauaag

SEQ ID NO: 437837 - RNA, 19 nt, Artificial Sequence
  Description of Artificial Sequence: Synthetic oligonucleotide
  Sense strand starting at position 1051 of SEQ ID NO: 316754
uuacuucucuggucacaug

SEQ ID NO: 437838 - RNA, 19 nt, Artificial Sequence
  Description of Artificial Sequence: Synthetic oligonucleotide
  Antisense Strand to SEQ ID NO: 437837
caugugaccagagaaguaa

SEQ ID NO: 437839 - RNA, 19 nt, Artificial Sequence
  Description of Artificial Sequence: Synthetic oligonucleotide
  Sense strand starting at position 1212 of SEQ ID NO: 316754
gcacuuucgggucagagac

SEQ ID NO: 437840 - RNA, 19 nt, Artificial Sequence
  Description of Artificial Sequence: Synthetic oligonucleotide
  Antisense Strand to SEQ ID NO: 437839
gucucugacccgaaagugc

SEQ ID NO: 437841 - RNA, 19 nt, Artificial Sequence
  Description of Artificial Sequence: Synthetic oligonucleotide
  Sense strand starting at position 1275 of SEQ ID NO: 316754
cugcaucugcgaguucuau

SEQ ID NO: 437842 - RNA, 19 nt, Artificial Sequence
  Description of Artificial Sequence: Synthetic oligonucleotide
  Antisense Strand to SEQ ID NO: 437841
auagaacucgcagaugcag

SEQ ID NO: 437843 - RNA, 19 nt, Artificial Sequence
  Description of Artificial Sequence: Synthetic oligonucleotide
  Sense strand starting at position 1276 of SEQ ID NO: 316754
ugcaucugcgaguucuauu

SEQ ID NO: 437844 - RNA, 19 nt, Artificial Sequence
  Description of Artificial Sequence: Synthetic oligonucleotide
  Antisense Strand to SEQ ID NO: 437843
aauagaacucgcagaugca

SEQ ID NO: 437845 - RNA, 19 nt, Artificial Sequence
  Description of Artificial Sequence: Synthetic oligonucleotide
  Sense strand starting at position 1277 of SEQ ID NO: 316754
gcaucugcgaguucuauuc

SEQ ID NO: 437846 - RNA, 19 nt, Artificial Sequence
  Description of Artificial Sequence: Synthetic oligonucleotide
  Antisense Strand to SEQ ID NO: 437845
gaauagaacucgcagaugc

SEQ ID NO: 437847 - RNA, 19 nt, Artificial Sequence
  Description of Artificial Sequence: Synthetic oligonucleotide
  Sense strand starting at position 2348 of SEQ ID NO: 316754
cugacaaaugccuggucaa

SEQ ID NO: 437848 - RNA, 19 nt, Artificial Sequence
  Description of Artificial Sequence: Synthetic oligonucleotide
  Antisense Strand to SEQ ID NO: 437847
uugaccaggcauuugucag

SEQ ID NO: 437849 - RNA, 19 nt, Artificial Sequence
  Description of Artificial Sequence: Synthetic oligonucleotide
  Sense strand starting at position 2349 of SEQ ID NO: 316754
ugacaaaugccuggucaac

SEQ ID NO: 437850 - RNA, 19 nt, Artificial Sequence
  Description of Artificial Sequence: Synthetic oligonucleotide
  Antisense Strand to SEQ ID NO: 437849
guugaccaggcauuuguca

SEQ ID NO: 437851 - RNA, 19 nt, Artificial Sequence
  Description of Artificial Sequence: Synthetic oligonucleotide
  Sense strand starting at position 2351 of SEQ ID NO: 316754
acaaaugccuggucaacca

SEQ ID NO: 437852 - RNA, 19 nt, Artificial Sequence
  Description of Artificial Sequence: Synthetic oligonucleotide
  Antisense Strand to SEQ ID NO: 437851
ugguugaccaggcauuugu

SEQ ID NO: 437853 - RNA, 19 nt, Artificial Sequence
  Description of Artificial Sequence: Synthetic oligonucleotide
  Sense strand starting at position 2397 of SEQ ID NO: 316754
uccuucucucaagaggcau

SEQ ID NO: 437854 - RNA, 19 nt, Artificial Sequence
  Description of Artificial Sequence: Synthetic oligonucleotide
  Antisense Strand to SEQ ID NO: 437853
augccucuugagagaagga

SEQ ID NO: 437855 - RNA, 19 nt, Artificial Sequence
  Description of Artificial Sequence: Synthetic oligonucleotide
  Sense strand starting at position 2442 of SEQ ID NO: 316754
uaguucuugcuggaugaca

SEQ ID NO: 437856 - RNA, 19 nt, Artificial Sequence
  Description of Artificial Sequence: Synthetic oligonucleotide
  Antisense Strand to SEQ ID NO: 437855
ugucauccagcaagaacua

SEQ ID NO: 437857 - RNA, 19 nt, Artificial Sequence
  Description of Artificial Sequence: Synthetic oligonucleotide
  Sense strand starting at position 2494 of SEQ ID NO: 316754
auguaaagccgggauagua

SEQ ID NO: 437858 - RNA, 19 nt, Artificial Sequence
  Description of Artificial Sequence: Synthetic oligonucleotide
  Antisense Strand to SEQ ID NO: 437857
uacuaucccggcuuuacau

SEQ ID NO: 437859 - RNA, 19 nt, Artificial Sequence
  Description of Artificial Sequence: Synthetic oligonucleotide
  Sense strand starting at position 2549 of SEQ ID NO: 316754
gugaguuaauaucuacaac

SEQ ID NO: 437860 - RNA, 19 nt, Artificial Sequence
  Description of Artificial Sequence: Synthetic oligonucleotide
  Antisense Strand to SEQ ID NO: 437859
guuguagauauuaacucac

SEQ ID NO: 437861 - RNA, 19 nt, Artificial Sequence
  Description of Artificial Sequence: Synthetic oligonucleotide
  Sense strand starting at position 2594 of SEQ ID NO: 316754
guaaucacccaguaaaugu

SEQ ID NO: 437862 - RNA, 19 nt, Artificial Sequence
  Description of Artificial Sequence: Synthetic oligonucleotide
  Antisense Strand to SEQ ID NO: 437861
acauuuacugggugauuac

SEQ ID NO: 437863 - RNA, 19 nt, Artificial Sequence
  Description of Artificial Sequence: Synthetic oligonucleotide
  Sense strand starting at position 2631 of SEQ ID NO: 316754
cuaggagcugcucagagau

SEQ ID NO: 437864 - RNA, 19 nt, Artificial Sequence
  Description of Artificial Sequence: Synthetic oligonucleotide
  Antisense Strand to SEQ ID NO: 437863
aucucugagcagcuccuag

SEQ ID NO: 437865 - RNA, 19 nt, Artificial Sequence
  Description of Artificial Sequence: Synthetic oligonucleotide
  Sense strand starting at position 2655 of SEQ ID NO: 316754
uuuauaguccauggaaugu

SEQ ID NO: 437866 - RNA, 19 nt, Artificial Sequence
  Description of Artificial Sequence: Synthetic oligonucleotide
  Antisense Strand to SEQ ID NO: 437865
acauuccauggacuauaaa

SEQ ID NO: 437867 - RNA, 19 nt, Artificial Sequence
  Description of Artificial Sequence: Synthetic oligonucleotide
  Sense strand starting at position 2665 of SEQ ID NO: 316754
auggaauguguuugaagca

SEQ ID NO: 437868 - RNA, 19 nt, Artificial Sequence
  Description of Artificial Sequence: Synthetic oligonucleotide
  Antisense Strand to SEQ ID NO: 437867
ugcuucaaacacauuccau

SEQ ID NO: 437869 - RNA, 19 nt, Artificial Sequence
  Description of Artificial Sequence: Synthetic oligonucleotide
  Sense strand starting at position 2684 of SEQ ID NO: 316754
gggucuggcacacaguaau

SEQ ID NO: 437870 - RNA, 19 nt, Artificial Sequence
  Description of Artificial Sequence: Synthetic oligonucleotide
  Antisense Strand to SEQ ID NO: 437869
auuacugugugccagaccc

SEQ ID NO: 437871 - RNA, 19 nt, Artificial Sequence
  Description of Artificial Sequence: Synthetic oligonucleotide
  Sense strand starting at position 2687 of SEQ ID NO: 316754
ucuggcacacaguaauaau

SEQ ID NO: 437872 - RNA, 19 nt, Artificial Sequence
  Description of Artificial Sequence: Synthetic oligonucleotide
  Antisense Strand to SEQ ID NO: 437871
auuauuacugugugccaga

SEQ ID NO: 437873 - RNA, 19 nt, Artificial Sequence
  Description of Artificial Sequence: Synthetic oligonucleotide
  Sense strand starting at position 2710 of SEQ ID NO: 316754
cacucuaugcgggaguuua

SEQ ID NO: 437874 - RNA, 19 nt, Artificial Sequence
  Description of Artificial Sequence: Synthetic oligonucleotide
  Antisense Strand to SEQ ID NO: 437873
uaaacucccgcauagagug

SEQ ID NO: 437875 - RNA, 19 nt, Artificial Sequence
  Description of Artificial Sequence: Synthetic oligonucleotide
  Sense strand starting at position 2753 of SEQ ID NO: 316754
gccucuucuuuauuaagag

SEQ ID NO: 437876 - RNA, 19 nt, Artificial Sequence
  Description of Artificial Sequence: Synthetic oligonucleotide
  Antisense Strand to SEQ ID NO: 437875
cucuuaauaaagaagaggc

SEQ ID NO: 437877 - RNA, 19 nt, Artificial Sequence
  Description of Artificial Sequence: Synthetic oligonucleotide
  Sense strand starting at position 2768 of SEQ ID NO: 316754
agagaacaucugugacauu

SEQ ID NO: 437878 - RNA, 19 nt, Artificial Sequence
  Description of Artificial Sequence: Synthetic oligonucleotide
  Antisense Strand to SEQ ID NO: 437877
aaugucacagauguucucu

SEQ ID NO: 437879 - RNA, 19 nt, Artificial Sequence
  Description of Artificial Sequence: Synthetic oligonucleotide
  Sense strand starting at position 2801 of SEQ ID NO: 316754
aguaaugugagcgaucaag

SEQ ID NO: 437880 - RNA, 19 nt, Artificial Sequence
  Description of Artificial Sequence: Synthetic oligonucleotide
  Antisense Strand to SEQ ID NO: 437879
cuugaucgcucacauuacu

SEQ ID NO: 437881 - RNA, 19 nt, Artificial Sequence
  Description of Artificial Sequence: Synthetic oligonucleotide
  Sense strand starting at position 2930 of SEQ ID NO: 316754
guaguuaggcuagaggguu

SEQ ID NO: 437882 - RNA, 19 nt, Artificial Sequence
  Description of Artificial Sequence: Synthetic oligonucleotide
  Antisense Strand to SEQ ID NO: 437881
aacccucuagccuaacuac

SEQ ID NO: 437883 - RNA, 19 nt, Artificial Sequence
  Description of Artificial Sequence: Synthetic oligonucleotide
  Sense strand starting at position 2994 of SEQ ID NO: 316754
acccauagcucuguaagac

SEQ ID NO: 437884 - RNA, 19 nt, Artificial Sequence
  Description of Artificial Sequence: Synthetic oligonucleotide
  Antisense Strand to SEQ ID NO: 437883
gucuuacagagcuaugggu

SEQ ID NO: 437885 - RNA, 19 nt, Artificial Sequence
  Description of Artificial Sequence: Synthetic oligonucleotide
  Sense strand starting at position 2995 of SEQ ID NO: 316754
cccauagcucuguaagaca

SEQ ID NO: 437886 - RNA, 19 nt, Artificial Sequence
  Description of Artificial Sequence: Synthetic oligonucleotide
  Antisense Strand to SEQ ID NO: 437885
ugucuuacagagcuauggg

SEQ ID NO: 437887 - RNA, 19 nt, Artificial Sequence
  Description of Artificial Sequence: Synthetic oligonucleotide
  Sense strand starting at position 3101 of SEQ ID NO: 316754
aguuguuacauagguaaau

SEQ ID NO: 437888 - RNA, 19 nt, Artificial Sequence
  Description of Artificial Sequence: Synthetic oligonucleotide
  Antisense Strand to SEQ ID NO: 437887
auuuaccuauguaacaacu

SEQ ID NO: 437889 - RNA, 19 nt, Artificial Sequence
  Description of Artificial Sequence: Synthetic oligonucleotide
  Sense strand starting at position 3820 of SEQ ID NO: 316754
auguuuguuggcuauauaa

SEQ ID NO: 437890 - RNA, 19 nt, Artificial Sequence
  Description of Artificial Sequence: Synthetic oligonucleotide
  Antisense Strand to SEQ ID NO: 437889
uuauauagccaacaaacau

SEQ ID NO: 437891 - RNA, 19 nt, Artificial Sequence
  Description of Artificial Sequence: Synthetic oligonucleotide
  Sense strand starting at position 3822 of SEQ ID NO: 316754
guuuguuggcuauauaaau

SEQ ID NO: 437892 - RNA, 19 nt, Artificial Sequence
  Description of Artificial Sequence: Synthetic oligonucleotide
  Antisense Strand to SEQ ID NO: 437891
auuuauauagccaacaaac

SEQ ID NO: 437893 - RNA, 19 nt, Artificial Sequence
  Description of Artificial Sequence: Synthetic oligonucleotide
  Sense strand starting at position 134 of SEQ ID NO: 316755
guauacuuacggcaaucua

SEQ ID NO: 437894 - RNA, 19 nt, Artificial Sequence
  Description of Artificial Sequence: Synthetic oligonucleotide
  Antisense Strand to SEQ ID NO: 437893
uagauugccguaaguauac

SEQ ID NO: 437895 - RNA, 19 nt, Artificial Sequence
  Description of Artificial Sequence: Synthetic oligonucleotide
  Sense strand starting at position 158 of SEQ ID NO: 316755
uacucagaucgugaacugu

SEQ ID NO: 437896 - RNA, 19 nt, Artificial Sequence
  Description of Artificial Sequence: Synthetic oligonucleotide
  Antisense Strand to SEQ ID NO: 437895
acaguucacgaucugagua

SEQ ID NO: 437897 - RNA, 19 nt, Artificial Sequence
  Description of Artificial Sequence: Synthetic oligonucleotide
  Sense strand starting at position 324 of SEQ ID NO: 316755
uguagcuauauguggagaa

SEQ ID NO: 437898 - RNA, 19 nt, Artificial Sequence
  Description of Artificial Sequence: Synthetic oligonucleotide
  Antisense Strand to SEQ ID NO: 437897
uucuccacauauagcuaca

SEQ ID NO: 437899 - RNA, 19 nt, Artificial Sequence
  Description of Artificial Sequence: Synthetic oligonucleotide
  Sense strand starting at position 382 of SEQ ID NO: 316755
accaaugaacaucgacuua

SEQ ID NO: 437900 - RNA, 19 nt, Artificial Sequence
  Description of Artificial Sequence: Synthetic oligonucleotide
  Antisense Strand to SEQ ID NO: 437899
uaagucgauguucauuggu

SEQ ID NO: 437901 - RNA, 19 nt, Artificial Sequence
  Description of Artificial Sequence: Synthetic oligonucleotide
  Sense strand starting at position 456 of SEQ ID NO: 316755
agcagugucccagacacua

SEQ ID NO: 437902 - RNA, 19 nt, Artificial Sequence
  Description of Artificial Sequence: Synthetic oligonucleotide
  Antisense Strand to SEQ ID NO: 437901
uagugucugggacacugcu

SEQ ID NO: 437903 - RNA, 19 nt, Artificial Sequence
  Description of Artificial Sequence: Synthetic oligonucleotide
  Sense strand starting at position 598 of SEQ ID NO: 316755
ccauuaagagaguauguuu

SEQ ID NO: 437904 - RNA, 19 nt, Artificial Sequence
  Description of Artificial Sequence: Synthetic oligonucleotide
  Antisense Strand to SEQ ID NO: 437903
aaacauacucucuuaaugg

SEQ ID NO: 437905 - RNA, 19 nt, Artificial Sequence
  Description of Artificial Sequence: Synthetic oligonucleotide
  Sense strand starting at position 628 of SEQ ID NO: 316755
aggcuuuagguuuaucaua

SEQ ID NO: 437906 - RNA, 19 nt, Artificial Sequence
  Description of Artificial Sequence: Synthetic oligonucleotide
  Antisense Strand to SEQ ID NO: 437905
uaugauaaaccuaaagccu

SEQ ID NO: 437907 - RNA, 19 nt, Artificial Sequence
  Description of Artificial Sequence: Synthetic oligonucleotide
  Sense strand starting at position 698 of SEQ ID NO: 316755
uguaauugauguccucaau

SEQ ID NO: 437908 - RNA, 19 nt, Artificial Sequence
  Description of Artificial Sequence: Synthetic oligonucleotide
  Antisense Strand to SEQ ID NO: 437907
auugaggacaucaauuaca

SEQ ID NO: 437909 - RNA, 19 nt, Artificial Sequence
  Description of Artificial Sequence: Synthetic oligonucleotide
  Sense strand starting at position 879 of SEQ ID NO: 316755
agugacacuguccacaaau

SEQ ID NO: 437910 - RNA, 19 nt, Artificial Sequence
  Description of Artificial Sequence: Synthetic oligonucleotide
  Antisense Strand to SEQ ID NO: 437909
auuuguggacagugucacu

SEQ ID NO: 437911 - RNA, 19 nt, Artificial Sequence
  Description of Artificial Sequence: Synthetic oligonucleotide
  Sense strand starting at position 971 of SEQ ID NO: 316755
ccuucuacucuugaacgga

SEQ ID NO: 437912 - RNA, 19 nt, Artificial Sequence
  Description of Artificial Sequence: Synthetic oligonucleotide
  Antisense Strand to SEQ ID NO: 437911
uccguucaagaguagaagg

SEQ ID NO: 437913 - RNA, 19 nt, Artificial Sequence
  Description of Artificial Sequence: Synthetic oligonucleotide
  Sense strand starting at position 980 of SEQ ID NO: 316755
cuugaacggaaagguaaua

SEQ ID NO: 437914 - RNA, 19 nt, Artificial Sequence
  Description of Artificial Sequence: Synthetic oligonucleotide
  Antisense Strand to SEQ ID NO: 437913
uauuaccuuuccguucaag

SEQ ID NO: 437915 - RNA, 19 nt, Artificial Sequence
  Description of Artificial Sequence: Synthetic oligonucleotide
  Sense strand starting at position 1033 of SEQ ID NO: 316755
guuauuucuggaugguucu

SEQ ID NO: 437916 - RNA, 19 nt, Artificial Sequence
  Description of Artificial Sequence: Synthetic oligonucleotide
  Antisense Strand to SEQ ID NO: 437915
agaaccauccagaaauaac

SEQ ID NO: 437917 - RNA, 19 nt, Artificial Sequence
  Description of Artificial Sequence: Synthetic oligonucleotide
  Sense strand starting at position 1565 of SEQ ID NO: 316755
aggugaaaugcauaugguu

SEQ ID NO: 437918 - RNA, 19 nt, Artificial Sequence
  Description of Artificial Sequence: Synthetic oligonucleotide
  Antisense Strand to SEQ ID NO: 437917
aaccauaugcauuucaccu

SEQ ID NO: 437919 - RNA, 19 nt, Artificial Sequence
  Description of Artificial Sequence: Synthetic oligonucleotide
  Sense strand starting at position 1619 of SEQ ID NO: 316755
auuccagcgcuguugugau

SEQ ID NO: 437920 - RNA, 19 nt, Artificial Sequence
  Description of Artificial Sequence: Synthetic oligonucleotide
  Antisense Strand to SEQ ID NO: 437919
aucacaacagcgcuggaau

SEQ ID NO: 437921 - RNA, 19 nt, Artificial Sequence
  Description of Artificial Sequence: Synthetic oligonucleotide
  Sense strand starting at position 1868 of SEQ ID NO: 316755
agagcaauuagcuggguga

SEQ ID NO: 437922 - RNA, 19 nt, Artificial Sequence
  Description of Artificial Sequence: Synthetic oligonucleotide
  Antisense Strand to SEQ ID NO: 437921
ucacccagcuaauugcucu

SEQ ID NO: 437923 - RNA, 19 nt, Artificial Sequence
  Description of Artificial Sequence: Synthetic oligonucleotide
  Sense strand starting at position 1870 of SEQ ID NO: 316755
agcaauuagcugggugaga

SEQ ID NO: 437924 - RNA, 19 nt, Artificial Sequence
  Description of Artificial Sequence: Synthetic oligonucleotide
  Antisense Strand to SEQ ID NO: 437923
ucucacccagcuaauugcu

SEQ ID NO: 437925 - RNA, 19 nt, Artificial Sequence
  Description of Artificial Sequence: Synthetic oligonucleotide
  Sense strand starting at position 2202 of SEQ ID NO: 316755
ggaggaggcgauugugaug

SEQ ID NO: 437926 - RNA, 19 nt, Artificial Sequence
  Description of Artificial Sequence: Synthetic oligonucleotide
  Antisense Strand to SEQ ID NO: 437925
caucacaaucgccuccucc

SEQ ID NO: 437927 - RNA, 19 nt, Artificial Sequence
  Description of Artificial Sequence: Synthetic oligonucleotide
  Sense strand starting at position 2411 of SEQ ID NO: 316755
aggagauaacggugacagu

SEQ ID NO: 437928 - RNA, 19 nt, Artificial Sequence
  Description of Artificial Sequence: Synthetic oligonucleotide
  Antisense Strand to SEQ ID NO: 437927
acugucaccguuaucuccu

SEQ ID NO: 437929 - RNA, 19 nt, Artificial Sequence
  Description of Artificial Sequence: Synthetic oligonucleotide
  Sense strand starting at position 2412 of SEQ ID NO: 316755
ggagauaacggugacaguu

SEQ ID NO: 437930 - RNA, 19 nt, Artificial Sequence
  Description of Artificial Sequence: Synthetic oligonucleotide
  Antisense Strand to SEQ ID NO: 437929
aacugucaccguuaucucc

SEQ ID NO: 437931 - RNA, 19 nt, Artificial Sequence
  Description of Artificial Sequence: Synthetic oligonucleotide
  Sense strand starting at position 2426 of SEQ ID NO: 316755
caguuuaggaggugaugau

SEQ ID NO: 437932 - RNA, 19 nt, Artificial Sequence
  Description of Artificial Sequence: Synthetic oligonucleotide
  Antisense Strand to SEQ ID NO: 437931
aucaucaccuccuaaacug

SEQ ID NO: 437933 - RNA, 19 nt, Artificial Sequence
  Description of Artificial Sequence: Synthetic oligonucleotide
  Sense strand starting at position 2441 of SEQ ID NO: 316755
ugauuaguaggcgaggcaa

SEQ ID NO: 437934 - RNA, 19 nt, Artificial Sequence
  Description of Artificial Sequence: Synthetic oligonucleotide
  Antisense Strand to SEQ ID NO: 437933
uugccucgccuacuaauca

SEQ ID NO: 437935 - RNA, 19 nt, Artificial Sequence
  Description of Artificial Sequence: Synthetic oligonucleotide
  Sense strand starting at position 2476 of SEQ ID NO: 316755
ugaugacagaccugacguu

SEQ ID NO: 437936 - RNA, 19 nt, Artificial Sequence
  Description of Artificial Sequence: Synthetic oligonucleotide
  Antisense Strand to SEQ ID NO: 437935
aacgucaggucugucauca

SEQ ID NO: 437937 - RNA, 19 nt, Artificial Sequence
  Description of Artificial Sequence: Synthetic oligonucleotide
  Sense strand starting at position 2571 of SEQ ID NO: 316755
gcaugaguggaaugggaaa

SEQ ID NO: 437938 - RNA, 19 nt, Artificial Sequence
  Description of Artificial Sequence: Synthetic oligonucleotide
  Antisense Strand to SEQ ID NO: 437937
uuucccauuccacucaugc

SEQ ID NO: 437939 - RNA, 19 nt, Artificial Sequence
  Description of Artificial Sequence: Synthetic oligonucleotide
  Sense strand starting at position 2868 of SEQ ID NO: 316755
ucucgaaacuacuuugauu

SEQ ID NO: 437940 - RNA, 19 nt, Artificial Sequence
  Description of Artificial Sequence: Synthetic oligonucleotide
  Antisense Strand to SEQ ID NO: 437939
aaucaaaguaguuucgaga

SEQ ID NO: 437941 - RNA, 19 nt, Artificial Sequence
  Description of Artificial Sequence: Synthetic oligonucleotide
  Sense strand starting at position 2890 of SEQ ID NO: 316755
ggaauagaguguccuggau

SEQ ID NO: 437942 - RNA, 19 nt, Artificial Sequence
  Description of Artificial Sequence: Synthetic oligonucleotide
  Antisense Strand to SEQ ID NO: 437941
auccaggacacucuauucc

SEQ ID NO: 437943 - RNA, 19 nt, Artificial Sequence
  Description of Artificial Sequence: Synthetic oligonucleotide
  Sense strand starting at position 2894 of SEQ ID NO: 316755
uagaguguccuggauagac

SEQ ID NO: 437944 - RNA, 19 nt, Artificial Sequence
  Description of Artificial Sequence: Synthetic oligonucleotide
  Antisense Strand to SEQ ID NO: 437943
gucuauccaggacacucua

SEQ ID NO: 437945 - RNA, 19 nt, Artificial Sequence
  Description of Artificial Sequence: Synthetic oligonucleotide
  Sense strand starting at position 2969 of SEQ ID NO: 316755
auugauuccuucuuguaca

SEQ ID NO: 437946 - RNA, 19 nt, Artificial Sequence
  Description of Artificial Sequence: Synthetic oligonucleotide
  Antisense Strand to SEQ ID NO: 437945
uguacaagaaggaaucaau

SEQ ID NO: 437947 - RNA, 19 nt, Artificial Sequence
  Description of Artificial Sequence: Synthetic oligonucleotide
  Sense strand starting at position 3043 of SEQ ID NO: 316755
aucucccagugguuaauua

SEQ ID NO: 437948 - RNA, 19 nt, Artificial Sequence
  Description of Artificial Sequence: Synthetic oligonucleotide
  Antisense Strand to SEQ ID NO: 437947
uaauuaaccacugggagau

SEQ ID NO: 437949 - RNA, 19 nt, Artificial Sequence
  Description of Artificial Sequence: Synthetic oligonucleotide
  Sense strand starting at position 3053 of SEQ ID NO: 316755
gguuaauuaccuuggucag

SEQ ID NO: 437950 - RNA, 19 nt, Artificial Sequence
  Description of Artificial Sequence: Synthetic oligonucleotide
  Antisense Strand to SEQ ID NO: 437949
cugaccaagguaauuaacc

SEQ ID NO: 437951 - RNA, 19 nt, Artificial Sequence
  Description of Artificial Sequence: Synthetic oligonucleotide
  Sense strand starting at position 3054 of SEQ ID NO: 316755
guuaauuaccuuggucaga

SEQ ID NO: 437952 - RNA, 19 nt, Artificial Sequence
  Description of Artificial Sequence: Synthetic oligonucleotide
  Antisense Strand to SEQ ID NO: 437951
ucugaccaagguaauuaac

SEQ ID NO: 437953 - RNA, 19 nt, Artificial Sequence
  Description of Artificial Sequence: Synthetic oligonucleotide
  Sense strand starting at position 3055 of SEQ ID NO: 316755
uuaauuaccuuggucagac

SEQ ID NO: 437954 - RNA, 19 nt, Artificial Sequence
  Description of Artificial Sequence: Synthetic oligonucleotide
  Antisense Strand to SEQ ID NO: 437953
gucugaccaagguaauuaa

SEQ ID NO: 437955 - RNA, 19 nt, Artificial Sequence
  Description of Artificial Sequence: Synthetic oligonucleotide
  Sense strand starting at position 3114 of SEQ ID NO: 316755
agaccugaggccuaguuau

SEQ ID NO: 437956 - RNA, 19 nt, Artificial Sequence
  Description of Artificial Sequence: Synthetic oligonucleotide
  Antisense Strand to SEQ ID NO: 437955
auaacuaggccucaggucu

SEQ ID NO: 437957 - RNA, 19 nt, Artificial Sequence
  Description of Artificial Sequence: Synthetic oligonucleotide
  Sense strand starting at position 3167 of SEQ ID NO: 316755
ugacucuuaguguagcaau

SEQ ID NO: 437958 - RNA, 19 nt, Artificial Sequence
  Description of Artificial Sequence: Synthetic oligonucleotide
  Antisense Strand to SEQ ID NO: 437957
auugcuacacuaagaguca

SEQ ID NO: 437959 - RNA, 19 nt, Artificial Sequence
  Description of Artificial Sequence: Synthetic oligonucleotide
  Sense strand starting at position 3236 of SEQ ID NO: 316755
guaccucuauaggcuauaa

SEQ ID NO: 437960 - RNA, 19 nt, Artificial Sequence
  Description of Artificial Sequence: Synthetic oligonucleotide
  Antisense Strand to SEQ ID NO: 437959
uuauagccuauagagguac

SEQ ID NO: 437961 - RNA, 19 nt, Artificial Sequence
  Description of Artificial Sequence: Synthetic oligonucleotide
  Sense strand starting at position 3302 of SEQ ID NO: 316755
gggccugaagcuuaagaac

SEQ ID NO: 437962 - RNA, 19 nt, Artificial Sequence
  Description of Artificial Sequence: Synthetic oligonucleotide
  Antisense Strand to SEQ ID NO: 437961
guucuuaagcuucaggccc

SEQ ID NO: 437963 - RNA, 19 nt, Artificial Sequence
  Description of Artificial Sequence: Synthetic oligonucleotide
  Sense strand starting at position 3395 of SEQ ID NO: 316755
gcaagaggccuagaagcuu

SEQ ID NO: 437964 - RNA, 19 nt, Artificial Sequence
  Description of Artificial Sequence: Synthetic oligonucleotide
  Antisense Strand to SEQ ID NO: 437963
aagcuucuaggccucuugc

SEQ ID NO: 437965 - RNA, 19 nt, Artificial Sequence
  Description of Artificial Sequence: Synthetic oligonucleotide
  Sense strand starting at position 3423 of SEQ ID NO: 316755
auuuauaucucacagggaa

SEQ ID NO: 437966 - RNA, 19 nt, Artificial Sequence
  Description of Artificial Sequence: Synthetic oligonucleotide
  Antisense Strand to SEQ ID NO: 437965
uucccugugagauauaaau

SEQ ID NO: 437967 - RNA, 19 nt, Artificial Sequence
  Description of Artificial Sequence: Synthetic oligonucleotide
  Sense strand starting at position 3741 of SEQ ID NO: 316755
uugaaagccaguuguagag

SEQ ID NO: 437968 - RNA, 19 nt, Artificial Sequence
  Description of Artificial Sequence: Synthetic oligonucleotide
  Antisense Strand to SEQ ID NO: 437967
cucuacaacuggcuuucaa

SEQ ID NO: 437969 - RNA, 19 nt, Artificial Sequence
  Description of Artificial Sequence: Synthetic oligonucleotide
  Sense strand starting at position 3747 of SEQ ID NO: 316755
gccaguuguagaggacaga

SEQ ID NO: 437970 - RNA, 19 nt, Artificial Sequence
  Description of Artificial Sequence: Synthetic oligonucleotide
  Antisense Strand to SEQ ID NO: 437969
ucuguccucuacaacuggc

SEQ ID NO: 437971 - RNA, 19 nt, Artificial Sequence
  Description of Artificial Sequence: Synthetic oligonucleotide
  Sense strand starting at position 3806 of SEQ ID NO: 316755
guuaauagagaagguauua

SEQ ID NO: 437972 - RNA, 19 nt, Artificial Sequence
  Description of Artificial Sequence: Synthetic oligonucleotide
  Antisense Strand to SEQ ID NO: 437971
uaauaccuucucuauuaac

SEQ ID NO: 437973 - RNA, 19 nt, Artificial Sequence
  Description of Artificial Sequence: Synthetic oligonucleotide
  Sense strand starting at position 579 of SEQ ID NO: 316756
cuaagaauaccucguacaa

SEQ ID NO: 437974 - RNA, 19 nt, Artificial Sequence
  Description of Artificial Sequence: Synthetic oligonucleotide
  Antisense Strand to SEQ ID NO: 437973
uuguacgagguauucuuag

SEQ ID NO: 437975 - RNA, 19 nt, Artificial Sequence
  Description of Artificial Sequence: Synthetic oligonucleotide
  Sense strand starting at position 818 of SEQ ID NO: 316756
acagauauauacuuuaggu

SEQ ID NO: 437976 - RNA, 19 nt, Artificial Sequence
  Description of Artificial Sequence: Synthetic oligonucleotide
  Antisense Strand to SEQ ID NO: 437975
accuaaaguauauaucugu

SEQ ID NO: 437977 - RNA, 19 nt, Artificial Sequence
  Description of Artificial Sequence: Synthetic oligonucleotide
  Sense strand starting at position 932 of SEQ ID NO: 316756
ucuaaacuccuauguaugu

SEQ ID NO: 437978 - RNA, 19 nt, Artificial Sequence
  Description of Artificial Sequence: Synthetic oligonucleotide
  Antisense Strand to SEQ ID NO: 437977
acauacauaggaguuuaga

SEQ ID NO: 437979 - RNA, 19 nt, Artificial Sequence
  Description of Artificial Sequence: Synthetic oligonucleotide
  Sense strand starting at position 1181 of SEQ ID NO: 316756
ugcauuuccuggcugcaau

SEQ ID NO: 437980 - RNA, 19 nt, Artificial Sequence
  Description of Artificial Sequence: Synthetic oligonucleotide
  Antisense Strand to SEQ ID NO: 437979
auugcagccaggaaaugca

SEQ ID NO: 437981 - RNA, 19 nt, Artificial Sequence
  Description of Artificial Sequence: Synthetic oligonucleotide
  Sense strand starting at position 1272 of SEQ ID NO: 316756
agggcaccuccucacuaau

SEQ ID NO: 437982 - RNA, 19 nt, Artificial Sequence
  Description of Artificial Sequence: Synthetic oligonucleotide
  Antisense Strand to SEQ ID NO: 437981
auuagugaggaggugcccu

SEQ ID NO: 437983 - RNA, 19 nt, Artificial Sequence
  Description of Artificial Sequence: Synthetic oligonucleotide
  Sense strand starting at position 1311 of SEQ ID NO: 316756
ccaagagcguuguucccua

SEQ ID NO: 437984 - RNA, 19 nt, Artificial Sequence
  Description of Artificial Sequence: Synthetic oligonucleotide
  Antisense Strand to SEQ ID NO: 437983
uagggaacaacgcucuugg

SEQ ID NO: 437985 - RNA, 19 nt, Artificial Sequence
  Description of Artificial Sequence: Synthetic oligonucleotide
  Sense strand starting at position 1315 of SEQ ID NO: 316756
gagcguuguucccuaacac

SEQ ID NO: 437986 - RNA, 19 nt, Artificial Sequence
  Description of Artificial Sequence: Synthetic oligonucleotide
  Antisense Strand to SEQ ID NO: 437985
guguuagggaacaacgcuc

SEQ ID NO: 437987 - RNA, 19 nt, Artificial Sequence
  Description of Artificial Sequence: Synthetic oligonucleotide
  Sense strand starting at position 1316 of SEQ ID NO: 316756
agcguuguucccuaacaca

SEQ ID NO: 437988 - RNA, 19 nt, Artificial Sequence
  Description of Artificial Sequence: Synthetic oligonucleotide
  Antisense Strand to SEQ ID NO: 437987
uguguuagggaacaacgcu

SEQ ID NO: 437989 - RNA, 19 nt, Artificial Sequence
  Description of Artificial Sequence: Synthetic oligonucleotide
  Sense strand starting at position 1374 of SEQ ID NO: 316756
acagacguccgggaaucau

SEQ ID NO: 437990 - RNA, 19 nt, Artificial Sequence
  Description of Artificial Sequence: Synthetic oligonucleotide
  Antisense Strand to SEQ ID NO: 437989
augauucccggacgucugu

SEQ ID NO: 437991 - RNA, 19 nt, Artificial Sequence
  Description of Artificial Sequence: Synthetic oligonucleotide
  Sense strand starting at position 2251 of SEQ ID NO: 316756
uucuguccucgcuuuguga

SEQ ID NO: 437992 - RNA, 19 nt, Artificial Sequence
  Description of Artificial Sequence: Synthetic oligonucleotide
  Antisense Strand to SEQ ID NO: 437991
ucacaaagcgaggacagaa

SEQ ID NO: 437993 - RNA, 19 nt, Artificial Sequence
  Description of Artificial Sequence: Synthetic oligonucleotide
  Sense strand starting at position 2532 of SEQ ID NO: 316756
uucagugugcccgagcgaa

SEQ ID NO: 437994 - RNA, 19 nt, Artificial Sequence
  Description of Artificial Sequence: Synthetic oligonucleotide
  Antisense Strand to SEQ ID NO: 437993
uucgcucgggcacacugaa

SEQ ID NO: 437995 - RNA, 19 nt, Artificial Sequence
  Description of Artificial Sequence: Synthetic oligonucleotide
  Sense strand starting at position 2707 of SEQ ID NO: 316756
gggcuuguucccgcaguuu

SEQ ID NO: 437996 - RNA, 19 nt, Artificial Sequence
  Description of Artificial Sequence: Synthetic oligonucleotide
  Antisense Strand to SEQ ID NO: 437995
aaacugcgggaacaagccc

SEQ ID NO: 437997 - RNA, 19 nt, Artificial Sequence
  Description of Artificial Sequence: Synthetic oligonucleotide
  Sense strand starting at position 2710 of SEQ ID NO: 316756
cuuguucccgcaguuuauu

SEQ ID NO: 437998 - RNA, 19 nt, Artificial Sequence
  Description of Artificial Sequence: Synthetic oligonucleotide
  Antisense Strand to SEQ ID NO: 437997
aauaaacugcgggaacaag

SEQ ID NO: 437999 - RNA, 19 nt, Artificial Sequence
  Description of Artificial Sequence: Synthetic oligonucleotide
  Sense strand starting at position 2719 of SEQ ID NO: 316756
gcaguuuauuaggucucua

SEQ ID NO: 438000 - RNA, 19 nt, Artificial Sequence
  Description of Artificial Sequence: Synthetic oligonucleotide
  Antisense Strand to SEQ ID NO: 437999
uagagaccuaauaaacugc

SEQ ID NO: 438001 - RNA, 19 nt, Artificial Sequence
  Description of Artificial Sequence: Synthetic oligonucleotide
  Sense strand starting at position 2723 of SEQ ID NO: 316756
uuuauuaggucucuaguua

SEQ ID NO: 438002 - RNA, 19 nt, Artificial Sequence
  Description of Artificial Sequence: Synthetic oligonucleotide
  Antisense Strand to SEQ ID NO: 438001
uaacuagagaccuaauaaa

SEQ ID NO: 438003 - RNA, 19 nt, Artificial Sequence
  Description of Artificial Sequence: Synthetic oligonucleotide
  Sense strand starting at position 2724 of SEQ ID NO: 316756
uuauuaggucucuaguuaa

SEQ ID NO: 438004 - RNA, 19 nt, Artificial Sequence
  Description of Artificial Sequence: Synthetic oligonucleotide
  Antisense Strand to SEQ ID NO: 438003
uuaacuagagaccuaauaa

SEQ ID NO: 438005 - RNA, 19 nt, Artificial Sequence
  Description of Artificial Sequence: Synthetic oligonucleotide
  Sense strand starting at position 2735 of SEQ ID NO: 316756
cuaguuaauccaggcauug

SEQ ID NO: 438006 - RNA, 19 nt, Artificial Sequence
  Description of Artificial Sequence: Synthetic oligonucleotide
  Antisense Strand to SEQ ID NO: 438005
caaugccuggauuaacuag

SEQ ID NO: 438007 - RNA, 19 nt, Artificial Sequence
  Description of Artificial Sequence: Synthetic oligonucleotide
  Sense strand starting at position 2759 of SEQ ID NO: 316756
cuguucuggucaguaggaa

SEQ ID NO: 438008 - RNA, 19 nt, Artificial Sequence
  Description of Artificial Sequence: Synthetic oligonucleotide
  Antisense Strand to SEQ ID NO: 438007
uuccuacugaccagaacag

SEQ ID NO: 438009 - RNA, 19 nt, Artificial Sequence
  Description of Artificial Sequence: Synthetic oligonucleotide
  Sense strand starting at position 2760 of SEQ ID NO: 316756
uguucuggucaguaggaaa

SEQ ID NO: 438010 - RNA, 19 nt, Artificial Sequence
  Description of Artificial Sequence: Synthetic oligonucleotide
  Antisense Strand to SEQ ID NO: 438009
uuuccuacugaccagaaca

SEQ ID NO: 438011 - RNA, 19 nt, Artificial Sequence
  Description of Artificial Sequence: Synthetic oligonucleotide
  Sense strand starting at position 2792 of SEQ ID NO: 316756
aacgcucugucucuagaau

SEQ ID NO: 438012 - RNA, 19 nt, Artificial Sequence
  Description of Artificial Sequence: Synthetic oligonucleotide
  Antisense Strand to SEQ ID NO: 438011
auucuagagacagagcguu

SEQ ID NO: 438013 - RNA, 19 nt, Artificial Sequence
  Description of Artificial Sequence: Synthetic oligonucleotide
  Sense strand starting at position 2793 of SEQ ID NO: 316756
acgcucugucucuagaauu

SEQ ID NO: 438014 - RNA, 19 nt, Artificial Sequence
  Description of Artificial Sequence: Synthetic oligonucleotide
  Antisense Strand to SEQ ID NO: 438013
aauucuagagacagagcgu

SEQ ID NO: 438015 - RNA, 19 nt, Artificial Sequence
  Description of Artificial Sequence: Synthetic oligonucleotide
  Sense strand starting at position 2957 of SEQ ID NO: 316756
acaguuacguacucuaacu

SEQ ID NO: 438016 - RNA, 19 nt, Artificial Sequence
  Description of Artificial Sequence: Synthetic oligonucleotide
  Antisense Strand to SEQ ID NO: 438015
aguuagaguacguaacugu

SEQ ID NO: 438017 - RNA, 19 nt, Artificial Sequence
  Description of Artificial Sequence: Synthetic oligonucleotide
  Sense strand starting at position 3010 of SEQ ID NO: 316756
guauacaugcacuguaaga

SEQ ID NO: 438018 - RNA, 19 nt, Artificial Sequence
  Description of Artificial Sequence: Synthetic oligonucleotide
  Antisense Strand to SEQ ID NO: 438017
ucuuacagugcauguauac

SEQ ID NO: 438019 - RNA, 19 nt, Artificial Sequence
  Description of Artificial Sequence: Synthetic oligonucleotide
  Sense strand starting at position 3012 of SEQ ID NO: 316756
auacaugcacuguaagaua

SEQ ID NO: 438020 - RNA, 19 nt, Artificial Sequence
  Description of Artificial Sequence: Synthetic oligonucleotide
  Antisense Strand to SEQ ID NO: 438019
uaucuuacagugcauguau

SEQ ID NO: 438021 - RNA, 19 nt, Artificial Sequence
  Description of Artificial Sequence: Synthetic oligonucleotide
  Sense strand starting at position 3072 of SEQ ID NO: 316756
aaauguagacuuugaugua

SEQ ID NO: 438022 - RNA, 19 nt, Artificial Sequence
  Description of Artificial Sequence: Synthetic oligonucleotide
  Antisense Strand to SEQ ID NO: 438021
uacaucaaagucuacauuu

SEQ ID NO: 438023 - RNA, 19 nt, Artificial Sequence
  Description of Artificial Sequence: Synthetic oligonucleotide
  Sense strand starting at position 3073 of SEQ ID NO: 316756
aauguagacuuugauguaa

SEQ ID NO: 438024 - RNA, 19 nt, Artificial Sequence
  Description of Artificial Sequence: Synthetic oligonucleotide
  Antisense Strand to SEQ ID NO: 438023
uuacaucaaagucuacauu

SEQ ID NO: 438025 - RNA, 19 nt, Artificial Sequence
  Description of Artificial Sequence: Synthetic oligonucleotide
  Sense strand starting at position 3094 of SEQ ID NO: 316756
augcaugaaucagaauaag

SEQ ID NO: 438026 - RNA, 19 nt, Artificial Sequence
  Description of Artificial Sequence: Synthetic oligonucleotide
  Antisense Strand to SEQ ID NO: 438025
cuuauucugauucaugcau

SEQ ID NO: 438027 - RNA, 19 nt, Artificial Sequence
  Description of Artificial Sequence: Synthetic oligonucleotide
  Sense strand starting at position 3124 of SEQ ID NO: 316756
aggucacuuuagguaagau

SEQ ID NO: 438028 - RNA, 19 nt, Artificial Sequence
  Description of Artificial Sequence: Synthetic oligonucleotide
  Antisense Strand to SEQ ID NO: 438027
aucuuaccuaaagugaccu

SEQ ID NO: 438029 - RNA, 19 nt, Artificial Sequence
  Description of Artificial Sequence: Synthetic oligonucleotide
  Sense strand starting at position 3125 of SEQ ID NO: 316756
ggucacuuuagguaagauc

SEQ ID NO: 438030 - RNA, 19 nt, Artificial Sequence
  Description of Artificial Sequence: Synthetic oligonucleotide
  Antisense Strand to SEQ ID NO: 438029
gaucuuaccuaaagugacc

SEQ ID NO: 438031 - RNA, 19 nt, Artificial Sequence
  Description of Artificial Sequence: Synthetic oligonucleotide
  Sense strand starting at position 3128 of SEQ ID NO: 316756
cacuuuagguaagaucaga

SEQ ID NO: 438032 - RNA, 19 nt, Artificial Sequence
  Description of Artificial Sequence: Synthetic oligonucleotide
  Antisense Strand to SEQ ID NO: 438031
ucugaucuuaccuaaagug

SEQ ID NO: 438033 - RNA, 19 nt, Artificial Sequence
  Description of Artificial Sequence: Synthetic oligonucleotide
  Sense strand starting at position 3144 of SEQ ID NO: 316756
agauaagguuaacugugua

SEQ ID NO: 438034 - RNA, 19 nt, Artificial Sequence
  Description of Artificial Sequence: Synthetic oligonucleotide
  Antisense Strand to SEQ ID NO: 438033
uacacaguuaaccuuaucu

SEQ ID NO: 438035 - RNA, 19 nt, Artificial Sequence
  Description of Artificial Sequence: Synthetic oligonucleotide
  Sense strand starting at position 3147 of SEQ ID NO: 316756
uaagguuaacuguguaauu

SEQ ID NO: 438036 - RNA, 19 nt, Artificial Sequence
  Description of Artificial Sequence: Synthetic oligonucleotide
  Antisense Strand to SEQ ID NO: 438035
aauuacacaguuaaccuua

SEQ ID NO: 438037 - RNA, 19 nt, Artificial Sequence
  Description of Artificial Sequence: Synthetic oligonucleotide
  Sense strand starting at position 3162 of SEQ ID NO: 316756
aauuuaugugcaugcugga

SEQ ID NO: 438038 - RNA, 19 nt, Artificial Sequence
  Description of Artificial Sequence: Synthetic oligonucleotide
  Antisense Strand to SEQ ID NO: 438037
uccagcaugcacauaaauu

SEQ ID NO: 438039 - RNA, 19 nt, Artificial Sequence
  Description of Artificial Sequence: Synthetic oligonucleotide
  Sense strand starting at position 3382 of SEQ ID NO: 316756
uggagaaauuacgauuucu

SEQ ID NO: 438040 - RNA, 19 nt, Artificial Sequence
  Description of Artificial Sequence: Synthetic oligonucleotide
  Antisense Strand to SEQ ID NO: 438039
agaaaucguaauuucucca

SEQ ID NO: 438041 - RNA, 19 nt, Artificial Sequence
  Description of Artificial Sequence: Synthetic oligonucleotide
  Sense strand starting at position 3405 of SEQ ID NO: 316756
ucaugaauucuuuggcaag

SEQ ID NO: 438042 - RNA, 19 nt, Artificial Sequence
  Description of Artificial Sequence: Synthetic oligonucleotide
  Antisense Strand to SEQ ID NO: 438041
cuugccaaagaauucauga

SEQ ID NO: 438043 - RNA, 19 nt, Artificial Sequence
  Description of Artificial Sequence: Synthetic oligonucleotide
  Sense strand starting at position 3452 of SEQ ID NO: 316756
aucgcauaccuagauuaua

SEQ ID NO: 438044 - RNA, 19 nt, Artificial Sequence
  Description of Artificial Sequence: Synthetic oligonucleotide
  Antisense Strand to SEQ ID NO: 438043
uauaaucuagguaugcgau

SEQ ID NO: 438045 - RNA, 19 nt, Artificial Sequence
  Description of Artificial Sequence: Synthetic oligonucleotide
  Sense strand starting at position 3827 of SEQ ID NO: 316756
guagucuucuucccacuca

SEQ ID NO: 438046 - RNA, 19 nt, Artificial Sequence
  Description of Artificial Sequence: Synthetic oligonucleotide
  Antisense Strand to SEQ ID NO: 438045
ugagugggaagaagacuac

SEQ ID NO: 438047 - RNA, 19 nt, Artificial Sequence
  Description of Artificial Sequence: Synthetic oligonucleotide
  Sense strand starting at position 3916 of SEQ ID NO: 316756
agcgauagagucugaaaga

SEQ ID NO: 438048 - RNA, 19 nt, Artificial Sequence
  Description of Artificial Sequence: Synthetic oligonucleotide
  Antisense Strand to SEQ ID NO: 438047
ucuuucagacucuaucgcu

SEQ ID NO: 438049 - RNA, 19 nt, Artificial Sequence
  Description of Artificial Sequence: Synthetic oligonucleotide
  Sense strand starting at position 3923 of SEQ ID NO: 316756
gagucugaaagauggagua

SEQ ID NO: 438050 - RNA, 19 nt, Artificial Sequence
  Description of Artificial Sequence: Synthetic oligonucleotide
  Antisense Strand to SEQ ID NO: 438049
uacuccaucuuucagacuc

SEQ ID NO: 438051 - RNA, 19 nt, Artificial Sequence
  Description of Artificial Sequence: Synthetic oligonucleotide
  Sense strand starting at position 3951 of SEQ ID NO: 316756
aaaccaggugcuuggaaua

SEQ ID NO: 438052 - RNA, 19 nt, Artificial Sequence
  Description of Artificial Sequence: Synthetic oligonucleotide
  Antisense Strand to SEQ ID NO: 438051
uauuccaagcaccugguuu

SEQ ID NO: 438053 - RNA, 19 nt, Artificial Sequence
  Description of Artificial Sequence: Synthetic oligonucleotide
  Sense strand starting at position 62 of SEQ ID NO: 316757
guagcuggaaauuguuaua

SEQ ID NO: 438054 - RNA, 19 nt, Artificial Sequence
  Description of Artificial Sequence: Synthetic oligonucleotide
  Antisense Strand to SEQ ID NO: 438053
uauaacaauuuccagcuac

SEQ ID NO: 438055 - RNA, 19 nt, Artificial Sequence
  Description of Artificial Sequence: Synthetic oligonucleotide
  Sense strand starting at position 83 of SEQ ID NO: 316757
uuggguaauuccuugacac

SEQ ID NO: 438056 - RNA, 19 nt, Artificial Sequence
  Description of Artificial Sequence: Synthetic oligonucleotide
  Antisense Strand to SEQ ID NO: 438055
gugucaaggaauuacccaa

SEQ ID NO: 438057 - RNA, 19 nt, Artificial Sequence
  Description of Artificial Sequence: Synthetic oligonucleotide
  Sense strand starting at position 84 of SEQ ID NO: 316757
uggguaauuccuugacacu

SEQ ID NO: 438058 - RNA, 19 nt, Artificial Sequence
  Description of Artificial Sequence: Synthetic oligonucleotide
  Antisense Strand to SEQ ID NO: 438057
agugucaaggaauuaccca

SEQ ID NO: 438059 - RNA, 19 nt, Artificial Sequence
  Description of Artificial Sequence: Synthetic oligonucleotide
  Sense strand starting at position 85 of SEQ ID NO: 316757
ggguaauuccuugacacuu

SEQ ID NO: 438060 - RNA, 19 nt, Artificial Sequence
  Description of Artificial Sequence: Synthetic oligonucleotide
  Antisense Strand to SEQ ID NO: 438059
aagugucaaggaauuaccc

SEQ ID NO: 438061 - RNA, 19 nt, Artificial Sequence
  Description of Artificial Sequence: Synthetic oligonucleotide
  Sense strand starting at position 200 of SEQ ID NO: 316757
aagaaucacguuuacguuu

SEQ ID NO: 438062 - RNA, 19 nt, Artificial Sequence
  Description of Artificial Sequence: Synthetic oligonucleotide
  Antisense Strand to SEQ ID NO: 438061
aaacguaaacgugauucuu

SEQ ID NO: 438063 - RNA, 19 nt, Artificial Sequence
  Description of Artificial Sequence: Synthetic oligonucleotide
  Sense strand starting at position 212 of SEQ ID NO: 316757
uacguuuauuucgugauau

SEQ ID NO: 438064 - RNA, 19 nt, Artificial Sequence
  Description of Artificial Sequence: Synthetic oligonucleotide
  Antisense Strand to SEQ ID NO: 438063
auaucacgaaauaaacgua

SEQ ID NO: 438065 - RNA, 19 nt, Artificial Sequence
  Description of Artificial Sequence: Synthetic oligonucleotide
  Sense strand starting at position 214 of SEQ ID NO: 316757
cguuuauuucgugauauca

SEQ ID NO: 438066 - RNA, 19 nt, Artificial Sequence
  Description of Artificial Sequence: Synthetic oligonucleotide
  Antisense Strand to SEQ ID NO: 438065
ugauaucacgaaauaaacg

SEQ ID NO: 438067 - RNA, 19 nt, Artificial Sequence
  Description of Artificial Sequence: Synthetic oligonucleotide
  Sense strand starting at position 233 of SEQ ID NO: 316757
ugugauauguuccuauuag

SEQ ID NO: 438068 - RNA, 19 nt, Artificial Sequence
  Description of Artificial Sequence: Synthetic oligonucleotide
  Antisense Strand to SEQ ID NO: 438067
cuaauaggaacauaucaca

SEQ ID NO: 438069 - RNA, 19 nt, Artificial Sequence
  Description of Artificial Sequence: Synthetic oligonucleotide
  Sense strand starting at position 252 of SEQ ID NO: 316757
ggcuuuguaauuuggguua

SEQ ID NO: 438070 - RNA, 19 nt, Artificial Sequence
  Description of Artificial Sequence: Synthetic oligonucleotide
  Antisense Strand to SEQ ID NO: 438069
uaacccaaauuacaaagcc

SEQ ID NO: 438071 - RNA, 19 nt, Artificial Sequence
  Description of Artificial Sequence: Synthetic oligonucleotide
  Sense strand starting at position 399 of SEQ ID NO: 316757
gaacuugaccuugggcaau

SEQ ID NO: 438072 - RNA, 19 nt, Artificial Sequence
  Description of Artificial Sequence: Synthetic oligonucleotide
  Antisense Strand to SEQ ID NO: 438071
auugcccaaggucaaguuc

SEQ ID NO: 438073 - RNA, 19 nt, Artificial Sequence
  Description of Artificial Sequence: Synthetic oligonucleotide
  Sense strand starting at position 455 of SEQ ID NO: 316757
uccaaaguaugcuucuaga

SEQ ID NO: 438074 - RNA, 19 nt, Artificial Sequence
  Description of Artificial Sequence: Synthetic oligonucleotide
  Antisense Strand to SEQ ID NO: 438073
ucuagaagcauacuuugga

SEQ ID NO: 438075 - RNA, 19 nt, Artificial Sequence
  Description of Artificial Sequence: Synthetic oligonucleotide
  Sense strand starting at position 819 of SEQ ID NO: 316757
gcuggaagauuacuauuau

SEQ ID NO: 438076 - RNA, 19 nt, Artificial Sequence
  Description of Artificial Sequence: Synthetic oligonucleotide
  Antisense Strand to SEQ ID NO: 438075
auaauaguaaucuuccagc

SEQ ID NO: 438077 - RNA, 19 nt, Artificial Sequence
  Description of Artificial Sequence: Synthetic oligonucleotide
  Sense strand starting at position 979 of SEQ ID NO: 316757
gucucuaguccuuacuaac

SEQ ID NO: 438078 - RNA, 19 nt, Artificial Sequence
  Description of Artificial Sequence: Synthetic oligonucleotide
  Antisense Strand to SEQ ID NO: 438077
guuaguaaggacuagagac

SEQ ID NO: 438079 - RNA, 19 nt, Artificial Sequence
  Description of Artificial Sequence: Synthetic oligonucleotide
  Sense strand starting at position 2202 of SEQ ID NO: 316757
ggaagugagcguugagaac

SEQ ID NO: 438080 - RNA, 19 nt, Artificial Sequence
  Description of Artificial Sequence: Synthetic oligonucleotide
  Antisense Strand to SEQ ID NO: 438079
guucucaacgcucacuucc

SEQ ID NO: 438081 - RNA, 19 nt, Artificial Sequence
  Description of Artificial Sequence: Synthetic oligonucleotide
  Sense strand starting at position 2367 of SEQ ID NO: 316757
accagaaacuugucuggca

SEQ ID NO: 438082 - RNA, 19 nt, Artificial Sequence
  Description of Artificial Sequence: Synthetic oligonucleotide
  Antisense Strand to SEQ ID NO: 438081
ugccagacaaguuucuggu

SEQ ID NO: 438083 - RNA, 19 nt, Artificial Sequence
  Description of Artificial Sequence: Synthetic oligonucleotide
  Sense strand starting at position 2515 of SEQ ID NO: 316757
cccagaaacucaguacuga

SEQ ID NO: 438084 - RNA, 19 nt, Artificial Sequence
  Description of Artificial Sequence: Synthetic oligonucleotide
  Antisense Strand to SEQ ID NO: 438083
ucaguacugaguuucuggg

SEQ ID NO: 438085 - RNA, 19 nt, Artificial Sequence
  Description of Artificial Sequence: Synthetic oligonucleotide
  Sense strand starting at position 2653 of SEQ ID NO: 316757
gggcacaagaucugcauua

SEQ ID NO: 438086 - RNA, 19 nt, Artificial Sequence
  Description of Artificial Sequence: Synthetic oligonucleotide
  Antisense Strand to SEQ ID NO: 438085
uaaugcagaucuugugccc

SEQ ID NO: 438087 - RNA, 19 nt, Artificial Sequence
  Description of Artificial Sequence: Synthetic oligonucleotide
  Sense strand starting at position 2654 of SEQ ID NO: 316757
ggcacaagaucugcauuaa

SEQ ID NO: 438088 - RNA, 19 nt, Artificial Sequence
  Description of Artificial Sequence: Synthetic oligonucleotide
  Antisense Strand to SEQ ID NO: 438087
uuaaugcagaucuugugcc

SEQ ID NO: 438089 - RNA, 19 nt, Artificial Sequence
  Description of Artificial Sequence: Synthetic oligonucleotide
  Sense strand starting at position 2655 of SEQ ID NO: 316757
gcacaagaucugcauuaau

SEQ ID NO: 438090 - RNA, 19 nt, Artificial Sequence
  Description of Artificial Sequence: Synthetic oligonucleotide
  Antisense Strand to SEQ ID NO: 438089
auuaaugcagaucuugugc

SEQ ID NO: 438091 - RNA, 19 nt, Artificial Sequence
  Description of Artificial Sequence: Synthetic oligonucleotide
  Sense strand starting at position 2687 of SEQ ID NO: 316757
cuguuagaaggugauuagu

SEQ ID NO: 438092 - RNA, 19 nt, Artificial Sequence
  Description of Artificial Sequence: Synthetic oligonucleotide
  Antisense Strand to SEQ ID NO: 438091
acuaaucaccuucuaacag

SEQ ID NO: 438093 - RNA, 19 nt, Artificial Sequence
  Description of Artificial Sequence: Synthetic oligonucleotide
  Sense strand starting at position 2689 of SEQ ID NO: 316757
guuagaaggugauuaguuu

SEQ ID NO: 438094 - RNA, 19 nt, Artificial Sequence
  Description of Artificial Sequence: Synthetic oligonucleotide
  Antisense Strand to SEQ ID NO: 438093
aaacuaaucaccuucuaac

SEQ ID NO: 438095 - RNA, 19 nt, Artificial Sequence
  Description of Artificial Sequence: Synthetic oligonucleotide
  Sense strand starting at position 2849 of SEQ ID NO: 316757
auguaaauuccucaagguc

SEQ ID NO: 438096 - RNA, 19 nt, Artificial Sequence
  Description of Artificial Sequence: Synthetic oligonucleotide
  Antisense Strand to SEQ ID NO: 438095
gaccuugaggaauuuacau

SEQ ID NO: 438097 - RNA, 19 nt, Artificial Sequence
  Description of Artificial Sequence: Synthetic oligonucleotide
  Sense strand starting at position 2857 of SEQ ID NO: 316757
uccucaaggucuuuacuga

SEQ ID NO: 438098 - RNA, 19 nt, Artificial Sequence
  Description of Artificial Sequence: Synthetic oligonucleotide
  Antisense Strand to SEQ ID NO: 438097
ucaguaaagaccuugagga

SEQ ID NO: 438099 - RNA, 19 nt, Artificial Sequence
  Description of Artificial Sequence: Synthetic oligonucleotide
  Sense strand starting at position 2998 of SEQ ID NO: 316757
gaagcugugcgguuaguuu

SEQ ID NO: 438100 - RNA, 19 nt, Artificial Sequence
  Description of Artificial Sequence: Synthetic oligonucleotide
  Antisense Strand to SEQ ID NO: 438099
aaacuaaccgcacagcuuc

SEQ ID NO: 438101 - RNA, 19 nt, Artificial Sequence
  Description of Artificial Sequence: Synthetic oligonucleotide
  Sense strand starting at position 3151 of SEQ ID NO: 316757
uguccaauuguuuggagga

SEQ ID NO: 438102 - RNA, 19 nt, Artificial Sequence
  Description of Artificial Sequence: Synthetic oligonucleotide
  Antisense Strand to SEQ ID NO: 438101
uccuccaaacaauuggaca

SEQ ID NO: 438103 - RNA, 19 nt, Artificial Sequence
  Description of Artificial Sequence: Synthetic oligonucleotide
  Sense strand starting at position 3178 of SEQ ID NO: 316757
gaaggagugcuugauagug

SEQ ID NO: 438104 - RNA, 19 nt, Artificial Sequence
  Description of Artificial Sequence: Synthetic oligonucleotide
  Antisense Strand to SEQ ID NO: 438103
cacuaucaagcacuccuuc

SEQ ID NO: 438105 - RNA, 19 nt, Artificial Sequence
  Description of Artificial Sequence: Synthetic oligonucleotide
  Sense strand starting at position 3184 of SEQ ID NO: 316757
gugcuugauagugaagaag

SEQ ID NO: 438106 - RNA, 19 nt, Artificial Sequence
  Description of Artificial Sequence: Synthetic oligonucleotide
  Antisense Strand to SEQ ID NO: 438105
cuucuucacuaucaagcac

SEQ ID NO: 438107 - RNA, 19 nt, Artificial Sequence
  Description of Artificial Sequence: Synthetic oligonucleotide
  Sense strand starting at position 3275 of SEQ ID NO: 316757
uuagaagugcuccauucua

SEQ ID NO: 438108 - RNA, 19 nt, Artificial Sequence
  Description of Artificial Sequence: Synthetic oligonucleotide
  Antisense Strand to SEQ ID NO: 438107
uagaauggagcacuucuaa

SEQ ID NO: 438109 - RNA, 19 nt, Artificial Sequence
  Description of Artificial Sequence: Synthetic oligonucleotide
  Sense strand starting at position 3288 of SEQ ID NO: 316757
auucuaacucucuggaagu

SEQ ID NO: 438110 - RNA, 19 nt, Artificial Sequence
  Description of Artificial Sequence: Synthetic oligonucleotide
  Antisense Strand to SEQ ID NO: 438109
acuuccagagaguuagaau

SEQ ID NO: 438111 - RNA, 19 nt, Artificial Sequence
  Description of Artificial Sequence: Synthetic oligonucleotide
  Sense strand starting at position 3384 of SEQ ID NO: 316757
gcuguaaacggauaguaag

SEQ ID NO: 438112 - RNA, 19 nt, Artificial Sequence
  Description of Artificial Sequence: Synthetic oligonucleotide
  Antisense Strand to SEQ ID NO: 438111
cuuacuauccguuuacagc

SEQ ID NO: 438113 - RNA, 19 nt, Artificial Sequence
  Description of Artificial Sequence: Synthetic oligonucleotide
  Sense strand starting at position 3424 of SEQ ID NO: 316757
uagcucuuagacgaucaga

SEQ ID NO: 438114 - RNA, 19 nt, Artificial Sequence
  Description of Artificial Sequence: Synthetic oligonucleotide
  Antisense Strand to SEQ ID NO: 438113
ucugaucgucuaagagcua

SEQ ID NO: 438115 - RNA, 19 nt, Artificial Sequence
  Description of Artificial Sequence: Synthetic oligonucleotide
  Sense strand starting at position 3616 of SEQ ID NO: 316757
acaguagugcgugauagaa

SEQ ID NO: 438116 - RNA, 19 nt, Artificial Sequence
  Description of Artificial Sequence: Synthetic oligonucleotide
  Antisense Strand to SEQ ID NO: 438115
uucuaucacgcacuacugu

SEQ ID NO: 438117 - RNA, 19 nt, Artificial Sequence
  Description of Artificial Sequence: Synthetic oligonucleotide
  Sense strand starting at position 3620 of SEQ ID NO: 316757
uagugcgugauagaagaaa

SEQ ID NO: 438118 - RNA, 19 nt, Artificial Sequence
  Description of Artificial Sequence: Synthetic oligonucleotide
  Antisense Strand to SEQ ID NO: 438117
uuucuucuaucacgcacua

SEQ ID NO: 438119 - RNA, 19 nt, Artificial Sequence
  Description of Artificial Sequence: Synthetic oligonucleotide
  Sense strand starting at position 3784 of SEQ ID NO: 316757
agcuauuaccacuaguuga

SEQ ID NO: 438120 - RNA, 19 nt, Artificial Sequence
  Description of Artificial Sequence: Synthetic oligonucleotide
  Antisense Strand to SEQ ID NO: 438119
ucaacuagugguaauagcu

SEQ ID NO: 438121 - RNA, 19 nt, Artificial Sequence
  Description of Artificial Sequence: Synthetic oligonucleotide
  Sense strand starting at position 3791 of SEQ ID NO: 316757
accacuaguugagugaaua

SEQ ID NO: 438122 - RNA, 19 nt, Artificial Sequence
  Description of Artificial Sequence: Synthetic oligonucleotide
  Antisense Strand to SEQ ID NO: 438121
uauucacucaacuaguggu

SEQ ID NO: 438123 - RNA, 19 nt, Artificial Sequence
  Description of Artificial Sequence: Synthetic oligonucleotide
  Sense strand starting at position 3792 of SEQ ID NO: 316757
ccacuaguugagugaauag

SEQ ID NO: 438124 - RNA, 19 nt, Artificial Sequence
  Description of Artificial Sequence: Synthetic oligonucleotide
  Antisense Strand to SEQ ID NO: 438123
cuauucacucaacuagugg

SEQ ID NO: 438125 - RNA, 19 nt, Artificial Sequence
  Description of Artificial Sequence: Synthetic oligonucleotide
  Sense strand starting at position 3893 of SEQ ID NO: 316757
gguaacaauguuugcugaa

SEQ ID NO: 438126 - RNA, 19 nt, Artificial Sequence
  Description of Artificial Sequence: Synthetic oligonucleotide
  Antisense Strand to SEQ ID NO: 438125
uucagcaaacauuguuacc

SEQ ID NO: 438127 - RNA, 19 nt, Artificial Sequence
  Description of Artificial Sequence: Synthetic oligonucleotide
  Sense strand starting at position 3894 of SEQ ID NO: 316757
guaacaauguuugcugaag

SEQ ID NO: 438128 - RNA, 19 nt, Artificial Sequence
  Description of Artificial Sequence: Synthetic oligonucleotide
  Antisense Strand to SEQ ID NO: 438127
cuucagcaaacauuguuac

SEQ ID NO: 438129 - RNA, 19 nt, Artificial Sequence
  Description of Artificial Sequence: Synthetic oligonucleotide
  Sense strand starting at position 3902 of SEQ ID NO: 316757
guuugcugaagaggugaau

SEQ ID NO: 438130 - RNA, 19 nt, Artificial Sequence
  Description of Artificial Sequence: Synthetic oligonucleotide
  Antisense Strand to SEQ ID NO: 438129
auucaccucuucagcaaac

SEQ ID NO: 438131 - RNA, 19 nt, Artificial Sequence
  Description of Artificial Sequence: Synthetic oligonucleotide
  Sense strand starting at position 3973 of SEQ ID NO: 316757
ucauauguuguuuaacagu

SEQ ID NO: 438132 - RNA, 19 nt, Artificial Sequence
  Description of Artificial Sequence: Synthetic oligonucleotide
  Antisense Strand to SEQ ID NO: 438131
acuguuaaacaacauauga

SEQ ID NO: 438133 - RNA, 19 nt, Artificial Sequence
  Description of Artificial Sequence: Synthetic oligonucleotide
  Sense strand starting at position 510 of SEQ ID NO: 316758
ucauuauauuagucagagg

SEQ ID NO: 438134 - RNA, 19 nt, Artificial Sequence
  Description of Artificial Sequence: Synthetic oligonucleotide
  Antisense Strand to SEQ ID NO: 438133
ccucugacuaauauaauga

SEQ ID NO: 438135 - RNA, 19 nt, Artificial Sequence
  Description of Artificial Sequence: Synthetic oligonucleotide
  Sense strand starting at position 515 of SEQ ID NO: 316758
auauuagucagaggugaua

SEQ ID NO: 438136 - RNA, 19 nt, Artificial Sequence
  Description of Artificial Sequence: Synthetic oligonucleotide
  Antisense Strand to SEQ ID NO: 438135
uaucaccucugacuaauau

SEQ ID NO: 438137 - RNA, 19 nt, Artificial Sequence
  Description of Artificial Sequence: Synthetic oligonucleotide
  Sense strand starting at position 517 of SEQ ID NO: 316758
auuagucagaggugauagu

SEQ ID NO: 438138 - RNA, 19 nt, Artificial Sequence
  Description of Artificial Sequence: Synthetic oligonucleotide
  Antisense Strand to SEQ ID NO: 438137
acuaucaccucugacuaau

SEQ ID NO: 438139 - RNA, 19 nt, Artificial Sequence
  Description of Artificial Sequence: Synthetic oligonucleotide
  Sense strand starting at position 518 of SEQ ID NO: 316758
uuagucagaggugauaguu

SEQ ID NO: 438140 - RNA, 19 nt, Artificial Sequence
  Description of Artificial Sequence: Synthetic oligonucleotide
  Antisense Strand to SEQ ID NO: 438139
aacuaucaccucugacuaa

SEQ ID NO: 438141 - RNA, 19 nt, Artificial Sequence
  Description of Artificial Sequence: Synthetic oligonucleotide
  Sense strand starting at position 598 of SEQ ID NO: 316758
guacguaaaucaccuggaa

SEQ ID NO: 438142 - RNA, 19 nt, Artificial Sequence
  Description of Artificial Sequence: Synthetic oligonucleotide
  Antisense Strand to SEQ ID NO: 438141
uuccaggugauuuacguac

SEQ ID NO: 438143 - RNA, 19 nt, Artificial Sequence
  Description of Artificial Sequence: Synthetic oligonucleotide
  Sense strand starting at position 691 of SEQ ID NO: 316758
uuaagauagagucgaguaa

SEQ ID NO: 438144 - RNA, 19 nt, Artificial Sequence
  Description of Artificial Sequence: Synthetic oligonucleotide
  Antisense Strand to SEQ ID NO: 438143
uuacucgacucuaucuuaa

SEQ ID NO: 438145 - RNA, 19 nt, Artificial Sequence
  Description of Artificial Sequence: Synthetic oligonucleotide
  Sense strand starting at position 881 of SEQ ID NO: 316758
ugagaauggcuuuauugcu

SEQ ID NO: 438146 - RNA, 19 nt, Artificial Sequence
  Description of Artificial Sequence: Synthetic oligonucleotide
  Antisense Strand to SEQ ID NO: 438145
agcaauaaagccauucuca

SEQ ID NO: 438147 - RNA, 19 nt, Artificial Sequence
  Description of Artificial Sequence: Synthetic oligonucleotide
  Sense strand starting at position 1212 of SEQ ID NO: 316758
ucagaagaguuugucaaua

SEQ ID NO: 438148 - RNA, 19 nt, Artificial Sequence
  Description of Artificial Sequence: Synthetic oligonucleotide
  Antisense Strand to SEQ ID NO: 438147
uauugacaaacucuucuga

SEQ ID NO: 438149 - RNA, 19 nt, Artificial Sequence
  Description of Artificial Sequence: Synthetic oligonucleotide
  Sense strand starting at position 1305 of SEQ ID NO: 316758
auuauuucgagacguacuu

SEQ ID NO: 438150 - RNA, 19 nt, Artificial Sequence
  Description of Artificial Sequence: Synthetic oligonucleotide
  Antisense Strand to SEQ ID NO: 438149
aaguacgucucgaaauaau

SEQ ID NO: 438151 - RNA, 19 nt, Artificial Sequence
  Description of Artificial Sequence: Synthetic oligonucleotide
  Sense strand starting at position 1622 of SEQ ID NO: 316758
aauuaacucugguuaucga

SEQ ID NO: 438152 - RNA, 19 nt, Artificial Sequence
  Description of Artificial Sequence: Synthetic oligonucleotide
  Antisense Strand to SEQ ID NO: 438151
ucgauaaccagaguuaauu

SEQ ID NO: 438153 - RNA, 19 nt, Artificial Sequence
  Description of Artificial Sequence: Synthetic oligonucleotide
  Sense strand starting at position 1629 of SEQ ID NO: 316758
ucugguuaucgacacacga

SEQ ID NO: 438154 - RNA, 19 nt, Artificial Sequence
  Description of Artificial Sequence: Synthetic oligonucleotide
  Antisense Strand to SEQ ID NO: 438153
ucgugugucgauaaccaga

SEQ ID NO: 438155 - RNA, 19 nt, Artificial Sequence
  Description of Artificial Sequence: Synthetic oligonucleotide
  Sense strand starting at position 1631 of SEQ ID NO: 316758
ugguuaucgacacacgauc

SEQ ID NO: 438156 - RNA, 19 nt, Artificial Sequence
  Description of Artificial Sequence: Synthetic oligonucleotide
  Antisense Strand to SEQ ID NO: 438155
gaucgugugucgauaacca

SEQ ID NO: 438157 - RNA, 19 nt, Artificial Sequence
  Description of Artificial Sequence: Synthetic oligonucleotide
  Sense strand starting at position 2047 of SEQ ID NO: 316758
ggguuugaacccggagaca

SEQ ID NO: 438158 - RNA, 19 nt, Artificial Sequence
  Description of Artificial Sequence: Synthetic oligonucleotide
  Antisense Strand to SEQ ID NO: 438157
ugucuccggguucaaaccc

SEQ ID NO: 438159 - RNA, 19 nt, Artificial Sequence
  Description of Artificial Sequence: Synthetic oligonucleotide
  Sense strand starting at position 2350 of SEQ ID NO: 316758
guagaaauugcagacgacu

SEQ ID NO: 438160 - RNA, 19 nt, Artificial Sequence
  Description of Artificial Sequence: Synthetic oligonucleotide
  Antisense Strand to SEQ ID NO: 438159
agucgucugcaauuucuac

SEQ ID NO: 438161 - RNA, 19 nt, Artificial Sequence
  Description of Artificial Sequence: Synthetic oligonucleotide
  Sense strand starting at position 2352 of SEQ ID NO: 316758
agaaauugcagacgacuuu

SEQ ID NO: 438162 - RNA, 19 nt, Artificial Sequence
  Description of Artificial Sequence: Synthetic oligonucleotide
  Antisense Strand to SEQ ID NO: 438161
aaagucgucugcaauuucu

SEQ ID NO: 438163 - RNA, 19 nt, Artificial Sequence
  Description of Artificial Sequence: Synthetic oligonucleotide
  Sense strand starting at position 2533 of SEQ ID NO: 316758
augcauugccaacaaauga

SEQ ID NO: 438164 - RNA, 19 nt, Artificial Sequence
  Description of Artificial Sequence: Synthetic oligonucleotide
  Antisense Strand to SEQ ID NO: 438163
ucauuuguuggcaaugcau

SEQ ID NO: 438165 - RNA, 19 nt, Artificial Sequence
  Description of Artificial Sequence: Synthetic oligonucleotide
  Sense strand starting at position 2544 of SEQ ID NO: 316758
acaaaugacccacguaaau

SEQ ID NO: 438166 - RNA, 19 nt, Artificial Sequence
  Description of Artificial Sequence: Synthetic oligonucleotide
  Antisense Strand to SEQ ID NO: 438165
auuuacgugggucauuugu

SEQ ID NO: 438167 - RNA, 19 nt, Artificial Sequence
  Description of Artificial Sequence: Synthetic oligonucleotide
  Sense strand starting at position 2635 of SEQ ID NO: 316758
cuauguuauggagggcaaa

SEQ ID NO: 438168 - RNA, 19 nt, Artificial Sequence
  Description of Artificial Sequence: Synthetic oligonucleotide
  Antisense Strand to SEQ ID NO: 438167
uuugcccuccauaacauag

SEQ ID NO: 438169 - RNA, 19 nt, Artificial Sequence
  Description of Artificial Sequence: Synthetic oligonucleotide
  Sense strand starting at position 2726 of SEQ ID NO: 316758
accugaccaguguaugauu

SEQ ID NO: 438170 - RNA, 19 nt, Artificial Sequence
  Description of Artificial Sequence: Synthetic oligonucleotide
  Antisense Strand to SEQ ID NO: 438169
aaucauacacuggucaggu

SEQ ID NO: 438171 - RNA, 19 nt, Artificial Sequence
  Description of Artificial Sequence: Synthetic oligonucleotide
  Sense strand starting at position 2832 of SEQ ID NO: 316758
uuaaucaggaguugagcua

SEQ ID NO: 438172 - RNA, 19 nt, Artificial Sequence
  Description of Artificial Sequence: Synthetic oligonucleotide
  Antisense Strand to SEQ ID NO: 438171
uagcucaacuccugauuaa

SEQ ID NO: 438173 - RNA, 19 nt, Artificial Sequence
  Description of Artificial Sequence: Synthetic oligonucleotide
  Sense strand starting at position 2948 of SEQ ID NO: 316758
augaucucugacugaaauu

SEQ ID NO: 438174 - RNA, 19 nt, Artificial Sequence
  Description of Artificial Sequence: Synthetic oligonucleotide
  Antisense Strand to SEQ ID NO: 438173
aauuucagucagagaucau

SEQ ID NO: 438175 - RNA, 19 nt, Artificial Sequence
  Description of Artificial Sequence: Synthetic oligonucleotide
  Sense strand starting at position 2960 of SEQ ID NO: 316758
ugaaauuaggccuggauug

SEQ ID NO: 438176 - RNA, 19 nt, Artificial Sequence
  Description of Artificial Sequence: Synthetic oligonucleotide
  Antisense Strand to SEQ ID NO: 438175
caauccaggccuaauuuca

SEQ ID NO: 438177 - RNA, 19 nt, Artificial Sequence
  Description of Artificial Sequence: Synthetic oligonucleotide
  Sense strand starting at position 2998 of SEQ ID NO: 316758
ugccauuaugggcaacuaa

SEQ ID NO: 438178 - RNA, 19 nt, Artificial Sequence
  Description of Artificial Sequence: Synthetic oligonucleotide
  Antisense Strand to SEQ ID NO: 438177
uuaguugcccauaauggca

SEQ ID NO: 438179 - RNA, 19 nt, Artificial Sequence
  Description of Artificial Sequence: Synthetic oligonucleotide
  Sense strand starting at position 3058 of SEQ ID NO: 316758
cuauuaaagugguugagau

SEQ ID NO: 438180 - RNA, 19 nt, Artificial Sequence
  Description of Artificial Sequence: Synthetic oligonucleotide
  Antisense Strand to SEQ ID NO: 438179
aucucaaccacuuuaauag

SEQ ID NO: 438181 - RNA, 19 nt, Artificial Sequence
  Description of Artificial Sequence: Synthetic oligonucleotide
  Sense strand starting at position 3059 of SEQ ID NO: 316758
uauuaaagugguugagaug

SEQ ID NO: 438182 - RNA, 19 nt, Artificial Sequence
  Description of Artificial Sequence: Synthetic oligonucleotide
  Antisense Strand to SEQ ID NO: 438181
caucucaaccacuuuaaua

SEQ ID NO: 438183 - RNA, 19 nt, Artificial Sequence
  Description of Artificial Sequence: Synthetic oligonucleotide
  Sense strand starting at position 3222 of SEQ ID NO: 316758
cugucacauuuggaauaga

SEQ ID NO: 438184 - RNA, 19 nt, Artificial Sequence
  Description of Artificial Sequence: Synthetic oligonucleotide
  Antisense Strand to SEQ ID NO: 438183
ucuauuccaaaugugacag

SEQ ID NO: 438185 - RNA, 19 nt, Artificial Sequence
  Description of Artificial Sequence: Synthetic oligonucleotide
  Sense strand starting at position 3297 of SEQ ID NO: 316758
uuugcaugcauugaagaga

SEQ ID NO: 438186 - RNA, 19 nt, Artificial Sequence
  Description of Artificial Sequence: Synthetic oligonucleotide
  Antisense Strand to SEQ ID NO: 438185
ucucuucaaugcaugcaaa

SEQ ID NO: 438187 - RNA, 19 nt, Artificial Sequence
  Description of Artificial Sequence: Synthetic oligonucleotide
  Sense strand starting at position 3364 of SEQ ID NO: 316758
cuaagugucuuacccaaga

SEQ ID NO: 438188 - RNA, 19 nt, Artificial Sequence
  Description of Artificial Sequence: Synthetic oligonucleotide
  Antisense Strand to SEQ ID NO: 438187
ucuuggguaagacacuuag

SEQ ID NO: 438189 - RNA, 19 nt, Artificial Sequence
  Description of Artificial Sequence: Synthetic oligonucleotide
  Sense strand starting at position 3397 of SEQ ID NO: 316758
aaugguaggauggguuauu

SEQ ID NO: 438190 - RNA, 19 nt, Artificial Sequence
  Description of Artificial Sequence: Synthetic oligonucleotide
  Antisense Strand to SEQ ID NO: 438189
aauaacccauccuaccauu

SEQ ID NO: 438191 - RNA, 19 nt, Artificial Sequence
  Description of Artificial Sequence: Synthetic oligonucleotide
  Sense strand starting at position 3398 of SEQ ID NO: 316758
augguaggauggguuauua

SEQ ID NO: 438192 - RNA, 19 nt, Artificial Sequence
  Description of Artificial Sequence: Synthetic oligonucleotide
  Antisense Strand to SEQ ID NO: 438191
uaauaacccauccuaccau

SEQ ID NO: 438193 - RNA, 19 nt, Artificial Sequence
  Description of Artificial Sequence: Synthetic oligonucleotide
  Sense strand starting at position 3406 of SEQ ID NO: 316758
auggguuauuaucccaaga

SEQ ID NO: 438194 - RNA, 19 nt, Artificial Sequence
  Description of Artificial Sequence: Synthetic oligonucleotide
  Antisense Strand to SEQ ID NO: 438193
ucuugggauaauaacccau

SEQ ID NO: 438195 - RNA, 19 nt, Artificial Sequence
  Description of Artificial Sequence: Synthetic oligonucleotide
  Sense strand starting at position 3483 of SEQ ID NO: 316758
uuuagcaagcacgauuaua

SEQ ID NO: 438196 - RNA, 19 nt, Artificial Sequence
  Description of Artificial Sequence: Synthetic oligonucleotide
  Antisense Strand to SEQ ID NO: 438195
uauaaucgugcuugcuaaa

SEQ ID NO: 438197 - RNA, 19 nt, Artificial Sequence
  Description of Artificial Sequence: Synthetic oligonucleotide
  Sense strand starting at position 3494 of SEQ ID NO: 316758
cgauuauagauguaaaguc

SEQ ID NO: 438198 - RNA, 19 nt, Artificial Sequence
  Description of Artificial Sequence: Synthetic oligonucleotide
  Antisense Strand to SEQ ID NO: 438197
gacuuuacaucuauaaucg

SEQ ID NO: 438199 - RNA, 19 nt, Artificial Sequence
  Description of Artificial Sequence: Synthetic oligonucleotide
  Sense strand starting at position 3504 of SEQ ID NO: 316758
uguaaagucccacauguaa

SEQ ID NO: 438200 - RNA, 19 nt, Artificial Sequence
  Description of Artificial Sequence: Synthetic oligonucleotide
  Antisense Strand to SEQ ID NO: 438199
uuacaugugggacuuuaca

SEQ ID NO: 438201 - RNA, 19 nt, Artificial Sequence
  Description of Artificial Sequence: Synthetic oligonucleotide
  Sense strand starting at position 3535 of SEQ ID NO: 316758
cugcuuccacuggaaacua

SEQ ID NO: 438202 - RNA, 19 nt, Artificial Sequence
  Description of Artificial Sequence: Synthetic oligonucleotide
  Antisense Strand to SEQ ID NO: 438201
uaguuuccaguggaagcag

SEQ ID NO: 438203 - RNA, 19 nt, Artificial Sequence
  Description of Artificial Sequence: Synthetic oligonucleotide
  Sense strand starting at position 3569 of SEQ ID NO: 316758
uugagaaauuuggaaugca

SEQ ID NO: 438204 - RNA, 19 nt, Artificial Sequence
  Description of Artificial Sequence: Synthetic oligonucleotide
  Antisense Strand to SEQ ID NO: 438203
ugcauuccaaauuucucaa

SEQ ID NO: 438205 - RNA, 19 nt, Artificial Sequence
  Description of Artificial Sequence: Synthetic oligonucleotide
  Sense strand starting at position 3591 of SEQ ID NO: 316758
gcuugugcugcugcagaaa

SEQ ID NO: 438206 - RNA, 19 nt, Artificial Sequence
  Description of Artificial Sequence: Synthetic oligonucleotide
  Antisense Strand to SEQ ID NO: 438205
uuucugcagcagcacaagc

SEQ ID NO: 438207 - RNA, 19 nt, Artificial Sequence
  Description of Artificial Sequence: Synthetic oligonucleotide
  Sense strand starting at position 3630 of SEQ ID NO: 316758
aggauuaacuguucuaaag

SEQ ID NO: 438208 - RNA, 19 nt, Artificial Sequence
  Description of Artificial Sequence: Synthetic oligonucleotide
  Antisense Strand to SEQ ID NO: 438207
cuuuagaacaguuaauccu

SEQ ID NO: 438209 - RNA, 19 nt, Artificial Sequence
  Description of Artificial Sequence: Synthetic oligonucleotide
  Sense strand starting at position 3691 of SEQ ID NO: 316758
acaguuuccagagaaacgu

SEQ ID NO: 438210 - RNA, 19 nt, Artificial Sequence
  Description of Artificial Sequence: Synthetic oligonucleotide
  Antisense Strand to SEQ ID NO: 438209
acguuucucuggaaacugu

SEQ ID NO: 438211 - RNA, 19 nt, Artificial Sequence
  Description of Artificial Sequence: Synthetic oligonucleotide
  Sense strand starting at position 3932 of SEQ ID NO: 316758
gcauguguguauuuacaua

SEQ ID NO: 438212 - RNA, 19 nt, Artificial Sequence
  Description of Artificial Sequence: Synthetic oligonucleotide
  Antisense Strand to SEQ ID NO: 438211
uauguaaauacacacaugc

SEQ ID NO: 438213 - RNA, 19 nt, Artificial Sequence
  Description of Artificial Sequence: Synthetic oligonucleotide
  Sense strand starting at position 120 of SEQ ID NO: 316759
ucuggaaucuaccuagaug

SEQ ID NO: 438214 - RNA, 19 nt, Artificial Sequence
  Description of Artificial Sequence: Synthetic oligonucleotide
  Antisense Strand to SEQ ID NO: 438213
caucuagguagauuccaga

SEQ ID NO: 438215 - RNA, 19 nt, Artificial Sequence
  Description of Artificial Sequence: Synthetic oligonucleotide
  Sense strand starting at position 225 of SEQ ID NO: 316759
agugaagcaguuuauagaa

SEQ ID NO: 438216 - RNA, 19 nt, Artificial Sequence
  Description of Artificial Sequence: Synthetic oligonucleotide
  Antisense Strand to SEQ ID NO: 438215
uucuauaaacugcuucacu

SEQ ID NO: 438217 - RNA, 19 nt, Artificial Sequence
  Description of Artificial Sequence: Synthetic oligonucleotide
  Sense strand starting at position 238 of SEQ ID NO: 316759
auagaaggcuuagucuaau

SEQ ID NO: 438218 - RNA, 19 nt, Artificial Sequence
  Description of Artificial Sequence: Synthetic oligonucleotide
  Antisense Strand to SEQ ID NO: 438217
auuagacuaagccuucuau

SEQ ID NO: 438219 - RNA, 19 nt, Artificial Sequence
  Description of Artificial Sequence: Synthetic oligonucleotide
  Sense strand starting at position 241 of SEQ ID NO: 316759
gaaggcuuagucuaaucuu

SEQ ID NO: 438220 - RNA, 19 nt, Artificial Sequence
  Description of Artificial Sequence: Synthetic oligonucleotide
  Antisense Strand to SEQ ID NO: 438219
aagauuagacuaagccuuc

SEQ ID NO: 438221 - RNA, 19 nt, Artificial Sequence
  Description of Artificial Sequence: Synthetic oligonucleotide
  Sense strand starting at position 481 of SEQ ID NO: 316759
agucaugucauaggaggaa

SEQ ID NO: 438222 - RNA, 19 nt, Artificial Sequence
  Description of Artificial Sequence: Synthetic oligonucleotide
  Antisense Strand to SEQ ID NO: 438221
uuccuccuaugacaugacu

SEQ ID NO: 438223 - RNA, 19 nt, Artificial Sequence
  Description of Artificial Sequence: Synthetic oligonucleotide
  Sense strand starting at position 562 of SEQ ID NO: 316759
gaaaguccaucuuugagga

SEQ ID NO: 438224 - RNA, 19 nt, Artificial Sequence
  Description of Artificial Sequence: Synthetic oligonucleotide
  Antisense Strand to SEQ ID NO: 438223
uccucaaagauggacuuuc

SEQ ID NO: 438225 - RNA, 19 nt, Artificial Sequence
  Description of Artificial Sequence: Synthetic oligonucleotide
  Sense strand starting at position 563 of SEQ ID NO: 316759
aaaguccaucuuugaggau

SEQ ID NO: 438226 - RNA, 19 nt, Artificial Sequence
  Description of Artificial Sequence: Synthetic oligonucleotide
  Antisense Strand to SEQ ID NO: 438225
auccucaaagauggacuuu

SEQ ID NO: 438227 - RNA, 19 nt, Artificial Sequence
  Description of Artificial Sequence: Synthetic oligonucleotide
  Sense strand starting at position 881 of SEQ ID NO: 316759
ccuggaauacucugacuuc

SEQ ID NO: 438228 - RNA, 19 nt, Artificial Sequence
  Description of Artificial Sequence: Synthetic oligonucleotide
  Antisense Strand to SEQ ID NO: 438227
gaagucagaguauuccagg

SEQ ID NO: 438229 - RNA, 19 nt, Artificial Sequence
  Description of Artificial Sequence: Synthetic oligonucleotide
  Sense strand starting at position 1081 of SEQ ID NO: 316759
cguuuaaggcauuagauaa

SEQ ID NO: 438230 - RNA, 19 nt, Artificial Sequence
  Description of Artificial Sequence: Synthetic oligonucleotide
  Antisense Strand to SEQ ID NO: 438229
uuaucuaaugccuuaaacg

SEQ ID NO: 438231 - RNA, 19 nt, Artificial Sequence
  Description of Artificial Sequence: Synthetic oligonucleotide
  Sense strand starting at position 1117 of SEQ ID NO: 316759
ggaaauuccugaucuuggu

SEQ ID NO: 438232 - RNA, 19 nt, Artificial Sequence
  Description of Artificial Sequence: Synthetic oligonucleotide
  Antisense Strand to SEQ ID NO: 438231
accaagaucaggaauuucc

SEQ ID NO: 438233 - RNA, 19 nt, Artificial Sequence
  Description of Artificial Sequence: Synthetic oligonucleotide
  Sense strand starting at position 1411 of SEQ ID NO: 316759
uuuguagaaugaucuugag

SEQ ID NO: 438234 - RNA, 19 nt, Artificial Sequence
  Description of Artificial Sequence: Synthetic oligonucleotide
  Antisense Strand to SEQ ID NO: 438233
cucaagaucauucuacaaa

SEQ ID NO: 438235 - RNA, 19 nt, Artificial Sequence
  Description of Artificial Sequence: Synthetic oligonucleotide
  Sense strand starting at position 1417 of SEQ ID NO: 316759
gaaugaucuugagugacga

SEQ ID NO: 438236 - RNA, 19 nt, Artificial Sequence
  Description of Artificial Sequence: Synthetic oligonucleotide
  Antisense Strand to SEQ ID NO: 438235
ucgucacucaagaucauuc

SEQ ID NO: 438237 - RNA, 19 nt, Artificial Sequence
  Description of Artificial Sequence: Synthetic oligonucleotide
  Sense strand starting at position 1418 of SEQ ID NO: 316759
aaugaucuugagugacgau

SEQ ID NO: 438238 - RNA, 19 nt, Artificial Sequence
  Description of Artificial Sequence: Synthetic oligonucleotide
  Antisense Strand to SEQ ID NO: 438237
aucgucacucaagaucauu

SEQ ID NO: 438239 - RNA, 19 nt, Artificial Sequence
  Description of Artificial Sequence: Synthetic oligonucleotide
  Sense strand starting at position 1419 of SEQ ID NO: 316759
augaucuugagugacgauu

SEQ ID NO: 438240 - RNA, 19 nt, Artificial Sequence
  Description of Artificial Sequence: Synthetic oligonucleotide
  Antisense Strand to SEQ ID NO: 438239
aaucgucacucaagaucau

SEQ ID NO: 438241 - RNA, 19 nt, Artificial Sequence
  Description of Artificial Sequence: Synthetic oligonucleotide
  Sense strand starting at position 1610 of SEQ ID NO: 316759
agggaaggucuguauguca

SEQ ID NO: 438242 - RNA, 19 nt, Artificial Sequence
  Description of Artificial Sequence: Synthetic oligonucleotide
  Antisense Strand to SEQ ID NO: 438241
ugacauacagaccuucccu

SEQ ID NO: 438243 - RNA, 19 nt, Artificial Sequence
  Description of Artificial Sequence: Synthetic oligonucleotide
  Sense strand starting at position 2422 of SEQ ID NO: 316759
ccuguugugcgccuuagaa

SEQ ID NO: 438244 - RNA, 19 nt, Artificial Sequence
  Description of Artificial Sequence: Synthetic oligonucleotide
  Antisense Strand to SEQ ID NO: 438243
uucuaaggcgcacaacagg

SEQ ID NO: 438245 - RNA, 19 nt, Artificial Sequence
  Description of Artificial Sequence: Synthetic oligonucleotide
  Sense strand starting at position 2504 of SEQ ID NO: 316759
uuccucagagguugaauua

SEQ ID NO: 438246 - RNA, 19 nt, Artificial Sequence
  Description of Artificial Sequence: Synthetic oligonucleotide
  Antisense Strand to SEQ ID NO: 438245
uaauucaaccucugaggaa

SEQ ID NO: 438247 - RNA, 19 nt, Artificial Sequence
  Description of Artificial Sequence: Synthetic oligonucleotide
  Sense strand starting at position 2553 of SEQ ID NO: 316759
cauugaguaauggguugau

SEQ ID NO: 438248 - RNA, 19 nt, Artificial Sequence
  Description of Artificial Sequence: Synthetic oligonucleotide
  Antisense Strand to SEQ ID NO: 438247
aucaacccauuacucaaug

SEQ ID NO: 438249 - RNA, 19 nt, Artificial Sequence
  Description of Artificial Sequence: Synthetic oligonucleotide
  Sense strand starting at position 2556 of SEQ ID NO: 316759
ugaguaauggguugauacu

SEQ ID NO: 438250 - RNA, 19 nt, Artificial Sequence
  Description of Artificial Sequence: Synthetic oligonucleotide
  Antisense Strand to SEQ ID NO: 438249
aguaucaacccauuacuca

SEQ ID NO: 438251 - RNA, 19 nt, Artificial Sequence
  Description of Artificial Sequence: Synthetic oligonucleotide
  Sense strand starting at position 2557 of SEQ ID NO: 316759
gaguaauggguugauacuu

SEQ ID NO: 438252 - RNA, 19 nt, Artificial Sequence
  Description of Artificial Sequence: Synthetic oligonucleotide
  Antisense Strand to SEQ ID NO: 438251
aaguaucaacccauuacuc

SEQ ID NO: 438253 - RNA, 19 nt, Artificial Sequence
  Description of Artificial Sequence: Synthetic oligonucleotide
  Sense strand starting at position 3338 of SEQ ID NO: 316759
uuagaaagcuauccaagau

SEQ ID NO: 438254 - RNA, 19 nt, Artificial Sequence
  Description of Artificial Sequence: Synthetic oligonucleotide
  Antisense Strand to SEQ ID NO: 438253
aucuuggauagcuuucuaa

SEQ ID NO: 438255 - RNA, 19 nt, Artificial Sequence
  Description of Artificial Sequence: Synthetic oligonucleotide
  Sense strand starting at position 3386 of SEQ ID NO: 316759
cacgguuauguacacagaa

SEQ ID NO: 438256 - RNA, 19 nt, Artificial Sequence
  Description of Artificial Sequence: Synthetic oligonucleotide
  Antisense Strand to SEQ ID NO: 438255
uucuguguacauaaccgug

SEQ ID NO: 438257 - RNA, 19 nt, Artificial Sequence
  Description of Artificial Sequence: Synthetic oligonucleotide
  Sense strand starting at position 3388 of SEQ ID NO: 316759
cgguuauguacacagaaua

SEQ ID NO: 438258 - RNA, 19 nt, Artificial Sequence
  Description of Artificial Sequence: Synthetic oligonucleotide
  Antisense Strand to SEQ ID NO: 438257
uauucuguguacauaaccg

SEQ ID NO: 438259 - RNA, 19 nt, Artificial Sequence
  Description of Artificial Sequence: Synthetic oligonucleotide
  Sense strand starting at position 3398 of SEQ ID NO: 316759
cacagaauaugucuggaua

SEQ ID NO: 438260 - RNA, 19 nt, Artificial Sequence
  Description of Artificial Sequence: Synthetic oligonucleotide
  Antisense Strand to SEQ ID NO: 438259
uauccagacauauucugug

SEQ ID NO: 438261 - RNA, 19 nt, Artificial Sequence
  Description of Artificial Sequence: Synthetic oligonucleotide
  Sense strand starting at position 3399 of SEQ ID NO: 316759
acagaauaugucuggauau

SEQ ID NO: 438262 - RNA, 19 nt, Artificial Sequence
  Description of Artificial Sequence: Synthetic oligonucleotide
  Antisense Strand to SEQ ID NO: 438261
auauccagacauauucugu

SEQ ID NO: 438263 - RNA, 19 nt, Artificial Sequence
  Description of Artificial Sequence: Synthetic oligonucleotide
  Sense strand starting at position 3451 of SEQ ID NO: 316759
ugccuaauuuccuugcaga

SEQ ID NO: 438264 - RNA, 19 nt, Artificial Sequence
  Description of Artificial Sequence: Synthetic oligonucleotide
  Antisense Strand to SEQ ID NO: 438263
ucugcaaggaaauuaggca

SEQ ID NO: 438265 - RNA, 19 nt, Artificial Sequence
  Description of Artificial Sequence: Synthetic oligonucleotide
  Sense strand starting at position 3452 of SEQ ID NO: 316759
gccuaauuuccuugcagag

SEQ ID NO: 438266 - RNA, 19 nt, Artificial Sequence
  Description of Artificial Sequence: Synthetic oligonucleotide
  Antisense Strand to SEQ ID NO: 438265
cucugcaaggaaauuaggc

SEQ ID NO: 438267 - RNA, 19 nt, Artificial Sequence
  Description of Artificial Sequence: Synthetic oligonucleotide
  Sense strand starting at position 3466 of SEQ ID NO: 316759
cagagugaggacugaguua

SEQ ID NO: 438268 - RNA, 19 nt, Artificial Sequence
  Description of Artificial Sequence: Synthetic oligonucleotide
  Antisense Strand to SEQ ID NO: 438267
uaacucaguccucacucug

SEQ ID NO: 438269 - RNA, 19 nt, Artificial Sequence
  Description of Artificial Sequence: Synthetic oligonucleotide
  Sense strand starting at position 3475 of SEQ ID NO: 316759
gacugaguuagaugguaga

SEQ ID NO: 438270 - RNA, 19 nt, Artificial Sequence
  Description of Artificial Sequence: Synthetic oligonucleotide
  Antisense Strand to SEQ ID NO: 438269
ucuaccaucuaacucaguc

SEQ ID NO: 438271 - RNA, 19 nt, Artificial Sequence
  Description of Artificial Sequence: Synthetic oligonucleotide
  Sense strand starting at position 3486 of SEQ ID NO: 316759
augguagacugaguuagau

SEQ ID NO: 438272 - RNA, 19 nt, Artificial Sequence
  Description of Artificial Sequence: Synthetic oligonucleotide
  Antisense Strand to SEQ ID NO: 438271
aucuaacucagucuaccau

SEQ ID NO: 438273 - RNA, 19 nt, Artificial Sequence
  Description of Artificial Sequence: Synthetic oligonucleotide
  Sense strand starting at position 3492 of SEQ ID NO: 316759
gacugaguuagaugaaagu

SEQ ID NO: 438274 - RNA, 19 nt, Artificial Sequence
  Description of Artificial Sequence: Synthetic oligonucleotide
  Antisense Strand to SEQ ID NO: 438273
acuuucaucuaacucaguc

SEQ ID NO: 438275 - RNA, 19 nt, Artificial Sequence
  Description of Artificial Sequence: Synthetic oligonucleotide
  Sense strand starting at position 3501 of SEQ ID NO: 316759
agaugaaaguaguuucuuu

SEQ ID NO: 438276 - RNA, 19 nt, Artificial Sequence
  Description of Artificial Sequence: Synthetic oligonucleotide
  Antisense Strand to SEQ ID NO: 438275
aaagaaacuacuuucaucu

SEQ ID NO: 438277 - RNA, 19 nt, Artificial Sequence
  Description of Artificial Sequence: Synthetic oligonucleotide
  Sense strand starting at position 3630 of SEQ ID NO: 316759
auugcuagacuguaaagau

SEQ ID NO: 438278 - RNA, 19 nt, Artificial Sequence
  Description of Artificial Sequence: Synthetic oligonucleotide
  Antisense Strand to SEQ ID NO: 438277
aucuuuacagucuagcaau

SEQ ID NO: 438279 - RNA, 19 nt, Artificial Sequence
  Description of Artificial Sequence: Synthetic oligonucleotide
  Sense strand starting at position 3642 of SEQ ID NO: 316759
uaaagauacuugguuguau

SEQ ID NO: 438280 - RNA, 19 nt, Artificial Sequence
  Description of Artificial Sequence: Synthetic oligonucleotide
  Antisense Strand to SEQ ID NO: 438279
auacaaccaaguaucuuua

SEQ ID NO: 438281 - RNA, 19 nt, Artificial Sequence
  Description of Artificial Sequence: Synthetic oligonucleotide
  Sense strand starting at position 3713 of SEQ ID NO: 316759
uuuaauugugggcaaauau

SEQ ID NO: 438282 - RNA, 19 nt, Artificial Sequence
  Description of Artificial Sequence: Synthetic oligonucleotide
  Antisense Strand to SEQ ID NO: 438281
auauuugcccacaauuaaa

SEQ ID NO: 438283 - RNA, 19 nt, Artificial Sequence
  Description of Artificial Sequence: Synthetic oligonucleotide
  Sense strand starting at position 3802 of SEQ ID NO: 316759
agaggagauugguucacga

SEQ ID NO: 438284 - RNA, 19 nt, Artificial Sequence
  Description of Artificial Sequence: Synthetic oligonucleotide
  Antisense Strand to SEQ ID NO: 438283
ucgugaaccaaucuccucu

SEQ ID NO: 438285 - RNA, 19 nt, Artificial Sequence
  Description of Artificial Sequence: Synthetic oligonucleotide
  Sense strand starting at position 3804 of SEQ ID NO: 316759
aggagauugguucacgagu

SEQ ID NO: 438286 - RNA, 19 nt, Artificial Sequence
  Description of Artificial Sequence: Synthetic oligonucleotide
  Antisense Strand to SEQ ID NO: 438285
acucgugaaccaaucuccu

SEQ ID NO: 438287 - RNA, 19 nt, Artificial Sequence
  Description of Artificial Sequence: Synthetic oligonucleotide
  Sense strand starting at position 3810 of SEQ ID NO: 316759
uugguucacgaguaaagag

SEQ ID NO: 438288 - RNA, 19 nt, Artificial Sequence
  Description of Artificial Sequence: Synthetic oligonucleotide
  Antisense Strand to SEQ ID NO: 438287
cucuuuacucgugaaccaa

SEQ ID NO: 438289 - RNA, 19 nt, Artificial Sequence
  Description of Artificial Sequence: Synthetic oligonucleotide
  Sense strand starting at position 3824 of SEQ ID NO: 316759
aagagaagucaucagccuu

SEQ ID NO: 438290 - RNA, 19 nt, Artificial Sequence
  Description of Artificial Sequence: Synthetic oligonucleotide
  Antisense Strand to SEQ ID NO: 438289
aaggcugaugacuucucuu

SEQ ID NO: 438291 - RNA, 19 nt, Artificial Sequence
  Description of Artificial Sequence: Synthetic oligonucleotide
  Sense strand starting at position 3851 of SEQ ID NO: 316759
gugcuuaugaucguugcua

SEQ ID NO: 438292 - RNA, 19 nt, Artificial Sequence
  Description of Artificial Sequence: Synthetic oligonucleotide
  Antisense Strand to SEQ ID NO: 438291
uagcaacgaucauaagcac

SEQ ID NO: 438293 - RNA, 19 nt, Artificial Sequence
  Description of Artificial Sequence: Synthetic oligonucleotide
  Sense strand starting at position 8 of SEQ ID NO: 316760
gaagcauugcacuggauau

SEQ ID NO: 438294 - RNA, 19 nt, Artificial Sequence
  Description of Artificial Sequence: Synthetic oligonucleotide
  Antisense Strand to SEQ ID NO: 438293
auauccagugcaaugcuuc

SEQ ID NO: 438295 - RNA, 19 nt, Artificial Sequence
  Description of Artificial Sequence: Synthetic oligonucleotide
  Sense strand starting at position 70 of SEQ ID NO: 316760
acguguacuaagugugaug

SEQ ID NO: 438296 - RNA, 19 nt, Artificial Sequence
  Description of Artificial Sequence: Synthetic oligonucleotide
  Antisense Strand to SEQ ID NO: 438295
caucacacuuaguacacgu

SEQ ID NO: 438297 - RNA, 19 nt, Artificial Sequence
  Description of Artificial Sequence: Synthetic oligonucleotide
  Sense strand starting at position 72 of SEQ ID NO: 316760
guguacuaagugugaugua

SEQ ID NO: 438298 - RNA, 19 nt, Artificial Sequence
  Description of Artificial Sequence: Synthetic oligonucleotide
  Antisense Strand to SEQ ID NO: 438297
uacaucacacuuaguacac

SEQ ID NO: 438299 - RNA, 19 nt, Artificial Sequence
  Description of Artificial Sequence: Synthetic oligonucleotide
  Sense strand starting at position 155 of SEQ ID NO: 316760
cccagacuugagugucauc

SEQ ID NO: 438300 - RNA, 19 nt, Artificial Sequence
  Description of Artificial Sequence: Synthetic oligonucleotide
  Antisense Strand to SEQ ID NO: 438299
gaugacacucaagucuggg

SEQ ID NO: 438301 - RNA, 19 nt, Artificial Sequence
  Description of Artificial Sequence: Synthetic oligonucleotide
  Sense strand starting at position 158 of SEQ ID NO: 316760
agacuugagugucaucaaa

SEQ ID NO: 438302 - RNA, 19 nt, Artificial Sequence
  Description of Artificial Sequence: Synthetic oligonucleotide
  Antisense Strand to SEQ ID NO: 438301
uuugaugacacucaagucu

SEQ ID NO: 438303 - RNA, 19 nt, Artificial Sequence
  Description of Artificial Sequence: Synthetic oligonucleotide
  Sense strand starting at position 218 of SEQ ID NO: 316760
ccaggagugucugauucag

SEQ ID NO: 438304 - RNA, 19 nt, Artificial Sequence
  Description of Artificial Sequence: Synthetic oligonucleotide
  Antisense Strand to SEQ ID NO: 438303
cugaaucagacacuccugg

SEQ ID NO: 438305 - RNA, 19 nt, Artificial Sequence
  Description of Artificial Sequence: Synthetic oligonucleotide
  Sense strand starting at position 220 of SEQ ID NO: 316760
aggagugucugauucaguc

SEQ ID NO: 438306 - RNA, 19 nt, Artificial Sequence
  Description of Artificial Sequence: Synthetic oligonucleotide
  Antisense Strand to SEQ ID NO: 438305
gacugaaucagacacuccu

SEQ ID NO: 438307 - RNA, 19 nt, Artificial Sequence
  Description of Artificial Sequence: Synthetic oligonucleotide
  Sense strand starting at position 245 of SEQ ID NO: 316760
gggugaggucugggauucu

SEQ ID NO: 438308 - RNA, 19 nt, Artificial Sequence
  Description of Artificial Sequence: Synthetic oligonucleotide
  Antisense Strand to SEQ ID NO: 438307
agaaucccagaccucaccc

SEQ ID NO: 438309 - RNA, 19 nt, Artificial Sequence
  Description of Artificial Sequence: Synthetic oligonucleotide
  Sense strand starting at position 318 of SEQ ID NO: 316760
agguaagacaaguauuggu

SEQ ID NO: 438310 - RNA, 19 nt, Artificial Sequence
  Description of Artificial Sequence: Synthetic oligonucleotide
  Antisense Strand to SEQ ID NO: 438309
accaauacuugucuuaccu

SEQ ID NO: 438311 - RNA, 19 nt, Artificial Sequence
  Description of Artificial Sequence: Synthetic oligonucleotide
  Sense strand starting at position 353 of SEQ ID NO: 316760
agaugaugauuccgggauu

SEQ ID NO: 438312 - RNA, 19 nt, Artificial Sequence
  Description of Artificial Sequence: Synthetic oligonucleotide
  Antisense Strand to SEQ ID NO: 438311
aaucccggaaucaucaucu

SEQ ID NO: 438313 - RNA, 19 nt, Artificial Sequence
  Description of Artificial Sequence: Synthetic oligonucleotide
  Sense strand starting at position 398 of SEQ ID NO: 316760
gucacauagccagguaaca

SEQ ID NO: 438314 - RNA, 19 nt, Artificial Sequence
  Description of Artificial Sequence: Synthetic oligonucleotide
  Antisense Strand to SEQ ID NO: 438313
uguuaccuggcuaugugac

SEQ ID NO: 438315 - RNA, 19 nt, Artificial Sequence
  Description of Artificial Sequence: Synthetic oligonucleotide
  Sense strand starting at position 516 of SEQ ID NO: 316760
ugccuuacgcuggagucaa

SEQ ID NO: 438316 - RNA, 19 nt, Artificial Sequence
  Description of Artificial Sequence: Synthetic oligonucleotide
  Antisense Strand to SEQ ID NO: 438315
uugacuccagcguaaggca

SEQ ID NO: 438317 - RNA, 19 nt, Artificial Sequence
  Description of Artificial Sequence: Synthetic oligonucleotide
  Sense strand starting at position 551 of SEQ ID NO: 316760
gacagaaaccucugugaca

SEQ ID NO: 438318 - RNA, 19 nt, Artificial Sequence
  Description of Artificial Sequence: Synthetic oligonucleotide
  Antisense Strand to SEQ ID NO: 438317
ugucacagagguuucuguc

SEQ ID NO: 438319 - RNA, 19 nt, Artificial Sequence
  Description of Artificial Sequence: Synthetic oligonucleotide
  Sense strand starting at position 1013 of SEQ ID NO: 316760
gacauugaaggcugacauu

SEQ ID NO: 438320 - RNA, 19 nt, Artificial Sequence
  Description of Artificial Sequence: Synthetic oligonucleotide
  Antisense Strand to SEQ ID NO: 438319
aaugucagccuucaauguc

SEQ ID NO: 438321 - RNA, 19 nt, Artificial Sequence
  Description of Artificial Sequence: Synthetic oligonucleotide
  Sense strand starting at position 1022 of SEQ ID NO: 316760
ggcugacauucucuucuaa

SEQ ID NO: 438322 - RNA, 19 nt, Artificial Sequence
  Description of Artificial Sequence: Synthetic oligonucleotide
  Antisense Strand to SEQ ID NO: 438321
uuagaagagaaugucagcc

SEQ ID NO: 438323 - RNA, 19 nt, Artificial Sequence
  Description of Artificial Sequence: Synthetic oligonucleotide
  Sense strand starting at position 1298 of SEQ ID NO: 316760
gccauucgccaacgaauca

SEQ ID NO: 438324 - RNA, 19 nt, Artificial Sequence
  Description of Artificial Sequence: Synthetic oligonucleotide
  Antisense Strand to SEQ ID NO: 438323
ugauucguuggcgaauggc

SEQ ID NO: 438325 - RNA, 19 nt, Artificial Sequence
  Description of Artificial Sequence: Synthetic oligonucleotide
  Sense strand starting at position 1357 of SEQ ID NO: 316760
gcucgcuuucuuugguaaa

SEQ ID NO: 438326 - RNA, 19 nt, Artificial Sequence
  Description of Artificial Sequence: Synthetic oligonucleotide
  Antisense Strand to SEQ ID NO: 438325
uuuaccaaagaaagcgagc

SEQ ID NO: 438327 - RNA, 19 nt, Artificial Sequence
  Description of Artificial Sequence: Synthetic oligonucleotide
  Sense strand starting at position 1359 of SEQ ID NO: 316760
ucgcuuucuuugguaaaca

SEQ ID NO: 438328 - RNA, 19 nt, Artificial Sequence
  Description of Artificial Sequence: Synthetic oligonucleotide
  Antisense Strand to SEQ ID NO: 438327
uguuuaccaaagaaagcga

SEQ ID NO: 438329 - RNA, 19 nt, Artificial Sequence
  Description of Artificial Sequence: Synthetic oligonucleotide
  Sense strand starting at position 1430 of SEQ ID NO: 316760
ccggauuuaugcuccaguu

SEQ ID NO: 438330 - RNA, 19 nt, Artificial Sequence
  Description of Artificial Sequence: Synthetic oligonucleotide
  Antisense Strand to SEQ ID NO: 438329
aacuggagcauaaauccgg

SEQ ID NO: 438331 - RNA, 19 nt, Artificial Sequence
  Description of Artificial Sequence: Synthetic oligonucleotide
  Sense strand starting at position 1456 of SEQ ID NO: 316760
ugugguuugcaguaagaaa

SEQ ID NO: 438332 - RNA, 19 nt, Artificial Sequence
  Description of Artificial Sequence: Synthetic oligonucleotide
  Antisense Strand to SEQ ID NO: 438331
uuucuuacugcaaaccaca

SEQ ID NO: 438333 - RNA, 19 nt, Artificial Sequence
  Description of Artificial Sequence: Synthetic oligonucleotide
  Sense strand starting at position 1503 of SEQ ID NO: 316760
gauucccagucagagaaua

SEQ ID NO: 438334 - RNA, 19 nt, Artificial Sequence
  Description of Artificial Sequence: Synthetic oligonucleotide
  Antisense Strand to SEQ ID NO: 438333
uauucucugacugggaauc

SEQ ID NO: 438335 - RNA, 19 nt, Artificial Sequence
  Description of Artificial Sequence: Synthetic oligonucleotide
  Sense strand starting at position 1553 of SEQ ID NO: 316760
ggcaauacguauuugcuga

SEQ ID NO: 438336 - RNA, 19 nt, Artificial Sequence
  Description of Artificial Sequence: Synthetic oligonucleotide
  Antisense Strand to SEQ ID NO: 438335
ucagcaaauacguauugcc

SEQ ID NO: 438337 - RNA, 19 nt, Artificial Sequence
  Description of Artificial Sequence: Synthetic oligonucleotide
  Sense strand starting at position 1554 of SEQ ID NO: 316760
gcaauacguauuugcugaa

SEQ ID NO: 438338 - RNA, 19 nt, Artificial Sequence
  Description of Artificial Sequence: Synthetic oligonucleotide
  Antisense Strand to SEQ ID NO: 438337
uucagcaaauacguauugc

SEQ ID NO: 438339 - RNA, 19 nt, Artificial Sequence
  Description of Artificial Sequence: Synthetic oligonucleotide
  Sense strand starting at position 1557 of SEQ ID NO: 316760
auacguauuugcugaauau

SEQ ID NO: 438340 - RNA, 19 nt, Artificial Sequence
  Description of Artificial Sequence: Synthetic oligonucleotide
  Antisense Strand to SEQ ID NO: 438339
auauucagcaaauacguau

SEQ ID NO: 438341 - RNA, 19 nt, Artificial Sequence
  Description of Artificial Sequence: Synthetic oligonucleotide
  Sense strand starting at position 2257 of SEQ ID NO: 316760
gagcuagugucccugaguc

SEQ ID NO: 438342 - RNA, 19 nt, Artificial Sequence
  Description of Artificial Sequence: Synthetic oligonucleotide
  Antisense Strand to SEQ ID NO: 438341
gacucagggacacuagcuc

SEQ ID NO: 438343 - RNA, 19 nt, Artificial Sequence
  Description of Artificial Sequence: Synthetic oligonucleotide
  Sense strand starting at position 2259 of SEQ ID NO: 316760
gcuagugucccugagucgu

SEQ ID NO: 438344 - RNA, 19 nt, Artificial Sequence
  Description of Artificial Sequence: Synthetic oligonucleotide
  Antisense Strand to SEQ ID NO: 438343
acgacucagggacacuagc

SEQ ID NO: 438345 - RNA, 19 nt, Artificial Sequence
  Description of Artificial Sequence: Synthetic oligonucleotide
  Sense strand starting at position 2383 of SEQ ID NO: 316760
uuaucagcugucugagcuu

SEQ ID NO: 438346 - RNA, 19 nt, Artificial Sequence
  Description of Artificial Sequence: Synthetic oligonucleotide
  Antisense Strand to SEQ ID NO: 438345
aagcucagacagcugauaa

SEQ ID NO: 438347 - RNA, 19 nt, Artificial Sequence
  Description of Artificial Sequence: Synthetic oligonucleotide
  Sense strand starting at position 2394 of SEQ ID NO: 316760
cugagcuuagcauguuacu

SEQ ID NO: 438348 - RNA, 19 nt, Artificial Sequence
  Description of Artificial Sequence: Synthetic oligonucleotide
  Antisense Strand to SEQ ID NO: 438347
aguaacaugcuaagcucag

SEQ ID NO: 438349 - RNA, 19 nt, Artificial Sequence
  Description of Artificial Sequence: Synthetic oligonucleotide
  Sense strand starting at position 2488 of SEQ ID NO: 316760
auguguaaugcagaagaau

SEQ ID NO: 438350 - RNA, 19 nt, Artificial Sequence
  Description of Artificial Sequence: Synthetic oligonucleotide
  Antisense Strand to SEQ ID NO: 438349
auucuucugcauuacacau

SEQ ID NO: 438351 - RNA, 19 nt, Artificial Sequence
  Description of Artificial Sequence: Synthetic oligonucleotide
  Sense strand starting at position 2491 of SEQ ID NO: 316760
uguaaugcagaagaaugua

SEQ ID NO: 438352 - RNA, 19 nt, Artificial Sequence
  Description of Artificial Sequence: Synthetic oligonucleotide
  Antisense Strand to SEQ ID NO: 438351
uacauucuucugcauuaca

SEQ ID NO: 438353 - RNA, 19 nt, Artificial Sequence
  Description of Artificial Sequence: Synthetic oligonucleotide
  Sense strand starting at position 2520 of SEQ ID NO: 316760
uaccuuacaccgcguauaa

SEQ ID NO: 438354 - RNA, 19 nt, Artificial Sequence
  Description of Artificial Sequence: Synthetic oligonucleotide
  Antisense Strand to SEQ ID NO: 438353
uuauacgcgguguaaggua

SEQ ID NO: 438355 - RNA, 19 nt, Artificial Sequence
  Description of Artificial Sequence: Synthetic oligonucleotide
  Sense strand starting at position 2685 of SEQ ID NO: 316760
ucuggaaauagugguggau

SEQ ID NO: 438356 - RNA, 19 nt, Artificial Sequence
  Description of Artificial Sequence: Synthetic oligonucleotide
  Antisense Strand to SEQ ID NO: 438355
auccaccacuauuuccaga

SEQ ID NO: 438357 - RNA, 19 nt, Artificial Sequence
  Description of Artificial Sequence: Synthetic oligonucleotide
  Sense strand starting at position 2720 of SEQ ID NO: 316760
gguacuuaaugccacaaua

SEQ ID NO: 438358 - RNA, 19 nt, Artificial Sequence
  Description of Artificial Sequence: Synthetic oligonucleotide
  Antisense Strand to SEQ ID NO: 438357
uauuguggcauuaaguacc

SEQ ID NO: 438359 - RNA, 19 nt, Artificial Sequence
  Description of Artificial Sequence: Synthetic oligonucleotide
  Sense strand starting at position 2730 of SEQ ID NO: 316760
gccacaauacuguaaaguu

SEQ ID NO: 438360 - RNA, 19 nt, Artificial Sequence
  Description of Artificial Sequence: Synthetic oligonucleotide
  Antisense Strand to SEQ ID NO: 438359
aacuuuacaguauuguggc

SEQ ID NO: 438361 - RNA, 19 nt, Artificial Sequence
  Description of Artificial Sequence: Synthetic oligonucleotide
  Sense strand starting at position 2820 of SEQ ID NO: 316760
gaaagaauauaacguguaa

SEQ ID NO: 438362 - RNA, 19 nt, Artificial Sequence
  Description of Artificial Sequence: Synthetic oligonucleotide
  Antisense Strand to SEQ ID NO: 438361
uuacacguuauauucuuuc

SEQ ID NO: 438363 - RNA, 19 nt, Artificial Sequence
  Description of Artificial Sequence: Synthetic oligonucleotide
  Sense strand starting at position 2824 of SEQ ID NO: 316760
gaauauaacguguaaugua

SEQ ID NO: 438364 - RNA, 19 nt, Artificial Sequence
  Description of Artificial Sequence: Synthetic oligonucleotide
  Antisense Strand to SEQ ID NO: 438363
uacauuacacguuauauuc

SEQ ID NO: 438365 - RNA, 19 nt, Artificial Sequence
  Description of Artificial Sequence: Synthetic oligonucleotide
  Sense strand starting at position 3047 of SEQ ID NO: 316760
uaugauauuugguagguau

SEQ ID NO: 438366 - RNA, 19 nt, Artificial Sequence
  Description of Artificial Sequence: Synthetic oligonucleotide
  Antisense Strand to SEQ ID NO: 438365
auaccuaccaaauaucaua

SEQ ID NO: 438367 - RNA, 19 nt, Artificial Sequence
  Description of Artificial Sequence: Synthetic oligonucleotide
  Sense strand starting at position 3638 of SEQ ID NO: 316760
uccugaagguaugcuauga

SEQ ID NO: 438368 - RNA, 19 nt, Artificial Sequence
  Description of Artificial Sequence: Synthetic oligonucleotide
  Antisense Strand to SEQ ID NO: 438367
ucauagcauaccuucagga

SEQ ID NO: 438369 - RNA, 19 nt, Artificial Sequence
  Description of Artificial Sequence: Synthetic oligonucleotide
  Sense strand starting at position 3642 of SEQ ID NO: 316760
gaagguaugcuaugaggag

SEQ ID NO: 438370 - RNA, 19 nt, Artificial Sequence
  Description of Artificial Sequence: Synthetic oligonucleotide
  Antisense Strand to SEQ ID NO: 438369
cuccucauagcauaccuuc

SEQ ID NO: 438371 - RNA, 19 nt, Artificial Sequence
  Description of Artificial Sequence: Synthetic oligonucleotide
  Sense strand starting at position 3795 of SEQ ID NO: 316760
gggauaaagucccaauacu

SEQ ID NO: 438372 - RNA, 19 nt, Artificial Sequence
  Description of Artificial Sequence: Synthetic oligonucleotide
  Antisense Strand to SEQ ID NO: 438371
aguauugggacuuuauccc

SEQ ID NO: 438373 - RNA, 19 nt, Artificial Sequence
  Description of Artificial Sequence: Synthetic oligonucleotide
  Sense strand starting at position 295 of SEQ ID NO: 316761
auaugcucagcccaaagau

SEQ ID NO: 438374 - RNA, 19 nt, Artificial Sequence
  Description of Artificial Sequence: Synthetic oligonucleotide
  Antisense Strand to SEQ ID NO: 438373
aucuuugggcugagcauau

SEQ ID NO: 438375 - RNA, 19 nt, Artificial Sequence
  Description of Artificial Sequence: Synthetic oligonucleotide
  Sense strand starting at position 349 of SEQ ID NO: 316761
gcuaacuaacuguagucau

SEQ ID NO: 438376 - RNA, 19 nt, Artificial Sequence
  Description of Artificial Sequence: Synthetic oligonucleotide
  Antisense Strand to SEQ ID NO: 438375
augacuacaguuaguuagc

SEQ ID NO: 438377 - RNA, 19 nt, Artificial Sequence
  Description of Artificial Sequence: Synthetic oligonucleotide
  Sense strand starting at position 353 of SEQ ID NO: 316761
acuaacuguagucauggua

SEQ ID NO: 438378 - RNA, 19 nt, Artificial Sequence
  Description of Artificial Sequence: Synthetic oligonucleotide
  Antisense Strand to SEQ ID NO: 438377
uaccaugacuacaguuagu

SEQ ID NO: 438379 - RNA, 19 nt, Artificial Sequence
  Description of Artificial Sequence: Synthetic oligonucleotide
  Sense strand starting at position 362 of SEQ ID NO: 316761
agucaugguacucguauuu

SEQ ID NO: 438380 - RNA, 19 nt, Artificial Sequence
  Description of Artificial Sequence: Synthetic oligonucleotide
  Antisense Strand to SEQ ID NO: 438379
aaauacgaguaccaugacu

SEQ ID NO: 438381 - RNA, 19 nt, Artificial Sequence
  Description of Artificial Sequence: Synthetic oligonucleotide
  Sense strand starting at position 373 of SEQ ID NO: 316761
ucguauuucuaagccaaau

SEQ ID NO: 438382 - RNA, 19 nt, Artificial Sequence
  Description of Artificial Sequence: Synthetic oligonucleotide
  Antisense Strand to SEQ ID NO: 438381
auuuggcuuagaaauacga

SEQ ID NO: 438383 - RNA, 19 nt, Artificial Sequence
  Description of Artificial Sequence: Synthetic oligonucleotide
  Sense strand starting at position 612 of SEQ ID NO: 316761
cugagucucuccuugguca

SEQ ID NO: 438384 - RNA, 19 nt, Artificial Sequence
  Description of Artificial Sequence: Synthetic oligonucleotide
  Antisense Strand to SEQ ID NO: 438383
ugaccaaggagagacucag

SEQ ID NO: 438385 - RNA, 19 nt, Artificial Sequence
  Description of Artificial Sequence: Synthetic oligonucleotide
  Sense strand starting at position 626 of SEQ ID NO: 316761
ggucacuccuuucuguaua

SEQ ID NO: 438386 - RNA, 19 nt, Artificial Sequence
  Description of Artificial Sequence: Synthetic oligonucleotide
  Antisense Strand to SEQ ID NO: 438385
uauacagaaaggagugacc

SEQ ID NO: 438387 - RNA, 19 nt, Artificial Sequence
  Description of Artificial Sequence: Synthetic oligonucleotide
  Sense strand starting at position 772 of SEQ ID NO: 316761
cugacaaauccagguguau

SEQ ID NO: 438388 - RNA, 19 nt, Artificial Sequence
  Description of Artificial Sequence: Synthetic oligonucleotide
  Antisense Strand to SEQ ID NO: 438387
auacaccuggauuugucag

SEQ ID NO: 438389 - RNA, 19 nt, Artificial Sequence
  Description of Artificial Sequence: Synthetic oligonucleotide
  Sense strand starting at position 787 of SEQ ID NO: 316761
guauuacuagcagggugua

SEQ ID NO: 438390 - RNA, 19 nt, Artificial Sequence
  Description of Artificial Sequence: Synthetic oligonucleotide
  Antisense Strand to SEQ ID NO: 438389
uacacccugcuaguaauac

SEQ ID NO: 438391 - RNA, 19 nt, Artificial Sequence
  Description of Artificial Sequence: Synthetic oligonucleotide
  Sense strand starting at position 1047 of SEQ ID NO: 316761
guggcuauacucuaaguuu

SEQ ID NO: 438392 - RNA, 19 nt, Artificial Sequence
  Description of Artificial Sequence: Synthetic oligonucleotide
  Antisense Strand to SEQ ID NO: 438391
aaacuuagaguauagccac

SEQ ID NO: 438393 - RNA, 19 nt, Artificial Sequence
  Description of Artificial Sequence: Synthetic oligonucleotide
  Sense strand starting at position 1107 of SEQ ID NO: 316761
uacauauauguguagaagu

SEQ ID NO: 438394 - RNA, 19 nt, Artificial Sequence
  Description of Artificial Sequence: Synthetic oligonucleotide
  Antisense Strand to SEQ ID NO: 438393
acuucuacacauauaugua

SEQ ID NO: 438395 - RNA, 19 nt, Artificial Sequence
  Description of Artificial Sequence: Synthetic oligonucleotide
  Sense strand starting at position 1109 of SEQ ID NO: 316761
cauauauguguagaaguau

SEQ ID NO: 438396 - RNA, 19 nt, Artificial Sequence
  Description of Artificial Sequence: Synthetic oligonucleotide
  Antisense Strand to SEQ ID NO: 438395
auacuucuacacauauaug

SEQ ID NO: 438397 - RNA, 19 nt, Artificial Sequence
  Description of Artificial Sequence: Synthetic oligonucleotide
  Sense strand starting at position 1245 of SEQ ID NO: 316761
guuagcugugguuaucuca

SEQ ID NO: 438398 - RNA, 19 nt, Artificial Sequence
  Description of Artificial Sequence: Synthetic oligonucleotide
  Antisense Strand to SEQ ID NO: 438397
ugagauaaccacagcuaac

SEQ ID NO: 438399 - RNA, 19 nt, Artificial Sequence
  Description of Artificial Sequence: Synthetic oligonucleotide
  Sense strand starting at position 1258 of SEQ ID NO: 316761
aucucagaguccuuucuua

SEQ ID NO: 438400 - RNA, 19 nt, Artificial Sequence
  Description of Artificial Sequence: Synthetic oligonucleotide
  Antisense Strand to SEQ ID NO: 438399
uaagaaaggacucugagau

SEQ ID NO: 438401 - RNA, 19 nt, Artificial Sequence
  Description of Artificial Sequence: Synthetic oligonucleotide
  Sense strand starting at position 2226 of SEQ ID NO: 316761
cgcagauaucacguugucu

SEQ ID NO: 438402 - RNA, 19 nt, Artificial Sequence
  Description of Artificial Sequence: Synthetic oligonucleotide
  Antisense Strand to SEQ ID NO: 438401
agacaacgugauaucugcg

SEQ ID NO: 438403 - RNA, 19 nt, Artificial Sequence
  Description of Artificial Sequence: Synthetic oligonucleotide
  Sense strand starting at position 2380 of SEQ ID NO: 316761
aaaugugaauuccuugagu

SEQ ID NO: 438404 - RNA, 19 nt, Artificial Sequence
  Description of Artificial Sequence: Synthetic oligonucleotide
  Antisense Strand to SEQ ID NO: 438403
acucaaggaauucacauuu

SEQ ID NO: 438405 - RNA, 19 nt, Artificial Sequence
  Description of Artificial Sequence: Synthetic oligonucleotide
  Sense strand starting at position 2382 of SEQ ID NO: 316761
augugaauuccuugaguca

SEQ ID NO: 438406 - RNA, 19 nt, Artificial Sequence
  Description of Artificial Sequence: Synthetic oligonucleotide
  Antisense Strand to SEQ ID NO: 438405
ugacucaaggaauucacau

SEQ ID NO: 438407 - RNA, 19 nt, Artificial Sequence
  Description of Artificial Sequence: Synthetic oligonucleotide
  Sense strand starting at position 2383 of SEQ ID NO: 316761
ugugaauuccuugagucag

SEQ ID NO: 438408 - RNA, 19 nt, Artificial Sequence
  Description of Artificial Sequence: Synthetic oligonucleotide
  Antisense Strand to SEQ ID NO: 438407
cugacucaaggaauucaca

SEQ ID NO: 438409 - RNA, 19 nt, Artificial Sequence
  Description of Artificial Sequence: Synthetic oligonucleotide
  Sense strand starting at position 2385 of SEQ ID NO: 316761
ugaauuccuugagucagag

SEQ ID NO: 438410 - RNA, 19 nt, Artificial Sequence
  Description of Artificial Sequence: Synthetic oligonucleotide
  Antisense Strand to SEQ ID NO: 438409
cucugacucaaggaauuca

SEQ ID NO: 438411 - RNA, 19 nt, Artificial Sequence
  Description of Artificial Sequence: Synthetic oligonucleotide
  Sense strand starting at position 2397 of SEQ ID NO: 316761
gucagagacuauucuacuc

SEQ ID NO: 438412 - RNA, 19 nt, Artificial Sequence
  Description of Artificial Sequence: Synthetic oligonucleotide
  Antisense Strand to SEQ ID NO: 438411
gaguagaauagucucugac

SEQ ID NO: 438413 - RNA, 19 nt, Artificial Sequence
  Description of Artificial Sequence: Synthetic oligonucleotide
  Sense strand starting at position 2445 of SEQ ID NO: 316761
gaaauaaaccguuauaguc

SEQ ID NO: 438414 - RNA, 19 nt, Artificial Sequence
  Description of Artificial Sequence: Synthetic oligonucleotide
  Antisense Strand to SEQ ID NO: 438413
gacuauaacgguuuauuuc

SEQ ID NO: 438415 - RNA, 19 nt, Artificial Sequence
  Description of Artificial Sequence: Synthetic oligonucleotide
  Sense strand starting at position 2623 of SEQ ID NO: 316761
agcucauaccuauggaaug

SEQ ID NO: 438416 - RNA, 19 nt, Artificial Sequence
  Description of Artificial Sequence: Synthetic oligonucleotide
  Antisense Strand to SEQ ID NO: 438415
cauuccauagguaugagcu

SEQ ID NO: 438417 - RNA, 19 nt, Artificial Sequence
  Description of Artificial Sequence: Synthetic oligonucleotide
  Sense strand starting at position 2740 of SEQ ID NO: 316761
ccuagaguuaaagaagugu

SEQ ID NO: 438418 - RNA, 19 nt, Artificial Sequence
  Description of Artificial Sequence: Synthetic oligonucleotide
  Antisense Strand to SEQ ID NO: 438417
acacuucuuuaacucuagg

SEQ ID NO: 438419 - RNA, 19 nt, Artificial Sequence
  Description of Artificial Sequence: Synthetic oligonucleotide
  Sense strand starting at position 2744 of SEQ ID NO: 316761
gaguuaaagaaguguagga

SEQ ID NO: 438420 - RNA, 19 nt, Artificial Sequence
  Description of Artificial Sequence: Synthetic oligonucleotide
  Antisense Strand to SEQ ID NO: 438419
uccuacacuucuuuaacuc

SEQ ID NO: 438421 - RNA, 19 nt, Artificial Sequence
  Description of Artificial Sequence: Synthetic oligonucleotide
  Sense strand starting at position 2787 of SEQ ID NO: 316761
auauuaauccagggcugac

SEQ ID NO: 438422 - RNA, 19 nt, Artificial Sequence
  Description of Artificial Sequence: Synthetic oligonucleotide
  Antisense Strand to SEQ ID NO: 438421
gucagcccuggauuaauau

SEQ ID NO: 438423 - RNA, 19 nt, Artificial Sequence
  Description of Artificial Sequence: Synthetic oligonucleotide
  Sense strand starting at position 2835 of SEQ ID NO: 316761
cugguauauucuuugcuua

SEQ ID NO: 438424 - RNA, 19 nt, Artificial Sequence
  Description of Artificial Sequence: Synthetic oligonucleotide
  Antisense Strand to SEQ ID NO: 438423
uaagcaaagaauauaccag

SEQ ID NO: 438425 - RNA, 19 nt, Artificial Sequence
  Description of Artificial Sequence: Synthetic oligonucleotide
  Sense strand starting at position 2836 of SEQ ID NO: 316761
ugguauauucuuugcuuaa

SEQ ID NO: 438426 - RNA, 19 nt, Artificial Sequence
  Description of Artificial Sequence: Synthetic oligonucleotide
  Antisense Strand to SEQ ID NO: 438425
uuaagcaaagaauauacca

SEQ ID NO: 438427 - RNA, 19 nt, Artificial Sequence
  Description of Artificial Sequence: Synthetic oligonucleotide
  Sense strand starting at position 2837 of SEQ ID NO: 316761
gguauauucuuugcuuaau

SEQ ID NO: 438428 - RNA, 19 nt, Artificial Sequence
  Description of Artificial Sequence: Synthetic oligonucleotide
  Antisense Strand to SEQ ID NO: 438427
auuaagcaaagaauauacc

SEQ ID NO: 438429 - RNA, 19 nt, Artificial Sequence
  Description of Artificial Sequence: Synthetic oligonucleotide
  Sense strand starting at position 2869 of SEQ ID NO: 316761
ugguuauuugugugucuca

SEQ ID NO: 438430 - RNA, 19 nt, Artificial Sequence
  Description of Artificial Sequence: Synthetic oligonucleotide
  Antisense Strand to SEQ ID NO: 438429
ugagacacacaaauaacca

SEQ ID NO: 438431 - RNA, 19 nt, Artificial Sequence
  Description of Artificial Sequence: Synthetic oligonucleotide
  Sense strand starting at position 2870 of SEQ ID NO: 316761
gguuauuugugugucucau

SEQ ID NO: 438432 - RNA, 19 nt, Artificial Sequence
  Description of Artificial Sequence: Synthetic oligonucleotide
  Antisense Strand to SEQ ID NO: 438431
augagacacacaaauaacc

SEQ ID NO: 438433 - RNA, 19 nt, Artificial Sequence
  Description of Artificial Sequence: Synthetic oligonucleotide
  Sense strand starting at position 3218 of SEQ ID NO: 316761
aagacagagcuuggcuuau

SEQ ID NO: 438434 - RNA, 19 nt, Artificial Sequence
  Description of Artificial Sequence: Synthetic oligonucleotide
  Antisense Strand to SEQ ID NO: 438433
auaagccaagcucugucuu

SEQ ID NO: 438435 - RNA, 19 nt, Artificial Sequence
  Description of Artificial Sequence: Synthetic oligonucleotide
  Sense strand starting at position 3220 of SEQ ID NO: 316761
gacagagcuuggcuuauau

SEQ ID NO: 438436 - RNA, 19 nt, Artificial Sequence
  Description of Artificial Sequence: Synthetic oligonucleotide
  Antisense Strand to SEQ ID NO: 438435
auauaagccaagcucuguc

SEQ ID NO: 438437 - RNA, 19 nt, Artificial Sequence
  Description of Artificial Sequence: Synthetic oligonucleotide
  Sense strand starting at position 3222 of SEQ ID NO: 316761
cagagcuuggcuuauauag

SEQ ID NO: 438438 - RNA, 19 nt, Artificial Sequence
  Description of Artificial Sequence: Synthetic oligonucleotide
  Antisense Strand to SEQ ID NO: 438437
cuauauaagccaagcucug

SEQ ID NO: 438439 - RNA, 19 nt, Artificial Sequence
  Description of Artificial Sequence: Synthetic oligonucleotide
  Sense strand starting at position 3229 of SEQ ID NO: 316761
uggcuuauauaggcuaaau

SEQ ID NO: 438440 - RNA, 19 nt, Artificial Sequence
  Description of Artificial Sequence: Synthetic oligonucleotide
  Antisense Strand to SEQ ID NO: 438439
auuuagccuauauaagcca

SEQ ID NO: 438441 - RNA, 19 nt, Artificial Sequence
  Description of Artificial Sequence: Synthetic oligonucleotide
  Sense strand starting at position 3231 of SEQ ID NO: 316761
gcuuauauaggcuaaauua

SEQ ID NO: 438442 - RNA, 19 nt, Artificial Sequence
  Description of Artificial Sequence: Synthetic oligonucleotide
  Antisense Strand to SEQ ID NO: 438441
uaauuuagccuauauaagc

SEQ ID NO: 438443 - RNA, 19 nt, Artificial Sequence
  Description of Artificial Sequence: Synthetic oligonucleotide
  Sense strand starting at position 3501 of SEQ ID NO: 316761
ggcuucuuagacuagguca

SEQ ID NO: 438444 - RNA, 19 nt, Artificial Sequence
  Description of Artificial Sequence: Synthetic oligonucleotide
  Antisense Strand to SEQ ID NO: 438443
ugaccuagucuaagaagcc

SEQ ID NO: 438445 - RNA, 19 nt, Artificial Sequence
  Description of Artificial Sequence: Synthetic oligonucleotide
  Sense strand starting at position 3544 of SEQ ID NO: 316761
uguuacuauccuuagagug

SEQ ID NO: 438446 - RNA, 19 nt, Artificial Sequence
  Description of Artificial Sequence: Synthetic oligonucleotide
  Antisense Strand to SEQ ID NO: 438445
cacucuaaggauaguaaca

SEQ ID NO: 438447 - RNA, 19 nt, Artificial Sequence
  Description of Artificial Sequence: Synthetic oligonucleotide
  Sense strand starting at position 3549 of SEQ ID NO: 316761
cuauccuuagagugaguaa

SEQ ID NO: 438448 - RNA, 19 nt, Artificial Sequence
  Description of Artificial Sequence: Synthetic oligonucleotide
  Antisense Strand to SEQ ID NO: 438447
uuacucacucuaaggauag

SEQ ID NO: 438449 - RNA, 19 nt, Artificial Sequence
  Description of Artificial Sequence: Synthetic oligonucleotide
  Sense strand starting at position 3552 of SEQ ID NO: 316761
uccuuagagugaguaaaug

SEQ ID NO: 438450 - RNA, 19 nt, Artificial Sequence
  Description of Artificial Sequence: Synthetic oligonucleotide
  Antisense Strand to SEQ ID NO: 438449
cauuuacucacucuaagga

SEQ ID NO: 438451 - RNA, 19 nt, Artificial Sequence
  Description of Artificial Sequence: Synthetic oligonucleotide
  Sense strand starting at position 3605 of SEQ ID NO: 316761
gugacaggauaaccugauu

SEQ ID NO: 438452 - RNA, 19 nt, Artificial Sequence
  Description of Artificial Sequence: Synthetic oligonucleotide
  Antisense Strand to SEQ ID NO: 438451
aaucagguuauccugucac

SEQ ID NO: 438453 - RNA, 19 nt, Artificial Sequence
  Description of Artificial Sequence: Synthetic oligonucleotide
  Sense strand starting at position 25 of SEQ ID NO: 316762
uuaguccuuccagauguau

SEQ ID NO: 438454 - RNA, 19 nt, Artificial Sequence
  Description of Artificial Sequence: Synthetic oligonucleotide
  Antisense Strand to SEQ ID NO: 438453
auacaucuggaaggacuaa

SEQ ID NO: 438455 - RNA, 19 nt, Artificial Sequence
  Description of Artificial Sequence: Synthetic oligonucleotide
  Sense strand starting at position 169 of SEQ ID NO: 316762
uggaauuucugacaacaaa

SEQ ID NO: 438456 - RNA, 19 nt, Artificial Sequence
  Description of Artificial Sequence: Synthetic oligonucleotide
  Antisense Strand to SEQ ID NO: 438455
uuuguugucagaaauucca

SEQ ID NO: 438457 - RNA, 19 nt, Artificial Sequence
  Description of Artificial Sequence: Synthetic oligonucleotide
  Sense strand starting at position 586 of SEQ ID NO: 316762
cuuccuugucuacaaguca

SEQ ID NO: 438458 - RNA, 19 nt, Artificial Sequence
  Description of Artificial Sequence: Synthetic oligonucleotide
  Antisense Strand to SEQ ID NO: 438457
ugacuuguagacaaggaag

SEQ ID NO: 438459 - RNA, 19 nt, Artificial Sequence
  Description of Artificial Sequence: Synthetic oligonucleotide
  Sense strand starting at position 623 of SEQ ID NO: 316762
ugugggagagguugugaaa

SEQ ID NO: 438460 - RNA, 19 nt, Artificial Sequence
  Description of Artificial Sequence: Synthetic oligonucleotide
  Antisense Strand to SEQ ID NO: 438459
uuucacaaccucucccaca

SEQ ID NO: 438461 - RNA, 19 nt, Artificial Sequence
  Description of Artificial Sequence: Synthetic oligonucleotide
  Sense strand starting at position 649 of SEQ ID NO: 316762
acucuagcaguuuaggauu

SEQ ID NO: 438462 - RNA, 19 nt, Artificial Sequence
  Description of Artificial Sequence: Synthetic oligonucleotide
  Antisense Strand to SEQ ID NO: 438461
aauccuaaacugcuagagu

SEQ ID NO: 438463 - RNA, 19 nt, Artificial Sequence
  Description of Artificial Sequence: Synthetic oligonucleotide
  Sense strand starting at position 690 of SEQ ID NO: 316762
gcuguuagaggucauuaaa

SEQ ID NO: 438464 - RNA, 19 nt, Artificial Sequence
  Description of Artificial Sequence: Synthetic oligonucleotide
  Antisense Strand to SEQ ID NO: 438463
uuuaaugaccucuaacagc

SEQ ID NO: 438465 - RNA, 19 nt, Artificial Sequence
  Description of Artificial Sequence: Synthetic oligonucleotide
  Sense strand starting at position 722 of SEQ ID NO: 316762
auagaaugucacuggacca

SEQ ID NO: 438466 - RNA, 19 nt, Artificial Sequence
  Description of Artificial Sequence: Synthetic oligonucleotide
  Antisense Strand to SEQ ID NO: 438465
ugguccagugacauucuau

SEQ ID NO: 438467 - RNA, 19 nt, Artificial Sequence
  Description of Artificial Sequence: Synthetic oligonucleotide
  Sense strand starting at position 785 of SEQ ID NO: 316762
acagucaauggcuaagagu

SEQ ID NO: 438468 - RNA, 19 nt, Artificial Sequence
  Description of Artificial Sequence: Synthetic oligonucleotide
  Antisense Strand to SEQ ID NO: 438467
acucuuagccauugacugu

SEQ ID NO: 438469 - RNA, 19 nt, Artificial Sequence
  Description of Artificial Sequence: Synthetic oligonucleotide
  Sense strand starting at position 944 of SEQ ID NO: 316762
aaggcaaagcaucgagaaa

SEQ ID NO: 438470 - RNA, 19 nt, Artificial Sequence
  Description of Artificial Sequence: Synthetic oligonucleotide
  Antisense Strand to SEQ ID NO: 438469
uuucucgaugcuuugccuu

SEQ ID NO: 438471 - RNA, 19 nt, Artificial Sequence
  Description of Artificial Sequence: Synthetic oligonucleotide
  Sense strand starting at position 1078 of SEQ ID NO: 316762
gccauaauuccagaguaaa

SEQ ID NO: 438472 - RNA, 19 nt, Artificial Sequence
  Description of Artificial Sequence: Synthetic oligonucleotide
  Antisense Strand to SEQ ID NO: 438471
uuuacucuggaauuauggc

SEQ ID NO: 438473 - RNA, 19 nt, Artificial Sequence
  Description of Artificial Sequence: Synthetic oligonucleotide
  Sense strand starting at position 1272 of SEQ ID NO: 316762
aggaaucaguaagccuaua

SEQ ID NO: 438474 - RNA, 19 nt, Artificial Sequence
  Description of Artificial Sequence: Synthetic oligonucleotide
  Antisense Strand to SEQ ID NO: 438473
uauaggcuuacugauuccu

SEQ ID NO: 438475 - RNA, 19 nt, Artificial Sequence
  Description of Artificial Sequence: Synthetic oligonucleotide
  Sense strand starting at position 1367 of SEQ ID NO: 316762
agcauauacuaguugggua

SEQ ID NO: 438476 - RNA, 19 nt, Artificial Sequence
  Description of Artificial Sequence: Synthetic oligonucleotide
  Antisense Strand to SEQ ID NO: 438475
uacccaacuaguauaugcu

SEQ ID NO: 438477 - RNA, 19 nt, Artificial Sequence
  Description of Artificial Sequence: Synthetic oligonucleotide
  Sense strand starting at position 1369 of SEQ ID NO: 316762
cauauacuaguuggguaua

SEQ ID NO: 438478 - RNA, 19 nt, Artificial Sequence
  Description of Artificial Sequence: Synthetic oligonucleotide
  Antisense Strand to SEQ ID NO: 438477
uauacccaacuaguauaug

SEQ ID NO: 438479 - RNA, 19 nt, Artificial Sequence
  Description of Artificial Sequence: Synthetic oligonucleotide
  Sense strand starting at position 1371 of SEQ ID NO: 316762
uauacuaguuggguauaua

SEQ ID NO: 438480 - RNA, 19 nt, Artificial Sequence
  Description of Artificial Sequence: Synthetic oligonucleotide
  Antisense Strand to SEQ ID NO: 438479
uauauacccaacuaguaua

SEQ ID NO: 438481 - RNA, 19 nt, Artificial Sequence
  Description of Artificial Sequence: Synthetic oligonucleotide
  Sense strand starting at position 2033 of SEQ ID NO: 316762
gggauagucggcaguucug

SEQ ID NO: 438482 - RNA, 19 nt, Artificial Sequence
  Description of Artificial Sequence: Synthetic oligonucleotide
  Antisense Strand to SEQ ID NO: 438481
cagaacugccgacuauccc

SEQ ID NO: 438483 - RNA, 19 nt, Artificial Sequence
  Description of Artificial Sequence: Synthetic oligonucleotide
  Sense strand starting at position 2065 of SEQ ID NO: 316762
gagguacccugaguucuga

SEQ ID NO: 438484 - RNA, 19 nt, Artificial Sequence
  Description of Artificial Sequence: Synthetic oligonucleotide
  Antisense Strand to SEQ ID NO: 438483
ucagaacucaggguaccuc

SEQ ID NO: 438485 - RNA, 19 nt, Artificial Sequence
  Description of Artificial Sequence: Synthetic oligonucleotide
  Sense strand starting at position 2088 of SEQ ID NO: 316762
cguagugcuguuucuggua

SEQ ID NO: 438486 - RNA, 19 nt, Artificial Sequence
  Description of Artificial Sequence: Synthetic oligonucleotide
  Antisense Strand to SEQ ID NO: 438485
uaccagaaacagcacuacg

SEQ ID NO: 438487 - RNA, 19 nt, Artificial Sequence
  Description of Artificial Sequence: Synthetic oligonucleotide
  Sense strand starting at position 2103 of SEQ ID NO: 316762
gguauucucaucgcgguca

SEQ ID NO: 438488 - RNA, 19 nt, Artificial Sequence
  Description of Artificial Sequence: Synthetic oligonucleotide
  Antisense Strand to SEQ ID NO: 438487
ugaccgcgaugagaauacc

SEQ ID NO: 438489 - RNA, 19 nt, Artificial Sequence
  Description of Artificial Sequence: Synthetic oligonucleotide
  Sense strand starting at position 2137 of SEQ ID NO: 316762
acaaguaaaguuugaauca

SEQ ID NO: 438490 - RNA, 19 nt, Artificial Sequence
  Description of Artificial Sequence: Synthetic oligonucleotide
  Antisense Strand to SEQ ID NO: 438489
ugauucaaacuuuacuugu

SEQ ID NO: 438491 - RNA, 19 nt, Artificial Sequence
  Description of Artificial Sequence: Synthetic oligonucleotide
  Sense strand starting at position 2387 of SEQ ID NO: 316762
agaguuugcgaccaaugac

SEQ ID NO: 438492 - RNA, 19 nt, Artificial Sequence
  Description of Artificial Sequence: Synthetic oligonucleotide
  Antisense Strand to SEQ ID NO: 438491
gucauuggucgcaaacucu

SEQ ID NO: 438493 - RNA, 19 nt, Artificial Sequence
  Description of Artificial Sequence: Synthetic oligonucleotide
  Sense strand starting at position 2413 of SEQ ID NO: 316762
agcaucuugagugacagua

SEQ ID NO: 438494 - RNA, 19 nt, Artificial Sequence
  Description of Artificial Sequence: Synthetic oligonucleotide
  Antisense Strand to SEQ ID NO: 438493
uacugucacucaagaugcu

SEQ ID NO: 438495 - RNA, 19 nt, Artificial Sequence
  Description of Artificial Sequence: Synthetic oligonucleotide
  Sense strand starting at position 2477 of SEQ ID NO: 316762
ggguguguuccuucuguuu

SEQ ID NO: 438496 - RNA, 19 nt, Artificial Sequence
  Description of Artificial Sequence: Synthetic oligonucleotide
  Antisense Strand to SEQ ID NO: 438495
aaacagaaggaacacaccc

SEQ ID NO: 438497 - RNA, 19 nt, Artificial Sequence
  Description of Artificial Sequence: Synthetic oligonucleotide
  Sense strand starting at position 2680 of SEQ ID NO: 316762
acacaaguauaguuaagau

SEQ ID NO: 438498 - RNA, 19 nt, Artificial Sequence
  Description of Artificial Sequence: Synthetic oligonucleotide
  Antisense Strand to SEQ ID NO: 438497
aucuuaacuauacuugugu

SEQ ID NO: 438499 - RNA, 19 nt, Artificial Sequence
  Description of Artificial Sequence: Synthetic oligonucleotide
  Sense strand starting at position 2692 of SEQ ID NO: 316762
uuaagaucacgauggauug

SEQ ID NO: 438500 - RNA, 19 nt, Artificial Sequence
  Description of Artificial Sequence: Synthetic oligonucleotide
  Antisense Strand to SEQ ID NO: 438499
caauccaucgugaucuuaa

SEQ ID NO: 438501 - RNA, 19 nt, Artificial Sequence
  Description of Artificial Sequence: Synthetic oligonucleotide
  Sense strand starting at position 2722 of SEQ ID NO: 316762
aguagucaaacuuggguua

SEQ ID NO: 438502 - RNA, 19 nt, Artificial Sequence
  Description of Artificial Sequence: Synthetic oligonucleotide
  Antisense Strand to SEQ ID NO: 438501
uaacccaaguuugacuacu

SEQ ID NO: 438503 - RNA, 19 nt, Artificial Sequence
  Description of Artificial Sequence: Synthetic oligonucleotide
  Sense strand starting at position 2725 of SEQ ID NO: 316762
agucaaacuuggguuauaa

SEQ ID NO: 438504 - RNA, 19 nt, Artificial Sequence
  Description of Artificial Sequence: Synthetic oligonucleotide
  Antisense Strand to SEQ ID NO: 438503
uuauaacccaaguuugacu

SEQ ID NO: 438505 - RNA, 19 nt, Artificial Sequence
  Description of Artificial Sequence: Synthetic oligonucleotide
  Sense strand starting at position 2762 of SEQ ID NO: 316762
uuuauuuguuucucagcga

SEQ ID NO: 438506 - RNA, 19 nt, Artificial Sequence
  Description of Artificial Sequence: Synthetic oligonucleotide
  Antisense Strand to SEQ ID NO: 438505
ucgcugagaaacaaauaaa

SEQ ID NO: 438507 - RNA, 19 nt, Artificial Sequence
  Description of Artificial Sequence: Synthetic oligonucleotide
  Sense strand starting at position 2791 of SEQ ID NO: 316762
aucucuuacguagaagguu

SEQ ID NO: 438508 - RNA, 19 nt, Artificial Sequence
  Description of Artificial Sequence: Synthetic oligonucleotide
  Antisense Strand to SEQ ID NO: 438507
aaccuucuacguaagagau

SEQ ID NO: 438509 - RNA, 19 nt, Artificial Sequence
  Description of Artificial Sequence: Synthetic oligonucleotide
  Sense strand starting at position 2799 of SEQ ID NO: 316762
cguagaagguucucaauau

SEQ ID NO: 438510 - RNA, 19 nt, Artificial Sequence
  Description of Artificial Sequence: Synthetic oligonucleotide
  Antisense Strand to SEQ ID NO: 438509
auauugagaaccuucuacg

SEQ ID NO: 438511 - RNA, 19 nt, Artificial Sequence
  Description of Artificial Sequence: Synthetic oligonucleotide
  Sense strand starting at position 2959 of SEQ ID NO: 316762
cuagguguauauccacaaa

SEQ ID NO: 438512 - RNA, 19 nt, Artificial Sequence
  Description of Artificial Sequence: Synthetic oligonucleotide
  Antisense Strand to SEQ ID NO: 438511
uuuguggauauacaccuag

SEQ ID NO: 438513 - RNA, 19 nt, Artificial Sequence
  Description of Artificial Sequence: Synthetic oligonucleotide
  Sense strand starting at position 3082 of SEQ ID NO: 316762
guaggagcucuacacacuu

SEQ ID NO: 438514 - RNA, 19 nt, Artificial Sequence
  Description of Artificial Sequence: Synthetic oligonucleotide
  Antisense Strand to SEQ ID NO: 438513
aaguguguagagcuccuac

SEQ ID NO: 438515 - RNA, 19 nt, Artificial Sequence
  Description of Artificial Sequence: Synthetic oligonucleotide
  Sense strand starting at position 3219 of SEQ ID NO: 316762
cugacaauaugucugauga

SEQ ID NO: 438516 - RNA, 19 nt, Artificial Sequence
  Description of Artificial Sequence: Synthetic oligonucleotide
  Antisense Strand to SEQ ID NO: 438515
ucaucagacauauugucag

SEQ ID NO: 438517 - RNA, 19 nt, Artificial Sequence
  Description of Artificial Sequence: Synthetic oligonucleotide
  Sense strand starting at position 3220 of SEQ ID NO: 316762
ugacaauaugucugaugag

SEQ ID NO: 438518 - RNA, 19 nt, Artificial Sequence
  Description of Artificial Sequence: Synthetic oligonucleotide
  Antisense Strand to SEQ ID NO: 438517
cucaucagacauauuguca

SEQ ID NO: 438519 - RNA, 19 nt, Artificial Sequence
  Description of Artificial Sequence: Synthetic oligonucleotide
  Sense strand starting at position 3316 of SEQ ID NO: 316762
guuucuguacaucaggaau

SEQ ID NO: 438520 - RNA, 19 nt, Artificial Sequence
  Description of Artificial Sequence: Synthetic oligonucleotide
  Antisense Strand to SEQ ID NO: 438519
auuccugauguacagaaac

SEQ ID NO: 438521 - RNA, 19 nt, Artificial Sequence
  Description of Artificial Sequence: Synthetic oligonucleotide
  Sense strand starting at position 3504 of SEQ ID NO: 316762
guguguuuacuguugcuag

SEQ ID NO: 438522 - RNA, 19 nt, Artificial Sequence
  Description of Artificial Sequence: Synthetic oligonucleotide
  Antisense Strand to SEQ ID NO: 438521
cuagcaacaguaaacacac

SEQ ID NO: 438523 - RNA, 19 nt, Artificial Sequence
  Description of Artificial Sequence: Synthetic oligonucleotide
  Sense strand starting at position 3577 of SEQ ID NO: 316762
uuaaucacaguguguugaa

SEQ ID NO: 438524 - RNA, 19 nt, Artificial Sequence
  Description of Artificial Sequence: Synthetic oligonucleotide
  Antisense Strand to SEQ ID NO: 438523
uucaacacacugugauuaa

SEQ ID NO: 438525 - RNA, 19 nt, Artificial Sequence
  Description of Artificial Sequence: Synthetic oligonucleotide
  Sense strand starting at position 3578 of SEQ ID NO: 316762
uaaucacaguguguugaaa

SEQ ID NO: 438526 - RNA, 19 nt, Artificial Sequence
  Description of Artificial Sequence: Synthetic oligonucleotide
  Antisense Strand to SEQ ID NO: 438525
uuucaacacacugugauua

SEQ ID NO: 438527 - RNA, 19 nt, Artificial Sequence
  Description of Artificial Sequence: Synthetic oligonucleotide
  Sense strand starting at position 3586 of SEQ ID NO: 316762
guguguugaaauuagucau

SEQ ID NO: 438528 - RNA, 19 nt, Artificial Sequence
  Description of Artificial Sequence: Synthetic oligonucleotide
  Antisense Strand to SEQ ID NO: 438527
augacuaauuucaacacac

SEQ ID NO: 438529 - RNA, 19 nt, Artificial Sequence
  Description of Artificial Sequence: Synthetic oligonucleotide
  Sense strand starting at position 3693 of SEQ ID NO: 316762
gcacuauuccauugacuga

SEQ ID NO: 438530 - RNA, 19 nt, Artificial Sequence
  Description of Artificial Sequence: Synthetic oligonucleotide
  Antisense Strand to SEQ ID NO: 438529
ucagucaauggaauagugc

SEQ ID NO: 438531 - RNA, 19 nt, Artificial Sequence
  Description of Artificial Sequence: Synthetic oligonucleotide
  Sense strand starting at position 3704 of SEQ ID NO: 316762
uugacugacccaugauaau

SEQ ID NO: 438532 - RNA, 19 nt, Artificial Sequence
  Description of Artificial Sequence: Synthetic oligonucleotide
  Antisense Strand to SEQ ID NO: 438531
auuaucaugggucagucaa

SEQ ID NO: 438533 - RNA, 19 nt, Artificial Sequence
  Description of Artificial Sequence: Synthetic oligonucleotide
  Sense strand starting at position 77 of SEQ ID NO: 316763
ugaggacuacucuggcuuu

SEQ ID NO: 438534 - RNA, 19 nt, Artificial Sequence
  Description of Artificial Sequence: Synthetic oligonucleotide
  Antisense Strand to SEQ ID NO: 438533
aaagccagaguaguccuca

SEQ ID NO: 438535 - RNA, 19 nt, Artificial Sequence
  Description of Artificial Sequence: Synthetic oligonucleotide
  Sense strand starting at position 80 of SEQ ID NO: 316763
ggacuacucuggcuuuaac

SEQ ID NO: 438536 - RNA, 19 nt, Artificial Sequence
  Description of Artificial Sequence: Synthetic oligonucleotide
  Antisense Strand to SEQ ID NO: 438535
guuaaagccagaguagucc

SEQ ID NO: 438537 - RNA, 19 nt, Artificial Sequence
  Description of Artificial Sequence: Synthetic oligonucleotide
  Sense strand starting at position 124 of SEQ ID NO: 316763
gccacuggccaauauagua

SEQ ID NO: 438538 - RNA, 19 nt, Artificial Sequence
  Description of Artificial Sequence: Synthetic oligonucleotide
  Antisense Strand to SEQ ID NO: 438537
uacuauauuggccaguggc

SEQ ID NO: 438539 - RNA, 19 nt, Artificial Sequence
  Description of Artificial Sequence: Synthetic oligonucleotide
  Sense strand starting at position 184 of SEQ ID NO: 316763
acaauucuucuagggauac

SEQ ID NO: 438540 - RNA, 19 nt, Artificial Sequence
  Description of Artificial Sequence: Synthetic oligonucleotide
  Antisense Strand to SEQ ID NO: 438539
guaucccuagaagaauugu

SEQ ID NO: 438541 - RNA, 19 nt, Artificial Sequence
  Description of Artificial Sequence: Synthetic oligonucleotide
  Sense strand starting at position 196 of SEQ ID NO: 316763
gggauaccuucuucccagu

SEQ ID NO: 438542 - RNA, 19 nt, Artificial Sequence
  Description of Artificial Sequence: Synthetic oligonucleotide
  Antisense Strand to SEQ ID NO: 438541
acugggaagaagguauccc

SEQ ID NO: 438543 - RNA, 19 nt, Artificial Sequence
  Description of Artificial Sequence: Synthetic oligonucleotide
  Sense strand starting at position 252 of SEQ ID NO: 316763
uuaguccuuccagauguau

SEQ ID NO: 438544 - RNA, 19 nt, Artificial Sequence
  Description of Artificial Sequence: Synthetic oligonucleotide
  Antisense Strand to SEQ ID NO: 438543
auacaucuggaaggacuaa

SEQ ID NO: 438545 - RNA, 19 nt, Artificial Sequence
  Description of Artificial Sequence: Synthetic oligonucleotide
  Sense strand starting at position 396 of SEQ ID NO: 316763
uggaauuucugacaacaaa

SEQ ID NO: 438546 - RNA, 19 nt, Artificial Sequence
  Description of Artificial Sequence: Synthetic oligonucleotide
  Antisense Strand to SEQ ID NO: 438545
uuuguugucagaaauucca

SEQ ID NO: 438547 - RNA, 19 nt, Artificial Sequence
  Description of Artificial Sequence: Synthetic oligonucleotide
  Sense strand starting at position 813 of SEQ ID NO: 316763
cuuccuugucuacaaguca

SEQ ID NO: 438548 - RNA, 19 nt, Artificial Sequence
  Description of Artificial Sequence: Synthetic oligonucleotide
  Antisense Strand to SEQ ID NO: 438547
ugacuuguagacaaggaag

SEQ ID NO: 438549 - RNA, 19 nt, Artificial Sequence
  Description of Artificial Sequence: Synthetic oligonucleotide
  Sense strand starting at position 850 of SEQ ID NO: 316763
ugugggagagguugugaaa

SEQ ID NO: 438550 - RNA, 19 nt, Artificial Sequence
  Description of Artificial Sequence: Synthetic oligonucleotide
  Antisense Strand to SEQ ID NO: 438549
uuucacaaccucucccaca

SEQ ID NO: 438551 - RNA, 19 nt, Artificial Sequence
  Description of Artificial Sequence: Synthetic oligonucleotide
  Sense strand starting at position 876 of SEQ ID NO: 316763
acucuagcaguuuaggauu

SEQ ID NO: 438552 - RNA, 19 nt, Artificial Sequence
  Description of Artificial Sequence: Synthetic oligonucleotide
  Antisense Strand to SEQ ID NO: 438551
aauccuaaacugcuagagu

SEQ ID NO: 438553 - RNA, 19 nt, Artificial Sequence
  Description of Artificial Sequence: Synthetic oligonucleotide
  Sense strand starting at position 917 of SEQ ID NO: 316763
gcuguuagaggucauuaaa

SEQ ID NO: 438554 - RNA, 19 nt, Artificial Sequence
  Description of Artificial Sequence: Synthetic oligonucleotide
  Antisense Strand to SEQ ID NO: 438553
uuuaaugaccucuaacagc

SEQ ID NO: 438555 - RNA, 19 nt, Artificial Sequence
  Description of Artificial Sequence: Synthetic oligonucleotide
  Sense strand starting at position 949 of SEQ ID NO: 316763
auagaaugucacuggacca

SEQ ID NO: 438556 - RNA, 19 nt, Artificial Sequence
  Description of Artificial Sequence: Synthetic oligonucleotide
  Antisense Strand to SEQ ID NO: 438555
ugguccagugacauucuau

SEQ ID NO: 438557 - RNA, 19 nt, Artificial Sequence
  Description of Artificial Sequence: Synthetic oligonucleotide
  Sense strand starting at position 1012 of SEQ ID NO: 316763
acagucaauggcuaagagu

SEQ ID NO: 438558 - RNA, 19 nt, Artificial Sequence
  Description of Artificial Sequence: Synthetic oligonucleotide
  Antisense Strand to SEQ ID NO: 438557
acucuuagccauugacugu

SEQ ID NO: 438559 - RNA, 19 nt, Artificial Sequence
  Description of Artificial Sequence: Synthetic oligonucleotide
  Sense strand starting at position 1171 of SEQ ID NO: 316763
aaggcaaagcaucgagaaa

SEQ ID NO: 438560 - RNA, 19 nt, Artificial Sequence
  Description of Artificial Sequence: Synthetic oligonucleotide
  Antisense Strand to SEQ ID NO: 438559
uuucucgaugcuuugccuu

SEQ ID NO: 438561 - RNA, 19 nt, Artificial Sequence
  Description of Artificial Sequence: Synthetic oligonucleotide
  Sense strand starting at position 1305 of SEQ ID NO: 316763
gccauaauuccagaguaaa

SEQ ID NO: 438562 - RNA, 19 nt, Artificial Sequence
  Description of Artificial Sequence: Synthetic oligonucleotide
  Antisense Strand to SEQ ID NO: 438561
uuuacucuggaauuauggc

SEQ ID NO: 438563 - RNA, 19 nt, Artificial Sequence
  Description of Artificial Sequence: Synthetic oligonucleotide
  Sense strand starting at position 1499 of SEQ ID NO: 316763
aggaaucaguaagccuaua

SEQ ID NO: 438564 - RNA, 19 nt, Artificial Sequence
  Description of Artificial Sequence: Synthetic oligonucleotide
  Antisense Strand to SEQ ID NO: 438563
uauaggcuuacugauuccu

SEQ ID NO: 438565 - RNA, 19 nt, Artificial Sequence
  Description of Artificial Sequence: Synthetic oligonucleotide
  Sense strand starting at position 1596 of SEQ ID NO: 316763
cauauacuaguuggguaua

SEQ ID NO: 438566 - RNA, 19 nt, Artificial Sequence
  Description of Artificial Sequence: Synthetic oligonucleotide
  Antisense Strand to SEQ ID NO: 438565
uauacccaacuaguauaug

SEQ ID NO: 438567 - RNA, 19 nt, Artificial Sequence
  Description of Artificial Sequence: Synthetic oligonucleotide
  Sense strand starting at position 1598 of SEQ ID NO: 316763
uauacuaguuggguauaua

SEQ ID NO: 438568 - RNA, 19 nt, Artificial Sequence
  Description of Artificial Sequence: Synthetic oligonucleotide
  Antisense Strand to SEQ ID NO: 438567
uauauacccaacuaguaua

SEQ ID NO: 438569 - RNA, 19 nt, Artificial Sequence
  Description of Artificial Sequence: Synthetic oligonucleotide
  Sense strand starting at position 2260 of SEQ ID NO: 316763
gggauagucggcaguucug

SEQ ID NO: 438570 - RNA, 19 nt, Artificial Sequence
  Description of Artificial Sequence: Synthetic oligonucleotide
  Antisense Strand to SEQ ID NO: 438569
cagaacugccgacuauccc

SEQ ID NO: 438571 - RNA, 19 nt, Artificial Sequence
  Description of Artificial Sequence: Synthetic oligonucleotide
  Sense strand starting at position 2292 of SEQ ID NO: 316763
gagguacccugaguucuga

SEQ ID NO: 438572 - RNA, 19 nt, Artificial Sequence
  Description of Artificial Sequence: Synthetic oligonucleotide
  Antisense Strand to SEQ ID NO: 438571
ucagaacucaggguaccuc

SEQ ID NO: 438573 - RNA, 19 nt, Artificial Sequence
  Description of Artificial Sequence: Synthetic oligonucleotide
  Sense strand starting at position 2315 of SEQ ID NO: 316763
cguagugcuguuucuggua

SEQ ID NO: 438574 - RNA, 19 nt, Artificial Sequence
  Description of Artificial Sequence: Synthetic oligonucleotide
  Antisense Strand to SEQ ID NO: 438573
uaccagaaacagcacuacg

SEQ ID NO: 438575 - RNA, 19 nt, Artificial Sequence
  Description of Artificial Sequence: Synthetic oligonucleotide
  Sense strand starting at position 2330 of SEQ ID NO: 316763
gguauucucaucgcgguca

SEQ ID NO: 438576 - RNA, 19 nt, Artificial Sequence
  Description of Artificial Sequence: Synthetic oligonucleotide
  Antisense Strand to SEQ ID NO: 438575
ugaccgcgaugagaauacc

SEQ ID NO: 438577 - RNA, 19 nt, Artificial Sequence
  Description of Artificial Sequence: Synthetic oligonucleotide
  Sense strand starting at position 2364 of SEQ ID NO: 316763
acaaguaaaguuugaauca

SEQ ID NO: 438578 - RNA, 19 nt, Artificial Sequence
  Description of Artificial Sequence: Synthetic oligonucleotide
  Antisense Strand to SEQ ID NO: 438577
ugauucaaacuuuacuugu

SEQ ID NO: 438579 - RNA, 19 nt, Artificial Sequence
  Description of Artificial Sequence: Synthetic oligonucleotide
  Sense strand starting at position 2614 of SEQ ID NO: 316763
agaguuugcgaccaaugac

SEQ ID NO: 438580 - RNA, 19 nt, Artificial Sequence
  Description of Artificial Sequence: Synthetic oligonucleotide
  Antisense Strand to SEQ ID NO: 438579
gucauuggucgcaaacucu

SEQ ID NO: 438581 - RNA, 19 nt, Artificial Sequence
  Description of Artificial Sequence: Synthetic oligonucleotide
  Sense strand starting at position 2640 of SEQ ID NO: 316763
agcaucuugagugacagua

SEQ ID NO: 438582 - RNA, 19 nt, Artificial Sequence
  Description of Artificial Sequence: Synthetic oligonucleotide
  Antisense Strand to SEQ ID NO: 438581
uacugucacucaagaugcu

SEQ ID NO: 438583 - RNA, 19 nt, Artificial Sequence
  Description of Artificial Sequence: Synthetic oligonucleotide
  Sense strand starting at position 2704 of SEQ ID NO: 316763
ggguguguuccuucuguuu

SEQ ID NO: 438584 - RNA, 19 nt, Artificial Sequence
  Description of Artificial Sequence: Synthetic oligonucleotide
  Antisense Strand to SEQ ID NO: 438583
aaacagaaggaacacaccc

SEQ ID NO: 438585 - RNA, 19 nt, Artificial Sequence
  Description of Artificial Sequence: Synthetic oligonucleotide
  Sense strand starting at position 2907 of SEQ ID NO: 316763
acacaaguauaguuaagau

SEQ ID NO: 438586 - RNA, 19 nt, Artificial Sequence
  Description of Artificial Sequence: Synthetic oligonucleotide
  Antisense Strand to SEQ ID NO: 438585
aucuuaacuauacuugugu

SEQ ID NO: 438587 - RNA, 19 nt, Artificial Sequence
  Description of Artificial Sequence: Synthetic oligonucleotide
  Sense strand starting at position 2919 of SEQ ID NO: 316763
uuaagaucacgauggauug

SEQ ID NO: 438588 - RNA, 19 nt, Artificial Sequence
  Description of Artificial Sequence: Synthetic oligonucleotide
  Antisense Strand to SEQ ID NO: 438587
caauccaucgugaucuuaa

SEQ ID NO: 438589 - RNA, 19 nt, Artificial Sequence
  Description of Artificial Sequence: Synthetic oligonucleotide
  Sense strand starting at position 2952 of SEQ ID NO: 316763
agucaaacuuggguuauaa

SEQ ID NO: 438590 - RNA, 19 nt, Artificial Sequence
  Description of Artificial Sequence: Synthetic oligonucleotide
  Antisense Strand to SEQ ID NO: 438589
uuauaacccaaguuugacu

SEQ ID NO: 438591 - RNA, 19 nt, Artificial Sequence
  Description of Artificial Sequence: Synthetic oligonucleotide
  Sense strand starting at position 2989 of SEQ ID NO: 316763
uuuauuuguuucucagcga

SEQ ID NO: 438592 - RNA, 19 nt, Artificial Sequence
  Description of Artificial Sequence: Synthetic oligonucleotide
  Antisense Strand to SEQ ID NO: 438591
ucgcugagaaacaaauaaa

SEQ ID NO: 438593 - RNA, 19 nt, Artificial Sequence
  Description of Artificial Sequence: Synthetic oligonucleotide
  Sense strand starting at position 3018 of SEQ ID NO: 316763
aucucuuacguagaagguu

SEQ ID NO: 438594 - RNA, 19 nt, Artificial Sequence
  Description of Artificial Sequence: Synthetic oligonucleotide
  Antisense Strand to SEQ ID NO: 438593
aaccuucuacguaagagau

SEQ ID NO: 438595 - RNA, 19 nt, Artificial Sequence
  Description of Artificial Sequence: Synthetic oligonucleotide
  Sense strand starting at position 3186 of SEQ ID NO: 316763
cuagguguauauccacaaa

SEQ ID NO: 438596 - RNA, 19 nt, Artificial Sequence
  Description of Artificial Sequence: Synthetic oligonucleotide
  Antisense Strand to SEQ ID NO: 438595
uuuguggauauacaccuag

SEQ ID NO: 438597 - RNA, 19 nt, Artificial Sequence
  Description of Artificial Sequence: Synthetic oligonucleotide
  Sense strand starting at position 3309 of SEQ ID NO: 316763
guaggagcucuacacacuu

SEQ ID NO: 438598 - RNA, 19 nt, Artificial Sequence
  Description of Artificial Sequence: Synthetic oligonucleotide
  Antisense Strand to SEQ ID NO: 438597
aaguguguagagcuccuac

SEQ ID NO: 438599 - RNA, 19 nt, Artificial Sequence
  Description of Artificial Sequence: Synthetic oligonucleotide
  Sense strand starting at position 3446 of SEQ ID NO: 316763
cugacaauaugucugauga

SEQ ID NO: 438600 - RNA, 19 nt, Artificial Sequence
  Description of Artificial Sequence: Synthetic oligonucleotide
  Antisense Strand to SEQ ID NO: 438599
ucaucagacauauugucag

SEQ ID NO: 438601 - RNA, 19 nt, Artificial Sequence
  Description of Artificial Sequence: Synthetic oligonucleotide
  Sense strand starting at position 3447 of SEQ ID NO: 316763
ugacaauaugucugaugag

SEQ ID NO: 438602 - RNA, 19 nt, Artificial Sequence
  Description of Artificial Sequence: Synthetic oligonucleotide
  Antisense Strand to SEQ ID NO: 438601
cucaucagacauauuguca

SEQ ID NO: 438603 - RNA, 19 nt, Artificial Sequence
  Description of Artificial Sequence: Synthetic oligonucleotide
  Sense strand starting at position 3543 of SEQ ID NO: 316763
guuucuguacaucaggaau

SEQ ID NO: 438604 - RNA, 19 nt, Artificial Sequence
  Description of Artificial Sequence: Synthetic oligonucleotide
  Antisense Strand to SEQ ID NO: 438603
auuccugauguacagaaac

SEQ ID NO: 438605 - RNA, 19 nt, Artificial Sequence
  Description of Artificial Sequence: Synthetic oligonucleotide
  Sense strand starting at position 3731 of SEQ ID NO: 316763
guguguuuacuguugcuag

SEQ ID NO: 438606 - RNA, 19 nt, Artificial Sequence
  Description of Artificial Sequence: Synthetic oligonucleotide
  Antisense Strand to SEQ ID NO: 438605
cuagcaacaguaaacacac

SEQ ID NO: 438607 - RNA, 19 nt, Artificial Sequence
  Description of Artificial Sequence: Synthetic oligonucleotide
  Sense strand starting at position 3805 of SEQ ID NO: 316763
uaaucacaguguguugaaa

SEQ ID NO: 438608 - RNA, 19 nt, Artificial Sequence
  Description of Artificial Sequence: Synthetic oligonucleotide
  Antisense Strand to SEQ ID NO: 438607
uuucaacacacugugauua

SEQ ID NO: 438609 - RNA, 19 nt, Artificial Sequence
  Description of Artificial Sequence: Synthetic oligonucleotide
  Sense strand starting at position 3920 of SEQ ID NO: 316763
gcacuauuccauugacuga

SEQ ID NO: 438610 - RNA, 19 nt, Artificial Sequence
  Description of Artificial Sequence: Synthetic oligonucleotide
  Antisense Strand to SEQ ID NO: 438609
ucagucaauggaauagugc

SEQ ID NO: 438611 - RNA, 19 nt, Artificial Sequence
  Description of Artificial Sequence: Synthetic oligonucleotide
  Sense strand starting at position 3931 of SEQ ID NO: 316763
uugacugacccaugauaau

SEQ ID NO: 438612 - RNA, 19 nt, Artificial Sequence
  Description of Artificial Sequence: Synthetic oligonucleotide
  Antisense Strand to SEQ ID NO: 438611
auuaucaugggucagucaa

SEQ ID NO: 438613 - RNA, 19 nt, Artificial Sequence
  Description of Artificial Sequence: Synthetic oligonucleotide
  Sense strand starting at position 91 of SEQ ID NO: 316764
aggagaaccugaugaauuu

SEQ ID NO: 438614 - RNA, 19 nt, Artificial Sequence
  Description of Artificial Sequence: Synthetic oligonucleotide
  Antisense Strand to SEQ ID NO: 438613
aaauucaucagguucuccu

SEQ ID NO: 438615 - RNA, 19 nt, Artificial Sequence
  Description of Artificial Sequence: Synthetic oligonucleotide
  Sense strand starting at position 260 of SEQ ID NO: 316764
gucucaugccuguaacuuu

SEQ ID NO: 438616 - RNA, 19 nt, Artificial Sequence
  Description of Artificial Sequence: Synthetic oligonucleotide
  Antisense Strand to SEQ ID NO: 438615
aaaguuacaggcaugagac

SEQ ID NO: 438617 - RNA, 19 nt, Artificial Sequence
  Description of Artificial Sequence: Synthetic oligonucleotide
  Sense strand starting at position 557 of SEQ ID NO: 316764
cccaguuuccuugauaguu

SEQ ID NO: 438618 - RNA, 19 nt, Artificial Sequence
  Description of Artificial Sequence: Synthetic oligonucleotide
  Antisense Strand to SEQ ID NO: 438617
aacuaucaaggaaacuggg

SEQ ID NO: 438619 - RNA, 19 nt, Artificial Sequence
  Description of Artificial Sequence: Synthetic oligonucleotide
  Sense strand starting at position 632 of SEQ ID NO: 316764
gcauuuccaugauaagguc

SEQ ID NO: 438620 - RNA, 19 nt, Artificial Sequence
  Description of Artificial Sequence: Synthetic oligonucleotide
  Antisense Strand to SEQ ID NO: 438619
gaccuuaucauggaaaugc

SEQ ID NO: 438621 - RNA, 19 nt, Artificial Sequence
  Description of Artificial Sequence: Synthetic oligonucleotide
  Sense strand starting at position 682 of SEQ ID NO: 316764
cucccuaaguggucacagu

SEQ ID NO: 438622 - RNA, 19 nt, Artificial Sequence
  Description of Artificial Sequence: Synthetic oligonucleotide
  Antisense Strand to SEQ ID NO: 438621
acugugaccacuuagggag

SEQ ID NO: 438623 - RNA, 19 nt, Artificial Sequence
  Description of Artificial Sequence: Synthetic oligonucleotide
  Sense strand starting at position 683 of SEQ ID NO: 316764
ucccuaaguggucacaguu

SEQ ID NO: 438624 - RNA, 19 nt, Artificial Sequence
  Description of Artificial Sequence: Synthetic oligonucleotide
  Antisense Strand to SEQ ID NO: 438623
aacugugaccacuuaggga

SEQ ID NO: 438625 - RNA, 19 nt, Artificial Sequence
  Description of Artificial Sequence: Synthetic oligonucleotide
  Sense strand starting at position 803 of SEQ ID NO: 316764
ugacuuaauuuacaggaaa

SEQ ID NO: 438626 - RNA, 19 nt, Artificial Sequence
  Description of Artificial Sequence: Synthetic oligonucleotide
  Antisense Strand to SEQ ID NO: 438625
uuuccuguaaauuaaguca

SEQ ID NO: 438627 - RNA, 19 nt, Artificial Sequence
  Description of Artificial Sequence: Synthetic oligonucleotide
  Sense strand starting at position 862 of SEQ ID NO: 316764
aacauuuacuacgagguaa

SEQ ID NO: 438628 - RNA, 19 nt, Artificial Sequence
  Description of Artificial Sequence: Synthetic oligonucleotide
  Antisense Strand to SEQ ID NO: 438627
uuaccucguaguaaauguu

SEQ ID NO: 438629 - RNA, 19 nt, Artificial Sequence
  Description of Artificial Sequence: Synthetic oligonucleotide
  Sense strand starting at position 873 of SEQ ID NO: 316764
cgagguaagugauucaauu

SEQ ID NO: 438630 - RNA, 19 nt, Artificial Sequence
  Description of Artificial Sequence: Synthetic oligonucleotide
  Antisense Strand to SEQ ID NO: 438629
aauugaaucacuuaccucg

SEQ ID NO: 438631 - RNA, 19 nt, Artificial Sequence
  Description of Artificial Sequence: Synthetic oligonucleotide
  Sense strand starting at position 993 of SEQ ID NO: 316764
acccuuuggugcucaauca

SEQ ID NO: 438632 - RNA, 19 nt, Artificial Sequence
  Description of Artificial Sequence: Synthetic oligonucleotide
  Antisense Strand to SEQ ID NO: 438631
ugauugagcaccaaagggu

SEQ ID NO: 438633 - RNA, 19 nt, Artificial Sequence
  Description of Artificial Sequence: Synthetic oligonucleotide
  Sense strand starting at position 994 of SEQ ID NO: 316764
cccuuuggugcucaaucaa

SEQ ID NO: 438634 - RNA, 19 nt, Artificial Sequence
  Description of Artificial Sequence: Synthetic oligonucleotide
  Antisense Strand to SEQ ID NO: 438633
uugauugagcaccaaaggg

SEQ ID NO: 438635 - RNA, 19 nt, Artificial Sequence
  Description of Artificial Sequence: Synthetic oligonucleotide
  Sense strand starting at position 1211 of SEQ ID NO: 316764
aucaaagcugccugagagu

SEQ ID NO: 438636 - RNA, 19 nt, Artificial Sequence
  Description of Artificial Sequence: Synthetic oligonucleotide
  Antisense Strand to SEQ ID NO: 438635
acucucaggcagcuuugau

SEQ ID NO: 438637 - RNA, 19 nt, Artificial Sequence
  Description of Artificial Sequence: Synthetic oligonucleotide
  Sense strand starting at position 1369 of SEQ ID NO: 316764
guaguuaaacagcacagua

SEQ ID NO: 438638 - RNA, 19 nt, Artificial Sequence
  Description of Artificial Sequence: Synthetic oligonucleotide
  Antisense Strand to SEQ ID NO: 438637
uacugugcuguuuaacuac

SEQ ID NO: 438639 - RNA, 19 nt, Artificial Sequence
  Description of Artificial Sequence: Synthetic oligonucleotide
  Sense strand starting at position 1596 of SEQ ID NO: 316764
ggcugauccugacccucaa

SEQ ID NO: 438640 - RNA, 19 nt, Artificial Sequence
  Description of Artificial Sequence: Synthetic oligonucleotide
  Antisense Strand to SEQ ID NO: 438639
uugagggucaggaucagcc

SEQ ID NO: 438641 - RNA, 19 nt, Artificial Sequence
  Description of Artificial Sequence: Synthetic oligonucleotide
  Sense strand starting at position 2248 of SEQ ID NO: 316764
uguucucgugcguuaauag

SEQ ID NO: 438642 - RNA, 19 nt, Artificial Sequence
  Description of Artificial Sequence: Synthetic oligonucleotide
  Antisense Strand to SEQ ID NO: 438641
cuauuaacgcacgagaaca

SEQ ID NO: 438643 - RNA, 19 nt, Artificial Sequence
  Description of Artificial Sequence: Synthetic oligonucleotide
  Sense strand starting at position 2256 of SEQ ID NO: 316764
ugcguuaauagggaaagcu

SEQ ID NO: 438644 - RNA, 19 nt, Artificial Sequence
  Description of Artificial Sequence: Synthetic oligonucleotide
  Antisense Strand to SEQ ID NO: 438643
agcuuucccuauuaacgca

SEQ ID NO: 438645 - RNA, 19 nt, Artificial Sequence
  Description of Artificial Sequence: Synthetic oligonucleotide
  Sense strand starting at position 2265 of SEQ ID NO: 316764
agggaaagcugccuugauu

SEQ ID NO: 438646 - RNA, 19 nt, Artificial Sequence
  Description of Artificial Sequence: Synthetic oligonucleotide
  Antisense Strand to SEQ ID NO: 438645
aaucaaggcagcuuucccu

SEQ ID NO: 438647 - RNA, 19 nt, Artificial Sequence
  Description of Artificial Sequence: Synthetic oligonucleotide
  Sense strand starting at position 2274 of SEQ ID NO: 316764
ugccuugauuaucuuguaa

SEQ ID NO: 438648 - RNA, 19 nt, Artificial Sequence
  Description of Artificial Sequence: Synthetic oligonucleotide
  Antisense Strand to SEQ ID NO: 438647
uuacaagauaaucaaggca

SEQ ID NO: 438649 - RNA, 19 nt, Artificial Sequence
  Description of Artificial Sequence: Synthetic oligonucleotide
  Sense strand starting at position 2375 of SEQ ID NO: 316764
uaguuaguucuguggacca

SEQ ID NO: 438650 - RNA, 19 nt, Artificial Sequence
  Description of Artificial Sequence: Synthetic oligonucleotide
  Antisense Strand to SEQ ID NO: 438649
ugguccacagaacuaacua

SEQ ID NO: 438651 - RNA, 19 nt, Artificial Sequence
  Description of Artificial Sequence: Synthetic oligonucleotide
  Sense strand starting at position 2377 of SEQ ID NO: 316764
guuaguucuguggaccaga

SEQ ID NO: 438652 - RNA, 19 nt, Artificial Sequence
  Description of Artificial Sequence: Synthetic oligonucleotide
  Antisense Strand to SEQ ID NO: 438651
ucugguccacagaacuaac

SEQ ID NO: 438653 - RNA, 19 nt, Artificial Sequence
  Description of Artificial Sequence: Synthetic oligonucleotide
  Sense strand starting at position 2390 of SEQ ID NO: 316764
accagaggcugguuucaga

SEQ ID NO: 438654 - RNA, 19 nt, Artificial Sequence
  Description of Artificial Sequence: Synthetic oligonucleotide
  Antisense Strand to SEQ ID NO: 438653
ucugaaaccagccucuggu

SEQ ID NO: 438655 - RNA, 19 nt, Artificial Sequence
  Description of Artificial Sequence: Synthetic oligonucleotide
  Sense strand starting at position 2433 of SEQ ID NO: 316764
aaacgagguggguaguuaa

SEQ ID NO: 438656 - RNA, 19 nt, Artificial Sequence
  Description of Artificial Sequence: Synthetic oligonucleotide
  Antisense Strand to SEQ ID NO: 438655
uuaacuacccaccucguuu

SEQ ID NO: 438657 - RNA, 19 nt, Artificial Sequence
  Description of Artificial Sequence: Synthetic oligonucleotide
  Sense strand starting at position 2497 of SEQ ID NO: 316764
auaacuucucguugaacuc

SEQ ID NO: 438658 - RNA, 19 nt, Artificial Sequence
  Description of Artificial Sequence: Synthetic oligonucleotide
  Antisense Strand to SEQ ID NO: 438657
gaguucaacgagaaguuau

SEQ ID NO: 438659 - RNA, 19 nt, Artificial Sequence
  Description of Artificial Sequence: Synthetic oligonucleotide
  Sense strand starting at position 2509 of SEQ ID NO: 316764
ugaacucucagguauggua

SEQ ID NO: 438660 - RNA, 19 nt, Artificial Sequence
  Description of Artificial Sequence: Synthetic oligonucleotide
  Antisense Strand to SEQ ID NO: 438659
uaccauaccugagaguuca

SEQ ID NO: 438661 - RNA, 19 nt, Artificial Sequence
  Description of Artificial Sequence: Synthetic oligonucleotide
  Sense strand starting at position 2516 of SEQ ID NO: 316764
ucagguaugguaggaugau

SEQ ID NO: 438662 - RNA, 19 nt, Artificial Sequence
  Description of Artificial Sequence: Synthetic oligonucleotide
  Antisense Strand to SEQ ID NO: 438661
aucauccuaccauaccuga

SEQ ID NO: 438663 - RNA, 19 nt, Artificial Sequence
  Description of Artificial Sequence: Synthetic oligonucleotide
  Sense strand starting at position 2588 of SEQ ID NO: 316764
uuauguggcagacaggauu

SEQ ID NO: 438664 - RNA, 19 nt, Artificial Sequence
  Description of Artificial Sequence: Synthetic oligonucleotide
  Antisense Strand to SEQ ID NO: 438663
aauccugucugccacauaa

SEQ ID NO: 438665 - RNA, 19 nt, Artificial Sequence
  Description of Artificial Sequence: Synthetic oligonucleotide
  Sense strand starting at position 2646 of SEQ ID NO: 316764
aggauuauccagugaaccc

SEQ ID NO: 438666 - RNA, 19 nt, Artificial Sequence
  Description of Artificial Sequence: Synthetic oligonucleotide
  Antisense Strand to SEQ ID NO: 438665
ggguucacuggauaauccu

SEQ ID NO: 438667 - RNA, 19 nt, Artificial Sequence
  Description of Artificial Sequence: Synthetic oligonucleotide
  Sense strand starting at position 2751 of SEQ ID NO: 316764
agugaugucagaggcaaug

SEQ ID NO: 438668 - RNA, 19 nt, Artificial Sequence
  Description of Artificial Sequence: Synthetic oligonucleotide
  Antisense Strand to SEQ ID NO: 438667
cauugccucugacaucacu

SEQ ID NO: 438669 - RNA, 19 nt, Artificial Sequence
  Description of Artificial Sequence: Synthetic oligonucleotide
  Sense strand starting at position 2834 of SEQ ID NO: 316764
ggaacuagagccugcaaau

SEQ ID NO: 438670 - RNA, 19 nt, Artificial Sequence
  Description of Artificial Sequence: Synthetic oligonucleotide
  Antisense Strand to SEQ ID NO: 438669
auuugcaggcucuaguucc

SEQ ID NO: 438671 - RNA, 19 nt, Artificial Sequence
  Description of Artificial Sequence: Synthetic oligonucleotide
  Sense strand starting at position 2872 of SEQ ID NO: 316764
ccuuaagcacuguaagaca

SEQ ID NO: 438672 - RNA, 19 nt, Artificial Sequence
  Description of Artificial Sequence: Synthetic oligonucleotide
  Antisense Strand to SEQ ID NO: 438671
ugucuuacagugcuuaagg

SEQ ID NO: 438673 - RNA, 19 nt, Artificial Sequence
  Description of Artificial Sequence: Synthetic oligonucleotide
  Sense strand starting at position 2888 of SEQ ID NO: 316764
acaauacaccuguguuguu

SEQ ID NO: 438674 - RNA, 19 nt, Artificial Sequence
  Description of Artificial Sequence: Synthetic oligonucleotide
  Antisense Strand to SEQ ID NO: 438673
aacaacacagguguauugu

SEQ ID NO: 438675 - RNA, 19 nt, Artificial Sequence
  Description of Artificial Sequence: Synthetic oligonucleotide
  Sense strand starting at position 2930 of SEQ ID NO: 316764
uuguuauagcagcaauggu

SEQ ID NO: 438676 - RNA, 19 nt, Artificial Sequence
  Description of Artificial Sequence: Synthetic oligonucleotide
  Antisense Strand to SEQ ID NO: 438675
accauugcugcuauaacaa

SEQ ID NO: 438677 - RNA, 19 nt, Artificial Sequence
  Description of Artificial Sequence: Synthetic oligonucleotide
  Sense strand starting at position 2991 of SEQ ID NO: 316764
aaagaaggguaggaaauau

SEQ ID NO: 438678 - RNA, 19 nt, Artificial Sequence
  Description of Artificial Sequence: Synthetic oligonucleotide
  Antisense Strand to SEQ ID NO: 438677
auauuuccuacccuucuuu

SEQ ID NO: 438679 - RNA, 19 nt, Artificial Sequence
  Description of Artificial Sequence: Synthetic oligonucleotide
  Sense strand starting at position 2999 of SEQ ID NO: 316764
guaggaaauaugggucuua

SEQ ID NO: 438680 - RNA, 19 nt, Artificial Sequence
  Description of Artificial Sequence: Synthetic oligonucleotide
  Antisense Strand to SEQ ID NO: 438679
uaagacccauauuuccuac

SEQ ID NO: 438681 - RNA, 19 nt, Artificial Sequence
  Description of Artificial Sequence: Synthetic oligonucleotide
  Sense strand starting at position 3038 of SEQ ID NO: 316764
uccaguaaggauugucuau

SEQ ID NO: 438682 - RNA, 19 nt, Artificial Sequence
  Description of Artificial Sequence: Synthetic oligonucleotide
  Antisense Strand to SEQ ID NO: 438681
auagacaauccuuacugga

SEQ ID NO: 438683 - RNA, 19 nt, Artificial Sequence
  Description of Artificial Sequence: Synthetic oligonucleotide
  Sense strand starting at position 3486 of SEQ ID NO: 316764
accacuuuccagggauagu

SEQ ID NO: 438684 - RNA, 19 nt, Artificial Sequence
  Description of Artificial Sequence: Synthetic oligonucleotide
  Antisense Strand to SEQ ID NO: 438683
acuaucccuggaaaguggu

SEQ ID NO: 438685 - RNA, 19 nt, Artificial Sequence
  Description of Artificial Sequence: Synthetic oligonucleotide
  Sense strand starting at position 3495 of SEQ ID NO: 316764
cagggauaguuguuaaacu

SEQ ID NO: 438686 - RNA, 19 nt, Artificial Sequence
  Description of Artificial Sequence: Synthetic oligonucleotide
  Antisense Strand to SEQ ID NO: 438685
aguuuaacaacuaucccug

SEQ ID NO: 438687 - RNA, 19 nt, Artificial Sequence
  Description of Artificial Sequence: Synthetic oligonucleotide
  Sense strand starting at position 3946 of SEQ ID NO: 316764
augagauaccgauggcuuu

SEQ ID NO: 438688 - RNA, 19 nt, Artificial Sequence
  Description of Artificial Sequence: Synthetic oligonucleotide
  Antisense Strand to SEQ ID NO: 438687
aaagccaucgguaucucau

SEQ ID NO: 438689 - RNA, 19 nt, Artificial Sequence
  Description of Artificial Sequence: Synthetic oligonucleotide
  Sense strand starting at position 3947 of SEQ ID NO: 316764
ugagauaccgauggcuuua

SEQ ID NO: 438690 - RNA, 19 nt, Artificial Sequence
  Description of Artificial Sequence: Synthetic oligonucleotide
  Antisense Strand to SEQ ID NO: 438689
uaaagccaucgguaucuca

SEQ ID NO: 438691 - RNA, 19 nt, Artificial Sequence
  Description of Artificial Sequence: Synthetic oligonucleotide
  Sense strand starting at position 3952 of SEQ ID NO: 316764
uaccgauggcuuuagucaa

SEQ ID NO: 438692 - RNA, 19 nt, Artificial Sequence
  Description of Artificial Sequence: Synthetic oligonucleotide
  Antisense Strand to SEQ ID NO: 438691
uugacuaaagccaucggua

SEQ ID NO: 438693 - RNA, 19 nt, Artificial Sequence
  Description of Artificial Sequence: Synthetic oligonucleotide
  Sense strand starting at position 18 of SEQ ID NO: 316765
aguggaaaggugugagacu

SEQ ID NO: 438694 - RNA, 19 nt, Artificial Sequence
  Description of Artificial Sequence: Synthetic oligonucleotide
  Antisense Strand to SEQ ID NO: 438693
agucucacaccuuuccacu

SEQ ID NO: 438695 - RNA, 19 nt, Artificial Sequence
  Description of Artificial Sequence: Synthetic oligonucleotide
  Sense strand starting at position 19 of SEQ ID NO: 316765
guggaaaggugugagacuu

SEQ ID NO: 438696 - RNA, 19 nt, Artificial Sequence
  Description of Artificial Sequence: Synthetic oligonucleotide
  Antisense Strand to SEQ ID NO: 438695
aagucucacaccuuuccac

SEQ ID NO: 438697 - RNA, 19 nt, Artificial Sequence
  Description of Artificial Sequence: Synthetic oligonucleotide
  Sense strand starting at position 29 of SEQ ID NO: 316765
gugagacuucuggaaaguc

SEQ ID NO: 438698 - RNA, 19 nt, Artificial Sequence
  Description of Artificial Sequence: Synthetic oligonucleotide
  Antisense Strand to SEQ ID NO: 438697
gacuuuccagaagucucac

SEQ ID NO: 438699 - RNA, 19 nt, Artificial Sequence
  Description of Artificial Sequence: Synthetic oligonucleotide
  Sense strand starting at position 183 of SEQ ID NO: 316765
ggacuuuagggcugccaua

SEQ ID NO: 438700 - RNA, 19 nt, Artificial Sequence
  Description of Artificial Sequence: Synthetic oligonucleotide
  Antisense Strand to SEQ ID NO: 438699
uauggcagcccuaaagucc

SEQ ID NO: 438701 - RNA, 19 nt, Artificial Sequence
  Description of Artificial Sequence: Synthetic oligonucleotide
  Sense strand starting at position 247 of SEQ ID NO: 316765
guaauauucuuguuuaggc

SEQ ID NO: 438702 - RNA, 19 nt, Artificial Sequence
  Description of Artificial Sequence: Synthetic oligonucleotide
  Antisense Strand to SEQ ID NO: 438701
gccuaaacaagaauauuac

SEQ ID NO: 438703 - RNA, 19 nt, Artificial Sequence
  Description of Artificial Sequence: Synthetic oligonucleotide
  Sense strand starting at position 257 of SEQ ID NO: 316765
uguuuaggccacugugaug

SEQ ID NO: 438704 - RNA, 19 nt, Artificial Sequence
  Description of Artificial Sequence: Synthetic oligonucleotide
  Antisense Strand to SEQ ID NO: 438703
caucacaguggccuaaaca

SEQ ID NO: 438705 - RNA, 19 nt, Artificial Sequence
  Description of Artificial Sequence: Synthetic oligonucleotide
  Sense strand starting at position 376 of SEQ ID NO: 316765
gggagccucugagcagaua

SEQ ID NO: 438706 - RNA, 19 nt, Artificial Sequence
  Description of Artificial Sequence: Synthetic oligonucleotide
  Antisense Strand to SEQ ID NO: 438705
uaucugcucagaggcuccc

SEQ ID NO: 438707 - RNA, 19 nt, Artificial Sequence
  Description of Artificial Sequence: Synthetic oligonucleotide
  Sense strand starting at position 409 of SEQ ID NO: 316765
cuuggaguuggccaaggau

SEQ ID NO: 438708 - RNA, 19 nt, Artificial Sequence
  Description of Artificial Sequence: Synthetic oligonucleotide
  Antisense Strand to SEQ ID NO: 438707
auccuuggccaacuccaag

SEQ ID NO: 438709 - RNA, 19 nt, Artificial Sequence
  Description of Artificial Sequence: Synthetic oligonucleotide
  Sense strand starting at position 412 of SEQ ID NO: 316765
ggaguuggccaaggauaga

SEQ ID NO: 438710 - RNA, 19 nt, Artificial Sequence
  Description of Artificial Sequence: Synthetic oligonucleotide
  Antisense Strand to SEQ ID NO: 438709
ucuauccuuggccaacucc

SEQ ID NO: 438711 - RNA, 19 nt, Artificial Sequence
  Description of Artificial Sequence: Synthetic oligonucleotide
  Sense strand starting at position 482 of SEQ ID NO: 316765
ccaagauccugugcugaag

SEQ ID NO: 438712 - RNA, 19 nt, Artificial Sequence
  Description of Artificial Sequence: Synthetic oligonucleotide
  Antisense Strand to SEQ ID NO: 438711
cuucagcacaggaucuugg

SEQ ID NO: 438713 - RNA, 19 nt, Artificial Sequence
  Description of Artificial Sequence: Synthetic oligonucleotide
  Sense strand starting at position 488 of SEQ ID NO: 316765
uccugugcugaagaaauga

SEQ ID NO: 438714 - RNA, 19 nt, Artificial Sequence
  Description of Artificial Sequence: Synthetic oligonucleotide
  Antisense Strand to SEQ ID NO: 438713
ucauuucuucagcacagga

SEQ ID NO: 438715 - RNA, 19 nt, Artificial Sequence
  Description of Artificial Sequence: Synthetic oligonucleotide
  Sense strand starting at position 541 of SEQ ID NO: 316765
cugagagugugguuuggga

SEQ ID NO: 438716 - RNA, 19 nt, Artificial Sequence
  Description of Artificial Sequence: Synthetic oligonucleotide
  Antisense Strand to SEQ ID NO: 438715
ucccaaaccacacucucag

SEQ ID NO: 438717 - RNA, 19 nt, Artificial Sequence
  Description of Artificial Sequence: Synthetic oligonucleotide
  Sense strand starting at position 543 of SEQ ID NO: 316765
gagagugugguuugggaca

SEQ ID NO: 438718 - RNA, 19 nt, Artificial Sequence
  Description of Artificial Sequence: Synthetic oligonucleotide
  Antisense Strand to SEQ ID NO: 438717
ugucccaaaccacacucuc

SEQ ID NO: 438719 - RNA, 19 nt, Artificial Sequence
  Description of Artificial Sequence: Synthetic oligonucleotide
  Sense strand starting at position 548 of SEQ ID NO: 316765
ugugguuugggacacguua

SEQ ID NO: 438720 - RNA, 19 nt, Artificial Sequence
  Description of Artificial Sequence: Synthetic oligonucleotide
  Antisense Strand to SEQ ID NO: 438719
uaacgugucccaaaccaca

SEQ ID NO: 438721 - RNA, 19 nt, Artificial Sequence
  Description of Artificial Sequence: Synthetic oligonucleotide
  Sense strand starting at position 550 of SEQ ID NO: 316765
ugguuugggacacguuaaa

SEQ ID NO: 438722 - RNA, 19 nt, Artificial Sequence
  Description of Artificial Sequence: Synthetic oligonucleotide
  Antisense Strand to SEQ ID NO: 438721
uuuaacgugucccaaacca

SEQ ID NO: 438723 - RNA, 19 nt, Artificial Sequence
  Description of Artificial Sequence: Synthetic oligonucleotide
  Sense strand starting at position 560 of SEQ ID NO: 316765
cacguuaaauuugagagga

SEQ ID NO: 438724 - RNA, 19 nt, Artificial Sequence
  Description of Artificial Sequence: Synthetic oligonucleotide
  Antisense Strand to SEQ ID NO: 438723
uccucucaaauuuaacgug

SEQ ID NO: 438725 - RNA, 19 nt, Artificial Sequence
  Description of Artificial Sequence: Synthetic oligonucleotide
  Sense strand starting at position 562 of SEQ ID NO: 316765
cguuaaauuugagaggauc

SEQ ID NO: 438726 - RNA, 19 nt, Artificial Sequence
  Description of Artificial Sequence: Synthetic oligonucleotide
  Antisense Strand to SEQ ID NO: 438725
gauccucucaaauuuaacg

SEQ ID NO: 438727 - RNA, 19 nt, Artificial Sequence
  Description of Artificial Sequence: Synthetic oligonucleotide
  Sense strand starting at position 576 of SEQ ID NO: 316765
ggaucuguuaggcguccaa

SEQ ID NO: 438728 - RNA, 19 nt, Artificial Sequence
  Description of Artificial Sequence: Synthetic oligonucleotide
  Antisense Strand to SEQ ID NO: 438727
uuggacgccuaacagaucc

SEQ ID NO: 438729 - RNA, 19 nt, Artificial Sequence
  Description of Artificial Sequence: Synthetic oligonucleotide
  Sense strand starting at position 608 of SEQ ID NO: 316765
gguaaacaggucuggaguu

SEQ ID NO: 438730 - RNA, 19 nt, Artificial Sequence
  Description of Artificial Sequence: Synthetic oligonucleotide
  Antisense Strand to SEQ ID NO: 438729
aacuccagaccuguuuacc

SEQ ID NO: 438731 - RNA, 19 nt, Artificial Sequence
  Description of Artificial Sequence: Synthetic oligonucleotide
  Sense strand starting at position 654 of SEQ ID NO: 316765
uugagaaguuugggagaaa

SEQ ID NO: 438732 - RNA, 19 nt, Artificial Sequence
  Description of Artificial Sequence: Synthetic oligonucleotide
  Antisense Strand to SEQ ID NO: 438731
uuucucccaaacuucucaa

SEQ ID NO: 438733 - RNA, 19 nt, Artificial Sequence
  Description of Artificial Sequence: Synthetic oligonucleotide
  Sense strand starting at position 690 of SEQ ID NO: 316765
cauguaacuguaggaaauc

SEQ ID NO: 438734 - RNA, 19 nt, Artificial Sequence
  Description of Artificial Sequence: Synthetic oligonucleotide
  Antisense Strand to SEQ ID NO: 438733
gauuuccuacaguuacaug

SEQ ID NO: 438735 - RNA, 19 nt, Artificial Sequence
  Description of Artificial Sequence: Synthetic oligonucleotide
  Sense strand starting at position 975 of SEQ ID NO: 316765
ggucaaggaugacuuugau

SEQ ID NO: 438736 - RNA, 19 nt, Artificial Sequence
  Description of Artificial Sequence: Synthetic oligonucleotide
  Antisense Strand to SEQ ID NO: 438735
aucaaagucauccuugacc

SEQ ID NO: 438737 - RNA, 19 nt, Artificial Sequence
  Description of Artificial Sequence: Synthetic oligonucleotide
  Sense strand starting at position 979 of SEQ ID NO: 316765
aaggaugacuuugauaaag

SEQ ID NO: 438738 - RNA, 19 nt, Artificial Sequence
  Description of Artificial Sequence: Synthetic oligonucleotide
  Antisense Strand to SEQ ID NO: 438737
cuuuaucaaagucauccuu

SEQ ID NO: 438739 - RNA, 19 nt, Artificial Sequence
  Description of Artificial Sequence: Synthetic oligonucleotide
  Sense strand starting at position 981 of SEQ ID NO: 316765
ggaugacuuugauaaagag

SEQ ID NO: 438740 - RNA, 19 nt, Artificial Sequence
  Description of Artificial Sequence: Synthetic oligonucleotide
  Antisense Strand to SEQ ID NO: 438739
cucuuuaucaaagucaucc

SEQ ID NO: 438741 - RNA, 19 nt, Artificial Sequence
  Description of Artificial Sequence: Synthetic oligonucleotide
  Sense strand starting at position 1004 of SEQ ID NO: 316765
agaggagugguugggugaa

SEQ ID NO: 438742 - RNA, 19 nt, Artificial Sequence
  Description of Artificial Sequence: Synthetic oligonucleotide
  Antisense Strand to SEQ ID NO: 438741
uucacccaaccacuccucu

SEQ ID NO: 438743 - RNA, 19 nt, Artificial Sequence
  Description of Artificial Sequence: Synthetic oligonucleotide
  Sense strand starting at position 1190 of SEQ ID NO: 316765
agagaaaucuuagaugcca

SEQ ID NO: 438744 - RNA, 19 nt, Artificial Sequence
  Description of Artificial Sequence: Synthetic oligonucleotide
  Antisense Strand to SEQ ID NO: 438743
uggcaucuaagauuucucu

SEQ ID NO: 438745 - RNA, 19 nt, Artificial Sequence
  Description of Artificial Sequence: Synthetic oligonucleotide
  Sense strand starting at position 1227 of SEQ ID NO: 316765
cgcgucuguuggaauaaag

SEQ ID NO: 438746 - RNA, 19 nt, Artificial Sequence
  Description of Artificial Sequence: Synthetic oligonucleotide
  Antisense Strand to SEQ ID NO: 438745
cuuuauuccaacagacgcg

SEQ ID NO: 438747 - RNA, 19 nt, Artificial Sequence
  Description of Artificial Sequence: Synthetic oligonucleotide
  Sense strand starting at position 1234 of SEQ ID NO: 316765
guuggaauaaaguggucau

SEQ ID NO: 438748 - RNA, 19 nt, Artificial Sequence
  Description of Artificial Sequence: Synthetic oligonucleotide
  Antisense Strand to SEQ ID NO: 438747
augaccacuuuauuccaac

SEQ ID NO: 438749 - RNA, 19 nt, Artificial Sequence
  Description of Artificial Sequence: Synthetic oligonucleotide
  Sense strand starting at position 1309 of SEQ ID NO: 316765
aggucagacuucucaauuc

SEQ ID NO: 438750 - RNA, 19 nt, Artificial Sequence
  Description of Artificial Sequence: Synthetic oligonucleotide
  Antisense Strand to SEQ ID NO: 438749
gaauugagaagucugaccu

SEQ ID NO: 438751 - RNA, 19 nt, Artificial Sequence
  Description of Artificial Sequence: Synthetic oligonucleotide
  Sense strand starting at position 1348 of SEQ ID NO: 316765
uuccaucuccugugucuua

SEQ ID NO: 438752 - RNA, 19 nt, Artificial Sequence
  Description of Artificial Sequence: Synthetic oligonucleotide
  Antisense Strand to SEQ ID NO: 438751
uaagacacaggagauggaa

SEQ ID NO: 438753 - RNA, 19 nt, Artificial Sequence
  Description of Artificial Sequence: Synthetic oligonucleotide
  Sense strand starting at position 1361 of SEQ ID NO: 316765
gucuuacaucugcacguuu

SEQ ID NO: 438754 - RNA, 19 nt, Artificial Sequence
  Description of Artificial Sequence: Synthetic oligonucleotide
  Antisense Strand to SEQ ID NO: 438753
aaacgugcagauguaagac

SEQ ID NO: 438755 - RNA, 19 nt, Artificial Sequence
  Description of Artificial Sequence: Synthetic oligonucleotide
  Sense strand starting at position 1454 of SEQ ID NO: 316765
cgccgugaucuggaugcaa

SEQ ID NO: 438756 - RNA, 19 nt, Artificial Sequence
  Description of Artificial Sequence: Synthetic oligonucleotide
  Antisense Strand to SEQ ID NO: 438755
uugcauccagaucacggcg

SEQ ID NO: 438757 - RNA, 19 nt, Artificial Sequence
  Description of Artificial Sequence: Synthetic oligonucleotide
  Sense strand starting at position 1508 of SEQ ID NO: 316765
ugcuucucuggcugucaau

SEQ ID NO: 438758 - RNA, 19 nt, Artificial Sequence
  Description of Artificial Sequence: Synthetic oligonucleotide
  Antisense Strand to SEQ ID NO: 438757
auugacagccagagaagca

SEQ ID NO: 438759 - RNA, 19 nt, Artificial Sequence
  Description of Artificial Sequence: Synthetic oligonucleotide
  Sense strand starting at position 1560 of SEQ ID NO: 316765
agcucucugcuugacacau

SEQ ID NO: 438760 - RNA, 19 nt, Artificial Sequence
  Description of Artificial Sequence: Synthetic oligonucleotide
  Antisense Strand to SEQ ID NO: 438759
augugucaagcagagagcu

SEQ ID NO: 438761 - RNA, 19 nt, Artificial Sequence
  Description of Artificial Sequence: Synthetic oligonucleotide
  Sense strand starting at position 1751 of SEQ ID NO: 316765
agguguuugggagaagcaa

SEQ ID NO: 438762 - RNA, 19 nt, Artificial Sequence
  Description of Artificial Sequence: Synthetic oligonucleotide
  Antisense Strand to SEQ ID NO: 438761
uugcuucucccaaacaccu

SEQ ID NO: 438763 - RNA, 19 nt, Artificial Sequence
  Description of Artificial Sequence: Synthetic oligonucleotide
  Sense strand starting at position 2121 of SEQ ID NO: 316765
acuuguaguuucuuggaua

SEQ ID NO: 438764 - RNA, 19 nt, Artificial Sequence
  Description of Artificial Sequence: Synthetic oligonucleotide
  Antisense Strand to SEQ ID NO: 438763
uauccaagaaacuacaagu

SEQ ID NO: 438765 - RNA, 19 nt, Artificial Sequence
  Description of Artificial Sequence: Synthetic oligonucleotide
  Sense strand starting at position 2803 of SEQ ID NO: 316765
cuccaagacuuggacagau

SEQ ID NO: 438766 - RNA, 19 nt, Artificial Sequence
  Description of Artificial Sequence: Synthetic oligonucleotide
  Antisense Strand to SEQ ID NO: 438765
aucuguccaagucuuggag

SEQ ID NO: 438767 - RNA, 19 nt, Artificial Sequence
  Description of Artificial Sequence: Synthetic oligonucleotide
  Sense strand starting at position 3222 of SEQ ID NO: 316765
guccuuccauguccagaga

SEQ ID NO: 438768 - RNA, 19 nt, Artificial Sequence
  Description of Artificial Sequence: Synthetic oligonucleotide
  Antisense Strand to SEQ ID NO: 438767
ucucuggacauggaaggac

SEQ ID NO: 438769 - RNA, 19 nt, Artificial Sequence
  Description of Artificial Sequence: Synthetic oligonucleotide
  Sense strand starting at position 3907 of SEQ ID NO: 316765
ggcagagguuuccugaaau

SEQ ID NO: 438770 - RNA, 19 nt, Artificial Sequence
  Description of Artificial Sequence: Synthetic oligonucleotide
  Antisense Strand to SEQ ID NO: 438769
auuucaggaaaccucugcc

SEQ ID NO: 438771 - RNA, 19 nt, Artificial Sequence
  Description of Artificial Sequence: Synthetic oligonucleotide
  Sense strand starting at position 3959 of SEQ ID NO: 316765
ggagguggguuuggaagau

SEQ ID NO: 438772 - RNA, 19 nt, Artificial Sequence
  Description of Artificial Sequence: Synthetic oligonucleotide
  Antisense Strand to SEQ ID NO: 438771
aucuuccaaacccaccucc

SEQ ID NO: 438773 - RNA, 19 nt, Artificial Sequence
  Description of Artificial Sequence: Synthetic oligonucleotide
  Sense strand starting at position 96 of SEQ ID NO: 316766
acaauuaugguagguaauc

SEQ ID NO: 438774 - RNA, 19 nt, Artificial Sequence
  Description of Artificial Sequence: Synthetic oligonucleotide
  Antisense Strand to SEQ ID NO: 438773
gauuaccuaccauaauugu

SEQ ID NO: 438775 - RNA, 19 nt, Artificial Sequence
  Description of Artificial Sequence: Synthetic oligonucleotide
  Sense strand starting at position 97 of SEQ ID NO: 316766
caauuaugguagguaauca

SEQ ID NO: 438776 - RNA, 19 nt, Artificial Sequence
  Description of Artificial Sequence: Synthetic oligonucleotide
  Antisense Strand to SEQ ID NO: 438775
ugauuaccuaccauaauug

SEQ ID NO: 438777 - RNA, 19 nt, Artificial Sequence
  Description of Artificial Sequence: Synthetic oligonucleotide
  Sense strand starting at position 331 of SEQ ID NO: 316766
uugaacauccucugguuau

SEQ ID NO: 438778 - RNA, 19 nt, Artificial Sequence
  Description of Artificial Sequence: Synthetic oligonucleotide
  Antisense Strand to SEQ ID NO: 438777
auaaccagaggauguucaa

SEQ ID NO: 438779 - RNA, 19 nt, Artificial Sequence
  Description of Artificial Sequence: Synthetic oligonucleotide
  Sense strand starting at position 887 of SEQ ID NO: 316766
uuggauugccaccaaaguu

SEQ ID NO: 438780 - RNA, 19 nt, Artificial Sequence
  Description of Artificial Sequence: Synthetic oligonucleotide
  Antisense Strand to SEQ ID NO: 438779
aacuuugguggcaauccaa

SEQ ID NO: 438781 - RNA, 19 nt, Artificial Sequence
  Description of Artificial Sequence: Synthetic oligonucleotide
  Sense strand starting at position 906 of SEQ ID NO: 316766
ggcaaucaucaauaaguau

SEQ ID NO: 438782 - RNA, 19 nt, Artificial Sequence
  Description of Artificial Sequence: Synthetic oligonucleotide
  Antisense Strand to SEQ ID NO: 438781
auacuuauugaugauugcc

SEQ ID NO: 438783 - RNA, 19 nt, Artificial Sequence
  Description of Artificial Sequence: Synthetic oligonucleotide
  Sense strand starting at position 1106 of SEQ ID NO: 316766
ggcuaaagaagcuggaaau

SEQ ID NO: 438784 - RNA, 19 nt, Artificial Sequence
  Description of Artificial Sequence: Synthetic oligonucleotide
  Antisense Strand to SEQ ID NO: 438783
auuuccagcuucuuuagcc

SEQ ID NO: 438785 - RNA, 19 nt, Artificial Sequence
  Description of Artificial Sequence: Synthetic oligonucleotide
  Sense strand starting at position 1223 of SEQ ID NO: 316766
agugauuuguccucucauu

SEQ ID NO: 438786 - RNA, 19 nt, Artificial Sequence
  Description of Artificial Sequence: Synthetic oligonucleotide
  Antisense Strand to SEQ ID NO: 438785
aaugagaggacaaaucacu

SEQ ID NO: 438787 - RNA, 19 nt, Artificial Sequence
  Description of Artificial Sequence: Synthetic oligonucleotide
  Sense strand starting at position 1431 of SEQ ID NO: 316766
acaggaggagccugguaaa

SEQ ID NO: 438788 - RNA, 19 nt, Artificial Sequence
  Description of Artificial Sequence: Synthetic oligonucleotide
  Antisense Strand to SEQ ID NO: 438787
uuuaccaggcuccuccugu

SEQ ID NO: 438789 - RNA, 19 nt, Artificial Sequence
  Description of Artificial Sequence: Synthetic oligonucleotide
  Sense strand starting at position 1621 of SEQ ID NO: 316766
guaacugaacuauguaaua

SEQ ID NO: 438790 - RNA, 19 nt, Artificial Sequence
  Description of Artificial Sequence: Synthetic oligonucleotide
  Antisense Strand to SEQ ID NO: 438789
uauuacauaguucaguuac

SEQ ID NO: 438791 - RNA, 19 nt, Artificial Sequence
  Description of Artificial Sequence: Synthetic oligonucleotide
  Sense strand starting at position 1712 of SEQ ID NO: 316766
uugcauaaagguugaauua

SEQ ID NO: 438792 - RNA, 19 nt, Artificial Sequence
  Description of Artificial Sequence: Synthetic oligonucleotide
  Antisense Strand to SEQ ID NO: 438791
uaauucaaccuuuaugcaa

SEQ ID NO: 438793 - RNA, 19 nt, Artificial Sequence
  Description of Artificial Sequence: Synthetic oligonucleotide
  Sense strand starting at position 1983 of SEQ ID NO: 316766
uggccuucccauuaaagag

SEQ ID NO: 438794 - RNA, 19 nt, Artificial Sequence
  Description of Artificial Sequence: Synthetic oligonucleotide
  Antisense Strand to SEQ ID NO: 438793
cucuuuaaugggaaggcca

SEQ ID NO: 438795 - RNA, 19 nt, Artificial Sequence
  Description of Artificial Sequence: Synthetic oligonucleotide
  Sense strand starting at position 2082 of SEQ ID NO: 316766
uucuguauuccagggaaga

SEQ ID NO: 438796 - RNA, 19 nt, Artificial Sequence
  Description of Artificial Sequence: Synthetic oligonucleotide
  Antisense Strand to SEQ ID NO: 438795
ucuucccuggaauacagaa

SEQ ID NO: 438797 - RNA, 19 nt, Artificial Sequence
  Description of Artificial Sequence: Synthetic oligonucleotide
  Sense strand starting at position 2083 of SEQ ID NO: 316766
ucuguauuccagggaagac

SEQ ID NO: 438798 - RNA, 19 nt, Artificial Sequence
  Description of Artificial Sequence: Synthetic oligonucleotide
  Antisense Strand to SEQ ID NO: 438797
gucuucccuggaauacaga

SEQ ID NO: 438799 - RNA, 19 nt, Artificial Sequence
  Description of Artificial Sequence: Synthetic oligonucleotide
  Sense strand starting at position 2182 of SEQ ID NO: 316766
aggagacaguaagaauaaa

SEQ ID NO: 438800 - RNA, 19 nt, Artificial Sequence
  Description of Artificial Sequence: Synthetic oligonucleotide
  Antisense Strand to SEQ ID NO: 438799
uuuauucuuacugucuccu

SEQ ID NO: 438801 - RNA, 19 nt, Artificial Sequence
  Description of Artificial Sequence: Synthetic oligonucleotide
  Sense strand starting at position 2342 of SEQ ID NO: 316766
aacuaucaugcaggguuua

SEQ ID NO: 438802 - RNA, 19 nt, Artificial Sequence
  Description of Artificial Sequence: Synthetic oligonucleotide
  Antisense Strand to SEQ ID NO: 438801
uaaacccugcaugauaguu

SEQ ID NO: 438803 - RNA, 19 nt, Artificial Sequence
  Description of Artificial Sequence: Synthetic oligonucleotide
  Sense strand starting at position 2347 of SEQ ID NO: 316766
ucaugcaggguuuaucuau

SEQ ID NO: 438804 - RNA, 19 nt, Artificial Sequence
  Description of Artificial Sequence: Synthetic oligonucleotide
  Antisense Strand to SEQ ID NO: 438803
auagauaaacccugcauga

SEQ ID NO: 438805 - RNA, 19 nt, Artificial Sequence
  Description of Artificial Sequence: Synthetic oligonucleotide
  Sense strand starting at position 2370 of SEQ ID NO: 316766
gaaauaaaucugugauagc

SEQ ID NO: 438806 - RNA, 19 nt, Artificial Sequence
  Description of Artificial Sequence: Synthetic oligonucleotide
  Antisense Strand to SEQ ID NO: 438805
gcuaucacagauuuauuuc

SEQ ID NO: 438807 - RNA, 19 nt, Artificial Sequence
  Description of Artificial Sequence: Synthetic oligonucleotide
  Sense strand starting at position 2460 of SEQ ID NO: 316766
agggaucgauauccauaca

SEQ ID NO: 438808 - RNA, 19 nt, Artificial Sequence
  Description of Artificial Sequence: Synthetic oligonucleotide
  Antisense Strand to SEQ ID NO: 438807
uguauggauaucgaucccu

SEQ ID NO: 438809 - RNA, 19 nt, Artificial Sequence
  Description of Artificial Sequence: Synthetic oligonucleotide
  Sense strand starting at position 2512 of SEQ ID NO: 316766
agaaguugaacuggaguga

SEQ ID NO: 438810 - RNA, 19 nt, Artificial Sequence
  Description of Artificial Sequence: Synthetic oligonucleotide
  Antisense Strand to SEQ ID NO: 438809
ucacuccaguucaacuucu

SEQ ID NO: 438811 - RNA, 19 nt, Artificial Sequence
  Description of Artificial Sequence: Synthetic oligonucleotide
  Sense strand starting at position 2605 of SEQ ID NO: 316766
acuauauauugcccaggaa

SEQ ID NO: 438812 - RNA, 19 nt, Artificial Sequence
  Description of Artificial Sequence: Synthetic oligonucleotide
  Antisense Strand to SEQ ID NO: 438811
uuccugggcaauauauagu

SEQ ID NO: 438813 - RNA, 19 nt, Artificial Sequence
  Description of Artificial Sequence: Synthetic oligonucleotide
  Sense strand starting at position 2689 of SEQ ID NO: 316766
gugcuaucaggaggaggua

SEQ ID NO: 438814 - RNA, 19 nt, Artificial Sequence
  Description of Artificial Sequence: Synthetic oligonucleotide
  Antisense Strand to SEQ ID NO: 438813
uaccuccuccugauagcac

SEQ ID NO: 438815 - RNA, 19 nt, Artificial Sequence
  Description of Artificial Sequence: Synthetic oligonucleotide
  Sense strand starting at position 2704 of SEQ ID NO: 316766
gguaucuucugacuacacu

SEQ ID NO: 438816 - RNA, 19 nt, Artificial Sequence
  Description of Artificial Sequence: Synthetic oligonucleotide
  Antisense Strand to SEQ ID NO: 438815
aguguagucagaagauacc

SEQ ID NO: 438817 - RNA, 19 nt, Artificial Sequence
  Description of Artificial Sequence: Synthetic oligonucleotide
  Sense strand starting at position 2738 of SEQ ID NO: 316766
gcaagaccuuccuugacaa

SEQ ID NO: 438818 - RNA, 19 nt, Artificial Sequence
  Description of Artificial Sequence: Synthetic oligonucleotide
  Antisense Strand to SEQ ID NO: 438817
uugucaaggaaggucuugc

SEQ ID NO: 438819 - RNA, 19 nt, Artificial Sequence
  Description of Artificial Sequence: Synthetic oligonucleotide
  Sense strand starting at position 2762 of SEQ ID NO: 316766
cugggaaacucaucucugu

SEQ ID NO: 438820 - RNA, 19 nt, Artificial Sequence
  Description of Artificial Sequence: Synthetic oligonucleotide
  Antisense Strand to SEQ ID NO: 438819
acagagaugaguuucccag

SEQ ID NO: 438821 - RNA, 19 nt, Artificial Sequence
  Description of Artificial Sequence: Synthetic oligonucleotide
  Sense strand starting at position 2808 of SEQ ID NO: 316766
uuagaucuauguuccauau

SEQ ID NO: 438822 - RNA, 19 nt, Artificial Sequence
  Description of Artificial Sequence: Synthetic oligonucleotide
  Antisense Strand to SEQ ID NO: 438821
auauggaacauagaucuaa

SEQ ID NO: 438823 - RNA, 19 nt, Artificial Sequence
  Description of Artificial Sequence: Synthetic oligonucleotide
  Sense strand starting at position 2834 of SEQ ID NO: 316766
aggaguggcuccuuaaaca

SEQ ID NO: 438824 - RNA, 19 nt, Artificial Sequence
  Description of Artificial Sequence: Synthetic oligonucleotide
  Antisense Strand to SEQ ID NO: 438823
uguuuaaggagccacuccu

SEQ ID NO: 438825 - RNA, 19 nt, Artificial Sequence
  Description of Artificial Sequence: Synthetic oligonucleotide
  Sense strand starting at position 3415 of SEQ ID NO: 316766
cccuacuuccucggaauga

SEQ ID NO: 438826 - RNA, 19 nt, Artificial Sequence
  Description of Artificial Sequence: Synthetic oligonucleotide
  Antisense Strand to SEQ ID NO: 438825
ucauuccgaggaaguaggg

SEQ ID NO: 438827 - RNA, 19 nt, Artificial Sequence
  Description of Artificial Sequence: Synthetic oligonucleotide
  Sense strand starting at position 3426 of SEQ ID NO: 316766
cggaaugaucagggccaau

SEQ ID NO: 438828 - RNA, 19 nt, Artificial Sequence
  Description of Artificial Sequence: Synthetic oligonucleotide
  Antisense Strand to SEQ ID NO: 438827
auuggcccugaucauuccg

SEQ ID NO: 438829 - RNA, 19 nt, Artificial Sequence
  Description of Artificial Sequence: Synthetic oligonucleotide
  Sense strand starting at position 3512 of SEQ ID NO: 316766
acagcucugguuuauaauu

SEQ ID NO: 438830 - RNA, 19 nt, Artificial Sequence
  Description of Artificial Sequence: Synthetic oligonucleotide
  Antisense Strand to SEQ ID NO: 438829
aauuauaaaccagagcugu

SEQ ID NO: 438831 - RNA, 19 nt, Artificial Sequence
  Description of Artificial Sequence: Synthetic oligonucleotide
  Sense strand starting at position 3522 of SEQ ID NO: 316766
uuuauaauuccaugggacu

SEQ ID NO: 438832 - RNA, 19 nt, Artificial Sequence
  Description of Artificial Sequence: Synthetic oligonucleotide
  Antisense Strand to SEQ ID NO: 438831
agucccauggaauuauaaa

SEQ ID NO: 438833 - RNA, 19 nt, Artificial Sequence
  Description of Artificial Sequence: Synthetic oligonucleotide
  Sense strand starting at position 3523 of SEQ ID NO: 316766
uuauaauuccaugggacuc

SEQ ID NO: 438834 - RNA, 19 nt, Artificial Sequence
  Description of Artificial Sequence: Synthetic oligonucleotide
  Antisense Strand to SEQ ID NO: 438833
gagucccauggaauuauaa

SEQ ID NO: 438835 - RNA, 19 nt, Artificial Sequence
  Description of Artificial Sequence: Synthetic oligonucleotide
  Sense strand starting at position 3558 of SEQ ID NO: 316766
aaaguauaguccuuuggag

SEQ ID NO: 438836 - RNA, 19 nt, Artificial Sequence
  Description of Artificial Sequence: Synthetic oligonucleotide
  Antisense Strand to SEQ ID NO: 438835
cuccaaaggacuauacuuu

SEQ ID NO: 438837 - RNA, 19 nt, Artificial Sequence
  Description of Artificial Sequence: Synthetic oligonucleotide
  Sense strand starting at position 3560 of SEQ ID NO: 316766
aguauaguccuuuggagac

SEQ ID NO: 438838 - RNA, 19 nt, Artificial Sequence
  Description of Artificial Sequence: Synthetic oligonucleotide
  Antisense Strand to SEQ ID NO: 438837
gucuccaaaggacuauacu

SEQ ID NO: 438839 - RNA, 19 nt, Artificial Sequence
  Description of Artificial Sequence: Synthetic oligonucleotide
  Sense strand starting at position 3731 of SEQ ID NO: 316766
auaugaaagucuuugauug

SEQ ID NO: 438840 - RNA, 19 nt, Artificial Sequence
  Description of Artificial Sequence: Synthetic oligonucleotide
  Antisense Strand to SEQ ID NO: 438839
caaucaaagacuuucauau

SEQ ID NO: 438841 - RNA, 19 nt, Artificial Sequence
  Description of Artificial Sequence: Synthetic oligonucleotide
  Sense strand starting at position 3732 of SEQ ID NO: 316766
uaugaaagucuuugauuga

SEQ ID NO: 438842 - RNA, 19 nt, Artificial Sequence
  Description of Artificial Sequence: Synthetic oligonucleotide
  Antisense Strand to SEQ ID NO: 438841
ucaaucaaagacuuucaua

SEQ ID NO: 438843 - RNA, 19 nt, Artificial Sequence
  Description of Artificial Sequence: Synthetic oligonucleotide
  Sense strand starting at position 3735 of SEQ ID NO: 316766
gaaagucuuugauugaaug

SEQ ID NO: 438844 - RNA, 19 nt, Artificial Sequence
  Description of Artificial Sequence: Synthetic oligonucleotide
  Antisense Strand to SEQ ID NO: 438843
cauucaaucaaagacuuuc

SEQ ID NO: 438845 - RNA, 19 nt, Artificial Sequence
  Description of Artificial Sequence: Synthetic oligonucleotide
  Sense strand starting at position 3736 of SEQ ID NO: 316766
aaagucuuugauugaaugu

SEQ ID NO: 438846 - RNA, 19 nt, Artificial Sequence
  Description of Artificial Sequence: Synthetic oligonucleotide
  Antisense Strand to SEQ ID NO: 438845
acauucaaucaaagacuuu

SEQ ID NO: 438847 - RNA, 19 nt, Artificial Sequence
  Description of Artificial Sequence: Synthetic oligonucleotide
  Sense strand starting at position 3758 of SEQ ID NO: 316766
uacugcuuccuggaggaua

SEQ ID NO: 438848 - RNA, 19 nt, Artificial Sequence
  Description of Artificial Sequence: Synthetic oligonucleotide
  Antisense Strand to SEQ ID NO: 438847
uauccuccaggaagcagua

SEQ ID NO: 438849 - RNA, 19 nt, Artificial Sequence
  Description of Artificial Sequence: Synthetic oligonucleotide
  Sense strand starting at position 3926 of SEQ ID NO: 316766
gccugcuuugcuguaaagu

SEQ ID NO: 438850 - RNA, 19 nt, Artificial Sequence
  Description of Artificial Sequence: Synthetic oligonucleotide
  Antisense Strand to SEQ ID NO: 438849
acuuuacagcaaagcaggc

SEQ ID NO: 438851 - RNA, 19 nt, Artificial Sequence
  Description of Artificial Sequence: Synthetic oligonucleotide
  Sense strand starting at position 3968 of SEQ ID NO: 316766
ugaucuuugcuagauaauu

SEQ ID NO: 438852 - RNA, 19 nt, Artificial Sequence
  Description of Artificial Sequence: Synthetic oligonucleotide
  Antisense Strand to SEQ ID NO: 438851
aauuaucuagcaaagauca

SEQ ID NO: 438853 - RNA, 19 nt, Artificial Sequence
  Description of Artificial Sequence: Synthetic oligonucleotide
  Sense strand starting at position 231 of SEQ ID NO: 316767
acuucuuaagcuggugaca

SEQ ID NO: 438854 - RNA, 19 nt, Artificial Sequence
  Description of Artificial Sequence: Synthetic oligonucleotide
  Antisense Strand to SEQ ID NO: 438853
ugucaccagcuuaagaagu

SEQ ID NO: 438855 - RNA, 19 nt, Artificial Sequence
  Description of Artificial Sequence: Synthetic oligonucleotide
  Sense strand starting at position 332 of SEQ ID NO: 316767
ccuguuaagucaccugaac

SEQ ID NO: 438856 - RNA, 19 nt, Artificial Sequence
  Description of Artificial Sequence: Synthetic oligonucleotide
  Antisense Strand to SEQ ID NO: 438855
guucaggugacuuaacagg

SEQ ID NO: 438857 - RNA, 19 nt, Artificial Sequence
  Description of Artificial Sequence: Synthetic oligonucleotide
  Sense strand starting at position 402 of SEQ ID NO: 316767
caacaauauggcuggucau

SEQ ID NO: 438858 - RNA, 19 nt, Artificial Sequence
  Description of Artificial Sequence: Synthetic oligonucleotide
  Antisense Strand to SEQ ID NO: 438857
augaccagccauauuguug

SEQ ID NO: 438859 - RNA, 19 nt, Artificial Sequence
  Description of Artificial Sequence: Synthetic oligonucleotide
  Sense strand starting at position 403 of SEQ ID NO: 316767
aacaauauggcuggucaua

SEQ ID NO: 438860 - RNA, 19 nt, Artificial Sequence
  Description of Artificial Sequence: Synthetic oligonucleotide
  Antisense Strand to SEQ ID NO: 438859
uaugaccagccauauuguu

SEQ ID NO: 438861 - RNA, 19 nt, Artificial Sequence
  Description of Artificial Sequence: Synthetic oligonucleotide
  Sense strand starting at position 456 of SEQ ID NO: 316767
ugagaagucuuacuguuuc

SEQ ID NO: 438862 - RNA, 19 nt, Artificial Sequence
  Description of Artificial Sequence: Synthetic oligonucleotide
  Antisense Strand to SEQ ID NO: 438861
gaaacaguaagacuucuca

SEQ ID NO: 438863 - RNA, 19 nt, Artificial Sequence
  Description of Artificial Sequence: Synthetic oligonucleotide
  Sense strand starting at position 606 of SEQ ID NO: 316767
auggaagucugaucuauua

SEQ ID NO: 438864 - RNA, 19 nt, Artificial Sequence
  Description of Artificial Sequence: Synthetic oligonucleotide
  Antisense Strand to SEQ ID NO: 438863
uaauagaucagacuuccau

SEQ ID NO: 438865 - RNA, 19 nt, Artificial Sequence
  Description of Artificial Sequence: Synthetic oligonucleotide
  Sense strand starting at position 813 of SEQ ID NO: 316767
auguuacuagugggacuuu

SEQ ID NO: 438866 - RNA, 19 nt, Artificial Sequence
  Description of Artificial Sequence: Synthetic oligonucleotide
  Antisense Strand to SEQ ID NO: 438865
aaagucccacuaguaacau

SEQ ID NO: 438867 - RNA, 19 nt, Artificial Sequence
  Description of Artificial Sequence: Synthetic oligonucleotide
  Sense strand starting at position 892 of SEQ ID NO: 316767
ucaguaaccugagcagagu

SEQ ID NO: 438868 - RNA, 19 nt, Artificial Sequence
  Description of Artificial Sequence: Synthetic oligonucleotide
  Antisense Strand to SEQ ID NO: 438867
acucugcucagguuacuga

SEQ ID NO: 438869 - RNA, 19 nt, Artificial Sequence
  Description of Artificial Sequence: Synthetic oligonucleotide
  Sense strand starting at position 1023 of SEQ ID NO: 316767
auuaguucugcggaaauua

SEQ ID NO: 438870 - RNA, 19 nt, Artificial Sequence
  Description of Artificial Sequence: Synthetic oligonucleotide
  Antisense Strand to SEQ ID NO: 438869
uaauuuccgcagaacuaau

SEQ ID NO: 438871 - RNA, 19 nt, Artificial Sequence
  Description of Artificial Sequence: Synthetic oligonucleotide
  Sense strand starting at position 1066 of SEQ ID NO: 316767
guaugugugaaauagacac

SEQ ID NO: 438872 - RNA, 19 nt, Artificial Sequence
  Description of Artificial Sequence: Synthetic oligonucleotide
  Antisense Strand to SEQ ID NO: 438871
gugucuauuucacacauac

SEQ ID NO: 438873 - RNA, 19 nt, Artificial Sequence
  Description of Artificial Sequence: Synthetic oligonucleotide
  Sense strand starting at position 1089 of SEQ ID NO: 316767
cggagcuucgcugccaauu

SEQ ID NO: 438874 - RNA, 19 nt, Artificial Sequence
  Description of Artificial Sequence: Synthetic oligonucleotide
  Antisense Strand to SEQ ID NO: 438873
aauuggcagcgaagcuccg

SEQ ID NO: 438875 - RNA, 19 nt, Artificial Sequence
  Description of Artificial Sequence: Synthetic oligonucleotide
  Sense strand starting at position 1147 of SEQ ID NO: 316767
ccaugucacugggugcaaa

SEQ ID NO: 438876 - RNA, 19 nt, Artificial Sequence
  Description of Artificial Sequence: Synthetic oligonucleotide
  Antisense Strand to SEQ ID NO: 438875
uuugcacccagugacaugg

SEQ ID NO: 438877 - RNA, 19 nt, Artificial Sequence
  Description of Artificial Sequence: Synthetic oligonucleotide
  Sense strand starting at position 1181 of SEQ ID NO: 316767
aggguaacugggcgagaaa

SEQ ID NO: 438878 - RNA, 19 nt, Artificial Sequence
  Description of Artificial Sequence: Synthetic oligonucleotide
  Antisense Strand to SEQ ID NO: 438877
uuucucgcccaguuacccu

SEQ ID NO: 438879 - RNA, 19 nt, Artificial Sequence
  Description of Artificial Sequence: Synthetic oligonucleotide
  Sense strand starting at position 1225 of SEQ ID NO: 316767
guacuuccacccugaagag

SEQ ID NO: 438880 - RNA, 19 nt, Artificial Sequence
  Description of Artificial Sequence: Synthetic oligonucleotide
  Antisense Strand to SEQ ID NO: 438879
cucuucaggguggaaguac

SEQ ID NO: 438881 - RNA, 19 nt, Artificial Sequence
  Description of Artificial Sequence: Synthetic oligonucleotide
  Sense strand starting at position 1844 of SEQ ID NO: 316767
cgccauuaccaucagcaau

SEQ ID NO: 438882 - RNA, 19 nt, Artificial Sequence
  Description of Artificial Sequence: Synthetic oligonucleotide
  Antisense Strand to SEQ ID NO: 438881
auugcugaugguaauggcg

SEQ ID NO: 438883 - RNA, 19 nt, Artificial Sequence
  Description of Artificial Sequence: Synthetic oligonucleotide
  Sense strand starting at position 2270 of SEQ ID NO: 316767
uggaauguccagugggaca

SEQ ID NO: 438884 - RNA, 19 nt, Artificial Sequence
  Description of Artificial Sequence: Synthetic oligonucleotide
  Antisense Strand to SEQ ID NO: 438883
ugucccacuggacauucca

SEQ ID NO: 438885 - RNA, 19 nt, Artificial Sequence
  Description of Artificial Sequence: Synthetic oligonucleotide
  Sense strand starting at position 2365 of SEQ ID NO: 316767
gugcgugucauugccaguu

SEQ ID NO: 438886 - RNA, 19 nt, Artificial Sequence
  Description of Artificial Sequence: Synthetic oligonucleotide
  Antisense Strand to SEQ ID NO: 438885
aacuggcaaugacacgcac

SEQ ID NO: 438887 - RNA, 19 nt, Artificial Sequence
  Description of Artificial Sequence: Synthetic oligonucleotide
  Sense strand starting at position 2489 of SEQ ID NO: 316767
uugugcucaccacaggauu

SEQ ID NO: 438888 - RNA, 19 nt, Artificial Sequence
  Description of Artificial Sequence: Synthetic oligonucleotide
  Antisense Strand to SEQ ID NO: 438887
aauccuguggugagcacaa

SEQ ID NO: 438889 - RNA, 19 nt, Artificial Sequence
  Description of Artificial Sequence: Synthetic oligonucleotide
  Sense strand starting at position 2608 of SEQ ID NO: 316767
caagaaaucucaccguagu

SEQ ID NO: 438890 - RNA, 19 nt, Artificial Sequence
  Description of Artificial Sequence: Synthetic oligonucleotide
  Antisense Strand to SEQ ID NO: 438889
acuacggugagauuucuug

SEQ ID NO: 438891 - RNA, 19 nt, Artificial Sequence
  Description of Artificial Sequence: Synthetic oligonucleotide
  Sense strand starting at position 2609 of SEQ ID NO: 316767
aagaaaucucaccguaguc

SEQ ID NO: 438892 - RNA, 19 nt, Artificial Sequence
  Description of Artificial Sequence: Synthetic oligonucleotide
  Antisense Strand to SEQ ID NO: 438891
gacuacggugagauuucuu

SEQ ID NO: 438893 - RNA, 19 nt, Artificial Sequence
  Description of Artificial Sequence: Synthetic oligonucleotide
  Sense strand starting at position 2611 of SEQ ID NO: 316767
gaaaucucaccguagucau

SEQ ID NO: 438894 - RNA, 19 nt, Artificial Sequence
  Description of Artificial Sequence: Synthetic oligonucleotide
  Antisense Strand to SEQ ID NO: 438893
augacuacggugagauuuc

SEQ ID NO: 438895 - RNA, 19 nt, Artificial Sequence
  Description of Artificial Sequence: Synthetic oligonucleotide
  Sense strand starting at position 3130 of SEQ ID NO: 316767
uuagaugggucacuguuga

SEQ ID NO: 438896 - RNA, 19 nt, Artificial Sequence
  Description of Artificial Sequence: Synthetic oligonucleotide
  Antisense Strand to SEQ ID NO: 438895
ucaacagugacccaucuaa

SEQ ID NO: 438897 - RNA, 19 nt, Artificial Sequence
  Description of Artificial Sequence: Synthetic oligonucleotide
  Sense strand starting at position 3140 of SEQ ID NO: 316767
cacuguugacguggagaaa

SEQ ID NO: 438898 - RNA, 19 nt, Artificial Sequence
  Description of Artificial Sequence: Synthetic oligonucleotide
  Antisense Strand to SEQ ID NO: 438897
uuucuccacgucaacagug

SEQ ID NO: 438899 - RNA, 19 nt, Artificial Sequence
  Description of Artificial Sequence: Synthetic oligonucleotide
  Sense strand starting at position 3216 of SEQ ID NO: 316767
gaaggaaaugagugugguu

SEQ ID NO: 438900 - RNA, 19 nt, Artificial Sequence
  Description of Artificial Sequence: Synthetic oligonucleotide
  Antisense Strand to SEQ ID NO: 438899
aaccacacucauuuccuuc

SEQ ID NO: 438901 - RNA, 19 nt, Artificial Sequence
  Description of Artificial Sequence: Synthetic oligonucleotide
  Sense strand starting at position 3218 of SEQ ID NO: 316767
aggaaaugagugugguuag

SEQ ID NO: 438902 - RNA, 19 nt, Artificial Sequence
  Description of Artificial Sequence: Synthetic oligonucleotide
  Antisense Strand to SEQ ID NO: 438901
cuaaccacacucauuuccu

SEQ ID NO: 438903 - RNA, 19 nt, Artificial Sequence
  Description of Artificial Sequence: Synthetic oligonucleotide
  Sense strand starting at position 3225 of SEQ ID NO: 316767
gagugugguuagccaagaa

SEQ ID NO: 438904 - RNA, 19 nt, Artificial Sequence
  Description of Artificial Sequence: Synthetic oligonucleotide
  Antisense Strand to SEQ ID NO: 438903
uucuuggcuaaccacacuc

SEQ ID NO: 438905 - RNA, 19 nt, Artificial Sequence
  Description of Artificial Sequence: Synthetic oligonucleotide
  Sense strand starting at position 3269 of SEQ ID NO: 316767
guaucagacuuauuguauc

SEQ ID NO: 438906 - RNA, 19 nt, Artificial Sequence
  Description of Artificial Sequence: Synthetic oligonucleotide
  Antisense Strand to SEQ ID NO: 438905
gauacaauaagucugauac

SEQ ID NO: 438907 - RNA, 19 nt, Artificial Sequence
  Description of Artificial Sequence: Synthetic oligonucleotide
  Sense strand starting at position 3488 of SEQ ID NO: 316767
uggucugguguuuaacaau

SEQ ID NO: 438908 - RNA, 19 nt, Artificial Sequence
  Description of Artificial Sequence: Synthetic oligonucleotide
  Antisense Strand to SEQ ID NO: 438907
auuguuaaacaccagacca

SEQ ID NO: 438909 - RNA, 19 nt, Artificial Sequence
  Description of Artificial Sequence: Synthetic oligonucleotide
  Sense strand starting at position 3501 of SEQ ID NO: 316767
aacaauguguguucuggaa

SEQ ID NO: 438910 - RNA, 19 nt, Artificial Sequence
  Description of Artificial Sequence: Synthetic oligonucleotide
  Antisense Strand to SEQ ID NO: 438909
uuccagaacacacauuguu

SEQ ID NO: 438911 - RNA, 19 nt, Artificial Sequence
  Description of Artificial Sequence: Synthetic oligonucleotide
  Sense strand starting at position 3609 of SEQ ID NO: 316767
uugggaugcucagcagauu

SEQ ID NO: 438912 - RNA, 19 nt, Artificial Sequence
  Description of Artificial Sequence: Synthetic oligonucleotide
  Antisense Strand to SEQ ID NO: 438911
aaucugcugagcaucccaa

SEQ ID NO: 438913 - RNA, 19 nt, Artificial Sequence
  Description of Artificial Sequence: Synthetic oligonucleotide
  Sense strand starting at position 3630 of SEQ ID NO: 316767
agggcuuaagaucggugaa

SEQ ID NO: 438914 - RNA, 19 nt, Artificial Sequence
  Description of Artificial Sequence: Synthetic oligonucleotide
  Antisense Strand to SEQ ID NO: 438913
uucaccgaucuuaagcccu

SEQ ID NO: 438915 - RNA, 19 nt, Artificial Sequence
  Description of Artificial Sequence: Synthetic oligonucleotide
  Sense strand starting at position 3631 of SEQ ID NO: 316767
gggcuuaagaucggugaag

SEQ ID NO: 438916 - RNA, 19 nt, Artificial Sequence
  Description of Artificial Sequence: Synthetic oligonucleotide
  Antisense Strand to SEQ ID NO: 438915
cuucaccgaucuuaagccc

SEQ ID NO: 438917 - RNA, 19 nt, Artificial Sequence
  Description of Artificial Sequence: Synthetic oligonucleotide
  Sense strand starting at position 3642 of SEQ ID NO: 316767
cggugaagugccuagaaga

SEQ ID NO: 438918 - RNA, 19 nt, Artificial Sequence
  Description of Artificial Sequence: Synthetic oligonucleotide
  Antisense Strand to SEQ ID NO: 438917
ucuucuaggcacuucaccg

SEQ ID NO: 438919 - RNA, 19 nt, Artificial Sequence
  Description of Artificial Sequence: Synthetic oligonucleotide
  Sense strand starting at position 3715 of SEQ ID NO: 316767
uuaucaacccugugagggu

SEQ ID NO: 438920 - RNA, 19 nt, Artificial Sequence
  Description of Artificial Sequence: Synthetic oligonucleotide
  Antisense Strand to SEQ ID NO: 438919
acccucacaggguugauaa

SEQ ID NO: 438921 - RNA, 19 nt, Artificial Sequence
  Description of Artificial Sequence: Synthetic oligonucleotide
  Sense strand starting at position 3863 of SEQ ID NO: 316767
augcuaugauaugcuauau

SEQ ID NO: 438922 - RNA, 19 nt, Artificial Sequence
  Description of Artificial Sequence: Synthetic oligonucleotide
  Antisense Strand to SEQ ID NO: 438921
auauagcauaucauagcau

SEQ ID NO: 438923 - RNA, 19 nt, Artificial Sequence
  Description of Artificial Sequence: Synthetic oligonucleotide
  Sense strand starting at position 3934 of SEQ ID NO: 316767
uggucuaauugaguauacu

SEQ ID NO: 438924 - RNA, 19 nt, Artificial Sequence
  Description of Artificial Sequence: Synthetic oligonucleotide
  Antisense Strand to SEQ ID NO: 438923
aguauacucaauuagacca

SEQ ID NO: 438925 - RNA, 19 nt, Artificial Sequence
  Description of Artificial Sequence: Synthetic oligonucleotide
  Sense strand starting at position 3935 of SEQ ID NO: 316767
ggucuaauugaguauacug

SEQ ID NO: 438926 - RNA, 19 nt, Artificial Sequence
  Description of Artificial Sequence: Synthetic oligonucleotide
  Antisense Strand to SEQ ID NO: 438925
caguauacucaauuagacc

SEQ ID NO: 438927 - RNA, 19 nt, Artificial Sequence
  Description of Artificial Sequence: Synthetic oligonucleotide
  Sense strand starting at position 3944 of SEQ ID NO: 316767
gaguauacuggugguccaa

SEQ ID NO: 438928 - RNA, 19 nt, Artificial Sequence
  Description of Artificial Sequence: Synthetic oligonucleotide
  Antisense Strand to SEQ ID NO: 438927
uuggaccaccaguauacuc

SEQ ID NO: 438929 - RNA, 19 nt, Artificial Sequence
  Description of Artificial Sequence: Synthetic oligonucleotide
  Sense strand starting at position 3956 of SEQ ID NO: 316767
gguccaagcuuuccugaau

SEQ ID NO: 438930 - RNA, 19 nt, Artificial Sequence
  Description of Artificial Sequence: Synthetic oligonucleotide
  Antisense Strand to SEQ ID NO: 438929
auucaggaaagcuuggacc

SEQ ID NO: 438931 - RNA, 19 nt, Artificial Sequence
  Description of Artificial Sequence: Synthetic oligonucleotide
  Sense strand starting at position 3957 of SEQ ID NO: 316767
guccaagcuuuccugaaug

SEQ ID NO: 438932 - RNA, 19 nt, Artificial Sequence
  Description of Artificial Sequence: Synthetic oligonucleotide
  Antisense Strand to SEQ ID NO: 438931
cauucaggaaagcuuggac

SEQ ID NO: 438933 - RNA, 19 nt, Artificial Sequence
  Description of Artificial Sequence: Synthetic oligonucleotide
  Sense strand starting at position 239 of SEQ ID NO: 316768
aagugagagcuuuauucuu

SEQ ID NO: 438934 - RNA, 19 nt, Artificial Sequence
  Description of Artificial Sequence: Synthetic oligonucleotide
  Antisense Strand to SEQ ID NO: 438933
aagaauaaagcucucacuu

SEQ ID NO: 438935 - RNA, 19 nt, Artificial Sequence
  Description of Artificial Sequence: Synthetic oligonucleotide
  Sense strand starting at position 241 of SEQ ID NO: 316768
gugagagcuuuauucuuua

SEQ ID NO: 438936 - RNA, 19 nt, Artificial Sequence
  Description of Artificial Sequence: Synthetic oligonucleotide
  Antisense Strand to SEQ ID NO: 438935
uaaagaauaaagcucucac

SEQ ID NO: 438937 - RNA, 19 nt, Artificial Sequence
  Description of Artificial Sequence: Synthetic oligonucleotide
  Sense strand starting at position 351 of SEQ ID NO: 316768
auugauaucuuugcauaga

SEQ ID NO: 438938 - RNA, 19 nt, Artificial Sequence
  Description of Artificial Sequence: Synthetic oligonucleotide
  Antisense Strand to SEQ ID NO: 438937
ucuaugcaaagauaucaau

SEQ ID NO: 438939 - RNA, 19 nt, Artificial Sequence
  Description of Artificial Sequence: Synthetic oligonucleotide
  Sense strand starting at position 394 of SEQ ID NO: 316768
uugaucaaugaaugaugua

SEQ ID NO: 438940 - RNA, 19 nt, Artificial Sequence
  Description of Artificial Sequence: Synthetic oligonucleotide
  Antisense Strand to SEQ ID NO: 438939
uacaucauucauugaucaa

SEQ ID NO: 438941 - RNA, 19 nt, Artificial Sequence
  Description of Artificial Sequence: Synthetic oligonucleotide
  Sense strand starting at position 976 of SEQ ID NO: 316768
aaagaaacgccguaaucau

SEQ ID NO: 438942 - RNA, 19 nt, Artificial Sequence
  Description of Artificial Sequence: Synthetic oligonucleotide
  Antisense Strand to SEQ ID NO: 438941
augauuacggcguuucuuu

SEQ ID NO: 438943 - RNA, 19 nt, Artificial Sequence
  Description of Artificial Sequence: Synthetic oligonucleotide
  Sense strand starting at position 983 of SEQ ID NO: 316768
cgccguaaucauuaagaac

SEQ ID NO: 438944 - RNA, 19 nt, Artificial Sequence
  Description of Artificial Sequence: Synthetic oligonucleotide
  Antisense Strand to SEQ ID NO: 438943
guucuuaaugauuacggcg

SEQ ID NO: 438945 - RNA, 19 nt, Artificial Sequence
  Description of Artificial Sequence: Synthetic oligonucleotide
  Sense strand starting at position 1090 of SEQ ID NO: 316768
uuauauaaauggcugcaua

SEQ ID NO: 438946 - RNA, 19 nt, Artificial Sequence
  Description of Artificial Sequence: Synthetic oligonucleotide
  Antisense Strand to SEQ ID NO: 438945
uaugcagccauuuauauaa

SEQ ID NO: 438947 - RNA, 19 nt, Artificial Sequence
  Description of Artificial Sequence: Synthetic oligonucleotide
  Sense strand starting at position 1100 of SEQ ID NO: 316768
ggcugcauacaguauguaa

SEQ ID NO: 438948 - RNA, 19 nt, Artificial Sequence
  Description of Artificial Sequence: Synthetic oligonucleotide
  Antisense Strand to SEQ ID NO: 438947
uuacauacuguaugcagcc

SEQ ID NO: 438949 - RNA, 19 nt, Artificial Sequence
  Description of Artificial Sequence: Synthetic oligonucleotide
  Sense strand starting at position 1169 of SEQ ID NO: 316768
uagguaacguuucuugaaa

SEQ ID NO: 438950 - RNA, 19 nt, Artificial Sequence
  Description of Artificial Sequence: Synthetic oligonucleotide
  Antisense Strand to SEQ ID NO: 438949
uuucaagaaacguuaccua

SEQ ID NO: 438951 - RNA, 19 nt, Artificial Sequence
  Description of Artificial Sequence: Synthetic oligonucleotide
  Sense strand starting at position 1170 of SEQ ID NO: 316768
agguaacguuucuugaaau

SEQ ID NO: 438952 - RNA, 19 nt, Artificial Sequence
  Description of Artificial Sequence: Synthetic oligonucleotide
  Antisense Strand to SEQ ID NO: 438951
auuucaagaaacguuaccu

SEQ ID NO: 438953 - RNA, 19 nt, Artificial Sequence
  Description of Artificial Sequence: Synthetic oligonucleotide
  Sense strand starting at position 1294 of SEQ ID NO: 316768
cagaaagcaugguuguuua

SEQ ID NO: 438954 - RNA, 19 nt, Artificial Sequence
  Description of Artificial Sequence: Synthetic oligonucleotide
  Antisense Strand to SEQ ID NO: 438953
uaaacaaccaugcuuucug

SEQ ID NO: 438955 - RNA, 19 nt, Artificial Sequence
  Description of Artificial Sequence: Synthetic oligonucleotide
  Sense strand starting at position 1302 of SEQ ID NO: 316768
augguuguuuauccucuaa

SEQ ID NO: 438956 - RNA, 19 nt, Artificial Sequence
  Description of Artificial Sequence: Synthetic oligonucleotide
  Antisense Strand to SEQ ID NO: 438955
uuagaggauaaacaaccau

SEQ ID NO: 438957 - RNA, 19 nt, Artificial Sequence
  Description of Artificial Sequence: Synthetic oligonucleotide
  Sense strand starting at position 1304 of SEQ ID NO: 316768
gguuguuuauccucuaaga

SEQ ID NO: 438958 - RNA, 19 nt, Artificial Sequence
  Description of Artificial Sequence: Synthetic oligonucleotide
  Antisense Strand to SEQ ID NO: 438957
ucuuagaggauaaacaacc

SEQ ID NO: 438959 - RNA, 19 nt, Artificial Sequence
  Description of Artificial Sequence: Synthetic oligonucleotide
  Sense strand starting at position 1345 of SEQ ID NO: 316768
auguguuacucaccauauc

SEQ ID NO: 438960 - RNA, 19 nt, Artificial Sequence
  Description of Artificial Sequence: Synthetic oligonucleotide
  Antisense Strand to SEQ ID NO: 438959
gauauggugaguaacacau

SEQ ID NO: 438961 - RNA, 19 nt, Artificial Sequence
  Description of Artificial Sequence: Synthetic oligonucleotide
  Sense strand starting at position 1535 of SEQ ID NO: 316768
cagaguguuguguguauuu

SEQ ID NO: 438962 - RNA, 19 nt, Artificial Sequence
  Description of Artificial Sequence: Synthetic oligonucleotide
  Antisense Strand to SEQ ID NO: 438961
aaauacacacaacacucug

SEQ ID NO: 438963 - RNA, 19 nt, Artificial Sequence
  Description of Artificial Sequence: Synthetic oligonucleotide
  Sense strand starting at position 1537 of SEQ ID NO: 316768
gaguguuguguguauuuca

SEQ ID NO: 438964 - RNA, 19 nt, Artificial Sequence
  Description of Artificial Sequence: Synthetic oligonucleotide
  Antisense Strand to SEQ ID NO: 438963
ugaaauacacacaacacuc

SEQ ID NO: 438965 - RNA, 19 nt, Artificial Sequence
  Description of Artificial Sequence: Synthetic oligonucleotide
  Sense strand starting at position 2277 of SEQ ID NO: 316768
gccugaguccagggacuaa

SEQ ID NO: 438966 - RNA, 19 nt, Artificial Sequence
  Description of Artificial Sequence: Synthetic oligonucleotide
  Antisense Strand to SEQ ID NO: 438965
uuagucccuggacucaggc

SEQ ID NO: 438967 - RNA, 19 nt, Artificial Sequence
  Description of Artificial Sequence: Synthetic oligonucleotide
  Sense strand starting at position 2383 of SEQ ID NO: 316768
guucuaugaucuccagaau

SEQ ID NO: 438968 - RNA, 19 nt, Artificial Sequence
  Description of Artificial Sequence: Synthetic oligonucleotide
  Antisense Strand to SEQ ID NO: 438967
auucuggagaucauagaac

SEQ ID NO: 438969 - RNA, 19 nt, Artificial Sequence
  Description of Artificial Sequence: Synthetic oligonucleotide
  Sense strand starting at position 2467 of SEQ ID NO: 316768
auggaucuugcauaguaaa

SEQ ID NO: 438970 - RNA, 19 nt, Artificial Sequence
  Description of Artificial Sequence: Synthetic oligonucleotide
  Antisense Strand to SEQ ID NO: 438969
uuuacuaugcaagauccau

SEQ ID NO: 438971 - RNA, 19 nt, Artificial Sequence
  Description of Artificial Sequence: Synthetic oligonucleotide
  Sense strand starting at position 2478 of SEQ ID NO: 316768
auaguaaauguuugugagu

SEQ ID NO: 438972 - RNA, 19 nt, Artificial Sequence
  Description of Artificial Sequence: Synthetic oligonucleotide
  Antisense Strand to SEQ ID NO: 438971
acucacaaacauuuacuau

SEQ ID NO: 438973 - RNA, 19 nt, Artificial Sequence
  Description of Artificial Sequence: Synthetic oligonucleotide
  Sense strand starting at position 2479 of SEQ ID NO: 316768
uaguaaauguuugugagua

SEQ ID NO: 438974 - RNA, 19 nt, Artificial Sequence
  Description of Artificial Sequence: Synthetic oligonucleotide
  Antisense Strand to SEQ ID NO: 438973
uacucacaaacauuuacua

SEQ ID NO: 438975 - RNA, 19 nt, Artificial Sequence
  Description of Artificial Sequence: Synthetic oligonucleotide
  Sense strand starting at position 2550 of SEQ ID NO: 316768
gcaacacugugaguuggau

SEQ ID NO: 438976 - RNA, 19 nt, Artificial Sequence
  Description of Artificial Sequence: Synthetic oligonucleotide
  Antisense Strand to SEQ ID NO: 438975
auccaacucacaguguugc

SEQ ID NO: 438977 - RNA, 19 nt, Artificial Sequence
  Description of Artificial Sequence: Synthetic oligonucleotide
  Sense strand starting at position 2606 of SEQ ID NO: 316768
ccugacgagcucuauuauu

SEQ ID NO: 438978 - RNA, 19 nt, Artificial Sequence
  Description of Artificial Sequence: Synthetic oligonucleotide
  Antisense Strand to SEQ ID NO: 438977
aauaauagagcucgucagg

SEQ ID NO: 438979 - RNA, 19 nt, Artificial Sequence
  Description of Artificial Sequence: Synthetic oligonucleotide
  Sense strand starting at position 2705 of SEQ ID NO: 316768
gagauaacuguaugugaaa

SEQ ID NO: 438980 - RNA, 19 nt, Artificial Sequence
  Description of Artificial Sequence: Synthetic oligonucleotide
  Antisense Strand to SEQ ID NO: 438979
uuucacauacaguuaucuc

SEQ ID NO: 438981 - RNA, 19 nt, Artificial Sequence
  Description of Artificial Sequence: Synthetic oligonucleotide
  Sense strand starting at position 2706 of SEQ ID NO: 316768
agauaacuguaugugaaag

SEQ ID NO: 438982 - RNA, 19 nt, Artificial Sequence
  Description of Artificial Sequence: Synthetic oligonucleotide
  Antisense Strand to SEQ ID NO: 438981
cuuucacauacaguuaucu

SEQ ID NO: 438983 - RNA, 19 nt, Artificial Sequence
  Description of Artificial Sequence: Synthetic oligonucleotide
  Sense strand starting at position 2760 of SEQ ID NO: 316768
agcuuugcauacccagaau

SEQ ID NO: 438984 - RNA, 19 nt, Artificial Sequence
  Description of Artificial Sequence: Synthetic oligonucleotide
  Antisense Strand to SEQ ID NO: 438983
auucuggguaugcaaagcu

SEQ ID NO: 438985 - RNA, 19 nt, Artificial Sequence
  Description of Artificial Sequence: Synthetic oligonucleotide
  Sense strand starting at position 2903 of SEQ ID NO: 316768
uuugcauuugaaugcuacu

SEQ ID NO: 438986 - RNA, 19 nt, Artificial Sequence
  Description of Artificial Sequence: Synthetic oligonucleotide
  Antisense Strand to SEQ ID NO: 438985
aguagcauucaaaugcaaa

SEQ ID NO: 438987 - RNA, 19 nt, Artificial Sequence
  Description of Artificial Sequence: Synthetic oligonucleotide
  Sense strand starting at position 2995 of SEQ ID NO: 316768
cugcuuagucuggaaacuc

SEQ ID NO: 438988 - RNA, 19 nt, Artificial Sequence
  Description of Artificial Sequence: Synthetic oligonucleotide
  Antisense Strand to SEQ ID NO: 438987
gaguuuccagacuaagcag

SEQ ID NO: 438989 - RNA, 19 nt, Artificial Sequence
  Description of Artificial Sequence: Synthetic oligonucleotide
  Sense strand starting at position 3147 of SEQ ID NO: 316768
aucccucuucgggaaugua

SEQ ID NO: 438990 - RNA, 19 nt, Artificial Sequence
  Description of Artificial Sequence: Synthetic oligonucleotide
  Antisense Strand to SEQ ID NO: 438989
uacauucccgaagagggau

SEQ ID NO: 438991 - RNA, 19 nt, Artificial Sequence
  Description of Artificial Sequence: Synthetic oligonucleotide
  Sense strand starting at position 3155 of SEQ ID NO: 316768
ucgggaauguauccucuga

SEQ ID NO: 438992 - RNA, 19 nt, Artificial Sequence
  Description of Artificial Sequence: Synthetic oligonucleotide
  Antisense Strand to SEQ ID NO: 438991
ucagaggauacauucccga

SEQ ID NO: 438993 - RNA, 19 nt, Artificial Sequence
  Description of Artificial Sequence: Synthetic oligonucleotide
  Sense strand starting at position 3157 of SEQ ID NO: 316768
gggaauguauccucugagu

SEQ ID NO: 438994 - RNA, 19 nt, Artificial Sequence
  Description of Artificial Sequence: Synthetic oligonucleotide
  Antisense Strand to SEQ ID NO: 438993
acucagaggauacauuccc

SEQ ID NO: 438995 - RNA, 19 nt, Artificial Sequence
  Description of Artificial Sequence: Synthetic oligonucleotide
  Sense strand starting at position 3159 of SEQ ID NO: 316768
gaauguauccucugagugg

SEQ ID NO: 438996 - RNA, 19 nt, Artificial Sequence
  Description of Artificial Sequence: Synthetic oligonucleotide
  Antisense Strand to SEQ ID NO: 438995
ccacucagaggauacauuc

SEQ ID NO: 438997 - RNA, 19 nt, Artificial Sequence
  Description of Artificial Sequence: Synthetic oligonucleotide
  Sense strand starting at position 3163 of SEQ ID NO: 316768
guauccucugaguggaaca

SEQ ID NO: 438998 - RNA, 19 nt, Artificial Sequence
  Description of Artificial Sequence: Synthetic oligonucleotide
  Antisense Strand to SEQ ID NO: 438997
uguuccacucagaggauac

SEQ ID NO: 438999 - RNA, 19 nt, Artificial Sequence
  Description of Artificial Sequence: Synthetic oligonucleotide
  Sense strand starting at position 3224 of SEQ ID NO: 316768
cauuguguugauugugaag

SEQ ID NO: 439000 - RNA, 19 nt, Artificial Sequence
  Description of Artificial Sequence: Synthetic oligonucleotide
  Antisense Strand to SEQ ID NO: 438999
cuucacaaucaacacaaug

SEQ ID NO: 439001 - RNA, 19 nt, Artificial Sequence
  Description of Artificial Sequence: Synthetic oligonucleotide
  Sense strand starting at position 3584 of SEQ ID NO: 316768
ggaucuuuaccucauaugu

SEQ ID NO: 439002 - RNA, 19 nt, Artificial Sequence
  Description of Artificial Sequence: Synthetic oligonucleotide
  Antisense Strand to SEQ ID NO: 439001
acauaugagguaaagaucc

SEQ ID NO: 439003 - RNA, 19 nt, Artificial Sequence
  Description of Artificial Sequence: Synthetic oligonucleotide
  Sense strand starting at position 3629 of SEQ ID NO: 316768
guugaauuguaguugacac

SEQ ID NO: 439004 - RNA, 19 nt, Artificial Sequence
  Description of Artificial Sequence: Synthetic oligonucleotide
  Antisense Strand to SEQ ID NO: 439003
gugucaacuacaauucaac

SEQ ID NO: 439005 - RNA, 19 nt, Artificial Sequence
  Description of Artificial Sequence: Synthetic oligonucleotide
  Sense strand starting at position 3744 of SEQ ID NO: 316768
cugagaaccuuugcccauu

SEQ ID NO: 439006 - RNA, 19 nt, Artificial Sequence
  Description of Artificial Sequence: Synthetic oligonucleotide
  Antisense Strand to SEQ ID NO: 439005
aaugggcaaagguucucag

SEQ ID NO: 439007 - RNA, 19 nt, Artificial Sequence
  Description of Artificial Sequence: Synthetic oligonucleotide
  Sense strand starting at position 3836 of SEQ ID NO: 316768
uagaguccugucugacaaa

SEQ ID NO: 439008 - RNA, 19 nt, Artificial Sequence
  Description of Artificial Sequence: Synthetic oligonucleotide
  Antisense Strand to SEQ ID NO: 439007
uuugucagacaggacucua

SEQ ID NO: 439009 - RNA, 19 nt, Artificial Sequence
  Description of Artificial Sequence: Synthetic oligonucleotide
  Sense strand starting at position 3861 of SEQ ID NO: 316768
uagugaauucuauggcuaa

SEQ ID NO: 439010 - RNA, 19 nt, Artificial Sequence
  Description of Artificial Sequence: Synthetic oligonucleotide
  Antisense Strand to SEQ ID NO: 439009
uuagccauagaauucacua

SEQ ID NO: 439011 - RNA, 19 nt, Artificial Sequence
  Description of Artificial Sequence: Synthetic oligonucleotide
  Sense strand starting at position 3966 of SEQ ID NO: 316768
agagucaaacaucauguuu

SEQ ID NO: 439012 - RNA, 19 nt, Artificial Sequence
  Description of Artificial Sequence: Synthetic oligonucleotide
  Antisense Strand to SEQ ID NO: 439011
aaacaugauguuugacucu

SEQ ID NO: 439013 - RNA, 19 nt, Artificial Sequence
  Description of Artificial Sequence: Synthetic oligonucleotide
  Sense strand starting at position 46 of SEQ ID NO: 316769
guauuugcuuacuugccaa

SEQ ID NO: 439014 - RNA, 19 nt, Artificial Sequence
  Description of Artificial Sequence: Synthetic oligonucleotide
  Antisense Strand to SEQ ID NO: 439013
uuggcaaguaagcaaauac

SEQ ID NO: 439015 - RNA, 19 nt, Artificial Sequence
  Description of Artificial Sequence: Synthetic oligonucleotide
  Sense strand starting at position 111 of SEQ ID NO: 316769
uccaguuguaagggaauga

SEQ ID NO: 439016 - RNA, 19 nt, Artificial Sequence
  Description of Artificial Sequence: Synthetic oligonucleotide
  Antisense Strand to SEQ ID NO: 439015
ucauucccuuacaacugga

SEQ ID NO: 439017 - RNA, 19 nt, Artificial Sequence
  Description of Artificial Sequence: Synthetic oligonucleotide
  Sense strand starting at position 251 of SEQ ID NO: 316769
auggaauugcugcaauucu

SEQ ID NO: 439018 - RNA, 19 nt, Artificial Sequence
  Description of Artificial Sequence: Synthetic oligonucleotide
  Antisense Strand to SEQ ID NO: 439017
agaauugcagcaauuccau

SEQ ID NO: 439019 - RNA, 19 nt, Artificial Sequence
  Description of Artificial Sequence: Synthetic oligonucleotide
  Sense strand starting at position 275 of SEQ ID NO: 316769
aguaaacugguaggaucaa

SEQ ID NO: 439020 - RNA, 19 nt, Artificial Sequence
  Description of Artificial Sequence: Synthetic oligonucleotide
  Antisense Strand to SEQ ID NO: 439019
uugauccuaccaguuuacu

SEQ ID NO: 439021 - RNA, 19 nt, Artificial Sequence
  Description of Artificial Sequence: Synthetic oligonucleotide
  Sense strand starting at position 523 of SEQ ID NO: 316769
aagagaauuugucaucuag

SEQ ID NO: 439022 - RNA, 19 nt, Artificial Sequence
  Description of Artificial Sequence: Synthetic oligonucleotide
  Antisense Strand to SEQ ID NO: 439021
cuagaugacaaauucucuu

SEQ ID NO: 439023 - RNA, 19 nt, Artificial Sequence
  Description of Artificial Sequence: Synthetic oligonucleotide
  Sense strand starting at position 642 of SEQ ID NO: 316769
gggaaagcauucuuuaauu

SEQ ID NO: 439024 - RNA, 19 nt, Artificial Sequence
  Description of Artificial Sequence: Synthetic oligonucleotide
  Antisense Strand to SEQ ID NO: 439023
aauuaaagaaugcuuuccc

SEQ ID NO: 439025 - RNA, 19 nt, Artificial Sequence
  Description of Artificial Sequence: Synthetic oligonucleotide
  Sense strand starting at position 717 of SEQ ID NO: 316769
guuaauuuguuaucaguuc

SEQ ID NO: 439026 - RNA, 19 nt, Artificial Sequence
  Description of Artificial Sequence: Synthetic oligonucleotide
  Antisense Strand to SEQ ID NO: 439025
gaacugauaacaaauuaac

SEQ ID NO: 439027 - RNA, 19 nt, Artificial Sequence
  Description of Artificial Sequence: Synthetic oligonucleotide
  Sense strand starting at position 944 of SEQ ID NO: 316769
cugaguuccguuuagaaau

SEQ ID NO: 439028 - RNA, 19 nt, Artificial Sequence
  Description of Artificial Sequence: Synthetic oligonucleotide
  Antisense Strand to SEQ ID NO: 439027
auuucuaaacggaacucag

SEQ ID NO: 439029 - RNA, 19 nt, Artificial Sequence
  Description of Artificial Sequence: Synthetic oligonucleotide
  Sense strand starting at position 1043 of SEQ ID NO: 316769
augugaaauccucaugagu

SEQ ID NO: 439030 - RNA, 19 nt, Artificial Sequence
  Description of Artificial Sequence: Synthetic oligonucleotide
  Antisense Strand to SEQ ID NO: 439029
acucaugaggauuucacau

SEQ ID NO: 439031 - RNA, 19 nt, Artificial Sequence
  Description of Artificial Sequence: Synthetic oligonucleotide
  Sense strand starting at position 1067 of SEQ ID NO: 316769
ggguuaagugaggguccuu

SEQ ID NO: 439032 - RNA, 19 nt, Artificial Sequence
  Description of Artificial Sequence: Synthetic oligonucleotide
  Antisense Strand to SEQ ID NO: 439031
aaggacccucacuuaaccc

SEQ ID NO: 439033 - RNA, 19 nt, Artificial Sequence
  Description of Artificial Sequence: Synthetic oligonucleotide
  Sense strand starting at position 1072 of SEQ ID NO: 316769
aagugaggguccuuaagua

SEQ ID NO: 439034 - RNA, 19 nt, Artificial Sequence
  Description of Artificial Sequence: Synthetic oligonucleotide
  Antisense Strand to SEQ ID NO: 439033
uacuuaaggacccucacuu

SEQ ID NO: 439035 - RNA, 19 nt, Artificial Sequence
  Description of Artificial Sequence: Synthetic oligonucleotide
  Sense strand starting at position 1076 of SEQ ID NO: 316769
gaggguccuuaaguauaga

SEQ ID NO: 439036 - RNA, 19 nt, Artificial Sequence
  Description of Artificial Sequence: Synthetic oligonucleotide
  Antisense Strand to SEQ ID NO: 439035
ucuauacuuaaggacccuc

SEQ ID NO: 439037 - RNA, 19 nt, Artificial Sequence
  Description of Artificial Sequence: Synthetic oligonucleotide
  Sense strand starting at position 1084 of SEQ ID NO: 316769
uuaaguauagaacguuaca

SEQ ID NO: 439038 - RNA, 19 nt, Artificial Sequence
  Description of Artificial Sequence: Synthetic oligonucleotide
  Antisense Strand to SEQ ID NO: 439037
uguaacguucuauacuuaa

SEQ ID NO: 439039 - RNA, 19 nt, Artificial Sequence
  Description of Artificial Sequence: Synthetic oligonucleotide
  Sense strand starting at position 1087 of SEQ ID NO: 316769
aguauagaacguuacauau

SEQ ID NO: 439040 - RNA, 19 nt, Artificial Sequence
  Description of Artificial Sequence: Synthetic oligonucleotide
  Antisense Strand to SEQ ID NO: 439039
auauguaacguucuauacu

SEQ ID NO: 439041 - RNA, 19 nt, Artificial Sequence
  Description of Artificial Sequence: Synthetic oligonucleotide
  Sense strand starting at position 1152 of SEQ ID NO: 316769
ucgaauacuuucuugggua

SEQ ID NO: 439042 - RNA, 19 nt, Artificial Sequence
  Description of Artificial Sequence: Synthetic oligonucleotide
  Antisense Strand to SEQ ID NO: 439041
uacccaagaaaguauucga

SEQ ID NO: 439043 - RNA, 19 nt, Artificial Sequence
  Description of Artificial Sequence: Synthetic oligonucleotide
  Sense strand starting at position 1154 of SEQ ID NO: 316769
gaauacuuucuuggguaag

SEQ ID NO: 439044 - RNA, 19 nt, Artificial Sequence
  Description of Artificial Sequence: Synthetic oligonucleotide
  Antisense Strand to SEQ ID NO: 439043
cuuacccaagaaaguauuc

SEQ ID NO: 439045 - RNA, 19 nt, Artificial Sequence
  Description of Artificial Sequence: Synthetic oligonucleotide
  Sense strand starting at position 1156 of SEQ ID NO: 316769
auacuuucuuggguaaggu

SEQ ID NO: 439046 - RNA, 19 nt, Artificial Sequence
  Description of Artificial Sequence: Synthetic oligonucleotide
  Antisense Strand to SEQ ID NO: 439045
accuuacccaagaaaguau

SEQ ID NO: 439047 - RNA, 19 nt, Artificial Sequence
  Description of Artificial Sequence: Synthetic oligonucleotide
  Sense strand starting at position 1157 of SEQ ID NO: 316769
uacuuucuuggguaaggua

SEQ ID NO: 439048 - RNA, 19 nt, Artificial Sequence
  Description of Artificial Sequence: Synthetic oligonucleotide
  Antisense Strand to SEQ ID NO: 439047
uaccuuacccaagaaagua

SEQ ID NO: 439049 - RNA, 19 nt, Artificial Sequence
  Description of Artificial Sequence: Synthetic oligonucleotide
  Sense strand starting at position 1165 of SEQ ID NO: 316769
uggguaagguaucuuucuu

SEQ ID NO: 439050 - RNA, 19 nt, Artificial Sequence
  Description of Artificial Sequence: Synthetic oligonucleotide
  Antisense Strand to SEQ ID NO: 439049
aagaaagauaccuuaccca

SEQ ID NO: 439051 - RNA, 19 nt, Artificial Sequence
  Description of Artificial Sequence: Synthetic oligonucleotide
  Sense strand starting at position 1274 of SEQ ID NO: 316769
aauggagguuaucuccuaa

SEQ ID NO: 439052 - RNA, 19 nt, Artificial Sequence
  Description of Artificial Sequence: Synthetic oligonucleotide
  Antisense Strand to SEQ ID NO: 439051
uuaggagauaaccuccauu

SEQ ID NO: 439053 - RNA, 19 nt, Artificial Sequence
  Description of Artificial Sequence: Synthetic oligonucleotide
  Sense strand starting at position 1281 of SEQ ID NO: 316769
guuaucuccuaauuucguu

SEQ ID NO: 439054 - RNA, 19 nt, Artificial Sequence
  Description of Artificial Sequence: Synthetic oligonucleotide
  Antisense Strand to SEQ ID NO: 439053
aacgaaauuaggagauaac

SEQ ID NO: 439055 - RNA, 19 nt, Artificial Sequence
  Description of Artificial Sequence: Synthetic oligonucleotide
  Sense strand starting at position 1312 of SEQ ID NO: 316769
ggucauauacguguuacgu

SEQ ID NO: 439056 - RNA, 19 nt, Artificial Sequence
  Description of Artificial Sequence: Synthetic oligonucleotide
  Antisense Strand to SEQ ID NO: 439055
acguaacacguauaugacc

SEQ ID NO: 439057 - RNA, 19 nt, Artificial Sequence
  Description of Artificial Sequence: Synthetic oligonucleotide
  Sense strand starting at position 1313 of SEQ ID NO: 316769
gucauauacguguuacgug

SEQ ID NO: 439058 - RNA, 19 nt, Artificial Sequence
  Description of Artificial Sequence: Synthetic oligonucleotide
  Antisense Strand to SEQ ID NO: 439057
cacguaacacguauaugac

SEQ ID NO: 439059 - RNA, 19 nt, Artificial Sequence
  Description of Artificial Sequence: Synthetic oligonucleotide
  Sense strand starting at position 1328 of SEQ ID NO: 316769
cguguaagucuauauuucu

SEQ ID NO: 439060 - RNA, 19 nt, Artificial Sequence
  Description of Artificial Sequence: Synthetic oligonucleotide
  Antisense Strand to SEQ ID NO: 439059
agaaauauagacuuacacg

SEQ ID NO: 439061 - RNA, 19 nt, Artificial Sequence
  Description of Artificial Sequence: Synthetic oligonucleotide
  Sense strand starting at position 1419 of SEQ ID NO: 316769
cuuagauaacgacgacuua

SEQ ID NO: 439062 - RNA, 19 nt, Artificial Sequence
  Description of Artificial Sequence: Synthetic oligonucleotide
  Antisense Strand to SEQ ID NO: 439061
uaagucgucguuaucuaag

SEQ ID NO: 439063 - RNA, 19 nt, Artificial Sequence
  Description of Artificial Sequence: Synthetic oligonucleotide
  Sense strand starting at position 1783 of SEQ ID NO: 316769
gaggauuaccugugagccu

SEQ ID NO: 439064 - RNA, 19 nt, Artificial Sequence
  Description of Artificial Sequence: Synthetic oligonucleotide
  Antisense Strand to SEQ ID NO: 439063
aggcucacagguaauccuc

SEQ ID NO: 439065 - RNA, 19 nt, Artificial Sequence
  Description of Artificial Sequence: Synthetic oligonucleotide
  Sense strand starting at position 2214 of SEQ ID NO: 316769
cgaugagauaagcauguga

SEQ ID NO: 439066 - RNA, 19 nt, Artificial Sequence
  Description of Artificial Sequence: Synthetic oligonucleotide
  Antisense Strand to SEQ ID NO: 439065
ucacaugcuuaucucaucg

SEQ ID NO: 439067 - RNA, 19 nt, Artificial Sequence
  Description of Artificial Sequence: Synthetic oligonucleotide
  Sense strand starting at position 2216 of SEQ ID NO: 316769
augagauaagcaugugaga

SEQ ID NO: 439068 - RNA, 19 nt, Artificial Sequence
  Description of Artificial Sequence: Synthetic oligonucleotide
  Antisense Strand to SEQ ID NO: 439067
ucucacaugcuuaucucau

SEQ ID NO: 439069 - RNA, 19 nt, Artificial Sequence
  Description of Artificial Sequence: Synthetic oligonucleotide
  Sense strand starting at position 2227 of SEQ ID NO: 316769
augugagaaugcuuucuaa

SEQ ID NO: 439070 - RNA, 19 nt, Artificial Sequence
  Description of Artificial Sequence: Synthetic oligonucleotide
  Antisense Strand to SEQ ID NO: 439069
uuagaaagcauucucacau

SEQ ID NO: 439071 - RNA, 19 nt, Artificial Sequence
  Description of Artificial Sequence: Synthetic oligonucleotide
  Sense strand starting at position 2455 of SEQ ID NO: 316769
ccaggaacuguuuacaucu

SEQ ID NO: 439072 - RNA, 19 nt, Artificial Sequence
  Description of Artificial Sequence: Synthetic oligonucleotide
  Antisense Strand to SEQ ID NO: 439071
agauguaaacaguuccugg

SEQ ID NO: 439073 - RNA, 19 nt, Artificial Sequence
  Description of Artificial Sequence: Synthetic oligonucleotide
  Sense strand starting at position 2532 of SEQ ID NO: 316769
cagagaagauucguaguag

SEQ ID NO: 439074 - RNA, 19 nt, Artificial Sequence
  Description of Artificial Sequence: Synthetic oligonucleotide
  Antisense Strand to SEQ ID NO: 439073
cuacuacgaaucuucucug

SEQ ID NO: 439075 - RNA, 19 nt, Artificial Sequence
  Description of Artificial Sequence: Synthetic oligonucleotide
  Sense strand starting at position 2546 of SEQ ID NO: 316769
aguaguccuuccuuagaua

SEQ ID NO: 439076 - RNA, 19 nt, Artificial Sequence
  Description of Artificial Sequence: Synthetic oligonucleotide
  Antisense Strand to SEQ ID NO: 439075
uaucuaaggaaggacuacu

SEQ ID NO: 439077 - RNA, 19 nt, Artificial Sequence
  Description of Artificial Sequence: Synthetic oligonucleotide
  Sense strand starting at position 2547 of SEQ ID NO: 316769
guaguccuuccuuagauau

SEQ ID NO: 439078 - RNA, 19 nt, Artificial Sequence
  Description of Artificial Sequence: Synthetic oligonucleotide
  Antisense Strand to SEQ ID NO: 439077
auaucuaaggaaggacuac

SEQ ID NO: 439079 - RNA, 19 nt, Artificial Sequence
  Description of Artificial Sequence: Synthetic oligonucleotide
  Sense strand starting at position 3137 of SEQ ID NO: 316769
gggcaagcuugaucuugaa

SEQ ID NO: 439080 - RNA, 19 nt, Artificial Sequence
  Description of Artificial Sequence: Synthetic oligonucleotide
  Antisense Strand to SEQ ID NO: 439079
uucaagaucaagcuugccc

SEQ ID NO: 439081 - RNA, 19 nt, Artificial Sequence
  Description of Artificial Sequence: Synthetic oligonucleotide
  Sense strand starting at position 3141 of SEQ ID NO: 316769
aagcuugaucuugaagguu

SEQ ID NO: 439082 - RNA, 19 nt, Artificial Sequence
  Description of Artificial Sequence: Synthetic oligonucleotide
  Antisense Strand to SEQ ID NO: 439081
aaccuucaagaucaagcuu

SEQ ID NO: 439083 - RNA, 19 nt, Artificial Sequence
  Description of Artificial Sequence: Synthetic oligonucleotide
  Sense strand starting at position 3513 of SEQ ID NO: 316769
gcacuugcugauuggauaa

SEQ ID NO: 439084 - RNA, 19 nt, Artificial Sequence
  Description of Artificial Sequence: Synthetic oligonucleotide
  Antisense Strand to SEQ ID NO: 439083
uuauccaaucagcaagugc

SEQ ID NO: 439085 - RNA, 19 nt, Artificial Sequence
  Description of Artificial Sequence: Synthetic oligonucleotide
  Sense strand starting at position 3600 of SEQ ID NO: 316769
cugcuaaugguccaguauu

SEQ ID NO: 439086 - RNA, 19 nt, Artificial Sequence
  Description of Artificial Sequence: Synthetic oligonucleotide
  Antisense Strand to SEQ ID NO: 439085
aauacuggaccauuagcag

SEQ ID NO: 439087 - RNA, 19 nt, Artificial Sequence
  Description of Artificial Sequence: Synthetic oligonucleotide
  Sense strand starting at position 3911 of SEQ ID NO: 316769
gagcuagggcaguauagaa

SEQ ID NO: 439088 - RNA, 19 nt, Artificial Sequence
  Description of Artificial Sequence: Synthetic oligonucleotide
  Antisense Strand to SEQ ID NO: 439087
uucuauacugcccuagcuc

SEQ ID NO: 439089 - RNA, 19 nt, Artificial Sequence
  Description of Artificial Sequence: Synthetic oligonucleotide
  Sense strand starting at position 3920 of SEQ ID NO: 316769
caguauagaagauggugua

SEQ ID NO: 439090 - RNA, 19 nt, Artificial Sequence
  Description of Artificial Sequence: Synthetic oligonucleotide
  Antisense Strand to SEQ ID NO: 439089
uacaccaucuucuauacug

SEQ ID NO: 439091 - RNA, 19 nt, Artificial Sequence
  Description of Artificial Sequence: Synthetic oligonucleotide
  Sense strand starting at position 3921 of SEQ ID NO: 316769
aguauagaagaugguguau

SEQ ID NO: 439092 - RNA, 19 nt, Artificial Sequence
  Description of Artificial Sequence: Synthetic oligonucleotide
  Antisense Strand to SEQ ID NO: 439091
auacaccaucuucuauacu

SEQ ID NO: 439093 - RNA, 19 nt, Artificial Sequence
  Description of Artificial Sequence: Synthetic oligonucleotide
  Sense strand starting at position 59 of SEQ ID NO: 316770
acaggauacugcuuugaua

SEQ ID NO: 439094 - RNA, 19 nt, Artificial Sequence
  Description of Artificial Sequence: Synthetic oligonucleotide
  Antisense Strand to SEQ ID NO: 439093
uaucaaagcaguauccugu

SEQ ID NO: 439095 - RNA, 19 nt, Artificial Sequence
  Description of Artificial Sequence: Synthetic oligonucleotide
  Sense strand starting at position 61 of SEQ ID NO: 316770
aggauacugcuuugauaua

SEQ ID NO: 439096 - RNA, 19 nt, Artificial Sequence
  Description of Artificial Sequence: Synthetic oligonucleotide
  Antisense Strand to SEQ ID NO: 439095
uauaucaaagcaguauccu

SEQ ID NO: 439097 - RNA, 19 nt, Artificial Sequence
  Description of Artificial Sequence: Synthetic oligonucleotide
  Sense strand starting at position 273 of SEQ ID NO: 316770
cuuaaugagcuauguauga

SEQ ID NO: 439098 - RNA, 19 nt, Artificial Sequence
  Description of Artificial Sequence: Synthetic oligonucleotide
  Antisense Strand to SEQ ID NO: 439097
ucauacauagcucauuaag

SEQ ID NO: 439099 - RNA, 19 nt, Artificial Sequence
  Description of Artificial Sequence: Synthetic oligonucleotide
  Sense strand starting at position 277 of SEQ ID NO: 316770
augagcuauguaugacuga

SEQ ID NO: 439100 - RNA, 19 nt, Artificial Sequence
  Description of Artificial Sequence: Synthetic oligonucleotide
  Antisense Strand to SEQ ID NO: 439099
ucagucauacauagcucau

SEQ ID NO: 439101 - RNA, 19 nt, Artificial Sequence
  Description of Artificial Sequence: Synthetic oligonucleotide
  Sense strand starting at position 280 of SEQ ID NO: 316770
agcuauguaugacugauaa

SEQ ID NO: 439102 - RNA, 19 nt, Artificial Sequence
  Description of Artificial Sequence: Synthetic oligonucleotide
  Antisense Strand to SEQ ID NO: 439101
uuaucagucauacauagcu

SEQ ID NO: 439103 - RNA, 19 nt, Artificial Sequence
  Description of Artificial Sequence: Synthetic oligonucleotide
  Sense strand starting at position 439 of SEQ ID NO: 316770
gcaaucugugaugaauucu

SEQ ID NO: 439104 - RNA, 19 nt, Artificial Sequence
  Description of Artificial Sequence: Synthetic oligonucleotide
  Antisense Strand to SEQ ID NO: 439103
agaauucaucacagauugc

SEQ ID NO: 439105 - RNA, 19 nt, Artificial Sequence
  Description of Artificial Sequence: Synthetic oligonucleotide
  Sense strand starting at position 473 of SEQ ID NO: 316770
cuguauuaaccagaggcca

SEQ ID NO: 439106 - RNA, 19 nt, Artificial Sequence
  Description of Artificial Sequence: Synthetic oligonucleotide
  Antisense Strand to SEQ ID NO: 439105
uggccucugguuaauacag

SEQ ID NO: 439107 - RNA, 19 nt, Artificial Sequence
  Description of Artificial Sequence: Synthetic oligonucleotide
  Sense strand starting at position 681 of SEQ ID NO: 316770
ggacgcaguuauuuccaua

SEQ ID NO: 439108 - RNA, 19 nt, Artificial Sequence
  Description of Artificial Sequence: Synthetic oligonucleotide
  Antisense Strand to SEQ ID NO: 439107
uauggaaauaacugcgucc

SEQ ID NO: 439109 - RNA, 19 nt, Artificial Sequence
  Description of Artificial Sequence: Synthetic oligonucleotide
  Sense strand starting at position 907 of SEQ ID NO: 316770
ggaauuucuuucuaaagga

SEQ ID NO: 439110 - RNA, 19 nt, Artificial Sequence
  Description of Artificial Sequence: Synthetic oligonucleotide
  Antisense Strand to SEQ ID NO: 439109
uccuuuagaaagaaauucc

SEQ ID NO: 439111 - RNA, 19 nt, Artificial Sequence
  Description of Artificial Sequence: Synthetic oligonucleotide
  Sense strand starting at position 948 of SEQ ID NO: 316770
augcacaaugcauauguaa

SEQ ID NO: 439112 - RNA, 19 nt, Artificial Sequence
  Description of Artificial Sequence: Synthetic oligonucleotide
  Antisense Strand to SEQ ID NO: 439111
uuacauaugcauugugcau

SEQ ID NO: 439113 - RNA, 19 nt, Artificial Sequence
  Description of Artificial Sequence: Synthetic oligonucleotide
  Sense strand starting at position 1028 of SEQ ID NO: 316770
gucaauuucugagauucua

SEQ ID NO: 439114 - RNA, 19 nt, Artificial Sequence
  Description of Artificial Sequence: Synthetic oligonucleotide
  Antisense Strand to SEQ ID NO: 439113
uagaaucucagaaauugac

SEQ ID NO: 439115 - RNA, 19 nt, Artificial Sequence
  Description of Artificial Sequence: Synthetic oligonucleotide
  Sense strand starting at position 1199 of SEQ ID NO: 316770
aguuaaucuucuccuggaa

SEQ ID NO: 439116 - RNA, 19 nt, Artificial Sequence
  Description of Artificial Sequence: Synthetic oligonucleotide
  Antisense Strand to SEQ ID NO: 439115
uuccaggagaagauuaacu

SEQ ID NO: 439117 - RNA, 19 nt, Artificial Sequence
  Description of Artificial Sequence: Synthetic oligonucleotide
  Sense strand starting at position 1256 of SEQ ID NO: 316770
ugaagcagaugugugaaau

SEQ ID NO: 439118 - RNA, 19 nt, Artificial Sequence
  Description of Artificial Sequence: Synthetic oligonucleotide
  Antisense Strand to SEQ ID NO: 439117
auuucacacaucugcuuca

SEQ ID NO: 439119 - RNA, 19 nt, Artificial Sequence
  Description of Artificial Sequence: Synthetic oligonucleotide
  Sense strand starting at position 1257 of SEQ ID NO: 316770
gaagcagaugugugaaauu

SEQ ID NO: 439120 - RNA, 19 nt, Artificial Sequence
  Description of Artificial Sequence: Synthetic oligonucleotide
  Antisense Strand to SEQ ID NO: 439119
aauuucacacaucugcuuc

SEQ ID NO: 439121 - RNA, 19 nt, Artificial Sequence
  Description of Artificial Sequence: Synthetic oligonucleotide
  Sense strand starting at position 1289 of SEQ ID NO: 316770
gaggguauauaccuaauca

SEQ ID NO: 439122 - RNA, 19 nt, Artificial Sequence
  Description of Artificial Sequence: Synthetic oligonucleotide
  Antisense Strand to SEQ ID NO: 439121
ugauuagguauauacccuc

SEQ ID NO: 439123 - RNA, 19 nt, Artificial Sequence
  Description of Artificial Sequence: Synthetic oligonucleotide
  Sense strand starting at position 1293 of SEQ ID NO: 316770
guauauaccuaaucaggau

SEQ ID NO: 439124 - RNA, 19 nt, Artificial Sequence
  Description of Artificial Sequence: Synthetic oligonucleotide
  Antisense Strand to SEQ ID NO: 439123
auccugauuagguauauac

SEQ ID NO: 439125 - RNA, 19 nt, Artificial Sequence
  Description of Artificial Sequence: Synthetic oligonucleotide
  Sense strand starting at position 1299 of SEQ ID NO: 316770
accuaaucaggauggguua

SEQ ID NO: 439126 - RNA, 19 nt, Artificial Sequence
  Description of Artificial Sequence: Synthetic oligonucleotide
  Antisense Strand to SEQ ID NO: 439125
uaacccauccugauuaggu

SEQ ID NO: 439127 - RNA, 19 nt, Artificial Sequence
  Description of Artificial Sequence: Synthetic oligonucleotide
  Sense strand starting at position 2377 of SEQ ID NO: 316770
gcgagcgucagccuugaaa

SEQ ID NO: 439128 - RNA, 19 nt, Artificial Sequence
  Description of Artificial Sequence: Synthetic oligonucleotide
  Antisense Strand to SEQ ID NO: 439127
uuucaaggcugacgcucgc

SEQ ID NO: 439129 - RNA, 19 nt, Artificial Sequence
  Description of Artificial Sequence: Synthetic oligonucleotide
  Sense strand starting at position 2531 of SEQ ID NO: 316770
gugucaccucgccuuguau

SEQ ID NO: 439130 - RNA, 19 nt, Artificial Sequence
  Description of Artificial Sequence: Synthetic oligonucleotide
  Antisense Strand to SEQ ID NO: 439129
auacaaggcgaggugacac

SEQ ID NO: 439131 - RNA, 19 nt, Artificial Sequence
  Description of Artificial Sequence: Synthetic oligonucleotide
  Sense strand starting at position 2556 of SEQ ID NO: 316770
gccgguugugugccuaaca

SEQ ID NO: 439132 - RNA, 19 nt, Artificial Sequence
  Description of Artificial Sequence: Synthetic oligonucleotide
  Antisense Strand to SEQ ID NO: 439131
uguuaggcacacaaccggc

SEQ ID NO: 439133 - RNA, 19 nt, Artificial Sequence
  Description of Artificial Sequence: Synthetic oligonucleotide
  Sense strand starting at position 2862 of SEQ ID NO: 316770
ugcauuucuuuggcgagau

SEQ ID NO: 439134 - RNA, 19 nt, Artificial Sequence
  Description of Artificial Sequence: Synthetic oligonucleotide
  Antisense Strand to SEQ ID NO: 439133
aucucgccaaagaaaugca

SEQ ID NO: 439135 - RNA, 19 nt, Artificial Sequence
  Description of Artificial Sequence: Synthetic oligonucleotide
  Sense strand starting at position 2866 of SEQ ID NO: 316770
uuucuuuggcgagaucacu

SEQ ID NO: 439136 - RNA, 19 nt, Artificial Sequence
  Description of Artificial Sequence: Synthetic oligonucleotide
  Antisense Strand to SEQ ID NO: 439135
agugaucucgccaaagaaa

SEQ ID NO: 439137 - RNA, 19 nt, Artificial Sequence
  Description of Artificial Sequence: Synthetic oligonucleotide
  Sense strand starting at position 2908 of SEQ ID NO: 316770
agaauuaagacccgugaac

SEQ ID NO: 439138 - RNA, 19 nt, Artificial Sequence
  Description of Artificial Sequence: Synthetic oligonucleotide
  Antisense Strand to SEQ ID NO: 439137
guucacgggucuuaauucu

SEQ ID NO: 439139 - RNA, 19 nt, Artificial Sequence
  Description of Artificial Sequence: Synthetic oligonucleotide
  Sense strand starting at position 2980 of SEQ ID NO: 316770
uauuaagugcguguuguau

SEQ ID NO: 439140 - RNA, 19 nt, Artificial Sequence
  Description of Artificial Sequence: Synthetic oligonucleotide
  Antisense Strand to SEQ ID NO: 439139
auacaacacgcacuuaaua

SEQ ID NO: 439141 - RNA, 19 nt, Artificial Sequence
  Description of Artificial Sequence: Synthetic oligonucleotide
  Sense strand starting at position 3004 of SEQ ID NO: 316770
gugccucaugaauauuaaa

SEQ ID NO: 439142 - RNA, 19 nt, Artificial Sequence
  Description of Artificial Sequence: Synthetic oligonucleotide
  Antisense Strand to SEQ ID NO: 439141
uuuaauauucaugaggcac

SEQ ID NO: 439143 - RNA, 19 nt, Artificial Sequence
  Description of Artificial Sequence: Synthetic oligonucleotide
  Sense strand starting at position 3237 of SEQ ID NO: 316770
ccagguagaguuuguagaa

SEQ ID NO: 439144 - RNA, 19 nt, Artificial Sequence
  Description of Artificial Sequence: Synthetic oligonucleotide
  Antisense Strand to SEQ ID NO: 439143
uucuacaaacucuaccugg

SEQ ID NO: 439145 - RNA, 19 nt, Artificial Sequence
  Description of Artificial Sequence: Synthetic oligonucleotide
  Sense strand starting at position 3238 of SEQ ID NO: 316770
cagguagaguuuguagaac

SEQ ID NO: 439146 - RNA, 19 nt, Artificial Sequence
  Description of Artificial Sequence: Synthetic oligonucleotide
  Antisense Strand to SEQ ID NO: 439145
guucuacaaacucuaccug

SEQ ID NO: 439147 - RNA, 19 nt, Artificial Sequence
  Description of Artificial Sequence: Synthetic oligonucleotide
  Sense strand starting at position 3247 of SEQ ID NO: 316770
uuuguagaacuauggaaau

SEQ ID NO: 439148 - RNA, 19 nt, Artificial Sequence
  Description of Artificial Sequence: Synthetic oligonucleotide
  Antisense Strand to SEQ ID NO: 439147
auuuccauaguucuacaaa

SEQ ID NO: 439149 - RNA, 19 nt, Artificial Sequence
  Description of Artificial Sequence: Synthetic oligonucleotide
  Sense strand starting at position 3292 of SEQ ID NO: 316770
ggacacuguuggccaagau

SEQ ID NO: 439150 - RNA, 19 nt, Artificial Sequence
  Description of Artificial Sequence: Synthetic oligonucleotide
  Antisense Strand to SEQ ID NO: 439149
aucuuggccaacagugucc

SEQ ID NO: 439151 - RNA, 19 nt, Artificial Sequence
  Description of Artificial Sequence: Synthetic oligonucleotide
  Sense strand starting at position 3301 of SEQ ID NO: 316770
uggccaagaucuuuagauu

SEQ ID NO: 439152 - RNA, 19 nt, Artificial Sequence
  Description of Artificial Sequence: Synthetic oligonucleotide
  Antisense Strand to SEQ ID NO: 439151
aaucuaaagaucuuggcca

SEQ ID NO: 439153 - RNA, 19 nt, Artificial Sequence
  Description of Artificial Sequence: Synthetic oligonucleotide
  Sense strand starting at position 3302 of SEQ ID NO: 316770
ggccaagaucuuuagauuc

SEQ ID NO: 439154 - RNA, 19 nt, Artificial Sequence
  Description of Artificial Sequence: Synthetic oligonucleotide
  Antisense Strand to SEQ ID NO: 439153
gaaucuaaagaucuuggcc

SEQ ID NO: 439155 - RNA, 19 nt, Artificial Sequence
  Description of Artificial Sequence: Synthetic oligonucleotide
  Sense strand starting at position 3415 of SEQ ID NO: 316770
guaguuacguagcuaauuu

SEQ ID NO: 439156 - RNA, 19 nt, Artificial Sequence
  Description of Artificial Sequence: Synthetic oligonucleotide
  Antisense Strand to SEQ ID NO: 439155
aaauuagcuacguaacuac

SEQ ID NO: 439157 - RNA, 19 nt, Artificial Sequence
  Description of Artificial Sequence: Synthetic oligonucleotide
  Sense strand starting at position 3453 of SEQ ID NO: 316770
ugagaauguagacaguagu

SEQ ID NO: 439158 - RNA, 19 nt, Artificial Sequence
  Description of Artificial Sequence: Synthetic oligonucleotide
  Antisense Strand to SEQ ID NO: 439157
acuacugucuacauucuca

SEQ ID NO: 439159 - RNA, 19 nt, Artificial Sequence
  Description of Artificial Sequence: Synthetic oligonucleotide
  Sense strand starting at position 3493 of SEQ ID NO: 316770
accugcuuucuauaaggau

SEQ ID NO: 439160 - RNA, 19 nt, Artificial Sequence
  Description of Artificial Sequence: Synthetic oligonucleotide
  Antisense Strand to SEQ ID NO: 439159
auccuuauagaaagcaggu

SEQ ID NO: 439161 - RNA, 19 nt, Artificial Sequence
  Description of Artificial Sequence: Synthetic oligonucleotide
  Sense strand starting at position 3524 of SEQ ID NO: 316770
caugguagugucguaguuu

SEQ ID NO: 439162 - RNA, 19 nt, Artificial Sequence
  Description of Artificial Sequence: Synthetic oligonucleotide
  Antisense Strand to SEQ ID NO: 439161
aaacuacgacacuaccaug

SEQ ID NO: 439163 - RNA, 19 nt, Artificial Sequence
  Description of Artificial Sequence: Synthetic oligonucleotide
  Sense strand starting at position 3527 of SEQ ID NO: 316770
gguagugucguaguuucuu

SEQ ID NO: 439164 - RNA, 19 nt, Artificial Sequence
  Description of Artificial Sequence: Synthetic oligonucleotide
  Antisense Strand to SEQ ID NO: 439163
aagaaacuacgacacuacc

SEQ ID NO: 439165 - RNA, 19 nt, Artificial Sequence
  Description of Artificial Sequence: Synthetic oligonucleotide
  Sense strand starting at position 3570 of SEQ ID NO: 316770
cucuuaagugugcaagaac

SEQ ID NO: 439166 - RNA, 19 nt, Artificial Sequence
  Description of Artificial Sequence: Synthetic oligonucleotide
  Antisense Strand to SEQ ID NO: 439165
guucuugcacacuuaagag

SEQ ID NO: 439167 - RNA, 19 nt, Artificial Sequence
  Description of Artificial Sequence: Synthetic oligonucleotide
  Sense strand starting at position 3669 of SEQ ID NO: 316770
uggucucuggcauacauaa

SEQ ID NO: 439168 - RNA, 19 nt, Artificial Sequence
  Description of Artificial Sequence: Synthetic oligonucleotide
  Antisense Strand to SEQ ID NO: 439167
uuauguaugccagagacca

SEQ ID NO: 439169 - RNA, 19 nt, Artificial Sequence
  Description of Artificial Sequence: Synthetic oligonucleotide
  Sense strand starting at position 3857 of SEQ ID NO: 316770
ucagaaacacuguguuaca

SEQ ID NO: 439170 - RNA, 19 nt, Artificial Sequence
  Description of Artificial Sequence: Synthetic oligonucleotide
  Antisense Strand to SEQ ID NO: 439169
uguaacacaguguuucuga

SEQ ID NO: 439171 - RNA, 19 nt, Artificial Sequence
  Description of Artificial Sequence: Synthetic oligonucleotide
  Sense strand starting at position 3929 of SEQ ID NO: 316770
auagaucgcaucugggaaa

SEQ ID NO: 439172 - RNA, 19 nt, Artificial Sequence
  Description of Artificial Sequence: Synthetic oligonucleotide
  Antisense Strand to SEQ ID NO: 439171
uuucccagaugcgaucuau

SEQ ID NO: 439173 - RNA, 19 nt, Artificial Sequence
  Description of Artificial Sequence: Synthetic oligonucleotide
  Sense strand starting at position 79 of SEQ ID NO: 316771
guuguaauagcaugaggaa

SEQ ID NO: 439174 - RNA, 19 nt, Artificial Sequence
  Description of Artificial Sequence: Synthetic oligonucleotide
  Antisense Strand to SEQ ID NO: 439173
uuccucaugcuauuacaac

SEQ ID NO: 439175 - RNA, 19 nt, Artificial Sequence
  Description of Artificial Sequence: Synthetic oligonucleotide
  Sense strand starting at position 136 of SEQ ID NO: 316771
agcaaauaaugugacauuu

SEQ ID NO: 439176 - RNA, 19 nt, Artificial Sequence
  Description of Artificial Sequence: Synthetic oligonucleotide
  Antisense Strand to SEQ ID NO: 439175
aaaugucacauuauuugcu

SEQ ID NO: 439177 - RNA, 19 nt, Artificial Sequence
  Description of Artificial Sequence: Synthetic oligonucleotide
  Sense strand starting at position 177 of SEQ ID NO: 316771
uugcuuccuguuuaaagaa

SEQ ID NO: 439178 - RNA, 19 nt, Artificial Sequence
  Description of Artificial Sequence: Synthetic oligonucleotide
  Antisense Strand to SEQ ID NO: 439177
uucuuuaaacaggaagcaa

SEQ ID NO: 439179 - RNA, 19 nt, Artificial Sequence
  Description of Artificial Sequence: Synthetic oligonucleotide
  Sense strand starting at position 234 of SEQ ID NO: 316771
agaagaauuuaugaucgua

SEQ ID NO: 439180 - RNA, 19 nt, Artificial Sequence
  Description of Artificial Sequence: Synthetic oligonucleotide
  Antisense Strand to SEQ ID NO: 439179
uacgaucauaaauucuucu

SEQ ID NO: 439181 - RNA, 19 nt, Artificial Sequence
  Description of Artificial Sequence: Synthetic oligonucleotide
  Sense strand starting at position 384 of SEQ ID NO: 316771
gaagguaacucuguaagag

SEQ ID NO: 439182 - RNA, 19 nt, Artificial Sequence
  Description of Artificial Sequence: Synthetic oligonucleotide
  Antisense Strand to SEQ ID NO: 439181
cucuuacagaguuaccuuc

SEQ ID NO: 439183 - RNA, 19 nt, Artificial Sequence
  Description of Artificial Sequence: Synthetic oligonucleotide
  Sense strand starting at position 400 of SEQ ID NO: 316771
gagaaagcacaauguaugu

SEQ ID NO: 439184 - RNA, 19 nt, Artificial Sequence
  Description of Artificial Sequence: Synthetic oligonucleotide
  Antisense Strand to SEQ ID NO: 439183
acauacauugugcuuucuc

SEQ ID NO: 439185 - RNA, 19 nt, Artificial Sequence
  Description of Artificial Sequence: Synthetic oligonucleotide
  Sense strand starting at position 549 of SEQ ID NO: 316771
acagacauuuguugaauac

SEQ ID NO: 439186 - RNA, 19 nt, Artificial Sequence
  Description of Artificial Sequence: Synthetic oligonucleotide
  Antisense Strand to SEQ ID NO: 439185
guauucaacaaaugucugu

SEQ ID NO: 439187 - RNA, 19 nt, Artificial Sequence
  Description of Artificial Sequence: Synthetic oligonucleotide
  Sense strand starting at position 713 of SEQ ID NO: 316771
aucauaaggugaguuuaua

SEQ ID NO: 439188 - RNA, 19 nt, Artificial Sequence
  Description of Artificial Sequence: Synthetic oligonucleotide
  Antisense Strand to SEQ ID NO: 439187
uauaaacucaccuuaugau

SEQ ID NO: 439189 - RNA, 19 nt, Artificial Sequence
  Description of Artificial Sequence: Synthetic oligonucleotide
  Sense strand starting at position 914 of SEQ ID NO: 316771
ugaggaagugccugccaaa

SEQ ID NO: 439190 - RNA, 19 nt, Artificial Sequence
  Description of Artificial Sequence: Synthetic oligonucleotide
  Antisense Strand to SEQ ID NO: 439189
uuuggcaggcacuuccuca

SEQ ID NO: 439191 - RNA, 19 nt, Artificial Sequence
  Description of Artificial Sequence: Synthetic oligonucleotide
  Sense strand starting at position 1038 of SEQ ID NO: 316771
uguggaagacaauguagua

SEQ ID NO: 439192 - RNA, 19 nt, Artificial Sequence
  Description of Artificial Sequence: Synthetic oligonucleotide
  Antisense Strand to SEQ ID NO: 439191
uacuacauugucuuccaca

SEQ ID NO: 439193 - RNA, 19 nt, Artificial Sequence
  Description of Artificial Sequence: Synthetic oligonucleotide
  Sense strand starting at position 1045 of SEQ ID NO: 316771
gacaauguaguauguuacu

SEQ ID NO: 439194 - RNA, 19 nt, Artificial Sequence
  Description of Artificial Sequence: Synthetic oligonucleotide
  Antisense Strand to SEQ ID NO: 439193
aguaacauacuacauuguc

SEQ ID NO: 439195 - RNA, 19 nt, Artificial Sequence
  Description of Artificial Sequence: Synthetic oligonucleotide
  Sense strand starting at position 1192 of SEQ ID NO: 316771
gguaauuggcagcagcuaa

SEQ ID NO: 439196 - RNA, 19 nt, Artificial Sequence
  Description of Artificial Sequence: Synthetic oligonucleotide
  Antisense Strand to SEQ ID NO: 439195
uuagcugcugccaauuacc

SEQ ID NO: 439197 - RNA, 19 nt, Artificial Sequence
  Description of Artificial Sequence: Synthetic oligonucleotide
  Sense strand starting at position 1312 of SEQ ID NO: 316771
gacuuuaguuggcuguaaa

SEQ ID NO: 439198 - RNA, 19 nt, Artificial Sequence
  Description of Artificial Sequence: Synthetic oligonucleotide
  Antisense Strand to SEQ ID NO: 439197
uuuacagccaacuaaaguc

SEQ ID NO: 439199 - RNA, 19 nt, Artificial Sequence
  Description of Artificial Sequence: Synthetic oligonucleotide
  Sense strand starting at position 1532 of SEQ ID NO: 316771
cgagaaccaguuuaagcua

SEQ ID NO: 439200 - RNA, 19 nt, Artificial Sequence
  Description of Artificial Sequence: Synthetic oligonucleotide
  Antisense Strand to SEQ ID NO: 439199
uagcuuaaacugguucucg

SEQ ID NO: 439201 - RNA, 19 nt, Artificial Sequence
  Description of Artificial Sequence: Synthetic oligonucleotide
  Sense strand starting at position 1602 of SEQ ID NO: 316771
gggauaguauuaccucuuu

SEQ ID NO: 439202 - RNA, 19 nt, Artificial Sequence
  Description of Artificial Sequence: Synthetic oligonucleotide
  Antisense Strand to SEQ ID NO: 439201
aaagagguaauacuauccc

SEQ ID NO: 439203 - RNA, 19 nt, Artificial Sequence
  Description of Artificial Sequence: Synthetic oligonucleotide
  Sense strand starting at position 2044 of SEQ ID NO: 316771
aucagugguaacuacagua

SEQ ID NO: 439204 - RNA, 19 nt, Artificial Sequence
  Description of Artificial Sequence: Synthetic oligonucleotide
  Antisense Strand to SEQ ID NO: 439203
uacuguaguuaccacugau

SEQ ID NO: 439205 - RNA, 19 nt, Artificial Sequence
  Description of Artificial Sequence: Synthetic oligonucleotide
  Sense strand starting at position 2246 of SEQ ID NO: 316771
aguaaugucaugugaguca

SEQ ID NO: 439206 - RNA, 19 nt, Artificial Sequence
  Description of Artificial Sequence: Synthetic oligonucleotide
  Antisense Strand to SEQ ID NO: 439205
ugacucacaugacauuacu

SEQ ID NO: 439207 - RNA, 19 nt, Artificial Sequence
  Description of Artificial Sequence: Synthetic oligonucleotide
  Sense strand starting at position 2287 of SEQ ID NO: 316771
ugccaaagguuucucaaga

SEQ ID NO: 439208 - RNA, 19 nt, Artificial Sequence
  Description of Artificial Sequence: Synthetic oligonucleotide
  Antisense Strand to SEQ ID NO: 439207
ucuugagaaaccuuuggca

SEQ ID NO: 439209 - RNA, 19 nt, Artificial Sequence
  Description of Artificial Sequence: Synthetic oligonucleotide
  Sense strand starting at position 2288 of SEQ ID NO: 316771
gccaaagguuucucaagaa

SEQ ID NO: 439210 - RNA, 19 nt, Artificial Sequence
  Description of Artificial Sequence: Synthetic oligonucleotide
  Antisense Strand to SEQ ID NO: 439209
uucuugagaaaccuuuggc

SEQ ID NO: 439211 - RNA, 19 nt, Artificial Sequence
  Description of Artificial Sequence: Synthetic oligonucleotide
  Sense strand starting at position 2300 of SEQ ID NO: 316771
ucaagaaacuugguucuaa

SEQ ID NO: 439212 - RNA, 19 nt, Artificial Sequence
  Description of Artificial Sequence: Synthetic oligonucleotide
  Antisense Strand to SEQ ID NO: 439211
uuagaaccaaguuucuuga

SEQ ID NO: 439213 - RNA, 19 nt, Artificial Sequence
  Description of Artificial Sequence: Synthetic oligonucleotide
  Sense strand starting at position 2310 of SEQ ID NO: 316771
ugguucuaagucuauuaaa

SEQ ID NO: 439214 - RNA, 19 nt, Artificial Sequence
  Description of Artificial Sequence: Synthetic oligonucleotide
  Antisense Strand to SEQ ID NO: 439213
uuuaauagacuuagaacca

SEQ ID NO: 439215 - RNA, 19 nt, Artificial Sequence
  Description of Artificial Sequence: Synthetic oligonucleotide
  Sense strand starting at position 2391 of SEQ ID NO: 316771
ugaagaguugaauaguguu

SEQ ID NO: 439216 - RNA, 19 nt, Artificial Sequence
  Description of Artificial Sequence: Synthetic oligonucleotide
  Antisense Strand to SEQ ID NO: 439215
aacacuauucaacucuuca

SEQ ID NO: 439217 - RNA, 19 nt, Artificial Sequence
  Description of Artificial Sequence: Synthetic oligonucleotide
  Sense strand starting at position 2448 of SEQ ID NO: 316771
uccuuucuugaaggaacua

SEQ ID NO: 439218 - RNA, 19 nt, Artificial Sequence
  Description of Artificial Sequence: Synthetic oligonucleotide
  Antisense Strand to SEQ ID NO: 439217
uaguuccuucaagaaagga

SEQ ID NO: 439219 - RNA, 19 nt, Artificial Sequence
  Description of Artificial Sequence: Synthetic oligonucleotide
  Sense strand starting at position 2468 of SEQ ID NO: 316771
cuaguaagacauuguagcu

SEQ ID NO: 439220 - RNA, 19 nt, Artificial Sequence
  Description of Artificial Sequence: Synthetic oligonucleotide
  Antisense Strand to SEQ ID NO: 439219
agcuacaaugucuuacuag

SEQ ID NO: 439221 - RNA, 19 nt, Artificial Sequence
  Description of Artificial Sequence: Synthetic oligonucleotide
  Sense strand starting at position 2527 of SEQ ID NO: 316771
acuauuguaugugucuaaa

SEQ ID NO: 439222 - RNA, 19 nt, Artificial Sequence
  Description of Artificial Sequence: Synthetic oligonucleotide
  Antisense Strand to SEQ ID NO: 439221
uuuagacacauacaauagu

SEQ ID NO: 439223 - RNA, 19 nt, Artificial Sequence
  Description of Artificial Sequence: Synthetic oligonucleotide
  Sense strand starting at position 2530 of SEQ ID NO: 316771
auuguaugugucuaaacua

SEQ ID NO: 439224 - RNA, 19 nt, Artificial Sequence
  Description of Artificial Sequence: Synthetic oligonucleotide
  Antisense Strand to SEQ ID NO: 439223
uaguuuagacacauacaau

SEQ ID NO: 439225 - RNA, 19 nt, Artificial Sequence
  Description of Artificial Sequence: Synthetic oligonucleotide
  Sense strand starting at position 2662 of SEQ ID NO: 316771
guacucaacuguucuagaa

SEQ ID NO: 439226 - RNA, 19 nt, Artificial Sequence
  Description of Artificial Sequence: Synthetic oligonucleotide
  Antisense Strand to SEQ ID NO: 439225
uucuagaacaguugaguac

SEQ ID NO: 439227 - RNA, 19 nt, Artificial Sequence
  Description of Artificial Sequence: Synthetic oligonucleotide
  Sense strand starting at position 2786 of SEQ ID NO: 316771
ccgcacaaugcuuauugaa

SEQ ID NO: 439228 - RNA, 19 nt, Artificial Sequence
  Description of Artificial Sequence: Synthetic oligonucleotide
  Antisense Strand to SEQ ID NO: 439227
uucaauaagcauugugcgg

SEQ ID NO: 439229 - RNA, 19 nt, Artificial Sequence
  Description of Artificial Sequence: Synthetic oligonucleotide
  Sense strand starting at position 2788 of SEQ ID NO: 316771
gcacaaugcuuauugaaga

SEQ ID NO: 439230 - RNA, 19 nt, Artificial Sequence
  Description of Artificial Sequence: Synthetic oligonucleotide
  Antisense Strand to SEQ ID NO: 439229
ucuucaauaagcauugugc

SEQ ID NO: 439231 - RNA, 19 nt, Artificial Sequence
  Description of Artificial Sequence: Synthetic oligonucleotide
  Sense strand starting at position 2844 of SEQ ID NO: 316771
uccucuagacugggagauu

SEQ ID NO: 439232 - RNA, 19 nt, Artificial Sequence
  Description of Artificial Sequence: Synthetic oligonucleotide
  Antisense Strand to SEQ ID NO: 439231
aaucucccagucuagagga

SEQ ID NO: 439233 - RNA, 19 nt, Artificial Sequence
  Description of Artificial Sequence: Synthetic oligonucleotide
  Sense strand starting at position 2855 of SEQ ID NO: 316771
gggagauucuccuccugaa

SEQ ID NO: 439234 - RNA, 19 nt, Artificial Sequence
  Description of Artificial Sequence: Synthetic oligonucleotide
  Antisense Strand to SEQ ID NO: 439233
uucaggaggagaaucuccc

SEQ ID NO: 439235 - RNA, 19 nt, Artificial Sequence
  Description of Artificial Sequence: Synthetic oligonucleotide
  Sense strand starting at position 2867 of SEQ ID NO: 316771
uccugaaaugccuguuaca

SEQ ID NO: 439236 - RNA, 19 nt, Artificial Sequence
  Description of Artificial Sequence: Synthetic oligonucleotide
  Antisense Strand to SEQ ID NO: 439235
uguaacaggcauuucagga

SEQ ID NO: 439237 - RNA, 19 nt, Artificial Sequence
  Description of Artificial Sequence: Synthetic oligonucleotide
  Sense strand starting at position 2915 of SEQ ID NO: 316771
agguguuguucauuagaag

SEQ ID NO: 439238 - RNA, 19 nt, Artificial Sequence
  Description of Artificial Sequence: Synthetic oligonucleotide
  Antisense Strand to SEQ ID NO: 439237
cuucuaaugaacaacaccu

SEQ ID NO: 439239 - RNA, 19 nt, Artificial Sequence
  Description of Artificial Sequence: Synthetic oligonucleotide
  Sense strand starting at position 2916 of SEQ ID NO: 316771
gguguuguucauuagaagc

SEQ ID NO: 439240 - RNA, 19 nt, Artificial Sequence
  Description of Artificial Sequence: Synthetic oligonucleotide
  Antisense Strand to SEQ ID NO: 439239
gcuucuaaugaacaacacc

SEQ ID NO: 439241 - RNA, 19 nt, Artificial Sequence
  Description of Artificial Sequence: Synthetic oligonucleotide
  Sense strand starting at position 2986 of SEQ ID NO: 316771
augagacaaucucuaaggu

SEQ ID NO: 439242 - RNA, 19 nt, Artificial Sequence
  Description of Artificial Sequence: Synthetic oligonucleotide
  Antisense Strand to SEQ ID NO: 439241
accuuagagauugucucau

SEQ ID NO: 439243 - RNA, 19 nt, Artificial Sequence
  Description of Artificial Sequence: Synthetic oligonucleotide
  Sense strand starting at position 3003 of SEQ ID NO: 316771
guccacucgaacugaaagu

SEQ ID NO: 439244 - RNA, 19 nt, Artificial Sequence
  Description of Artificial Sequence: Synthetic oligonucleotide
  Antisense Strand to SEQ ID NO: 439243
acuuucaguucgaguggac

SEQ ID NO: 439245 - RNA, 19 nt, Artificial Sequence
  Description of Artificial Sequence: Synthetic oligonucleotide
  Sense strand starting at position 3212 of SEQ ID NO: 316771
accugaaauuugggagaca

SEQ ID NO: 439246 - RNA, 19 nt, Artificial Sequence
  Description of Artificial Sequence: Synthetic oligonucleotide
  Antisense Strand to SEQ ID NO: 439245
ugucucccaaauuucaggu

SEQ ID NO: 439247 - RNA, 19 nt, Artificial Sequence
  Description of Artificial Sequence: Synthetic oligonucleotide
  Sense strand starting at position 3449 of SEQ ID NO: 316771
guacuaaauuagcucaaug

SEQ ID NO: 439248 - RNA, 19 nt, Artificial Sequence
  Description of Artificial Sequence: Synthetic oligonucleotide
  Antisense Strand to SEQ ID NO: 439247
cauugagcuaauuuaguac

SEQ ID NO: 439249 - RNA, 19 nt, Artificial Sequence
  Description of Artificial Sequence: Synthetic oligonucleotide
  Sense strand starting at position 3574 of SEQ ID NO: 316771
guucuuauaugucuuuaca

SEQ ID NO: 439250 - RNA, 19 nt, Artificial Sequence
  Description of Artificial Sequence: Synthetic oligonucleotide
  Antisense Strand to SEQ ID NO: 439249
uguaaagacauauaagaac

SEQ ID NO: 439251 - RNA, 19 nt, Artificial Sequence
  Description of Artificial Sequence: Synthetic oligonucleotide
  Sense strand starting at position 3932 of SEQ ID NO: 316771
guguuuauauaauuccaca

SEQ ID NO: 439252 - RNA, 19 nt, Artificial Sequence
  Description of Artificial Sequence: Synthetic oligonucleotide
  Antisense Strand to SEQ ID NO: 439251
uguggaauuauauaaacac

SEQ ID NO: 439253 - RNA, 19 nt, Artificial Sequence
  Description of Artificial Sequence: Synthetic oligonucleotide
  Sense strand starting at position 2034 of SEQ ID NO: 316772
ucagaaauuccucaggcua

SEQ ID NO: 439254 - RNA, 19 nt, Artificial Sequence
  Description of Artificial Sequence: Synthetic oligonucleotide
  Antisense Strand to SEQ ID NO: 439253
uagccugaggaauuucuga

SEQ ID NO: 439255 - RNA, 19 nt, Artificial Sequence
  Description of Artificial Sequence: Synthetic oligonucleotide
  Sense strand starting at position 2036 of SEQ ID NO: 316772
agaaauuccucaggcuaca

SEQ ID NO: 439256 - RNA, 19 nt, Artificial Sequence
  Description of Artificial Sequence: Synthetic oligonucleotide
  Antisense Strand to SEQ ID NO: 439255
uguagccugaggaauuucu

SEQ ID NO: 439257 - RNA, 19 nt, Artificial Sequence
  Description of Artificial Sequence: Synthetic oligonucleotide
  Sense strand starting at position 2109 of SEQ ID NO: 316772
gcaugccuuucugucaaau

SEQ ID NO: 439258 - RNA, 19 nt, Artificial Sequence
  Description of Artificial Sequence: Synthetic oligonucleotide
  Antisense Strand to SEQ ID NO: 439257
auuugacagaaaggcaugc

SEQ ID NO: 439259 - RNA, 19 nt, Artificial Sequence
  Description of Artificial Sequence: Synthetic oligonucleotide
  Sense strand starting at position 2128 of SEQ ID NO: 316772
ucacgcuugugugcauaaa

SEQ ID NO: 439260 - RNA, 19 nt, Artificial Sequence
  Description of Artificial Sequence: Synthetic oligonucleotide
  Antisense Strand to SEQ ID NO: 439259
uuuaugcacacaagcguga

SEQ ID NO: 439261 - RNA, 19 nt, Artificial Sequence
  Description of Artificial Sequence: Synthetic oligonucleotide
  Sense strand starting at position 2167 of SEQ ID NO: 316772
gcuuucugugccgaggaaa

SEQ ID NO: 439262 - RNA, 19 nt, Artificial Sequence
  Description of Artificial Sequence: Synthetic oligonucleotide
  Antisense Strand to SEQ ID NO: 439261
uuuccucggcacagaaagc

SEQ ID NO: 439263 - RNA, 19 nt, Artificial Sequence
  Description of Artificial Sequence: Synthetic oligonucleotide
  Sense strand starting at position 2170 of SEQ ID NO: 316772
uucugugccgaggaaaguu

SEQ ID NO: 439264 - RNA, 19 nt, Artificial Sequence
  Description of Artificial Sequence: Synthetic oligonucleotide
  Antisense Strand to SEQ ID NO: 439263
aacuuuccucggcacagaa

SEQ ID NO: 439265 - RNA, 19 nt, Artificial Sequence
  Description of Artificial Sequence: Synthetic oligonucleotide
  Sense strand starting at position 2212 of SEQ ID NO: 316772
gagucagcauuucuguuua

SEQ ID NO: 439266 - RNA, 19 nt, Artificial Sequence
  Description of Artificial Sequence: Synthetic oligonucleotide
  Antisense Strand to SEQ ID NO: 439265
uaaacagaaaugcugacuc

SEQ ID NO: 439267 - RNA, 19 nt, Artificial Sequence
  Description of Artificial Sequence: Synthetic oligonucleotide
  Sense strand starting at position 2214 of SEQ ID NO: 316772
gucagcauuucuguuuauu

SEQ ID NO: 439268 - RNA, 19 nt, Artificial Sequence
  Description of Artificial Sequence: Synthetic oligonucleotide
  Antisense Strand to SEQ ID NO: 439267
aauaaacagaaaugcugac

SEQ ID NO: 439269 - RNA, 19 nt, Artificial Sequence
  Description of Artificial Sequence: Synthetic oligonucleotide
  Sense strand starting at position 2301 of SEQ ID NO: 316772
accugacaauaucaggaua

SEQ ID NO: 439270 - RNA, 19 nt, Artificial Sequence
  Description of Artificial Sequence: Synthetic oligonucleotide
  Antisense Strand to SEQ ID NO: 439269
uauccugauauugucaggu

SEQ ID NO: 439271 - RNA, 19 nt, Artificial Sequence
  Description of Artificial Sequence: Synthetic oligonucleotide
  Sense strand starting at position 2303 of SEQ ID NO: 316772
cugacaauaucaggauauc

SEQ ID NO: 439272 - RNA, 19 nt, Artificial Sequence
  Description of Artificial Sequence: Synthetic oligonucleotide
  Antisense Strand to SEQ ID NO: 439271
gauauccugauauugucag

SEQ ID NO: 439273 - RNA, 19 nt, Artificial Sequence
  Description of Artificial Sequence: Synthetic oligonucleotide
  Sense strand starting at position 2386 of SEQ ID NO: 316772
agaagagauuggccaccau

SEQ ID NO: 439274 - RNA, 19 nt, Artificial Sequence
  Description of Artificial Sequence: Synthetic oligonucleotide
  Antisense Strand to SEQ ID NO: 439273
augguggccaaucucuucu

SEQ ID NO: 439275 - RNA, 19 nt, Artificial Sequence
  Description of Artificial Sequence: Synthetic oligonucleotide
  Sense strand starting at position 2412 of SEQ ID NO: 316772
cugagaggaucacaaggua

SEQ ID NO: 439276 - RNA, 19 nt, Artificial Sequence
  Description of Artificial Sequence: Synthetic oligonucleotide
  Antisense Strand to SEQ ID NO: 439275
uaccuugugauccucucag

SEQ ID NO: 439277 - RNA, 19 nt, Artificial Sequence
  Description of Artificial Sequence: Synthetic oligonucleotide
  Sense strand starting at position 2464 of SEQ ID NO: 316772
cacugagugccugguaaua

SEQ ID NO: 439278 - RNA, 19 nt, Artificial Sequence
  Description of Artificial Sequence: Synthetic oligonucleotide
  Antisense Strand to SEQ ID NO: 439277
uauuaccaggcacucagug

SEQ ID NO: 439279 - RNA, 19 nt, Artificial Sequence
  Description of Artificial Sequence: Synthetic oligonucleotide
  Sense strand starting at position 2521 of SEQ ID NO: 316772
gucauuguuguggaaauaa

SEQ ID NO: 439280 - RNA, 19 nt, Artificial Sequence
  Description of Artificial Sequence: Synthetic oligonucleotide
  Antisense Strand to SEQ ID NO: 439279
uuauuuccacaacaaugac

SEQ ID NO: 439281 - RNA, 19 nt, Artificial Sequence
  Description of Artificial Sequence: Synthetic oligonucleotide
  Sense strand starting at position 2533 of SEQ ID NO: 316772
gaaauaacacuuugagguu

SEQ ID NO: 439282 - RNA, 19 nt, Artificial Sequence
  Description of Artificial Sequence: Synthetic oligonucleotide
  Antisense Strand to SEQ ID NO: 439281
aaccucaaaguguuauuuc

SEQ ID NO: 439283 - RNA, 19 nt, Artificial Sequence
  Description of Artificial Sequence: Synthetic oligonucleotide
  Sense strand starting at position 2715 of SEQ ID NO: 316772
gcuugaaacugacuguauu

SEQ ID NO: 439284 - RNA, 19 nt, Artificial Sequence
  Description of Artificial Sequence: Synthetic oligonucleotide
  Antisense Strand to SEQ ID NO: 439283
aauacagucaguuucaagc

SEQ ID NO: 439285 - RNA, 19 nt, Artificial Sequence
  Description of Artificial Sequence: Synthetic oligonucleotide
  Sense strand starting at position 2932 of SEQ ID NO: 316772
caaagaggucuuugucauc

SEQ ID NO: 439286 - RNA, 19 nt, Artificial Sequence
  Description of Artificial Sequence: Synthetic oligonucleotide
  Antisense Strand to SEQ ID NO: 439285
gaugacaaagaccucuuug

SEQ ID NO: 439287 - RNA, 19 nt, Artificial Sequence
  Description of Artificial Sequence: Synthetic oligonucleotide
  Sense strand starting at position 2935 of SEQ ID NO: 316772
agaggucuuugucaucaca

SEQ ID NO: 439288 - RNA, 19 nt, Artificial Sequence
  Description of Artificial Sequence: Synthetic oligonucleotide
  Antisense Strand to SEQ ID NO: 439287
ugugaugacaaagaccucu

SEQ ID NO: 439289 - RNA, 19 nt, Artificial Sequence
  Description of Artificial Sequence: Synthetic oligonucleotide
  Sense strand starting at position 2937 of SEQ ID NO: 316772
aggucuuugucaucacagu

SEQ ID NO: 439290 - RNA, 19 nt, Artificial Sequence
  Description of Artificial Sequence: Synthetic oligonucleotide
  Antisense Strand to SEQ ID NO: 439289
acugugaugacaaagaccu

SEQ ID NO: 439291 - RNA, 19 nt, Artificial Sequence
  Description of Artificial Sequence: Synthetic oligonucleotide
  Sense strand starting at position 2938 of SEQ ID NO: 316772
ggucuuugucaucacaguu

SEQ ID NO: 439292 - RNA, 19 nt, Artificial Sequence
  Description of Artificial Sequence: Synthetic oligonucleotide
  Antisense Strand to SEQ ID NO: 439291
aacugugaugacaaagacc

SEQ ID NO: 439293 - RNA, 19 nt, Artificial Sequence
  Description of Artificial Sequence: Synthetic oligonucleotide
  Sense strand starting at position 2962 of SEQ ID NO: 316772
aggauacaucucuggccuu

SEQ ID NO: 439294 - RNA, 19 nt, Artificial Sequence
  Description of Artificial Sequence: Synthetic oligonucleotide
  Antisense Strand to SEQ ID NO: 439293
aaggccagagauguauccu

SEQ ID NO: 439295 - RNA, 19 nt, Artificial Sequence
  Description of Artificial Sequence: Synthetic oligonucleotide
  Sense strand starting at position 3548 of SEQ ID NO: 316772
guucuuccaguguggcaaa

SEQ ID NO: 439296 - RNA, 19 nt, Artificial Sequence
  Description of Artificial Sequence: Synthetic oligonucleotide
  Antisense Strand to SEQ ID NO: 439295
uuugccacacuggaagaac

SEQ ID NO: 439297 - RNA, 19 nt, Artificial Sequence
  Description of Artificial Sequence: Synthetic oligonucleotide
  Sense strand starting at position 3617 of SEQ ID NO: 316772
aacagauugcauugcuguu

SEQ ID NO: 439298 - RNA, 19 nt, Artificial Sequence
  Description of Artificial Sequence: Synthetic oligonucleotide
  Antisense Strand to SEQ ID NO: 439297
aacagcaaugcaaucuguu

SEQ ID NO: 439299 - RNA, 19 nt, Artificial Sequence
  Description of Artificial Sequence: Synthetic oligonucleotide
  Sense strand starting at position 3641 of SEQ ID NO: 316772
gauuaaagccauugcgaca

SEQ ID NO: 439300 - RNA, 19 nt, Artificial Sequence
  Description of Artificial Sequence: Synthetic oligonucleotide
  Antisense Strand to SEQ ID NO: 439299
ugucgcaauggcuuuaauc

SEQ ID NO: 439301 - RNA, 19 nt, Artificial Sequence
  Description of Artificial Sequence: Synthetic oligonucleotide
  Sense strand starting at position 3648 of SEQ ID NO: 316772
gccauugcgacaggucuua

SEQ ID NO: 439302 - RNA, 19 nt, Artificial Sequence
  Description of Artificial Sequence: Synthetic oligonucleotide
  Antisense Strand to SEQ ID NO: 439301
uaagaccugucgcaauggc

SEQ ID NO: 439303 - RNA, 19 nt, Artificial Sequence
  Description of Artificial Sequence: Synthetic oligonucleotide
  Sense strand starting at position 3716 of SEQ ID NO: 316772
ugugacaaucuugguucua

SEQ ID NO: 439304 - RNA, 19 nt, Artificial Sequence
  Description of Artificial Sequence: Synthetic oligonucleotide
  Antisense Strand to SEQ ID NO: 439303
uagaaccaagauugucaca

SEQ ID NO: 439305 - RNA, 19 nt, Artificial Sequence
  Description of Artificial Sequence: Synthetic oligonucleotide
  Sense strand starting at position 3717 of SEQ ID NO: 316772
gugacaaucuugguucuau

SEQ ID NO: 439306 - RNA, 19 nt, Artificial Sequence
  Description of Artificial Sequence: Synthetic oligonucleotide
  Antisense Strand to SEQ ID NO: 439305
auagaaccaagauugucac

SEQ ID NO: 439307 - RNA, 19 nt, Artificial Sequence
  Description of Artificial Sequence: Synthetic oligonucleotide
  Sense strand starting at position 3732 of SEQ ID NO: 316772
cuaugcugccuggaauaua

SEQ ID NO: 439308 - RNA, 19 nt, Artificial Sequence
  Description of Artificial Sequence: Synthetic oligonucleotide
  Antisense Strand to SEQ ID NO: 439307
uauauuccaggcagcauag

SEQ ID NO: 439309 - RNA, 19 nt, Artificial Sequence
  Description of Artificial Sequence: Synthetic oligonucleotide
  Sense strand starting at position 3744 of SEQ ID NO: 316772
gaauauaagcuguggucau

SEQ ID NO: 439310 - RNA, 19 nt, Artificial Sequence
  Description of Artificial Sequence: Synthetic oligonucleotide
  Antisense Strand to SEQ ID NO: 439309
augaccacagcuuauauuc

SEQ ID NO: 439311 - RNA, 19 nt, Artificial Sequence
  Description of Artificial Sequence: Synthetic oligonucleotide
  Sense strand starting at position 3751 of SEQ ID NO: 316772
agcuguggucauuaacucu

SEQ ID NO: 439312 - RNA, 19 nt, Artificial Sequence
  Description of Artificial Sequence: Synthetic oligonucleotide
  Antisense Strand to SEQ ID NO: 439311
agaguuaaugaccacagcu

SEQ ID NO: 439313 - RNA, 19 nt, Artificial Sequence
  Description of Artificial Sequence: Synthetic oligonucleotide
  Sense strand starting at position 3758 of SEQ ID NO: 316772
gucauuaacucuuugggca

SEQ ID NO: 439314 - RNA, 19 nt, Artificial Sequence
  Description of Artificial Sequence: Synthetic oligonucleotide
  Antisense Strand to SEQ ID NO: 439313
ugcccaaagaguuaaugac

SEQ ID NO: 439315 - RNA, 19 nt, Artificial Sequence
  Description of Artificial Sequence: Synthetic oligonucleotide
  Sense strand starting at position 3794 of SEQ ID NO: 316772
guucuucuugaauauaaug

SEQ ID NO: 439316 - RNA, 19 nt, Artificial Sequence
  Description of Artificial Sequence: Synthetic oligonucleotide
  Antisense Strand to SEQ ID NO: 439315
cauuauauucaagaagaac

SEQ ID NO: 439317 - RNA, 19 nt, Artificial Sequence
  Description of Artificial Sequence: Synthetic oligonucleotide
  Sense strand starting at position 3825 of SEQ ID NO: 316772
gacgaaggacucuguuaaa

SEQ ID NO: 439318 - RNA, 19 nt, Artificial Sequence
  Description of Artificial Sequence: Synthetic oligonucleotide
  Antisense Strand to SEQ ID NO: 439317
uuuaacagaguccuucguc

SEQ ID NO: 439319 - RNA, 19 nt, Artificial Sequence
  Description of Artificial Sequence: Synthetic oligonucleotide
  Sense strand starting at position 3853 of SEQ ID NO: 316772
ugggcuuucugauaaggac

SEQ ID NO: 439320 - RNA, 19 nt, Artificial Sequence
  Description of Artificial Sequence: Synthetic oligonucleotide
  Antisense Strand to SEQ ID NO: 439319
guccuuaucagaaagccca

SEQ ID NO: 439321 - RNA, 19 nt, Artificial Sequence
  Description of Artificial Sequence: Synthetic oligonucleotide
  Sense strand starting at position 3867 of SEQ ID NO: 316772
aggacuugaucuguuaccu

SEQ ID NO: 439322 - RNA, 19 nt, Artificial Sequence
  Description of Artificial Sequence: Synthetic oligonucleotide
  Antisense Strand to SEQ ID NO: 439321
agguaacagaucaaguccu

SEQ ID NO: 439323 - RNA, 19 nt, Artificial Sequence
  Description of Artificial Sequence: Synthetic oligonucleotide
  Sense strand starting at position 3912 of SEQ ID NO: 316772
augcuugaugauuauaagu

SEQ ID NO: 439324 - RNA, 19 nt, Artificial Sequence
  Description of Artificial Sequence: Synthetic oligonucleotide
  Antisense Strand to SEQ ID NO: 439323
acuuauaaucaucaagcau

SEQ ID NO: 439325 - RNA, 19 nt, Artificial Sequence
  Description of Artificial Sequence: Synthetic oligonucleotide
  Sense strand starting at position 3914 of SEQ ID NO: 316772
gcuugaugauuauaagucu

SEQ ID NO: 439326 - RNA, 19 nt, Artificial Sequence
  Description of Artificial Sequence: Synthetic oligonucleotide
  Antisense Strand to SEQ ID NO: 439325
agacuuauaaucaucaagc

SEQ ID NO: 439327 - RNA, 19 nt, Artificial Sequence
  Description of Artificial Sequence: Synthetic oligonucleotide
  Sense strand starting at position 3917 of SEQ ID NO: 316772
ugaugauuauaagucuaag

SEQ ID NO: 439328 - RNA, 19 nt, Artificial Sequence
  Description of Artificial Sequence: Synthetic oligonucleotide
  Antisense Strand to SEQ ID NO: 439327
cuuagacuuauaaucauca

SEQ ID NO: 439329 - RNA, 19 nt, Artificial Sequence
  Description of Artificial Sequence: Synthetic oligonucleotide
  Sense strand starting at position 3923 of SEQ ID NO: 316772
uuauaagucuaaggaugaa

SEQ ID NO: 439330 - RNA, 19 nt, Artificial Sequence
  Description of Artificial Sequence: Synthetic oligonucleotide
  Antisense Strand to SEQ ID NO: 439329
uucauccuuagacuuauaa

SEQ ID NO: 439331 - RNA, 19 nt, Artificial Sequence
  Description of Artificial Sequence: Synthetic oligonucleotide
  Sense strand starting at position 3978 of SEQ ID NO: 316772
acagaaaucuuugugcuuc

SEQ ID NO: 439332 - RNA, 19 nt, Artificial Sequence
  Description of Artificial Sequence: Synthetic oligonucleotide
  Antisense Strand to SEQ ID NO: 439331
gaagcacaaagauuucugu

SEQ ID NO: 439333 - RNA, 19 nt, Artificial Sequence
  Description of Artificial Sequence: Synthetic oligonucleotide
  Sense strand starting at position 382 of SEQ ID NO: 316773
ucagaaauuccucaggcua

SEQ ID NO: 439334 - RNA, 19 nt, Artificial Sequence
  Description of Artificial Sequence: Synthetic oligonucleotide
  Antisense Strand to SEQ ID NO: 439333
uagccugaggaauuucuga

SEQ ID NO: 439335 - RNA, 19 nt, Artificial Sequence
  Description of Artificial Sequence: Synthetic oligonucleotide
  Sense strand starting at position 518 of SEQ ID NO: 316773
uucugugccgaggaaaguu

SEQ ID NO: 439336 - RNA, 19 nt, Artificial Sequence
  Description of Artificial Sequence: Synthetic oligonucleotide
  Antisense Strand to SEQ ID NO: 439335
aacuuuccucggcacagaa

SEQ ID NO: 439337 - RNA, 19 nt, Artificial Sequence
  Description of Artificial Sequence: Synthetic oligonucleotide
  Sense strand starting at position 560 of SEQ ID NO: 316773
gagucagcauuucuguuua

SEQ ID NO: 439338 - RNA, 19 nt, Artificial Sequence
  Description of Artificial Sequence: Synthetic oligonucleotide
  Antisense Strand to SEQ ID NO: 439337
uaaacagaaaugcugacuc

SEQ ID NO: 439339 - RNA, 19 nt, Artificial Sequence
  Description of Artificial Sequence: Synthetic oligonucleotide
  Sense strand starting at position 562 of SEQ ID NO: 316773
gucagcauuucuguuuauu

SEQ ID NO: 439340 - RNA, 19 nt, Artificial Sequence
  Description of Artificial Sequence: Synthetic oligonucleotide
  Antisense Strand to SEQ ID NO: 439339
aauaaacagaaaugcugac

SEQ ID NO: 439341 - RNA, 19 nt, Artificial Sequence
  Description of Artificial Sequence: Synthetic oligonucleotide
  Sense strand starting at position 734 of SEQ ID NO: 316773
agaagagauuggccaccau

SEQ ID NO: 439342 - RNA, 19 nt, Artificial Sequence
  Description of Artificial Sequence: Synthetic oligonucleotide
  Antisense Strand to SEQ ID NO: 439341
augguggccaaucucuucu

SEQ ID NO: 439343 - RNA, 19 nt, Artificial Sequence
  Description of Artificial Sequence: Synthetic oligonucleotide
  Sense strand starting at position 869 of SEQ ID NO: 316773
gucauuguuguggaaauaa

SEQ ID NO: 439344 - RNA, 19 nt, Artificial Sequence
  Description of Artificial Sequence: Synthetic oligonucleotide
  Antisense Strand to SEQ ID NO: 439343
uuauuuccacaacaaugac

SEQ ID NO: 439345 - RNA, 19 nt, Artificial Sequence
  Description of Artificial Sequence: Synthetic oligonucleotide
  Sense strand starting at position 881 of SEQ ID NO: 316773
gaaauaacacuuugagguu

SEQ ID NO: 439346 - RNA, 19 nt, Artificial Sequence
  Description of Artificial Sequence: Synthetic oligonucleotide
  Antisense Strand to SEQ ID NO: 439345
aaccucaaaguguuauuuc

SEQ ID NO: 439347 - RNA, 19 nt, Artificial Sequence
  Description of Artificial Sequence: Synthetic oligonucleotide
  Sense strand starting at position 1063 of SEQ ID NO: 316773
gcuugaaacugacuguauu

SEQ ID NO: 439348 - RNA, 19 nt, Artificial Sequence
  Description of Artificial Sequence: Synthetic oligonucleotide
  Antisense Strand to SEQ ID NO: 439347
aauacagucaguuucaagc

SEQ ID NO: 439349 - RNA, 19 nt, Artificial Sequence
  Description of Artificial Sequence: Synthetic oligonucleotide
  Sense strand starting at position 1280 of SEQ ID NO: 316773
caaagaggucuuugucauc

SEQ ID NO: 439350 - RNA, 19 nt, Artificial Sequence
  Description of Artificial Sequence: Synthetic oligonucleotide
  Antisense Strand to SEQ ID NO: 439349
gaugacaaagaccucuuug

SEQ ID NO: 439351 - RNA, 19 nt, Artificial Sequence
  Description of Artificial Sequence: Synthetic oligonucleotide
  Sense strand starting at position 1286 of SEQ ID NO: 316773
ggucuuugucaucacaguu

SEQ ID NO: 439352 - RNA, 19 nt, Artificial Sequence
  Description of Artificial Sequence: Synthetic oligonucleotide
  Antisense Strand to SEQ ID NO: 439351
aacugugaugacaaagacc

SEQ ID NO: 439353 - RNA, 19 nt, Artificial Sequence
  Description of Artificial Sequence: Synthetic oligonucleotide
  Sense strand starting at position 1310 of SEQ ID NO: 316773
aggauacaucucuggccuu

SEQ ID NO: 439354 - RNA, 19 nt, Artificial Sequence
  Description of Artificial Sequence: Synthetic oligonucleotide
  Antisense Strand to SEQ ID NO: 439353
aaggccagagauguauccu

SEQ ID NO: 439355 - RNA, 19 nt, Artificial Sequence
  Description of Artificial Sequence: Synthetic oligonucleotide
  Sense strand starting at position 1989 of SEQ ID NO: 316773
gauuaaagccauugcgaca

SEQ ID NO: 439356 - RNA, 19 nt, Artificial Sequence
  Description of Artificial Sequence: Synthetic oligonucleotide
  Antisense Strand to SEQ ID NO: 439355
ugucgcaauggcuuuaauc

SEQ ID NO: 439357 - RNA, 19 nt, Artificial Sequence
  Description of Artificial Sequence: Synthetic oligonucleotide
  Sense strand starting at position 2064 of SEQ ID NO: 316773
ugugacaaucuugguucua

SEQ ID NO: 439358 - RNA, 19 nt, Artificial Sequence
  Description of Artificial Sequence: Synthetic oligonucleotide
  Antisense Strand to SEQ ID NO: 439357
uagaaccaagauugucaca

SEQ ID NO: 439359 - RNA, 19 nt, Artificial Sequence
  Description of Artificial Sequence: Synthetic oligonucleotide
  Sense strand starting at position 2065 of SEQ ID NO: 316773
gugacaaucuugguucuau

SEQ ID NO: 439360 - RNA, 19 nt, Artificial Sequence
  Description of Artificial Sequence: Synthetic oligonucleotide
  Antisense Strand to SEQ ID NO: 439359
auagaaccaagauugucac

SEQ ID NO: 439361 - RNA, 19 nt, Artificial Sequence
  Description of Artificial Sequence: Synthetic oligonucleotide
  Sense strand starting at position 2080 of SEQ ID NO: 316773
cuaugcugccuggaauaua

SEQ ID NO: 439362 - RNA, 19 nt, Artificial Sequence
  Description of Artificial Sequence: Synthetic oligonucleotide
  Antisense Strand to SEQ ID NO: 439361
uauauuccaggcagcauag

SEQ ID NO: 439363 - RNA, 19 nt, Artificial Sequence
  Description of Artificial Sequence: Synthetic oligonucleotide
  Sense strand starting at position 2092 of SEQ ID NO: 316773
gaauauaagcuguggucau

SEQ ID NO: 439364 - RNA, 19 nt, Artificial Sequence
  Description of Artificial Sequence: Synthetic oligonucleotide
  Antisense Strand to SEQ ID NO: 439363
augaccacagcuuauauuc

SEQ ID NO: 439365 - RNA, 19 nt, Artificial Sequence
  Description of Artificial Sequence: Synthetic oligonucleotide
  Sense strand starting at position 2099 of SEQ ID NO: 316773
agcuguggucauuaacucu

SEQ ID NO: 439366 - RNA, 19 nt, Artificial Sequence
  Description of Artificial Sequence: Synthetic oligonucleotide
  Antisense Strand to SEQ ID NO: 439365
agaguuaaugaccacagcu

SEQ ID NO: 439367 - RNA, 19 nt, Artificial Sequence
  Description of Artificial Sequence: Synthetic oligonucleotide
  Sense strand starting at position 2106 of SEQ ID NO: 316773
gucauuaacucuuugggca

SEQ ID NO: 439368 - RNA, 19 nt, Artificial Sequence
  Description of Artificial Sequence: Synthetic oligonucleotide
  Antisense Strand to SEQ ID NO: 439367
ugcccaaagaguuaaugac

SEQ ID NO: 439369 - RNA, 19 nt, Artificial Sequence
  Description of Artificial Sequence: Synthetic oligonucleotide
  Sense strand starting at position 2142 of SEQ ID NO: 316773
guucuucuugaauauaaug

SEQ ID NO: 439370 - RNA, 19 nt, Artificial Sequence
  Description of Artificial Sequence: Synthetic oligonucleotide
  Antisense Strand to SEQ ID NO: 439369
cauuauauucaagaagaac

SEQ ID NO: 439371 - RNA, 19 nt, Artificial Sequence
  Description of Artificial Sequence: Synthetic oligonucleotide
  Sense strand starting at position 2173 of SEQ ID NO: 316773
gacgaaggacucuguuaaa

SEQ ID NO: 439372 - RNA, 19 nt, Artificial Sequence
  Description of Artificial Sequence: Synthetic oligonucleotide
  Antisense Strand to SEQ ID NO: 439371
uuuaacagaguccuucguc

SEQ ID NO: 439373 - RNA, 19 nt, Artificial Sequence
  Description of Artificial Sequence: Synthetic oligonucleotide
  Sense strand starting at position 2215 of SEQ ID NO: 316773
aggacuugaucuguuaccu

SEQ ID NO: 439374 - RNA, 19 nt, Artificial Sequence
  Description of Artificial Sequence: Synthetic oligonucleotide
  Antisense Strand to SEQ ID NO: 439373
agguaacagaucaaguccu

SEQ ID NO: 439375 - RNA, 19 nt, Artificial Sequence
  Description of Artificial Sequence: Synthetic oligonucleotide
  Sense strand starting at position 2260 of SEQ ID NO: 316773
augcuugaugauuauaagu

SEQ ID NO: 439376 - RNA, 19 nt, Artificial Sequence
  Description of Artificial Sequence: Synthetic oligonucleotide
  Antisense Strand to SEQ ID NO: 439375
acuuauaaucaucaagcau

SEQ ID NO: 439377 - RNA, 19 nt, Artificial Sequence
  Description of Artificial Sequence: Synthetic oligonucleotide
  Sense strand starting at position 2265 of SEQ ID NO: 316773
ugaugauuauaagucuaag

SEQ ID NO: 439378 - RNA, 19 nt, Artificial Sequence
  Description of Artificial Sequence: Synthetic oligonucleotide
  Antisense Strand to SEQ ID NO: 439377
cuuagacuuauaaucauca

SEQ ID NO: 439379 - RNA, 19 nt, Artificial Sequence
  Description of Artificial Sequence: Synthetic oligonucleotide
  Sense strand starting at position 2326 of SEQ ID NO: 316773
acagaaaucuuugugcuuc

SEQ ID NO: 439380 - RNA, 19 nt, Artificial Sequence
  Description of Artificial Sequence: Synthetic oligonucleotide
  Antisense Strand to SEQ ID NO: 439379
gaagcacaaagauuucugu

SEQ ID NO: 439381 - RNA, 19 nt, Artificial Sequence
  Description of Artificial Sequence: Synthetic oligonucleotide
  Sense strand starting at position 2413 of SEQ ID NO: 316773
agagcugaaucugaaauuu

SEQ ID NO: 439382 - RNA, 19 nt, Artificial Sequence
  Description of Artificial Sequence: Synthetic oligonucleotide
  Antisense Strand to SEQ ID NO: 439381
aaauuucagauucagcucu

SEQ ID NO: 439383 - RNA, 19 nt, Artificial Sequence
  Description of Artificial Sequence: Synthetic oligonucleotide
  Sense strand starting at position 2447 of SEQ ID NO: 316773
aggucuuguaaagaaaggu

SEQ ID NO: 439384 - RNA, 19 nt, Artificial Sequence
  Description of Artificial Sequence: Synthetic oligonucleotide
  Antisense Strand to SEQ ID NO: 439383
accuuucuuuacaagaccu

SEQ ID NO: 439385 - RNA, 19 nt, Artificial Sequence
  Description of Artificial Sequence: Synthetic oligonucleotide
  Sense strand starting at position 2461 of SEQ ID NO: 316773
aagguagacuguuuccuau

SEQ ID NO: 439386 - RNA, 19 nt, Artificial Sequence
  Description of Artificial Sequence: Synthetic oligonucleotide
  Antisense Strand to SEQ ID NO: 439385
auaggaaacagucuaccuu

SEQ ID NO: 439387 - RNA, 19 nt, Artificial Sequence
  Description of Artificial Sequence: Synthetic oligonucleotide
  Sense strand starting at position 2463 of SEQ ID NO: 316773
gguagacuguuuccuauaa

SEQ ID NO: 439388 - RNA, 19 nt, Artificial Sequence
  Description of Artificial Sequence: Synthetic oligonucleotide
  Antisense Strand to SEQ ID NO: 439387
uuauaggaaacagucuacc

SEQ ID NO: 439389 - RNA, 19 nt, Artificial Sequence
  Description of Artificial Sequence: Synthetic oligonucleotide
  Sense strand starting at position 2464 of SEQ ID NO: 316773
guagacuguuuccuauaau

SEQ ID NO: 439390 - RNA, 19 nt, Artificial Sequence
  Description of Artificial Sequence: Synthetic oligonucleotide
  Antisense Strand to SEQ ID NO: 439389
auuauaggaaacagucuac

SEQ ID NO: 439391 - RNA, 19 nt, Artificial Sequence
  Description of Artificial Sequence: Synthetic oligonucleotide
  Sense strand starting at position 2560 of SEQ ID NO: 316773
gcaggaagguuccucggau

SEQ ID NO: 439392 - RNA, 19 nt, Artificial Sequence
  Description of Artificial Sequence: Synthetic oligonucleotide
  Antisense Strand to SEQ ID NO: 439391
auccgaggaaccuuccugc

SEQ ID NO: 439393 - RNA, 19 nt, Artificial Sequence
  Description of Artificial Sequence: Synthetic oligonucleotide
  Sense strand starting at position 2561 of SEQ ID NO: 316773
caggaagguuccucggauu

SEQ ID NO: 439394 - RNA, 19 nt, Artificial Sequence
  Description of Artificial Sequence: Synthetic oligonucleotide
  Antisense Strand to SEQ ID NO: 439393
aauccgaggaaccuuccug

SEQ ID NO: 439395 - RNA, 19 nt, Artificial Sequence
  Description of Artificial Sequence: Synthetic oligonucleotide
  Sense strand starting at position 2572 of SEQ ID NO: 316773
cucggauuccuuugaaagg

SEQ ID NO: 439396 - RNA, 19 nt, Artificial Sequence
  Description of Artificial Sequence: Synthetic oligonucleotide
  Antisense Strand to SEQ ID NO: 439395
ccuuucaaaggaauccgag

SEQ ID NO: 439397 - RNA, 19 nt, Artificial Sequence
  Description of Artificial Sequence: Synthetic oligonucleotide
  Sense strand starting at position 2599 of SEQ ID NO: 316773
ggcuuacgggacugauuaa

SEQ ID NO: 439398 - RNA, 19 nt, Artificial Sequence
  Description of Artificial Sequence: Synthetic oligonucleotide
  Antisense Strand to SEQ ID NO: 439397
uuaaucagucccguaagcc

SEQ ID NO: 439399 - RNA, 19 nt, Artificial Sequence
  Description of Artificial Sequence: Synthetic oligonucleotide
  Sense strand starting at position 2600 of SEQ ID NO: 316773
gcuuacgggacugauuaaa

SEQ ID NO: 439400 - RNA, 19 nt, Artificial Sequence
  Description of Artificial Sequence: Synthetic oligonucleotide
  Antisense Strand to SEQ ID NO: 439399
uuuaaucagucccguaagc

SEQ ID NO: 439401 - RNA, 19 nt, Artificial Sequence
  Description of Artificial Sequence: Synthetic oligonucleotide
  Sense strand starting at position 2703 of SEQ ID NO: 316773
ucuccauccucguuaagga

SEQ ID NO: 439402 - RNA, 19 nt, Artificial Sequence
  Description of Artificial Sequence: Synthetic oligonucleotide
  Antisense Strand to SEQ ID NO: 439401
uccuuaacgaggauggaga

SEQ ID NO: 439403 - RNA, 19 nt, Artificial Sequence
  Description of Artificial Sequence: Synthetic oligonucleotide
  Sense strand starting at position 3150 of SEQ ID NO: 316773
gguucuaaccuggagaagu

SEQ ID NO: 439404 - RNA, 19 nt, Artificial Sequence
  Description of Artificial Sequence: Synthetic oligonucleotide
  Antisense Strand to SEQ ID NO: 439403
acuucuccagguuagaacc

SEQ ID NO: 439405 - RNA, 19 nt, Artificial Sequence
  Description of Artificial Sequence: Synthetic oligonucleotide
  Sense strand starting at position 3227 of SEQ ID NO: 316773
ucuauugugucucuaaaua

SEQ ID NO: 439406 - RNA, 19 nt, Artificial Sequence
  Description of Artificial Sequence: Synthetic oligonucleotide
  Antisense Strand to SEQ ID NO: 439405
uauuuagagacacaauaga

SEQ ID NO: 439407 - RNA, 19 nt, Artificial Sequence
  Description of Artificial Sequence: Synthetic oligonucleotide
  Sense strand starting at position 3291 of SEQ ID NO: 316773
uuuggauaagauugcauaa

SEQ ID NO: 439408 - RNA, 19 nt, Artificial Sequence
  Description of Artificial Sequence: Synthetic oligonucleotide
  Antisense Strand to SEQ ID NO: 439407
uuaugcaaucuuauccaaa

SEQ ID NO: 439409 - RNA, 19 nt, Artificial Sequence
  Description of Artificial Sequence: Synthetic oligonucleotide
  Sense strand starting at position 3625 of SEQ ID NO: 316773
uuaauaucacagugaaacg

SEQ ID NO: 439410 - RNA, 19 nt, Artificial Sequence
  Description of Artificial Sequence: Synthetic oligonucleotide
  Antisense Strand to SEQ ID NO: 439409
cguuucacugugauauuaa

SEQ ID NO: 439411 - RNA, 19 nt, Artificial Sequence
  Description of Artificial Sequence: Synthetic oligonucleotide
  Sense strand starting at position 3764 of SEQ ID NO: 316773
ggguguuggaccugcauaa

SEQ ID NO: 439412 - RNA, 19 nt, Artificial Sequence
  Description of Artificial Sequence: Synthetic oligonucleotide
  Antisense Strand to SEQ ID NO: 439411
uuaugcagguccaacaccc

SEQ ID NO: 439413 - RNA, 19 nt, Artificial Sequence
  Description of Artificial Sequence: Synthetic oligonucleotide
  Sense strand starting at position 305 of SEQ ID NO: 316774
uguacaugcuauuucuuau

SEQ ID NO: 439414 - RNA, 19 nt, Artificial Sequence
  Description of Artificial Sequence: Synthetic oligonucleotide
  Antisense Strand to SEQ ID NO: 439413
auaagaaauagcauguaca

SEQ ID NO: 439415 - RNA, 19 nt, Artificial Sequence
  Description of Artificial Sequence: Synthetic oligonucleotide
  Sense strand starting at position 385 of SEQ ID NO: 316774
ugguauauuccagaagugg

SEQ ID NO: 439416 - RNA, 19 nt, Artificial Sequence
  Description of Artificial Sequence: Synthetic oligonucleotide
  Antisense Strand to SEQ ID NO: 439415
ccacuucuggaauauacca

SEQ ID NO: 439417 - RNA, 19 nt, Artificial Sequence
  Description of Artificial Sequence: Synthetic oligonucleotide
  Sense strand starting at position 396 of SEQ ID NO: 316774
agaagugguguuugacaau

SEQ ID NO: 439418 - RNA, 19 nt, Artificial Sequence
  Description of Artificial Sequence: Synthetic oligonucleotide
  Antisense Strand to SEQ ID NO: 439417
auugucaaacaccacuucu

SEQ ID NO: 439419 - RNA, 19 nt, Artificial Sequence
  Description of Artificial Sequence: Synthetic oligonucleotide
  Sense strand starting at position 450 of SEQ ID NO: 316774
ucaggaaugcaauguagaa

SEQ ID NO: 439420 - RNA, 19 nt, Artificial Sequence
  Description of Artificial Sequence: Synthetic oligonucleotide
  Antisense Strand to SEQ ID NO: 439419
uucuacauugcauuccuga

SEQ ID NO: 439421 - RNA, 19 nt, Artificial Sequence
  Description of Artificial Sequence: Synthetic oligonucleotide
  Sense strand starting at position 457 of SEQ ID NO: 316774
ugcaauguagaaugauaua

SEQ ID NO: 439422 - RNA, 19 nt, Artificial Sequence
  Description of Artificial Sequence: Synthetic oligonucleotide
  Antisense Strand to SEQ ID NO: 439421
uauaucauucuacauugca

SEQ ID NO: 439423 - RNA, 19 nt, Artificial Sequence
  Description of Artificial Sequence: Synthetic oligonucleotide
  Sense strand starting at position 773 of SEQ ID NO: 316774
cagaauaucuuguucugag

SEQ ID NO: 439424 - RNA, 19 nt, Artificial Sequence
  Description of Artificial Sequence: Synthetic oligonucleotide
  Antisense Strand to SEQ ID NO: 439423
cucagaacaagauauucug

SEQ ID NO: 439425 - RNA, 19 nt, Artificial Sequence
  Description of Artificial Sequence: Synthetic oligonucleotide
  Sense strand starting at position 893 of SEQ ID NO: 316774
gagggcuaccucgagugau

SEQ ID NO: 439426 - RNA, 19 nt, Artificial Sequence
  Description of Artificial Sequence: Synthetic oligonucleotide
  Antisense Strand to SEQ ID NO: 439425
aucacucgagguagcccuc

SEQ ID NO: 439427 - RNA, 19 nt, Artificial Sequence
  Description of Artificial Sequence: Synthetic oligonucleotide
  Sense strand starting at position 1144 of SEQ ID NO: 316774
gaaagugucugauugaugg

SEQ ID NO: 439428 - RNA, 19 nt, Artificial Sequence
  Description of Artificial Sequence: Synthetic oligonucleotide
  Antisense Strand to SEQ ID NO: 439427
ccaucaaucagacacuuuc

SEQ ID NO: 439429 - RNA, 19 nt, Artificial Sequence
  Description of Artificial Sequence: Synthetic oligonucleotide
  Sense strand starting at position 1146 of SEQ ID NO: 316774
aagugucugauugauggua

SEQ ID NO: 439430 - RNA, 19 nt, Artificial Sequence
  Description of Artificial Sequence: Synthetic oligonucleotide
  Antisense Strand to SEQ ID NO: 439429
uaccaucaaucagacacuu

SEQ ID NO: 439431 - RNA, 19 nt, Artificial Sequence
  Description of Artificial Sequence: Synthetic oligonucleotide
  Sense strand starting at position 1178 of SEQ ID NO: 316774
cgauaaugagucuaguaau

SEQ ID NO: 439432 - RNA, 19 nt, Artificial Sequence
  Description of Artificial Sequence: Synthetic oligonucleotide
  Antisense Strand to SEQ ID NO: 439431
auuacuagacucauuaucg

SEQ ID NO: 439433 - RNA, 19 nt, Artificial Sequence
  Description of Artificial Sequence: Synthetic oligonucleotide
  Sense strand starting at position 2141 of SEQ ID NO: 316774
cggguuagcccaggaggaa

SEQ ID NO: 439434 - RNA, 19 nt, Artificial Sequence
  Description of Artificial Sequence: Synthetic oligonucleotide
  Antisense Strand to SEQ ID NO: 439433
uuccuccugggcuaacccg

SEQ ID NO: 439435 - RNA, 19 nt, Artificial Sequence
  Description of Artificial Sequence: Synthetic oligonucleotide
  Sense strand starting at position 2273 of SEQ ID NO: 316774
augaacaacguccaguaau

SEQ ID NO: 439436 - RNA, 19 nt, Artificial Sequence
  Description of Artificial Sequence: Synthetic oligonucleotide
  Antisense Strand to SEQ ID NO: 439435
auuacuggacguuguucau

SEQ ID NO: 439437 - RNA, 19 nt, Artificial Sequence
  Description of Artificial Sequence: Synthetic oligonucleotide
  Sense strand starting at position 2302 of SEQ ID NO: 316774
agauuagggcucuagguuu

SEQ ID NO: 439438 - RNA, 19 nt, Artificial Sequence
  Description of Artificial Sequence: Synthetic oligonucleotide
  Antisense Strand to SEQ ID NO: 439437
aaaccuagagcccuaaucu

SEQ ID NO: 439439 - RNA, 19 nt, Artificial Sequence
  Description of Artificial Sequence: Synthetic oligonucleotide
  Sense strand starting at position 2323 of SEQ ID NO: 316774
uccagaguucuagauguua

SEQ ID NO: 439440 - RNA, 19 nt, Artificial Sequence
  Description of Artificial Sequence: Synthetic oligonucleotide
  Antisense Strand to SEQ ID NO: 439439
uaacaucuagaacucugga

SEQ ID NO: 439441 - RNA, 19 nt, Artificial Sequence
  Description of Artificial Sequence: Synthetic oligonucleotide
  Sense strand starting at position 2339 of SEQ ID NO: 316774
uuaacagaucugcagucau

SEQ ID NO: 439442 - RNA, 19 nt, Artificial Sequence
  Description of Artificial Sequence: Synthetic oligonucleotide
  Antisense Strand to SEQ ID NO: 439441
augacugcagaucuguuaa

SEQ ID NO: 439443 - RNA, 19 nt, Artificial Sequence
  Description of Artificial Sequence: Synthetic oligonucleotide
  Sense strand starting at position 2349 of SEQ ID NO: 316774
ugcagucauggugauuaau

SEQ ID NO: 439444 - RNA, 19 nt, Artificial Sequence
  Description of Artificial Sequence: Synthetic oligonucleotide
  Antisense Strand to SEQ ID NO: 439443
auuaaucaccaugacugca

SEQ ID NO: 439445 - RNA, 19 nt, Artificial Sequence
  Description of Artificial Sequence: Synthetic oligonucleotide
  Sense strand starting at position 2359 of SEQ ID NO: 316774
gugauuaauaaggagcuuu

SEQ ID NO: 439446 - RNA, 19 nt, Artificial Sequence
  Description of Artificial Sequence: Synthetic oligonucleotide
  Antisense Strand to SEQ ID NO: 439445
aaagcuccuuauuaaucac

SEQ ID NO: 439447 - RNA, 19 nt, Artificial Sequence
  Description of Artificial Sequence: Synthetic oligonucleotide
  Sense strand starting at position 2606 of SEQ ID NO: 316774
guggaaacgggauguaaau

SEQ ID NO: 439448 - RNA, 19 nt, Artificial Sequence
  Description of Artificial Sequence: Synthetic oligonucleotide
  Antisense Strand to SEQ ID NO: 439447
auuuacaucccguuuccac

SEQ ID NO: 439449 - RNA, 19 nt, Artificial Sequence
  Description of Artificial Sequence: Synthetic oligonucleotide
  Sense strand starting at position 2691 of SEQ ID NO: 316774
uuaugcuaugauuaugcaa

SEQ ID NO: 439450 - RNA, 19 nt, Artificial Sequence
  Description of Artificial Sequence: Synthetic oligonucleotide
  Antisense Strand to SEQ ID NO: 439449
uugcauaaucauagcauaa

SEQ ID NO: 439451 - RNA, 19 nt, Artificial Sequence
  Description of Artificial Sequence: Synthetic oligonucleotide
  Sense strand starting at position 2694 of SEQ ID NO: 316774
ugcuaugauuaugcaauca

SEQ ID NO: 439452 - RNA, 19 nt, Artificial Sequence
  Description of Artificial Sequence: Synthetic oligonucleotide
  Antisense Strand to SEQ ID NO: 439451
ugauugcauaaucauagca

SEQ ID NO: 439453 - RNA, 19 nt, Artificial Sequence
  Description of Artificial Sequence: Synthetic oligonucleotide
  Sense strand starting at position 2772 of SEQ ID NO: 316774
aguaaaucuugacuuugaa

SEQ ID NO: 439454 - RNA, 19 nt, Artificial Sequence
  Description of Artificial Sequence: Synthetic oligonucleotide
  Antisense Strand to SEQ ID NO: 439453
uucaaagucaagauuuacu

SEQ ID NO: 439455 - RNA, 19 nt, Artificial Sequence
  Description of Artificial Sequence: Synthetic oligonucleotide
  Sense strand starting at position 2784 of SEQ ID NO: 316774
cuuugaauuugguauaaca

SEQ ID NO: 439456 - RNA, 19 nt, Artificial Sequence
  Description of Artificial Sequence: Synthetic oligonucleotide
  Antisense Strand to SEQ ID NO: 439455
uguuauaccaaauucaaag

SEQ ID NO: 439457 - RNA, 19 nt, Artificial Sequence
  Description of Artificial Sequence: Synthetic oligonucleotide
  Sense strand starting at position 2851 of SEQ ID NO: 316774
gucuaagacccuuguugaa

SEQ ID NO: 439458 - RNA, 19 nt, Artificial Sequence
  Description of Artificial Sequence: Synthetic oligonucleotide
  Antisense Strand to SEQ ID NO: 439457
uucaacaagggucuuagac

SEQ ID NO: 439459 - RNA, 19 nt, Artificial Sequence
  Description of Artificial Sequence: Synthetic oligonucleotide
  Sense strand starting at position 2853 of SEQ ID NO: 316774
cuaagacccuuguugaaga

SEQ ID NO: 439460 - RNA, 19 nt, Artificial Sequence
  Description of Artificial Sequence: Synthetic oligonucleotide
  Antisense Strand to SEQ ID NO: 439459
ucuucaacaagggucuuag

SEQ ID NO: 439461 - RNA, 19 nt, Artificial Sequence
  Description of Artificial Sequence: Synthetic oligonucleotide
  Sense strand starting at position 2928 of SEQ ID NO: 316774
gggucaagaucacugaguu

SEQ ID NO: 439462 - RNA, 19 nt, Artificial Sequence
  Description of Artificial Sequence: Synthetic oligonucleotide
  Antisense Strand to SEQ ID NO: 439461
aacucagugaucuugaccc

SEQ ID NO: 439463 - RNA, 19 nt, Artificial Sequence
  Description of Artificial Sequence: Synthetic oligonucleotide
  Sense strand starting at position 2929 of SEQ ID NO: 316774
ggucaagaucacugaguuu

SEQ ID NO: 439464 - RNA, 19 nt, Artificial Sequence
  Description of Artificial Sequence: Synthetic oligonucleotide
  Antisense Strand to SEQ ID NO: 439463
aaacucagugaucuugacc

SEQ ID NO: 439465 - RNA, 19 nt, Artificial Sequence
  Description of Artificial Sequence: Synthetic oligonucleotide
  Sense strand starting at position 2994 of SEQ ID NO: 316774
cuuugucaucucugggaga

SEQ ID NO: 439466 - RNA, 19 nt, Artificial Sequence
  Description of Artificial Sequence: Synthetic oligonucleotide
  Antisense Strand to SEQ ID NO: 439465
ucucccagagaugacaaag

SEQ ID NO: 439467 - RNA, 19 nt, Artificial Sequence
  Description of Artificial Sequence: Synthetic oligonucleotide
  Sense strand starting at position 2996 of SEQ ID NO: 316774
uugucaucucugggagagu

SEQ ID NO: 439468 - RNA, 19 nt, Artificial Sequence
  Description of Artificial Sequence: Synthetic oligonucleotide
  Antisense Strand to SEQ ID NO: 439467
acucucccagagaugacaa

SEQ ID NO: 439469 - RNA, 19 nt, Artificial Sequence
  Description of Artificial Sequence: Synthetic oligonucleotide
  Sense strand starting at position 3005 of SEQ ID NO: 316774
cugggagaguguuuggaua

SEQ ID NO: 439470 - RNA, 19 nt, Artificial Sequence
  Description of Artificial Sequence: Synthetic oligonucleotide
  Antisense Strand to SEQ ID NO: 439469
uauccaaacacucucccag

SEQ ID NO: 439471 - RNA, 19 nt, Artificial Sequence
  Description of Artificial Sequence: Synthetic oligonucleotide
  Sense strand starting at position 3058 of SEQ ID NO: 316774
uugagauacuuuguaacaa

SEQ ID NO: 439472 - RNA, 19 nt, Artificial Sequence
  Description of Artificial Sequence: Synthetic oligonucleotide
  Antisense Strand to SEQ ID NO: 439471
uuguuacaaaguaucucaa

SEQ ID NO: 439473 - RNA, 19 nt, Artificial Sequence
  Description of Artificial Sequence: Synthetic oligonucleotide
  Sense strand starting at position 3128 of SEQ ID NO: 316774
auacuucuguggcccauaa

SEQ ID NO: 439474 - RNA, 19 nt, Artificial Sequence
  Description of Artificial Sequence: Synthetic oligonucleotide
  Antisense Strand to SEQ ID NO: 439473
uuaugggccacagaaguau

SEQ ID NO: 439475 - RNA, 19 nt, Artificial Sequence
  Description of Artificial Sequence: Synthetic oligonucleotide
  Sense strand starting at position 3130 of SEQ ID NO: 316774
acuucuguggcccauaaca

SEQ ID NO: 439476 - RNA, 19 nt, Artificial Sequence
  Description of Artificial Sequence: Synthetic oligonucleotide
  Antisense Strand to SEQ ID NO: 439475
uguuaugggccacagaagu

SEQ ID NO: 439477 - RNA, 19 nt, Artificial Sequence
  Description of Artificial Sequence: Synthetic oligonucleotide
  Sense strand starting at position 3132 of SEQ ID NO: 316774
uucuguggcccauaacaaa

SEQ ID NO: 439478 - RNA, 19 nt, Artificial Sequence
  Description of Artificial Sequence: Synthetic oligonucleotide
  Antisense Strand to SEQ ID NO: 439477
uuuguuaugggccacagaa

SEQ ID NO: 439479 - RNA, 19 nt, Artificial Sequence
  Description of Artificial Sequence: Synthetic oligonucleotide
  Sense strand starting at position 3193 of SEQ ID NO: 316774
caaaguuugcagugaggaa

SEQ ID NO: 439480 - RNA, 19 nt, Artificial Sequence
  Description of Artificial Sequence: Synthetic oligonucleotide
  Antisense Strand to SEQ ID NO: 439479
uuccucacugcaaacuuug

SEQ ID NO: 439481 - RNA, 19 nt, Artificial Sequence
  Description of Artificial Sequence: Synthetic oligonucleotide
  Sense strand starting at position 3259 of SEQ ID NO: 316774
aguaucuucuuggucacau

SEQ ID NO: 439482 - RNA, 19 nt, Artificial Sequence
  Description of Artificial Sequence: Synthetic oligonucleotide
  Antisense Strand to SEQ ID NO: 439481
augugaccaagaagauacu

SEQ ID NO: 439483 - RNA, 19 nt, Artificial Sequence
  Description of Artificial Sequence: Synthetic oligonucleotide
  Sense strand starting at position 3396 of SEQ ID NO: 316774
ugugccauuucucuaguuu

SEQ ID NO: 439484 - RNA, 19 nt, Artificial Sequence
  Description of Artificial Sequence: Synthetic oligonucleotide
  Antisense Strand to SEQ ID NO: 439483
aaacuagagaaauggcaca

SEQ ID NO: 439485 - RNA, 19 nt, Artificial Sequence
  Description of Artificial Sequence: Synthetic oligonucleotide
  Sense strand starting at position 3397 of SEQ ID NO: 316774
gugccauuucucuaguuua

SEQ ID NO: 439486 - RNA, 19 nt, Artificial Sequence
  Description of Artificial Sequence: Synthetic oligonucleotide
  Antisense Strand to SEQ ID NO: 439485
uaaacuagagaaauggcac

SEQ ID NO: 439487 - RNA, 19 nt, Artificial Sequence
  Description of Artificial Sequence: Synthetic oligonucleotide
  Sense strand starting at position 3740 of SEQ ID NO: 316774
uugagagugauguaguguu

SEQ ID NO: 439488 - RNA, 19 nt, Artificial Sequence
  Description of Artificial Sequence: Synthetic oligonucleotide
  Antisense Strand to SEQ ID NO: 439487
aacacuacaucacucucaa

SEQ ID NO: 439489 - RNA, 19 nt, Artificial Sequence
  Description of Artificial Sequence: Synthetic oligonucleotide
  Sense strand starting at position 3784 of SEQ ID NO: 316774
gaauguaaugcugaauggu

SEQ ID NO: 439490 - RNA, 19 nt, Artificial Sequence
  Description of Artificial Sequence: Synthetic oligonucleotide
  Antisense Strand to SEQ ID NO: 439489
accauucagcauuacauuc

SEQ ID NO: 439491 - RNA, 19 nt, Artificial Sequence
  Description of Artificial Sequence: Synthetic oligonucleotide
  Sense strand starting at position 3787 of SEQ ID NO: 316774
uguaaugcugaaugguaga

SEQ ID NO: 439492 - RNA, 19 nt, Artificial Sequence
  Description of Artificial Sequence: Synthetic oligonucleotide
  Antisense Strand to SEQ ID NO: 439491
ucuaccauucagcauuaca

SEQ ID NO: 439493 - RNA, 19 nt, Artificial Sequence
  Description of Artificial Sequence: Synthetic oligonucleotide
  Sense strand starting at position 82 of SEQ ID NO: 316775
gggcuauacaacuguggaa

SEQ ID NO: 439494 - RNA, 19 nt, Artificial Sequence
  Description of Artificial Sequence: Synthetic oligonucleotide
  Antisense Strand to SEQ ID NO: 439493
uuccacaguuguauagccc

SEQ ID NO: 439495 - RNA, 19 nt, Artificial Sequence
  Description of Artificial Sequence: Synthetic oligonucleotide
  Sense strand starting at position 84 of SEQ ID NO: 316775
gcuauacaacuguggaaua

SEQ ID NO: 439496 - RNA, 19 nt, Artificial Sequence
  Description of Artificial Sequence: Synthetic oligonucleotide
  Antisense Strand to SEQ ID NO: 439495
uauuccacaguuguauagc

SEQ ID NO: 439497 - RNA, 19 nt, Artificial Sequence
  Description of Artificial Sequence: Synthetic oligonucleotide
  Sense strand starting at position 94 of SEQ ID NO: 316775
uguggaauauuaccauucu

SEQ ID NO: 439498 - RNA, 19 nt, Artificial Sequence
  Description of Artificial Sequence: Synthetic oligonucleotide
  Antisense Strand to SEQ ID NO: 439497
agaaugguaauauuccaca

SEQ ID NO: 439499 - RNA, 19 nt, Artificial Sequence
  Description of Artificial Sequence: Synthetic oligonucleotide
  Sense strand starting at position 422 of SEQ ID NO: 316775
gagucaggauccucaccau

SEQ ID NO: 439500 - RNA, 19 nt, Artificial Sequence
  Description of Artificial Sequence: Synthetic oligonucleotide
  Antisense Strand to SEQ ID NO: 439499
auggugaggauccugacuc

SEQ ID NO: 439501 - RNA, 19 nt, Artificial Sequence
  Description of Artificial Sequence: Synthetic oligonucleotide
  Sense strand starting at position 490 of SEQ ID NO: 316775
auggcaaagugaucgagaa

SEQ ID NO: 439502 - RNA, 19 nt, Artificial Sequence
  Description of Artificial Sequence: Synthetic oligonucleotide
  Antisense Strand to SEQ ID NO: 439501
uucucgaucacuuugccau

SEQ ID NO: 439503 - RNA, 19 nt, Artificial Sequence
  Description of Artificial Sequence: Synthetic oligonucleotide
  Sense strand starting at position 491 of SEQ ID NO: 316775
uggcaaagugaucgagaaa

SEQ ID NO: 439504 - RNA, 19 nt, Artificial Sequence
  Description of Artificial Sequence: Synthetic oligonucleotide
  Antisense Strand to SEQ ID NO: 439503
uuucucgaucacuuugcca

SEQ ID NO: 439505 - RNA, 19 nt, Artificial Sequence
  Description of Artificial Sequence: Synthetic oligonucleotide
  Sense strand starting at position 587 of SEQ ID NO: 316775
ccuauacagucaucugaga

SEQ ID NO: 439506 - RNA, 19 nt, Artificial Sequence
  Description of Artificial Sequence: Synthetic oligonucleotide
  Antisense Strand to SEQ ID NO: 439505
ucucagaugacuguauagg

SEQ ID NO: 439507 - RNA, 19 nt, Artificial Sequence
  Description of Artificial Sequence: Synthetic oligonucleotide
  Sense strand starting at position 679 of SEQ ID NO: 316775
agggaugagcucugugaaa

SEQ ID NO: 439508 - RNA, 19 nt, Artificial Sequence
  Description of Artificial Sequence: Synthetic oligonucleotide
  Antisense Strand to SEQ ID NO: 439507
uuucacagagcucaucccu

SEQ ID NO: 439509 - RNA, 19 nt, Artificial Sequence
  Description of Artificial Sequence: Synthetic oligonucleotide
  Sense strand starting at position 681 of SEQ ID NO: 316775
ggaugagcucugugaaacu

SEQ ID NO: 439510 - RNA, 19 nt, Artificial Sequence
  Description of Artificial Sequence: Synthetic oligonucleotide
  Antisense Strand to SEQ ID NO: 439509
aguuucacagagcucaucc

SEQ ID NO: 439511 - RNA, 19 nt, Artificial Sequence
  Description of Artificial Sequence: Synthetic oligonucleotide
  Sense strand starting at position 756 of SEQ ID NO: 316775
ugaauucuguuacugacau

SEQ ID NO: 439512 - RNA, 19 nt, Artificial Sequence
  Description of Artificial Sequence: Synthetic oligonucleotide
  Antisense Strand to SEQ ID NO: 439511
augucaguaacagaauuca

SEQ ID NO: 439513 - RNA, 19 nt, Artificial Sequence
  Description of Artificial Sequence: Synthetic oligonucleotide
  Sense strand starting at position 769 of SEQ ID NO: 316775
ugacauuagugacugaaca

SEQ ID NO: 439514 - RNA, 19 nt, Artificial Sequence
  Description of Artificial Sequence: Synthetic oligonucleotide
  Antisense Strand to SEQ ID NO: 439513
uguucagucacuaauguca

SEQ ID NO: 439515 - RNA, 19 nt, Artificial Sequence
  Description of Artificial Sequence: Synthetic oligonucleotide
  Sense strand starting at position 792 of SEQ ID NO: 316775
ugcacauauuacuuagaga

SEQ ID NO: 439516 - RNA, 19 nt, Artificial Sequence
  Description of Artificial Sequence: Synthetic oligonucleotide
  Antisense Strand to SEQ ID NO: 439515
ucucuaaguaauaugugca

SEQ ID NO: 439517 - RNA, 19 nt, Artificial Sequence
  Description of Artificial Sequence: Synthetic oligonucleotide
  Sense strand starting at position 825 of SEQ ID NO: 316775
ccuguaaaccagggaaagu

SEQ ID NO: 439518 - RNA, 19 nt, Artificial Sequence
  Description of Artificial Sequence: Synthetic oligonucleotide
  Antisense Strand to SEQ ID NO: 439517
acuuucccugguuuacagg

SEQ ID NO: 439519 - RNA, 19 nt, Artificial Sequence
  Description of Artificial Sequence: Synthetic oligonucleotide
  Sense strand starting at position 911 of SEQ ID NO: 316775
uagggcauacuguaucuua

SEQ ID NO: 439520 - RNA, 19 nt, Artificial Sequence
  Description of Artificial Sequence: Synthetic oligonucleotide
  Antisense Strand to SEQ ID NO: 439519
uaagauacaguaugcccua

SEQ ID NO: 439521 - RNA, 19 nt, Artificial Sequence
  Description of Artificial Sequence: Synthetic oligonucleotide
  Sense strand starting at position 1013 of SEQ ID NO: 316775
ugaaaugauuauuccuggu

SEQ ID NO: 439522 - RNA, 19 nt, Artificial Sequence
  Description of Artificial Sequence: Synthetic oligonucleotide
  Antisense Strand to SEQ ID NO: 439521
accaggaauaaucauuuca

SEQ ID NO: 439523 - RNA, 19 nt, Artificial Sequence
  Description of Artificial Sequence: Synthetic oligonucleotide
  Sense strand starting at position 1107 of SEQ ID NO: 316775
gagaaauagccauguaggu

SEQ ID NO: 439524 - RNA, 19 nt, Artificial Sequence
  Description of Artificial Sequence: Synthetic oligonucleotide
  Antisense Strand to SEQ ID NO: 439523
accuacauggcuauuucuc

SEQ ID NO: 439525 - RNA, 19 nt, Artificial Sequence
  Description of Artificial Sequence: Synthetic oligonucleotide
  Sense strand starting at position 1111 of SEQ ID NO: 316775
aauagccauguagguaaua

SEQ ID NO: 439526 - RNA, 19 nt, Artificial Sequence
  Description of Artificial Sequence: Synthetic oligonucleotide
  Antisense Strand to SEQ ID NO: 439525
uauuaccuacauggcuauu

SEQ ID NO: 439527 - RNA, 19 nt, Artificial Sequence
  Description of Artificial Sequence: Synthetic oligonucleotide
  Sense strand starting at position 1160 of SEQ ID NO: 316775
augaguaacacugguguaa

SEQ ID NO: 439528 - RNA, 19 nt, Artificial Sequence
  Description of Artificial Sequence: Synthetic oligonucleotide
  Antisense Strand to SEQ ID NO: 439527
uuacaccaguguuacucau

SEQ ID NO: 439529 - RNA, 19 nt, Artificial Sequence
  Description of Artificial Sequence: Synthetic oligonucleotide
  Sense strand starting at position 1164 of SEQ ID NO: 316775
guaacacugguguaaagua

SEQ ID NO: 439530 - RNA, 19 nt, Artificial Sequence
  Description of Artificial Sequence: Synthetic oligonucleotide
  Antisense Strand to SEQ ID NO: 439529
uacuuuacaccaguguuac

SEQ ID NO: 439531 - RNA, 19 nt, Artificial Sequence
  Description of Artificial Sequence: Synthetic oligonucleotide
  Sense strand starting at position 1208 of SEQ ID NO: 316775
caggcauaucgacaccuuu

SEQ ID NO: 439532 - RNA, 19 nt, Artificial Sequence
  Description of Artificial Sequence: Synthetic oligonucleotide
  Antisense Strand to SEQ ID NO: 439531
aaaggugucgauaugccug

SEQ ID NO: 439533 - RNA, 19 nt, Artificial Sequence
  Description of Artificial Sequence: Synthetic oligonucleotide
  Sense strand starting at position 1384 of SEQ ID NO: 316775
acucuugugaguggaagga

SEQ ID NO: 439534 - RNA, 19 nt, Artificial Sequence
  Description of Artificial Sequence: Synthetic oligonucleotide
  Antisense Strand to SEQ ID NO: 439533
uccuuccacucacaagagu

SEQ ID NO: 439535 - RNA, 19 nt, Artificial Sequence
  Description of Artificial Sequence: Synthetic oligonucleotide
  Sense strand starting at position 1496 of SEQ ID NO: 316775
ggcuccaggaguuaacuua

SEQ ID NO: 439536 - RNA, 19 nt, Artificial Sequence
  Description of Artificial Sequence: Synthetic oligonucleotide
  Antisense Strand to SEQ ID NO: 439535
uaaguuaacuccuggagcc

SEQ ID NO: 439537 - RNA, 19 nt, Artificial Sequence
  Description of Artificial Sequence: Synthetic oligonucleotide
  Sense strand starting at position 1826 of SEQ ID NO: 316775
caggucuuuccugaugauc

SEQ ID NO: 439538 - RNA, 19 nt, Artificial Sequence
  Description of Artificial Sequence: Synthetic oligonucleotide
  Antisense Strand to SEQ ID NO: 439537
gaucaucaggaaagaccug

SEQ ID NO: 439539 - RNA, 19 nt, Artificial Sequence
  Description of Artificial Sequence: Synthetic oligonucleotide
  Sense strand starting at position 1829 of SEQ ID NO: 316775
gucuuuccugaugaucauu

SEQ ID NO: 439540 - RNA, 19 nt, Artificial Sequence
  Description of Artificial Sequence: Synthetic oligonucleotide
  Antisense Strand to SEQ ID NO: 439539
aaugaucaucaggaaagac

SEQ ID NO: 439541 - RNA, 19 nt, Artificial Sequence
  Description of Artificial Sequence: Synthetic oligonucleotide
  Sense strand starting at position 1891 of SEQ ID NO: 316775
gccuaaugaguuuaccuga

SEQ ID NO: 439542 - RNA, 19 nt, Artificial Sequence
  Description of Artificial Sequence: Synthetic oligonucleotide
  Antisense Strand to SEQ ID NO: 439541
ucagguaaacucauuaggc

SEQ ID NO: 439543 - RNA, 19 nt, Artificial Sequence
  Description of Artificial Sequence: Synthetic oligonucleotide
  Sense strand starting at position 2016 of SEQ ID NO: 316775
ugaauucuucucgaugcua

SEQ ID NO: 439544 - RNA, 19 nt, Artificial Sequence
  Description of Artificial Sequence: Synthetic oligonucleotide
  Antisense Strand to SEQ ID NO: 439543
uagcaucgagaagaauuca

SEQ ID NO: 439545 - RNA, 19 nt, Artificial Sequence
  Description of Artificial Sequence: Synthetic oligonucleotide
  Sense strand starting at position 2077 of SEQ ID NO: 316775
agacuugguuuccugugaa

SEQ ID NO: 439546 - RNA, 19 nt, Artificial Sequence
  Description of Artificial Sequence: Synthetic oligonucleotide
  Antisense Strand to SEQ ID NO: 439545
uucacaggaaaccaagucu

SEQ ID NO: 439547 - RNA, 19 nt, Artificial Sequence
  Description of Artificial Sequence: Synthetic oligonucleotide
  Sense strand starting at position 2310 of SEQ ID NO: 316775
cgagucucacuuuauauga

SEQ ID NO: 439548 - RNA, 19 nt, Artificial Sequence
  Description of Artificial Sequence: Synthetic oligonucleotide
  Antisense Strand to SEQ ID NO: 439547
ucauauaaagugagacucg

SEQ ID NO: 439549 - RNA, 19 nt, Artificial Sequence
  Description of Artificial Sequence: Synthetic oligonucleotide
  Sense strand starting at position 2331 of SEQ ID NO: 316775
aguggacauuaacuaucau

SEQ ID NO: 439550 - RNA, 19 nt, Artificial Sequence
  Description of Artificial Sequence: Synthetic oligonucleotide
  Antisense Strand to SEQ ID NO: 439549
augauaguuaauguccacu

SEQ ID NO: 439551 - RNA, 19 nt, Artificial Sequence
  Description of Artificial Sequence: Synthetic oligonucleotide
  Sense strand starting at position 2413 of SEQ ID NO: 316775
gaaagaaccugggaacuaa

SEQ ID NO: 439552 - RNA, 19 nt, Artificial Sequence
  Description of Artificial Sequence: Synthetic oligonucleotide
  Antisense Strand to SEQ ID NO: 439551
uuaguucccagguucuuuc

SEQ ID NO: 439553 - RNA, 19 nt, Artificial Sequence
  Description of Artificial Sequence: Synthetic oligonucleotide
  Sense strand starting at position 2509 of SEQ ID NO: 316775
caaguaguuugagugauaa

SEQ ID NO: 439554 - RNA, 19 nt, Artificial Sequence
  Description of Artificial Sequence: Synthetic oligonucleotide
  Antisense Strand to SEQ ID NO: 439553
uuaucacucaaacuacuug

SEQ ID NO: 439555 - RNA, 19 nt, Artificial Sequence
  Description of Artificial Sequence: Synthetic oligonucleotide
  Sense strand starting at position 2511 of SEQ ID NO: 316775
aguaguuugagugauaaua

SEQ ID NO: 439556 - RNA, 19 nt, Artificial Sequence
  Description of Artificial Sequence: Synthetic oligonucleotide
  Antisense Strand to SEQ ID NO: 439555
uauuaucacucaaacuacu

SEQ ID NO: 439557 - RNA, 19 nt, Artificial Sequence
  Description of Artificial Sequence: Synthetic oligonucleotide
  Sense strand starting at position 2693 of SEQ ID NO: 316775
aauguuugggcacauauca

SEQ ID NO: 439558 - RNA, 19 nt, Artificial Sequence
  Description of Artificial Sequence: Synthetic oligonucleotide
  Antisense Strand to SEQ ID NO: 439557
ugauaugugcccaaacauu

SEQ ID NO: 439559 - RNA, 19 nt, Artificial Sequence
  Description of Artificial Sequence: Synthetic oligonucleotide
  Sense strand starting at position 2778 of SEQ ID NO: 316775
uuuccucuucuggagacuu

SEQ ID NO: 439560 - RNA, 19 nt, Artificial Sequence
  Description of Artificial Sequence: Synthetic oligonucleotide
  Antisense Strand to SEQ ID NO: 439559
aagucuccagaagaggaaa

SEQ ID NO: 439561 - RNA, 19 nt, Artificial Sequence
  Description of Artificial Sequence: Synthetic oligonucleotide
  Sense strand starting at position 2960 of SEQ ID NO: 316775
cuaauugugagucaguuac

SEQ ID NO: 439562 - RNA, 19 nt, Artificial Sequence
  Description of Artificial Sequence: Synthetic oligonucleotide
  Antisense Strand to SEQ ID NO: 439561
guaacugacucacaauuag

SEQ ID NO: 439563 - RNA, 19 nt, Artificial Sequence
  Description of Artificial Sequence: Synthetic oligonucleotide
  Sense strand starting at position 2964 of SEQ ID NO: 316775
uugugagucaguuacauug

SEQ ID NO: 439564 - RNA, 19 nt, Artificial Sequence
  Description of Artificial Sequence: Synthetic oligonucleotide
  Antisense Strand to SEQ ID NO: 439563
caauguaacugacucacaa

SEQ ID NO: 439565 - RNA, 19 nt, Artificial Sequence
  Description of Artificial Sequence: Synthetic oligonucleotide
  Sense strand starting at position 3081 of SEQ ID NO: 316775
gggagacucgaguaguuua

SEQ ID NO: 439566 - RNA, 19 nt, Artificial Sequence
  Description of Artificial Sequence: Synthetic oligonucleotide
  Antisense Strand to SEQ ID NO: 439565
uaaacuacucgagucuccc

SEQ ID NO: 439567 - RNA, 19 nt, Artificial Sequence
  Description of Artificial Sequence: Synthetic oligonucleotide
  Sense strand starting at position 3611 of SEQ ID NO: 316775
guauucgacccauaacaag

SEQ ID NO: 439568 - RNA, 19 nt, Artificial Sequence
  Description of Artificial Sequence: Synthetic oligonucleotide
  Antisense Strand to SEQ ID NO: 439567
cuuguuaugggucgaauac

SEQ ID NO: 439569 - RNA, 19 nt, Artificial Sequence
  Description of Artificial Sequence: Synthetic oligonucleotide
  Sense strand starting at position 3662 of SEQ ID NO: 316775
gaggcaguuggaugaucua

SEQ ID NO: 439570 - RNA, 19 nt, Artificial Sequence
  Description of Artificial Sequence: Synthetic oligonucleotide
  Antisense Strand to SEQ ID NO: 439569
uagaucauccaacugccuc

SEQ ID NO: 439571 - RNA, 19 nt, Artificial Sequence
  Description of Artificial Sequence: Synthetic oligonucleotide
  Sense strand starting at position 3665 of SEQ ID NO: 316775
gcaguuggaugaucuaaga

SEQ ID NO: 439572 - RNA, 19 nt, Artificial Sequence
  Description of Artificial Sequence: Synthetic oligonucleotide
  Antisense Strand to SEQ ID NO: 439571
ucuuagaucauccaacugc

SEQ ID NO: 439573 - RNA, 19 nt, Artificial Sequence
  Description of Artificial Sequence: Synthetic oligonucleotide
  Sense strand starting at position 140 of SEQ ID NO: 316776
gcugccugugcagucuuaa

SEQ ID NO: 439574 - RNA, 19 nt, Artificial Sequence
  Description of Artificial Sequence: Synthetic oligonucleotide
  Antisense Strand to SEQ ID NO: 439573
uuaagacugcacaggcagc

SEQ ID NO: 439575 - RNA, 19 nt, Artificial Sequence
  Description of Artificial Sequence: Synthetic oligonucleotide
  Sense strand starting at position 367 of SEQ ID NO: 316776
agcacuuuaagggaauguu

SEQ ID NO: 439576 - RNA, 19 nt, Artificial Sequence
  Description of Artificial Sequence: Synthetic oligonucleotide
  Antisense Strand to SEQ ID NO: 439575
aacauucccuuaaagugcu

SEQ ID NO: 439577 - RNA, 19 nt, Artificial Sequence
  Description of Artificial Sequence: Synthetic oligonucleotide
  Sense strand starting at position 393 of SEQ ID NO: 316776
uccucauaauuguuuguca

SEQ ID NO: 439578 - RNA, 19 nt, Artificial Sequence
  Description of Artificial Sequence: Synthetic oligonucleotide
  Antisense Strand to SEQ ID NO: 439577
ugacaaacaauuaugagga

SEQ ID NO: 439579 - RNA, 19 nt, Artificial Sequence
  Description of Artificial Sequence: Synthetic oligonucleotide
  Sense strand starting at position 394 of SEQ ID NO: 316776
ccucauaauuguuugucau

SEQ ID NO: 439580 - RNA, 19 nt, Artificial Sequence
  Description of Artificial Sequence: Synthetic oligonucleotide
  Antisense Strand to SEQ ID NO: 439579
augacaaacaauuaugagg

SEQ ID NO: 439581 - RNA, 19 nt, Artificial Sequence
  Description of Artificial Sequence: Synthetic oligonucleotide
  Sense strand starting at position 395 of SEQ ID NO: 316776
cucauaauuguuugucaug

SEQ ID NO: 439582 - RNA, 19 nt, Artificial Sequence
  Description of Artificial Sequence: Synthetic oligonucleotide
  Antisense Strand to SEQ ID NO: 439581
caugacaaacaauuaugag

SEQ ID NO: 439583 - RNA, 19 nt, Artificial Sequence
  Description of Artificial Sequence: Synthetic oligonucleotide
  Sense strand starting at position 396 of SEQ ID NO: 316776
ucauaauuguuugucauga

SEQ ID NO: 439584 - RNA, 19 nt, Artificial Sequence
  Description of Artificial Sequence: Synthetic oligonucleotide
  Antisense Strand to SEQ ID NO: 439583
ucaugacaaacaauuauga

SEQ ID NO: 439585 - RNA, 19 nt, Artificial Sequence
  Description of Artificial Sequence: Synthetic oligonucleotide
  Sense strand starting at position 401 of SEQ ID NO: 316776
auuguuugucaugaaacuu

SEQ ID NO: 439586 - RNA, 19 nt, Artificial Sequence
  Description of Artificial Sequence: Synthetic oligonucleotide
  Antisense Strand to SEQ ID NO: 439585
aaguuucaugacaaacaau

SEQ ID NO: 439587 - RNA, 19 nt, Artificial Sequence
  Description of Artificial Sequence: Synthetic oligonucleotide
  Sense strand starting at position 576 of SEQ ID NO: 316776
gauaaaugccugugaccuc

SEQ ID NO: 439588 - RNA, 19 nt, Artificial Sequence
  Description of Artificial Sequence: Synthetic oligonucleotide
  Antisense Strand to SEQ ID NO: 439587
gaggucacaggcauuuauc

SEQ ID NO: 439589 - RNA, 19 nt, Artificial Sequence
  Description of Artificial Sequence: Synthetic oligonucleotide
  Sense strand starting at position 583 of SEQ ID NO: 316776
gccugugaccucugcaauc

SEQ ID NO: 439590 - RNA, 19 nt, Artificial Sequence
  Description of Artificial Sequence: Synthetic oligonucleotide
  Antisense Strand to SEQ ID NO: 439589
gauugcagaggucacaggc

SEQ ID NO: 439591 - RNA, 19 nt, Artificial Sequence
  Description of Artificial Sequence: Synthetic oligonucleotide
  Sense strand starting at position 762 of SEQ ID NO: 316776
uuuaauccaguuuaugagu

SEQ ID NO: 439592 - RNA, 19 nt, Artificial Sequence
  Description of Artificial Sequence: Synthetic oligonucleotide
  Antisense Strand to SEQ ID NO: 439591
acucauaaacuggauuaaa

SEQ ID NO: 439593 - RNA, 19 nt, Artificial Sequence
  Description of Artificial Sequence: Synthetic oligonucleotide
  Sense strand starting at position 767 of SEQ ID NO: 316776
uccaguuuaugaguccaua

SEQ ID NO: 439594 - RNA, 19 nt, Artificial Sequence
  Description of Artificial Sequence: Synthetic oligonucleotide
  Antisense Strand to SEQ ID NO: 439593
uauggacucauaaacugga

SEQ ID NO: 439595 - RNA, 19 nt, Artificial Sequence
  Description of Artificial Sequence: Synthetic oligonucleotide
  Sense strand starting at position 770 of SEQ ID NO: 316776
aguuuaugaguccauaaua

SEQ ID NO: 439596 - RNA, 19 nt, Artificial Sequence
  Description of Artificial Sequence: Synthetic oligonucleotide
  Antisense Strand to SEQ ID NO: 439595
uauuauggacucauaaacu

SEQ ID NO: 439597 - RNA, 19 nt, Artificial Sequence
  Description of Artificial Sequence: Synthetic oligonucleotide
  Sense strand starting at position 1016 of SEQ ID NO: 316776
uuugcaaucuuugcauguu

SEQ ID NO: 439598 - RNA, 19 nt, Artificial Sequence
  Description of Artificial Sequence: Synthetic oligonucleotide
  Antisense Strand to SEQ ID NO: 439597
aacaugcaaagauugcaaa

SEQ ID NO: 439599 - RNA, 19 nt, Artificial Sequence
  Description of Artificial Sequence: Synthetic oligonucleotide
  Sense strand starting at position 1019 of SEQ ID NO: 316776
gcaaucuuugcauguuagu

SEQ ID NO: 439600 - RNA, 19 nt, Artificial Sequence
  Description of Artificial Sequence: Synthetic oligonucleotide
  Antisense Strand to SEQ ID NO: 439599
acuaacaugcaaagauugc

SEQ ID NO: 439601 - RNA, 19 nt, Artificial Sequence
  Description of Artificial Sequence: Synthetic oligonucleotide
  Sense strand starting at position 1028 of SEQ ID NO: 316776
gcauguuaguacguagaaa

SEQ ID NO: 439602 - RNA, 19 nt, Artificial Sequence
  Description of Artificial Sequence: Synthetic oligonucleotide
  Antisense Strand to SEQ ID NO: 439601
uuucuacguacuaacaugc

SEQ ID NO: 439603 - RNA, 19 nt, Artificial Sequence
  Description of Artificial Sequence: Synthetic oligonucleotide
  Sense strand starting at position 1029 of SEQ ID NO: 316776
cauguuaguacguagaaag

SEQ ID NO: 439604 - RNA, 19 nt, Artificial Sequence
  Description of Artificial Sequence: Synthetic oligonucleotide
  Antisense Strand to SEQ ID NO: 439603
cuuucuacguacuaacaug

SEQ ID NO: 439605 - RNA, 19 nt, Artificial Sequence
  Description of Artificial Sequence: Synthetic oligonucleotide
  Sense strand starting at position 1040 of SEQ ID NO: 316776
guagaaagcuuccuuauuc

SEQ ID NO: 439606 - RNA, 19 nt, Artificial Sequence
  Description of Artificial Sequence: Synthetic oligonucleotide
  Antisense Strand to SEQ ID NO: 439605
gaauaaggaagcuuucuac

SEQ ID NO: 439607 - RNA, 19 nt, Artificial Sequence
  Description of Artificial Sequence: Synthetic oligonucleotide
  Sense strand starting at position 1069 of SEQ ID NO: 316776
acugauuacgccuagcuuu

SEQ ID NO: 439608 - RNA, 19 nt, Artificial Sequence
  Description of Artificial Sequence: Synthetic oligonucleotide
  Antisense Strand to SEQ ID NO: 439607
aaagcuaggcguaaucagu

SEQ ID NO: 439609 - RNA, 19 nt, Artificial Sequence
  Description of Artificial Sequence: Synthetic oligonucleotide
  Sense strand starting at position 1072 of SEQ ID NO: 316776
gauuacgccuagcuuuaga

SEQ ID NO: 439610 - RNA, 19 nt, Artificial Sequence
  Description of Artificial Sequence: Synthetic oligonucleotide
  Antisense Strand to SEQ ID NO: 439609
ucuaaagcuaggcguaauc

SEQ ID NO: 439611 - RNA, 19 nt, Artificial Sequence
  Description of Artificial Sequence: Synthetic oligonucleotide
  Sense strand starting at position 1191 of SEQ ID NO: 316776
gucacauauguauaaaugu

SEQ ID NO: 439612 - RNA, 19 nt, Artificial Sequence
  Description of Artificial Sequence: Synthetic oligonucleotide
  Antisense Strand to SEQ ID NO: 439611
acauuuauacauaugugac

SEQ ID NO: 439613 - RNA, 19 nt, Artificial Sequence
  Description of Artificial Sequence: Synthetic oligonucleotide
  Sense strand starting at position 1466 of SEQ ID NO: 316776
uuucucuaaucgcuuaaag

SEQ ID NO: 439614 - RNA, 19 nt, Artificial Sequence
  Description of Artificial Sequence: Synthetic oligonucleotide
  Antisense Strand to SEQ ID NO: 439613
cuuuaagcgauuagagaaa

SEQ ID NO: 439615 - RNA, 19 nt, Artificial Sequence
  Description of Artificial Sequence: Synthetic oligonucleotide
  Sense strand starting at position 1468 of SEQ ID NO: 316776
ucucuaaucgcuuaaagcu

SEQ ID NO: 439616 - RNA, 19 nt, Artificial Sequence
  Description of Artificial Sequence: Synthetic oligonucleotide
  Antisense Strand to SEQ ID NO: 439615
agcuuuaagcgauuagaga

SEQ ID NO: 439617 - RNA, 19 nt, Artificial Sequence
  Description of Artificial Sequence: Synthetic oligonucleotide
  Sense strand starting at position 1476 of SEQ ID NO: 316776
cgcuuaaagcuacaaauca

SEQ ID NO: 439618 - RNA, 19 nt, Artificial Sequence
  Description of Artificial Sequence: Synthetic oligonucleotide
  Antisense Strand to SEQ ID NO: 439617
ugauuuguagcuuuaagcg

SEQ ID NO: 439619 - RNA, 19 nt, Artificial Sequence
  Description of Artificial Sequence: Synthetic oligonucleotide
  Sense strand starting at position 1639 of SEQ ID NO: 316776
agucuaauagcacggcauu

SEQ ID NO: 439620 - RNA, 19 nt, Artificial Sequence
  Description of Artificial Sequence: Synthetic oligonucleotide
  Antisense Strand to SEQ ID NO: 439619
aaugccgugcuauuagacu

SEQ ID NO: 439621 - RNA, 19 nt, Artificial Sequence
  Description of Artificial Sequence: Synthetic oligonucleotide
  Sense strand starting at position 1653 of SEQ ID NO: 316776
gcauucuaauagcaggaaa

SEQ ID NO: 439622 - RNA, 19 nt, Artificial Sequence
  Description of Artificial Sequence: Synthetic oligonucleotide
  Antisense Strand to SEQ ID NO: 439621
uuuccugcuauuagaaugc

SEQ ID NO: 439623 - RNA, 19 nt, Artificial Sequence
  Description of Artificial Sequence: Synthetic oligonucleotide
  Sense strand starting at position 1804 of SEQ ID NO: 316776
gcgcugcguguaggaaauu

SEQ ID NO: 439624 - RNA, 19 nt, Artificial Sequence
  Description of Artificial Sequence: Synthetic oligonucleotide
  Antisense Strand to SEQ ID NO: 439623
aauuuccuacacgcagcgc

SEQ ID NO: 439625 - RNA, 19 nt, Artificial Sequence
  Description of Artificial Sequence: Synthetic oligonucleotide
  Sense strand starting at position 1867 of SEQ ID NO: 316776
gcuucacuggcggaaagaa

SEQ ID NO: 439626 - RNA, 19 nt, Artificial Sequence
  Description of Artificial Sequence: Synthetic oligonucleotide
  Antisense Strand to SEQ ID NO: 439625
uucuuuccgccagugaagc

SEQ ID NO: 439627 - RNA, 19 nt, Artificial Sequence
  Description of Artificial Sequence: Synthetic oligonucleotide
  Sense strand starting at position 1988 of SEQ ID NO: 316776
gcuggagucagacgcuaau

SEQ ID NO: 439628 - RNA, 19 nt, Artificial Sequence
  Description of Artificial Sequence: Synthetic oligonucleotide
  Antisense Strand to SEQ ID NO: 439627
auuagcgucugacuccagc

SEQ ID NO: 439629 - RNA, 19 nt, Artificial Sequence
  Description of Artificial Sequence: Synthetic oligonucleotide
  Sense strand starting at position 3140 of SEQ ID NO: 316776
gccgaaaucuggcucugca

SEQ ID NO: 439630 - RNA, 19 nt, Artificial Sequence
  Description of Artificial Sequence: Synthetic oligonucleotide
  Antisense Strand to SEQ ID NO: 439629
ugcagagccagauuucggc

SEQ ID NO: 439631 - RNA, 19 nt, Artificial Sequence
  Description of Artificial Sequence: Synthetic oligonucleotide
  Sense strand starting at position 3418 of SEQ ID NO: 316776
ggguguuggcaggagacuu

SEQ ID NO: 439632 - RNA, 19 nt, Artificial Sequence
  Description of Artificial Sequence: Synthetic oligonucleotide
  Antisense Strand to SEQ ID NO: 439631
aagucuccugccaacaccc

SEQ ID NO: 439633 - RNA, 19 nt, Artificial Sequence
  Description of Artificial Sequence: Synthetic oligonucleotide
  Sense strand starting at position 3445 of SEQ ID NO: 316776
aguggcaucauucguguuu

SEQ ID NO: 439634 - RNA, 19 nt, Artificial Sequence
  Description of Artificial Sequence: Synthetic oligonucleotide
  Antisense Strand to SEQ ID NO: 439633
aaacacgaaugaugccacu

SEQ ID NO: 439635 - RNA, 19 nt, Artificial Sequence
  Description of Artificial Sequence: Synthetic oligonucleotide
  Sense strand starting at position 3449 of SEQ ID NO: 316776
gcaucauucguguuuccuc

SEQ ID NO: 439636 - RNA, 19 nt, Artificial Sequence
  Description of Artificial Sequence: Synthetic oligonucleotide
  Antisense Strand to SEQ ID NO: 439635
gaggaaacacgaaugaugc

SEQ ID NO: 439637 - RNA, 19 nt, Artificial Sequence
  Description of Artificial Sequence: Synthetic oligonucleotide
  Sense strand starting at position 3683 of SEQ ID NO: 316776
gugacaguguaauggaaga

SEQ ID NO: 439638 - RNA, 19 nt, Artificial Sequence
  Description of Artificial Sequence: Synthetic oligonucleotide
  Antisense Strand to SEQ ID NO: 439637
ucuuccauuacacugucac

SEQ ID NO: 439639 - RNA, 19 nt, Artificial Sequence
  Description of Artificial Sequence: Synthetic oligonucleotide
  Sense strand starting at position 3756 of SEQ ID NO: 316776
guuggaacaacgugugacu

SEQ ID NO: 439640 - RNA, 19 nt, Artificial Sequence
  Description of Artificial Sequence: Synthetic oligonucleotide
  Antisense Strand to SEQ ID NO: 439639
agucacacguuguuccaac

SEQ ID NO: 439641 - RNA, 19 nt, Artificial Sequence
  Description of Artificial Sequence: Synthetic oligonucleotide
  Sense strand starting at position 3768 of SEQ ID NO: 316776
ugugacuacuacuuaucuu

SEQ ID NO: 439642 - RNA, 19 nt, Artificial Sequence
  Description of Artificial Sequence: Synthetic oligonucleotide
  Antisense Strand to SEQ ID NO: 439641
aagauaaguaguagucaca

SEQ ID NO: 439643 - RNA, 19 nt, Artificial Sequence
  Description of Artificial Sequence: Synthetic oligonucleotide
  Sense strand starting at position 3775 of SEQ ID NO: 316776
acuacuuaucuucgggaaa

SEQ ID NO: 439644 - RNA, 19 nt, Artificial Sequence
  Description of Artificial Sequence: Synthetic oligonucleotide
  Antisense Strand to SEQ ID NO: 439643
uuucccgaagauaaguagu

SEQ ID NO: 439645 - RNA, 19 nt, Artificial Sequence
  Description of Artificial Sequence: Synthetic oligonucleotide
  Sense strand starting at position 3776 of SEQ ID NO: 316776
cuacuuaucuucgggaaau

SEQ ID NO: 439646 - RNA, 19 nt, Artificial Sequence
  Description of Artificial Sequence: Synthetic oligonucleotide
  Antisense Strand to SEQ ID NO: 439645
auuucccgaagauaaguag

SEQ ID NO: 439647 - RNA, 19 nt, Artificial Sequence
  Description of Artificial Sequence: Synthetic oligonucleotide
  Sense strand starting at position 3786 of SEQ ID NO: 316776
ucgggaaauuacuuaucuu

SEQ ID NO: 439648 - RNA, 19 nt, Artificial Sequence
  Description of Artificial Sequence: Synthetic oligonucleotide
  Antisense Strand to SEQ ID NO: 439647
aagauaaguaauuucccga

SEQ ID NO: 439649 - RNA, 19 nt, Artificial Sequence
  Description of Artificial Sequence: Synthetic oligonucleotide
  Sense strand starting at position 3797 of SEQ ID NO: 316776
cuuaucuugaugcguuaag

SEQ ID NO: 439650 - RNA, 19 nt, Artificial Sequence
  Description of Artificial Sequence: Synthetic oligonucleotide
  Antisense Strand to SEQ ID NO: 439649
cuuaacgcaucaagauaag

SEQ ID NO: 439651 - RNA, 19 nt, Artificial Sequence
  Description of Artificial Sequence: Synthetic oligonucleotide
  Sense strand starting at position 3887 of SEQ ID NO: 316776
ccuaguaauuccuauguuu

SEQ ID NO: 439652 - RNA, 19 nt, Artificial Sequence
  Description of Artificial Sequence: Synthetic oligonucleotide
  Antisense Strand to SEQ ID NO: 439651
aaacauaggaauuacuagg

SEQ ID NO: 439653 - RNA, 19 nt, Artificial Sequence
  Description of Artificial Sequence: Synthetic oligonucleotide
  Sense strand starting at position 51 of SEQ ID NO: 316777
gcauguuaguacguagaaa

SEQ ID NO: 439654 - RNA, 19 nt, Artificial Sequence
  Description of Artificial Sequence: Synthetic oligonucleotide
  Antisense Strand to SEQ ID NO: 439653
uuucuacguacuaacaugc

SEQ ID NO: 439655 - RNA, 19 nt, Artificial Sequence
  Description of Artificial Sequence: Synthetic oligonucleotide
  Sense strand starting at position 52 of SEQ ID NO: 316777
cauguuaguacguagaaag

SEQ ID NO: 439656 - RNA, 19 nt, Artificial Sequence
  Description of Artificial Sequence: Synthetic oligonucleotide
  Antisense Strand to SEQ ID NO: 439655
cuuucuacguacuaacaug

SEQ ID NO: 439657 - RNA, 19 nt, Artificial Sequence
  Description of Artificial Sequence: Synthetic oligonucleotide
  Sense strand starting at position 63 of SEQ ID NO: 316777
guagaaagcuuccuuauuc

SEQ ID NO: 439658 - RNA, 19 nt, Artificial Sequence
  Description of Artificial Sequence: Synthetic oligonucleotide
  Antisense Strand to SEQ ID NO: 439657
gaauaaggaagcuuucuac

SEQ ID NO: 439659 - RNA, 19 nt, Artificial Sequence
  Description of Artificial Sequence: Synthetic oligonucleotide
  Sense strand starting at position 92 of SEQ ID NO: 316777
acugauuacgccuagcuuu

SEQ ID NO: 439660 - RNA, 19 nt, Artificial Sequence
  Description of Artificial Sequence: Synthetic oligonucleotide
  Antisense Strand to SEQ ID NO: 439659
aaagcuaggcguaaucagu

SEQ ID NO: 439661 - RNA, 19 nt, Artificial Sequence
  Description of Artificial Sequence: Synthetic oligonucleotide
  Sense strand starting at position 95 of SEQ ID NO: 316777
gauuacgccuagcuuuaga

SEQ ID NO: 439662 - RNA, 19 nt, Artificial Sequence
  Description of Artificial Sequence: Synthetic oligonucleotide
  Antisense Strand to SEQ ID NO: 439661
ucuaaagcuaggcguaauc

SEQ ID NO: 439663 - RNA, 19 nt, Artificial Sequence
  Description of Artificial Sequence: Synthetic oligonucleotide
  Sense strand starting at position 214 of SEQ ID NO: 316777
gucacauauguauaaaugu

SEQ ID NO: 439664 - RNA, 19 nt, Artificial Sequence
  Description of Artificial Sequence: Synthetic oligonucleotide
  Antisense Strand to SEQ ID NO: 439663
acauuuauacauaugugac

SEQ ID NO: 439665 - RNA, 19 nt, Artificial Sequence
  Description of Artificial Sequence: Synthetic oligonucleotide
  Sense strand starting at position 489 of SEQ ID NO: 316777
uuucucuaaucgcuuaaag

SEQ ID NO: 439666 - RNA, 19 nt, Artificial Sequence
  Description of Artificial Sequence: Synthetic oligonucleotide
  Antisense Strand to SEQ ID NO: 439665
cuuuaagcgauuagagaaa

SEQ ID NO: 439667 - RNA, 19 nt, Artificial Sequence
  Description of Artificial Sequence: Synthetic oligonucleotide
  Sense strand starting at position 491 of SEQ ID NO: 316777
ucucuaaucgcuuaaagcu

SEQ ID NO: 439668 - RNA, 19 nt, Artificial Sequence
  Description of Artificial Sequence: Synthetic oligonucleotide
  Antisense Strand to SEQ ID NO: 439667
agcuuuaagcgauuagaga

SEQ ID NO: 439669 - RNA, 19 nt, Artificial Sequence
  Description of Artificial Sequence: Synthetic oligonucleotide
  Sense strand starting at position 499 of SEQ ID NO: 316777
cgcuuaaagcuacaaauca

SEQ ID NO: 439670 - RNA, 19 nt, Artificial Sequence
  Description of Artificial Sequence: Synthetic oligonucleotide
  Antisense Strand to SEQ ID NO: 439669
ugauuuguagcuuuaagcg

SEQ ID NO: 439671 - RNA, 19 nt, Artificial Sequence
  Description of Artificial Sequence: Synthetic oligonucleotide
  Sense strand starting at position 890 of SEQ ID NO: 316777
gcuucacuggcggaaagaa

SEQ ID NO: 439672 - RNA, 19 nt, Artificial Sequence
  Description of Artificial Sequence: Synthetic oligonucleotide
  Antisense Strand to SEQ ID NO: 439671
uucuuuccgccagugaagc

SEQ ID NO: 439673 - RNA, 19 nt, Artificial Sequence
  Description of Artificial Sequence: Synthetic oligonucleotide
  Sense strand starting at position 2441 of SEQ ID NO: 316777
ggguguuggcaggagacuu

SEQ ID NO: 439674 - RNA, 19 nt, Artificial Sequence
  Description of Artificial Sequence: Synthetic oligonucleotide
  Antisense Strand to SEQ ID NO: 439673
aagucuccugccaacaccc

SEQ ID NO: 439675 - RNA, 19 nt, Artificial Sequence
  Description of Artificial Sequence: Synthetic oligonucleotide
  Sense strand starting at position 2472 of SEQ ID NO: 316777
gcaucauucguguuuccuc

SEQ ID NO: 439676 - RNA, 19 nt, Artificial Sequence
  Description of Artificial Sequence: Synthetic oligonucleotide
  Antisense Strand to SEQ ID NO: 439675
gaggaaacacgaaugaugc

SEQ ID NO: 439677 - RNA, 19 nt, Artificial Sequence
  Description of Artificial Sequence: Synthetic oligonucleotide
  Sense strand starting at position 2779 of SEQ ID NO: 316777
guuggaacaacgugugacu

SEQ ID NO: 439678 - RNA, 19 nt, Artificial Sequence
  Description of Artificial Sequence: Synthetic oligonucleotide
  Antisense Strand to SEQ ID NO: 439677
agucacacguuguuccaac

SEQ ID NO: 439679 - RNA, 19 nt, Artificial Sequence
  Description of Artificial Sequence: Synthetic oligonucleotide
  Sense strand starting at position 2791 of SEQ ID NO: 316777
ugugacuacuacuuaucuu

SEQ ID NO: 439680 - RNA, 19 nt, Artificial Sequence
  Description of Artificial Sequence: Synthetic oligonucleotide
  Antisense Strand to SEQ ID NO: 439679
aagauaaguaguagucaca

SEQ ID NO: 439681 - RNA, 19 nt, Artificial Sequence
  Description of Artificial Sequence: Synthetic oligonucleotide
  Sense strand starting at position 2798 of SEQ ID NO: 316777
acuacuuaucuucgggaaa

SEQ ID NO: 439682 - RNA, 19 nt, Artificial Sequence
  Description of Artificial Sequence: Synthetic oligonucleotide
  Antisense Strand to SEQ ID NO: 439681
uuucccgaagauaaguagu

SEQ ID NO: 439683 - RNA, 19 nt, Artificial Sequence
  Description of Artificial Sequence: Synthetic oligonucleotide
  Sense strand starting at position 2809 of SEQ ID NO: 316777
ucgggaaauuacuuaucuu

SEQ ID NO: 439684 - RNA, 19 nt, Artificial Sequence
  Description of Artificial Sequence: Synthetic oligonucleotide
  Antisense Strand to SEQ ID NO: 439683
aagauaaguaauuucccga

SEQ ID NO: 439685 - RNA, 19 nt, Artificial Sequence
  Description of Artificial Sequence: Synthetic oligonucleotide
  Sense strand starting at position 3018 of SEQ ID NO: 316777
acagucaccucaguaaaca

SEQ ID NO: 439686 - RNA, 19 nt, Artificial Sequence
  Description of Artificial Sequence: Synthetic oligonucleotide
  Antisense Strand to SEQ ID NO: 439685
uguuuacugaggugacugu

SEQ ID NO: 439687 - RNA, 19 nt, Artificial Sequence
  Description of Artificial Sequence: Synthetic oligonucleotide
  Sense strand starting at position 3122 of SEQ ID NO: 316777
uucuuucaggagugggaaa

SEQ ID NO: 439688 - RNA, 19 nt, Artificial Sequence
  Description of Artificial Sequence: Synthetic oligonucleotide
  Antisense Strand to SEQ ID NO: 439687
uuucccacuccugaaagaa

SEQ ID NO: 439689 - RNA, 19 nt, Artificial Sequence
  Description of Artificial Sequence: Synthetic oligonucleotide
  Sense strand starting at position 3293 of SEQ ID NO: 316777
gaaggcauauuugaguuua

SEQ ID NO: 439690 - RNA, 19 nt, Artificial Sequence
  Description of Artificial Sequence: Synthetic oligonucleotide
  Antisense Strand to SEQ ID NO: 439689
uaaacucaaauaugccuuc

SEQ ID NO: 439691 - RNA, 19 nt, Artificial Sequence
  Description of Artificial Sequence: Synthetic oligonucleotide
  Sense strand starting at position 3304 of SEQ ID NO: 316777
ugaguuuaauccucgguug

SEQ ID NO: 439692 - RNA, 19 nt, Artificial Sequence
  Description of Artificial Sequence: Synthetic oligonucleotide
  Antisense Strand to SEQ ID NO: 439691
caaccgaggauuaaacuca

SEQ ID NO: 439693 - RNA, 19 nt, Artificial Sequence
  Description of Artificial Sequence: Synthetic oligonucleotide
  Sense strand starting at position 3332 of SEQ ID NO: 316777
guuccuaagaaggguguua

SEQ ID NO: 439694 - RNA, 19 nt, Artificial Sequence
  Description of Artificial Sequence: Synthetic oligonucleotide
  Antisense Strand to SEQ ID NO: 439693
uaacacccuucuuaggaac

SEQ ID NO: 439695 - RNA, 19 nt, Artificial Sequence
  Description of Artificial Sequence: Synthetic oligonucleotide
  Sense strand starting at position 3345 of SEQ ID NO: 316777
guguuacgucuuuaccaau

SEQ ID NO: 439696 - RNA, 19 nt, Artificial Sequence
  Description of Artificial Sequence: Synthetic oligonucleotide
  Antisense Strand to SEQ ID NO: 439695
auugguaaagacguaacac

SEQ ID NO: 439697 - RNA, 19 nt, Artificial Sequence
  Description of Artificial Sequence: Synthetic oligonucleotide
  Sense strand starting at position 3354 of SEQ ID NO: 316777
cuuuaccaauggguuuaaa

SEQ ID NO: 439698 - RNA, 19 nt, Artificial Sequence
  Description of Artificial Sequence: Synthetic oligonucleotide
  Antisense Strand to SEQ ID NO: 439697
uuuaaacccauugguaaag

SEQ ID NO: 439699 - RNA, 19 nt, Artificial Sequence
  Description of Artificial Sequence: Synthetic oligonucleotide
  Sense strand starting at position 3363 of SEQ ID NO: 316777
uggguuuaaaucugggaga

SEQ ID NO: 439700 - RNA, 19 nt, Artificial Sequence
  Description of Artificial Sequence: Synthetic oligonucleotide
  Antisense Strand to SEQ ID NO: 439699
ucucccagauuuaaaccca

SEQ ID NO: 439701 - RNA, 19 nt, Artificial Sequence
  Description of Artificial Sequence: Synthetic oligonucleotide
  Sense strand starting at position 3395 of SEQ ID NO: 316777
gccaucuuuccacacguga

SEQ ID NO: 439702 - RNA, 19 nt, Artificial Sequence
  Description of Artificial Sequence: Synthetic oligonucleotide
  Antisense Strand to SEQ ID NO: 439701
ucacguguggaaagauggc

SEQ ID NO: 439703 - RNA, 19 nt, Artificial Sequence
  Description of Artificial Sequence: Synthetic oligonucleotide
  Sense strand starting at position 3454 of SEQ ID NO: 316777
aagacagguuuggccuaaa

SEQ ID NO: 439704 - RNA, 19 nt, Artificial Sequence
  Description of Artificial Sequence: Synthetic oligonucleotide
  Antisense Strand to SEQ ID NO: 439703
uuuaggccaaaccugucuu

SEQ ID NO: 439705 - RNA, 19 nt, Artificial Sequence
  Description of Artificial Sequence: Synthetic oligonucleotide
  Sense strand starting at position 3457 of SEQ ID NO: 316777
acagguuuggccuaaagac

SEQ ID NO: 439706 - RNA, 19 nt, Artificial Sequence
  Description of Artificial Sequence: Synthetic oligonucleotide
  Antisense Strand to SEQ ID NO: 439705
gucuuuaggccaaaccugu

SEQ ID NO: 439707 - RNA, 19 nt, Artificial Sequence
  Description of Artificial Sequence: Synthetic oligonucleotide
  Sense strand starting at position 3465 of SEQ ID NO: 316777
ggccuaaagacauguuuga

SEQ ID NO: 439708 - RNA, 19 nt, Artificial Sequence
  Description of Artificial Sequence: Synthetic oligonucleotide
  Antisense Strand to SEQ ID NO: 439707
ucaaacaugucuuuaggcc

SEQ ID NO: 439709 - RNA, 19 nt, Artificial Sequence
  Description of Artificial Sequence: Synthetic oligonucleotide
  Sense strand starting at position 3476 of SEQ ID NO: 316777
auguuugaggccuggaaac

SEQ ID NO: 439710 - RNA, 19 nt, Artificial Sequence
  Description of Artificial Sequence: Synthetic oligonucleotide
  Antisense Strand to SEQ ID NO: 439709
guuuccaggccucaaacau

SEQ ID NO: 439711 - RNA, 19 nt, Artificial Sequence
  Description of Artificial Sequence: Synthetic oligonucleotide
  Sense strand starting at position 3500 of SEQ ID NO: 316777
uagauuagauuccucugga

SEQ ID NO: 439712 - RNA, 19 nt, Artificial Sequence
  Description of Artificial Sequence: Synthetic oligonucleotide
  Antisense Strand to SEQ ID NO: 439711
uccagaggaaucuaaucua

SEQ ID NO: 439713 - RNA, 19 nt, Artificial Sequence
  Description of Artificial Sequence: Synthetic oligonucleotide
  Sense strand starting at position 3503 of SEQ ID NO: 316777
auuagauuccucuggaaau

SEQ ID NO: 439714 - RNA, 19 nt, Artificial Sequence
  Description of Artificial Sequence: Synthetic oligonucleotide
  Antisense Strand to SEQ ID NO: 439713
auuuccagaggaaucuaau

SEQ ID NO: 439715 - RNA, 19 nt, Artificial Sequence
  Description of Artificial Sequence: Synthetic oligonucleotide
  Sense strand starting at position 3526 of SEQ ID NO: 316777
uuaaaccagucaguaaauu

SEQ ID NO: 439716 - RNA, 19 nt, Artificial Sequence
  Description of Artificial Sequence: Synthetic oligonucleotide
  Antisense Strand to SEQ ID NO: 439715
aauuuacugacugguuuaa

SEQ ID NO: 439717 - RNA, 19 nt, Artificial Sequence
  Description of Artificial Sequence: Synthetic oligonucleotide
  Sense strand starting at position 3534 of SEQ ID NO: 316777
gucaguaaauucuugcauc

SEQ ID NO: 439718 - RNA, 19 nt, Artificial Sequence
  Description of Artificial Sequence: Synthetic oligonucleotide
  Antisense Strand to SEQ ID NO: 439717
gaugcaagaauuuacugac

SEQ ID NO: 439719 - RNA, 19 nt, Artificial Sequence
  Description of Artificial Sequence: Synthetic oligonucleotide
  Sense strand starting at position 3562 of SEQ ID NO: 316777
gcuuaaaccagugagaggu

SEQ ID NO: 439720 - RNA, 19 nt, Artificial Sequence
  Description of Artificial Sequence: Synthetic oligonucleotide
  Antisense Strand to SEQ ID NO: 439719
accucucacugguuuaagc

SEQ ID NO: 439721 - RNA, 19 nt, Artificial Sequence
  Description of Artificial Sequence: Synthetic oligonucleotide
  Sense strand starting at position 3635 of SEQ ID NO: 316777
gaggcaaaguuauuaauac

SEQ ID NO: 439722 - RNA, 19 nt, Artificial Sequence
  Description of Artificial Sequence: Synthetic oligonucleotide
  Antisense Strand to SEQ ID NO: 439721
guauuaauaacuuugccuc

SEQ ID NO: 439723 - RNA, 19 nt, Artificial Sequence
  Description of Artificial Sequence: Synthetic oligonucleotide
  Sense strand starting at position 3661 of SEQ ID NO: 316777
guagguugcagccagacaa

SEQ ID NO: 439724 - RNA, 19 nt, Artificial Sequence
  Description of Artificial Sequence: Synthetic oligonucleotide
  Antisense Strand to SEQ ID NO: 439723
uugucuggcugcaaccuac

SEQ ID NO: 439725 - RNA, 19 nt, Artificial Sequence
  Description of Artificial Sequence: Synthetic oligonucleotide
  Sense strand starting at position 3688 of SEQ ID NO: 316777
uugaaugcuuucccuagga

SEQ ID NO: 439726 - RNA, 19 nt, Artificial Sequence
  Description of Artificial Sequence: Synthetic oligonucleotide
  Antisense Strand to SEQ ID NO: 439725
uccuagggaaagcauucaa

SEQ ID NO: 439727 - RNA, 19 nt, Artificial Sequence
  Description of Artificial Sequence: Synthetic oligonucleotide
  Sense strand starting at position 3690 of SEQ ID NO: 316777
gaaugcuuucccuaggaug

SEQ ID NO: 439728 - RNA, 19 nt, Artificial Sequence
  Description of Artificial Sequence: Synthetic oligonucleotide
  Antisense Strand to SEQ ID NO: 439727
cauccuagggaaagcauuc

SEQ ID NO: 439729 - RNA, 19 nt, Artificial Sequence
  Description of Artificial Sequence: Synthetic oligonucleotide
  Sense strand starting at position 3692 of SEQ ID NO: 316777
augcuuucccuaggaugga

SEQ ID NO: 439730 - RNA, 19 nt, Artificial Sequence
  Description of Artificial Sequence: Synthetic oligonucleotide
  Antisense Strand to SEQ ID NO: 439729
uccauccuagggaaagcau

SEQ ID NO: 439731 - RNA, 19 nt, Artificial Sequence
  Description of Artificial Sequence: Synthetic oligonucleotide
  Sense strand starting at position 3935 of SEQ ID NO: 316777
uugaacauuucccaugguu

SEQ ID NO: 439732 - RNA, 19 nt, Artificial Sequence
  Description of Artificial Sequence: Synthetic oligonucleotide
  Antisense Strand to SEQ ID NO: 439731
aaccaugggaaauguucaa

SEQ ID NO: 439733 - RNA, 19 nt, Artificial Sequence
  Description of Artificial Sequence: Synthetic oligonucleotide
  Sense strand starting at position 198 of SEQ ID NO: 316778
ggacaaucacucugugauu

SEQ ID NO: 439734 - RNA, 19 nt, Artificial Sequence
  Description of Artificial Sequence: Synthetic oligonucleotide
  Antisense Strand to SEQ ID NO: 439733
aaucacagagugauugucc

SEQ ID NO: 439735 - RNA, 19 nt, Artificial Sequence
  Description of Artificial Sequence: Synthetic oligonucleotide
  Sense strand starting at position 232 of SEQ ID NO: 316778
cuaauaaauguguaagcca

SEQ ID NO: 439736 - RNA, 19 nt, Artificial Sequence
  Description of Artificial Sequence: Synthetic oligonucleotide
  Antisense Strand to SEQ ID NO: 439735
uggcuuacacauuuauuag

SEQ ID NO: 439737 - RNA, 19 nt, Artificial Sequence
  Description of Artificial Sequence: Synthetic oligonucleotide
  Sense strand starting at position 275 of SEQ ID NO: 316778
ucaguagauuguuuagaga

SEQ ID NO: 439738 - RNA, 19 nt, Artificial Sequence
  Description of Artificial Sequence: Synthetic oligonucleotide
  Antisense Strand to SEQ ID NO: 439737
ucucuaaacaaucuacuga

SEQ ID NO: 439739 - RNA, 19 nt, Artificial Sequence
  Description of Artificial Sequence: Synthetic oligonucleotide
  Sense strand starting at position 327 of SEQ ID NO: 316778
cccuaaagucccgaagaca

SEQ ID NO: 439740 - RNA, 19 nt, Artificial Sequence
  Description of Artificial Sequence: Synthetic oligonucleotide
  Antisense Strand to SEQ ID NO: 439739
ugucuucgggacuuuaggg

SEQ ID NO: 439741 - RNA, 19 nt, Artificial Sequence
  Description of Artificial Sequence: Synthetic oligonucleotide
  Sense strand starting at position 502 of SEQ ID NO: 316778
aucuaauugcuagguaaau

SEQ ID NO: 439742 - RNA, 19 nt, Artificial Sequence
  Description of Artificial Sequence: Synthetic oligonucleotide
  Antisense Strand to SEQ ID NO: 439741
auuuaccuagcaauuagau

SEQ ID NO: 439743 - RNA, 19 nt, Artificial Sequence
  Description of Artificial Sequence: Synthetic oligonucleotide
  Sense strand starting at position 503 of SEQ ID NO: 316778
ucuaauugcuagguaaaua

SEQ ID NO: 439744 - RNA, 19 nt, Artificial Sequence
  Description of Artificial Sequence: Synthetic oligonucleotide
  Antisense Strand to SEQ ID NO: 439743
uauuuaccuagcaauuaga

SEQ ID NO: 439745 - RNA, 19 nt, Artificial Sequence
  Description of Artificial Sequence: Synthetic oligonucleotide
  Sense strand starting at position 575 of SEQ ID NO: 316778
guguguuuaaaugaugaca

SEQ ID NO: 439746 - RNA, 19 nt, Artificial Sequence
  Description of Artificial Sequence: Synthetic oligonucleotide
  Antisense Strand to SEQ ID NO: 439745
ugucaucauuuaaacacac

SEQ ID NO: 439747 - RNA, 19 nt, Artificial Sequence
  Description of Artificial Sequence: Synthetic oligonucleotide
  Sense strand starting at position 737 of SEQ ID NO: 316778
uggcaugguauugauuaau

SEQ ID NO: 439748 - RNA, 19 nt, Artificial Sequence
  Description of Artificial Sequence: Synthetic oligonucleotide
  Antisense Strand to SEQ ID NO: 439747
auuaaucaauaccaugcca

SEQ ID NO: 439749 - RNA, 19 nt, Artificial Sequence
  Description of Artificial Sequence: Synthetic oligonucleotide
  Sense strand starting at position 997 of SEQ ID NO: 316778
ccaguaaacuuuccaguag

SEQ ID NO: 439750 - RNA, 19 nt, Artificial Sequence
  Description of Artificial Sequence: Synthetic oligonucleotide
  Antisense Strand to SEQ ID NO: 439749
cuacuggaaaguuuacugg

SEQ ID NO: 439751 - RNA, 19 nt, Artificial Sequence
  Description of Artificial Sequence: Synthetic oligonucleotide
  Sense strand starting at position 1027 of SEQ ID NO: 316778
aggguagucugauuccaga

SEQ ID NO: 439752 - RNA, 19 nt, Artificial Sequence
  Description of Artificial Sequence: Synthetic oligonucleotide
  Antisense Strand to SEQ ID NO: 439751
ucuggaaucagacuacccu

SEQ ID NO: 439753 - RNA, 19 nt, Artificial Sequence
  Description of Artificial Sequence: Synthetic oligonucleotide
  Sense strand starting at position 1306 of SEQ ID NO: 316778
guuguaaggcuuuaaggag

SEQ ID NO: 439754 - RNA, 19 nt, Artificial Sequence
  Description of Artificial Sequence: Synthetic oligonucleotide
  Antisense Strand to SEQ ID NO: 439753
cuccuuaaagccuuacaac

SEQ ID NO: 439755 - RNA, 19 nt, Artificial Sequence
  Description of Artificial Sequence: Synthetic oligonucleotide
  Sense strand starting at position 1519 of SEQ ID NO: 316778
cacuguggacuuugacauu

SEQ ID NO: 439756 - RNA, 19 nt, Artificial Sequence
  Description of Artificial Sequence: Synthetic oligonucleotide
  Antisense Strand to SEQ ID NO: 439755
aaugucaaaguccacagug

SEQ ID NO: 439757 - RNA, 19 nt, Artificial Sequence
  Description of Artificial Sequence: Synthetic oligonucleotide
  Sense strand starting at position 1634 of SEQ ID NO: 316778
ccaauauacucacucguga

SEQ ID NO: 439758 - RNA, 19 nt, Artificial Sequence
  Description of Artificial Sequence: Synthetic oligonucleotide
  Antisense Strand to SEQ ID NO: 439757
ucacgagugaguauauugg

SEQ ID NO: 439759 - RNA, 19 nt, Artificial Sequence
  Description of Artificial Sequence: Synthetic oligonucleotide
  Sense strand starting at position 2129 of SEQ ID NO: 316778
gaguguguuacugaaggaa

SEQ ID NO: 439760 - RNA, 19 nt, Artificial Sequence
  Description of Artificial Sequence: Synthetic oligonucleotide
  Antisense Strand to SEQ ID NO: 439759
uuccuucaguaacacacuc

SEQ ID NO: 439761 - RNA, 19 nt, Artificial Sequence
  Description of Artificial Sequence: Synthetic oligonucleotide
  Sense strand starting at position 2132 of SEQ ID NO: 316778
uguguuacugaaggaagua

SEQ ID NO: 439762 - RNA, 19 nt, Artificial Sequence
  Description of Artificial Sequence: Synthetic oligonucleotide
  Antisense Strand to SEQ ID NO: 439761
uacuuccuucaguaacaca

SEQ ID NO: 439763 - RNA, 19 nt, Artificial Sequence
  Description of Artificial Sequence: Synthetic oligonucleotide
  Sense strand starting at position 2133 of SEQ ID NO: 316778
guguuacugaaggaaguaa

SEQ ID NO: 439764 - RNA, 19 nt, Artificial Sequence
  Description of Artificial Sequence: Synthetic oligonucleotide
  Antisense Strand to SEQ ID NO: 439763
uuacuuccuucaguaacac

SEQ ID NO: 439765 - RNA, 19 nt, Artificial Sequence
  Description of Artificial Sequence: Synthetic oligonucleotide
  Sense strand starting at position 2188 of SEQ ID NO: 316778
uguuuaacuguuccucguu

SEQ ID NO: 439766 - RNA, 19 nt, Artificial Sequence
  Description of Artificial Sequence: Synthetic oligonucleotide
  Antisense Strand to SEQ ID NO: 439765
aacgaggaacaguuaaaca

SEQ ID NO: 439767 - RNA, 19 nt, Artificial Sequence
  Description of Artificial Sequence: Synthetic oligonucleotide
  Sense strand starting at position 2238 of SEQ ID NO: 316778
cguaaugauaaaggaguua

SEQ ID NO: 439768 - RNA, 19 nt, Artificial Sequence
  Description of Artificial Sequence: Synthetic oligonucleotide
  Antisense Strand to SEQ ID NO: 439767
uaacuccuuuaucauuacg

SEQ ID NO: 439769 - RNA, 19 nt, Artificial Sequence
  Description of Artificial Sequence: Synthetic oligonucleotide
  Sense strand starting at position 2346 of SEQ ID NO: 316778
ugauuagcacuugaauauu

SEQ ID NO: 439770 - RNA, 19 nt, Artificial Sequence
  Description of Artificial Sequence: Synthetic oligonucleotide
  Antisense Strand to SEQ ID NO: 439769
aauauucaagugcuaauca

SEQ ID NO: 439771 - RNA, 19 nt, Artificial Sequence
  Description of Artificial Sequence: Synthetic oligonucleotide
  Sense strand starting at position 2443 of SEQ ID NO: 316778
cugucagaaucuuuaggac

SEQ ID NO: 439772 - RNA, 19 nt, Artificial Sequence
  Description of Artificial Sequence: Synthetic oligonucleotide
  Antisense Strand to SEQ ID NO: 439771
guccuaaagauucugacag

SEQ ID NO: 439773 - RNA, 19 nt, Artificial Sequence
  Description of Artificial Sequence: Synthetic oligonucleotide
  Sense strand starting at position 2455 of SEQ ID NO: 316778
uuaggacuguuauuaauac

SEQ ID NO: 439774 - RNA, 19 nt, Artificial Sequence
  Description of Artificial Sequence: Synthetic oligonucleotide
  Antisense Strand to SEQ ID NO: 439773
guauuaauaacaguccuaa

SEQ ID NO: 439775 - RNA, 19 nt, Artificial Sequence
  Description of Artificial Sequence: Synthetic oligonucleotide
  Sense strand starting at position 2560 of SEQ ID NO: 316778
gguaaacugugacuagaau

SEQ ID NO: 439776 - RNA, 19 nt, Artificial Sequence
  Description of Artificial Sequence: Synthetic oligonucleotide
  Antisense Strand to SEQ ID NO: 439775
auucuagucacaguuuacc

SEQ ID NO: 439777 - RNA, 19 nt, Artificial Sequence
  Description of Artificial Sequence: Synthetic oligonucleotide
  Sense strand starting at position 2647 of SEQ ID NO: 316778
cguuaucugaaaugggaga

SEQ ID NO: 439778 - RNA, 19 nt, Artificial Sequence
  Description of Artificial Sequence: Synthetic oligonucleotide
  Antisense Strand to SEQ ID NO: 439777
ucucccauuucagauaacg

SEQ ID NO: 439779 - RNA, 19 nt, Artificial Sequence
  Description of Artificial Sequence: Synthetic oligonucleotide
  Sense strand starting at position 2802 of SEQ ID NO: 316778
uacuguggacuuugacauu

SEQ ID NO: 439780 - RNA, 19 nt, Artificial Sequence
  Description of Artificial Sequence: Synthetic oligonucleotide
  Antisense Strand to SEQ ID NO: 439779
aaugucaaaguccacagua

SEQ ID NO: 439781 - RNA, 19 nt, Artificial Sequence
  Description of Artificial Sequence: Synthetic oligonucleotide
  Sense strand starting at position 2932 of SEQ ID NO: 316778
uucuuaguuggucacagaa

SEQ ID NO: 439782 - RNA, 19 nt, Artificial Sequence
  Description of Artificial Sequence: Synthetic oligonucleotide
  Antisense Strand to SEQ ID NO: 439781
uucugugaccaacuaagaa

SEQ ID NO: 439783 - RNA, 19 nt, Artificial Sequence
  Description of Artificial Sequence: Synthetic oligonucleotide
  Sense strand starting at position 3000 of SEQ ID NO: 316778
ggaaucucacuuggagagu

SEQ ID NO: 439784 - RNA, 19 nt, Artificial Sequence
  Description of Artificial Sequence: Synthetic oligonucleotide
  Antisense Strand to SEQ ID NO: 439783
acucuccaagugagauucc

SEQ ID NO: 439785 - RNA, 19 nt, Artificial Sequence
  Description of Artificial Sequence: Synthetic oligonucleotide
  Sense strand starting at position 3044 of SEQ ID NO: 316778
auggaaaugucaguuuccu

SEQ ID NO: 439786 - RNA, 19 nt, Artificial Sequence
  Description of Artificial Sequence: Synthetic oligonucleotide
  Antisense Strand to SEQ ID NO: 439785
aggaaacugacauuuccau

SEQ ID NO: 439787 - RNA, 19 nt, Artificial Sequence
  Description of Artificial Sequence: Synthetic oligonucleotide
  Sense strand starting at position 3052 of SEQ ID NO: 316778
gucaguuuccuuccucgca

SEQ ID NO: 439788 - RNA, 19 nt, Artificial Sequence
  Description of Artificial Sequence: Synthetic oligonucleotide
  Antisense Strand to SEQ ID NO: 439787
ugcgaggaaggaaacugac

SEQ ID NO: 439789 - RNA, 19 nt, Artificial Sequence
  Description of Artificial Sequence: Synthetic oligonucleotide
  Sense strand starting at position 3183 of SEQ ID NO: 316778
gggccugauggcguguauu

SEQ ID NO: 439790 - RNA, 19 nt, Artificial Sequence
  Description of Artificial Sequence: Synthetic oligonucleotide
  Antisense Strand to SEQ ID NO: 439789
aauacacgccaucaggccc

SEQ ID NO: 439791 - RNA, 19 nt, Artificial Sequence
  Description of Artificial Sequence: Synthetic oligonucleotide
  Sense strand starting at position 3280 of SEQ ID NO: 316778
ugccacucugaguaacaga

SEQ ID NO: 439792 - RNA, 19 nt, Artificial Sequence
  Description of Artificial Sequence: Synthetic oligonucleotide
  Antisense Strand to SEQ ID NO: 439791
ucuguuacucagaguggca

SEQ ID NO: 439793 - RNA, 19 nt, Artificial Sequence
  Description of Artificial Sequence: Synthetic oligonucleotide
  Sense strand starting at position 3397 of SEQ ID NO: 316778
ccagcaacccuuuaaggua

SEQ ID NO: 439794 - RNA, 19 nt, Artificial Sequence
  Description of Artificial Sequence: Synthetic oligonucleotide
  Antisense Strand to SEQ ID NO: 439793
uaccuuaaaggguugcugg

SEQ ID NO: 439795 - RNA, 19 nt, Artificial Sequence
  Description of Artificial Sequence: Synthetic oligonucleotide
  Sense strand starting at position 3659 of SEQ ID NO: 316778
ucaggacuugcguaaauau

SEQ ID NO: 439796 - RNA, 19 nt, Artificial Sequence
  Description of Artificial Sequence: Synthetic oligonucleotide
  Antisense Strand to SEQ ID NO: 439795
auauuuacgcaaguccuga

SEQ ID NO: 439797 - RNA, 19 nt, Artificial Sequence
  Description of Artificial Sequence: Synthetic oligonucleotide
  Sense strand starting at position 3683 of SEQ ID NO: 316778
agucauauuucugccguca

SEQ ID NO: 439798 - RNA, 19 nt, Artificial Sequence
  Description of Artificial Sequence: Synthetic oligonucleotide
  Antisense Strand to SEQ ID NO: 439797
ugacggcagaaauaugacu

SEQ ID NO: 439799 - RNA, 19 nt, Artificial Sequence
  Description of Artificial Sequence: Synthetic oligonucleotide
  Sense strand starting at position 3792 of SEQ ID NO: 316778
cuuugucuugcugaacaaa

SEQ ID NO: 439800 - RNA, 19 nt, Artificial Sequence
  Description of Artificial Sequence: Synthetic oligonucleotide
  Antisense Strand to SEQ ID NO: 439799
uuuguucagcaagacaaag

SEQ ID NO: 439801 - RNA, 19 nt, Artificial Sequence
  Description of Artificial Sequence: Synthetic oligonucleotide
  Sense strand starting at position 3803 of SEQ ID NO: 316778
ugaacaaaggugugguuaa

SEQ ID NO: 439802 - RNA, 19 nt, Artificial Sequence
  Description of Artificial Sequence: Synthetic oligonucleotide
  Antisense Strand to SEQ ID NO: 439801
uuaaccacaccuuuguuca

SEQ ID NO: 439803 - RNA, 19 nt, Artificial Sequence
  Description of Artificial Sequence: Synthetic oligonucleotide
  Sense strand starting at position 3822 of SEQ ID NO: 316778
guggaacucuagcuauuga

SEQ ID NO: 439804 - RNA, 19 nt, Artificial Sequence
  Description of Artificial Sequence: Synthetic oligonucleotide
  Antisense Strand to SEQ ID NO: 439803
ucaauagcuagaguuccac

SEQ ID NO: 439805 - RNA, 19 nt, Artificial Sequence
  Description of Artificial Sequence: Synthetic oligonucleotide
  Sense strand starting at position 3899 of SEQ ID NO: 316778
cuuucuaaucugcauagga

SEQ ID NO: 439806 - RNA, 19 nt, Artificial Sequence
  Description of Artificial Sequence: Synthetic oligonucleotide
  Antisense Strand to SEQ ID NO: 439805
uccuaugcagauuagaaag

SEQ ID NO: 439807 - RNA, 19 nt, Artificial Sequence
  Description of Artificial Sequence: Synthetic oligonucleotide
  Sense strand starting at position 3901 of SEQ ID NO: 316778
uucuaaucugcauaggauu

SEQ ID NO: 439808 - RNA, 19 nt, Artificial Sequence
  Description of Artificial Sequence: Synthetic oligonucleotide
  Antisense Strand to SEQ ID NO: 439807
aauccuaugcagauuagaa

SEQ ID NO: 439809 - RNA, 19 nt, Artificial Sequence
  Description of Artificial Sequence: Synthetic oligonucleotide
  Sense strand starting at position 3916 of SEQ ID NO: 316778
gauuaucguguggaguaaa

SEQ ID NO: 439810 - RNA, 19 nt, Artificial Sequence
  Description of Artificial Sequence: Synthetic oligonucleotide
  Antisense Strand to SEQ ID NO: 439809
uuuacuccacacgauaauc

SEQ ID NO: 439811 - RNA, 19 nt, Artificial Sequence
  Description of Artificial Sequence: Synthetic oligonucleotide
  Sense strand starting at position 3924 of SEQ ID NO: 316778
uguggaguaaagugaaaua

SEQ ID NO: 439812 - RNA, 19 nt, Artificial Sequence
  Description of Artificial Sequence: Synthetic oligonucleotide
  Antisense Strand to SEQ ID NO: 439811
uauuucacuuuacuccaca

SEQ ID NO: 439813 - RNA, 19 nt, Artificial Sequence
  Description of Artificial Sequence: Synthetic oligonucleotide
  Sense strand starting at position 120 of SEQ ID NO: 316779
gcagauggcuauuucuuua

SEQ ID NO: 439814 - RNA, 19 nt, Artificial Sequence
  Description of Artificial Sequence: Synthetic oligonucleotide
  Antisense Strand to SEQ ID NO: 439813
uaaagaaauagccaucugc

SEQ ID NO: 439815 - RNA, 19 nt, Artificial Sequence
  Description of Artificial Sequence: Synthetic oligonucleotide
  Sense strand starting at position 289 of SEQ ID NO: 316779
cagcuagucgugucucuca

SEQ ID NO: 439816 - RNA, 19 nt, Artificial Sequence
  Description of Artificial Sequence: Synthetic oligonucleotide
  Antisense Strand to SEQ ID NO: 439815
ugagagacacgacuagcug

SEQ ID NO: 439817 - RNA, 19 nt, Artificial Sequence
  Description of Artificial Sequence: Synthetic oligonucleotide
  Sense strand starting at position 291 of SEQ ID NO: 316779
gcuagucgugucucucagu

SEQ ID NO: 439818 - RNA, 19 nt, Artificial Sequence
  Description of Artificial Sequence: Synthetic oligonucleotide
  Antisense Strand to SEQ ID NO: 439817
acugagagacacgacuagc

SEQ ID NO: 439819 - RNA, 19 nt, Artificial Sequence
  Description of Artificial Sequence: Synthetic oligonucleotide
  Sense strand starting at position 297 of SEQ ID NO: 316779
cgugucucucaguugcaau

SEQ ID NO: 439820 - RNA, 19 nt, Artificial Sequence
  Description of Artificial Sequence: Synthetic oligonucleotide
  Antisense Strand to SEQ ID NO: 439819
auugcaacugagagacacg

SEQ ID NO: 439821 - RNA, 19 nt, Artificial Sequence
  Description of Artificial Sequence: Synthetic oligonucleotide
  Sense strand starting at position 561 of SEQ ID NO: 316779
ucauuacuauugucaguga

SEQ ID NO: 439822 - RNA, 19 nt, Artificial Sequence
  Description of Artificial Sequence: Synthetic oligonucleotide
  Antisense Strand to SEQ ID NO: 439821
ucacugacaauaguaauga

SEQ ID NO: 439823 - RNA, 19 nt, Artificial Sequence
  Description of Artificial Sequence: Synthetic oligonucleotide
  Sense strand starting at position 1001 of SEQ ID NO: 316779
aguuaaucgcuuuaggauu

SEQ ID NO: 439824 - RNA, 19 nt, Artificial Sequence
  Description of Artificial Sequence: Synthetic oligonucleotide
  Antisense Strand to SEQ ID NO: 439823
aauccuaaagcgauuaacu

SEQ ID NO: 439825 - RNA, 19 nt, Artificial Sequence
  Description of Artificial Sequence: Synthetic oligonucleotide
  Sense strand starting at position 1313 of SEQ ID NO: 316779
ucaguuuaguccuuacuau

SEQ ID NO: 439826 - RNA, 19 nt, Artificial Sequence
  Description of Artificial Sequence: Synthetic oligonucleotide
  Antisense Strand to SEQ ID NO: 439825
auaguaaggacuaaacuga

SEQ ID NO: 439827 - RNA, 19 nt, Artificial Sequence
  Description of Artificial Sequence: Synthetic oligonucleotide
  Sense strand starting at position 1464 of SEQ ID NO: 316779
ggaccuuagcaguguggga

SEQ ID NO: 439828 - RNA, 19 nt, Artificial Sequence
  Description of Artificial Sequence: Synthetic oligonucleotide
  Antisense Strand to SEQ ID NO: 439827
ucccacacugcuaaggucc

SEQ ID NO: 439829 - RNA, 19 nt, Artificial Sequence
  Description of Artificial Sequence: Synthetic oligonucleotide
  Sense strand starting at position 1519 of SEQ ID NO: 316779
ggugguguuauguaaacaa

SEQ ID NO: 439830 - RNA, 19 nt, Artificial Sequence
  Description of Artificial Sequence: Synthetic oligonucleotide
  Antisense Strand to SEQ ID NO: 439829
uuguuuacauaacaccacc

SEQ ID NO: 439831 - RNA, 19 nt, Artificial Sequence
  Description of Artificial Sequence: Synthetic oligonucleotide
  Sense strand starting at position 1732 of SEQ ID NO: 316779
cccugaucaaguuggauag

SEQ ID NO: 439832 - RNA, 19 nt, Artificial Sequence
  Description of Artificial Sequence: Synthetic oligonucleotide
  Antisense Strand to SEQ ID NO: 439831
cuauccaacuugaucaggg

SEQ ID NO: 439833 - RNA, 19 nt, Artificial Sequence
  Description of Artificial Sequence: Synthetic oligonucleotide
  Sense strand starting at position 1733 of SEQ ID NO: 316779
ccugaucaaguuggauaga

SEQ ID NO: 439834 - RNA, 19 nt, Artificial Sequence
  Description of Artificial Sequence: Synthetic oligonucleotide
  Antisense Strand to SEQ ID NO: 439833
ucuauccaacuugaucagg

SEQ ID NO: 439835 - RNA, 19 nt, Artificial Sequence
  Description of Artificial Sequence: Synthetic oligonucleotide
  Sense strand starting at position 1837 of SEQ ID NO: 316779
uggcacaauuuauaugaua

SEQ ID NO: 439836 - RNA, 19 nt, Artificial Sequence
  Description of Artificial Sequence: Synthetic oligonucleotide
  Antisense Strand to SEQ ID NO: 439835
uaucauauaaauugugcca

SEQ ID NO: 439837 - RNA, 19 nt, Artificial Sequence
  Description of Artificial Sequence: Synthetic oligonucleotide
  Sense strand starting at position 1850 of SEQ ID NO: 316779
augauaacugagugcucua

SEQ ID NO: 439838 - RNA, 19 nt, Artificial Sequence
  Description of Artificial Sequence: Synthetic oligonucleotide
  Antisense Strand to SEQ ID NO: 439837
uagagcacucaguuaucau

SEQ ID NO: 439839 - RNA, 19 nt, Artificial Sequence
  Description of Artificial Sequence: Synthetic oligonucleotide
  Sense strand starting at position 1853 of SEQ ID NO: 316779
auaacugagugcucuaaug

SEQ ID NO: 439840 - RNA, 19 nt, Artificial Sequence
  Description of Artificial Sequence: Synthetic oligonucleotide
  Antisense Strand to SEQ ID NO: 439839
cauuagagcacucaguuau

SEQ ID NO: 439841 - RNA, 19 nt, Artificial Sequence
  Description of Artificial Sequence: Synthetic oligonucleotide
  Sense strand starting at position 1885 of SEQ ID NO: 316779
aagaccaguuggucguuaa

SEQ ID NO: 439842 - RNA, 19 nt, Artificial Sequence
  Description of Artificial Sequence: Synthetic oligonucleotide
  Antisense Strand to SEQ ID NO: 439841
uuaacgaccaacuggucuu

SEQ ID NO: 439843 - RNA, 19 nt, Artificial Sequence
  Description of Artificial Sequence: Synthetic oligonucleotide
  Sense strand starting at position 1886 of SEQ ID NO: 316779
agaccaguuggucguuaau

SEQ ID NO: 439844 - RNA, 19 nt, Artificial Sequence
  Description of Artificial Sequence: Synthetic oligonucleotide
  Antisense Strand to SEQ ID NO: 439843
auuaacgaccaacuggucu

SEQ ID NO: 439845 - RNA, 19 nt, Artificial Sequence
  Description of Artificial Sequence: Synthetic oligonucleotide
  Sense strand starting at position 1889 of SEQ ID NO: 316779
ccaguuggucguuaaucuu

SEQ ID NO: 439846 - RNA, 19 nt, Artificial Sequence
  Description of Artificial Sequence: Synthetic oligonucleotide
  Antisense Strand to SEQ ID NO: 439845
aagauuaacgaccaacugg

SEQ ID NO: 439847 - RNA, 19 nt, Artificial Sequence
  Description of Artificial Sequence: Synthetic oligonucleotide
  Sense strand starting at position 1936 of SEQ ID NO: 316779
guuacuuaccuagggacga

SEQ ID NO: 439848 - RNA, 19 nt, Artificial Sequence
  Description of Artificial Sequence: Synthetic oligonucleotide
  Antisense Strand to SEQ ID NO: 439847
ucgucccuagguaaguaac

SEQ ID NO: 439849 - RNA, 19 nt, Artificial Sequence
  Description of Artificial Sequence: Synthetic oligonucleotide
  Sense strand starting at position 1951 of SEQ ID NO: 316779
acgagucucuggcuauaga

SEQ ID NO: 439850 - RNA, 19 nt, Artificial Sequence
  Description of Artificial Sequence: Synthetic oligonucleotide
  Antisense Strand to SEQ ID NO: 439849
ucuauagccagagacucgu

SEQ ID NO: 439851 - RNA, 19 nt, Artificial Sequence
  Description of Artificial Sequence: Synthetic oligonucleotide
  Sense strand starting at position 2078 of SEQ ID NO: 316779
uuugucuuucuugauagaa

SEQ ID NO: 439852 - RNA, 19 nt, Artificial Sequence
  Description of Artificial Sequence: Synthetic oligonucleotide
  Antisense Strand to SEQ ID NO: 439851
uucuaucaagaaagacaaa

SEQ ID NO: 439853 - RNA, 19 nt, Artificial Sequence
  Description of Artificial Sequence: Synthetic oligonucleotide
  Sense strand starting at position 2259 of SEQ ID NO: 316779
ugauaagagguuugccaaa

SEQ ID NO: 439854 - RNA, 19 nt, Artificial Sequence
  Description of Artificial Sequence: Synthetic oligonucleotide
  Antisense Strand to SEQ ID NO: 439853
uuuggcaaaccucuuauca

SEQ ID NO: 439855 - RNA, 19 nt, Artificial Sequence
  Description of Artificial Sequence: Synthetic oligonucleotide
  Sense strand starting at position 2649 of SEQ ID NO: 316779
ggcgaucagauaugucagu

SEQ ID NO: 439856 - RNA, 19 nt, Artificial Sequence
  Description of Artificial Sequence: Synthetic oligonucleotide
  Antisense Strand to SEQ ID NO: 439855
acugacauaucugaucgcc

SEQ ID NO: 439857 - RNA, 19 nt, Artificial Sequence
  Description of Artificial Sequence: Synthetic oligonucleotide
  Sense strand starting at position 2654 of SEQ ID NO: 316779
ucagauaugucagugagca

SEQ ID NO: 439858 - RNA, 19 nt, Artificial Sequence
  Description of Artificial Sequence: Synthetic oligonucleotide
  Antisense Strand to SEQ ID NO: 439857
ugcucacugacauaucuga

SEQ ID NO: 439859 - RNA, 19 nt, Artificial Sequence
  Description of Artificial Sequence: Synthetic oligonucleotide
  Sense strand starting at position 2655 of SEQ ID NO: 316779
cagauaugucagugagcag

SEQ ID NO: 439860 - RNA, 19 nt, Artificial Sequence
  Description of Artificial Sequence: Synthetic oligonucleotide
  Antisense Strand to SEQ ID NO: 439859
cugcucacugacauaucug

SEQ ID NO: 439861 - RNA, 19 nt, Artificial Sequence
  Description of Artificial Sequence: Synthetic oligonucleotide
  Sense strand starting at position 2656 of SEQ ID NO: 316779
agauaugucagugagcaga

SEQ ID NO: 439862 - RNA, 19 nt, Artificial Sequence
  Description of Artificial Sequence: Synthetic oligonucleotide
  Antisense Strand to SEQ ID NO: 439861
ucugcucacugacauaucu

SEQ ID NO: 439863 - RNA, 19 nt, Artificial Sequence
  Description of Artificial Sequence: Synthetic oligonucleotide
  Sense strand starting at position 2667 of SEQ ID NO: 316779
ugagcagaggugugaguuu

SEQ ID NO: 439864 - RNA, 19 nt, Artificial Sequence
  Description of Artificial Sequence: Synthetic oligonucleotide
  Antisense Strand to SEQ ID NO: 439863
aaacucacaccucugcuca

SEQ ID NO: 439865 - RNA, 19 nt, Artificial Sequence
  Description of Artificial Sequence: Synthetic oligonucleotide
  Sense strand starting at position 2907 of SEQ ID NO: 316779
ccucuugucuagucaucuu

SEQ ID NO: 439866 - RNA, 19 nt, Artificial Sequence
  Description of Artificial Sequence: Synthetic oligonucleotide
  Antisense Strand to SEQ ID NO: 439865
aagaugacuagacaagagg

SEQ ID NO: 439867 - RNA, 19 nt, Artificial Sequence
  Description of Artificial Sequence: Synthetic oligonucleotide
  Sense strand starting at position 2910 of SEQ ID NO: 316779
cuugucuagucaucuuauu

SEQ ID NO: 439868 - RNA, 19 nt, Artificial Sequence
  Description of Artificial Sequence: Synthetic oligonucleotide
  Antisense Strand to SEQ ID NO: 439867
aauaagaugacuagacaag

SEQ ID NO: 439869 - RNA, 19 nt, Artificial Sequence
  Description of Artificial Sequence: Synthetic oligonucleotide
  Sense strand starting at position 3048 of SEQ ID NO: 316779
gcccuaaggcucuacuaau

SEQ ID NO: 439870 - RNA, 19 nt, Artificial Sequence
  Description of Artificial Sequence: Synthetic oligonucleotide
  Antisense Strand to SEQ ID NO: 439869
auuaguagagccuuagggc

SEQ ID NO: 439871 - RNA, 19 nt, Artificial Sequence
  Description of Artificial Sequence: Synthetic oligonucleotide
  Sense strand starting at position 3093 of SEQ ID NO: 316779
gggucuaaguguccuagca

SEQ ID NO: 439872 - RNA, 19 nt, Artificial Sequence
  Description of Artificial Sequence: Synthetic oligonucleotide
  Antisense Strand to SEQ ID NO: 439871
ugcuaggacacuuagaccc

SEQ ID NO: 439873 - RNA, 19 nt, Artificial Sequence
  Description of Artificial Sequence: Synthetic oligonucleotide
  Sense strand starting at position 3379 of SEQ ID NO: 316779
auaaauuucugcuaggcaa

SEQ ID NO: 439874 - RNA, 19 nt, Artificial Sequence
  Description of Artificial Sequence: Synthetic oligonucleotide
  Antisense Strand to SEQ ID NO: 439873
uugccuagcagaaauuuau

SEQ ID NO: 439875 - RNA, 19 nt, Artificial Sequence
  Description of Artificial Sequence: Synthetic oligonucleotide
  Sense strand starting at position 3416 of SEQ ID NO: 316779
aguggucuuaaaugaguuu

SEQ ID NO: 439876 - RNA, 19 nt, Artificial Sequence
  Description of Artificial Sequence: Synthetic oligonucleotide
  Antisense Strand to SEQ ID NO: 439875
aaacucauuuaagaccacu

SEQ ID NO: 439877 - RNA, 19 nt, Artificial Sequence
  Description of Artificial Sequence: Synthetic oligonucleotide
  Sense strand starting at position 3417 of SEQ ID NO: 316779
guggucuuaaaugaguuua

SEQ ID NO: 439878 - RNA, 19 nt, Artificial Sequence
  Description of Artificial Sequence: Synthetic oligonucleotide
  Antisense Strand to SEQ ID NO: 439877
uaaacucauuuaagaccac

SEQ ID NO: 439879 - RNA, 19 nt, Artificial Sequence
  Description of Artificial Sequence: Synthetic oligonucleotide
  Sense strand starting at position 3419 of SEQ ID NO: 316779
ggucuuaaaugaguuuaaa

SEQ ID NO: 439880 - RNA, 19 nt, Artificial Sequence
  Description of Artificial Sequence: Synthetic oligonucleotide
  Antisense Strand to SEQ ID NO: 439879
uuuaaacucauuuaagacc

SEQ ID NO: 439881 - RNA, 19 nt, Artificial Sequence
  Description of Artificial Sequence: Synthetic oligonucleotide
  Sense strand starting at position 3597 of SEQ ID NO: 316779
ggguuaagagcacauacuu

SEQ ID NO: 439882 - RNA, 19 nt, Artificial Sequence
  Description of Artificial Sequence: Synthetic oligonucleotide
  Antisense Strand to SEQ ID NO: 439881
aaguaugugcucuuaaccc

SEQ ID NO: 439883 - RNA, 19 nt, Artificial Sequence
  Description of Artificial Sequence: Synthetic oligonucleotide
  Sense strand starting at position 3725 of SEQ ID NO: 316779
gguaguaguaucuaccuua

SEQ ID NO: 439884 - RNA, 19 nt, Artificial Sequence
  Description of Artificial Sequence: Synthetic oligonucleotide
  Antisense Strand to SEQ ID NO: 439883
uaagguagauacuacuacc

SEQ ID NO: 439885 - RNA, 19 nt, Artificial Sequence
  Description of Artificial Sequence: Synthetic oligonucleotide
  Sense strand starting at position 3794 of SEQ ID NO: 316779
uagugcuugccacauagua

SEQ ID NO: 439886 - RNA, 19 nt, Artificial Sequence
  Description of Artificial Sequence: Synthetic oligonucleotide
  Antisense Strand to SEQ ID NO: 439885
uacuauguggcaagcacua

SEQ ID NO: 439887 - RNA, 19 nt, Artificial Sequence
  Description of Artificial Sequence: Synthetic oligonucleotide
  Sense strand starting at position 3809 of SEQ ID NO: 316779
aguaaaugcuauccaagug

SEQ ID NO: 439888 - RNA, 19 nt, Artificial Sequence
  Description of Artificial Sequence: Synthetic oligonucleotide
  Antisense Strand to SEQ ID NO: 439887
cacuuggauagcauuuacu

SEQ ID NO: 439889 - RNA, 19 nt, Artificial Sequence
  Description of Artificial Sequence: Synthetic oligonucleotide
  Sense strand starting at position 3817 of SEQ ID NO: 316779
cuauccaaguguuuguuaa

SEQ ID NO: 439890 - RNA, 19 nt, Artificial Sequence
  Description of Artificial Sequence: Synthetic oligonucleotide
  Antisense Strand to SEQ ID NO: 439889
uuaacaaacacuuggauag

SEQ ID NO: 439891 - RNA, 19 nt, Artificial Sequence
  Description of Artificial Sequence: Synthetic oligonucleotide
  Sense strand starting at position 3819 of SEQ ID NO: 316779
auccaaguguuuguuaaau

SEQ ID NO: 439892 - RNA, 19 nt, Artificial Sequence
  Description of Artificial Sequence: Synthetic oligonucleotide
  Antisense Strand to SEQ ID NO: 439891
auuuaacaaacacuuggau

SEQ ID NO: 439893 - RNA, 19 nt, Artificial Sequence
  Description of Artificial Sequence: Synthetic oligonucleotide
  Sense strand starting at position 26 of SEQ ID NO: 316780
aaaggaaaguuucugccua

SEQ ID NO: 439894 - RNA, 19 nt, Artificial Sequence
  Description of Artificial Sequence: Synthetic oligonucleotide
  Antisense Strand to SEQ ID NO: 439893
uaggcagaaacuuuccuuu

SEQ ID NO: 439895 - RNA, 19 nt, Artificial Sequence
  Description of Artificial Sequence: Synthetic oligonucleotide
  Sense strand starting at position 30 of SEQ ID NO: 316780
gaaaguuucugccuaggaa

SEQ ID NO: 439896 - RNA, 19 nt, Artificial Sequence
  Description of Artificial Sequence: Synthetic oligonucleotide
  Antisense Strand to SEQ ID NO: 439895
uuccuaggcagaaacuuuc

SEQ ID NO: 439897 - RNA, 19 nt, Artificial Sequence
  Description of Artificial Sequence: Synthetic oligonucleotide
  Sense strand starting at position 31 of SEQ ID NO: 316780
aaaguuucugccuaggaaa

SEQ ID NO: 439898 - RNA, 19 nt, Artificial Sequence
  Description of Artificial Sequence: Synthetic oligonucleotide
  Antisense Strand to SEQ ID NO: 439897
uuuccuaggcagaaacuuu

SEQ ID NO: 439899 - RNA, 19 nt, Artificial Sequence
  Description of Artificial Sequence: Synthetic oligonucleotide
  Sense strand starting at position 166 of SEQ ID NO: 316780
ugcucaugauuuguaguca

SEQ ID NO: 439900 - RNA, 19 nt, Artificial Sequence
  Description of Artificial Sequence: Synthetic oligonucleotide
  Antisense Strand to SEQ ID NO: 439899
ugacuacaaaucaugagca

SEQ ID NO: 439901 - RNA, 19 nt, Artificial Sequence
  Description of Artificial Sequence: Synthetic oligonucleotide
  Sense strand starting at position 391 of SEQ ID NO: 316780
aggacuagggucuguuauu

SEQ ID NO: 439902 - RNA, 19 nt, Artificial Sequence
  Description of Artificial Sequence: Synthetic oligonucleotide
  Antisense Strand to SEQ ID NO: 439901
aauaacagacccuaguccu

SEQ ID NO: 439903 - RNA, 19 nt, Artificial Sequence
  Description of Artificial Sequence: Synthetic oligonucleotide
  Sense strand starting at position 490 of SEQ ID NO: 316780
guuuguaaaugauuccaga

SEQ ID NO: 439904 - RNA, 19 nt, Artificial Sequence
  Description of Artificial Sequence: Synthetic oligonucleotide
  Antisense Strand to SEQ ID NO: 439903
ucuggaaucauuuacaaac

SEQ ID NO: 439905 - RNA, 19 nt, Artificial Sequence
  Description of Artificial Sequence: Synthetic oligonucleotide
  Sense strand starting at position 639 of SEQ ID NO: 316780
ugaaaugagugauuggugu

SEQ ID NO: 439906 - RNA, 19 nt, Artificial Sequence
  Description of Artificial Sequence: Synthetic oligonucleotide
  Antisense Strand to SEQ ID NO: 439905
acaccaaucacucauuuca

SEQ ID NO: 439907 - RNA, 19 nt, Artificial Sequence
  Description of Artificial Sequence: Synthetic oligonucleotide
  Sense strand starting at position 641 of SEQ ID NO: 316780
aaaugagugauugguguuu

SEQ ID NO: 439908 - RNA, 19 nt, Artificial Sequence
  Description of Artificial Sequence: Synthetic oligonucleotide
  Antisense Strand to SEQ ID NO: 439907
aaacaccaaucacucauuu

SEQ ID NO: 439909 - RNA, 19 nt, Artificial Sequence
  Description of Artificial Sequence: Synthetic oligonucleotide
  Sense strand starting at position 660 of SEQ ID NO: 316780
auggguguuagccaaguga

SEQ ID NO: 439910 - RNA, 19 nt, Artificial Sequence
  Description of Artificial Sequence: Synthetic oligonucleotide
  Antisense Strand to SEQ ID NO: 439909
ucacuuggcuaacacccau

SEQ ID NO: 439911 - RNA, 19 nt, Artificial Sequence
  Description of Artificial Sequence: Synthetic oligonucleotide
  Sense strand starting at position 675 of SEQ ID NO: 316780
gugaaagaaugaguguaau

SEQ ID NO: 439912 - RNA, 19 nt, Artificial Sequence
  Description of Artificial Sequence: Synthetic oligonucleotide
  Antisense Strand to SEQ ID NO: 439911
auuacacucauucuuucac

SEQ ID NO: 439913 - RNA, 19 nt, Artificial Sequence
  Description of Artificial Sequence: Synthetic oligonucleotide
  Sense strand starting at position 681 of SEQ ID NO: 316780
gaaugaguguaauugaaca

SEQ ID NO: 439914 - RNA, 19 nt, Artificial Sequence
  Description of Artificial Sequence: Synthetic oligonucleotide
  Antisense Strand to SEQ ID NO: 439913
uguucaauuacacucauuc

SEQ ID NO: 439915 - RNA, 19 nt, Artificial Sequence
  Description of Artificial Sequence: Synthetic oligonucleotide
  Sense strand starting at position 754 of SEQ ID NO: 316780
gagguaucuuuauugauag

SEQ ID NO: 439916 - RNA, 19 nt, Artificial Sequence
  Description of Artificial Sequence: Synthetic oligonucleotide
  Antisense Strand to SEQ ID NO: 439915
cuaucaauaaagauaccuc

SEQ ID NO: 439917 - RNA, 19 nt, Artificial Sequence
  Description of Artificial Sequence: Synthetic oligonucleotide
  Sense strand starting at position 856 of SEQ ID NO: 316780
uuacaugaugaaugcagua

SEQ ID NO: 439918 - RNA, 19 nt, Artificial Sequence
  Description of Artificial Sequence: Synthetic oligonucleotide
  Antisense Strand to SEQ ID NO: 439917
uacugcauucaucauguaa

SEQ ID NO: 439919 - RNA, 19 nt, Artificial Sequence
  Description of Artificial Sequence: Synthetic oligonucleotide
  Sense strand starting at position 1163 of SEQ ID NO: 316780
aacuguugggcucaaggau

SEQ ID NO: 439920 - RNA, 19 nt, Artificial Sequence
  Description of Artificial Sequence: Synthetic oligonucleotide
  Antisense Strand to SEQ ID NO: 439919
auccuugagcccaacaguu

SEQ ID NO: 439921 - RNA, 19 nt, Artificial Sequence
  Description of Artificial Sequence: Synthetic oligonucleotide
  Sense strand starting at position 1418 of SEQ ID NO: 316780
uugauaaaguaucugauac

SEQ ID NO: 439922 - RNA, 19 nt, Artificial Sequence
  Description of Artificial Sequence: Synthetic oligonucleotide
  Antisense Strand to SEQ ID NO: 439921
guaucagauacuuuaucaa

SEQ ID NO: 439923 - RNA, 19 nt, Artificial Sequence
  Description of Artificial Sequence: Synthetic oligonucleotide
  Sense strand starting at position 1425 of SEQ ID NO: 316780
aguaucugauacuuaaguu

SEQ ID NO: 439924 - RNA, 19 nt, Artificial Sequence
  Description of Artificial Sequence: Synthetic oligonucleotide
  Antisense Strand to SEQ ID NO: 439923
aacuuaaguaucagauacu

SEQ ID NO: 439925 - RNA, 19 nt, Artificial Sequence
  Description of Artificial Sequence: Synthetic oligonucleotide
  Sense strand starting at position 1433 of SEQ ID NO: 316780
auacuuaaguuuccaguga

SEQ ID NO: 439926 - RNA, 19 nt, Artificial Sequence
  Description of Artificial Sequence: Synthetic oligonucleotide
  Antisense Strand to SEQ ID NO: 439925
ucacuggaaacuuaaguau

SEQ ID NO: 439927 - RNA, 19 nt, Artificial Sequence
  Description of Artificial Sequence: Synthetic oligonucleotide
  Sense strand starting at position 1481 of SEQ ID NO: 316780
cuuuaagauuuacaugagu

SEQ ID NO: 439928 - RNA, 19 nt, Artificial Sequence
  Description of Artificial Sequence: Synthetic oligonucleotide
  Antisense Strand to SEQ ID NO: 439927
acucauguaaaucuuaaag

SEQ ID NO: 439929 - RNA, 19 nt, Artificial Sequence
  Description of Artificial Sequence: Synthetic oligonucleotide
  Sense strand starting at position 1489 of SEQ ID NO: 316780
uuuacaugaguuugauagu

SEQ ID NO: 439930 - RNA, 19 nt, Artificial Sequence
  Description of Artificial Sequence: Synthetic oligonucleotide
  Antisense Strand to SEQ ID NO: 439929
acuaucaaacucauguaaa

SEQ ID NO: 439931 - RNA, 19 nt, Artificial Sequence
  Description of Artificial Sequence: Synthetic oligonucleotide
  Sense strand starting at position 1570 of SEQ ID NO: 316780
accugucaaagguauuguu

SEQ ID NO: 439932 - RNA, 19 nt, Artificial Sequence
  Description of Artificial Sequence: Synthetic oligonucleotide
  Antisense Strand to SEQ ID NO: 439931
aacaauaccuuugacaggu

SEQ ID NO: 439933 - RNA, 19 nt, Artificial Sequence
  Description of Artificial Sequence: Synthetic oligonucleotide
  Sense strand starting at position 1663 of SEQ ID NO: 316780
agaaucauauugccaggua

SEQ ID NO: 439934 - RNA, 19 nt, Artificial Sequence
  Description of Artificial Sequence: Synthetic oligonucleotide
  Antisense Strand to SEQ ID NO: 439933
uaccuggcaauaugauucu

SEQ ID NO: 439935 - RNA, 19 nt, Artificial Sequence
  Description of Artificial Sequence: Synthetic oligonucleotide
  Sense strand starting at position 1666 of SEQ ID NO: 316780
aucauauugccagguagag

SEQ ID NO: 439936 - RNA, 19 nt, Artificial Sequence
  Description of Artificial Sequence: Synthetic oligonucleotide
  Antisense Strand to SEQ ID NO: 439935
cucuaccuggcaauaugau

SEQ ID NO: 439937 - RNA, 19 nt, Artificial Sequence
  Description of Artificial Sequence: Synthetic oligonucleotide
  Sense strand starting at position 1736 of SEQ ID NO: 316780
gcuguaucuagagagcaca

SEQ ID NO: 439938 - RNA, 19 nt, Artificial Sequence
  Description of Artificial Sequence: Synthetic oligonucleotide
  Antisense Strand to SEQ ID NO: 439937
ugugcucucuagauacagc

SEQ ID NO: 439939 - RNA, 19 nt, Artificial Sequence
  Description of Artificial Sequence: Synthetic oligonucleotide
  Sense strand starting at position 1935 of SEQ ID NO: 316780
acgguaaaucuugacauug

SEQ ID NO: 439940 - RNA, 19 nt, Artificial Sequence
  Description of Artificial Sequence: Synthetic oligonucleotide
  Antisense Strand to SEQ ID NO: 439939
caaugucaagauuuaccgu

SEQ ID NO: 439941 - RNA, 19 nt, Artificial Sequence
  Description of Artificial Sequence: Synthetic oligonucleotide
  Sense strand starting at position 2062 of SEQ ID NO: 316780
caguucgucgcauugucaa

SEQ ID NO: 439942 - RNA, 19 nt, Artificial Sequence
  Description of Artificial Sequence: Synthetic oligonucleotide
  Antisense Strand to SEQ ID NO: 439941
uugacaaugcgacgaacug

SEQ ID NO: 439943 - RNA, 19 nt, Artificial Sequence
  Description of Artificial Sequence: Synthetic oligonucleotide
  Sense strand starting at position 2161 of SEQ ID NO: 316780
ugagucugagccuauuaau

SEQ ID NO: 439944 - RNA, 19 nt, Artificial Sequence
  Description of Artificial Sequence: Synthetic oligonucleotide
  Antisense Strand to SEQ ID NO: 439943
auuaauaggcucagacuca

SEQ ID NO: 439945 - RNA, 19 nt, Artificial Sequence
  Description of Artificial Sequence: Synthetic oligonucleotide
  Sense strand starting at position 2251 of SEQ ID NO: 316780
auguacuauugccugauga

SEQ ID NO: 439946 - RNA, 19 nt, Artificial Sequence
  Description of Artificial Sequence: Synthetic oligonucleotide
  Antisense Strand to SEQ ID NO: 439945
ucaucaggcaauaguacau

SEQ ID NO: 439947 - RNA, 19 nt, Artificial Sequence
  Description of Artificial Sequence: Synthetic oligonucleotide
  Sense strand starting at position 2252 of SEQ ID NO: 316780
uguacuauugccugaugaa

SEQ ID NO: 439948 - RNA, 19 nt, Artificial Sequence
  Description of Artificial Sequence: Synthetic oligonucleotide
  Antisense Strand to SEQ ID NO: 439947
uucaucaggcaauaguaca

SEQ ID NO: 439949 - RNA, 19 nt, Artificial Sequence
  Description of Artificial Sequence: Synthetic oligonucleotide
  Sense strand starting at position 2253 of SEQ ID NO: 316780
guacuauugccugaugaau

SEQ ID NO: 439950 - RNA, 19 nt, Artificial Sequence
  Description of Artificial Sequence: Synthetic oligonucleotide
  Antisense Strand to SEQ ID NO: 439949
auucaucaggcaauaguac

SEQ ID NO: 439951 - RNA, 19 nt, Artificial Sequence
  Description of Artificial Sequence: Synthetic oligonucleotide
  Sense strand starting at position 2453 of SEQ ID NO: 316780
uugcauauuugacagauac

SEQ ID NO: 439952 - RNA, 19 nt, Artificial Sequence
  Description of Artificial Sequence: Synthetic oligonucleotide
  Antisense Strand to SEQ ID NO: 439951
guaucugucaaauaugcaa

SEQ ID NO: 439953 - RNA, 19 nt, Artificial Sequence
  Description of Artificial Sequence: Synthetic oligonucleotide
  Sense strand starting at position 2488 of SEQ ID NO: 316780
auaggauaaagcugagcuu

SEQ ID NO: 439954 - RNA, 19 nt, Artificial Sequence
  Description of Artificial Sequence: Synthetic oligonucleotide
  Antisense Strand to SEQ ID NO: 439953
aagcucagcuuuauccuau

SEQ ID NO: 439955 - RNA, 19 nt, Artificial Sequence
  Description of Artificial Sequence: Synthetic oligonucleotide
  Sense strand starting at position 2499 of SEQ ID NO: 316780
cugagcuugccugaaagaa

SEQ ID NO: 439956 - RNA, 19 nt, Artificial Sequence
  Description of Artificial Sequence: Synthetic oligonucleotide
  Antisense Strand to SEQ ID NO: 439955
uucuuucaggcaagcucag

SEQ ID NO: 439957 - RNA, 19 nt, Artificial Sequence
  Description of Artificial Sequence: Synthetic oligonucleotide
  Sense strand starting at position 2748 of SEQ ID NO: 316780
ucaugcauucuccaguauu

SEQ ID NO: 439958 - RNA, 19 nt, Artificial Sequence
  Description of Artificial Sequence: Synthetic oligonucleotide
  Antisense Strand to SEQ ID NO: 439957
aauacuggagaaugcauga

SEQ ID NO: 439959 - RNA, 19 nt, Artificial Sequence
  Description of Artificial Sequence: Synthetic oligonucleotide
  Sense strand starting at position 2776 of SEQ ID NO: 316780
uuucuugcugaacaaugaa

SEQ ID NO: 439960 - RNA, 19 nt, Artificial Sequence
  Description of Artificial Sequence: Synthetic oligonucleotide
  Antisense Strand to SEQ ID NO: 439959
uucauuguucagcaagaaa

SEQ ID NO: 439961 - RNA, 19 nt, Artificial Sequence
  Description of Artificial Sequence: Synthetic oligonucleotide
  Sense strand starting at position 2871 of SEQ ID NO: 316780
ccucaagaugccuagcaga

SEQ ID NO: 439962 - RNA, 19 nt, Artificial Sequence
  Description of Artificial Sequence: Synthetic oligonucleotide
  Antisense Strand to SEQ ID NO: 439961
ucugcuaggcaucuugagg

SEQ ID NO: 439963 - RNA, 19 nt, Artificial Sequence
  Description of Artificial Sequence: Synthetic oligonucleotide
  Sense strand starting at position 2897 of SEQ ID NO: 316780
agaggaguacuguguaccu

SEQ ID NO: 439964 - RNA, 19 nt, Artificial Sequence
  Description of Artificial Sequence: Synthetic oligonucleotide
  Antisense Strand to SEQ ID NO: 439963
agguacacaguacuccucu

SEQ ID NO: 439965 - RNA, 19 nt, Artificial Sequence
  Description of Artificial Sequence: Synthetic oligonucleotide
  Sense strand starting at position 2899 of SEQ ID NO: 316780
aggaguacuguguaccuua

SEQ ID NO: 439966 - RNA, 19 nt, Artificial Sequence
  Description of Artificial Sequence: Synthetic oligonucleotide
  Antisense Strand to SEQ ID NO: 439965
uaagguacacaguacuccu

SEQ ID NO: 439967 - RNA, 19 nt, Artificial Sequence
  Description of Artificial Sequence: Synthetic oligonucleotide
  Sense strand starting at position 2929 of SEQ ID NO: 316780
uucugaguuccagaauugu

SEQ ID NO: 439968 - RNA, 19 nt, Artificial Sequence
  Description of Artificial Sequence: Synthetic oligonucleotide
  Antisense Strand to SEQ ID NO: 439967
acaauucuggaacucagaa

SEQ ID NO: 439969 - RNA, 19 nt, Artificial Sequence
  Description of Artificial Sequence: Synthetic oligonucleotide
  Sense strand starting at position 3019 of SEQ ID NO: 316780
auggaaacauagucuuacu

SEQ ID NO: 439970 - RNA, 19 nt, Artificial Sequence
  Description of Artificial Sequence: Synthetic oligonucleotide
  Antisense Strand to SEQ ID NO: 439969
aguaagacuauguuuccau

SEQ ID NO: 439971 - RNA, 19 nt, Artificial Sequence
  Description of Artificial Sequence: Synthetic oligonucleotide
  Sense strand starting at position 3608 of SEQ ID NO: 316780
gugauuaguguuuacuuag

SEQ ID NO: 439972 - RNA, 19 nt, Artificial Sequence
  Description of Artificial Sequence: Synthetic oligonucleotide
  Antisense Strand to SEQ ID NO: 439971
cuaaguaaacacuaaucac

SEQ ID NO: 439973 - RNA, 19 nt, Artificial Sequence
  Description of Artificial Sequence: Synthetic oligonucleotide
  Sense strand starting at position 19 of SEQ ID NO: 316781
ucauauuuguguuugcaaa

SEQ ID NO: 439974 - RNA, 19 nt, Artificial Sequence
  Description of Artificial Sequence: Synthetic oligonucleotide
  Antisense Strand to SEQ ID NO: 439973
uuugcaaacacaaauauga

SEQ ID NO: 439975 - RNA, 19 nt, Artificial Sequence
  Description of Artificial Sequence: Synthetic oligonucleotide
  Sense strand starting at position 20 of SEQ ID NO: 316781
cauauuuguguuugcaaag

SEQ ID NO: 439976 - RNA, 19 nt, Artificial Sequence
  Description of Artificial Sequence: Synthetic oligonucleotide
  Antisense Strand to SEQ ID NO: 439975
cuuugcaaacacaaauaug

SEQ ID NO: 439977 - RNA, 19 nt, Artificial Sequence
  Description of Artificial Sequence: Synthetic oligonucleotide
  Sense strand starting at position 158 of SEQ ID NO: 316781
auuagcucucugugacuga

SEQ ID NO: 439978 - RNA, 19 nt, Artificial Sequence
  Description of Artificial Sequence: Synthetic oligonucleotide
  Antisense Strand to SEQ ID NO: 439977
ucagucacagagagcuaau

SEQ ID NO: 439979 - RNA, 19 nt, Artificial Sequence
  Description of Artificial Sequence: Synthetic oligonucleotide
  Sense strand starting at position 161 of SEQ ID NO: 316781
agcucucugugacugauaa

SEQ ID NO: 439980 - RNA, 19 nt, Artificial Sequence
  Description of Artificial Sequence: Synthetic oligonucleotide
  Antisense Strand to SEQ ID NO: 439979
uuaucagucacagagagcu

SEQ ID NO: 439981 - RNA, 19 nt, Artificial Sequence
  Description of Artificial Sequence: Synthetic oligonucleotide
  Sense strand starting at position 162 of SEQ ID NO: 316781
gcucucugugacugauaaa

SEQ ID NO: 439982 - RNA, 19 nt, Artificial Sequence
  Description of Artificial Sequence: Synthetic oligonucleotide
  Antisense Strand to SEQ ID NO: 439981
uuuaucagucacagagagc

SEQ ID NO: 439983 - RNA, 19 nt, Artificial Sequence
  Description of Artificial Sequence: Synthetic oligonucleotide
  Sense strand starting at position 184 of SEQ ID NO: 316781
guggcuuauagauauguua

SEQ ID NO: 439984 - RNA, 19 nt, Artificial Sequence
  Description of Artificial Sequence: Synthetic oligonucleotide
  Antisense Strand to SEQ ID NO: 439983
uaacauaucuauaagccac

SEQ ID NO: 439985 - RNA, 19 nt, Artificial Sequence
  Description of Artificial Sequence: Synthetic oligonucleotide
  Sense strand starting at position 192 of SEQ ID NO: 316781
uagauauguuaccuaaggu

SEQ ID NO: 439986 - RNA, 19 nt, Artificial Sequence
  Description of Artificial Sequence: Synthetic oligonucleotide
  Antisense Strand to SEQ ID NO: 439985
accuuagguaacauaucua

SEQ ID NO: 439987 - RNA, 19 nt, Artificial Sequence
  Description of Artificial Sequence: Synthetic oligonucleotide
  Sense strand starting at position 278 of SEQ ID NO: 316781
acuaacuacguauguuaaa

SEQ ID NO: 439988 - RNA, 19 nt, Artificial Sequence
  Description of Artificial Sequence: Synthetic oligonucleotide
  Antisense Strand to SEQ ID NO: 439987
uuuaacauacguaguuagu

SEQ ID NO: 439989 - RNA, 19 nt, Artificial Sequence
  Description of Artificial Sequence: Synthetic oligonucleotide
  Sense strand starting at position 279 of SEQ ID NO: 316781
cuaacuacguauguuaaau

SEQ ID NO: 439990 - RNA, 19 nt, Artificial Sequence
  Description of Artificial Sequence: Synthetic oligonucleotide
  Antisense Strand to SEQ ID NO: 439989
auuuaacauacguaguuag

SEQ ID NO: 439991 - RNA, 19 nt, Artificial Sequence
  Description of Artificial Sequence: Synthetic oligonucleotide
  Sense strand starting at position 406 of SEQ ID NO: 316781
gcaaucucuggccaugaca

SEQ ID NO: 439992 - RNA, 19 nt, Artificial Sequence
  Description of Artificial Sequence: Synthetic oligonucleotide
  Antisense Strand to SEQ ID NO: 439991
ugucauggccagagauugc

SEQ ID NO: 439993 - RNA, 19 nt, Artificial Sequence
  Description of Artificial Sequence: Synthetic oligonucleotide
  Sense strand starting at position 508 of SEQ ID NO: 316781
auguaaugagguuggagua

SEQ ID NO: 439994 - RNA, 19 nt, Artificial Sequence
  Description of Artificial Sequence: Synthetic oligonucleotide
  Antisense Strand to SEQ ID NO: 439993
uacuccaaccucauuacau

SEQ ID NO: 439995 - RNA, 19 nt, Artificial Sequence
  Description of Artificial Sequence: Synthetic oligonucleotide
  Sense strand starting at position 571 of SEQ ID NO: 316781
gguucugaaauguacugua

SEQ ID NO: 439996 - RNA, 19 nt, Artificial Sequence
  Description of Artificial Sequence: Synthetic oligonucleotide
  Antisense Strand to SEQ ID NO: 439995
uacaguacauuucagaacc

SEQ ID NO: 439997 - RNA, 19 nt, Artificial Sequence
  Description of Artificial Sequence: Synthetic oligonucleotide
  Sense strand starting at position 602 of SEQ ID NO: 316781
gcagguuuaucuuuacaac

SEQ ID NO: 439998 - RNA, 19 nt, Artificial Sequence
  Description of Artificial Sequence: Synthetic oligonucleotide
  Antisense Strand to SEQ ID NO: 439997
guuguaaagauaaaccugc

SEQ ID NO: 439999 - RNA, 19 nt, Artificial Sequence
  Description of Artificial Sequence: Synthetic oligonucleotide
  Sense strand starting at position 647 of SEQ ID NO: 316781
auagcuuuccagcagcaca

SEQ ID NO: 440000 - RNA, 19 nt, Artificial Sequence
  Description of Artificial Sequence: Synthetic oligonucleotide
  Antisense Strand to SEQ ID NO: 439999
ugugcugcuggaaagcuau

SEQ ID NO: 440001 - RNA, 19 nt, Artificial Sequence
  Description of Artificial Sequence: Synthetic oligonucleotide
  Sense strand starting at position 660 of SEQ ID NO: 316781
agcacauacugaguagaca

SEQ ID NO: 440002 - RNA, 19 nt, Artificial Sequence
  Description of Artificial Sequence: Synthetic oligonucleotide
  Antisense Strand to SEQ ID NO: 440001
ugucuacucaguaugugcu

SEQ ID NO: 440003 - RNA, 19 nt, Artificial Sequence
  Description of Artificial Sequence: Synthetic oligonucleotide
  Sense strand starting at position 725 of SEQ ID NO: 316781
uguugagccuaucuugauu

SEQ ID NO: 440004 - RNA, 19 nt, Artificial Sequence
  Description of Artificial Sequence: Synthetic oligonucleotide
  Antisense Strand to SEQ ID NO: 440003
aaucaagauaggcucaaca

SEQ ID NO: 440005 - RNA, 19 nt, Artificial Sequence
  Description of Artificial Sequence: Synthetic oligonucleotide
  Sense strand starting at position 730 of SEQ ID NO: 316781
agccuaucuugauugacaa

SEQ ID NO: 440006 - RNA, 19 nt, Artificial Sequence
  Description of Artificial Sequence: Synthetic oligonucleotide
  Antisense Strand to SEQ ID NO: 440005
uugucaaucaagauaggcu

SEQ ID NO: 440007 - RNA, 19 nt, Artificial Sequence
  Description of Artificial Sequence: Synthetic oligonucleotide
  Sense strand starting at position 731 of SEQ ID NO: 316781
gccuaucuugauugacaag

SEQ ID NO: 440008 - RNA, 19 nt, Artificial Sequence
  Description of Artificial Sequence: Synthetic oligonucleotide
  Antisense Strand to SEQ ID NO: 440007
cuugucaaucaagauaggc

SEQ ID NO: 440009 - RNA, 19 nt, Artificial Sequence
  Description of Artificial Sequence: Synthetic oligonucleotide
  Sense strand starting at position 862 of SEQ ID NO: 316781
cgaguuaagcaggaugaca

SEQ ID NO: 440010 - RNA, 19 nt, Artificial Sequence
  Description of Artificial Sequence: Synthetic oligonucleotide
  Antisense Strand to SEQ ID NO: 440009
ugucauccugcuuaacucg

SEQ ID NO: 440011 - RNA, 19 nt, Artificial Sequence
  Description of Artificial Sequence: Synthetic oligonucleotide
  Sense strand starting at position 873 of SEQ ID NO: 316781
ggaugacagcuccaguaac

SEQ ID NO: 440012 - RNA, 19 nt, Artificial Sequence
  Description of Artificial Sequence: Synthetic oligonucleotide
  Antisense Strand to SEQ ID NO: 440011
guuacuggagcugucaucc

SEQ ID NO: 440013 - RNA, 19 nt, Artificial Sequence
  Description of Artificial Sequence: Synthetic oligonucleotide
  Sense strand starting at position 1080 of SEQ ID NO: 316781
cggcaaaguauuugcaaca

SEQ ID NO: 440014 - RNA, 19 nt, Artificial Sequence
  Description of Artificial Sequence: Synthetic oligonucleotide
  Antisense Strand to SEQ ID NO: 440013
uguugcaaauacuuugccg

SEQ ID NO: 440015 - RNA, 19 nt, Artificial Sequence
  Description of Artificial Sequence: Synthetic oligonucleotide
  Sense strand starting at position 1171 of SEQ ID NO: 316781
gcguauucccaagacugac

SEQ ID NO: 440016 - RNA, 19 nt, Artificial Sequence
  Description of Artificial Sequence: Synthetic oligonucleotide
  Antisense Strand to SEQ ID NO: 440015
gucagucuugggaauacgc

SEQ ID NO: 440017 - RNA, 19 nt, Artificial Sequence
  Description of Artificial Sequence: Synthetic oligonucleotide
  Sense strand starting at position 1181 of SEQ ID NO: 316781
aagacugacuguucugauu

SEQ ID NO: 440018 - RNA, 19 nt, Artificial Sequence
  Description of Artificial Sequence: Synthetic oligonucleotide
  Antisense Strand to SEQ ID NO: 440017
aaucagaacagucagucuu

SEQ ID NO: 440019 - RNA, 19 nt, Artificial Sequence
  Description of Artificial Sequence: Synthetic oligonucleotide
  Sense strand starting at position 2792 of SEQ ID NO: 316781
gggcgauaucgguauugag

SEQ ID NO: 440020 - RNA, 19 nt, Artificial Sequence
  Description of Artificial Sequence: Synthetic oligonucleotide
  Antisense Strand to SEQ ID NO: 440019
cucaauaccgauaucgccc

SEQ ID NO: 440021 - RNA, 19 nt, Artificial Sequence
  Description of Artificial Sequence: Synthetic oligonucleotide
  Sense strand starting at position 3084 of SEQ ID NO: 316781
ggcugagaagagugguaga

SEQ ID NO: 440022 - RNA, 19 nt, Artificial Sequence
  Description of Artificial Sequence: Synthetic oligonucleotide
  Antisense Strand to SEQ ID NO: 440021
ucuaccacucuucucagcc

SEQ ID NO: 440023 - RNA, 19 nt, Artificial Sequence
  Description of Artificial Sequence: Synthetic oligonucleotide
  Sense strand starting at position 3271 of SEQ ID NO: 316781
aaggaaauguuuccugaca

SEQ ID NO: 440024 - RNA, 19 nt, Artificial Sequence
  Description of Artificial Sequence: Synthetic oligonucleotide
  Antisense Strand to SEQ ID NO: 440023
ugucaggaaacauuuccuu

SEQ ID NO: 440025 - RNA, 19 nt, Artificial Sequence
  Description of Artificial Sequence: Synthetic oligonucleotide
  Sense strand starting at position 3272 of SEQ ID NO: 316781
aggaaauguuuccugacau

SEQ ID NO: 440026 - RNA, 19 nt, Artificial Sequence
  Description of Artificial Sequence: Synthetic oligonucleotide
  Antisense Strand to SEQ ID NO: 440025
augucaggaaacauuuccu

SEQ ID NO: 440027 - RNA, 19 nt, Artificial Sequence
  Description of Artificial Sequence: Synthetic oligonucleotide
  Sense strand starting at position 3284 of SEQ ID NO: 316781
cugacauauucgguggauu

SEQ ID NO: 440028 - RNA, 19 nt, Artificial Sequence
  Description of Artificial Sequence: Synthetic oligonucleotide
  Antisense Strand to SEQ ID NO: 440027
aauccaccgaauaugucag

SEQ ID NO: 440029 - RNA, 19 nt, Artificial Sequence
  Description of Artificial Sequence: Synthetic oligonucleotide
  Sense strand starting at position 3327 of SEQ ID NO: 316781
uaaguuguaucgucaaagg

SEQ ID NO: 440030 - RNA, 19 nt, Artificial Sequence
  Description of Artificial Sequence: Synthetic oligonucleotide
  Antisense Strand to SEQ ID NO: 440029
ccuuugacgauacaacuua

SEQ ID NO: 440031 - RNA, 19 nt, Artificial Sequence
  Description of Artificial Sequence: Synthetic oligonucleotide
  Sense strand starting at position 3332 of SEQ ID NO: 316781
uguaucgucaaagguaaau

SEQ ID NO: 440032 - RNA, 19 nt, Artificial Sequence
  Description of Artificial Sequence: Synthetic oligonucleotide
  Antisense Strand to SEQ ID NO: 440031
auuuaccuuugacgauaca

SEQ ID NO: 440033 - RNA, 19 nt, Artificial Sequence
  Description of Artificial Sequence: Synthetic oligonucleotide
  Sense strand starting at position 3426 of SEQ ID NO: 316781
uuguuuguagcuuauccau

SEQ ID NO: 440034 - RNA, 19 nt, Artificial Sequence
  Description of Artificial Sequence: Synthetic oligonucleotide
  Antisense Strand to SEQ ID NO: 440033
auggauaagcuacaaacaa

SEQ ID NO: 440035 - RNA, 19 nt, Artificial Sequence
  Description of Artificial Sequence: Synthetic oligonucleotide
  Sense strand starting at position 3488 of SEQ ID NO: 316781
uaguguuuacuuggugaac

SEQ ID NO: 440036 - RNA, 19 nt, Artificial Sequence
  Description of Artificial Sequence: Synthetic oligonucleotide
  Antisense Strand to SEQ ID NO: 440035
guucaccaaguaaacacua

SEQ ID NO: 440037 - RNA, 19 nt, Artificial Sequence
  Description of Artificial Sequence: Synthetic oligonucleotide
  Sense strand starting at position 3499 of SEQ ID NO: 316781
uggugaaccuggcugugau

SEQ ID NO: 440038 - RNA, 19 nt, Artificial Sequence
  Description of Artificial Sequence: Synthetic oligonucleotide
  Antisense Strand to SEQ ID NO: 440037
aucacagccagguucacca

SEQ ID NO: 440039 - RNA, 19 nt, Artificial Sequence
  Description of Artificial Sequence: Synthetic oligonucleotide
  Sense strand starting at position 3500 of SEQ ID NO: 316781
ggugaaccuggcugugaua

SEQ ID NO: 440040 - RNA, 19 nt, Artificial Sequence
  Description of Artificial Sequence: Synthetic oligonucleotide
  Antisense Strand to SEQ ID NO: 440039
uaucacagccagguucacc

SEQ ID NO: 440041 - RNA, 19 nt, Artificial Sequence
  Description of Artificial Sequence: Synthetic oligonucleotide
  Sense strand starting at position 3502 of SEQ ID NO: 316781
ugaaccuggcugugauacu

SEQ ID NO: 440042 - RNA, 19 nt, Artificial Sequence
  Description of Artificial Sequence: Synthetic oligonucleotide
  Antisense Strand to SEQ ID NO: 440041
aguaucacagccagguuca

SEQ ID NO: 440043 - RNA, 19 nt, Artificial Sequence
  Description of Artificial Sequence: Synthetic oligonucleotide
  Sense strand starting at position 3676 of SEQ ID NO: 316781
uguauuuaccaguguuggu

SEQ ID NO: 440044 - RNA, 19 nt, Artificial Sequence
  Description of Artificial Sequence: Synthetic oligonucleotide
  Antisense Strand to SEQ ID NO: 440043
accaacacugguaaauaca

SEQ ID NO: 440045 - RNA, 19 nt, Artificial Sequence
  Description of Artificial Sequence: Synthetic oligonucleotide
  Sense strand starting at position 3686 of SEQ ID NO: 316781
aguguuggucaaggguaua

SEQ ID NO: 440046 - RNA, 19 nt, Artificial Sequence
  Description of Artificial Sequence: Synthetic oligonucleotide
  Antisense Strand to SEQ ID NO: 440045
uauacccuugaccaacacu

SEQ ID NO: 440047 - RNA, 19 nt, Artificial Sequence
  Description of Artificial Sequence: Synthetic oligonucleotide
  Sense strand starting at position 3689 of SEQ ID NO: 316781
guuggucaaggguauauua

SEQ ID NO: 440048 - RNA, 19 nt, Artificial Sequence
  Description of Artificial Sequence: Synthetic oligonucleotide
  Antisense Strand to SEQ ID NO: 440047
uaauauacccuugaccaac

SEQ ID NO: 440049 - RNA, 19 nt, Artificial Sequence
  Description of Artificial Sequence: Synthetic oligonucleotide
  Sense strand starting at position 3736 of SEQ ID NO: 316781
gaguguuuagcacacuaag

SEQ ID NO: 440050 - RNA, 19 nt, Artificial Sequence
  Description of Artificial Sequence: Synthetic oligonucleotide
  Antisense Strand to SEQ ID NO: 440049
cuuagugugcuaaacacuc

SEQ ID NO: 440051 - RNA, 19 nt, Artificial Sequence
  Description of Artificial Sequence: Synthetic oligonucleotide
  Sense strand starting at position 3874 of SEQ ID NO: 316781
guuacaagaguccauaauu

SEQ ID NO: 440052 - RNA, 19 nt, Artificial Sequence
  Description of Artificial Sequence: Synthetic oligonucleotide
  Antisense Strand to SEQ ID NO: 440051
aauuauggacucuuguaac

SEQ ID NO: 440053 - RNA, 19 nt, Artificial Sequence
  Description of Artificial Sequence: Synthetic oligonucleotide
  Sense strand starting at position 70 of SEQ ID NO: 316782
uugaaugagacauguugau

SEQ ID NO: 440054 - RNA, 19 nt, Artificial Sequence
  Description of Artificial Sequence: Synthetic oligonucleotide
  Antisense Strand to SEQ ID NO: 440053
aucaacaugucucauucaa

SEQ ID NO: 440055 - RNA, 19 nt, Artificial Sequence
  Description of Artificial Sequence: Synthetic oligonucleotide
  Sense strand starting at position 172 of SEQ ID NO: 316782
ugcucugcucuggaggaaa

SEQ ID NO: 440056 - RNA, 19 nt, Artificial Sequence
  Description of Artificial Sequence: Synthetic oligonucleotide
  Antisense Strand to SEQ ID NO: 440055
uuuccuccagagcagagca

SEQ ID NO: 440057 - RNA, 19 nt, Artificial Sequence
  Description of Artificial Sequence: Synthetic oligonucleotide
  Sense strand starting at position 354 of SEQ ID NO: 316782
uggccauacgccugauuua

SEQ ID NO: 440058 - RNA, 19 nt, Artificial Sequence
  Description of Artificial Sequence: Synthetic oligonucleotide
  Antisense Strand to SEQ ID NO: 440057
uaaaucaggcguauggcca

SEQ ID NO: 440059 - RNA, 19 nt, Artificial Sequence
  Description of Artificial Sequence: Synthetic oligonucleotide
  Sense strand starting at position 411 of SEQ ID NO: 316782
guacuuggacucuagucaa

SEQ ID NO: 440060 - RNA, 19 nt, Artificial Sequence
  Description of Artificial Sequence: Synthetic oligonucleotide
  Antisense Strand to SEQ ID NO: 440059
uugacuagaguccaaguac

SEQ ID NO: 440061 - RNA, 19 nt, Artificial Sequence
  Description of Artificial Sequence: Synthetic oligonucleotide
  Sense strand starting at position 414 of SEQ ID NO: 316782
cuuggacucuagucaagaa

SEQ ID NO: 440062 - RNA, 19 nt, Artificial Sequence
  Description of Artificial Sequence: Synthetic oligonucleotide
  Antisense Strand to SEQ ID NO: 440061
uucuugacuagaguccaag

SEQ ID NO: 440063 - RNA, 19 nt, Artificial Sequence
  Description of Artificial Sequence: Synthetic oligonucleotide
  Sense strand starting at position 477 of SEQ ID NO: 316782
ggguaucaagauugcugga

SEQ ID NO: 440064 - RNA, 19 nt, Artificial Sequence
  Description of Artificial Sequence: Synthetic oligonucleotide
  Antisense Strand to SEQ ID NO: 440063
uccagcaaucuugauaccc

SEQ ID NO: 440065 - RNA, 19 nt, Artificial Sequence
  Description of Artificial Sequence: Synthetic oligonucleotide
  Sense strand starting at position 479 of SEQ ID NO: 316782
guaucaagauugcuggacu

SEQ ID NO: 440066 - RNA, 19 nt, Artificial Sequence
  Description of Artificial Sequence: Synthetic oligonucleotide
  Antisense Strand to SEQ ID NO: 440065
aguccagcaaucuugauac

SEQ ID NO: 440067 - RNA, 19 nt, Artificial Sequence
  Description of Artificial Sequence: Synthetic oligonucleotide
  Sense strand starting at position 482 of SEQ ID NO: 316782
ucaagauugcuggacuugu

SEQ ID NO: 440068 - RNA, 19 nt, Artificial Sequence
  Description of Artificial Sequence: Synthetic oligonucleotide
  Antisense Strand to SEQ ID NO: 440067
acaaguccagcaaucuuga

SEQ ID NO: 440069 - RNA, 19 nt, Artificial Sequence
  Description of Artificial Sequence: Synthetic oligonucleotide
  Sense strand starting at position 490 of SEQ ID NO: 316782
gcuggacuuguauaacauc

SEQ ID NO: 440070 - RNA, 19 nt, Artificial Sequence
  Description of Artificial Sequence: Synthetic oligonucleotide
  Antisense Strand to SEQ ID NO: 440069
gauguuauacaaguccagc

SEQ ID NO: 440071 - RNA, 19 nt, Artificial Sequence
  Description of Artificial Sequence: Synthetic oligonucleotide
  Sense strand starting at position 601 of SEQ ID NO: 316782
uaagcuguggcuuaccaau

SEQ ID NO: 440072 - RNA, 19 nt, Artificial Sequence
  Description of Artificial Sequence: Synthetic oligonucleotide
  Antisense Strand to SEQ ID NO: 440071
auugguaagccacagcuua

SEQ ID NO: 440073 - RNA, 19 nt, Artificial Sequence
  Description of Artificial Sequence: Synthetic oligonucleotide
  Sense strand starting at position 1008 of SEQ ID NO: 316782
agaugcuaucucugcaaga

SEQ ID NO: 440074 - RNA, 19 nt, Artificial Sequence
  Description of Artificial Sequence: Synthetic oligonucleotide
  Antisense Strand to SEQ ID NO: 440073
ucuugcagagauagcaucu

SEQ ID NO: 440075 - RNA, 19 nt, Artificial Sequence
  Description of Artificial Sequence: Synthetic oligonucleotide
  Sense strand starting at position 1010 of SEQ ID NO: 316782
augcuaucucugcaagaaa

SEQ ID NO: 440076 - RNA, 19 nt, Artificial Sequence
  Description of Artificial Sequence: Synthetic oligonucleotide
  Antisense Strand to SEQ ID NO: 440075
uuucuugcagagauagcau

SEQ ID NO: 440077 - RNA, 19 nt, Artificial Sequence
  Description of Artificial Sequence: Synthetic oligonucleotide
  Sense strand starting at position 1038 of SEQ ID NO: 316782
cacaauuggguuugacuua

SEQ ID NO: 440078 - RNA, 19 nt, Artificial Sequence
  Description of Artificial Sequence: Synthetic oligonucleotide
  Antisense Strand to SEQ ID NO: 440077
uaagucaaacccaauugug

SEQ ID NO: 440079 - RNA, 19 nt, Artificial Sequence
  Description of Artificial Sequence: Synthetic oligonucleotide
  Sense strand starting at position 1099 of SEQ ID NO: 316782
agaccuuccuauguguuua

SEQ ID NO: 440080 - RNA, 19 nt, Artificial Sequence
  Description of Artificial Sequence: Synthetic oligonucleotide
  Antisense Strand to SEQ ID NO: 440079
uaaacacauaggaaggucu

SEQ ID NO: 440081 - RNA, 19 nt, Artificial Sequence
  Description of Artificial Sequence: Synthetic oligonucleotide
  Sense strand starting at position 1103 of SEQ ID NO: 316782
cuuccuauguguuuaacac

SEQ ID NO: 440082 - RNA, 19 nt, Artificial Sequence
  Description of Artificial Sequence: Synthetic oligonucleotide
  Antisense Strand to SEQ ID NO: 440081
guguuaaacacauaggaag

SEQ ID NO: 440083 - RNA, 19 nt, Artificial Sequence
  Description of Artificial Sequence: Synthetic oligonucleotide
  Sense strand starting at position 1206 of SEQ ID NO: 316782
gagcauagauccuuggcca

SEQ ID NO: 440084 - RNA, 19 nt, Artificial Sequence
  Description of Artificial Sequence: Synthetic oligonucleotide
  Antisense Strand to SEQ ID NO: 440083
uggccaaggaucuaugcuc

SEQ ID NO: 440085 - RNA, 19 nt, Artificial Sequence
  Description of Artificial Sequence: Synthetic oligonucleotide
  Sense strand starting at position 1207 of SEQ ID NO: 316782
agcauagauccuuggccaa

SEQ ID NO: 440086 - RNA, 19 nt, Artificial Sequence
  Description of Artificial Sequence: Synthetic oligonucleotide
  Antisense Strand to SEQ ID NO: 440085
uuggccaaggaucuaugcu

SEQ ID NO: 440087 - RNA, 19 nt, Artificial Sequence
  Description of Artificial Sequence: Synthetic oligonucleotide
  Sense strand starting at position 1282 of SEQ ID NO: 316782
gcggcuagucaugcacaca

SEQ ID NO: 440088 - RNA, 19 nt, Artificial Sequence
  Description of Artificial Sequence: Synthetic oligonucleotide
  Antisense Strand to SEQ ID NO: 440087
ugugugcaugacuagccgc

SEQ ID NO: 440089 - RNA, 19 nt, Artificial Sequence
  Description of Artificial Sequence: Synthetic oligonucleotide
  Sense strand starting at position 1306 of SEQ ID NO: 316782
acgcuuguacaagauguua

SEQ ID NO: 440090 - RNA, 19 nt, Artificial Sequence
  Description of Artificial Sequence: Synthetic oligonucleotide
  Antisense Strand to SEQ ID NO: 440089
uaacaucuuguacaagcgu

SEQ ID NO: 440091 - RNA, 19 nt, Artificial Sequence
  Description of Artificial Sequence: Synthetic oligonucleotide
  Sense strand starting at position 1386 of SEQ ID NO: 316782
caccauagucuugagguga

SEQ ID NO: 440092 - RNA, 19 nt, Artificial Sequence
  Description of Artificial Sequence: Synthetic oligonucleotide
  Antisense Strand to SEQ ID NO: 440091
ucaccucaagacuauggug

SEQ ID NO: 440093 - RNA, 19 nt, Artificial Sequence
  Description of Artificial Sequence: Synthetic oligonucleotide
  Sense strand starting at position 1390 of SEQ ID NO: 316782
auagucuugaggugaucca

SEQ ID NO: 440094 - RNA, 19 nt, Artificial Sequence
  Description of Artificial Sequence: Synthetic oligonucleotide
  Antisense Strand to SEQ ID NO: 440093
uggaucaccucaagacuau

SEQ ID NO: 440095 - RNA, 19 nt, Artificial Sequence
  Description of Artificial Sequence: Synthetic oligonucleotide
  Sense strand starting at position 1397 of SEQ ID NO: 316782
ugaggugauccaggguauc

SEQ ID NO: 440096 - RNA, 19 nt, Artificial Sequence
  Description of Artificial Sequence: Synthetic oligonucleotide
  Antisense Strand to SEQ ID NO: 440095
gauacccuggaucaccuca

SEQ ID NO: 440097 - RNA, 19 nt, Artificial Sequence
  Description of Artificial Sequence: Synthetic oligonucleotide
  Sense strand starting at position 1723 of SEQ ID NO: 316782
aaaggucgauuccuccaaa

SEQ ID NO: 440098 - RNA, 19 nt, Artificial Sequence
  Description of Artificial Sequence: Synthetic oligonucleotide
  Antisense Strand to SEQ ID NO: 440097
uuuggaggaaucgaccuuu

SEQ ID NO: 440099 - RNA, 19 nt, Artificial Sequence
  Description of Artificial Sequence: Synthetic oligonucleotide
  Sense strand starting at position 1726 of SEQ ID NO: 316782
ggucgauuccuccaaaguu

SEQ ID NO: 440100 - RNA, 19 nt, Artificial Sequence
  Description of Artificial Sequence: Synthetic oligonucleotide
  Antisense Strand to SEQ ID NO: 440099
aacuuuggaggaaucgacc

SEQ ID NO: 440101 - RNA, 19 nt, Artificial Sequence
  Description of Artificial Sequence: Synthetic oligonucleotide
  Sense strand starting at position 2080 of SEQ ID NO: 316782
cugugaguuugccuuauuu

SEQ ID NO: 440102 - RNA, 19 nt, Artificial Sequence
  Description of Artificial Sequence: Synthetic oligonucleotide
  Antisense Strand to SEQ ID NO: 440101
aaauaaggcaaacucacag

SEQ ID NO: 440103 - RNA, 19 nt, Artificial Sequence
  Description of Artificial Sequence: Synthetic oligonucleotide
  Sense strand starting at position 2082 of SEQ ID NO: 316782
gugaguuugccuuauuucu

SEQ ID NO: 440104 - RNA, 19 nt, Artificial Sequence
  Description of Artificial Sequence: Synthetic oligonucleotide
  Antisense Strand to SEQ ID NO: 440103
agaaauaaggcaaacucac

SEQ ID NO: 440105 - RNA, 19 nt, Artificial Sequence
  Description of Artificial Sequence: Synthetic oligonucleotide
  Sense strand starting at position 2302 of SEQ ID NO: 316782
gcgugcgcgauccuuaaau

SEQ ID NO: 440106 - RNA, 19 nt, Artificial Sequence
  Description of Artificial Sequence: Synthetic oligonucleotide
  Antisense Strand to SEQ ID NO: 440105
auuuaaggaucgcgcacgc

SEQ ID NO: 440107 - RNA, 19 nt, Artificial Sequence
  Description of Artificial Sequence: Synthetic oligonucleotide
  Sense strand starting at position 2577 of SEQ ID NO: 316782
cuguuauuagcauaaugua

SEQ ID NO: 440108 - RNA, 19 nt, Artificial Sequence
  Description of Artificial Sequence: Synthetic oligonucleotide
  Antisense Strand to SEQ ID NO: 440107
uacauuaugcuaauaacag

SEQ ID NO: 440109 - RNA, 19 nt, Artificial Sequence
  Description of Artificial Sequence: Synthetic oligonucleotide
  Sense strand starting at position 2585 of SEQ ID NO: 316782
agcauaauguaugcaaaua

SEQ ID NO: 440110 - RNA, 19 nt, Artificial Sequence
  Description of Artificial Sequence: Synthetic oligonucleotide
  Antisense Strand to SEQ ID NO: 440109
uauuugcauacauuaugcu

SEQ ID NO: 440111 - RNA, 19 nt, Artificial Sequence
  Description of Artificial Sequence: Synthetic oligonucleotide
  Sense strand starting at position 2828 of SEQ ID NO: 316782
acgcucuaucucuacugau

SEQ ID NO: 440112 - RNA, 19 nt, Artificial Sequence
  Description of Artificial Sequence: Synthetic oligonucleotide
  Antisense Strand to SEQ ID NO: 440111
aucaguagagauagagcgu

SEQ ID NO: 440113 - RNA, 19 nt, Artificial Sequence
  Description of Artificial Sequence: Synthetic oligonucleotide
  Sense strand starting at position 3151 of SEQ ID NO: 316782
aguguugagguauacacau

SEQ ID NO: 440114 - RNA, 19 nt, Artificial Sequence
  Description of Artificial Sequence: Synthetic oligonucleotide
  Antisense Strand to SEQ ID NO: 440113
auguguauaccucaacacu

SEQ ID NO: 440115 - RNA, 19 nt, Artificial Sequence
  Description of Artificial Sequence: Synthetic oligonucleotide
  Sense strand starting at position 3234 of SEQ ID NO: 316782
cuguucucucuggaucaaa

SEQ ID NO: 440116 - RNA, 19 nt, Artificial Sequence
  Description of Artificial Sequence: Synthetic oligonucleotide
  Antisense Strand to SEQ ID NO: 440115
uuugauccagagagaacag

SEQ ID NO: 440117 - RNA, 19 nt, Artificial Sequence
  Description of Artificial Sequence: Synthetic oligonucleotide
  Sense strand starting at position 3274 of SEQ ID NO: 316782
uuuggaaaguugguaacaa

SEQ ID NO: 440118 - RNA, 19 nt, Artificial Sequence
  Description of Artificial Sequence: Synthetic oligonucleotide
  Antisense Strand to SEQ ID NO: 440117
uuguuaccaacuuuccaaa

SEQ ID NO: 440119 - RNA, 19 nt, Artificial Sequence
  Description of Artificial Sequence: Synthetic oligonucleotide
  Sense strand starting at position 3282 of SEQ ID NO: 316782
guugguaacaaguagcauu

SEQ ID NO: 440120 - RNA, 19 nt, Artificial Sequence
  Description of Artificial Sequence: Synthetic oligonucleotide
  Antisense Strand to SEQ ID NO: 440119
aaugcuacuuguuaccaac

SEQ ID NO: 440121 - RNA, 19 nt, Artificial Sequence
  Description of Artificial Sequence: Synthetic oligonucleotide
  Sense strand starting at position 3292 of SEQ ID NO: 316782
aguagcauuugacaucuaa

SEQ ID NO: 440122 - RNA, 19 nt, Artificial Sequence
  Description of Artificial Sequence: Synthetic oligonucleotide
  Antisense Strand to SEQ ID NO: 440121
uuagaugucaaaugcuacu

SEQ ID NO: 440123 - RNA, 19 nt, Artificial Sequence
  Description of Artificial Sequence: Synthetic oligonucleotide
  Sense strand starting at position 3481 of SEQ ID NO: 316782
acauguguaaacggauauu

SEQ ID NO: 440124 - RNA, 19 nt, Artificial Sequence
  Description of Artificial Sequence: Synthetic oligonucleotide
  Antisense Strand to SEQ ID NO: 440123
aauauccguuuacacaugu

SEQ ID NO: 440125 - RNA, 19 nt, Artificial Sequence
  Description of Artificial Sequence: Synthetic oligonucleotide
  Sense strand starting at position 3484 of SEQ ID NO: 316782
uguguaaacggauauugcu

SEQ ID NO: 440126 - RNA, 19 nt, Artificial Sequence
  Description of Artificial Sequence: Synthetic oligonucleotide
  Antisense Strand to SEQ ID NO: 440125
agcaauauccguuuacaca

SEQ ID NO: 440127 - RNA, 19 nt, Artificial Sequence
  Description of Artificial Sequence: Synthetic oligonucleotide
  Sense strand starting at position 3494 of SEQ ID NO: 316782
gauauugcuaggugugaag

SEQ ID NO: 440128 - RNA, 19 nt, Artificial Sequence
  Description of Artificial Sequence: Synthetic oligonucleotide
  Antisense Strand to SEQ ID NO: 440127
cuucacaccuagcaauauc

SEQ ID NO: 440129 - RNA, 19 nt, Artificial Sequence
  Description of Artificial Sequence: Synthetic oligonucleotide
  Sense strand starting at position 3501 of SEQ ID NO: 316782
cuaggugugaagcaaggua

SEQ ID NO: 440130 - RNA, 19 nt, Artificial Sequence
  Description of Artificial Sequence: Synthetic oligonucleotide
  Antisense Strand to SEQ ID NO: 440129
uaccuugcuucacaccuag

SEQ ID NO: 440131 - RNA, 19 nt, Artificial Sequence
  Description of Artificial Sequence: Synthetic oligonucleotide
  Sense strand starting at position 3548 of SEQ ID NO: 316782
agacuaacauuggaggaaa

SEQ ID NO: 440132 - RNA, 19 nt, Artificial Sequence
  Description of Artificial Sequence: Synthetic oligonucleotide
  Antisense Strand to SEQ ID NO: 440131
uuuccuccaauguuagucu

SEQ ID NO: 440133 - RNA, 19 nt, Artificial Sequence
  Description of Artificial Sequence: Synthetic oligonucleotide
  Sense strand starting at position 78 of SEQ ID NO: 316783
uggccauacgccugauuua

SEQ ID NO: 440134 - RNA, 19 nt, Artificial Sequence
  Description of Artificial Sequence: Synthetic oligonucleotide
  Antisense Strand to SEQ ID NO: 440133
uaaaucaggcguauggcca

SEQ ID NO: 440135 - RNA, 19 nt, Artificial Sequence
  Description of Artificial Sequence: Synthetic oligonucleotide
  Sense strand starting at position 135 of SEQ ID NO: 316783
guacuuggacucuagucaa

SEQ ID NO: 440136 - RNA, 19 nt, Artificial Sequence
  Description of Artificial Sequence: Synthetic oligonucleotide
  Antisense Strand to SEQ ID NO: 440135
uugacuagaguccaaguac

SEQ ID NO: 440137 - RNA, 19 nt, Artificial Sequence
  Description of Artificial Sequence: Synthetic oligonucleotide
  Sense strand starting at position 138 of SEQ ID NO: 316783
cuuggacucuagucaagaa

SEQ ID NO: 440138 - RNA, 19 nt, Artificial Sequence
  Description of Artificial Sequence: Synthetic oligonucleotide
  Antisense Strand to SEQ ID NO: 440137
uucuugacuagaguccaag

SEQ ID NO: 440139 - RNA, 19 nt, Artificial Sequence
  Description of Artificial Sequence: Synthetic oligonucleotide
  Sense strand starting at position 201 of SEQ ID NO: 316783
ggguaucaagauugcugga

SEQ ID NO: 440140 - RNA, 19 nt, Artificial Sequence
  Description of Artificial Sequence: Synthetic oligonucleotide
  Antisense Strand to SEQ ID NO: 440139
uccagcaaucuugauaccc

SEQ ID NO: 440141 - RNA, 19 nt, Artificial Sequence
  Description of Artificial Sequence: Synthetic oligonucleotide
  Sense strand starting at position 203 of SEQ ID NO: 316783
guaucaagauugcuggacu

SEQ ID NO: 440142 - RNA, 19 nt, Artificial Sequence
  Description of Artificial Sequence: Synthetic oligonucleotide
  Antisense Strand to SEQ ID NO: 440141
aguccagcaaucuugauac

SEQ ID NO: 440143 - RNA, 19 nt, Artificial Sequence
  Description of Artificial Sequence: Synthetic oligonucleotide
  Sense strand starting at position 206 of SEQ ID NO: 316783
ucaagauugcuggacuugu

SEQ ID NO: 440144 - RNA, 19 nt, Artificial Sequence
  Description of Artificial Sequence: Synthetic oligonucleotide
  Antisense Strand to SEQ ID NO: 440143
acaaguccagcaaucuuga

SEQ ID NO: 440145 - RNA, 19 nt, Artificial Sequence
  Description of Artificial Sequence: Synthetic oligonucleotide
  Sense strand starting at position 214 of SEQ ID NO: 316783
gcuggacuuguauaacauc

SEQ ID NO: 440146 - RNA, 19 nt, Artificial Sequence
  Description of Artificial Sequence: Synthetic oligonucleotide
  Antisense Strand to SEQ ID NO: 440145
gauguuauacaaguccagc

SEQ ID NO: 440147 - RNA, 19 nt, Artificial Sequence
  Description of Artificial Sequence: Synthetic oligonucleotide
  Sense strand starting at position 325 of SEQ ID NO: 316783
uaagcuguggcuuaccaau

SEQ ID NO: 440148 - RNA, 19 nt, Artificial Sequence
  Description of Artificial Sequence: Synthetic oligonucleotide
  Antisense Strand to SEQ ID NO: 440147
auugguaagccacagcuua

SEQ ID NO: 440149 - RNA, 19 nt, Artificial Sequence
  Description of Artificial Sequence: Synthetic oligonucleotide
  Sense strand starting at position 732 of SEQ ID NO: 316783
agaugcuaucucugcaaga

SEQ ID NO: 440150 - RNA, 19 nt, Artificial Sequence
  Description of Artificial Sequence: Synthetic oligonucleotide
  Antisense Strand to SEQ ID NO: 440149
ucuugcagagauagcaucu

SEQ ID NO: 440151 - RNA, 19 nt, Artificial Sequence
  Description of Artificial Sequence: Synthetic oligonucleotide
  Sense strand starting at position 734 of SEQ ID NO: 316783
augcuaucucugcaagaaa

SEQ ID NO: 440152 - RNA, 19 nt, Artificial Sequence
  Description of Artificial Sequence: Synthetic oligonucleotide
  Antisense Strand to SEQ ID NO: 440151
uuucuugcagagauagcau

SEQ ID NO: 440153 - RNA, 19 nt, Artificial Sequence
  Description of Artificial Sequence: Synthetic oligonucleotide
  Sense strand starting at position 762 of SEQ ID NO: 316783
cacaauuggguuugacuua

SEQ ID NO: 440154 - RNA, 19 nt, Artificial Sequence
  Description of Artificial Sequence: Synthetic oligonucleotide
  Antisense Strand to SEQ ID NO: 440153
uaagucaaacccaauugug

SEQ ID NO: 440155 - RNA, 19 nt, Artificial Sequence
  Description of Artificial Sequence: Synthetic oligonucleotide
  Sense strand starting at position 930 of SEQ ID NO: 316783
gagcauagauccuuggcca

SEQ ID NO: 440156 - RNA, 19 nt, Artificial Sequence
  Description of Artificial Sequence: Synthetic oligonucleotide
  Antisense Strand to SEQ ID NO: 440155
uggccaaggaucuaugcuc

SEQ ID NO: 440157 - RNA, 19 nt, Artificial Sequence
  Description of Artificial Sequence: Synthetic oligonucleotide
  Sense strand starting at position 931 of SEQ ID NO: 316783
agcauagauccuuggccaa

SEQ ID NO: 440158 - RNA, 19 nt, Artificial Sequence
  Description of Artificial Sequence: Synthetic oligonucleotide
  Antisense Strand to SEQ ID NO: 440157
uuggccaaggaucuaugcu

SEQ ID NO: 440159 - RNA, 19 nt, Artificial Sequence
  Description of Artificial Sequence: Synthetic oligonucleotide
  Sense strand starting at position 1006 of SEQ ID NO: 316783
gcggcuagucaugcacaca

SEQ ID NO: 440160 - RNA, 19 nt, Artificial Sequence
  Description of Artificial Sequence: Synthetic oligonucleotide
  Antisense Strand to SEQ ID NO: 440159
ugugugcaugacuagccgc

SEQ ID NO: 440161 - RNA, 19 nt, Artificial Sequence
  Description of Artificial Sequence: Synthetic oligonucleotide
  Sense strand starting at position 1030 of SEQ ID NO: 316783
acgcuuguacaagauguua

SEQ ID NO: 440162 - RNA, 19 nt, Artificial Sequence
  Description of Artificial Sequence: Synthetic oligonucleotide
  Antisense Strand to SEQ ID NO: 440161
uaacaucuuguacaagcgu

SEQ ID NO: 440163 - RNA, 19 nt, Artificial Sequence
  Description of Artificial Sequence: Synthetic oligonucleotide
  Sense strand starting at position 1110 of SEQ ID NO: 316783
caccauagucuugagguga

SEQ ID NO: 440164 - RNA, 19 nt, Artificial Sequence
  Description of Artificial Sequence: Synthetic oligonucleotide
  Antisense Strand to SEQ ID NO: 440163
ucaccucaagacuauggug

SEQ ID NO: 440165 - RNA, 19 nt, Artificial Sequence
  Description of Artificial Sequence: Synthetic oligonucleotide
  Sense strand starting at position 1114 of SEQ ID NO: 316783
auagucuugaggugaucca

SEQ ID NO: 440166 - RNA, 19 nt, Artificial Sequence
  Description of Artificial Sequence: Synthetic oligonucleotide
  Antisense Strand to SEQ ID NO: 440165
uggaucaccucaagacuau

SEQ ID NO: 440167 - RNA, 19 nt, Artificial Sequence
  Description of Artificial Sequence: Synthetic oligonucleotide
  Sense strand starting at position 1121 of SEQ ID NO: 316783
ugaggugauccaggguauc

SEQ ID NO: 440168 - RNA, 19 nt, Artificial Sequence
  Description of Artificial Sequence: Synthetic oligonucleotide
  Antisense Strand to SEQ ID NO: 440167
gauacccuggaucaccuca

SEQ ID NO: 440169 - RNA, 19 nt, Artificial Sequence
  Description of Artificial Sequence: Synthetic oligonucleotide
  Sense strand starting at position 1447 of SEQ ID NO: 316783
aaaggucgauuccuccaaa

SEQ ID NO: 440170 - RNA, 19 nt, Artificial Sequence
  Description of Artificial Sequence: Synthetic oligonucleotide
  Antisense Strand to SEQ ID NO: 440169
uuuggaggaaucgaccuuu

SEQ ID NO: 440171 - RNA, 19 nt, Artificial Sequence
  Description of Artificial Sequence: Synthetic oligonucleotide
  Sense strand starting at position 1450 of SEQ ID NO: 316783
ggucgauuccuccaaaguu

SEQ ID NO: 440172 - RNA, 19 nt, Artificial Sequence
  Description of Artificial Sequence: Synthetic oligonucleotide
  Antisense Strand to SEQ ID NO: 440171
aacuuuggaggaaucgacc

SEQ ID NO: 440173 - RNA, 19 nt, Artificial Sequence
  Description of Artificial Sequence: Synthetic oligonucleotide
  Sense strand starting at position 1804 of SEQ ID NO: 316783
cugugaguuugccuuauuu

SEQ ID NO: 440174 - RNA, 19 nt, Artificial Sequence
  Description of Artificial Sequence: Synthetic oligonucleotide
  Antisense Strand to SEQ ID NO: 440173
aaauaaggcaaacucacag

SEQ ID NO: 440175 - RNA, 19 nt, Artificial Sequence
  Description of Artificial Sequence: Synthetic oligonucleotide
  Sense strand starting at position 1806 of SEQ ID NO: 316783
gugaguuugccuuauuucu

SEQ ID NO: 440176 - RNA, 19 nt, Artificial Sequence
  Description of Artificial Sequence: Synthetic oligonucleotide
  Antisense Strand to SEQ ID NO: 440175
agaaauaaggcaaacucac

SEQ ID NO: 440177 - RNA, 19 nt, Artificial Sequence
  Description of Artificial Sequence: Synthetic oligonucleotide
  Sense strand starting at position 2026 of SEQ ID NO: 316783
gcgugcgcgauccuuaaau

SEQ ID NO: 440178 - RNA, 19 nt, Artificial Sequence
  Description of Artificial Sequence: Synthetic oligonucleotide
  Antisense Strand to SEQ ID NO: 440177
auuuaaggaucgcgcacgc

SEQ ID NO: 440179 - RNA, 19 nt, Artificial Sequence
  Description of Artificial Sequence: Synthetic oligonucleotide
  Sense strand starting at position 2301 of SEQ ID NO: 316783
cuguuauuagcauaaugua

SEQ ID NO: 440180 - RNA, 19 nt, Artificial Sequence
  Description of Artificial Sequence: Synthetic oligonucleotide
  Antisense Strand to SEQ ID NO: 440179
uacauuaugcuaauaacag

SEQ ID NO: 440181 - RNA, 19 nt, Artificial Sequence
  Description of Artificial Sequence: Synthetic oligonucleotide
  Sense strand starting at position 2309 of SEQ ID NO: 316783
agcauaauguaugcaaaua

SEQ ID NO: 440182 - RNA, 19 nt, Artificial Sequence
  Description of Artificial Sequence: Synthetic oligonucleotide
  Antisense Strand to SEQ ID NO: 440181
uauuugcauacauuaugcu

SEQ ID NO: 440183 - RNA, 19 nt, Artificial Sequence
  Description of Artificial Sequence: Synthetic oligonucleotide
  Sense strand starting at position 2552 of SEQ ID NO: 316783
acgcucuaucucuacugau

SEQ ID NO: 440184 - RNA, 19 nt, Artificial Sequence
  Description of Artificial Sequence: Synthetic oligonucleotide
  Antisense Strand to SEQ ID NO: 440183
aucaguagagauagagcgu

SEQ ID NO: 440185 - RNA, 19 nt, Artificial Sequence
  Description of Artificial Sequence: Synthetic oligonucleotide
  Sense strand starting at position 2875 of SEQ ID NO: 316783
aguguugagguauacacau

SEQ ID NO: 440186 - RNA, 19 nt, Artificial Sequence
  Description of Artificial Sequence: Synthetic oligonucleotide
  Antisense Strand to SEQ ID NO: 440185
auguguauaccucaacacu

SEQ ID NO: 440187 - RNA, 19 nt, Artificial Sequence
  Description of Artificial Sequence: Synthetic oligonucleotide
  Sense strand starting at position 2958 of SEQ ID NO: 316783
cuguucucucuggaucaaa

SEQ ID NO: 440188 - RNA, 19 nt, Artificial Sequence
  Description of Artificial Sequence: Synthetic oligonucleotide
  Antisense Strand to SEQ ID NO: 440187
uuugauccagagagaacag

SEQ ID NO: 440189 - RNA, 19 nt, Artificial Sequence
  Description of Artificial Sequence: Synthetic oligonucleotide
  Sense strand starting at position 2998 of SEQ ID NO: 316783
uuuggaaaguugguaacaa

SEQ ID NO: 440190 - RNA, 19 nt, Artificial Sequence
  Description of Artificial Sequence: Synthetic oligonucleotide
  Antisense Strand to SEQ ID NO: 440189
uuguuaccaacuuuccaaa

SEQ ID NO: 440191 - RNA, 19 nt, Artificial Sequence
  Description of Artificial Sequence: Synthetic oligonucleotide
  Sense strand starting at position 3006 of SEQ ID NO: 316783
guugguaacaaguagcauu

SEQ ID NO: 440192 - RNA, 19 nt, Artificial Sequence
  Description of Artificial Sequence: Synthetic oligonucleotide
  Antisense Strand to SEQ ID NO: 440191
aaugcuacuuguuaccaac

SEQ ID NO: 440193 - RNA, 19 nt, Artificial Sequence
  Description of Artificial Sequence: Synthetic oligonucleotide
  Sense strand starting at position 3205 of SEQ ID NO: 316783
acauguguaaacggauauu

SEQ ID NO: 440194 - RNA, 19 nt, Artificial Sequence
  Description of Artificial Sequence: Synthetic oligonucleotide
  Antisense Strand to SEQ ID NO: 440193
aauauccguuuacacaugu

SEQ ID NO: 440195 - RNA, 19 nt, Artificial Sequence
  Description of Artificial Sequence: Synthetic oligonucleotide
  Sense strand starting at position 3208 of SEQ ID NO: 316783
uguguaaacggauauugcu

SEQ ID NO: 440196 - RNA, 19 nt, Artificial Sequence
  Description of Artificial Sequence: Synthetic oligonucleotide
  Antisense Strand to SEQ ID NO: 440195
agcaauauccguuuacaca

SEQ ID NO: 440197 - RNA, 19 nt, Artificial Sequence
  Description of Artificial Sequence: Synthetic oligonucleotide
  Sense strand starting at position 3218 of SEQ ID NO: 316783
gauauugcuaggugugaag

SEQ ID NO: 440198 - RNA, 19 nt, Artificial Sequence
  Description of Artificial Sequence: Synthetic oligonucleotide
  Antisense Strand to SEQ ID NO: 440197
cuucacaccuagcaauauc

SEQ ID NO: 440199 - RNA, 19 nt, Artificial Sequence
  Description of Artificial Sequence: Synthetic oligonucleotide
  Sense strand starting at position 3225 of SEQ ID NO: 316783
cuaggugugaagcaaggua

SEQ ID NO: 440200 - RNA, 19 nt, Artificial Sequence
  Description of Artificial Sequence: Synthetic oligonucleotide
  Antisense Strand to SEQ ID NO: 440199
uaccuugcuucacaccuag

SEQ ID NO: 440201 - RNA, 19 nt, Artificial Sequence
  Description of Artificial Sequence: Synthetic oligonucleotide
  Sense strand starting at position 3272 of SEQ ID NO: 316783
agacuaacauuggaggaaa

SEQ ID NO: 440202 - RNA, 19 nt, Artificial Sequence
  Description of Artificial Sequence: Synthetic oligonucleotide
  Antisense Strand to SEQ ID NO: 440201
uuuccuccaauguuagucu

SEQ ID NO: 440203 - RNA, 19 nt, Artificial Sequence
  Description of Artificial Sequence: Synthetic oligonucleotide
  Sense strand starting at position 3751 of SEQ ID NO: 316783
uguacaaacucuuucugua

SEQ ID NO: 440204 - RNA, 19 nt, Artificial Sequence
  Description of Artificial Sequence: Synthetic oligonucleotide
  Antisense Strand to SEQ ID NO: 440203
uacagaaagaguuuguaca

SEQ ID NO: 440205 - RNA, 19 nt, Artificial Sequence
  Description of Artificial Sequence: Synthetic oligonucleotide
  Sense strand starting at position 3866 of SEQ ID NO: 316783
guauacucucuccaguaga

SEQ ID NO: 440206 - RNA, 19 nt, Artificial Sequence
  Description of Artificial Sequence: Synthetic oligonucleotide
  Antisense Strand to SEQ ID NO: 440205
ucuacuggagagaguauac

SEQ ID NO: 440207 - RNA, 19 nt, Artificial Sequence
  Description of Artificial Sequence: Synthetic oligonucleotide
  Sense strand starting at position 3877 of SEQ ID NO: 316783
ccaguagaguucccauuac

SEQ ID NO: 440208 - RNA, 19 nt, Artificial Sequence
  Description of Artificial Sequence: Synthetic oligonucleotide
  Antisense Strand to SEQ ID NO: 440207
guaaugggaacucuacugg

SEQ ID NO: 440209 - RNA, 19 nt, Artificial Sequence
  Description of Artificial Sequence: Synthetic oligonucleotide
  Sense strand starting at position 3892 of SEQ ID NO: 316783
uuacacugaugagucauaa

SEQ ID NO: 440210 - RNA, 19 nt, Artificial Sequence
  Description of Artificial Sequence: Synthetic oligonucleotide
  Antisense Strand to SEQ ID NO: 440209
uuaugacucaucaguguaa

SEQ ID NO: 440211 - RNA, 19 nt, Artificial Sequence
  Description of Artificial Sequence: Synthetic oligonucleotide
  Sense strand starting at position 3959 of SEQ ID NO: 316783
gccaguugccucuuuguca

SEQ ID NO: 440212 - RNA, 19 nt, Artificial Sequence
  Description of Artificial Sequence: Synthetic oligonucleotide
  Antisense Strand to SEQ ID NO: 440211
ugacaaagaggcaacuggc

SEQ ID NO: 440213 - RNA, 19 nt, Artificial Sequence
  Description of Artificial Sequence: Synthetic oligonucleotide
  Sense strand starting at position 3 of SEQ ID NO: 316784
aggucauggaaaugacuuu

SEQ ID NO: 440214 - RNA, 19 nt, Artificial Sequence
  Description of Artificial Sequence: Synthetic oligonucleotide
  Antisense Strand to SEQ ID NO: 440213
aaagucauuuccaugaccu

SEQ ID NO: 440215 - RNA, 19 nt, Artificial Sequence
  Description of Artificial Sequence: Synthetic oligonucleotide
  Sense strand starting at position 43 of SEQ ID NO: 316784
aauagcuaccguuauggau

SEQ ID NO: 440216 - RNA, 19 nt, Artificial Sequence
  Description of Artificial Sequence: Synthetic oligonucleotide
  Antisense Strand to SEQ ID NO: 440215
auccauaacgguagcuauu

SEQ ID NO: 440217 - RNA, 19 nt, Artificial Sequence
  Description of Artificial Sequence: Synthetic oligonucleotide
  Sense strand starting at position 106 of SEQ ID NO: 316784
ugaaguaaccauuguuauu

SEQ ID NO: 440218 - RNA, 19 nt, Artificial Sequence
  Description of Artificial Sequence: Synthetic oligonucleotide
  Antisense Strand to SEQ ID NO: 440217
aauaacaaugguuacuuca

SEQ ID NO: 440219 - RNA, 19 nt, Artificial Sequence
  Description of Artificial Sequence: Synthetic oligonucleotide
  Sense strand starting at position 141 of SEQ ID NO: 316784
ugaggaaacugagaauaaa

SEQ ID NO: 440220 - RNA, 19 nt, Artificial Sequence
  Description of Artificial Sequence: Synthetic oligonucleotide
  Antisense Strand to SEQ ID NO: 440219
uuuauucucaguuuccuca

SEQ ID NO: 440221 - RNA, 19 nt, Artificial Sequence
  Description of Artificial Sequence: Synthetic oligonucleotide
  Sense strand starting at position 177 of SEQ ID NO: 316784
agagcuuuaguccauucga

SEQ ID NO: 440222 - RNA, 19 nt, Artificial Sequence
  Description of Artificial Sequence: Synthetic oligonucleotide
  Antisense Strand to SEQ ID NO: 440221
ucgaauggacuaaagcucu

SEQ ID NO: 440223 - RNA, 19 nt, Artificial Sequence
  Description of Artificial Sequence: Synthetic oligonucleotide
  Sense strand starting at position 535 of SEQ ID NO: 316784
cagguuggaagauguaaga

SEQ ID NO: 440224 - RNA, 19 nt, Artificial Sequence
  Description of Artificial Sequence: Synthetic oligonucleotide
  Antisense Strand to SEQ ID NO: 440223
ucuuacaucuuccaaccug

SEQ ID NO: 440225 - RNA, 19 nt, Artificial Sequence
  Description of Artificial Sequence: Synthetic oligonucleotide
  Sense strand starting at position 606 of SEQ ID NO: 316784
gggcuuaaauuguugagga

SEQ ID NO: 440226 - RNA, 19 nt, Artificial Sequence
  Description of Artificial Sequence: Synthetic oligonucleotide
  Antisense Strand to SEQ ID NO: 440225
uccucaacaauuuaagccc

SEQ ID NO: 440227 - RNA, 19 nt, Artificial Sequence
  Description of Artificial Sequence: Synthetic oligonucleotide
  Sense strand starting at position 608 of SEQ ID NO: 316784
gcuuaaauuguugaggaca

SEQ ID NO: 440228 - RNA, 19 nt, Artificial Sequence
  Description of Artificial Sequence: Synthetic oligonucleotide
  Antisense Strand to SEQ ID NO: 440227
uguccucaacaauuuaagc

SEQ ID NO: 440229 - RNA, 19 nt, Artificial Sequence
  Description of Artificial Sequence: Synthetic oligonucleotide
  Sense strand starting at position 885 of SEQ ID NO: 316784
ccuggcauucuugaaccau

SEQ ID NO: 440230 - RNA, 19 nt, Artificial Sequence
  Description of Artificial Sequence: Synthetic oligonucleotide
  Antisense Strand to SEQ ID NO: 440229
augguucaagaaugccagg

SEQ ID NO: 440231 - RNA, 19 nt, Artificial Sequence
  Description of Artificial Sequence: Synthetic oligonucleotide
  Sense strand starting at position 927 of SEQ ID NO: 316784
ccuaaagauuuagaaguca

SEQ ID NO: 440232 - RNA, 19 nt, Artificial Sequence
  Description of Artificial Sequence: Synthetic oligonucleotide
  Antisense Strand to SEQ ID NO: 440231
ugacuucuaaaucuuuagg

SEQ ID NO: 440233 - RNA, 19 nt, Artificial Sequence
  Description of Artificial Sequence: Synthetic oligonucleotide
  Sense strand starting at position 935 of SEQ ID NO: 316784
uuuagaagucaucgacaua

SEQ ID NO: 440234 - RNA, 19 nt, Artificial Sequence
  Description of Artificial Sequence: Synthetic oligonucleotide
  Antisense Strand to SEQ ID NO: 440233
uaugucgaugacuucuaaa

SEQ ID NO: 440235 - RNA, 19 nt, Artificial Sequence
  Description of Artificial Sequence: Synthetic oligonucleotide
  Sense strand starting at position 942 of SEQ ID NO: 316784
gucaucgacauauauggua

SEQ ID NO: 440236 - RNA, 19 nt, Artificial Sequence
  Description of Artificial Sequence: Synthetic oligonucleotide
  Antisense Strand to SEQ ID NO: 440235
uaccauauaugucgaugac

SEQ ID NO: 440237 - RNA, 19 nt, Artificial Sequence
  Description of Artificial Sequence: Synthetic oligonucleotide
  Sense strand starting at position 966 of SEQ ID NO: 316784
gguuaugggccuuaucuaa

SEQ ID NO: 440238 - RNA, 19 nt, Artificial Sequence
  Description of Artificial Sequence: Synthetic oligonucleotide
  Antisense Strand to SEQ ID NO: 440237
uuagauaaggcccauaacc

SEQ ID NO: 440239 - RNA, 19 nt, Artificial Sequence
  Description of Artificial Sequence: Synthetic oligonucleotide
  Sense strand starting at position 974 of SEQ ID NO: 316784
gccuuaucuaaauggguag

SEQ ID NO: 440240 - RNA, 19 nt, Artificial Sequence
  Description of Artificial Sequence: Synthetic oligonucleotide
  Antisense Strand to SEQ ID NO: 440239
cuacccauuuagauaaggc

SEQ ID NO: 440241 - RNA, 19 nt, Artificial Sequence
  Description of Artificial Sequence: Synthetic oligonucleotide
  Sense strand starting at position 977 of SEQ ID NO: 316784
uuaucuaaauggguagagu

SEQ ID NO: 440242 - RNA, 19 nt, Artificial Sequence
  Description of Artificial Sequence: Synthetic oligonucleotide
  Antisense Strand to SEQ ID NO: 440241
acucuacccauuuagauaa

SEQ ID NO: 440243 - RNA, 19 nt, Artificial Sequence
  Description of Artificial Sequence: Synthetic oligonucleotide
  Sense strand starting at position 1371 of SEQ ID NO: 316784
ugaacaaaugaaugugguu

SEQ ID NO: 440244 - RNA, 19 nt, Artificial Sequence
  Description of Artificial Sequence: Synthetic oligonucleotide
  Antisense Strand to SEQ ID NO: 440243
aaccacauucauuuguuca

SEQ ID NO: 440245 - RNA, 19 nt, Artificial Sequence
  Description of Artificial Sequence: Synthetic oligonucleotide
  Sense strand starting at position 1458 of SEQ ID NO: 316784
ggacgauccuaacuaaagu

SEQ ID NO: 440246 - RNA, 19 nt, Artificial Sequence
  Description of Artificial Sequence: Synthetic oligonucleotide
  Antisense Strand to SEQ ID NO: 440245
acuuuaguuaggaucgucc

SEQ ID NO: 440247 - RNA, 19 nt, Artificial Sequence
  Description of Artificial Sequence: Synthetic oligonucleotide
  Sense strand starting at position 1608 of SEQ ID NO: 316784
agguuauguguugaaugaa

SEQ ID NO: 440248 - RNA, 19 nt, Artificial Sequence
  Description of Artificial Sequence: Synthetic oligonucleotide
  Antisense Strand to SEQ ID NO: 440247
uucauucaacacauaaccu

SEQ ID NO: 440249 - RNA, 19 nt, Artificial Sequence
  Description of Artificial Sequence: Synthetic oligonucleotide
  Sense strand starting at position 2166 of SEQ ID NO: 316784
cagugauguggcuaagaua

SEQ ID NO: 440250 - RNA, 19 nt, Artificial Sequence
  Description of Artificial Sequence: Synthetic oligonucleotide
  Antisense Strand to SEQ ID NO: 440249
uaucuuagccacaucacug

SEQ ID NO: 440251 - RNA, 19 nt, Artificial Sequence
  Description of Artificial Sequence: Synthetic oligonucleotide
  Sense strand starting at position 2224 of SEQ ID NO: 316784
gcaguuuguaccuuuguuu

SEQ ID NO: 440252 - RNA, 19 nt, Artificial Sequence
  Description of Artificial Sequence: Synthetic oligonucleotide
  Antisense Strand to SEQ ID NO: 440251
aaacaaagguacaaacugc

SEQ ID NO: 440253 - RNA, 19 nt, Artificial Sequence
  Description of Artificial Sequence: Synthetic oligonucleotide
  Sense strand starting at position 2282 of SEQ ID NO: 316784
gucgaauaaagguaaccau

SEQ ID NO: 440254 - RNA, 19 nt, Artificial Sequence
  Description of Artificial Sequence: Synthetic oligonucleotide
  Antisense Strand to SEQ ID NO: 440253
augguuaccuuuauucgac

SEQ ID NO: 440255 - RNA, 19 nt, Artificial Sequence
  Description of Artificial Sequence: Synthetic oligonucleotide
  Sense strand starting at position 2400 of SEQ ID NO: 316784
caacguucuguauauagau

SEQ ID NO: 440256 - RNA, 19 nt, Artificial Sequence
  Description of Artificial Sequence: Synthetic oligonucleotide
  Antisense Strand to SEQ ID NO: 440255
aucuauauacagaacguug

SEQ ID NO: 440257 - RNA, 19 nt, Artificial Sequence
  Description of Artificial Sequence: Synthetic oligonucleotide
  Sense strand starting at position 2481 of SEQ ID NO: 316784
ucacuaagguugucagauu

SEQ ID NO: 440258 - RNA, 19 nt, Artificial Sequence
  Description of Artificial Sequence: Synthetic oligonucleotide
  Antisense Strand to SEQ ID NO: 440257
aaucugacaaccuuaguga

SEQ ID NO: 440259 - RNA, 19 nt, Artificial Sequence
  Description of Artificial Sequence: Synthetic oligonucleotide
  Sense strand starting at position 2576 of SEQ ID NO: 316784
cuaaauauuguaugggaua

SEQ ID NO: 440260 - RNA, 19 nt, Artificial Sequence
  Description of Artificial Sequence: Synthetic oligonucleotide
  Antisense Strand to SEQ ID NO: 440259
uaucccauacaauauuuag

SEQ ID NO: 440261 - RNA, 19 nt, Artificial Sequence
  Description of Artificial Sequence: Synthetic oligonucleotide
  Sense strand starting at position 2737 of SEQ ID NO: 316784
gcuauuaauguuggacuaa

SEQ ID NO: 440262 - RNA, 19 nt, Artificial Sequence
  Description of Artificial Sequence: Synthetic oligonucleotide
  Antisense Strand to SEQ ID NO: 440261
uuaguccaacauuaauagc

SEQ ID NO: 440263 - RNA, 19 nt, Artificial Sequence
  Description of Artificial Sequence: Synthetic oligonucleotide
  Sense strand starting at position 2817 of SEQ ID NO: 316784
ugaagaauucagugguggu

SEQ ID NO: 440264 - RNA, 19 nt, Artificial Sequence
  Description of Artificial Sequence: Synthetic oligonucleotide
  Antisense Strand to SEQ ID NO: 440263
accaccacugaauucuuca

SEQ ID NO: 440265 - RNA, 19 nt, Artificial Sequence
  Description of Artificial Sequence: Synthetic oligonucleotide
  Sense strand starting at position 3094 of SEQ ID NO: 316784
agcugucccucacuuauuu

SEQ ID NO: 440266 - RNA, 19 nt, Artificial Sequence
  Description of Artificial Sequence: Synthetic oligonucleotide
  Antisense Strand to SEQ ID NO: 440265
aaauaagugagggacagcu

SEQ ID NO: 440267 - RNA, 19 nt, Artificial Sequence
  Description of Artificial Sequence: Synthetic oligonucleotide
  Sense strand starting at position 3124 of SEQ ID NO: 316784
guucuuaaugcagauagau

SEQ ID NO: 440268 - RNA, 19 nt, Artificial Sequence
  Description of Artificial Sequence: Synthetic oligonucleotide
  Antisense Strand to SEQ ID NO: 440267
aucuaucugcauuaagaac

SEQ ID NO: 440269 - RNA, 19 nt, Artificial Sequence
  Description of Artificial Sequence: Synthetic oligonucleotide
  Sense strand starting at position 3177 of SEQ ID NO: 316784
gucuuaagauacuuuguga

SEQ ID NO: 440270 - RNA, 19 nt, Artificial Sequence
  Description of Artificial Sequence: Synthetic oligonucleotide
  Antisense Strand to SEQ ID NO: 440269
ucacaaaguaucuuaagac

SEQ ID NO: 440271 - RNA, 19 nt, Artificial Sequence
  Description of Artificial Sequence: Synthetic oligonucleotide
  Sense strand starting at position 3250 of SEQ ID NO: 316784
ugagucuuucuguaaaucu

SEQ ID NO: 440272 - RNA, 19 nt, Artificial Sequence
  Description of Artificial Sequence: Synthetic oligonucleotide
  Antisense Strand to SEQ ID NO: 440271
agauuuacagaaagacuca

SEQ ID NO: 440273 - RNA, 19 nt, Artificial Sequence
  Description of Artificial Sequence: Synthetic oligonucleotide
  Sense strand starting at position 3459 of SEQ ID NO: 316784
aggucacauagauaguagu

SEQ ID NO: 440274 - RNA, 19 nt, Artificial Sequence
  Description of Artificial Sequence: Synthetic oligonucleotide
  Antisense Strand to SEQ ID NO: 440273
acuacuaucuaugugaccu

SEQ ID NO: 440275 - RNA, 19 nt, Artificial Sequence
  Description of Artificial Sequence: Synthetic oligonucleotide
  Sense strand starting at position 3498 of SEQ ID NO: 316784
gccagaaacggugaucuca

SEQ ID NO: 440276 - RNA, 19 nt, Artificial Sequence
  Description of Artificial Sequence: Synthetic oligonucleotide
  Antisense Strand to SEQ ID NO: 440275
ugagaucaccguuucuggc

SEQ ID NO: 440277 - RNA, 19 nt, Artificial Sequence
  Description of Artificial Sequence: Synthetic oligonucleotide
  Sense strand starting at position 3500 of SEQ ID NO: 316784
cagaaacggugaucucagu

SEQ ID NO: 440278 - RNA, 19 nt, Artificial Sequence
  Description of Artificial Sequence: Synthetic oligonucleotide
  Antisense Strand to SEQ ID NO: 440277
acugagaucaccguuucug

SEQ ID NO: 440279 - RNA, 19 nt, Artificial Sequence
  Description of Artificial Sequence: Synthetic oligonucleotide
  Sense strand starting at position 3623 of SEQ ID NO: 316784
gguuuagucagaggacaga

SEQ ID NO: 440280 - RNA, 19 nt, Artificial Sequence
  Description of Artificial Sequence: Synthetic oligonucleotide
  Antisense Strand to SEQ ID NO: 440279
ucuguccucugacuaaacc

SEQ ID NO: 440281 - RNA, 19 nt, Artificial Sequence
  Description of Artificial Sequence: Synthetic oligonucleotide
  Sense strand starting at position 3774 of SEQ ID NO: 316784
agagacagcgcuuaauauu

SEQ ID NO: 440282 - RNA, 19 nt, Artificial Sequence
  Description of Artificial Sequence: Synthetic oligonucleotide
  Antisense Strand to SEQ ID NO: 440281
aauauuaagcgcugucucu

SEQ ID NO: 440283 - RNA, 19 nt, Artificial Sequence
  Description of Artificial Sequence: Synthetic oligonucleotide
  Sense strand starting at position 3794 of SEQ ID NO: 316784
gcccuuugauuaguaagag

SEQ ID NO: 440284 - RNA, 19 nt, Artificial Sequence
  Description of Artificial Sequence: Synthetic oligonucleotide
  Antisense Strand to SEQ ID NO: 440283
cucuuacuaaucaaagggc

SEQ ID NO: 440285 - RNA, 19 nt, Artificial Sequence
  Description of Artificial Sequence: Synthetic oligonucleotide
  Sense strand starting at position 3800 of SEQ ID NO: 316784
ugauuaguaagaggauguu

SEQ ID NO: 440286 - RNA, 19 nt, Artificial Sequence
  Description of Artificial Sequence: Synthetic oligonucleotide
  Antisense Strand to SEQ ID NO: 440285
aacauccucuuacuaauca

SEQ ID NO: 440287 - RNA, 19 nt, Artificial Sequence
  Description of Artificial Sequence: Synthetic oligonucleotide
  Sense strand starting at position 3803 of SEQ ID NO: 316784
uuaguaagaggauguucuu

SEQ ID NO: 440288 - RNA, 19 nt, Artificial Sequence
  Description of Artificial Sequence: Synthetic oligonucleotide
  Antisense Strand to SEQ ID NO: 440287
aagaacauccucuuacuaa

SEQ ID NO: 440289 - RNA, 19 nt, Artificial Sequence
  Description of Artificial Sequence: Synthetic oligonucleotide
  Sense strand starting at position 3825 of SEQ ID NO: 316784
uguguaauccaagagguuu

SEQ ID NO: 440290 - RNA, 19 nt, Artificial Sequence
  Description of Artificial Sequence: Synthetic oligonucleotide
  Antisense Strand to SEQ ID NO: 440289
aaaccucuuggauuacaca

SEQ ID NO: 440291 - RNA, 19 nt, Artificial Sequence
  Description of Artificial Sequence: Synthetic oligonucleotide
  Sense strand starting at position 3940 of SEQ ID NO: 316784
gcaugaacucuggagcuaa

SEQ ID NO: 440292 - RNA, 19 nt, Artificial Sequence
  Description of Artificial Sequence: Synthetic oligonucleotide
  Antisense Strand to SEQ ID NO: 440291
uuagcuccagaguucaugc

SEQ ID NO: 440293 - RNA, 19 nt, Artificial Sequence
  Description of Artificial Sequence: Synthetic oligonucleotide
  Sense strand starting at position 429 of SEQ ID NO: 316785
ccgcacuuucuauauguca

SEQ ID NO: 440294 - RNA, 19 nt, Artificial Sequence
  Description of Artificial Sequence: Synthetic oligonucleotide
  Antisense Strand to SEQ ID NO: 440293
ugacauauagaaagugcgg

SEQ ID NO: 440295 - RNA, 19 nt, Artificial Sequence
  Description of Artificial Sequence: Synthetic oligonucleotide
  Sense strand starting at position 451 of SEQ ID NO: 316785
acuguucuacgugauauaa

SEQ ID NO: 440296 - RNA, 19 nt, Artificial Sequence
  Description of Artificial Sequence: Synthetic oligonucleotide
  Antisense Strand to SEQ ID NO: 440295
uuauaucacguagaacagu

SEQ ID NO: 440297 - RNA, 19 nt, Artificial Sequence
  Description of Artificial Sequence: Synthetic oligonucleotide
  Sense strand starting at position 461 of SEQ ID NO: 316785
gugauauaagugugguaag

SEQ ID NO: 440298 - RNA, 19 nt, Artificial Sequence
  Description of Artificial Sequence: Synthetic oligonucleotide
  Antisense Strand to SEQ ID NO: 440297
cuuaccacacuuauaucac

SEQ ID NO: 440299 - RNA, 19 nt, Artificial Sequence
  Description of Artificial Sequence: Synthetic oligonucleotide
  Sense strand starting at position 498 of SEQ ID NO: 316785
cucaucuuguccucagaua

SEQ ID NO: 440300 - RNA, 19 nt, Artificial Sequence
  Description of Artificial Sequence: Synthetic oligonucleotide
  Antisense Strand to SEQ ID NO: 440299
uaucugaggacaagaugag

SEQ ID NO: 440301 - RNA, 19 nt, Artificial Sequence
  Description of Artificial Sequence: Synthetic oligonucleotide
  Sense strand starting at position 602 of SEQ ID NO: 316785
ggcugaauuucccacugau

SEQ ID NO: 440302 - RNA, 19 nt, Artificial Sequence
  Description of Artificial Sequence: Synthetic oligonucleotide
  Antisense Strand to SEQ ID NO: 440301
aucagugggaaauucagcc

SEQ ID NO: 440303 - RNA, 19 nt, Artificial Sequence
  Description of Artificial Sequence: Synthetic oligonucleotide
  Sense strand starting at position 631 of SEQ ID NO: 316785
uacguuugccaccagagaa

SEQ ID NO: 440304 - RNA, 19 nt, Artificial Sequence
  Description of Artificial Sequence: Synthetic oligonucleotide
  Antisense Strand to SEQ ID NO: 440303
uucucugguggcaaacgua

SEQ ID NO: 440305 - RNA, 19 nt, Artificial Sequence
  Description of Artificial Sequence: Synthetic oligonucleotide
  Sense strand starting at position 692 of SEQ ID NO: 316785
cagguuagaacagguguau

SEQ ID NO: 440306 - RNA, 19 nt, Artificial Sequence
  Description of Artificial Sequence: Synthetic oligonucleotide
  Antisense Strand to SEQ ID NO: 440305
auacaccuguucuaaccug

SEQ ID NO: 440307 - RNA, 19 nt, Artificial Sequence
  Description of Artificial Sequence: Synthetic oligonucleotide
  Sense strand starting at position 704 of SEQ ID NO: 316785
gguguaucccauuaauaua

SEQ ID NO: 440308 - RNA, 19 nt, Artificial Sequence
  Description of Artificial Sequence: Synthetic oligonucleotide
  Antisense Strand to SEQ ID NO: 440307
uauauuaaugggauacacc

SEQ ID NO: 440309 - RNA, 19 nt, Artificial Sequence
  Description of Artificial Sequence: Synthetic oligonucleotide
  Sense strand starting at position 739 of SEQ ID NO: 316785
gcugucaggauguaaacau

SEQ ID NO: 440310 - RNA, 19 nt, Artificial Sequence
  Description of Artificial Sequence: Synthetic oligonucleotide
  Antisense Strand to SEQ ID NO: 440309
auguuuacauccugacagc

SEQ ID NO: 440311 - RNA, 19 nt, Artificial Sequence
  Description of Artificial Sequence: Synthetic oligonucleotide
  Sense strand starting at position 957 of SEQ ID NO: 316785
ggccuagagaggcauacuu

SEQ ID NO: 440312 - RNA, 19 nt, Artificial Sequence
  Description of Artificial Sequence: Synthetic oligonucleotide
  Antisense Strand to SEQ ID NO: 440311
aaguaugccucucuaggcc

SEQ ID NO: 440313 - RNA, 19 nt, Artificial Sequence
  Description of Artificial Sequence: Synthetic oligonucleotide
  Sense strand starting at position 1002 of SEQ ID NO: 316785
agagaaaugcugugacauc

SEQ ID NO: 440314 - RNA, 19 nt, Artificial Sequence
  Description of Artificial Sequence: Synthetic oligonucleotide
  Antisense Strand to SEQ ID NO: 440313
gaugucacagcauuucucu

SEQ ID NO: 440315 - RNA, 19 nt, Artificial Sequence
  Description of Artificial Sequence: Synthetic oligonucleotide
  Sense strand starting at position 1071 of SEQ ID NO: 316785
uugacaacugcuugcagaa

SEQ ID NO: 440316 - RNA, 19 nt, Artificial Sequence
  Description of Artificial Sequence: Synthetic oligonucleotide
  Antisense Strand to SEQ ID NO: 440315
uucugcaagcaguugucaa

SEQ ID NO: 440317 - RNA, 19 nt, Artificial Sequence
  Description of Artificial Sequence: Synthetic oligonucleotide
  Sense strand starting at position 1115 of SEQ ID NO: 316785
gagugaaccuaagcauucu

SEQ ID NO: 440318 - RNA, 19 nt, Artificial Sequence
  Description of Artificial Sequence: Synthetic oligonucleotide
  Antisense Strand to SEQ ID NO: 440317
agaaugcuuagguucacuc

SEQ ID NO: 440319 - RNA, 19 nt, Artificial Sequence
  Description of Artificial Sequence: Synthetic oligonucleotide
  Sense strand starting at position 1276 of SEQ ID NO: 316785
gucugaauggucuggacga

SEQ ID NO: 440320 - RNA, 19 nt, Artificial Sequence
  Description of Artificial Sequence: Synthetic oligonucleotide
  Antisense Strand to SEQ ID NO: 440319
ucguccagaccauucagac

SEQ ID NO: 440321 - RNA, 19 nt, Artificial Sequence
  Description of Artificial Sequence: Synthetic oligonucleotide
  Sense strand starting at position 1278 of SEQ ID NO: 316785
cugaauggucuggacgaca

SEQ ID NO: 440322 - RNA, 19 nt, Artificial Sequence
  Description of Artificial Sequence: Synthetic oligonucleotide
  Antisense Strand to SEQ ID NO: 440321
ugucguccagaccauucag

SEQ ID NO: 440323 - RNA, 19 nt, Artificial Sequence
  Description of Artificial Sequence: Synthetic oligonucleotide
  Sense strand starting at position 1776 of SEQ ID NO: 316785
gggaaauacucacuugcca

SEQ ID NO: 440324 - RNA, 19 nt, Artificial Sequence
  Description of Artificial Sequence: Synthetic oligonucleotide
  Antisense Strand to SEQ ID NO: 440323
uggcaagugaguauuuccc

SEQ ID NO: 440325 - RNA, 19 nt, Artificial Sequence
  Description of Artificial Sequence: Synthetic oligonucleotide
  Sense strand starting at position 2107 of SEQ ID NO: 316785
uuuggauuggcugaugaac

SEQ ID NO: 440326 - RNA, 19 nt, Artificial Sequence
  Description of Artificial Sequence: Synthetic oligonucleotide
  Antisense Strand to SEQ ID NO: 440325
guucaucagccaauccaaa

SEQ ID NO: 440327 - RNA, 19 nt, Artificial Sequence
  Description of Artificial Sequence: Synthetic oligonucleotide
  Sense strand starting at position 2116 of SEQ ID NO: 316785
gcugaugaacuccaguagu

SEQ ID NO: 440328 - RNA, 19 nt, Artificial Sequence
  Description of Artificial Sequence: Synthetic oligonucleotide
  Antisense Strand to SEQ ID NO: 440327
acuacuggaguucaucagc

SEQ ID NO: 440329 - RNA, 19 nt, Artificial Sequence
  Description of Artificial Sequence: Synthetic oligonucleotide
  Sense strand starting at position 2144 of SEQ ID NO: 316785
guguaacuccaaugaguag

SEQ ID NO: 440330 - RNA, 19 nt, Artificial Sequence
  Description of Artificial Sequence: Synthetic oligonucleotide
  Antisense Strand to SEQ ID NO: 440329
cuacucauuggaguuacac

SEQ ID NO: 440331 - RNA, 19 nt, Artificial Sequence
  Description of Artificial Sequence: Synthetic oligonucleotide
  Sense strand starting at position 2155 of SEQ ID NO: 316785
augaguagccgguacauaa

SEQ ID NO: 440332 - RNA, 19 nt, Artificial Sequence
  Description of Artificial Sequence: Synthetic oligonucleotide
  Antisense Strand to SEQ ID NO: 440331
uuauguaccggcuacucau

SEQ ID NO: 440333 - RNA, 19 nt, Artificial Sequence
  Description of Artificial Sequence: Synthetic oligonucleotide
  Sense strand starting at position 2188 of SEQ ID NO: 316785
cgcaaaguuccguuucuca

SEQ ID NO: 440334 - RNA, 19 nt, Artificial Sequence
  Description of Artificial Sequence: Synthetic oligonucleotide
  Antisense Strand to SEQ ID NO: 440333
ugagaaacggaacuuugcg

SEQ ID NO: 440335 - RNA, 19 nt, Artificial Sequence
  Description of Artificial Sequence: Synthetic oligonucleotide
  Sense strand starting at position 2246 of SEQ ID NO: 316785
uuaaacugccugugguaaa

SEQ ID NO: 440336 - RNA, 19 nt, Artificial Sequence
  Description of Artificial Sequence: Synthetic oligonucleotide
  Antisense Strand to SEQ ID NO: 440335
uuuaccacaggcaguuuaa

SEQ ID NO: 440337 - RNA, 19 nt, Artificial Sequence
  Description of Artificial Sequence: Synthetic oligonucleotide
  Sense strand starting at position 2256 of SEQ ID NO: 316785
ugugguaaagaaugaguuu

SEQ ID NO: 440338 - RNA, 19 nt, Artificial Sequence
  Description of Artificial Sequence: Synthetic oligonucleotide
  Antisense Strand to SEQ ID NO: 440337
aaacucauucuuuaccaca

SEQ ID NO: 440339 - RNA, 19 nt, Artificial Sequence
  Description of Artificial Sequence: Synthetic oligonucleotide
  Sense strand starting at position 2350 of SEQ ID NO: 316785
acuuuauaaugguugguca

SEQ ID NO: 440340 - RNA, 19 nt, Artificial Sequence
  Description of Artificial Sequence: Synthetic oligonucleotide
  Antisense Strand to SEQ ID NO: 440339
ugaccaaccauuauaaagu

SEQ ID NO: 440341 - RNA, 19 nt, Artificial Sequence
  Description of Artificial Sequence: Synthetic oligonucleotide
  Sense strand starting at position 2352 of SEQ ID NO: 316785
uuuauaaugguuggucaga

SEQ ID NO: 440342 - RNA, 19 nt, Artificial Sequence
  Description of Artificial Sequence: Synthetic oligonucleotide
  Antisense Strand to SEQ ID NO: 440341
ucugaccaaccauuauaaa

SEQ ID NO: 440343 - RNA, 19 nt, Artificial Sequence
  Description of Artificial Sequence: Synthetic oligonucleotide
  Sense strand starting at position 2354 of SEQ ID NO: 316785
uauaaugguuggucagaca

SEQ ID NO: 440344 - RNA, 19 nt, Artificial Sequence
  Description of Artificial Sequence: Synthetic oligonucleotide
  Antisense Strand to SEQ ID NO: 440343
ugucugaccaaccauuaua

SEQ ID NO: 440345 - RNA, 19 nt, Artificial Sequence
  Description of Artificial Sequence: Synthetic oligonucleotide
  Sense strand starting at position 2376 of SEQ ID NO: 316785
caguuuguccaguacaaag

SEQ ID NO: 440346 - RNA, 19 nt, Artificial Sequence
  Description of Artificial Sequence: Synthetic oligonucleotide
  Antisense Strand to SEQ ID NO: 440345
cuuuguacuggacaaacug

SEQ ID NO: 440347 - RNA, 19 nt, Artificial Sequence
  Description of Artificial Sequence: Synthetic oligonucleotide
  Sense strand starting at position 2408 of SEQ ID NO: 316785
gucguccuggaguaaugau

SEQ ID NO: 440348 - RNA, 19 nt, Artificial Sequence
  Description of Artificial Sequence: Synthetic oligonucleotide
  Antisense Strand to SEQ ID NO: 440347
aucauuacuccaggacgac

SEQ ID NO: 440349 - RNA, 19 nt, Artificial Sequence
  Description of Artificial Sequence: Synthetic oligonucleotide
  Sense strand starting at position 2801 of SEQ ID NO: 316785
ggucgccugcguuuguaua

SEQ ID NO: 440350 - RNA, 19 nt, Artificial Sequence
  Description of Artificial Sequence: Synthetic oligonucleotide
  Antisense Strand to SEQ ID NO: 440349
uauacaaacgcaggcgacc

SEQ ID NO: 440351 - RNA, 19 nt, Artificial Sequence
  Description of Artificial Sequence: Synthetic oligonucleotide
  Sense strand starting at position 2829 of SEQ ID NO: 316785
acucauguauucuuauaga

SEQ ID NO: 440352 - RNA, 19 nt, Artificial Sequence
  Description of Artificial Sequence: Synthetic oligonucleotide
  Antisense Strand to SEQ ID NO: 440351
ucuauaagaauacaugagu

SEQ ID NO: 440353 - RNA, 19 nt, Artificial Sequence
  Description of Artificial Sequence: Synthetic oligonucleotide
  Sense strand starting at position 2949 of SEQ ID NO: 316785
cugguacugugguuugaaa

SEQ ID NO: 440354 - RNA, 19 nt, Artificial Sequence
  Description of Artificial Sequence: Synthetic oligonucleotide
  Antisense Strand to SEQ ID NO: 440353
uuucaaaccacaguaccag

SEQ ID NO: 440355 - RNA, 19 nt, Artificial Sequence
  Description of Artificial Sequence: Synthetic oligonucleotide
  Sense strand starting at position 2951 of SEQ ID NO: 316785
gguacugugguuugaaaua

SEQ ID NO: 440356 - RNA, 19 nt, Artificial Sequence
  Description of Artificial Sequence: Synthetic oligonucleotide
  Antisense Strand to SEQ ID NO: 440355
uauuucaaaccacaguacc

SEQ ID NO: 440357 - RNA, 19 nt, Artificial Sequence
  Description of Artificial Sequence: Synthetic oligonucleotide
  Sense strand starting at position 2956 of SEQ ID NO: 316785
ugugguuugaaauaauugu

SEQ ID NO: 440358 - RNA, 19 nt, Artificial Sequence
  Description of Artificial Sequence: Synthetic oligonucleotide
  Antisense Strand to SEQ ID NO: 440357
acaauuauuucaaaccaca

SEQ ID NO: 440359 - RNA, 19 nt, Artificial Sequence
  Description of Artificial Sequence: Synthetic oligonucleotide
  Sense strand starting at position 3346 of SEQ ID NO: 316785
gggccuuaaauaggugauu

SEQ ID NO: 440360 - RNA, 19 nt, Artificial Sequence
  Description of Artificial Sequence: Synthetic oligonucleotide
  Antisense Strand to SEQ ID NO: 440359
aaucaccuauuuaaggccc

SEQ ID NO: 440361 - RNA, 19 nt, Artificial Sequence
  Description of Artificial Sequence: Synthetic oligonucleotide
  Sense strand starting at position 3396 of SEQ ID NO: 316785
auggauuaauggguuguca

SEQ ID NO: 440362 - RNA, 19 nt, Artificial Sequence
  Description of Artificial Sequence: Synthetic oligonucleotide
  Antisense Strand to SEQ ID NO: 440361
ugacaacccauuaauccau

SEQ ID NO: 440363 - RNA, 19 nt, Artificial Sequence
  Description of Artificial Sequence: Synthetic oligonucleotide
  Sense strand starting at position 3405 of SEQ ID NO: 316785
uggguugucaugggagaga

SEQ ID NO: 440364 - RNA, 19 nt, Artificial Sequence
  Description of Artificial Sequence: Synthetic oligonucleotide
  Antisense Strand to SEQ ID NO: 440363
ucucucccaugacaaccca

SEQ ID NO: 440365 - RNA, 19 nt, Artificial Sequence
  Description of Artificial Sequence: Synthetic oligonucleotide
  Sense strand starting at position 3420 of SEQ ID NO: 316785
gagaacauguggcuuuauu

SEQ ID NO: 440366 - RNA, 19 nt, Artificial Sequence
  Description of Artificial Sequence: Synthetic oligonucleotide
  Antisense Strand to SEQ ID NO: 440365
aauaaagccacauguucuc

SEQ ID NO: 440367 - RNA, 19 nt, Artificial Sequence
  Description of Artificial Sequence: Synthetic oligonucleotide
  Sense strand starting at position 3716 of SEQ ID NO: 316785
uuuggagcuagaggauauu

SEQ ID NO: 440368 - RNA, 19 nt, Artificial Sequence
  Description of Artificial Sequence: Synthetic oligonucleotide
  Antisense Strand to SEQ ID NO: 440367
aauauccucuagcuccaaa

SEQ ID NO: 440369 - RNA, 19 nt, Artificial Sequence
  Description of Artificial Sequence: Synthetic oligonucleotide
  Sense strand starting at position 3729 of SEQ ID NO: 316785
gauauuacacagugagagu

SEQ ID NO: 440370 - RNA, 19 nt, Artificial Sequence
  Description of Artificial Sequence: Synthetic oligonucleotide
  Antisense Strand to SEQ ID NO: 440369
acucucacuguguaauauc

SEQ ID NO: 440371 - RNA, 19 nt, Artificial Sequence
  Description of Artificial Sequence: Synthetic oligonucleotide
  Sense strand starting at position 3742 of SEQ ID NO: 316785
gagaguaugccuuaguuua

SEQ ID NO: 440372 - RNA, 19 nt, Artificial Sequence
  Description of Artificial Sequence: Synthetic oligonucleotide
  Antisense Strand to SEQ ID NO: 440371
uaaacuaaggcauacucuc

SEQ ID NO: 440373 - RNA, 19 nt, Artificial Sequence
  Description of Artificial Sequence: Synthetic oligonucleotide
  Sense strand starting at position 100 of SEQ ID NO: 316786
uggaacugggcuuggaaau

SEQ ID NO: 440374 - RNA, 19 nt, Artificial Sequence
  Description of Artificial Sequence: Synthetic oligonucleotide
  Antisense Strand to SEQ ID NO: 440373
auuuccaagcccaguucca

SEQ ID NO: 440375 - RNA, 19 nt, Artificial Sequence
  Description of Artificial Sequence: Synthetic oligonucleotide
  Sense strand starting at position 113 of SEQ ID NO: 316786
ggaaaugcaugccucucaa

SEQ ID NO: 440376 - RNA, 19 nt, Artificial Sequence
  Description of Artificial Sequence: Synthetic oligonucleotide
  Antisense Strand to SEQ ID NO: 440375
uugagaggcaugcauuucc

SEQ ID NO: 440377 - RNA, 19 nt, Artificial Sequence
  Description of Artificial Sequence: Synthetic oligonucleotide
  Sense strand starting at position 223 of SEQ ID NO: 316786
gauagcugauuguuauaac

SEQ ID NO: 440378 - RNA, 19 nt, Artificial Sequence
  Description of Artificial Sequence: Synthetic oligonucleotide
  Antisense Strand to SEQ ID NO: 440377
guuauaacaaucagcuauc

SEQ ID NO: 440379 - RNA, 19 nt, Artificial Sequence
  Description of Artificial Sequence: Synthetic oligonucleotide
  Sense strand starting at position 372 of SEQ ID NO: 316786
uggcaaaugucaucaucua

SEQ ID NO: 440380 - RNA, 19 nt, Artificial Sequence
  Description of Artificial Sequence: Synthetic oligonucleotide
  Antisense Strand to SEQ ID NO: 440379
uagaugaugacauuugcca

SEQ ID NO: 440381 - RNA, 19 nt, Artificial Sequence
  Description of Artificial Sequence: Synthetic oligonucleotide
  Sense strand starting at position 373 of SEQ ID NO: 316786
ggcaaaugucaucaucuag

SEQ ID NO: 440382 - RNA, 19 nt, Artificial Sequence
  Description of Artificial Sequence: Synthetic oligonucleotide
  Antisense Strand to SEQ ID NO: 440381
cuagaugaugacauuugcc

SEQ ID NO: 440383 - RNA, 19 nt, Artificial Sequence
  Description of Artificial Sequence: Synthetic oligonucleotide
  Sense strand starting at position 597 of SEQ ID NO: 316786
uguccuuuggaguauaauu

SEQ ID NO: 440384 - RNA, 19 nt, Artificial Sequence
  Description of Artificial Sequence: Synthetic oligonucleotide
  Antisense Strand to SEQ ID NO: 440383
aauuauacuccaaaggaca

SEQ ID NO: 440385 - RNA, 19 nt, Artificial Sequence
  Description of Artificial Sequence: Synthetic oligonucleotide
  Sense strand starting at position 737 of SEQ ID NO: 316786
agaccagaguuccuugaaa

SEQ ID NO: 440386 - RNA, 19 nt, Artificial Sequence
  Description of Artificial Sequence: Synthetic oligonucleotide
  Antisense Strand to SEQ ID NO: 440385
uuucaaggaacucuggucu

SEQ ID NO: 440387 - RNA, 19 nt, Artificial Sequence
  Description of Artificial Sequence: Synthetic oligonucleotide
  Sense strand starting at position 739 of SEQ ID NO: 316786
accagaguuccuugaaagc

SEQ ID NO: 440388 - RNA, 19 nt, Artificial Sequence
  Description of Artificial Sequence: Synthetic oligonucleotide
  Antisense Strand to SEQ ID NO: 440387
gcuuucaaggaacucuggu

SEQ ID NO: 440389 - RNA, 19 nt, Artificial Sequence
  Description of Artificial Sequence: Synthetic oligonucleotide
  Sense strand starting at position 897 of SEQ ID NO: 316786
ugcggauaaagcgauagaa

SEQ ID NO: 440390 - RNA, 19 nt, Artificial Sequence
  Description of Artificial Sequence: Synthetic oligonucleotide
  Antisense Strand to SEQ ID NO: 440389
uucuaucgcuuuauccgca

SEQ ID NO: 440391 - RNA, 19 nt, Artificial Sequence
  Description of Artificial Sequence: Synthetic oligonucleotide
  Sense strand starting at position 926 of SEQ ID NO: 316786
guagguguuaauuaagaua

SEQ ID NO: 440392 - RNA, 19 nt, Artificial Sequence
  Description of Artificial Sequence: Synthetic oligonucleotide
  Antisense Strand to SEQ ID NO: 440391
uaucuuaauuaacaccuac

SEQ ID NO: 440393 - RNA, 19 nt, Artificial Sequence
  Description of Artificial Sequence: Synthetic oligonucleotide
  Sense strand starting at position 1032 of SEQ ID NO: 316786
aaaucuuugccuuaugggu

SEQ ID NO: 440394 - RNA, 19 nt, Artificial Sequence
  Description of Artificial Sequence: Synthetic oligonucleotide
  Antisense Strand to SEQ ID NO: 440393
acccauaaggcaaagauuu

SEQ ID NO: 440395 - RNA, 19 nt, Artificial Sequence
  Description of Artificial Sequence: Synthetic oligonucleotide
  Sense strand starting at position 1159 of SEQ ID NO: 316786
cuuugugggccuuacaaga

SEQ ID NO: 440396 - RNA, 19 nt, Artificial Sequence
  Description of Artificial Sequence: Synthetic oligonucleotide
  Antisense Strand to SEQ ID NO: 440395
ucuuguaaggcccacaaag

SEQ ID NO: 440397 - RNA, 19 nt, Artificial Sequence
  Description of Artificial Sequence: Synthetic oligonucleotide
  Sense strand starting at position 1235 of SEQ ID NO: 316786
ccgcuugagucaccauuua

SEQ ID NO: 440398 - RNA, 19 nt, Artificial Sequence
  Description of Artificial Sequence: Synthetic oligonucleotide
  Antisense Strand to SEQ ID NO: 440397
uaaauggugacucaagcgg

SEQ ID NO: 440399 - RNA, 19 nt, Artificial Sequence
  Description of Artificial Sequence: Synthetic oligonucleotide
  Sense strand starting at position 1252 of SEQ ID NO: 316786
uaaacaaguguuuguggaa

SEQ ID NO: 440400 - RNA, 19 nt, Artificial Sequence
  Description of Artificial Sequence: Synthetic oligonucleotide
  Antisense Strand to SEQ ID NO: 440399
uuccacaaacacuuguuua

SEQ ID NO: 440401 - RNA, 19 nt, Artificial Sequence
  Description of Artificial Sequence: Synthetic oligonucleotide
  Sense strand starting at position 1259 of SEQ ID NO: 316786
guguuuguggaaugagaau

SEQ ID NO: 440402 - RNA, 19 nt, Artificial Sequence
  Description of Artificial Sequence: Synthetic oligonucleotide
  Antisense Strand to SEQ ID NO: 440401
auucucauuccacaaacac

SEQ ID NO: 440403 - RNA, 19 nt, Artificial Sequence
  Description of Artificial Sequence: Synthetic oligonucleotide
  Sense strand starting at position 1959 of SEQ ID NO: 316786
ggcagaaccuuuccucauc

SEQ ID NO: 440404 - RNA, 19 nt, Artificial Sequence
  Description of Artificial Sequence: Synthetic oligonucleotide
  Antisense Strand to SEQ ID NO: 440403
gaugaggaaagguucugcc

SEQ ID NO: 440405 - RNA, 19 nt, Artificial Sequence
  Description of Artificial Sequence: Synthetic oligonucleotide
  Sense strand starting at position 2006 of SEQ ID NO: 316786
ucgcuuacucuagggagga

SEQ ID NO: 440406 - RNA, 19 nt, Artificial Sequence
  Description of Artificial Sequence: Synthetic oligonucleotide
  Antisense Strand to SEQ ID NO: 440405
uccucccuagaguaagcga

SEQ ID NO: 440407 - RNA, 19 nt, Artificial Sequence
  Description of Artificial Sequence: Synthetic oligonucleotide
  Sense strand starting at position 2099 of SEQ ID NO: 316786
acucgaucuugauugacuu

SEQ ID NO: 440408 - RNA, 19 nt, Artificial Sequence
  Description of Artificial Sequence: Synthetic oligonucleotide
  Antisense Strand to SEQ ID NO: 440407
aagucaaucaagaucgagu

SEQ ID NO: 440409 - RNA, 19 nt, Artificial Sequence
  Description of Artificial Sequence: Synthetic oligonucleotide
  Sense strand starting at position 2124 of SEQ ID NO: 316786
uccauuaucgggcaacacu

SEQ ID NO: 440410 - RNA, 19 nt, Artificial Sequence
  Description of Artificial Sequence: Synthetic oligonucleotide
  Antisense Strand to SEQ ID NO: 440409
aguguugcccgauaaugga

SEQ ID NO: 440411 - RNA, 19 nt, Artificial Sequence
  Description of Artificial Sequence: Synthetic oligonucleotide
  Sense strand starting at position 2206 of SEQ ID NO: 316786
uagaauaaguguuccaaag

SEQ ID NO: 440412 - RNA, 19 nt, Artificial Sequence
  Description of Artificial Sequence: Synthetic oligonucleotide
  Antisense Strand to SEQ ID NO: 440411
cuuuggaacacuuauucua

SEQ ID NO: 440413 - RNA, 19 nt, Artificial Sequence
  Description of Artificial Sequence: Synthetic oligonucleotide
  Sense strand starting at position 2212 of SEQ ID NO: 316786
aaguguuccaaagagucga

SEQ ID NO: 440414 - RNA, 19 nt, Artificial Sequence
  Description of Artificial Sequence: Synthetic oligonucleotide
  Antisense Strand to SEQ ID NO: 440413
ucgacucuuuggaacacuu

SEQ ID NO: 440415 - RNA, 19 nt, Artificial Sequence
  Description of Artificial Sequence: Synthetic oligonucleotide
  Sense strand starting at position 2233 of SEQ ID NO: 316786
ggaggaaguuggcuuuaua

SEQ ID NO: 440416 - RNA, 19 nt, Artificial Sequence
  Description of Artificial Sequence: Synthetic oligonucleotide
  Antisense Strand to SEQ ID NO: 440415
uauaaagccaacuuccucc

SEQ ID NO: 440417 - RNA, 19 nt, Artificial Sequence
  Description of Artificial Sequence: Synthetic oligonucleotide
  Sense strand starting at position 2236 of SEQ ID NO: 316786
ggaaguuggcuuuauagac

SEQ ID NO: 440418 - RNA, 19 nt, Artificial Sequence
  Description of Artificial Sequence: Synthetic oligonucleotide
  Antisense Strand to SEQ ID NO: 440417
gucuauaaagccaacuucc

SEQ ID NO: 440419 - RNA, 19 nt, Artificial Sequence
  Description of Artificial Sequence: Synthetic oligonucleotide
  Sense strand starting at position 2354 of SEQ ID NO: 316786
gaaauaacggauugguuaa

SEQ ID NO: 440420 - RNA, 19 nt, Artificial Sequence
  Description of Artificial Sequence: Synthetic oligonucleotide
  Antisense Strand to SEQ ID NO: 440419
uuaaccaauccguuauuuc

SEQ ID NO: 440421 - RNA, 19 nt, Artificial Sequence
  Description of Artificial Sequence: Synthetic oligonucleotide
  Sense strand starting at position 2410 of SEQ ID NO: 316786
cuuaauugucaugacgauu

SEQ ID NO: 440422 - RNA, 19 nt, Artificial Sequence
  Description of Artificial Sequence: Synthetic oligonucleotide
  Antisense Strand to SEQ ID NO: 440421
aaucgucaugacaauuaag

SEQ ID NO: 440423 - RNA, 19 nt, Artificial Sequence
  Description of Artificial Sequence: Synthetic oligonucleotide
  Sense strand starting at position 2413 of SEQ ID NO: 316786
aauugucaugacgauugca

SEQ ID NO: 440424 - RNA, 19 nt, Artificial Sequence
  Description of Artificial Sequence: Synthetic oligonucleotide
  Antisense Strand to SEQ ID NO: 440423
ugcaaucgucaugacaauu

SEQ ID NO: 440425 - RNA, 19 nt, Artificial Sequence
  Description of Artificial Sequence: Synthetic oligonucleotide
  Sense strand starting at position 2416 of SEQ ID NO: 316786
ugucaugacgauugcauuu

SEQ ID NO: 440426 - RNA, 19 nt, Artificial Sequence
  Description of Artificial Sequence: Synthetic oligonucleotide
  Antisense Strand to SEQ ID NO: 440425
aaaugcaaucgucaugaca

SEQ ID NO: 440427 - RNA, 19 nt, Artificial Sequence
  Description of Artificial Sequence: Synthetic oligonucleotide
  Sense strand starting at position 2434 of SEQ ID NO: 316786
uugaaauggccugguugga

SEQ ID NO: 440428 - RNA, 19 nt, Artificial Sequence
  Description of Artificial Sequence: Synthetic oligonucleotide
  Antisense Strand to SEQ ID NO: 440427
uccaaccaggccauuucaa

SEQ ID NO: 440429 - RNA, 19 nt, Artificial Sequence
  Description of Artificial Sequence: Synthetic oligonucleotide
  Sense strand starting at position 2509 of SEQ ID NO: 316786
uuaguuuggugacuuggaa

SEQ ID NO: 440430 - RNA, 19 nt, Artificial Sequence
  Description of Artificial Sequence: Synthetic oligonucleotide
  Antisense Strand to SEQ ID NO: 440429
uuccaagucaccaaacuaa

SEQ ID NO: 440431 - RNA, 19 nt, Artificial Sequence
  Description of Artificial Sequence: Synthetic oligonucleotide
  Sense strand starting at position 2727 of SEQ ID NO: 316786
gaagaauuugcguacacgu

SEQ ID NO: 440432 - RNA, 19 nt, Artificial Sequence
  Description of Artificial Sequence: Synthetic oligonucleotide
  Antisense Strand to SEQ ID NO: 440431
acguguacgcaaauucuuc

SEQ ID NO: 440433 - RNA, 19 nt, Artificial Sequence
  Description of Artificial Sequence: Synthetic oligonucleotide
  Sense strand starting at position 2812 of SEQ ID NO: 316786
aggguuaagggauguucau

SEQ ID NO: 440434 - RNA, 19 nt, Artificial Sequence
  Description of Artificial Sequence: Synthetic oligonucleotide
  Antisense Strand to SEQ ID NO: 440433
augaacaucccuuaacccu

SEQ ID NO: 440435 - RNA, 19 nt, Artificial Sequence
  Description of Artificial Sequence: Synthetic oligonucleotide
  Sense strand starting at position 3300 of SEQ ID NO: 316786
gaaguugacuuagucuuua

SEQ ID NO: 440436 - RNA, 19 nt, Artificial Sequence
  Description of Artificial Sequence: Synthetic oligonucleotide
  Antisense Strand to SEQ ID NO: 440435
uaaagacuaagucaacuuc

SEQ ID NO: 440437 - RNA, 19 nt, Artificial Sequence
  Description of Artificial Sequence: Synthetic oligonucleotide
  Sense strand starting at position 3427 of SEQ ID NO: 316786
gccuuucuccugccugcaa

SEQ ID NO: 440438 - RNA, 19 nt, Artificial Sequence
  Description of Artificial Sequence: Synthetic oligonucleotide
  Antisense Strand to SEQ ID NO: 440437
uugcaggcaggagaaaggc

SEQ ID NO: 440439 - RNA, 19 nt, Artificial Sequence
  Description of Artificial Sequence: Synthetic oligonucleotide
  Sense strand starting at position 3482 of SEQ ID NO: 316786
aguuguuagauuggagaug

SEQ ID NO: 440440 - RNA, 19 nt, Artificial Sequence
  Description of Artificial Sequence: Synthetic oligonucleotide
  Antisense Strand to SEQ ID NO: 440439
caucuccaaucuaacaacu

SEQ ID NO: 440441 - RNA, 19 nt, Artificial Sequence
  Description of Artificial Sequence: Synthetic oligonucleotide
  Sense strand starting at position 3494 of SEQ ID NO: 316786
ggagaugauuuagaucuga

SEQ ID NO: 440442 - RNA, 19 nt, Artificial Sequence
  Description of Artificial Sequence: Synthetic oligonucleotide
  Antisense Strand to SEQ ID NO: 440441
ucagaucuaaaucaucucc

SEQ ID NO: 440443 - RNA, 19 nt, Artificial Sequence
  Description of Artificial Sequence: Synthetic oligonucleotide
  Sense strand starting at position 3499 of SEQ ID NO: 316786
ugauuuagaucugacucaa

SEQ ID NO: 440444 - RNA, 19 nt, Artificial Sequence
  Description of Artificial Sequence: Synthetic oligonucleotide
  Antisense Strand to SEQ ID NO: 440443
uugagucagaucuaaauca

SEQ ID NO: 440445 - RNA, 19 nt, Artificial Sequence
  Description of Artificial Sequence: Synthetic oligonucleotide
  Sense strand starting at position 3784 of SEQ ID NO: 316786
gcuaauuuguaggacaaga

SEQ ID NO: 440446 - RNA, 19 nt, Artificial Sequence
  Description of Artificial Sequence: Synthetic oligonucleotide
  Antisense Strand to SEQ ID NO: 440445
ucuuguccuacaaauuagc

SEQ ID NO: 440447 - RNA, 19 nt, Artificial Sequence
  Description of Artificial Sequence: Synthetic oligonucleotide
  Sense strand starting at position 3815 of SEQ ID NO: 316786
agaguagagcccuaacuuu

SEQ ID NO: 440448 - RNA, 19 nt, Artificial Sequence
  Description of Artificial Sequence: Synthetic oligonucleotide
  Antisense Strand to SEQ ID NO: 440447
aaaguuagggcucuacucu

SEQ ID NO: 440449 - RNA, 19 nt, Artificial Sequence
  Description of Artificial Sequence: Synthetic oligonucleotide
  Sense strand starting at position 3833 of SEQ ID NO: 316786
ucaggagucuccucuagac

SEQ ID NO: 440450 - RNA, 19 nt, Artificial Sequence
  Description of Artificial Sequence: Synthetic oligonucleotide
  Antisense Strand to SEQ ID NO: 440449
gucuagaggagacuccuga

SEQ ID NO: 440451 - RNA, 19 nt, Artificial Sequence
  Description of Artificial Sequence: Synthetic oligonucleotide
  Sense strand starting at position 3864 of SEQ ID NO: 316786
acaguaugcccuugggaaa

SEQ ID NO: 440452 - RNA, 19 nt, Artificial Sequence
  Description of Artificial Sequence: Synthetic oligonucleotide
  Antisense Strand to SEQ ID NO: 440451
uuucccaagggcauacugu

SEQ ID NO: 440453 - RNA, 19 nt, Artificial Sequence
  Description of Artificial Sequence: Synthetic oligonucleotide
  Sense strand starting at position 45 of SEQ ID NO: 316787
acgugagucuaugcagaca

SEQ ID NO: 440454 - RNA, 19 nt, Artificial Sequence
  Description of Artificial Sequence: Synthetic oligonucleotide
  Antisense Strand to SEQ ID NO: 440453
ugucugcauagacucacgu

SEQ ID NO: 440455 - RNA, 19 nt, Artificial Sequence
  Description of Artificial Sequence: Synthetic oligonucleotide
  Sense strand starting at position 297 of SEQ ID NO: 316787
gcuuaaauguguccuugga

SEQ ID NO: 440456 - RNA, 19 nt, Artificial Sequence
  Description of Artificial Sequence: Synthetic oligonucleotide
  Antisense Strand to SEQ ID NO: 440455
uccaaggacacauuuaagc

SEQ ID NO: 440457 - RNA, 19 nt, Artificial Sequence
  Description of Artificial Sequence: Synthetic oligonucleotide
  Sense strand starting at position 299 of SEQ ID NO: 316787
uuaaauguguccuuggaca

SEQ ID NO: 440458 - RNA, 19 nt, Artificial Sequence
  Description of Artificial Sequence: Synthetic oligonucleotide
  Antisense Strand to SEQ ID NO: 440457
uguccaaggacacauuuaa

SEQ ID NO: 440459 - RNA, 19 nt, Artificial Sequence
  Description of Artificial Sequence: Synthetic oligonucleotide
  Sense strand starting at position 304 of SEQ ID NO: 316787
uguguccuuggacaauaau

SEQ ID NO: 440460 - RNA, 19 nt, Artificial Sequence
  Description of Artificial Sequence: Synthetic oligonucleotide
  Antisense Strand to SEQ ID NO: 440459
auuauuguccaaggacaca

SEQ ID NO: 440461 - RNA, 19 nt, Artificial Sequence
  Description of Artificial Sequence: Synthetic oligonucleotide
  Sense strand starting at position 385 of SEQ ID NO: 316787
cgcuuccaucgauaaguua

SEQ ID NO: 440462 - RNA, 19 nt, Artificial Sequence
  Description of Artificial Sequence: Synthetic oligonucleotide
  Antisense Strand to SEQ ID NO: 440461
uaacuuaucgauggaagcg

SEQ ID NO: 440463 - RNA, 19 nt, Artificial Sequence
  Description of Artificial Sequence: Synthetic oligonucleotide
  Sense strand starting at position 447 of SEQ ID NO: 316787
gccuaugucagucaucgaa

SEQ ID NO: 440464 - RNA, 19 nt, Artificial Sequence
  Description of Artificial Sequence: Synthetic oligonucleotide
  Antisense Strand to SEQ ID NO: 440463
uucgaugacugacauaggc

SEQ ID NO: 440465 - RNA, 19 nt, Artificial Sequence
  Description of Artificial Sequence: Synthetic oligonucleotide
  Sense strand starting at position 462 of SEQ ID NO: 316787
cgaagucuuguacaggagu

SEQ ID NO: 440466 - RNA, 19 nt, Artificial Sequence
  Description of Artificial Sequence: Synthetic oligonucleotide
  Antisense Strand to SEQ ID NO: 440465
acuccuguacaagacuucg

SEQ ID NO: 440467 - RNA, 19 nt, Artificial Sequence
  Description of Artificial Sequence: Synthetic oligonucleotide
  Sense strand starting at position 490 of SEQ ID NO: 316787
cagcgcaucguucucagaa

SEQ ID NO: 440468 - RNA, 19 nt, Artificial Sequence
  Description of Artificial Sequence: Synthetic oligonucleotide
  Antisense Strand to SEQ ID NO: 440467
uucugagaacgaugcgcug

SEQ ID NO: 440469 - RNA, 19 nt, Artificial Sequence
  Description of Artificial Sequence: Synthetic oligonucleotide
  Sense strand starting at position 506 of SEQ ID NO: 316787
gaaguuucccgcgggagga

SEQ ID NO: 440470 - RNA, 19 nt, Artificial Sequence
  Description of Artificial Sequence: Synthetic oligonucleotide
  Antisense Strand to SEQ ID NO: 440469
uccucccgcgggaaacuuc

SEQ ID NO: 440471 - RNA, 19 nt, Artificial Sequence
  Description of Artificial Sequence: Synthetic oligonucleotide
  Sense strand starting at position 507 of SEQ ID NO: 316787
aaguuucccgcgggaggaa

SEQ ID NO: 440472 - RNA, 19 nt, Artificial Sequence
  Description of Artificial Sequence: Synthetic oligonucleotide
  Antisense Strand to SEQ ID NO: 440471
uuccucccgcgggaaacuu

SEQ ID NO: 440473 - RNA, 19 nt, Artificial Sequence
  Description of Artificial Sequence: Synthetic oligonucleotide
  Sense strand starting at position 1069 of SEQ ID NO: 316787
cagguucacgccggagaaa

SEQ ID NO: 440474 - RNA, 19 nt, Artificial Sequence
  Description of Artificial Sequence: Synthetic oligonucleotide
  Antisense Strand to SEQ ID NO: 440473
uuucuccggcgugaaccug

SEQ ID NO: 440475 - RNA, 19 nt, Artificial Sequence
  Description of Artificial Sequence: Synthetic oligonucleotide
  Sense strand starting at position 1917 of SEQ ID NO: 316787
ggaggcacuacggaugauu

SEQ ID NO: 440476 - RNA, 19 nt, Artificial Sequence
  Description of Artificial Sequence: Synthetic oligonucleotide
  Antisense Strand to SEQ ID NO: 440475
aaucauccguagugccucc

SEQ ID NO: 440477 - RNA, 19 nt, Artificial Sequence
  Description of Artificial Sequence: Synthetic oligonucleotide
  Sense strand starting at position 2203 of SEQ ID NO: 316787
uuaaguuuaaguuguggaa

SEQ ID NO: 440478 - RNA, 19 nt, Artificial Sequence
  Description of Artificial Sequence: Synthetic oligonucleotide
  Antisense Strand to SEQ ID NO: 440477
uuccacaacuuaaacuuaa

SEQ ID NO: 440479 - RNA, 19 nt, Artificial Sequence
  Description of Artificial Sequence: Synthetic oligonucleotide
  Sense strand starting at position 2207 of SEQ ID NO: 316787
guuuaaguuguggaagacu

SEQ ID NO: 440480 - RNA, 19 nt, Artificial Sequence
  Description of Artificial Sequence: Synthetic oligonucleotide
  Antisense Strand to SEQ ID NO: 440479
agucuuccacaacuuaaac

SEQ ID NO: 440481 - RNA, 19 nt, Artificial Sequence
  Description of Artificial Sequence: Synthetic oligonucleotide
  Sense strand starting at position 2322 of SEQ ID NO: 316787
ggcgcuggcaauuaaagaa

SEQ ID NO: 440482 - RNA, 19 nt, Artificial Sequence
  Description of Artificial Sequence: Synthetic oligonucleotide
  Antisense Strand to SEQ ID NO: 440481
uucuuuaauugccagcgcc

SEQ ID NO: 440483 - RNA, 19 nt, Artificial Sequence
  Description of Artificial Sequence: Synthetic oligonucleotide
  Sense strand starting at position 2365 of SEQ ID NO: 316787
acguuuggaggccauuauu

SEQ ID NO: 440484 - RNA, 19 nt, Artificial Sequence
  Description of Artificial Sequence: Synthetic oligonucleotide
  Antisense Strand to SEQ ID NO: 440483
aauaauggccuccaaacgu

SEQ ID NO: 440485 - RNA, 19 nt, Artificial Sequence
  Description of Artificial Sequence: Synthetic oligonucleotide
  Sense strand starting at position 2383 of SEQ ID NO: 316787
uugcaucaggcauauggaa

SEQ ID NO: 440486 - RNA, 19 nt, Artificial Sequence
  Description of Artificial Sequence: Synthetic oligonucleotide
  Antisense Strand to SEQ ID NO: 440485
uuccauaugccugaugcaa

SEQ ID NO: 440487 - RNA, 19 nt, Artificial Sequence
  Description of Artificial Sequence: Synthetic oligonucleotide
  Sense strand starting at position 2402 of SEQ ID NO: 316787
acuugcguucuguuaggua

SEQ ID NO: 440488 - RNA, 19 nt, Artificial Sequence
  Description of Artificial Sequence: Synthetic oligonucleotide
  Antisense Strand to SEQ ID NO: 440487
uaccuaacagaacgcaagu

SEQ ID NO: 440489 - RNA, 19 nt, Artificial Sequence
  Description of Artificial Sequence: Synthetic oligonucleotide
  Sense strand starting at position 2409 of SEQ ID NO: 316787
uucuguuagguaugcugaa

SEQ ID NO: 440490 - RNA, 19 nt, Artificial Sequence
  Description of Artificial Sequence: Synthetic oligonucleotide
  Antisense Strand to SEQ ID NO: 440489
uucagcauaccuaacagaa

SEQ ID NO: 440491 - RNA, 19 nt, Artificial Sequence
  Description of Artificial Sequence: Synthetic oligonucleotide
  Sense strand starting at position 2440 of SEQ ID NO: 316787
gccagacugccugagucuu

SEQ ID NO: 440492 - RNA, 19 nt, Artificial Sequence
  Description of Artificial Sequence: Synthetic oligonucleotide
  Antisense Strand to SEQ ID NO: 440491
aagacucaggcagucuggc

SEQ ID NO: 440493 - RNA, 19 nt, Artificial Sequence
  Description of Artificial Sequence: Synthetic oligonucleotide
  Sense strand starting at position 2514 of SEQ ID NO: 316787
guuccugauuuccugcaga

SEQ ID NO: 440494 - RNA, 19 nt, Artificial Sequence
  Description of Artificial Sequence: Synthetic oligonucleotide
  Antisense Strand to SEQ ID NO: 440493
ucugcaggaaaucaggaac

SEQ ID NO: 440495 - RNA, 19 nt, Artificial Sequence
  Description of Artificial Sequence: Synthetic oligonucleotide
  Sense strand starting at position 2841 of SEQ ID NO: 316787
ccaagcacuuguucuugaa

SEQ ID NO: 440496 - RNA, 19 nt, Artificial Sequence
  Description of Artificial Sequence: Synthetic oligonucleotide
  Antisense Strand to SEQ ID NO: 440495
uucaagaacaagugcuugg

SEQ ID NO: 440497 - RNA, 19 nt, Artificial Sequence
  Description of Artificial Sequence: Synthetic oligonucleotide
  Sense strand starting at position 2845 of SEQ ID NO: 316787
gcacuuguucuugaacauu

SEQ ID NO: 440498 - RNA, 19 nt, Artificial Sequence
  Description of Artificial Sequence: Synthetic oligonucleotide
  Antisense Strand to SEQ ID NO: 440497
aauguucaagaacaagugc

SEQ ID NO: 440499 - RNA, 19 nt, Artificial Sequence
  Description of Artificial Sequence: Synthetic oligonucleotide
  Sense strand starting at position 2856 of SEQ ID NO: 316787
ugaacauuauugcugagaa

SEQ ID NO: 440500 - RNA, 19 nt, Artificial Sequence
  Description of Artificial Sequence: Synthetic oligonucleotide
  Antisense Strand to SEQ ID NO: 440499
uucucagcaauaauguuca

SEQ ID NO: 440501 - RNA, 19 nt, Artificial Sequence
  Description of Artificial Sequence: Synthetic oligonucleotide
  Sense strand starting at position 2911 of SEQ ID NO: 316787
uuguuucugaagugagauc

SEQ ID NO: 440502 - RNA, 19 nt, Artificial Sequence
  Description of Artificial Sequence: Synthetic oligonucleotide
  Antisense Strand to SEQ ID NO: 440501
gaucucacuucagaaacaa

SEQ ID NO: 440503 - RNA, 19 nt, Artificial Sequence
  Description of Artificial Sequence: Synthetic oligonucleotide
  Sense strand starting at position 2912 of SEQ ID NO: 316787
uguuucugaagugagauca

SEQ ID NO: 440504 - RNA, 19 nt, Artificial Sequence
  Description of Artificial Sequence: Synthetic oligonucleotide
  Antisense Strand to SEQ ID NO: 440503
ugaucucacuucagaaaca

SEQ ID NO: 440505 - RNA, 19 nt, Artificial Sequence
  Description of Artificial Sequence: Synthetic oligonucleotide
  Sense strand starting at position 2987 of SEQ ID NO: 316787
auucuaacauccgauuugu

SEQ ID NO: 440506 - RNA, 19 nt, Artificial Sequence
  Description of Artificial Sequence: Synthetic oligonucleotide
  Antisense Strand to SEQ ID NO: 440505
acaaaucggauguuagaau

SEQ ID NO: 440507 - RNA, 19 nt, Artificial Sequence
  Description of Artificial Sequence: Synthetic oligonucleotide
  Sense strand starting at position 2993 of SEQ ID NO: 316787
acauccgauuuguaaacca

SEQ ID NO: 440508 - RNA, 19 nt, Artificial Sequence
  Description of Artificial Sequence: Synthetic oligonucleotide
  Antisense Strand to SEQ ID NO: 440507
ugguuuacaaaucggaugu

SEQ ID NO: 440509 - RNA, 19 nt, Artificial Sequence
  Description of Artificial Sequence: Synthetic oligonucleotide
  Sense strand starting at position 3001 of SEQ ID NO: 316787
uuuguaaaccaguaucuga

SEQ ID NO: 440510 - RNA, 19 nt, Artificial Sequence
  Description of Artificial Sequence: Synthetic oligonucleotide
  Antisense Strand to SEQ ID NO: 440509
ucagauacugguuuacaaa

SEQ ID NO: 440511 - RNA, 19 nt, Artificial Sequence
  Description of Artificial Sequence: Synthetic oligonucleotide
  Sense strand starting at position 3066 of SEQ ID NO: 316787
gugucauacuaagcacuuu

SEQ ID NO: 440512 - RNA, 19 nt, Artificial Sequence
  Description of Artificial Sequence: Synthetic oligonucleotide
  Antisense Strand to SEQ ID NO: 440511
aaagugcuuaguaugacac

SEQ ID NO: 440513 - RNA, 19 nt, Artificial Sequence
  Description of Artificial Sequence: Synthetic oligonucleotide
  Sense strand starting at position 3238 of SEQ ID NO: 316787
ucuggauuguguucuuacu

SEQ ID NO: 440514 - RNA, 19 nt, Artificial Sequence
  Description of Artificial Sequence: Synthetic oligonucleotide
  Antisense Strand to SEQ ID NO: 440513
aguaagaacacaauccaga

SEQ ID NO: 440515 - RNA, 19 nt, Artificial Sequence
  Description of Artificial Sequence: Synthetic oligonucleotide
  Sense strand starting at position 3240 of SEQ ID NO: 316787
uggauuguguucuuacuaa

SEQ ID NO: 440516 - RNA, 19 nt, Artificial Sequence
  Description of Artificial Sequence: Synthetic oligonucleotide
  Antisense Strand to SEQ ID NO: 440515
uuaguaagaacacaaucca

SEQ ID NO: 440517 - RNA, 19 nt, Artificial Sequence
  Description of Artificial Sequence: Synthetic oligonucleotide
  Sense strand starting at position 3493 of SEQ ID NO: 316787
uagcuacgucaguggauuu

SEQ ID NO: 440518 - RNA, 19 nt, Artificial Sequence
  Description of Artificial Sequence: Synthetic oligonucleotide
  Antisense Strand to SEQ ID NO: 440517
aaauccacugacguagcua

SEQ ID NO: 440519 - RNA, 19 nt, Artificial Sequence
  Description of Artificial Sequence: Synthetic oligonucleotide
  Sense strand starting at position 3511 of SEQ ID NO: 316787
ugagauagggucgaucagu

SEQ ID NO: 440520 - RNA, 19 nt, Artificial Sequence
  Description of Artificial Sequence: Synthetic oligonucleotide
  Antisense Strand to SEQ ID NO: 440519
acugaucgacccuaucuca

SEQ ID NO: 440521 - RNA, 19 nt, Artificial Sequence
  Description of Artificial Sequence: Synthetic oligonucleotide
  Sense strand starting at position 3522 of SEQ ID NO: 316787
cgaucagucucccucacuu

SEQ ID NO: 440522 - RNA, 19 nt, Artificial Sequence
  Description of Artificial Sequence: Synthetic oligonucleotide
  Antisense Strand to SEQ ID NO: 440521
aagugagggagacugaucg

SEQ ID NO: 440523 - RNA, 19 nt, Artificial Sequence
  Description of Artificial Sequence: Synthetic oligonucleotide
  Sense strand starting at position 3569 of SEQ ID NO: 316787
agcuaauugcauuaauggu

SEQ ID NO: 440524 - RNA, 19 nt, Artificial Sequence
  Description of Artificial Sequence: Synthetic oligonucleotide
  Antisense Strand to SEQ ID NO: 440523
accauuaaugcaauuagcu

SEQ ID NO: 440525 - RNA, 19 nt, Artificial Sequence
  Description of Artificial Sequence: Synthetic oligonucleotide
  Sense strand starting at position 3669 of SEQ ID NO: 316787
ugagguauucuuugcauga

SEQ ID NO: 440526 - RNA, 19 nt, Artificial Sequence
  Description of Artificial Sequence: Synthetic oligonucleotide
  Antisense Strand to SEQ ID NO: 440525
ucaugcaaagaauaccuca

SEQ ID NO: 440527 - RNA, 19 nt, Artificial Sequence
  Description of Artificial Sequence: Synthetic oligonucleotide
  Sense strand starting at position 3670 of SEQ ID NO: 316787
gagguauucuuugcaugaa

SEQ ID NO: 440528 - RNA, 19 nt, Artificial Sequence
  Description of Artificial Sequence: Synthetic oligonucleotide
  Antisense Strand to SEQ ID NO: 440527
uucaugcaaagaauaccuc

SEQ ID NO: 440529 - RNA, 19 nt, Artificial Sequence
  Description of Artificial Sequence: Synthetic oligonucleotide
  Sense strand starting at position 3673 of SEQ ID NO: 316787
guauucuuugcaugaaggu

SEQ ID NO: 440530 - RNA, 19 nt, Artificial Sequence
  Description of Artificial Sequence: Synthetic oligonucleotide
  Antisense Strand to SEQ ID NO: 440529
accuucaugcaaagaauac

SEQ ID NO: 440531 - RNA, 19 nt, Artificial Sequence
  Description of Artificial Sequence: Synthetic oligonucleotide
  Sense strand starting at position 3674 of SEQ ID NO: 316787
uauucuuugcaugaaggua

SEQ ID NO: 440532 - RNA, 19 nt, Artificial Sequence
  Description of Artificial Sequence: Synthetic oligonucleotide
  Antisense Strand to SEQ ID NO: 440531
uaccuucaugcaaagaaua

SEQ ID NO: 440533 - RNA, 19 nt, Artificial Sequence
  Description of Artificial Sequence: Synthetic oligonucleotide
  Sense strand starting at position 242 of SEQ ID NO: 316788
uggucuuacguggauauaa

SEQ ID NO: 440534 - RNA, 19 nt, Artificial Sequence
  Description of Artificial Sequence: Synthetic oligonucleotide
  Antisense Strand to SEQ ID NO: 440533
uuauauccacguaagacca

SEQ ID NO: 440535 - RNA, 19 nt, Artificial Sequence
  Description of Artificial Sequence: Synthetic oligonucleotide
  Sense strand starting at position 244 of SEQ ID NO: 316788
gucuuacguggauauaauu

SEQ ID NO: 440536 - RNA, 19 nt, Artificial Sequence
  Description of Artificial Sequence: Synthetic oligonucleotide
  Antisense Strand to SEQ ID NO: 440535
aauuauauccacguaagac

SEQ ID NO: 440537 - RNA, 19 nt, Artificial Sequence
  Description of Artificial Sequence: Synthetic oligonucleotide
  Sense strand starting at position 250 of SEQ ID NO: 316788
cguggauauaauuagcuua

SEQ ID NO: 440538 - RNA, 19 nt, Artificial Sequence
  Description of Artificial Sequence: Synthetic oligonucleotide
  Antisense Strand to SEQ ID NO: 440537
uaagcuaauuauauccacg

SEQ ID NO: 440539 - RNA, 19 nt, Artificial Sequence
  Description of Artificial Sequence: Synthetic oligonucleotide
  Sense strand starting at position 253 of SEQ ID NO: 316788
ggauauaauuagcuuaccu

SEQ ID NO: 440540 - RNA, 19 nt, Artificial Sequence
  Description of Artificial Sequence: Synthetic oligonucleotide
  Antisense Strand to SEQ ID NO: 440539
agguaagcuaauuauaucc

SEQ ID NO: 440541 - RNA, 19 nt, Artificial Sequence
  Description of Artificial Sequence: Synthetic oligonucleotide
  Sense strand starting at position 311 of SEQ ID NO: 316788
ugcaacuucuugguuaaga

SEQ ID NO: 440542 - RNA, 19 nt, Artificial Sequence
  Description of Artificial Sequence: Synthetic oligonucleotide
  Antisense Strand to SEQ ID NO: 440541
ucuuaaccaagaaguugca

SEQ ID NO: 440543 - RNA, 19 nt, Artificial Sequence
  Description of Artificial Sequence: Synthetic oligonucleotide
  Sense strand starting at position 345 of SEQ ID NO: 316788
uuuauuucuggcugcaaau

SEQ ID NO: 440544 - RNA, 19 nt, Artificial Sequence
  Description of Artificial Sequence: Synthetic oligonucleotide
  Antisense Strand to SEQ ID NO: 440543
auuugcagccagaaauaaa

SEQ ID NO: 440545 - RNA, 19 nt, Artificial Sequence
  Description of Artificial Sequence: Synthetic oligonucleotide
  Sense strand starting at position 389 of SEQ ID NO: 316788
uuguuaugagcacauaaag

SEQ ID NO: 440546 - RNA, 19 nt, Artificial Sequence
  Description of Artificial Sequence: Synthetic oligonucleotide
  Antisense Strand to SEQ ID NO: 440545
cuuuaugugcucauaacaa

SEQ ID NO: 440547 - RNA, 19 nt, Artificial Sequence
  Description of Artificial Sequence: Synthetic oligonucleotide
  Sense strand starting at position 467 of SEQ ID NO: 316788
guaguuuacugaucauauc

SEQ ID NO: 440548 - RNA, 19 nt, Artificial Sequence
  Description of Artificial Sequence: Synthetic oligonucleotide
  Antisense Strand to SEQ ID NO: 440547
gauaugaucaguaaacuac

SEQ ID NO: 440549 - RNA, 19 nt, Artificial Sequence
  Description of Artificial Sequence: Synthetic oligonucleotide
  Sense strand starting at position 498 of SEQ ID NO: 316788
uucuaagcacaagauguua

SEQ ID NO: 440550 - RNA, 19 nt, Artificial Sequence
  Description of Artificial Sequence: Synthetic oligonucleotide
  Antisense Strand to SEQ ID NO: 440549
uaacaucuugugcuuagaa

SEQ ID NO: 440551 - RNA, 19 nt, Artificial Sequence
  Description of Artificial Sequence: Synthetic oligonucleotide
  Sense strand starting at position 728 of SEQ ID NO: 316788
aacagcaguuuguuaagaa

SEQ ID NO: 440552 - RNA, 19 nt, Artificial Sequence
  Description of Artificial Sequence: Synthetic oligonucleotide
  Antisense Strand to SEQ ID NO: 440551
uucuuaacaaacugcuguu

SEQ ID NO: 440553 - RNA, 19 nt, Artificial Sequence
  Description of Artificial Sequence: Synthetic oligonucleotide
  Sense strand starting at position 758 of SEQ ID NO: 316788
cugugauagccacaaauca

SEQ ID NO: 440554 - RNA, 19 nt, Artificial Sequence
  Description of Artificial Sequence: Synthetic oligonucleotide
  Antisense Strand to SEQ ID NO: 440553
ugauuuguggcuaucacag

SEQ ID NO: 440555 - RNA, 19 nt, Artificial Sequence
  Description of Artificial Sequence: Synthetic oligonucleotide
  Sense strand starting at position 849 of SEQ ID NO: 316788
ugcugauuccguuccuguu

SEQ ID NO: 440556 - RNA, 19 nt, Artificial Sequence
  Description of Artificial Sequence: Synthetic oligonucleotide
  Antisense Strand to SEQ ID NO: 440555
aacaggaacggaaucagca

SEQ ID NO: 440557 - RNA, 19 nt, Artificial Sequence
  Description of Artificial Sequence: Synthetic oligonucleotide
  Sense strand starting at position 1015 of SEQ ID NO: 316788
cuagccugauuccucagaa

SEQ ID NO: 440558 - RNA, 19 nt, Artificial Sequence
  Description of Artificial Sequence: Synthetic oligonucleotide
  Antisense Strand to SEQ ID NO: 440557
uucugaggaaucaggcuag

SEQ ID NO: 440559 - RNA, 19 nt, Artificial Sequence
  Description of Artificial Sequence: Synthetic oligonucleotide
  Sense strand starting at position 1130 of SEQ ID NO: 316788
aguaguuucuuccuaauaa

SEQ ID NO: 440560 - RNA, 19 nt, Artificial Sequence
  Description of Artificial Sequence: Synthetic oligonucleotide
  Antisense Strand to SEQ ID NO: 440559
uuauuaggaagaaacuacu

SEQ ID NO: 440561 - RNA, 19 nt, Artificial Sequence
  Description of Artificial Sequence: Synthetic oligonucleotide
  Sense strand starting at position 1229 of SEQ ID NO: 316788
agguuucgccaacacaauu

SEQ ID NO: 440562 - RNA, 19 nt, Artificial Sequence
  Description of Artificial Sequence: Synthetic oligonucleotide
  Antisense Strand to SEQ ID NO: 440561
aauuguguuggcgaaaccu

SEQ ID NO: 440563 - RNA, 19 nt, Artificial Sequence
  Description of Artificial Sequence: Synthetic oligonucleotide
  Sense strand starting at position 1254 of SEQ ID NO: 316788
gcgacugauuucuuugucu

SEQ ID NO: 440564 - RNA, 19 nt, Artificial Sequence
  Description of Artificial Sequence: Synthetic oligonucleotide
  Antisense Strand to SEQ ID NO: 440563
agacaaagaaaucagucgc

SEQ ID NO: 440565 - RNA, 19 nt, Artificial Sequence
  Description of Artificial Sequence: Synthetic oligonucleotide
  Sense strand starting at position 1303 of SEQ ID NO: 316788
uugugcuuggagcacaaau

SEQ ID NO: 440566 - RNA, 19 nt, Artificial Sequence
  Description of Artificial Sequence: Synthetic oligonucleotide
  Antisense Strand to SEQ ID NO: 440565
auuugugcuccaagcacaa

SEQ ID NO: 440567 - RNA, 19 nt, Artificial Sequence
  Description of Artificial Sequence: Synthetic oligonucleotide
  Sense strand starting at position 1427 of SEQ ID NO: 316788
uggucacgaugauuaaaca

SEQ ID NO: 440568 - RNA, 19 nt, Artificial Sequence
  Description of Artificial Sequence: Synthetic oligonucleotide
  Antisense Strand to SEQ ID NO: 440567
uguuuaaucaucgugacca

SEQ ID NO: 440569 - RNA, 19 nt, Artificial Sequence
  Description of Artificial Sequence: Synthetic oligonucleotide
  Sense strand starting at position 2062 of SEQ ID NO: 316788
guggaugugacgcaagaga

SEQ ID NO: 440570 - RNA, 19 nt, Artificial Sequence
  Description of Artificial Sequence: Synthetic oligonucleotide
  Antisense Strand to SEQ ID NO: 440569
ucucuugcgucacauccac

SEQ ID NO: 440571 - RNA, 19 nt, Artificial Sequence
  Description of Artificial Sequence: Synthetic oligonucleotide
  Sense strand starting at position 2239 of SEQ ID NO: 316788
agcucucgccuuguaaagu

SEQ ID NO: 440572 - RNA, 19 nt, Artificial Sequence
  Description of Artificial Sequence: Synthetic oligonucleotide
  Antisense Strand to SEQ ID NO: 440571
acuuuacaaggcgagagcu

SEQ ID NO: 440573 - RNA, 19 nt, Artificial Sequence
  Description of Artificial Sequence: Synthetic oligonucleotide
  Sense strand starting at position 2260 of SEQ ID NO: 316788
aucuacaccguguaacuua

SEQ ID NO: 440574 - RNA, 19 nt, Artificial Sequence
  Description of Artificial Sequence: Synthetic oligonucleotide
  Antisense Strand to SEQ ID NO: 440573
uaaguuacacgguguagau

SEQ ID NO: 440575 - RNA, 19 nt, Artificial Sequence
  Description of Artificial Sequence: Synthetic oligonucleotide
  Sense strand starting at position 2385 of SEQ ID NO: 316788
uuccguuagcgauuacgau

SEQ ID NO: 440576 - RNA, 19 nt, Artificial Sequence
  Description of Artificial Sequence: Synthetic oligonucleotide
  Antisense Strand to SEQ ID NO: 440575
aucguaaucgcuaacggaa

SEQ ID NO: 440577 - RNA, 19 nt, Artificial Sequence
  Description of Artificial Sequence: Synthetic oligonucleotide
  Sense strand starting at position 2391 of SEQ ID NO: 316788
uagcgauuacgauagauua

SEQ ID NO: 440578 - RNA, 19 nt, Artificial Sequence
  Description of Artificial Sequence: Synthetic oligonucleotide
  Antisense Strand to SEQ ID NO: 440577
uaaucuaucguaaucgcua

SEQ ID NO: 440579 - RNA, 19 nt, Artificial Sequence
  Description of Artificial Sequence: Synthetic oligonucleotide
  Sense strand starting at position 2393 of SEQ ID NO: 316788
gcgauuacgauagauuauc

SEQ ID NO: 440580 - RNA, 19 nt, Artificial Sequence
  Description of Artificial Sequence: Synthetic oligonucleotide
  Antisense Strand to SEQ ID NO: 440579
gauaaucuaucguaaucgc

SEQ ID NO: 440581 - RNA, 19 nt, Artificial Sequence
  Description of Artificial Sequence: Synthetic oligonucleotide
  Sense strand starting at position 2479 of SEQ ID NO: 316788
aguguuaagcacgagggau

SEQ ID NO: 440582 - RNA, 19 nt, Artificial Sequence
  Description of Artificial Sequence: Synthetic oligonucleotide
  Antisense Strand to SEQ ID NO: 440581
aucccucgugcuuaacacu

SEQ ID NO: 440583 - RNA, 19 nt, Artificial Sequence
  Description of Artificial Sequence: Synthetic oligonucleotide
  Sense strand starting at position 2563 of SEQ ID NO: 316788
aacugaauuucuucggugu

SEQ ID NO: 440584 - RNA, 19 nt, Artificial Sequence
  Description of Artificial Sequence: Synthetic oligonucleotide
  Antisense Strand to SEQ ID NO: 440583
acaccgaagaaauucaguu

SEQ ID NO: 440585 - RNA, 19 nt, Artificial Sequence
  Description of Artificial Sequence: Synthetic oligonucleotide
  Sense strand starting at position 2564 of SEQ ID NO: 316788
acugaauuucuucgguguu

SEQ ID NO: 440586 - RNA, 19 nt, Artificial Sequence
  Description of Artificial Sequence: Synthetic oligonucleotide
  Antisense Strand to SEQ ID NO: 440585
aacaccgaagaaauucagu

SEQ ID NO: 440587 - RNA, 19 nt, Artificial Sequence
  Description of Artificial Sequence: Synthetic oligonucleotide
  Sense strand starting at position 2645 of SEQ ID NO: 316788
ggaaacuaucacuggcagu

SEQ ID NO: 440588 - RNA, 19 nt, Artificial Sequence
  Description of Artificial Sequence: Synthetic oligonucleotide
  Antisense Strand to SEQ ID NO: 440587
acugccagugauaguuucc

SEQ ID NO: 440589 - RNA, 19 nt, Artificial Sequence
  Description of Artificial Sequence: Synthetic oligonucleotide
  Sense strand starting at position 2666 of SEQ ID NO: 316788
ggugaauuccuugaguuua

SEQ ID NO: 440590 - RNA, 19 nt, Artificial Sequence
  Description of Artificial Sequence: Synthetic oligonucleotide
  Antisense Strand to SEQ ID NO: 440589
uaaacucaaggaauucacc

SEQ ID NO: 440591 - RNA, 19 nt, Artificial Sequence
  Description of Artificial Sequence: Synthetic oligonucleotide
  Sense strand starting at position 2668 of SEQ ID NO: 316788
ugaauuccuugaguuuacu

SEQ ID NO: 440592 - RNA, 19 nt, Artificial Sequence
  Description of Artificial Sequence: Synthetic oligonucleotide
  Antisense Strand to SEQ ID NO: 440591
aguaaacucaaggaauuca

SEQ ID NO: 440593 - RNA, 19 nt, Artificial Sequence
  Description of Artificial Sequence: Synthetic oligonucleotide
  Sense strand starting at position 2731 of SEQ ID NO: 316788
ugucuucugguuuaaagga

SEQ ID NO: 440594 - RNA, 19 nt, Artificial Sequence
  Description of Artificial Sequence: Synthetic oligonucleotide
  Antisense Strand to SEQ ID NO: 440593
uccuuuaaaccagaagaca

SEQ ID NO: 440595 - RNA, 19 nt, Artificial Sequence
  Description of Artificial Sequence: Synthetic oligonucleotide
  Sense strand starting at position 2744 of SEQ ID NO: 316788
aaaggaauacguugaaucu

SEQ ID NO: 440596 - RNA, 19 nt, Artificial Sequence
  Description of Artificial Sequence: Synthetic oligonucleotide
  Antisense Strand to SEQ ID NO: 440595
agauucaacguauuccuuu

SEQ ID NO: 440597 - RNA, 19 nt, Artificial Sequence
  Description of Artificial Sequence: Synthetic oligonucleotide
  Sense strand starting at position 2810 of SEQ ID NO: 316788
uggaauguuguggaggagu

SEQ ID NO: 440598 - RNA, 19 nt, Artificial Sequence
  Description of Artificial Sequence: Synthetic oligonucleotide
  Antisense Strand to SEQ ID NO: 440597
acuccuccacaacauucca

SEQ ID NO: 440599 - RNA, 19 nt, Artificial Sequence
  Description of Artificial Sequence: Synthetic oligonucleotide
  Sense strand starting at position 2812 of SEQ ID NO: 316788
gaauguuguggaggaguuu

SEQ ID NO: 440600 - RNA, 19 nt, Artificial Sequence
  Description of Artificial Sequence: Synthetic oligonucleotide
  Antisense Strand to SEQ ID NO: 440599
aaacuccuccacaacauuc

SEQ ID NO: 440601 - RNA, 19 nt, Artificial Sequence
  Description of Artificial Sequence: Synthetic oligonucleotide
  Sense strand starting at position 2821 of SEQ ID NO: 316788
ggaggaguuuccucaccga

SEQ ID NO: 440602 - RNA, 19 nt, Artificial Sequence
  Description of Artificial Sequence: Synthetic oligonucleotide
  Antisense Strand to SEQ ID NO: 440601
ucggugaggaaacuccucc

SEQ ID NO: 440603 - RNA, 19 nt, Artificial Sequence
  Description of Artificial Sequence: Synthetic oligonucleotide
  Sense strand starting at position 2867 of SEQ ID NO: 316788
auauguugugaggaguaaa

SEQ ID NO: 440604 - RNA, 19 nt, Artificial Sequence
  Description of Artificial Sequence: Synthetic oligonucleotide
  Antisense Strand to SEQ ID NO: 440603
uuuacuccucacaacauau

SEQ ID NO: 440605 - RNA, 19 nt, Artificial Sequence
  Description of Artificial Sequence: Synthetic oligonucleotide
  Sense strand starting at position 2936 of SEQ ID NO: 316788
caacaauguuggguaaugu

SEQ ID NO: 440606 - RNA, 19 nt, Artificial Sequence
  Description of Artificial Sequence: Synthetic oligonucleotide
  Antisense Strand to SEQ ID NO: 440605
acauuacccaacauuguug

SEQ ID NO: 440607 - RNA, 19 nt, Artificial Sequence
  Description of Artificial Sequence: Synthetic oligonucleotide
  Sense strand starting at position 3007 of SEQ ID NO: 316788
acgauaacuuucucaggau

SEQ ID NO: 440608 - RNA, 19 nt, Artificial Sequence
  Description of Artificial Sequence: Synthetic oligonucleotide
  Antisense Strand to SEQ ID NO: 440607
auccugagaaaguuaucgu

SEQ ID NO: 440609 - RNA, 19 nt, Artificial Sequence
  Description of Artificial Sequence: Synthetic oligonucleotide
  Sense strand starting at position 3321 of SEQ ID NO: 316788
gaaguuagagaucagccuu

SEQ ID NO: 440610 - RNA, 19 nt, Artificial Sequence
  Description of Artificial Sequence: Synthetic oligonucleotide
  Antisense Strand to SEQ ID NO: 440609
aaggcugaucucuaacuuc

SEQ ID NO: 440611 - RNA, 19 nt, Artificial Sequence
  Description of Artificial Sequence: Synthetic oligonucleotide
  Sense strand starting at position 3904 of SEQ ID NO: 316788
auagguacuguuuauacaa

SEQ ID NO: 440612 - RNA, 19 nt, Artificial Sequence
  Description of Artificial Sequence: Synthetic oligonucleotide
  Antisense Strand to SEQ ID NO: 440611
uuguauaaacaguaccuau

SEQ ID NO: 440613 - RNA, 19 nt, Artificial Sequence
  Description of Artificial Sequence: Synthetic oligonucleotide
  Sense strand starting at position 312 of SEQ ID NO: 316789
ucuauauggucuuuacaag

SEQ ID NO: 440614 - RNA, 19 nt, Artificial Sequence
  Description of Artificial Sequence: Synthetic oligonucleotide
  Antisense Strand to SEQ ID NO: 440613
cuuguaaagaccauauaga

SEQ ID NO: 440615 - RNA, 19 nt, Artificial Sequence
  Description of Artificial Sequence: Synthetic oligonucleotide
  Sense strand starting at position 318 of SEQ ID NO: 316789
uggucuuuacaagaagggu

SEQ ID NO: 440616 - RNA, 19 nt, Artificial Sequence
  Description of Artificial Sequence: Synthetic oligonucleotide
  Antisense Strand to SEQ ID NO: 440615
acccuucuuguaaagacca

SEQ ID NO: 440617 - RNA, 19 nt, Artificial Sequence
  Description of Artificial Sequence: Synthetic oligonucleotide
  Sense strand starting at position 557 of SEQ ID NO: 316789
aucucuugucucugaagag

SEQ ID NO: 440618 - RNA, 19 nt, Artificial Sequence
  Description of Artificial Sequence: Synthetic oligonucleotide
  Antisense Strand to SEQ ID NO: 440617
cucuucagagacaagagau

SEQ ID NO: 440619 - RNA, 19 nt, Artificial Sequence
  Description of Artificial Sequence: Synthetic oligonucleotide
  Sense strand starting at position 594 of SEQ ID NO: 316789
agaucagaauuugagcaga

SEQ ID NO: 440620 - RNA, 19 nt, Artificial Sequence
  Description of Artificial Sequence: Synthetic oligonucleotide
  Antisense Strand to SEQ ID NO: 440619
ucugcucaaauucugaucu

SEQ ID NO: 440621 - RNA, 19 nt, Artificial Sequence
  Description of Artificial Sequence: Synthetic oligonucleotide
  Sense strand starting at position 991 of SEQ ID NO: 316789
cuagaaccacuuugagauc

SEQ ID NO: 440622 - RNA, 19 nt, Artificial Sequence
  Description of Artificial Sequence: Synthetic oligonucleotide
  Antisense Strand to SEQ ID NO: 440621
gaucucaaagugguucuag

SEQ ID NO: 440623 - RNA, 19 nt, Artificial Sequence
  Description of Artificial Sequence: Synthetic oligonucleotide
  Sense strand starting at position 1000 of SEQ ID NO: 316789
cuuugagaucuguaaggcu

SEQ ID NO: 440624 - RNA, 19 nt, Artificial Sequence
  Description of Artificial Sequence: Synthetic oligonucleotide
  Antisense Strand to SEQ ID NO: 440623
agccuuacagaucucaaag

SEQ ID NO: 440625 - RNA, 19 nt, Artificial Sequence
  Description of Artificial Sequence: Synthetic oligonucleotide
  Sense strand starting at position 1054 of SEQ ID NO: 316789
agucaaggcuacuuagaaa

SEQ ID NO: 440626 - RNA, 19 nt, Artificial Sequence
  Description of Artificial Sequence: Synthetic oligonucleotide
  Antisense Strand to SEQ ID NO: 440625
uuucuaaguagccuugacu

SEQ ID NO: 440627 - RNA, 19 nt, Artificial Sequence
  Description of Artificial Sequence: Synthetic oligonucleotide
  Sense strand starting at position 1275 of SEQ ID NO: 316789
gaacauauaugaucgguac

SEQ ID NO: 440628 - RNA, 19 nt, Artificial Sequence
  Description of Artificial Sequence: Synthetic oligonucleotide
  Antisense Strand to SEQ ID NO: 440627
guaccgaucauauauguuc

SEQ ID NO: 440629 - RNA, 19 nt, Artificial Sequence
  Description of Artificial Sequence: Synthetic oligonucleotide
  Sense strand starting at position 1278 of SEQ ID NO: 316789
cauauaugaucgguaccua

SEQ ID NO: 440630 - RNA, 19 nt, Artificial Sequence
  Description of Artificial Sequence: Synthetic oligonucleotide
  Antisense Strand to SEQ ID NO: 440629
uagguaccgaucauauaug

SEQ ID NO: 440631 - RNA, 19 nt, Artificial Sequence
  Description of Artificial Sequence: Synthetic oligonucleotide
  Sense strand starting at position 1279 of SEQ ID NO: 316789
auauaugaucgguaccuag

SEQ ID NO: 440632 - RNA, 19 nt, Artificial Sequence
  Description of Artificial Sequence: Synthetic oligonucleotide
  Antisense Strand to SEQ ID NO: 440631
cuagguaccgaucauauau

SEQ ID NO: 440633 - RNA, 19 nt, Artificial Sequence
  Description of Artificial Sequence: Synthetic oligonucleotide
  Sense strand starting at position 1330 of SEQ ID NO: 316789
uuagccaugccagaagaua

SEQ ID NO: 440634 - RNA, 19 nt, Artificial Sequence
  Description of Artificial Sequence: Synthetic oligonucleotide
  Antisense Strand to SEQ ID NO: 440633
uaucuucuggcauggcuaa

SEQ ID NO: 440635 - RNA, 19 nt, Artificial Sequence
  Description of Artificial Sequence: Synthetic oligonucleotide
  Sense strand starting at position 1411 of SEQ ID NO: 316789
uccuauguccuagauguca

SEQ ID NO: 440636 - RNA, 19 nt, Artificial Sequence
  Description of Artificial Sequence: Synthetic oligonucleotide
  Antisense Strand to SEQ ID NO: 440635
ugacaucuaggacauagga

SEQ ID NO: 440637 - RNA, 19 nt, Artificial Sequence
  Description of Artificial Sequence: Synthetic oligonucleotide
  Sense strand starting at position 1461 of SEQ ID NO: 316789
uuccauucccucugggaga

SEQ ID NO: 440638 - RNA, 19 nt, Artificial Sequence
  Description of Artificial Sequence: Synthetic oligonucleotide
  Antisense Strand to SEQ ID NO: 440637
ucucccagagggaauggaa

SEQ ID NO: 440639 - RNA, 19 nt, Artificial Sequence
  Description of Artificial Sequence: Synthetic oligonucleotide
  Sense strand starting at position 1463 of SEQ ID NO: 316789
ccauucccucugggagaaa

SEQ ID NO: 440640 - RNA, 19 nt, Artificial Sequence
  Description of Artificial Sequence: Synthetic oligonucleotide
  Antisense Strand to SEQ ID NO: 440639
uuucucccagagggaaugg

SEQ ID NO: 440641 - RNA, 19 nt, Artificial Sequence
  Description of Artificial Sequence: Synthetic oligonucleotide
  Sense strand starting at position 1846 of SEQ ID NO: 316789
cuguuagagcaaugaauga

SEQ ID NO: 440642 - RNA, 19 nt, Artificial Sequence
  Description of Artificial Sequence: Synthetic oligonucleotide
  Antisense Strand to SEQ ID NO: 440641
ucauucauugcucuaacag

SEQ ID NO: 440643 - RNA, 19 nt, Artificial Sequence
  Description of Artificial Sequence: Synthetic oligonucleotide
  Sense strand starting at position 1859 of SEQ ID NO: 316789
gaaugaagaccaugucuua

SEQ ID NO: 440644 - RNA, 19 nt, Artificial Sequence
  Description of Artificial Sequence: Synthetic oligonucleotide
  Antisense Strand to SEQ ID NO: 440643
uaagacauggucuucauuc

SEQ ID NO: 440645 - RNA, 19 nt, Artificial Sequence
  Description of Artificial Sequence: Synthetic oligonucleotide
  Sense strand starting at position 1862 of SEQ ID NO: 316789
ugaagaccaugucuuauaa

SEQ ID NO: 440646 - RNA, 19 nt, Artificial Sequence
  Description of Artificial Sequence: Synthetic oligonucleotide
  Antisense Strand to SEQ ID NO: 440645
uuauaagacauggucuuca

SEQ ID NO: 440647 - RNA, 19 nt, Artificial Sequence
  Description of Artificial Sequence: Synthetic oligonucleotide
  Sense strand starting at position 2098 of SEQ ID NO: 316789
ucagauagaugauugcuau

SEQ ID NO: 440648 - RNA, 19 nt, Artificial Sequence
  Description of Artificial Sequence: Synthetic oligonucleotide
  Antisense Strand to SEQ ID NO: 440647
auagcaaucaucuaucuga

SEQ ID NO: 440649 - RNA, 19 nt, Artificial Sequence
  Description of Artificial Sequence: Synthetic oligonucleotide
  Sense strand starting at position 2099 of SEQ ID NO: 316789
cagauagaugauugcuauc

SEQ ID NO: 440650 - RNA, 19 nt, Artificial Sequence
  Description of Artificial Sequence: Synthetic oligonucleotide
  Antisense Strand to SEQ ID NO: 440649
gauagcaaucaucuaucug

SEQ ID NO: 440651 - RNA, 19 nt, Artificial Sequence
  Description of Artificial Sequence: Synthetic oligonucleotide
  Sense strand starting at position 2101 of SEQ ID NO: 316789
gauagaugauugcuaucuc

SEQ ID NO: 440652 - RNA, 19 nt, Artificial Sequence
  Description of Artificial Sequence: Synthetic oligonucleotide
  Antisense Strand to SEQ ID NO: 440651
gagauagcaaucaucuauc

SEQ ID NO: 440653 - RNA, 19 nt, Artificial Sequence
  Description of Artificial Sequence: Synthetic oligonucleotide
  Sense strand starting at position 2108 of SEQ ID NO: 316789
gauugcuaucuccacggga

SEQ ID NO: 440654 - RNA, 19 nt, Artificial Sequence
  Description of Artificial Sequence: Synthetic oligonucleotide
  Antisense Strand to SEQ ID NO: 440653
ucccguggagauagcaauc

SEQ ID NO: 440655 - RNA, 19 nt, Artificial Sequence
  Description of Artificial Sequence: Synthetic oligonucleotide
  Sense strand starting at position 2146 of SEQ ID NO: 316789
uuaggagaguucuucuaau

SEQ ID NO: 440656 - RNA, 19 nt, Artificial Sequence
  Description of Artificial Sequence: Synthetic oligonucleotide
  Antisense Strand to SEQ ID NO: 440655
auuagaagaacucuccuaa

SEQ ID NO: 440657 - RNA, 19 nt, Artificial Sequence
  Description of Artificial Sequence: Synthetic oligonucleotide
  Sense strand starting at position 2165 of SEQ ID NO: 316789
auaagucccucuguaauga

SEQ ID NO: 440658 - RNA, 19 nt, Artificial Sequence
  Description of Artificial Sequence: Synthetic oligonucleotide
  Antisense Strand to SEQ ID NO: 440657
ucauuacagagggacuuau

SEQ ID NO: 440659 - RNA, 19 nt, Artificial Sequence
  Description of Artificial Sequence: Synthetic oligonucleotide
  Sense strand starting at position 2192 of SEQ ID NO: 316789
aaagaauugagaugggugu

SEQ ID NO: 440660 - RNA, 19 nt, Artificial Sequence
  Description of Artificial Sequence: Synthetic oligonucleotide
  Antisense Strand to SEQ ID NO: 440659
acacccaucucaauucuuu

SEQ ID NO: 440661 - RNA, 19 nt, Artificial Sequence
  Description of Artificial Sequence: Synthetic oligonucleotide
  Sense strand starting at position 2314 of SEQ ID NO: 316789
cccacuuggugauuaggaa

SEQ ID NO: 440662 - RNA, 19 nt, Artificial Sequence
  Description of Artificial Sequence: Synthetic oligonucleotide
  Antisense Strand to SEQ ID NO: 440661
uuccuaaucaccaaguggg

SEQ ID NO: 440663 - RNA, 19 nt, Artificial Sequence
  Description of Artificial Sequence: Synthetic oligonucleotide
  Sense strand starting at position 2337 of SEQ ID NO: 316789
ugagauugccuguaaccca

SEQ ID NO: 440664 - RNA, 19 nt, Artificial Sequence
  Description of Artificial Sequence: Synthetic oligonucleotide
  Antisense Strand to SEQ ID NO: 440663
uggguuacaggcaaucuca

SEQ ID NO: 440665 - RNA, 19 nt, Artificial Sequence
  Description of Artificial Sequence: Synthetic oligonucleotide
  Sense strand starting at position 2404 of SEQ ID NO: 316789
cuaggaugcuaauuaugau

SEQ ID NO: 440666 - RNA, 19 nt, Artificial Sequence
  Description of Artificial Sequence: Synthetic oligonucleotide
  Antisense Strand to SEQ ID NO: 440665
aucauaauuagcauccuag

SEQ ID NO: 440667 - RNA, 19 nt, Artificial Sequence
  Description of Artificial Sequence: Synthetic oligonucleotide
  Sense strand starting at position 2444 of SEQ ID NO: 316789
aacugagacccuugagagu

SEQ ID NO: 440668 - RNA, 19 nt, Artificial Sequence
  Description of Artificial Sequence: Synthetic oligonucleotide
  Antisense Strand to SEQ ID NO: 440667
acucucaagggucucaguu

SEQ ID NO: 440669 - RNA, 19 nt, Artificial Sequence
  Description of Artificial Sequence: Synthetic oligonucleotide
  Sense strand starting at position 2463 of SEQ ID NO: 316789
gaaagagggcaauguaauu

SEQ ID NO: 440670 - RNA, 19 nt, Artificial Sequence
  Description of Artificial Sequence: Synthetic oligonucleotide
  Antisense Strand to SEQ ID NO: 440669
aauuacauugcccucuuuc

SEQ ID NO: 440671 - RNA, 19 nt, Artificial Sequence
  Description of Artificial Sequence: Synthetic oligonucleotide
  Sense strand starting at position 2468 of SEQ ID NO: 316789
agggcaauguaauuaauua

SEQ ID NO: 440672 - RNA, 19 nt, Artificial Sequence
  Description of Artificial Sequence: Synthetic oligonucleotide
  Antisense Strand to SEQ ID NO: 440671
uaauuaauuacauugcccu

SEQ ID NO: 440673 - RNA, 19 nt, Artificial Sequence
  Description of Artificial Sequence: Synthetic oligonucleotide
  Sense strand starting at position 2627 of SEQ ID NO: 316789
uuguaaagucuguauugau

SEQ ID NO: 440674 - RNA, 19 nt, Artificial Sequence
  Description of Artificial Sequence: Synthetic oligonucleotide
  Antisense Strand to SEQ ID NO: 440673
aucaauacagacuuuacaa

SEQ ID NO: 440675 - RNA, 19 nt, Artificial Sequence
  Description of Artificial Sequence: Synthetic oligonucleotide
  Sense strand starting at position 2822 of SEQ ID NO: 316789
aggacaauggcuugaauca

SEQ ID NO: 440676 - RNA, 19 nt, Artificial Sequence
  Description of Artificial Sequence: Synthetic oligonucleotide
  Antisense Strand to SEQ ID NO: 440675
ugauucaagccauuguccu

SEQ ID NO: 440677 - RNA, 19 nt, Artificial Sequence
  Description of Artificial Sequence: Synthetic oligonucleotide
  Sense strand starting at position 2983 of SEQ ID NO: 316789
ggucuauaagacuggguca

SEQ ID NO: 440678 - RNA, 19 nt, Artificial Sequence
  Description of Artificial Sequence: Synthetic oligonucleotide
  Antisense Strand to SEQ ID NO: 440677
ugacccagucuuauagacc

SEQ ID NO: 440679 - RNA, 19 nt, Artificial Sequence
  Description of Artificial Sequence: Synthetic oligonucleotide
  Sense strand starting at position 2985 of SEQ ID NO: 316789
ucuauaagacugggucacu

SEQ ID NO: 440680 - RNA, 19 nt, Artificial Sequence
  Description of Artificial Sequence: Synthetic oligonucleotide
  Antisense Strand to SEQ ID NO: 440679
agugacccagucuuauaga

SEQ ID NO: 440681 - RNA, 19 nt, Artificial Sequence
  Description of Artificial Sequence: Synthetic oligonucleotide
  Sense strand starting at position 2990 of SEQ ID NO: 316789
aagacugggucacugauau

SEQ ID NO: 440682 - RNA, 19 nt, Artificial Sequence
  Description of Artificial Sequence: Synthetic oligonucleotide
  Antisense Strand to SEQ ID NO: 440681
auaucagugacccagucuu

SEQ ID NO: 440683 - RNA, 19 nt, Artificial Sequence
  Description of Artificial Sequence: Synthetic oligonucleotide
  Sense strand starting at position 3081 of SEQ ID NO: 316789
auguacuuuaugggugaua

SEQ ID NO: 440684 - RNA, 19 nt, Artificial Sequence
  Description of Artificial Sequence: Synthetic oligonucleotide
  Antisense Strand to SEQ ID NO: 440683
uaucacccauaaaguacau

SEQ ID NO: 440685 - RNA, 19 nt, Artificial Sequence
  Description of Artificial Sequence: Synthetic oligonucleotide
  Sense strand starting at position 3083 of SEQ ID NO: 316789
guacuuuaugggugauaua

SEQ ID NO: 440686 - RNA, 19 nt, Artificial Sequence
  Description of Artificial Sequence: Synthetic oligonucleotide
  Antisense Strand to SEQ ID NO: 440685
uauaucacccauaaaguac

SEQ ID NO: 440687 - RNA, 19 nt, Artificial Sequence
  Description of Artificial Sequence: Synthetic oligonucleotide
  Sense strand starting at position 3090 of SEQ ID NO: 316789
augggugauauaugucaaa

SEQ ID NO: 440688 - RNA, 19 nt, Artificial Sequence
  Description of Artificial Sequence: Synthetic oligonucleotide
  Antisense Strand to SEQ ID NO: 440687
uuugacauauaucacccau

SEQ ID NO: 440689 - RNA, 19 nt, Artificial Sequence
  Description of Artificial Sequence: Synthetic oligonucleotide
  Sense strand starting at position 3102 of SEQ ID NO: 316789
ugucaaauuguugacaucu

SEQ ID NO: 440690 - RNA, 19 nt, Artificial Sequence
  Description of Artificial Sequence: Synthetic oligonucleotide
  Antisense Strand to SEQ ID NO: 440689
agaugucaacaauuugaca

SEQ ID NO: 440691 - RNA, 19 nt, Artificial Sequence
  Description of Artificial Sequence: Synthetic oligonucleotide
  Sense strand starting at position 3297 of SEQ ID NO: 316789
acauauuuguaugagacaa

SEQ ID NO: 440692 - RNA, 19 nt, Artificial Sequence
  Description of Artificial Sequence: Synthetic oligonucleotide
  Antisense Strand to SEQ ID NO: 440691
uugucucauacaaauaugu

SEQ ID NO: 440693 - RNA, 19 nt, Artificial Sequence
  Description of Artificial Sequence: Synthetic oligonucleotide
  Sense strand starting at position 26 of SEQ ID NO: 316790
agauaacaguaugaaacua

SEQ ID NO: 440694 - RNA, 19 nt, Artificial Sequence
  Description of Artificial Sequence: Synthetic oligonucleotide
  Antisense Strand to SEQ ID NO: 440693
uaguuucauacuguuaucu

SEQ ID NO: 440695 - RNA, 19 nt, Artificial Sequence
  Description of Artificial Sequence: Synthetic oligonucleotide
  Sense strand starting at position 310 of SEQ ID NO: 316790
uggcccugcacugagaauu

SEQ ID NO: 440696 - RNA, 19 nt, Artificial Sequence
  Description of Artificial Sequence: Synthetic oligonucleotide
  Antisense Strand to SEQ ID NO: 440695
aauucucagugcagggcca

SEQ ID NO: 440697 - RNA, 19 nt, Artificial Sequence
  Description of Artificial Sequence: Synthetic oligonucleotide
  Sense strand starting at position 388 of SEQ ID NO: 316790
cugauauuauuagcacaga

SEQ ID NO: 440698 - RNA, 19 nt, Artificial Sequence
  Description of Artificial Sequence: Synthetic oligonucleotide
  Antisense Strand to SEQ ID NO: 440697
ucugugcuaauaauaucag

SEQ ID NO: 440699 - RNA, 19 nt, Artificial Sequence
  Description of Artificial Sequence: Synthetic oligonucleotide
  Sense strand starting at position 412 of SEQ ID NO: 316790
uuagcuguaccuugauuau

SEQ ID NO: 440700 - RNA, 19 nt, Artificial Sequence
  Description of Artificial Sequence: Synthetic oligonucleotide
  Antisense Strand to SEQ ID NO: 440699
auaaucaagguacagcuaa

SEQ ID NO: 440701 - RNA, 19 nt, Artificial Sequence
  Description of Artificial Sequence: Synthetic oligonucleotide
  Sense strand starting at position 416 of SEQ ID NO: 316790
cuguaccuugauuaucaga

SEQ ID NO: 440702 - RNA, 19 nt, Artificial Sequence
  Description of Artificial Sequence: Synthetic oligonucleotide
  Antisense Strand to SEQ ID NO: 440701
ucugauaaucaagguacag

SEQ ID NO: 440703 - RNA, 19 nt, Artificial Sequence
  Description of Artificial Sequence: Synthetic oligonucleotide
  Sense strand starting at position 418 of SEQ ID NO: 316790
guaccuugauuaucagaag

SEQ ID NO: 440704 - RNA, 19 nt, Artificial Sequence
  Description of Artificial Sequence: Synthetic oligonucleotide
  Antisense Strand to SEQ ID NO: 440703
cuucugauaaucaagguac

SEQ ID NO: 440705 - RNA, 19 nt, Artificial Sequence
  Description of Artificial Sequence: Synthetic oligonucleotide
  Sense strand starting at position 573 of SEQ ID NO: 316790
acgaauacagaugguuauu

SEQ ID NO: 440706 - RNA, 19 nt, Artificial Sequence
  Description of Artificial Sequence: Synthetic oligonucleotide
  Antisense Strand to SEQ ID NO: 440705
aauaaccaucuguauucgu

SEQ ID NO: 440707 - RNA, 19 nt, Artificial Sequence
  Description of Artificial Sequence: Synthetic oligonucleotide
  Sense strand starting at position 582 of SEQ ID NO: 316790
gaugguuauuugggaacau

SEQ ID NO: 440708 - RNA, 19 nt, Artificial Sequence
  Description of Artificial Sequence: Synthetic oligonucleotide
  Antisense Strand to SEQ ID NO: 440707
auguucccaaauaaccauc

SEQ ID NO: 440709 - RNA, 19 nt, Artificial Sequence
  Description of Artificial Sequence: Synthetic oligonucleotide
  Sense strand starting at position 583 of SEQ ID NO: 316790
augguuauuugggaacauc

SEQ ID NO: 440710 - RNA, 19 nt, Artificial Sequence
  Description of Artificial Sequence: Synthetic oligonucleotide
  Antisense Strand to SEQ ID NO: 440709
gauguucccaaauaaccau

SEQ ID NO: 440711 - RNA, 19 nt, Artificial Sequence
  Description of Artificial Sequence: Synthetic oligonucleotide
  Sense strand starting at position 634 of SEQ ID NO: 316790
aucucaaaugguuauagca

SEQ ID NO: 440712 - RNA, 19 nt, Artificial Sequence
  Description of Artificial Sequence: Synthetic oligonucleotide
  Antisense Strand to SEQ ID NO: 440711
ugcuauaaccauuugagau

SEQ ID NO: 440713 - RNA, 19 nt, Artificial Sequence
  Description of Artificial Sequence: Synthetic oligonucleotide
  Sense strand starting at position 753 of SEQ ID NO: 316790
gcaccaacguaucuuuaua

SEQ ID NO: 440714 - RNA, 19 nt, Artificial Sequence
  Description of Artificial Sequence: Synthetic oligonucleotide
  Antisense Strand to SEQ ID NO: 440713
uauaaagauacguuggugc

SEQ ID NO: 440715 - RNA, 19 nt, Artificial Sequence
  Description of Artificial Sequence: Synthetic oligonucleotide
  Sense strand starting at position 787 of SEQ ID NO: 316790
uuggcaauaucccuaagau

SEQ ID NO: 440716 - RNA, 19 nt, Artificial Sequence
  Description of Artificial Sequence: Synthetic oligonucleotide
  Antisense Strand to SEQ ID NO: 440715
aucuuagggauauugccaa

SEQ ID NO: 440717 - RNA, 19 nt, Artificial Sequence
  Description of Artificial Sequence: Synthetic oligonucleotide
  Sense strand starting at position 788 of SEQ ID NO: 316790
uggcaauaucccuaagauu

SEQ ID NO: 440718 - RNA, 19 nt, Artificial Sequence
  Description of Artificial Sequence: Synthetic oligonucleotide
  Antisense Strand to SEQ ID NO: 440717
aaucuuagggauauugcca

SEQ ID NO: 440719 - RNA, 19 nt, Artificial Sequence
  Description of Artificial Sequence: Synthetic oligonucleotide
  Sense strand starting at position 879 of SEQ ID NO: 316790
auaaacugguccucuggaa

SEQ ID NO: 440720 - RNA, 19 nt, Artificial Sequence
  Description of Artificial Sequence: Synthetic oligonucleotide
  Antisense Strand to SEQ ID NO: 440719
uuccagaggaccaguuuau

SEQ ID NO: 440721 - RNA, 19 nt, Artificial Sequence
  Description of Artificial Sequence: Synthetic oligonucleotide
  Sense strand starting at position 977 of SEQ ID NO: 316790
cuacucuugucagcaagga

SEQ ID NO: 440722 - RNA, 19 nt, Artificial Sequence
  Description of Artificial Sequence: Synthetic oligonucleotide
  Antisense Strand to SEQ ID NO: 440721
uccuugcugacaagaguag

SEQ ID NO: 440723 - RNA, 19 nt, Artificial Sequence
  Description of Artificial Sequence: Synthetic oligonucleotide
  Sense strand starting at position 978 of SEQ ID NO: 316790
uacucuugucagcaaggaa

SEQ ID NO: 440724 - RNA, 19 nt, Artificial Sequence
  Description of Artificial Sequence: Synthetic oligonucleotide
  Antisense Strand to SEQ ID NO: 440723
uuccuugcugacaagagua

SEQ ID NO: 440725 - RNA, 19 nt, Artificial Sequence
  Description of Artificial Sequence: Synthetic oligonucleotide
  Sense strand starting at position 2032 of SEQ ID NO: 316790
guuauuugcuggcucggaa

SEQ ID NO: 440726 - RNA, 19 nt, Artificial Sequence
  Description of Artificial Sequence: Synthetic oligonucleotide
  Antisense Strand to SEQ ID NO: 440725
uuccgagccagcaaauaac

SEQ ID NO: 440727 - RNA, 19 nt, Artificial Sequence
  Description of Artificial Sequence: Synthetic oligonucleotide
  Sense strand starting at position 2120 of SEQ ID NO: 316790
acguuacugucauugagac

SEQ ID NO: 440728 - RNA, 19 nt, Artificial Sequence
  Description of Artificial Sequence: Synthetic oligonucleotide
  Antisense Strand to SEQ ID NO: 440727
gucucaaugacaguaacgu

SEQ ID NO: 440729 - RNA, 19 nt, Artificial Sequence
  Description of Artificial Sequence: Synthetic oligonucleotide
  Sense strand starting at position 2121 of SEQ ID NO: 316790
cguuacugucauugagaca

SEQ ID NO: 440730 - RNA, 19 nt, Artificial Sequence
  Description of Artificial Sequence: Synthetic oligonucleotide
  Antisense Strand to SEQ ID NO: 440729
ugucucaaugacaguaacg

SEQ ID NO: 440731 - RNA, 19 nt, Artificial Sequence
  Description of Artificial Sequence: Synthetic oligonucleotide
  Sense strand starting at position 2373 of SEQ ID NO: 316790
gaaggucuugcuggaaauc

SEQ ID NO: 440732 - RNA, 19 nt, Artificial Sequence
  Description of Artificial Sequence: Synthetic oligonucleotide
  Antisense Strand to SEQ ID NO: 440731
gauuuccagcaagaccuuc

SEQ ID NO: 440733 - RNA, 19 nt, Artificial Sequence
  Description of Artificial Sequence: Synthetic oligonucleotide
  Sense strand starting at position 2374 of SEQ ID NO: 316790
aaggucuugcuggaaauca

SEQ ID NO: 440734 - RNA, 19 nt, Artificial Sequence
  Description of Artificial Sequence: Synthetic oligonucleotide
  Antisense Strand to SEQ ID NO: 440733
ugauuuccagcaagaccuu

SEQ ID NO: 440735 - RNA, 19 nt, Artificial Sequence
  Description of Artificial Sequence: Synthetic oligonucleotide
  Sense strand starting at position 2450 of SEQ ID NO: 316790
uguagauacuguccuuaau

SEQ ID NO: 440736 - RNA, 19 nt, Artificial Sequence
  Description of Artificial Sequence: Synthetic oligonucleotide
  Antisense Strand to SEQ ID NO: 440735
auuaaggacaguaucuaca

SEQ ID NO: 440737 - RNA, 19 nt, Artificial Sequence
  Description of Artificial Sequence: Synthetic oligonucleotide
  Sense strand starting at position 2453 of SEQ ID NO: 316790
agauacuguccuuaauugu

SEQ ID NO: 440738 - RNA, 19 nt, Artificial Sequence
  Description of Artificial Sequence: Synthetic oligonucleotide
  Antisense Strand to SEQ ID NO: 440737
acaauuaaggacaguaucu

SEQ ID NO: 440739 - RNA, 19 nt, Artificial Sequence
  Description of Artificial Sequence: Synthetic oligonucleotide
  Sense strand starting at position 2613 of SEQ ID NO: 316790
gauuuaguuuggcauuaag

SEQ ID NO: 440740 - RNA, 19 nt, Artificial Sequence
  Description of Artificial Sequence: Synthetic oligonucleotide
  Antisense Strand to SEQ ID NO: 440739
cuuaaugccaaacuaaauc

SEQ ID NO: 440741 - RNA, 19 nt, Artificial Sequence
  Description of Artificial Sequence: Synthetic oligonucleotide
  Sense strand starting at position 2616 of SEQ ID NO: 316790
uuaguuuggcauuaagauu

SEQ ID NO: 440742 - RNA, 19 nt, Artificial Sequence
  Description of Artificial Sequence: Synthetic oligonucleotide
  Antisense Strand to SEQ ID NO: 440741
aaucuuaaugccaaacuaa

SEQ ID NO: 440743 - RNA, 19 nt, Artificial Sequence
  Description of Artificial Sequence: Synthetic oligonucleotide
  Sense strand starting at position 2747 of SEQ ID NO: 316790
uuuauauuccuggagcaau

SEQ ID NO: 440744 - RNA, 19 nt, Artificial Sequence
  Description of Artificial Sequence: Synthetic oligonucleotide
  Antisense Strand to SEQ ID NO: 440743
auugcuccaggaauauaaa

SEQ ID NO: 440745 - RNA, 19 nt, Artificial Sequence
  Description of Artificial Sequence: Synthetic oligonucleotide
  Sense strand starting at position 2759 of SEQ ID NO: 316790
gagcaaugucuggagcaga

SEQ ID NO: 440746 - RNA, 19 nt, Artificial Sequence
  Description of Artificial Sequence: Synthetic oligonucleotide
  Antisense Strand to SEQ ID NO: 440745
ucugcuccagacauugcuc

SEQ ID NO: 440747 - RNA, 19 nt, Artificial Sequence
  Description of Artificial Sequence: Synthetic oligonucleotide
  Sense strand starting at position 2764 of SEQ ID NO: 316790
augucuggagcagauguua

SEQ ID NO: 440748 - RNA, 19 nt, Artificial Sequence
  Description of Artificial Sequence: Synthetic oligonucleotide
  Antisense Strand to SEQ ID NO: 440747
uaacaucugcuccagacau

SEQ ID NO: 440749 - RNA, 19 nt, Artificial Sequence
  Description of Artificial Sequence: Synthetic oligonucleotide
  Sense strand starting at position 2772 of SEQ ID NO: 316790
agcagauguuacucuaaag

SEQ ID NO: 440750 - RNA, 19 nt, Artificial Sequence
  Description of Artificial Sequence: Synthetic oligonucleotide
  Antisense Strand to SEQ ID NO: 440749
cuuuagaguaacaucugcu

SEQ ID NO: 440751 - RNA, 19 nt, Artificial Sequence
  Description of Artificial Sequence: Synthetic oligonucleotide
  Sense strand starting at position 2872 of SEQ ID NO: 316790
ggacaccaugcggguaauu

SEQ ID NO: 440752 - RNA, 19 nt, Artificial Sequence
  Description of Artificial Sequence: Synthetic oligonucleotide
  Antisense Strand to SEQ ID NO: 440751
aauuacccgcauggugucc

SEQ ID NO: 440753 - RNA, 19 nt, Artificial Sequence
  Description of Artificial Sequence: Synthetic oligonucleotide
  Sense strand starting at position 3144 of SEQ ID NO: 316790
gagaaacugucacuguaaa

SEQ ID NO: 440754 - RNA, 19 nt, Artificial Sequence
  Description of Artificial Sequence: Synthetic oligonucleotide
  Antisense Strand to SEQ ID NO: 440753
uuuacagugacaguuucuc

SEQ ID NO: 440755 - RNA, 19 nt, Artificial Sequence
  Description of Artificial Sequence: Synthetic oligonucleotide
  Sense strand starting at position 3145 of SEQ ID NO: 316790
agaaacugucacuguaaac

SEQ ID NO: 440756 - RNA, 19 nt, Artificial Sequence
  Description of Artificial Sequence: Synthetic oligonucleotide
  Antisense Strand to SEQ ID NO: 440755
guuuacagugacaguuucu

SEQ ID NO: 440757 - RNA, 19 nt, Artificial Sequence
  Description of Artificial Sequence: Synthetic oligonucleotide
  Sense strand starting at position 3256 of SEQ ID NO: 316790
cagucugugcuugauuaca

SEQ ID NO: 440758 - RNA, 19 nt, Artificial Sequence
  Description of Artificial Sequence: Synthetic oligonucleotide
  Antisense Strand to SEQ ID NO: 440757
uguaaucaagcacagacug

SEQ ID NO: 440759 - RNA, 19 nt, Artificial Sequence
  Description of Artificial Sequence: Synthetic oligonucleotide
  Sense strand starting at position 3266 of SEQ ID NO: 316790
uugauuacaugguccagaa

SEQ ID NO: 440760 - RNA, 19 nt, Artificial Sequence
  Description of Artificial Sequence: Synthetic oligonucleotide
  Antisense Strand to SEQ ID NO: 440759
uucuggaccauguaaucaa

SEQ ID NO: 440761 - RNA, 19 nt, Artificial Sequence
  Description of Artificial Sequence: Synthetic oligonucleotide
  Sense strand starting at position 3270 of SEQ ID NO: 316790
uuacaugguccagaaguuu

SEQ ID NO: 440762 - RNA, 19 nt, Artificial Sequence
  Description of Artificial Sequence: Synthetic oligonucleotide
  Antisense Strand to SEQ ID NO: 440761
aaacuucuggaccauguaa

SEQ ID NO: 440763 - RNA, 19 nt, Artificial Sequence
  Description of Artificial Sequence: Synthetic oligonucleotide
  Sense strand starting at position 3276 of SEQ ID NO: 316790
gguccagaaguuugaaauc

SEQ ID NO: 440764 - RNA, 19 nt, Artificial Sequence
  Description of Artificial Sequence: Synthetic oligonucleotide
  Antisense Strand to SEQ ID NO: 440763
gauuucaaacuucuggacc

SEQ ID NO: 440765 - RNA, 19 nt, Artificial Sequence
  Description of Artificial Sequence: Synthetic oligonucleotide
  Sense strand starting at position 3452 of SEQ ID NO: 316790
gggcauacugacuaguaac

SEQ ID NO: 440766 - RNA, 19 nt, Artificial Sequence
  Description of Artificial Sequence: Synthetic oligonucleotide
  Antisense Strand to SEQ ID NO: 440765
guuacuagucaguaugccc

SEQ ID NO: 440767 - RNA, 19 nt, Artificial Sequence
  Description of Artificial Sequence: Synthetic oligonucleotide
  Sense strand starting at position 3900 of SEQ ID NO: 316790
guuuauagaaugugcagau

SEQ ID NO: 440768 - RNA, 19 nt, Artificial Sequence
  Description of Artificial Sequence: Synthetic oligonucleotide
  Antisense Strand to SEQ ID NO: 440767
aucugcacauucuauaaac

SEQ ID NO: 440769 - RNA, 19 nt, Artificial Sequence
  Description of Artificial Sequence: Synthetic oligonucleotide
  Sense strand starting at position 3901 of SEQ ID NO: 316790
uuuauagaaugugcagauu

SEQ ID NO: 440770 - RNA, 19 nt, Artificial Sequence
  Description of Artificial Sequence: Synthetic oligonucleotide
  Antisense Strand to SEQ ID NO: 440769
aaucugcacauucuauaaa

SEQ ID NO: 440771 - RNA, 19 nt, Artificial Sequence
  Description of Artificial Sequence: Synthetic oligonucleotide
  Sense strand starting at position 3904 of SEQ ID NO: 316790
auagaaugugcagauucuu

SEQ ID NO: 440772 - RNA, 19 nt, Artificial Sequence
  Description of Artificial Sequence: Synthetic oligonucleotide
  Antisense Strand to SEQ ID NO: 440771
aagaaucugcacauucuau

SEQ ID NO: 440773 - RNA, 19 nt, Artificial Sequence
  Description of Artificial Sequence: Synthetic oligonucleotide
  Sense strand starting at position 2207 of SEQ ID NO: 316791
cgcccuggccgcuuaagaa

SEQ ID NO: 440774 - RNA, 19 nt, Artificial Sequence
  Description of Artificial Sequence: Synthetic oligonucleotide
  Antisense Strand to SEQ ID NO: 440773
uucuuaagcggccagggcg

SEQ ID NO: 440775 - RNA, 19 nt, Artificial Sequence
  Description of Artificial Sequence: Synthetic oligonucleotide
  Sense strand starting at position 2463 of SEQ ID NO: 316791
aacaguggucgggagcauu

SEQ ID NO: 440776 - RNA, 19 nt, Artificial Sequence
  Description of Artificial Sequence: Synthetic oligonucleotide
  Antisense Strand to SEQ ID NO: 440775
aaugcucccgaccacuguu

SEQ ID NO: 440777 - RNA, 19 nt, Artificial Sequence
  Description of Artificial Sequence: Synthetic oligonucleotide
  Sense strand starting at position 2738 of SEQ ID NO: 316791
gugcgacccgcguagaaau

SEQ ID NO: 440778 - RNA, 19 nt, Artificial Sequence
  Description of Artificial Sequence: Synthetic oligonucleotide
  Antisense Strand to SEQ ID NO: 440777
auuucuacgcgggucgcac

SEQ ID NO: 440779 - RNA, 19 nt, Artificial Sequence
  Description of Artificial Sequence: Synthetic oligonucleotide
  Sense strand starting at position 2739 of SEQ ID NO: 316791
ugcgacccgcguagaaaua

SEQ ID NO: 440780 - RNA, 19 nt, Artificial Sequence
  Description of Artificial Sequence: Synthetic oligonucleotide
  Antisense Strand to SEQ ID NO: 440779
uauuucuacgcgggucgca

SEQ ID NO: 440781 - RNA, 19 nt, Artificial Sequence
  Description of Artificial Sequence: Synthetic oligonucleotide
  Sense strand starting at position 2990 of SEQ ID NO: 316791
gaggguguuucuguagggu

SEQ ID NO: 440782 - RNA, 19 nt, Artificial Sequence
  Description of Artificial Sequence: Synthetic oligonucleotide
  Antisense Strand to SEQ ID NO: 440781
acccuacagaaacacccuc

SEQ ID NO: 440783 - RNA, 19 nt, Artificial Sequence
  Description of Artificial Sequence: Synthetic oligonucleotide
  Sense strand starting at position 2993 of SEQ ID NO: 316791
gguguuucuguaggguaaa

SEQ ID NO: 440784 - RNA, 19 nt, Artificial Sequence
  Description of Artificial Sequence: Synthetic oligonucleotide
  Antisense Strand to SEQ ID NO: 440783
uuuacccuacagaaacacc

SEQ ID NO: 440785 - RNA, 19 nt, Artificial Sequence
  Description of Artificial Sequence: Synthetic oligonucleotide
  Sense strand starting at position 2994 of SEQ ID NO: 316791
guguuucuguaggguaaac

SEQ ID NO: 440786 - RNA, 19 nt, Artificial Sequence
  Description of Artificial Sequence: Synthetic oligonucleotide
  Antisense Strand to SEQ ID NO: 440785
guuuacccuacagaaacac

SEQ ID NO: 440787 - RNA, 19 nt, Artificial Sequence
  Description of Artificial Sequence: Synthetic oligonucleotide
  Sense strand starting at position 2996 of SEQ ID NO: 316791
guuucuguaggguaaacau

SEQ ID NO: 440788 - RNA, 19 nt, Artificial Sequence
  Description of Artificial Sequence: Synthetic oligonucleotide
  Antisense Strand to SEQ ID NO: 440787
auguuuacccuacagaaac

SEQ ID NO: 440789 - RNA, 19 nt, Artificial Sequence
  Description of Artificial Sequence: Synthetic oligonucleotide
  Sense strand starting at position 3011 of SEQ ID NO: 316791
acaugaagccucggcuaua

SEQ ID NO: 440790 - RNA, 19 nt, Artificial Sequence
  Description of Artificial Sequence: Synthetic oligonucleotide
  Antisense Strand to SEQ ID NO: 440789
uauagccgaggcuucaugu

SEQ ID NO: 440791 - RNA, 19 nt, Artificial Sequence
  Description of Artificial Sequence: Synthetic oligonucleotide
  Sense strand starting at position 3012 of SEQ ID NO: 316791
caugaagccucggcuauau

SEQ ID NO: 440792 - RNA, 19 nt, Artificial Sequence
  Description of Artificial Sequence: Synthetic oligonucleotide
  Antisense Strand to SEQ ID NO: 440791
auauagccgaggcuucaug

SEQ ID NO: 440793 - RNA, 19 nt, Artificial Sequence
  Description of Artificial Sequence: Synthetic oligonucleotide
  Sense strand starting at position 3023 of SEQ ID NO: 316791
ggcuauauuccaggcauuu

SEQ ID NO: 440794 - RNA, 19 nt, Artificial Sequence
  Description of Artificial Sequence: Synthetic oligonucleotide
  Antisense Strand to SEQ ID NO: 440793
aaaugccuggaauauagcc

SEQ ID NO: 440795 - RNA, 19 nt, Artificial Sequence
  Description of Artificial Sequence: Synthetic oligonucleotide
  Sense strand starting at position 3085 of SEQ ID NO: 316791
ccgcgugguuauuuacaca

SEQ ID NO: 440796 - RNA, 19 nt, Artificial Sequence
  Description of Artificial Sequence: Synthetic oligonucleotide
  Antisense Strand to SEQ ID NO: 440795
uguguaaauaaccacgcgg

SEQ ID NO: 440797 - RNA, 19 nt, Artificial Sequence
  Description of Artificial Sequence: Synthetic oligonucleotide
  Sense strand starting at position 3339 of SEQ ID NO: 316791
gcagcagacuuguugagac

SEQ ID NO: 440798 - RNA, 19 nt, Artificial Sequence
  Description of Artificial Sequence: Synthetic oligonucleotide
  Antisense Strand to SEQ ID NO: 440797
gucucaacaagucugcugc

SEQ ID NO: 440799 - RNA, 19 nt, Artificial Sequence
  Description of Artificial Sequence: Synthetic oligonucleotide
  Sense strand starting at position 3341 of SEQ ID NO: 316791
agcagacuuguugagacuu

SEQ ID NO: 440800 - RNA, 19 nt, Artificial Sequence
  Description of Artificial Sequence: Synthetic oligonucleotide
  Antisense Strand to SEQ ID NO: 440799
aagucucaacaagucugcu

SEQ ID NO: 440801 - RNA, 19 nt, Artificial Sequence
  Description of Artificial Sequence: Synthetic oligonucleotide
  Sense strand starting at position 3373 of SEQ ID NO: 316791
gagagagcuuuccauggua

SEQ ID NO: 440802 - RNA, 19 nt, Artificial Sequence
  Description of Artificial Sequence: Synthetic oligonucleotide
  Antisense Strand to SEQ ID NO: 440801
uaccauggaaagcucucuc

SEQ ID NO: 440803 - RNA, 19 nt, Artificial Sequence
  Description of Artificial Sequence: Synthetic oligonucleotide
  Sense strand starting at position 3375 of SEQ ID NO: 316791
gagagcuuuccaugguaga

SEQ ID NO: 440804 - RNA, 19 nt, Artificial Sequence
  Description of Artificial Sequence: Synthetic oligonucleotide
  Antisense Strand to SEQ ID NO: 440803
ucuaccauggaaagcucuc

SEQ ID NO: 440805 - RNA, 19 nt, Artificial Sequence
  Description of Artificial Sequence: Synthetic oligonucleotide
  Sense strand starting at position 3376 of SEQ ID NO: 316791
agagcuuuccaugguagag

SEQ ID NO: 440806 - RNA, 19 nt, Artificial Sequence
  Description of Artificial Sequence: Synthetic oligonucleotide
  Antisense Strand to SEQ ID NO: 440805
cucuaccauggaaagcucu

SEQ ID NO: 440807 - RNA, 19 nt, Artificial Sequence
  Description of Artificial Sequence: Synthetic oligonucleotide
  Sense strand starting at position 3388 of SEQ ID NO: 316791
gguagagcucuuuagaagc

SEQ ID NO: 440808 - RNA, 19 nt, Artificial Sequence
  Description of Artificial Sequence: Synthetic oligonucleotide
  Antisense Strand to SEQ ID NO: 440807
gcuucuaaagagcucuacc

SEQ ID NO: 440809 - RNA, 19 nt, Artificial Sequence
  Description of Artificial Sequence: Synthetic oligonucleotide
  Sense strand starting at position 3415 of SEQ ID NO: 316791
aggaacuaauccuguguuu

SEQ ID NO: 440810 - RNA, 19 nt, Artificial Sequence
  Description of Artificial Sequence: Synthetic oligonucleotide
  Antisense Strand to SEQ ID NO: 440809
aaacacaggauuaguuccu

SEQ ID NO: 440811 - RNA, 19 nt, Artificial Sequence
  Description of Artificial Sequence: Synthetic oligonucleotide
  Sense strand starting at position 3492 of SEQ ID NO: 316791
agugauccauacuacauga

SEQ ID NO: 440812 - RNA, 19 nt, Artificial Sequence
  Description of Artificial Sequence: Synthetic oligonucleotide
  Antisense Strand to SEQ ID NO: 440811
ucauguaguauggaucacu

SEQ ID NO: 440813 - RNA, 19 nt, Artificial Sequence
  Description of Artificial Sequence: Synthetic oligonucleotide
  Sense strand starting at position 3511 of SEQ ID NO: 316791
ugaggugaacuuuauguuu

SEQ ID NO: 440814 - RNA, 19 nt, Artificial Sequence
  Description of Artificial Sequence: Synthetic oligonucleotide
  Antisense Strand to SEQ ID NO: 440813
aaacauaaaguucaccuca

SEQ ID NO: 440815 - RNA, 19 nt, Artificial Sequence
  Description of Artificial Sequence: Synthetic oligonucleotide
  Sense strand starting at position 3551 of SEQ ID NO: 316791
uuugcuugaugcuuagaga

SEQ ID NO: 440816 - RNA, 19 nt, Artificial Sequence
  Description of Artificial Sequence: Synthetic oligonucleotide
  Antisense Strand to SEQ ID NO: 440815
ucucuaagcaucaagcaaa

SEQ ID NO: 440817 - RNA, 19 nt, Artificial Sequence
  Description of Artificial Sequence: Synthetic oligonucleotide
  Sense strand starting at position 3552 of SEQ ID NO: 316791
uugcuugaugcuuagagaa

SEQ ID NO: 440818 - RNA, 19 nt, Artificial Sequence
  Description of Artificial Sequence: Synthetic oligonucleotide
  Antisense Strand to SEQ ID NO: 440817
uucucuaagcaucaagcaa

SEQ ID NO: 440819 - RNA, 19 nt, Artificial Sequence
  Description of Artificial Sequence: Synthetic oligonucleotide
  Sense strand starting at position 3554 of SEQ ID NO: 316791
gcuugaugcuuagagaaau

SEQ ID NO: 440820 - RNA, 19 nt, Artificial Sequence
  Description of Artificial Sequence: Synthetic oligonucleotide
  Antisense Strand to SEQ ID NO: 440819
auuucucuaagcaucaagc

SEQ ID NO: 440821 - RNA, 19 nt, Artificial Sequence
  Description of Artificial Sequence: Synthetic oligonucleotide
  Sense strand starting at position 3695 of SEQ ID NO: 316791
agcauacucuuacugaugu

SEQ ID NO: 440822 - RNA, 19 nt, Artificial Sequence
  Description of Artificial Sequence: Synthetic oligonucleotide
  Antisense Strand to SEQ ID NO: 440821
acaucaguaagaguaugcu

SEQ ID NO: 440823 - RNA, 19 nt, Artificial Sequence
  Description of Artificial Sequence: Synthetic oligonucleotide
  Sense strand starting at position 3696 of SEQ ID NO: 316791
gcauacucuuacugaugua

SEQ ID NO: 440824 - RNA, 19 nt, Artificial Sequence
  Description of Artificial Sequence: Synthetic oligonucleotide
  Antisense Strand to SEQ ID NO: 440823
uacaucaguaagaguaugc

SEQ ID NO: 440825 - RNA, 19 nt, Artificial Sequence
  Description of Artificial Sequence: Synthetic oligonucleotide
  Sense strand starting at position 3792 of SEQ ID NO: 316791
ucgaaauaaacaugguaga

SEQ ID NO: 440826 - RNA, 19 nt, Artificial Sequence
  Description of Artificial Sequence: Synthetic oligonucleotide
  Antisense Strand to SEQ ID NO: 440825
ucuaccauguuuauuucga

SEQ ID NO: 440827 - RNA, 19 nt, Artificial Sequence
  Description of Artificial Sequence: Synthetic oligonucleotide
  Sense strand starting at position 3943 of SEQ ID NO: 316791
agaauuuggucaggugaau

SEQ ID NO: 440828 - RNA, 19 nt, Artificial Sequence
  Description of Artificial Sequence: Synthetic oligonucleotide
  Antisense Strand to SEQ ID NO: 440827
auucaccugaccaaauucu

SEQ ID NO: 440829 - RNA, 19 nt, Artificial Sequence
  Description of Artificial Sequence: Synthetic oligonucleotide
  Sense strand starting at position 366 of SEQ ID NO: 316792
ggcgauugcucugcuucca

SEQ ID NO: 440830 - RNA, 19 nt, Artificial Sequence
  Description of Artificial Sequence: Synthetic oligonucleotide
  Antisense Strand to SEQ ID NO: 440829
uggaagcagagcaaucgcc

SEQ ID NO: 440831 - RNA, 19 nt, Artificial Sequence
  Description of Artificial Sequence: Synthetic oligonucleotide
  Sense strand starting at position 453 of SEQ ID NO: 316792
gagugaaguggucacaggu

SEQ ID NO: 440832 - RNA, 19 nt, Artificial Sequence
  Description of Artificial Sequence: Synthetic oligonucleotide
  Antisense Strand to SEQ ID NO: 440831
accugugaccacuucacuc

SEQ ID NO: 440833 - RNA, 19 nt, Artificial Sequence
  Description of Artificial Sequence: Synthetic oligonucleotide
  Sense strand starting at position 1287 of SEQ ID NO: 316792
cgccgauucuccuccaaac

SEQ ID NO: 440834 - RNA, 19 nt, Artificial Sequence
  Description of Artificial Sequence: Synthetic oligonucleotide
  Antisense Strand to SEQ ID NO: 440833
guuuggaggagaaucggcg

SEQ ID NO: 440835 - RNA, 19 nt, Artificial Sequence
  Description of Artificial Sequence: Synthetic oligonucleotide
  Sense strand starting at position 2747 of SEQ ID NO: 316792
gggcucacuuucgguguaa

SEQ ID NO: 440836 - RNA, 19 nt, Artificial Sequence
  Description of Artificial Sequence: Synthetic oligonucleotide
  Antisense Strand to SEQ ID NO: 440835
uuacaccgaaagugagccc

SEQ ID NO: 440837 - RNA, 19 nt, Artificial Sequence
  Description of Artificial Sequence: Synthetic oligonucleotide
  Sense strand starting at position 2748 of SEQ ID NO: 316792
ggcucacuuucgguguaac

SEQ ID NO: 440838 - RNA, 19 nt, Artificial Sequence
  Description of Artificial Sequence: Synthetic oligonucleotide
  Antisense Strand to SEQ ID NO: 440837
guuacaccgaaagugagcc

SEQ ID NO: 440839 - RNA, 19 nt, Artificial Sequence
  Description of Artificial Sequence: Synthetic oligonucleotide
  Sense strand starting at position 2751 of SEQ ID NO: 316792
ucacuuucgguguaacgga

SEQ ID NO: 440840 - RNA, 19 nt, Artificial Sequence
  Description of Artificial Sequence: Synthetic oligonucleotide
  Antisense Strand to SEQ ID NO: 440839
uccguuacaccgaaaguga

SEQ ID NO: 440841 - RNA, 19 nt, Artificial Sequence
  Description of Artificial Sequence: Synthetic oligonucleotide
  Sense strand starting at position 2777 of SEQ ID NO: 316792
uuuccuuuaccgggacgaa

SEQ ID NO: 440842 - RNA, 19 nt, Artificial Sequence
  Description of Artificial Sequence: Synthetic oligonucleotide
  Antisense Strand to SEQ ID NO: 440841
uucgucccgguaaaggaaa

SEQ ID NO: 440843 - RNA, 19 nt, Artificial Sequence
  Description of Artificial Sequence: Synthetic oligonucleotide
  Sense strand starting at position 3130 of SEQ ID NO: 316792
cguguuuagccugagcuca

SEQ ID NO: 440844 - RNA, 19 nt, Artificial Sequence
  Description of Artificial Sequence: Synthetic oligonucleotide
  Antisense Strand to SEQ ID NO: 440843
ugagcucaggcuaaacacg

SEQ ID NO: 440845 - RNA, 19 nt, Artificial Sequence
  Description of Artificial Sequence: Synthetic oligonucleotide
  Sense strand starting at position 3363 of SEQ ID NO: 316792
ggacccaugcccuaggauu

SEQ ID NO: 440846 - RNA, 19 nt, Artificial Sequence
  Description of Artificial Sequence: Synthetic oligonucleotide
  Antisense Strand to SEQ ID NO: 440845
aauccuagggcaugggucc

SEQ ID NO: 440847 - RNA, 19 nt, Artificial Sequence
  Description of Artificial Sequence: Synthetic oligonucleotide
  Sense strand starting at position 3589 of SEQ ID NO: 316792
ggugagauguucgggucca

SEQ ID NO: 440848 - RNA, 19 nt, Artificial Sequence
  Description of Artificial Sequence: Synthetic oligonucleotide
  Antisense Strand to SEQ ID NO: 440847
uggacccgaacaucucacc

SEQ ID NO: 440849 - RNA, 19 nt, Artificial Sequence
  Description of Artificial Sequence: Synthetic oligonucleotide
  Sense strand starting at position 3590 of SEQ ID NO: 316792
gugagauguucggguccaa

SEQ ID NO: 440850 - RNA, 19 nt, Artificial Sequence
  Description of Artificial Sequence: Synthetic oligonucleotide
  Antisense Strand to SEQ ID NO: 440849
uuggacccgaacaucucac

SEQ ID NO: 440851 - RNA, 19 nt, Artificial Sequence
  Description of Artificial Sequence: Synthetic oligonucleotide
  Sense strand starting at position 3594 of SEQ ID NO: 316792
gauguucggguccaagaaa

SEQ ID NO: 440852 - RNA, 19 nt, Artificial Sequence
  Description of Artificial Sequence: Synthetic oligonucleotide
  Antisense Strand to SEQ ID NO: 440851
uuucuuggacccgaacauc

SEQ ID NO: 440853 - RNA, 19 nt, Artificial Sequence
  Description of Artificial Sequence: Synthetic oligonucleotide
  Sense strand starting at position 3648 of SEQ ID NO: 316792
aucccuaacuggguggaua

SEQ ID NO: 440854 - RNA, 19 nt, Artificial Sequence
  Description of Artificial Sequence: Synthetic oligonucleotide
  Antisense Strand to SEQ ID NO: 440853
uauccacccaguuagggau

SEQ ID NO: 440855 - RNA, 19 nt, Artificial Sequence
  Description of Artificial Sequence: Synthetic oligonucleotide
  Sense strand starting at position 3649 of SEQ ID NO: 316792
ucccuaacuggguggauaa

SEQ ID NO: 440856 - RNA, 19 nt, Artificial Sequence
  Description of Artificial Sequence: Synthetic oligonucleotide
  Antisense Strand to SEQ ID NO: 440855
uuauccacccaguuaggga

SEQ ID NO: 440857 - RNA, 19 nt, Artificial Sequence
  Description of Artificial Sequence: Synthetic oligonucleotide
  Sense strand starting at position 3776 of SEQ ID NO: 316792
gggauaugcuggugccuuu

SEQ ID NO: 440858 - RNA, 19 nt, Artificial Sequence
  Description of Artificial Sequence: Synthetic oligonucleotide
  Antisense Strand to SEQ ID NO: 440857
aaaggcaccagcauauccc

SEQ ID NO: 440859 - RNA, 19 nt, Artificial Sequence
  Description of Artificial Sequence: Synthetic oligonucleotide
  Sense strand starting at position 3825 of SEQ ID NO: 316792
gcccguucuuccgagcaga

SEQ ID NO: 440860 - RNA, 19 nt, Artificial Sequence
  Description of Artificial Sequence: Synthetic oligonucleotide
  Antisense Strand to SEQ ID NO: 440859
ucugcucggaagaacgggc

SEQ ID NO: 440861 - RNA, 19 nt, Artificial Sequence
  Description of Artificial Sequence: Synthetic oligonucleotide
  Sense strand starting at position 13 of SEQ ID NO: 316793
uugaaauaguucuaagccu

SEQ ID NO: 440862 - RNA, 19 nt, Artificial Sequence
  Description of Artificial Sequence: Synthetic oligonucleotide
  Antisense Strand to SEQ ID NO: 440861
aggcuuagaacuauuucaa

SEQ ID NO: 440863 - RNA, 19 nt, Artificial Sequence
  Description of Artificial Sequence: Synthetic oligonucleotide
  Sense strand starting at position 409 of SEQ ID NO: 316793
cuggaaacguccuugacuu

SEQ ID NO: 440864 - RNA, 19 nt, Artificial Sequence
  Description of Artificial Sequence: Synthetic oligonucleotide
  Antisense Strand to SEQ ID NO: 440863
aagucaaggacguuuccag

SEQ ID NO: 440865 - RNA, 19 nt, Artificial Sequence
  Description of Artificial Sequence: Synthetic oligonucleotide
  Sense strand starting at position 410 of SEQ ID NO: 316793
uggaaacguccuugacuuc

SEQ ID NO: 440866 - RNA, 19 nt, Artificial Sequence
  Description of Artificial Sequence: Synthetic oligonucleotide
  Antisense Strand to SEQ ID NO: 440865
gaagucaaggacguuucca

SEQ ID NO: 440867 - RNA, 19 nt, Artificial Sequence
  Description of Artificial Sequence: Synthetic oligonucleotide
  Sense strand starting at position 427 of SEQ ID NO: 316793
uccacacucguccauaaga

SEQ ID NO: 440868 - RNA, 19 nt, Artificial Sequence
  Description of Artificial Sequence: Synthetic oligonucleotide
  Antisense Strand to SEQ ID NO: 440867
ucuuauggacgagugugga

SEQ ID NO: 440869 - RNA, 19 nt, Artificial Sequence
  Description of Artificial Sequence: Synthetic oligonucleotide
  Sense strand starting at position 468 of SEQ ID NO: 316793
agugauuucucccagaaac

SEQ ID NO: 440870 - RNA, 19 nt, Artificial Sequence
  Description of Artificial Sequence: Synthetic oligonucleotide
  Antisense Strand to SEQ ID NO: 440869
guuucugggagaaaucacu

SEQ ID NO: 440871 - RNA, 19 nt, Artificial Sequence
  Description of Artificial Sequence: Synthetic oligonucleotide
  Sense strand starting at position 649 of SEQ ID NO: 316793
ggcuguggucuccaacaag

SEQ ID NO: 440872 - RNA, 19 nt, Artificial Sequence
  Description of Artificial Sequence: Synthetic oligonucleotide
  Antisense Strand to SEQ ID NO: 440871
cuuguuggagaccacagcc

SEQ ID NO: 440873 - RNA, 19 nt, Artificial Sequence
  Description of Artificial Sequence: Synthetic oligonucleotide
  Sense strand starting at position 666 of SEQ ID NO: 316793
agccuaugauucuagauac

SEQ ID NO: 440874 - RNA, 19 nt, Artificial Sequence
  Description of Artificial Sequence: Synthetic oligonucleotide
  Antisense Strand to SEQ ID NO: 440873
guaucuagaaucauaggcu

SEQ ID NO: 440875 - RNA, 19 nt, Artificial Sequence
  Description of Artificial Sequence: Synthetic oligonucleotide
  Sense strand starting at position 888 of SEQ ID NO: 316793
uauugugguccuggcacau

SEQ ID NO: 440876 - RNA, 19 nt, Artificial Sequence
  Description of Artificial Sequence: Synthetic oligonucleotide
  Antisense Strand to SEQ ID NO: 440875
augugccaggaccacaaua

SEQ ID NO: 440877 - RNA, 19 nt, Artificial Sequence
  Description of Artificial Sequence: Synthetic oligonucleotide
  Sense strand starting at position 920 of SEQ ID NO: 316793
ucaggcaguucucagguau

SEQ ID NO: 440878 - RNA, 19 nt, Artificial Sequence
  Description of Artificial Sequence: Synthetic oligonucleotide
  Antisense Strand to SEQ ID NO: 440877
auaccugagaacugccuga

SEQ ID NO: 440879 - RNA, 19 nt, Artificial Sequence
  Description of Artificial Sequence: Synthetic oligonucleotide
  Sense strand starting at position 927 of SEQ ID NO: 316793
guucucagguauccacaaa

SEQ ID NO: 440880 - RNA, 19 nt, Artificial Sequence
  Description of Artificial Sequence: Synthetic oligonucleotide
  Antisense Strand to SEQ ID NO: 440879
uuuguggauaccugagaac

SEQ ID NO: 440881 - RNA, 19 nt, Artificial Sequence
  Description of Artificial Sequence: Synthetic oligonucleotide
  Sense strand starting at position 1021 of SEQ ID NO: 316793
ccagaugucugcuucugau

SEQ ID NO: 440882 - RNA, 19 nt, Artificial Sequence
  Description of Artificial Sequence: Synthetic oligonucleotide
  Antisense Strand to SEQ ID NO: 440881
aucagaagcagacaucugg

SEQ ID NO: 440883 - RNA, 19 nt, Artificial Sequence
  Description of Artificial Sequence: Synthetic oligonucleotide
  Sense strand starting at position 1025 of SEQ ID NO: 316793
augucugcuucugaugaga

SEQ ID NO: 440884 - RNA, 19 nt, Artificial Sequence
  Description of Artificial Sequence: Synthetic oligonucleotide
  Antisense Strand to SEQ ID NO: 440883
ucucaucagaagcagacau

SEQ ID NO: 440885 - RNA, 19 nt, Artificial Sequence
  Description of Artificial Sequence: Synthetic oligonucleotide
  Sense strand starting at position 1027 of SEQ ID NO: 316793
gucugcuucugaugagagu

SEQ ID NO: 440886 - RNA, 19 nt, Artificial Sequence
  Description of Artificial Sequence: Synthetic oligonucleotide
  Antisense Strand to SEQ ID NO: 440885
acucucaucagaagcagac

SEQ ID NO: 440887 - RNA, 19 nt, Artificial Sequence
  Description of Artificial Sequence: Synthetic oligonucleotide
  Sense strand starting at position 1036 of SEQ ID NO: 316793
ugaugagaguccugagcac

SEQ ID NO: 440888 - RNA, 19 nt, Artificial Sequence
  Description of Artificial Sequence: Synthetic oligonucleotide
  Antisense Strand to SEQ ID NO: 440887
gugcucaggacucucauca

SEQ ID NO: 440889 - RNA, 19 nt, Artificial Sequence
  Description of Artificial Sequence: Synthetic oligonucleotide
  Sense strand starting at position 1193 of SEQ ID NO: 316793
agaggaucccugcguccau

SEQ ID NO: 440890 - RNA, 19 nt, Artificial Sequence
  Description of Artificial Sequence: Synthetic oligonucleotide
  Antisense Strand to SEQ ID NO: 440889
auggacgcagggauccucu

SEQ ID NO: 440891 - RNA, 19 nt, Artificial Sequence
  Description of Artificial Sequence: Synthetic oligonucleotide
  Sense strand starting at position 1267 of SEQ ID NO: 316793
gggccacuuccggagacuu

SEQ ID NO: 440892 - RNA, 19 nt, Artificial Sequence
  Description of Artificial Sequence: Synthetic oligonucleotide
  Antisense Strand to SEQ ID NO: 440891
aagucuccggaaguggccc

SEQ ID NO: 440893 - RNA, 19 nt, Artificial Sequence
  Description of Artificial Sequence: Synthetic oligonucleotide
  Sense strand starting at position 1279 of SEQ ID NO: 316793
gagacuugcuguccacauc

SEQ ID NO: 440894 - RNA, 19 nt, Artificial Sequence
  Description of Artificial Sequence: Synthetic oligonucleotide
  Antisense Strand to SEQ ID NO: 440893
gauguggacagcaagucuc

SEQ ID NO: 440895 - RNA, 19 nt, Artificial Sequence
  Description of Artificial Sequence: Synthetic oligonucleotide
  Sense strand starting at position 1319 of SEQ ID NO: 316793
gggucaagaguuugccaca

SEQ ID NO: 440896 - RNA, 19 nt, Artificial Sequence
  Description of Artificial Sequence: Synthetic oligonucleotide
  Antisense Strand to SEQ ID NO: 440895
uguggcaaacucuugaccc

SEQ ID NO: 440897 - RNA, 19 nt, Artificial Sequence
  Description of Artificial Sequence: Synthetic oligonucleotide
  Sense strand starting at position 1350 of SEQ ID NO: 316793
ugucccguuccuggaaaga

SEQ ID NO: 440898 - RNA, 19 nt, Artificial Sequence
  Description of Artificial Sequence: Synthetic oligonucleotide
  Antisense Strand to SEQ ID NO: 440897
ucuuuccaggaacgggaca

SEQ ID NO: 440899 - RNA, 19 nt, Artificial Sequence
  Description of Artificial Sequence: Synthetic oligonucleotide
  Sense strand starting at position 1448 of SEQ ID NO: 316793
ugcuguguccgacaggaaa

SEQ ID NO: 440900 - RNA, 19 nt, Artificial Sequence
  Description of Artificial Sequence: Synthetic oligonucleotide
  Antisense Strand to SEQ ID NO: 440899
uuuccugucggacacagca

SEQ ID NO: 440901 - RNA, 19 nt, Artificial Sequence
  Description of Artificial Sequence: Synthetic oligonucleotide
  Sense strand starting at position 1633 of SEQ ID NO: 316793
gcgugaccuacuggaagaa

SEQ ID NO: 440902 - RNA, 19 nt, Artificial Sequence
  Description of Artificial Sequence: Synthetic oligonucleotide
  Antisense Strand to SEQ ID NO: 440901
uucuuccaguaggucacgc

SEQ ID NO: 440903 - RNA, 19 nt, Artificial Sequence
  Description of Artificial Sequence: Synthetic oligonucleotide
  Sense strand starting at position 2245 of SEQ ID NO: 316793
gggccugucaggugaggaa

SEQ ID NO: 440904 - RNA, 19 nt, Artificial Sequence
  Description of Artificial Sequence: Synthetic oligonucleotide
  Antisense Strand to SEQ ID NO: 440903
uuccucaccugacaggccc

SEQ ID NO: 440905 - RNA, 19 nt, Artificial Sequence
  Description of Artificial Sequence: Synthetic oligonucleotide
  Sense strand starting at position 2534 of SEQ ID NO: 316793
caggucaucugcucaaaga

SEQ ID NO: 440906 - RNA, 19 nt, Artificial Sequence
  Description of Artificial Sequence: Synthetic oligonucleotide
  Antisense Strand to SEQ ID NO: 440905
ucuuugagcagaugaccug

SEQ ID NO: 440907 - RNA, 19 nt, Artificial Sequence
  Description of Artificial Sequence: Synthetic oligonucleotide
  Sense strand starting at position 2535 of SEQ ID NO: 316793
aggucaucugcucaaagau

SEQ ID NO: 440908 - RNA, 19 nt, Artificial Sequence
  Description of Artificial Sequence: Synthetic oligonucleotide
  Antisense Strand to SEQ ID NO: 440907
aucuuugagcagaugaccu

SEQ ID NO: 440909 - RNA, 19 nt, Artificial Sequence
  Description of Artificial Sequence: Synthetic oligonucleotide
  Sense strand starting at position 2670 of SEQ ID NO: 316793
gggccacagucuuugacuu

SEQ ID NO: 440910 - RNA, 19 nt, Artificial Sequence
  Description of Artificial Sequence: Synthetic oligonucleotide
  Antisense Strand to SEQ ID NO: 440909
aagucaaagacuguggccc

SEQ ID NO: 440911 - RNA, 19 nt, Artificial Sequence
  Description of Artificial Sequence: Synthetic oligonucleotide
  Sense strand starting at position 2680 of SEQ ID NO: 316793
cuuugacuucccugucuga

SEQ ID NO: 440912 - RNA, 19 nt, Artificial Sequence
  Description of Artificial Sequence: Synthetic oligonucleotide
  Antisense Strand to SEQ ID NO: 440911
ucagacagggaagucaaag

SEQ ID NO: 440913 - RNA, 19 nt, Artificial Sequence
  Description of Artificial Sequence: Synthetic oligonucleotide
  Sense strand starting at position 2846 of SEQ ID NO: 316793
caggcuuaguucucgugga

SEQ ID NO: 440914 - RNA, 19 nt, Artificial Sequence
  Description of Artificial Sequence: Synthetic oligonucleotide
  Antisense Strand to SEQ ID NO: 440913
uccacgagaacuaagccug

SEQ ID NO: 440915 - RNA, 19 nt, Artificial Sequence
  Description of Artificial Sequence: Synthetic oligonucleotide
  Sense strand starting at position 2899 of SEQ ID NO: 316793
gagggugucuccuagcaca

SEQ ID NO: 440916 - RNA, 19 nt, Artificial Sequence
  Description of Artificial Sequence: Synthetic oligonucleotide
  Antisense Strand to SEQ ID NO: 440915
ugugcuaggagacacccuc

SEQ ID NO: 440917 - RNA, 19 nt, Artificial Sequence
  Description of Artificial Sequence: Synthetic oligonucleotide
  Sense strand starting at position 2994 of SEQ ID NO: 316793
gaaauugagugcuagcuug

SEQ ID NO: 440918 - RNA, 19 nt, Artificial Sequence
  Description of Artificial Sequence: Synthetic oligonucleotide
  Antisense Strand to SEQ ID NO: 440917
caagcuagcacucaauuuc

SEQ ID NO: 440919 - RNA, 19 nt, Artificial Sequence
  Description of Artificial Sequence: Synthetic oligonucleotide
  Sense strand starting at position 3002 of SEQ ID NO: 316793
gugcuagcuugugucacuu

SEQ ID NO: 440920 - RNA, 19 nt, Artificial Sequence
  Description of Artificial Sequence: Synthetic oligonucleotide
  Antisense Strand to SEQ ID NO: 440919
aagugacacaagcuagcac

SEQ ID NO: 440921 - RNA, 19 nt, Artificial Sequence
  Description of Artificial Sequence: Synthetic oligonucleotide
  Sense strand starting at position 3033 of SEQ ID NO: 316793
ggagaagaauuuggucauc

SEQ ID NO: 440922 - RNA, 19 nt, Artificial Sequence
  Description of Artificial Sequence: Synthetic oligonucleotide
  Antisense Strand to SEQ ID NO: 440921
gaugaccaaauucuucucc

SEQ ID NO: 440923 - RNA, 19 nt, Artificial Sequence
  Description of Artificial Sequence: Synthetic oligonucleotide
  Sense strand starting at position 3043 of SEQ ID NO: 316793
uuggucaucuuuccuggaa

SEQ ID NO: 440924 - RNA, 19 nt, Artificial Sequence
  Description of Artificial Sequence: Synthetic oligonucleotide
  Antisense Strand to SEQ ID NO: 440923
uuccaggaaagaugaccaa

SEQ ID NO: 440925 - RNA, 19 nt, Artificial Sequence
  Description of Artificial Sequence: Synthetic oligonucleotide
  Sense strand starting at position 3044 of SEQ ID NO: 316793
uggucaucuuuccuggaac

SEQ ID NO: 440926 - RNA, 19 nt, Artificial Sequence
  Description of Artificial Sequence: Synthetic oligonucleotide
  Antisense Strand to SEQ ID NO: 440925
guuccaggaaagaugacca

SEQ ID NO: 440927 - RNA, 19 nt, Artificial Sequence
  Description of Artificial Sequence: Synthetic oligonucleotide
  Sense strand starting at position 3046 of SEQ ID NO: 316793
gucaucuuuccuggaacca

SEQ ID NO: 440928 - RNA, 19 nt, Artificial Sequence
  Description of Artificial Sequence: Synthetic oligonucleotide
  Antisense Strand to SEQ ID NO: 440927
ugguuccaggaaagaugac

SEQ ID NO: 440929 - RNA, 19 nt, Artificial Sequence
  Description of Artificial Sequence: Synthetic oligonucleotide
  Sense strand starting at position 3399 of SEQ ID NO: 316793
aggacaaguuucuaggaga

SEQ ID NO: 440930 - RNA, 19 nt, Artificial Sequence
  Description of Artificial Sequence: Synthetic oligonucleotide
  Antisense Strand to SEQ ID NO: 440929
ucuccuagaaacuuguccu

SEQ ID NO: 440931 - RNA, 19 nt, Artificial Sequence
  Description of Artificial Sequence: Synthetic oligonucleotide
  Sense strand starting at position 3402 of SEQ ID NO: 316793
acaaguuucuaggagagaa

SEQ ID NO: 440932 - RNA, 19 nt, Artificial Sequence
  Description of Artificial Sequence: Synthetic oligonucleotide
  Antisense Strand to SEQ ID NO: 440931
uucucuccuagaaacuugu

SEQ ID NO: 440933 - RNA, 19 nt, Artificial Sequence
  Description of Artificial Sequence: Synthetic oligonucleotide
  Sense strand starting at position 3421 of SEQ ID NO: 316793
gccacuuugugucaucaaa

SEQ ID NO: 440934 - RNA, 19 nt, Artificial Sequence
  Description of Artificial Sequence: Synthetic oligonucleotide
  Antisense Strand to SEQ ID NO: 440933
uuugaugacacaaaguggc

SEQ ID NO: 440935 - RNA, 19 nt, Artificial Sequence
  Description of Artificial Sequence: Synthetic oligonucleotide
  Sense strand starting at position 3520 of SEQ ID NO: 316793
gagccugucagucguugga

SEQ ID NO: 440936 - RNA, 19 nt, Artificial Sequence
  Description of Artificial Sequence: Synthetic oligonucleotide
  Antisense Strand to SEQ ID NO: 440935
uccaacgacugacaggcuc

SEQ ID NO: 440937 - RNA, 19 nt, Artificial Sequence
  Description of Artificial Sequence: Synthetic oligonucleotide
  Sense strand starting at position 3522 of SEQ ID NO: 316793
gccugucagucguuggaag

SEQ ID NO: 440938 - RNA, 19 nt, Artificial Sequence
  Description of Artificial Sequence: Synthetic oligonucleotide
  Antisense Strand to SEQ ID NO: 440937
cuuccaacgacugacaggc

SEQ ID NO: 440939 - RNA, 19 nt, Artificial Sequence
  Description of Artificial Sequence: Synthetic oligonucleotide
  Sense strand starting at position 3721 of SEQ ID NO: 316793
gguggaaggacuuggcuaa

SEQ ID NO: 440940 - RNA, 19 nt, Artificial Sequence
  Description of Artificial Sequence: Synthetic oligonucleotide
  Antisense Strand to SEQ ID NO: 440939
uuagccaaguccuuccacc

SEQ ID NO: 440941 - RNA, 19 nt, Artificial Sequence
  Description of Artificial Sequence: Synthetic oligonucleotide
  Sense strand starting at position 2034 of SEQ ID NO: 316794
gggucuguucaucagaaag

SEQ ID NO: 440942 - RNA, 19 nt, Artificial Sequence
  Description of Artificial Sequence: Synthetic oligonucleotide
  Antisense Strand to SEQ ID NO: 440941
cuuucugaugaacagaccc

SEQ ID NO: 440943 - RNA, 19 nt, Artificial Sequence
  Description of Artificial Sequence: Synthetic oligonucleotide
  Sense strand starting at position 2525 of SEQ ID NO: 316794
ccaacaggcuucuaugcaa

SEQ ID NO: 440944 - RNA, 19 nt, Artificial Sequence
  Description of Artificial Sequence: Synthetic oligonucleotide
  Antisense Strand to SEQ ID NO: 440943
uugcauagaagccuguugg

SEQ ID NO: 440945 - RNA, 19 nt, Artificial Sequence
  Description of Artificial Sequence: Synthetic oligonucleotide
  Sense strand starting at position 2757 of SEQ ID NO: 316794
ccaacaggugucuauacaa

SEQ ID NO: 440946 - RNA, 19 nt, Artificial Sequence
  Description of Artificial Sequence: Synthetic oligonucleotide
  Antisense Strand to SEQ ID NO: 440945
uuguauagacaccuguugg

SEQ ID NO: 440947 - RNA, 19 nt, Artificial Sequence
  Description of Artificial Sequence: Synthetic oligonucleotide
  Sense strand starting at position 2847 of SEQ ID NO: 316794
ucaacacucugggacagaa

SEQ ID NO: 440948 - RNA, 19 nt, Artificial Sequence
  Description of Artificial Sequence: Synthetic oligonucleotide
  Antisense Strand to SEQ ID NO: 440947
uucugucccagaguguuga

SEQ ID NO: 440949 - RNA, 19 nt, Artificial Sequence
  Description of Artificial Sequence: Synthetic oligonucleotide
  Sense strand starting at position 2937 of SEQ ID NO: 316794
gccauaauggagugaaaua

SEQ ID NO: 440950 - RNA, 19 nt, Artificial Sequence
  Description of Artificial Sequence: Synthetic oligonucleotide
  Antisense Strand to SEQ ID NO: 440949
uauuucacuccauuauggc

SEQ ID NO: 440951 - RNA, 19 nt, Artificial Sequence
  Description of Artificial Sequence: Synthetic oligonucleotide
  Sense strand starting at position 3214 of SEQ ID NO: 316794
gagauaaagugagaucuug

SEQ ID NO: 440952 - RNA, 19 nt, Artificial Sequence
  Description of Artificial Sequence: Synthetic oligonucleotide
  Antisense Strand to SEQ ID NO: 440951
caagaucucacuuuaucuc

SEQ ID NO: 440953 - RNA, 19 nt, Artificial Sequence
  Description of Artificial Sequence: Synthetic oligonucleotide
  Sense strand starting at position 3413 of SEQ ID NO: 316794
ugaaguaaaucagugcuga

SEQ ID NO: 440954 - RNA, 19 nt, Artificial Sequence
  Description of Artificial Sequence: Synthetic oligonucleotide
  Antisense Strand to SEQ ID NO: 440953
ucagcacugauuuacuuca

SEQ ID NO: 440955 - RNA, 19 nt, Artificial Sequence
  Description of Artificial Sequence: Synthetic oligonucleotide
  Sense strand starting at position 3414 of SEQ ID NO: 316794
gaaguaaaucagugcugag

SEQ ID NO: 440956 - RNA, 19 nt, Artificial Sequence
  Description of Artificial Sequence: Synthetic oligonucleotide
  Antisense Strand to SEQ ID NO: 440955
cucagcacugauuuacuuc

SEQ ID NO: 440957 - RNA, 19 nt, Artificial Sequence
  Description of Artificial Sequence: Synthetic oligonucleotide
  Sense strand starting at position 3417 of SEQ ID NO: 316794
guaaaucagugcugagaua

SEQ ID NO: 440958 - RNA, 19 nt, Artificial Sequence
  Description of Artificial Sequence: Synthetic oligonucleotide
  Antisense Strand to SEQ ID NO: 440957
uaucucagcacugauuuac

SEQ ID NO: 440959 - RNA, 19 nt, Artificial Sequence
  Description of Artificial Sequence: Synthetic oligonucleotide
  Sense strand starting at position 3446 of SEQ ID NO: 316794
gcuacaaaugucuauauga

SEQ ID NO: 440960 - RNA, 19 nt, Artificial Sequence
  Description of Artificial Sequence: Synthetic oligonucleotide
  Antisense Strand to SEQ ID NO: 440959
ucauauagacauuuguagc

SEQ ID NO: 440961 - RNA, 19 nt, Artificial Sequence
  Description of Artificial Sequence: Synthetic oligonucleotide
  Sense strand starting at position 3723 of SEQ ID NO: 316794
ugaauaggcugggagcauu

SEQ ID NO: 440962 - RNA, 19 nt, Artificial Sequence
  Description of Artificial Sequence: Synthetic oligonucleotide
  Antisense Strand to SEQ ID NO: 440961
aaugcucccagccuauuca

SEQ ID NO: 440963 - RNA, 19 nt, Artificial Sequence
  Description of Artificial Sequence: Synthetic oligonucleotide
  Sense strand starting at position 3796 of SEQ ID NO: 316794
aggccaggaguuugacaaa

SEQ ID NO: 440964 - RNA, 19 nt, Artificial Sequence
  Description of Artificial Sequence: Synthetic oligonucleotide
  Antisense Strand to SEQ ID NO: 440963
uuugucaaacuccuggccu

SEQ ID NO: 440965 - RNA, 19 nt, Artificial Sequence
  Description of Artificial Sequence: Synthetic oligonucleotide
  Sense strand starting at position 3799 of SEQ ID NO: 316794
ccaggaguuugacaaagau

SEQ ID NO: 440966 - RNA, 19 nt, Artificial Sequence
  Description of Artificial Sequence: Synthetic oligonucleotide
  Antisense Strand to SEQ ID NO: 440965
aucuuugucaaacuccugg

SEQ ID NO: 440967 - RNA, 19 nt, Artificial Sequence
  Description of Artificial Sequence: Synthetic oligonucleotide
  Sense strand starting at position 3908 of SEQ ID NO: 316794
gcacuuugcuaggcuaaga

SEQ ID NO: 440968 - RNA, 19 nt, Artificial Sequence
  Description of Artificial Sequence: Synthetic oligonucleotide
  Antisense Strand to SEQ ID NO: 440967
ucuuagccuagcaaagugc

SEQ ID NO: 440969 - RNA, 19 nt, Artificial Sequence
  Description of Artificial Sequence: Synthetic oligonucleotide
  Sense strand starting at position 325 of SEQ ID NO: 316795
uugggucacucauagcauu

SEQ ID NO: 440970 - RNA, 19 nt, Artificial Sequence
  Description of Artificial Sequence: Synthetic oligonucleotide
  Antisense Strand to SEQ ID NO: 440969
aaugcuaugagugacccaa

SEQ ID NO: 440971 - RNA, 19 nt, Artificial Sequence
  Description of Artificial Sequence: Synthetic oligonucleotide
  Sense strand starting at position 328 of SEQ ID NO: 316795
ggucacucauagcauuuaa

SEQ ID NO: 440972 - RNA, 19 nt, Artificial Sequence
  Description of Artificial Sequence: Synthetic oligonucleotide
  Antisense Strand to SEQ ID NO: 440971
uuaaaugcuaugagugacc

SEQ ID NO: 440973 - RNA, 19 nt, Artificial Sequence
  Description of Artificial Sequence: Synthetic oligonucleotide
  Sense strand starting at position 405 of SEQ ID NO: 316795
auugaaugcucacuaccga

SEQ ID NO: 440974 - RNA, 19 nt, Artificial Sequence
  Description of Artificial Sequence: Synthetic oligonucleotide
  Antisense Strand to SEQ ID NO: 440973
ucgguagugagcauucaau

SEQ ID NO: 440975 - RNA, 19 nt, Artificial Sequence
  Description of Artificial Sequence: Synthetic oligonucleotide
  Sense strand starting at position 823 of SEQ ID NO: 316795
caccuugcucugugaagca

SEQ ID NO: 440976 - RNA, 19 nt, Artificial Sequence
  Description of Artificial Sequence: Synthetic oligonucleotide
  Antisense Strand to SEQ ID NO: 440975
ugcuucacagagcaaggug

SEQ ID NO: 440977 - RNA, 19 nt, Artificial Sequence
  Description of Artificial Sequence: Synthetic oligonucleotide
  Sense strand starting at position 1061 of SEQ ID NO: 316795
guaggugcucuauaauuac

SEQ ID NO: 440978 - RNA, 19 nt, Artificial Sequence
  Description of Artificial Sequence: Synthetic oligonucleotide
  Antisense Strand to SEQ ID NO: 440977
guaauuauagagcaccuac

SEQ ID NO: 440979 - RNA, 19 nt, Artificial Sequence
  Description of Artificial Sequence: Synthetic oligonucleotide
  Sense strand starting at position 1174 of SEQ ID NO: 316795
agagguuccuucgcguuua

SEQ ID NO: 440980 - RNA, 19 nt, Artificial Sequence
  Description of Artificial Sequence: Synthetic oligonucleotide
  Antisense Strand to SEQ ID NO: 440979
uaaacgcgaaggaaccucu

SEQ ID NO: 440981 - RNA, 19 nt, Artificial Sequence
  Description of Artificial Sequence: Synthetic oligonucleotide
  Sense strand starting at position 1175 of SEQ ID NO: 316795
gagguuccuucgcguuuaa

SEQ ID NO: 440982 - RNA, 19 nt, Artificial Sequence
  Description of Artificial Sequence: Synthetic oligonucleotide
  Antisense Strand to SEQ ID NO: 440981
uuaaacgcgaaggaaccuc

SEQ ID NO: 440983 - RNA, 19 nt, Artificial Sequence
  Description of Artificial Sequence: Synthetic oligonucleotide
  Sense strand starting at position 1238 of SEQ ID NO: 316795
ucucccuuucuguagaaga

SEQ ID NO: 440984 - RNA, 19 nt, Artificial Sequence
  Description of Artificial Sequence: Synthetic oligonucleotide
  Antisense Strand to SEQ ID NO: 440983
ucuucuacagaaagggaga

SEQ ID NO: 440985 - RNA, 19 nt, Artificial Sequence
  Description of Artificial Sequence: Synthetic oligonucleotide
  Sense strand starting at position 1336 of SEQ ID NO: 316795
cugggaaccucuugcauga

SEQ ID NO: 440986 - RNA, 19 nt, Artificial Sequence
  Description of Artificial Sequence: Synthetic oligonucleotide
  Antisense Strand to SEQ ID NO: 440985
ucaugcaagagguucccag

SEQ ID NO: 440987 - RNA, 19 nt, Artificial Sequence
  Description of Artificial Sequence: Synthetic oligonucleotide
  Sense strand starting at position 2304 of SEQ ID NO: 316795
gcggguucauaccugcaca

SEQ ID NO: 440988 - RNA, 19 nt, Artificial Sequence
  Description of Artificial Sequence: Synthetic oligonucleotide
  Antisense Strand to SEQ ID NO: 440987
ugugcagguaugaacccgc

SEQ ID NO: 440989 - RNA, 19 nt, Artificial Sequence
  Description of Artificial Sequence: Synthetic oligonucleotide
  Sense strand starting at position 2333 of SEQ ID NO: 316795
acgccaaacacaugagaga

SEQ ID NO: 440990 - RNA, 19 nt, Artificial Sequence
  Description of Artificial Sequence: Synthetic oligonucleotide
  Antisense Strand to SEQ ID NO: 440989
ucucucauguguuuggcgu

SEQ ID NO: 440991 - RNA, 19 nt, Artificial Sequence
  Description of Artificial Sequence: Synthetic oligonucleotide
  Sense strand starting at position 2388 of SEQ ID NO: 316795
acacaugcucuccagagau

SEQ ID NO: 440992 - RNA, 19 nt, Artificial Sequence
  Description of Artificial Sequence: Synthetic oligonucleotide
  Antisense Strand to SEQ ID NO: 440991
aucucuggagagcaugugu

SEQ ID NO: 440993 - RNA, 19 nt, Artificial Sequence
  Description of Artificial Sequence: Synthetic oligonucleotide
  Sense strand starting at position 2390 of SEQ ID NO: 316795
acaugcucuccagagauac

SEQ ID NO: 440994 - RNA, 19 nt, Artificial Sequence
  Description of Artificial Sequence: Synthetic oligonucleotide
  Antisense Strand to SEQ ID NO: 440993
guaucucuggagagcaugu

SEQ ID NO: 440995 - RNA, 19 nt, Artificial Sequence
  Description of Artificial Sequence: Synthetic oligonucleotide
  Sense strand starting at position 2458 of SEQ ID NO: 316795
auauaugcuugugcacauu

SEQ ID NO: 440996 - RNA, 19 nt, Artificial Sequence
  Description of Artificial Sequence: Synthetic oligonucleotide
  Antisense Strand to SEQ ID NO: 440995
aaugugcacaagcauauau

SEQ ID NO: 440997 - RNA, 19 nt, Artificial Sequence
  Description of Artificial Sequence: Synthetic oligonucleotide
  Sense strand starting at position 2590 of SEQ ID NO: 316795
ccguucauuccgucaguuu

SEQ ID NO: 440998 - RNA, 19 nt, Artificial Sequence
  Description of Artificial Sequence: Synthetic oligonucleotide
  Antisense Strand to SEQ ID NO: 440997
aaacugacggaaugaacgg

SEQ ID NO: 440999 - RNA, 19 nt, Artificial Sequence
  Description of Artificial Sequence: Synthetic oligonucleotide
  Sense strand starting at position 2838 of SEQ ID NO: 316795
acauucuugcaugagaauc

SEQ ID NO: 441000 - RNA, 19 nt, Artificial Sequence
  Description of Artificial Sequence: Synthetic oligonucleotide
  Antisense Strand to SEQ ID NO: 440999
gauucucaugcaagaaugu

SEQ ID NO: 441001 - RNA, 19 nt, Artificial Sequence
  Description of Artificial Sequence: Synthetic oligonucleotide
  Sense strand starting at position 2931 of SEQ ID NO: 316795
uccacacaugugcaucaua

SEQ ID NO: 441002 - RNA, 19 nt, Artificial Sequence
  Description of Artificial Sequence: Synthetic oligonucleotide
  Antisense Strand to SEQ ID NO: 441001
uaugaugcacaugugugga

SEQ ID NO: 441003 - RNA, 19 nt, Artificial Sequence
  Description of Artificial Sequence: Synthetic oligonucleotide
  Sense strand starting at position 3246 of SEQ ID NO: 316795
ccacgauuaucaggcagag

SEQ ID NO: 441004 - RNA, 19 nt, Artificial Sequence
  Description of Artificial Sequence: Synthetic oligonucleotide
  Antisense Strand to SEQ ID NO: 441003
cucugccugauaaucgugg

SEQ ID NO: 441005 - RNA, 19 nt, Artificial Sequence
  Description of Artificial Sequence: Synthetic oligonucleotide
  Sense strand starting at position 3258 of SEQ ID NO: 316795
ggcagaggauccugcaagu

SEQ ID NO: 441006 - RNA, 19 nt, Artificial Sequence
  Description of Artificial Sequence: Synthetic oligonucleotide
  Antisense Strand to SEQ ID NO: 441005
acuugcaggauccucugcc

SEQ ID NO: 441007 - RNA, 19 nt, Artificial Sequence
  Description of Artificial Sequence: Synthetic oligonucleotide
  Sense strand starting at position 3400 of SEQ ID NO: 316795
aucagugcuucuugcaaug

SEQ ID NO: 441008 - RNA, 19 nt, Artificial Sequence
  Description of Artificial Sequence: Synthetic oligonucleotide
  Antisense Strand to SEQ ID NO: 441007
cauugcaagaagcacugau

SEQ ID NO: 441009 - RNA, 19 nt, Artificial Sequence
  Description of Artificial Sequence: Synthetic oligonucleotide
  Sense strand starting at position 3739 of SEQ ID NO: 316795
ccucaaucucaaggagguu

SEQ ID NO: 441010 - RNA, 19 nt, Artificial Sequence
  Description of Artificial Sequence: Synthetic oligonucleotide
  Antisense Strand to SEQ ID NO: 441009
aaccuccuugagauugagg

SEQ ID NO: 441011 - RNA, 19 nt, Artificial Sequence
  Description of Artificial Sequence: Synthetic oligonucleotide
  Sense strand starting at position 3791 of SEQ ID NO: 316795
gugggcauuuagcaaguua

SEQ ID NO: 441012 - RNA, 19 nt, Artificial Sequence
  Description of Artificial Sequence: Synthetic oligonucleotide
  Antisense Strand to SEQ ID NO: 441011
uaacuugcuaaaugcccac

SEQ ID NO: 441013 - RNA, 19 nt, Artificial Sequence
  Description of Artificial Sequence: Synthetic oligonucleotide
  Sense strand starting at position 3877 of SEQ ID NO: 316795
acaaguguuuacucucaug

SEQ ID NO: 441014 - RNA, 19 nt, Artificial Sequence
  Description of Artificial Sequence: Synthetic oligonucleotide
  Antisense Strand to SEQ ID NO: 441013
caugagaguaaacacuugu

SEQ ID NO: 441015 - RNA, 19 nt, Artificial Sequence
  Description of Artificial Sequence: Synthetic oligonucleotide
  Sense strand starting at position 3901 of SEQ ID NO: 316795
gagagugcugaaugcgaga

SEQ ID NO: 441016 - RNA, 19 nt, Artificial Sequence
  Description of Artificial Sequence: Synthetic oligonucleotide
  Antisense Strand to SEQ ID NO: 441015
ucucgcauucagcacucuc

SEQ ID NO: 441017 - RNA, 19 nt, Artificial Sequence
  Description of Artificial Sequence: Synthetic oligonucleotide
  Sense strand starting at position 3906 of SEQ ID NO: 316795
ugcugaaugcgagaacaga

SEQ ID NO: 441018 - RNA, 19 nt, Artificial Sequence
  Description of Artificial Sequence: Synthetic oligonucleotide
  Antisense Strand to SEQ ID NO: 441017
ucuguucucgcauucagca

SEQ ID NO: 441019 - RNA, 19 nt, Artificial Sequence
  Description of Artificial Sequence: Synthetic oligonucleotide
  Sense strand starting at position 474 of SEQ ID NO: 316796
ucucgcgauccagagagua

SEQ ID NO: 441020 - RNA, 19 nt, Artificial Sequence
  Description of Artificial Sequence: Synthetic oligonucleotide
  Antisense Strand to SEQ ID NO: 441019
uacucucuggaucgcgaga

SEQ ID NO: 441021 - RNA, 19 nt, Artificial Sequence
  Description of Artificial Sequence: Synthetic oligonucleotide
  Sense strand starting at position 476 of SEQ ID NO: 316796
ucgcgauccagagaguaug

SEQ ID NO: 441022 - RNA, 19 nt, Artificial Sequence
  Description of Artificial Sequence: Synthetic oligonucleotide
  Antisense Strand to SEQ ID NO: 441021
cauacucucuggaucgcga

SEQ ID NO: 441023 - RNA, 19 nt, Artificial Sequence
  Description of Artificial Sequence: Synthetic oligonucleotide
  Sense strand starting at position 711 of SEQ ID NO: 316796
uuccauagccuccguuuau

SEQ ID NO: 441024 - RNA, 19 nt, Artificial Sequence
  Description of Artificial Sequence: Synthetic oligonucleotide
  Antisense Strand to SEQ ID NO: 441023
auaaacggaggcuauggaa

SEQ ID NO: 441025 - RNA, 19 nt, Artificial Sequence
  Description of Artificial Sequence: Synthetic oligonucleotide
  Sense strand starting at position 722 of SEQ ID NO: 316796
ccguuuauccuucccgagu

SEQ ID NO: 441026 - RNA, 19 nt, Artificial Sequence
  Description of Artificial Sequence: Synthetic oligonucleotide
  Antisense Strand to SEQ ID NO: 441025
acucgggaaggauaaacgg

SEQ ID NO: 441027 - RNA, 19 nt, Artificial Sequence
  Description of Artificial Sequence: Synthetic oligonucleotide
  Sense strand starting at position 986 of SEQ ID NO: 316796
aggguacggccuuaauuaa

SEQ ID NO: 441028 - RNA, 19 nt, Artificial Sequence
  Description of Artificial Sequence: Synthetic oligonucleotide
  Antisense Strand to SEQ ID NO: 441027
uuaauuaaggccguacccu

SEQ ID NO: 441029 - RNA, 19 nt, Artificial Sequence
  Description of Artificial Sequence: Synthetic oligonucleotide
  Sense strand starting at position 1216 of SEQ ID NO: 316796
cggaguccaugauccagau

SEQ ID NO: 441030 - RNA, 19 nt, Artificial Sequence
  Description of Artificial Sequence: Synthetic oligonucleotide
  Antisense Strand to SEQ ID NO: 441029
aucuggaucauggacuccg

SEQ ID NO: 441031 - RNA, 19 nt, Artificial Sequence
  Description of Artificial Sequence: Synthetic oligonucleotide
  Sense strand starting at position 1220 of SEQ ID NO: 316796
guccaugauccagauguug

SEQ ID NO: 441032 - RNA, 19 nt, Artificial Sequence
  Description of Artificial Sequence: Synthetic oligonucleotide
  Antisense Strand to SEQ ID NO: 441031
caacaucuggaucauggac

SEQ ID NO: 441033 - RNA, 19 nt, Artificial Sequence
  Description of Artificial Sequence: Synthetic oligonucleotide
  Sense strand starting at position 1868 of SEQ ID NO: 316796
ccugucaaugaccggaaau

SEQ ID NO: 441034 - RNA, 19 nt, Artificial Sequence
  Description of Artificial Sequence: Synthetic oligonucleotide
  Antisense Strand to SEQ ID NO: 441033
auuuccggucauugacagg

SEQ ID NO: 441035 - RNA, 19 nt, Artificial Sequence
  Description of Artificial Sequence: Synthetic oligonucleotide
  Sense strand starting at position 1869 of SEQ ID NO: 316796
cugucaaugaccggaaauu

SEQ ID NO: 441036 - RNA, 19 nt, Artificial Sequence
  Description of Artificial Sequence: Synthetic oligonucleotide
  Antisense Strand to SEQ ID NO: 441035
aauuuccggucauugacag

SEQ ID NO: 441037 - RNA, 19 nt, Artificial Sequence
  Description of Artificial Sequence: Synthetic oligonucleotide
  Sense strand starting at position 1927 of SEQ ID NO: 316796
cuuccuuggaguuguuaag

SEQ ID NO: 441038 - RNA, 19 nt, Artificial Sequence
  Description of Artificial Sequence: Synthetic oligonucleotide
  Antisense Strand to SEQ ID NO: 441037
cuuaacaacuccaaggaag

SEQ ID NO: 441039 - RNA, 19 nt, Artificial Sequence
  Description of Artificial Sequence: Synthetic oligonucleotide
  Sense strand starting at position 1937 of SEQ ID NO: 316796
guuguuaaguccuagguuc

SEQ ID NO: 441040 - RNA, 19 nt, Artificial Sequence
  Description of Artificial Sequence: Synthetic oligonucleotide
  Antisense Strand to SEQ ID NO: 441039
gaaccuaggacuuaacaac

SEQ ID NO: 441041 - RNA, 19 nt, Artificial Sequence
  Description of Artificial Sequence: Synthetic oligonucleotide
  Sense strand starting at position 1977 of SEQ ID NO: 316796
gggucagucuggagaucug

SEQ ID NO: 441042 - RNA, 19 nt, Artificial Sequence
  Description of Artificial Sequence: Synthetic oligonucleotide
  Antisense Strand to SEQ ID NO: 441041
cagaucuccagacugaccc

SEQ ID NO: 441043 - RNA, 19 nt, Artificial Sequence
  Description of Artificial Sequence: Synthetic oligonucleotide
  Sense strand starting at position 2088 of SEQ ID NO: 316796
agcagauuucgccgguaca

SEQ ID NO: 441044 - RNA, 19 nt, Artificial Sequence
  Description of Artificial Sequence: Synthetic oligonucleotide
  Antisense Strand to SEQ ID NO: 441043
uguaccggcgaaaucugcu

SEQ ID NO: 441045 - RNA, 19 nt, Artificial Sequence
  Description of Artificial Sequence: Synthetic oligonucleotide
  Sense strand starting at position 2089 of SEQ ID NO: 316796
gcagauuucgccgguacaa

SEQ ID NO: 441046 - RNA, 19 nt, Artificial Sequence
  Description of Artificial Sequence: Synthetic oligonucleotide
  Antisense Strand to SEQ ID NO: 441045
uuguaccggcgaaaucugc

SEQ ID NO: 441047 - RNA, 19 nt, Artificial Sequence
  Description of Artificial Sequence: Synthetic oligonucleotide
  Sense strand starting at position 2289 of SEQ ID NO: 316796
gccgcucugccggcagaaa

SEQ ID NO: 441048 - RNA, 19 nt, Artificial Sequence
  Description of Artificial Sequence: Synthetic oligonucleotide
  Antisense Strand to SEQ ID NO: 441047
uuucugccggcagagcggc

SEQ ID NO: 441049 - RNA, 19 nt, Artificial Sequence
  Description of Artificial Sequence: Synthetic oligonucleotide
  Sense strand starting at position 2354 of SEQ ID NO: 316796
ucgcgaagcucgagugcuu

SEQ ID NO: 441050 - RNA, 19 nt, Artificial Sequence
  Description of Artificial Sequence: Synthetic oligonucleotide
  Antisense Strand to SEQ ID NO: 441049
aagcacucgagcuucgcga

SEQ ID NO: 441051 - RNA, 19 nt, Artificial Sequence
  Description of Artificial Sequence: Synthetic oligonucleotide
  Sense strand starting at position 2355 of SEQ ID NO: 316796
cgcgaagcucgagugcuuu

SEQ ID NO: 441052 - RNA, 19 nt, Artificial Sequence
  Description of Artificial Sequence: Synthetic oligonucleotide
  Antisense Strand to SEQ ID NO: 441051
aaagcacucgagcuucgcg

SEQ ID NO: 441053 - RNA, 19 nt, Artificial Sequence
  Description of Artificial Sequence: Synthetic oligonucleotide
  Sense strand starting at position 3182 of SEQ ID NO: 316796
uugggucacucauagcauu

SEQ ID NO: 441054 - RNA, 19 nt, Artificial Sequence
  Description of Artificial Sequence: Synthetic oligonucleotide
  Antisense Strand to SEQ ID NO: 441053
aaugcuaugagugacccaa

SEQ ID NO: 441055 - RNA, 19 nt, Artificial Sequence
  Description of Artificial Sequence: Synthetic oligonucleotide
  Sense strand starting at position 3185 of SEQ ID NO: 316796
ggucacucauagcauuuaa

SEQ ID NO: 441056 - RNA, 19 nt, Artificial Sequence
  Description of Artificial Sequence: Synthetic oligonucleotide
  Antisense Strand to SEQ ID NO: 441055
uuaaaugcuaugagugacc

SEQ ID NO: 441057 - RNA, 19 nt, Artificial Sequence
  Description of Artificial Sequence: Synthetic oligonucleotide
  Sense strand starting at position 3262 of SEQ ID NO: 316796
auugaaugcucacuaccga

SEQ ID NO: 441058 - RNA, 19 nt, Artificial Sequence
  Description of Artificial Sequence: Synthetic oligonucleotide
  Antisense Strand to SEQ ID NO: 441057
ucgguagugagcauucaau

SEQ ID NO: 441059 - RNA, 19 nt, Artificial Sequence
  Description of Artificial Sequence: Synthetic oligonucleotide
  Sense strand starting at position 3680 of SEQ ID NO: 316796
caccuugcucugugaagca

SEQ ID NO: 441060 - RNA, 19 nt, Artificial Sequence
  Description of Artificial Sequence: Synthetic oligonucleotide
  Antisense Strand to SEQ ID NO: 441059
ugcuucacagagcaaggug

SEQ ID NO: 441061 - RNA, 19 nt, Artificial Sequence
  Description of Artificial Sequence: Synthetic oligonucleotide
  Sense strand starting at position 3918 of SEQ ID NO: 316796
guaggugcucuauaauuac

SEQ ID NO: 441062 - RNA, 19 nt, Artificial Sequence
  Description of Artificial Sequence: Synthetic oligonucleotide
  Antisense Strand to SEQ ID NO: 441061
guaauuauagagcaccuac

SEQ ID NO: 441063 - RNA, 19 nt, Artificial Sequence
  Description of Artificial Sequence: Synthetic oligonucleotide
  Sense strand starting at position 18 of SEQ ID NO: 316797
gcagucauuugacaaguua

SEQ ID NO: 441064 - RNA, 19 nt, Artificial Sequence
  Description of Artificial Sequence: Synthetic oligonucleotide
  Antisense Strand to SEQ ID NO: 441063
uaacuugucaaaugacugc

SEQ ID NO: 441065 - RNA, 19 nt, Artificial Sequence
  Description of Artificial Sequence: Synthetic oligonucleotide
  Sense strand starting at position 65 of SEQ ID NO: 316797
ugccuuaacuugucaaaug

SEQ ID NO: 441066 - RNA, 19 nt, Artificial Sequence
  Description of Artificial Sequence: Synthetic oligonucleotide
  Antisense Strand to SEQ ID NO: 441065
cauuugacaaguuaaggca

SEQ ID NO: 441067 - RNA, 19 nt, Artificial Sequence
  Description of Artificial Sequence: Synthetic oligonucleotide
  Sense strand starting at position 66 of SEQ ID NO: 316797
gccuuaacuugucaaauga

SEQ ID NO: 441068 - RNA, 19 nt, Artificial Sequence
  Description of Artificial Sequence: Synthetic oligonucleotide
  Antisense Strand to SEQ ID NO: 441067
ucauuugacaaguuaaggc

SEQ ID NO: 441069 - RNA, 19 nt, Artificial Sequence
  Description of Artificial Sequence: Synthetic oligonucleotide
  Sense strand starting at position 77 of SEQ ID NO: 316797
ucaaaugacuacuauggaa

SEQ ID NO: 441070 - RNA, 19 nt, Artificial Sequence
  Description of Artificial Sequence: Synthetic oligonucleotide
  Antisense Strand to SEQ ID NO: 441069
uuccauaguagucauuuga

SEQ ID NO: 441071 - RNA, 19 nt, Artificial Sequence
  Description of Artificial Sequence: Synthetic oligonucleotide
  Sense strand starting at position 139 of SEQ ID NO: 316797
uuuguuacauggcauuuaa

SEQ ID NO: 441072 - RNA, 19 nt, Artificial Sequence
  Description of Artificial Sequence: Synthetic oligonucleotide
  Antisense Strand to SEQ ID NO: 441071
uuaaaugccauguaacaaa

SEQ ID NO: 441073 - RNA, 19 nt, Artificial Sequence
  Description of Artificial Sequence: Synthetic oligonucleotide
  Sense strand starting at position 166 of SEQ ID NO: 316797
ucugguuccugucacaaca

SEQ ID NO: 441074 - RNA, 19 nt, Artificial Sequence
  Description of Artificial Sequence: Synthetic oligonucleotide
  Antisense Strand to SEQ ID NO: 441073
uguugugacaggaaccaga

SEQ ID NO: 441075 - RNA, 19 nt, Artificial Sequence
  Description of Artificial Sequence: Synthetic oligonucleotide
  Sense strand starting at position 182 of SEQ ID NO: 316797
acacguguauguguguuau

SEQ ID NO: 441076 - RNA, 19 nt, Artificial Sequence
  Description of Artificial Sequence: Synthetic oligonucleotide
  Antisense Strand to SEQ ID NO: 441075
auaacacacauacacgugu

SEQ ID NO: 441077 - RNA, 19 nt, Artificial Sequence
  Description of Artificial Sequence: Synthetic oligonucleotide
  Sense strand starting at position 184 of SEQ ID NO: 316797
acguguauguguguuauua

SEQ ID NO: 441078 - RNA, 19 nt, Artificial Sequence
  Description of Artificial Sequence: Synthetic oligonucleotide
  Antisense Strand to SEQ ID NO: 441077
uaauaacacacauacacgu

SEQ ID NO: 441079 - RNA, 19 nt, Artificial Sequence
  Description of Artificial Sequence: Synthetic oligonucleotide
  Sense strand starting at position 185 of SEQ ID NO: 316797
cguguauguguguuauuag

SEQ ID NO: 441080 - RNA, 19 nt, Artificial Sequence
  Description of Artificial Sequence: Synthetic oligonucleotide
  Antisense Strand to SEQ ID NO: 441079
cuaauaacacacauacacg

SEQ ID NO: 441081 - RNA, 19 nt, Artificial Sequence
  Description of Artificial Sequence: Synthetic oligonucleotide
  Sense strand starting at position 188 of SEQ ID NO: 316797
guauguguguuauuagcaa

SEQ ID NO: 441082 - RNA, 19 nt, Artificial Sequence
  Description of Artificial Sequence: Synthetic oligonucleotide
  Antisense Strand to SEQ ID NO: 441081
uugcuaauaacacacauac

SEQ ID NO: 441083 - RNA, 19 nt, Artificial Sequence
  Description of Artificial Sequence: Synthetic oligonucleotide
  Sense strand starting at position 221 of SEQ ID NO: 316797
gaugaaagguccuauacag

SEQ ID NO: 441084 - RNA, 19 nt, Artificial Sequence
  Description of Artificial Sequence: Synthetic oligonucleotide
  Antisense Strand to SEQ ID NO: 441083
cuguauaggaccuuucauc

SEQ ID NO: 441085 - RNA, 19 nt, Artificial Sequence
  Description of Artificial Sequence: Synthetic oligonucleotide
  Sense strand starting at position 251 of SEQ ID NO: 316797
ucaaguggauccucucuga

SEQ ID NO: 441086 - RNA, 19 nt, Artificial Sequence
  Description of Artificial Sequence: Synthetic oligonucleotide
  Antisense Strand to SEQ ID NO: 441085
ucagagaggauccacuuga

SEQ ID NO: 441087 - RNA, 19 nt, Artificial Sequence
  Description of Artificial Sequence: Synthetic oligonucleotide
  Sense strand starting at position 313 of SEQ ID NO: 316797
gcugaugugggccaaauga

SEQ ID NO: 441088 - RNA, 19 nt, Artificial Sequence
  Description of Artificial Sequence: Synthetic oligonucleotide
  Antisense Strand to SEQ ID NO: 441087
ucauuuggcccacaucagc

SEQ ID NO: 441089 - RNA, 19 nt, Artificial Sequence
  Description of Artificial Sequence: Synthetic oligonucleotide
  Sense strand starting at position 459 of SEQ ID NO: 316797
acacaaguugacuaauugu

SEQ ID NO: 441090 - RNA, 19 nt, Artificial Sequence
  Description of Artificial Sequence: Synthetic oligonucleotide
  Antisense Strand to SEQ ID NO: 441089
acaauuagucaacuugugu

SEQ ID NO: 441091 - RNA, 19 nt, Artificial Sequence
  Description of Artificial Sequence: Synthetic oligonucleotide
  Sense strand starting at position 499 of SEQ ID NO: 316797
gcaagaccugucggcagau

SEQ ID NO: 441092 - RNA, 19 nt, Artificial Sequence
  Description of Artificial Sequence: Synthetic oligonucleotide
  Antisense Strand to SEQ ID NO: 441091
aucugccgacaggucuugc

SEQ ID NO: 441093 - RNA, 19 nt, Artificial Sequence
  Description of Artificial Sequence: Synthetic oligonucleotide
  Sense strand starting at position 558 of SEQ ID NO: 316797
gagggucaccuaggauguu

SEQ ID NO: 441094 - RNA, 19 nt, Artificial Sequence
  Description of Artificial Sequence: Synthetic oligonucleotide
  Antisense Strand to SEQ ID NO: 441093
aacauccuaggugacccuc

SEQ ID NO: 441095 - RNA, 19 nt, Artificial Sequence
  Description of Artificial Sequence: Synthetic oligonucleotide
  Sense strand starting at position 776 of SEQ ID NO: 316797
aggccauccuauuaaguuu

SEQ ID NO: 441096 - RNA, 19 nt, Artificial Sequence
  Description of Artificial Sequence: Synthetic oligonucleotide
  Antisense Strand to SEQ ID NO: 441095
aaacuuaauaggauggccu

SEQ ID NO: 441097 - RNA, 19 nt, Artificial Sequence
  Description of Artificial Sequence: Synthetic oligonucleotide
  Sense strand starting at position 980 of SEQ ID NO: 316797
ucacauugcccaggaggaa

SEQ ID NO: 441098 - RNA, 19 nt, Artificial Sequence
  Description of Artificial Sequence: Synthetic oligonucleotide
  Antisense Strand to SEQ ID NO: 441097
uuccuccugggcaauguga

SEQ ID NO: 441099 - RNA, 19 nt, Artificial Sequence
  Description of Artificial Sequence: Synthetic oligonucleotide
  Sense strand starting at position 1001 of SEQ ID NO: 316797
aaccauauguguucuagug

SEQ ID NO: 441100 - RNA, 19 nt, Artificial Sequence
  Description of Artificial Sequence: Synthetic oligonucleotide
  Antisense Strand to SEQ ID NO: 441099
cacuagaacacauaugguu

SEQ ID NO: 441101 - RNA, 19 nt, Artificial Sequence
  Description of Artificial Sequence: Synthetic oligonucleotide
  Sense strand starting at position 1003 of SEQ ID NO: 316797
ccauauguguucuagugau

SEQ ID NO: 441102 - RNA, 19 nt, Artificial Sequence
  Description of Artificial Sequence: Synthetic oligonucleotide
  Antisense Strand to SEQ ID NO: 441101
aucacuagaacacauaugg

SEQ ID NO: 441103 - RNA, 19 nt, Artificial Sequence
  Description of Artificial Sequence: Synthetic oligonucleotide
  Sense strand starting at position 1007 of SEQ ID NO: 316797
auguguucuagugauucuu

SEQ ID NO: 441104 - RNA, 19 nt, Artificial Sequence
  Description of Artificial Sequence: Synthetic oligonucleotide
  Antisense Strand to SEQ ID NO: 441103
aagaaucacuagaacacau

SEQ ID NO: 441105 - RNA, 19 nt, Artificial Sequence
  Description of Artificial Sequence: Synthetic oligonucleotide
  Sense strand starting at position 1009 of SEQ ID NO: 316797
guguucuagugauucuuga

SEQ ID NO: 441106 - RNA, 19 nt, Artificial Sequence
  Description of Artificial Sequence: Synthetic oligonucleotide
  Antisense Strand to SEQ ID NO: 441105
ucaagaaucacuagaacac

SEQ ID NO: 441107 - RNA, 19 nt, Artificial Sequence
  Description of Artificial Sequence: Synthetic oligonucleotide
  Sense strand starting at position 1013 of SEQ ID NO: 316797
ucuagugauucuugaccaa

SEQ ID NO: 441108 - RNA, 19 nt, Artificial Sequence
  Description of Artificial Sequence: Synthetic oligonucleotide
  Antisense Strand to SEQ ID NO: 441107
uuggucaagaaucacuaga

SEQ ID NO: 441109 - RNA, 19 nt, Artificial Sequence
  Description of Artificial Sequence: Synthetic oligonucleotide
  Sense strand starting at position 1016 of SEQ ID NO: 316797
agugauucuugaccaacua

SEQ ID NO: 441110 - RNA, 19 nt, Artificial Sequence
  Description of Artificial Sequence: Synthetic oligonucleotide
  Antisense Strand to SEQ ID NO: 441109
uaguuggucaagaaucacu

SEQ ID NO: 441111 - RNA, 19 nt, Artificial Sequence
  Description of Artificial Sequence: Synthetic oligonucleotide
  Sense strand starting at position 1027 of SEQ ID NO: 316797
accaacuaguguuuacgaa

SEQ ID NO: 441112 - RNA, 19 nt, Artificial Sequence
  Description of Artificial Sequence: Synthetic oligonucleotide
  Antisense Strand to SEQ ID NO: 441111
uucguaaacacuaguuggu

SEQ ID NO: 441113 - RNA, 19 nt, Artificial Sequence
  Description of Artificial Sequence: Synthetic oligonucleotide
  Sense strand starting at position 1028 of SEQ ID NO: 316797
ccaacuaguguuuacgaau

SEQ ID NO: 441114 - RNA, 19 nt, Artificial Sequence
  Description of Artificial Sequence: Synthetic oligonucleotide
  Antisense Strand to SEQ ID NO: 441113
auucguaaacacuaguugg

SEQ ID NO: 441115 - RNA, 19 nt, Artificial Sequence
  Description of Artificial Sequence: Synthetic oligonucleotide
  Sense strand starting at position 1251 of SEQ ID NO: 316797
ugaccuuccugugguggaa

SEQ ID NO: 441116 - RNA, 19 nt, Artificial Sequence
  Description of Artificial Sequence: Synthetic oligonucleotide
  Antisense Strand to SEQ ID NO: 441115
uuccaccacaggaagguca

SEQ ID NO: 441117 - RNA, 19 nt, Artificial Sequence
  Description of Artificial Sequence: Synthetic oligonucleotide
  Sense strand starting at position 1295 of SEQ ID NO: 316797
gggagcuuuacguggguaa

SEQ ID NO: 441118 - RNA, 19 nt, Artificial Sequence
  Description of Artificial Sequence: Synthetic oligonucleotide
  Antisense Strand to SEQ ID NO: 441117
uuacccacguaaagcuccc

SEQ ID NO: 441119 - RNA, 19 nt, Artificial Sequence
  Description of Artificial Sequence: Synthetic oligonucleotide
  Sense strand starting at position 1296 of SEQ ID NO: 316797
ggagcuuuacguggguaau

SEQ ID NO: 441120 - RNA, 19 nt, Artificial Sequence
  Description of Artificial Sequence: Synthetic oligonucleotide
  Antisense Strand to SEQ ID NO: 441119
auuacccacguaaagcucc

SEQ ID NO: 441121 - RNA, 19 nt, Artificial Sequence
  Description of Artificial Sequence: Synthetic oligonucleotide
  Sense strand starting at position 1297 of SEQ ID NO: 316797
gagcuuuacguggguaaug

SEQ ID NO: 441122 - RNA, 19 nt, Artificial Sequence
  Description of Artificial Sequence: Synthetic oligonucleotide
  Antisense Strand to SEQ ID NO: 441121
cauuacccacguaaagcuc

SEQ ID NO: 441123 - RNA, 19 nt, Artificial Sequence
  Description of Artificial Sequence: Synthetic oligonucleotide
  Sense strand starting at position 1483 of SEQ ID NO: 316797
cugggucuccaguagucaa

SEQ ID NO: 441124 - RNA, 19 nt, Artificial Sequence
  Description of Artificial Sequence: Synthetic oligonucleotide
  Antisense Strand to SEQ ID NO: 441123
uugacuacuggagacccag

SEQ ID NO: 441125 - RNA, 19 nt, Artificial Sequence
  Description of Artificial Sequence: Synthetic oligonucleotide
  Sense strand starting at position 1496 of SEQ ID NO: 316797
agucaaaccucuggaguca

SEQ ID NO: 441126 - RNA, 19 nt, Artificial Sequence
  Description of Artificial Sequence: Synthetic oligonucleotide
  Antisense Strand to SEQ ID NO: 441125
ugacuccagagguuugacu

SEQ ID NO: 441127 - RNA, 19 nt, Artificial Sequence
  Description of Artificial Sequence: Synthetic oligonucleotide
  Sense strand starting at position 1507 of SEQ ID NO: 316797
uggagucacccuggaggau

SEQ ID NO: 441128 - RNA, 19 nt, Artificial Sequence
  Description of Artificial Sequence: Synthetic oligonucleotide
  Antisense Strand to SEQ ID NO: 441127
auccuccagggugacucca

SEQ ID NO: 441129 - RNA, 19 nt, Artificial Sequence
  Description of Artificial Sequence: Synthetic oligonucleotide
  Sense strand starting at position 2887 of SEQ ID NO: 316797
ucucgcgauccagagagua

SEQ ID NO: 441130 - RNA, 19 nt, Artificial Sequence
  Description of Artificial Sequence: Synthetic oligonucleotide
  Antisense Strand to SEQ ID NO: 441129
uacucucuggaucgcgaga

SEQ ID NO: 441131 - RNA, 19 nt, Artificial Sequence
  Description of Artificial Sequence: Synthetic oligonucleotide
  Sense strand starting at position 2889 of SEQ ID NO: 316797
ucgcgauccagagaguaug

SEQ ID NO: 441132 - RNA, 19 nt, Artificial Sequence
  Description of Artificial Sequence: Synthetic oligonucleotide
  Antisense Strand to SEQ ID NO: 441131
cauacucucuggaucgcga

SEQ ID NO: 441133 - RNA, 19 nt, Artificial Sequence
  Description of Artificial Sequence: Synthetic oligonucleotide
  Sense strand starting at position 3124 of SEQ ID NO: 316797
uuccauagccuccguuuau

SEQ ID NO: 441134 - RNA, 19 nt, Artificial Sequence
  Description of Artificial Sequence: Synthetic oligonucleotide
  Antisense Strand to SEQ ID NO: 441133
auaaacggaggcuauggaa

SEQ ID NO: 441135 - RNA, 19 nt, Artificial Sequence
  Description of Artificial Sequence: Synthetic oligonucleotide
  Sense strand starting at position 3135 of SEQ ID NO: 316797
ccguuuauccuucccgagu

SEQ ID NO: 441136 - RNA, 19 nt, Artificial Sequence
  Description of Artificial Sequence: Synthetic oligonucleotide
  Antisense Strand to SEQ ID NO: 441135
acucgggaaggauaaacgg

SEQ ID NO: 441137 - RNA, 19 nt, Artificial Sequence
  Description of Artificial Sequence: Synthetic oligonucleotide
  Sense strand starting at position 3399 of SEQ ID NO: 316797
aggguacggccuuaauuaa

SEQ ID NO: 441138 - RNA, 19 nt, Artificial Sequence
  Description of Artificial Sequence: Synthetic oligonucleotide
  Antisense Strand to SEQ ID NO: 441137
uuaauuaaggccguacccu

SEQ ID NO: 441139 - RNA, 19 nt, Artificial Sequence
  Description of Artificial Sequence: Synthetic oligonucleotide
  Sense strand starting at position 3629 of SEQ ID NO: 316797
cggaguccaugauccagau

SEQ ID NO: 441140 - RNA, 19 nt, Artificial Sequence
  Description of Artificial Sequence: Synthetic oligonucleotide
  Antisense Strand to SEQ ID NO: 441139
aucuggaucauggacuccg

SEQ ID NO: 441141 - RNA, 19 nt, Artificial Sequence
  Description of Artificial Sequence: Synthetic oligonucleotide
  Sense strand starting at position 3633 of SEQ ID NO: 316797
guccaugauccagauguug

SEQ ID NO: 441142 - RNA, 19 nt, Artificial Sequence
  Description of Artificial Sequence: Synthetic oligonucleotide
  Antisense Strand to SEQ ID NO: 441141
caacaucuggaucauggac

SEQ ID NO: 441143 - RNA, 19 nt, Artificial Sequence
  Description of Artificial Sequence: Synthetic oligonucleotide
  Sense strand starting at position 177 of SEQ ID NO: 316798
ucacauugcccaggaggaa

SEQ ID NO: 441144 - RNA, 19 nt, Artificial Sequence
  Description of Artificial Sequence: Synthetic oligonucleotide
  Antisense Strand to SEQ ID NO: 441143
uuccuccugggcaauguga

SEQ ID NO: 441145 - RNA, 19 nt, Artificial Sequence
  Description of Artificial Sequence: Synthetic oligonucleotide
  Sense strand starting at position 198 of SEQ ID NO: 316798
aaccauauguguucuagug

SEQ ID NO: 441146 - RNA, 19 nt, Artificial Sequence
  Description of Artificial Sequence: Synthetic oligonucleotide
  Antisense Strand to SEQ ID NO: 441145
cacuagaacacauaugguu

SEQ ID NO: 441147 - RNA, 19 nt, Artificial Sequence
  Description of Artificial Sequence: Synthetic oligonucleotide
  Sense strand starting at position 200 of SEQ ID NO: 316798
ccauauguguucuagugau

SEQ ID NO: 441148 - RNA, 19 nt, Artificial Sequence
  Description of Artificial Sequence: Synthetic oligonucleotide
  Antisense Strand to SEQ ID NO: 441147
aucacuagaacacauaugg

SEQ ID NO: 441149 - RNA, 19 nt, Artificial Sequence
  Description of Artificial Sequence: Synthetic oligonucleotide
  Sense strand starting at position 204 of SEQ ID NO: 316798
auguguucuagugauucuu

SEQ ID NO: 441150 - RNA, 19 nt, Artificial Sequence
  Description of Artificial Sequence: Synthetic oligonucleotide
  Antisense Strand to SEQ ID NO: 441149
aagaaucacuagaacacau

SEQ ID NO: 441151 - RNA, 19 nt, Artificial Sequence
  Description of Artificial Sequence: Synthetic oligonucleotide
  Sense strand starting at position 206 of SEQ ID NO: 316798
guguucuagugauucuuga

SEQ ID NO: 441152 - RNA, 19 nt, Artificial Sequence
  Description of Artificial Sequence: Synthetic oligonucleotide
  Antisense Strand to SEQ ID NO: 441151
ucaagaaucacuagaacac

SEQ ID NO: 441153 - RNA, 19 nt, Artificial Sequence
  Description of Artificial Sequence: Synthetic oligonucleotide
  Sense strand starting at position 210 of SEQ ID NO: 316798
ucuagugauucuugaccaa

SEQ ID NO: 441154 - RNA, 19 nt, Artificial Sequence
  Description of Artificial Sequence: Synthetic oligonucleotide
  Antisense Strand to SEQ ID NO: 441153
uuggucaagaaucacuaga

SEQ ID NO: 441155 - RNA, 19 nt, Artificial Sequence
  Description of Artificial Sequence: Synthetic oligonucleotide
  Sense strand starting at position 213 of SEQ ID NO: 316798
agugauucuugaccaacua

SEQ ID NO: 441156 - RNA, 19 nt, Artificial Sequence
  Description of Artificial Sequence: Synthetic oligonucleotide
  Antisense Strand to SEQ ID NO: 441155
uaguuggucaagaaucacu

SEQ ID NO: 441157 - RNA, 19 nt, Artificial Sequence
  Description of Artificial Sequence: Synthetic oligonucleotide
  Sense strand starting at position 224 of SEQ ID NO: 316798
accaacuaguguuuacgaa

SEQ ID NO: 441158 - RNA, 19 nt, Artificial Sequence
  Description of Artificial Sequence: Synthetic oligonucleotide
  Antisense Strand to SEQ ID NO: 441157
uucguaaacacuaguuggu

SEQ ID NO: 441159 - RNA, 19 nt, Artificial Sequence
  Description of Artificial Sequence: Synthetic oligonucleotide
  Sense strand starting at position 225 of SEQ ID NO: 316798
ccaacuaguguuuacgaau

SEQ ID NO: 441160 - RNA, 19 nt, Artificial Sequence
  Description of Artificial Sequence: Synthetic oligonucleotide
  Antisense Strand to SEQ ID NO: 441159
auucguaaacacuaguugg

SEQ ID NO: 441161 - RNA, 19 nt, Artificial Sequence
  Description of Artificial Sequence: Synthetic oligonucleotide
  Sense strand starting at position 448 of SEQ ID NO: 316798
ugaccuuccugugguggaa

SEQ ID NO: 441162 - RNA, 19 nt, Artificial Sequence
  Description of Artificial Sequence: Synthetic oligonucleotide
  Antisense Strand to SEQ ID NO: 441161
uuccaccacaggaagguca

SEQ ID NO: 441163 - RNA, 19 nt, Artificial Sequence
  Description of Artificial Sequence: Synthetic oligonucleotide
  Sense strand starting at position 492 of SEQ ID NO: 316798
gggagcuuuacguggguaa

SEQ ID NO: 441164 - RNA, 19 nt, Artificial Sequence
  Description of Artificial Sequence: Synthetic oligonucleotide
  Antisense Strand to SEQ ID NO: 441163
uuacccacguaaagcuccc

SEQ ID NO: 441165 - RNA, 19 nt, Artificial Sequence
  Description of Artificial Sequence: Synthetic oligonucleotide
  Sense strand starting at position 493 of SEQ ID NO: 316798
ggagcuuuacguggguaau

SEQ ID NO: 441166 - RNA, 19 nt, Artificial Sequence
  Description of Artificial Sequence: Synthetic oligonucleotide
  Antisense Strand to SEQ ID NO: 441165
auuacccacguaaagcucc

SEQ ID NO: 441167 - RNA, 19 nt, Artificial Sequence
  Description of Artificial Sequence: Synthetic oligonucleotide
  Sense strand starting at position 494 of SEQ ID NO: 316798
gagcuuuacguggguaaug

SEQ ID NO: 441168 - RNA, 19 nt, Artificial Sequence
  Description of Artificial Sequence: Synthetic oligonucleotide
  Antisense Strand to SEQ ID NO: 441167
cauuacccacguaaagcuc

SEQ ID NO: 441169 - RNA, 19 nt, Artificial Sequence
  Description of Artificial Sequence: Synthetic oligonucleotide
  Sense strand starting at position 680 of SEQ ID NO: 316798
cugggucuccaguagucaa

SEQ ID NO: 441170 - RNA, 19 nt, Artificial Sequence
  Description of Artificial Sequence: Synthetic oligonucleotide
  Antisense Strand to SEQ ID NO: 441169
uugacuacuggagacccag

SEQ ID NO: 441171 - RNA, 19 nt, Artificial Sequence
  Description of Artificial Sequence: Synthetic oligonucleotide
  Sense strand starting at position 693 of SEQ ID NO: 316798
agucaaaccucuggaguca

SEQ ID NO: 441172 - RNA, 19 nt, Artificial Sequence
  Description of Artificial Sequence: Synthetic oligonucleotide
  Antisense Strand to SEQ ID NO: 441171
ugacuccagagguuugacu

SEQ ID NO: 441173 - RNA, 19 nt, Artificial Sequence
  Description of Artificial Sequence: Synthetic oligonucleotide
  Sense strand starting at position 704 of SEQ ID NO: 316798
uggagucacccuggaggau

SEQ ID NO: 441174 - RNA, 19 nt, Artificial Sequence
  Description of Artificial Sequence: Synthetic oligonucleotide
  Antisense Strand to SEQ ID NO: 441173
auccuccagggugacucca

SEQ ID NO: 441175 - RNA, 19 nt, Artificial Sequence
  Description of Artificial Sequence: Synthetic oligonucleotide
  Sense strand starting at position 2084 of SEQ ID NO: 316798
ucucgcgauccagagagua

SEQ ID NO: 441176 - RNA, 19 nt, Artificial Sequence
  Description of Artificial Sequence: Synthetic oligonucleotide
  Antisense Strand to SEQ ID NO: 441175
uacucucuggaucgcgaga

SEQ ID NO: 441177 - RNA, 19 nt, Artificial Sequence
  Description of Artificial Sequence: Synthetic oligonucleotide
  Sense strand starting at position 2086 of SEQ ID NO: 316798
ucgcgauccagagaguaug

SEQ ID NO: 441178 - RNA, 19 nt, Artificial Sequence
  Description of Artificial Sequence: Synthetic oligonucleotide
  Antisense Strand to SEQ ID NO: 441177
cauacucucuggaucgcga

SEQ ID NO: 441179 - RNA, 19 nt, Artificial Sequence
  Description of Artificial Sequence: Synthetic oligonucleotide
  Sense strand starting at position 2321 of SEQ ID NO: 316798
uuccauagccuccguuuau

SEQ ID NO: 441180 - RNA, 19 nt, Artificial Sequence
  Description of Artificial Sequence: Synthetic oligonucleotide
  Antisense Strand to SEQ ID NO: 441179
auaaacggaggcuauggaa

SEQ ID NO: 441181 - RNA, 19 nt, Artificial Sequence
  Description of Artificial Sequence: Synthetic oligonucleotide
  Sense strand starting at position 2332 of SEQ ID NO: 316798
ccguuuauccuucccgagu

SEQ ID NO: 441182 - RNA, 19 nt, Artificial Sequence
  Description of Artificial Sequence: Synthetic oligonucleotide
  Antisense Strand to SEQ ID NO: 441181
acucgggaaggauaaacgg

SEQ ID NO: 441183 - RNA, 19 nt, Artificial Sequence
  Description of Artificial Sequence: Synthetic oligonucleotide
  Sense strand starting at position 2596 of SEQ ID NO: 316798
aggguacggccuuaauuaa

SEQ ID NO: 441184 - RNA, 19 nt, Artificial Sequence
  Description of Artificial Sequence: Synthetic oligonucleotide
  Antisense Strand to SEQ ID NO: 441183
uuaauuaaggccguacccu

SEQ ID NO: 441185 - RNA, 19 nt, Artificial Sequence
  Description of Artificial Sequence: Synthetic oligonucleotide
  Sense strand starting at position 2826 of SEQ ID NO: 316798
cggaguccaugauccagau

SEQ ID NO: 441186 - RNA, 19 nt, Artificial Sequence
  Description of Artificial Sequence: Synthetic oligonucleotide
  Antisense Strand to SEQ ID NO: 441185
aucuggaucauggacuccg

SEQ ID NO: 441187 - RNA, 19 nt, Artificial Sequence
  Description of Artificial Sequence: Synthetic oligonucleotide
  Sense strand starting at position 2830 of SEQ ID NO: 316798
guccaugauccagauguug

SEQ ID NO: 441188 - RNA, 19 nt, Artificial Sequence
  Description of Artificial Sequence: Synthetic oligonucleotide
  Antisense Strand to SEQ ID NO: 441187
caacaucuggaucauggac

SEQ ID NO: 441189 - RNA, 19 nt, Artificial Sequence
  Description of Artificial Sequence: Synthetic oligonucleotide
  Sense strand starting at position 3478 of SEQ ID NO: 316798
ccugucaaugaccggaaau

SEQ ID NO: 441190 - RNA, 19 nt, Artificial Sequence
  Description of Artificial Sequence: Synthetic oligonucleotide
  Antisense Strand to SEQ ID NO: 441189
auuuccggucauugacagg

SEQ ID NO: 441191 - RNA, 19 nt, Artificial Sequence
  Description of Artificial Sequence: Synthetic oligonucleotide
  Sense strand starting at position 3479 of SEQ ID NO: 316798
cugucaaugaccggaaauu

SEQ ID NO: 441192 - RNA, 19 nt, Artificial Sequence
  Description of Artificial Sequence: Synthetic oligonucleotide
  Antisense Strand to SEQ ID NO: 441191
aauuuccggucauugacag

SEQ ID NO: 441193 - RNA, 19 nt, Artificial Sequence
  Description of Artificial Sequence: Synthetic oligonucleotide
  Sense strand starting at position 3537 of SEQ ID NO: 316798
cuuccuuggaguuguuaag

SEQ ID NO: 441194 - RNA, 19 nt, Artificial Sequence
  Description of Artificial Sequence: Synthetic oligonucleotide
  Antisense Strand to SEQ ID NO: 441193
cuuaacaacuccaaggaag

SEQ ID NO: 441195 - RNA, 19 nt, Artificial Sequence
  Description of Artificial Sequence: Synthetic oligonucleotide
  Sense strand starting at position 3547 of SEQ ID NO: 316798
guuguuaaguccuagguuc

SEQ ID NO: 441196 - RNA, 19 nt, Artificial Sequence
  Description of Artificial Sequence: Synthetic oligonucleotide
  Antisense Strand to SEQ ID NO: 441195
gaaccuaggacuuaacaac

SEQ ID NO: 441197 - RNA, 19 nt, Artificial Sequence
  Description of Artificial Sequence: Synthetic oligonucleotide
  Sense strand starting at position 3587 of SEQ ID NO: 316798
gggucagucuggagaucug

SEQ ID NO: 441198 - RNA, 19 nt, Artificial Sequence
  Description of Artificial Sequence: Synthetic oligonucleotide
  Antisense Strand to SEQ ID NO: 441197
cagaucuccagacugaccc

SEQ ID NO: 441199 - RNA, 19 nt, Artificial Sequence
  Description of Artificial Sequence: Synthetic oligonucleotide
  Sense strand starting at position 3698 of SEQ ID NO: 316798
agcagauuucgccgguaca

SEQ ID NO: 441200 - RNA, 19 nt, Artificial Sequence
  Description of Artificial Sequence: Synthetic oligonucleotide
  Antisense Strand to SEQ ID NO: 441199
uguaccggcgaaaucugcu

SEQ ID NO: 441201 - RNA, 19 nt, Artificial Sequence
  Description of Artificial Sequence: Synthetic oligonucleotide
  Sense strand starting at position 3699 of SEQ ID NO: 316798
gcagauuucgccgguacaa

SEQ ID NO: 441202 - RNA, 19 nt, Artificial Sequence
  Description of Artificial Sequence: Synthetic oligonucleotide
  Antisense Strand to SEQ ID NO: 441201
uuguaccggcgaaaucugc

SEQ ID NO: 441203 - RNA, 19 nt, Artificial Sequence
  Description of Artificial Sequence: Synthetic oligonucleotide
  Sense strand starting at position 3899 of SEQ ID NO: 316798
gccgcucugccggcagaaa

SEQ ID NO: 441204 - RNA, 19 nt, Artificial Sequence
  Description of Artificial Sequence: Synthetic oligonucleotide
  Antisense Strand to SEQ ID NO: 441203
uuucugccggcagagcggc

SEQ ID NO: 441205 - RNA, 19 nt, Artificial Sequence
  Description of Artificial Sequence: Synthetic oligonucleotide
  Sense strand starting at position 3964 of SEQ ID NO: 316798
ucgcgaagcucgagugcuu

SEQ ID NO: 441206 - RNA, 19 nt, Artificial Sequence
  Description of Artificial Sequence: Synthetic oligonucleotide
  Antisense Strand to SEQ ID NO: 441205
aagcacucgagcuucgcga

SEQ ID NO: 441207 - RNA, 19 nt, Artificial Sequence
  Description of Artificial Sequence: Synthetic oligonucleotide
  Sense strand starting at position 3965 of SEQ ID NO: 316798
cgcgaagcucgagugcuuu

SEQ ID NO: 441208 - RNA, 19 nt, Artificial Sequence
  Description of Artificial Sequence: Synthetic oligonucleotide
  Antisense Strand to SEQ ID NO: 441207
aaagcacucgagcuucgcg

SEQ ID NO: 441209 - RNA, 19 nt, Artificial Sequence
  Description of Artificial Sequence: Synthetic oligonucleotide
  Sense strand starting at position 82 of SEQ ID NO: 316799
uugguaaagaaauguugga

SEQ ID NO: 441210 - RNA, 19 nt, Artificial Sequence
  Description of Artificial Sequence: Synthetic oligonucleotide
  Antisense Strand to SEQ ID NO: 441209
uccaacauuucuuuaccaa

SEQ ID NO: 441211 - RNA, 19 nt, Artificial Sequence
  Description of Artificial Sequence: Synthetic oligonucleotide
  Sense strand starting at position 188 of SEQ ID NO: 316799
ugugcauuaccuuauucuu

SEQ ID NO: 441212 - RNA, 19 nt, Artificial Sequence
  Description of Artificial Sequence: Synthetic oligonucleotide
  Antisense Strand to SEQ ID NO: 441211
aagaauaagguaaugcaca

SEQ ID NO: 441213 - RNA, 19 nt, Artificial Sequence
  Description of Artificial Sequence: Synthetic oligonucleotide
  Sense strand starting at position 289 of SEQ ID NO: 316799
cucaguggacuaugcaaua

SEQ ID NO: 441214 - RNA, 19 nt, Artificial Sequence
  Description of Artificial Sequence: Synthetic oligonucleotide
  Antisense Strand to SEQ ID NO: 441213
uauugcauaguccacugag

SEQ ID NO: 441215 - RNA, 19 nt, Artificial Sequence
  Description of Artificial Sequence: Synthetic oligonucleotide
  Sense strand starting at position 366 of SEQ ID NO: 316799
gagaucauccagugcuuua

SEQ ID NO: 441216 - RNA, 19 nt, Artificial Sequence
  Description of Artificial Sequence: Synthetic oligonucleotide
  Antisense Strand to SEQ ID NO: 441215
uaaagcacuggaugaucuc

SEQ ID NO: 441217 - RNA, 19 nt, Artificial Sequence
  Description of Artificial Sequence: Synthetic oligonucleotide
  Sense strand starting at position 369 of SEQ ID NO: 316799
aucauccagugcuuuaaga

SEQ ID NO: 441218 - RNA, 19 nt, Artificial Sequence
  Description of Artificial Sequence: Synthetic oligonucleotide
  Antisense Strand to SEQ ID NO: 441217
ucuuaaagcacuggaugau

SEQ ID NO: 441219 - RNA, 19 nt, Artificial Sequence
  Description of Artificial Sequence: Synthetic oligonucleotide
  Sense strand starting at position 399 of SEQ ID NO: 316799
gguauccuauguuugauga

SEQ ID NO: 441220 - RNA, 19 nt, Artificial Sequence
  Description of Artificial Sequence: Synthetic oligonucleotide
  Antisense Strand to SEQ ID NO: 441219
ucaucaaacauaggauacc

SEQ ID NO: 441221 - RNA, 19 nt, Artificial Sequence
  Description of Artificial Sequence: Synthetic oligonucleotide
  Sense strand starting at position 400 of SEQ ID NO: 316799
guauccuauguuugaugaa

SEQ ID NO: 441222 - RNA, 19 nt, Artificial Sequence
  Description of Artificial Sequence: Synthetic oligonucleotide
  Antisense Strand to SEQ ID NO: 441221
uucaucaaacauaggauac

SEQ ID NO: 441223 - RNA, 19 nt, Artificial Sequence
  Description of Artificial Sequence: Synthetic oligonucleotide
  Sense strand starting at position 422 of SEQ ID NO: 316799
ucaggucauuucuaacaag

SEQ ID NO: 441224 - RNA, 19 nt, Artificial Sequence
  Description of Artificial Sequence: Synthetic oligonucleotide
  Antisense Strand to SEQ ID NO: 441223
cuuguuagaaaugaccuga

SEQ ID NO: 441225 - RNA, 19 nt, Artificial Sequence
  Description of Artificial Sequence: Synthetic oligonucleotide
  Sense strand starting at position 425 of SEQ ID NO: 316799
ggucauuucuaacaagagu

SEQ ID NO: 441226 - RNA, 19 nt, Artificial Sequence
  Description of Artificial Sequence: Synthetic oligonucleotide
  Antisense Strand to SEQ ID NO: 441225
acucuuguuagaaaugacc

SEQ ID NO: 441227 - RNA, 19 nt, Artificial Sequence
  Description of Artificial Sequence: Synthetic oligonucleotide
  Sense strand starting at position 528 of SEQ ID NO: 316799
guuaucagagccuauguaa

SEQ ID NO: 441228 - RNA, 19 nt, Artificial Sequence
  Description of Artificial Sequence: Synthetic oligonucleotide
  Antisense Strand to SEQ ID NO: 441227
uuacauaggcucugauaac

SEQ ID NO: 441229 - RNA, 19 nt, Artificial Sequence
  Description of Artificial Sequence: Synthetic oligonucleotide
  Sense strand starting at position 579 of SEQ ID NO: 316799
cguuaaauuuguuuccuga

SEQ ID NO: 441230 - RNA, 19 nt, Artificial Sequence
  Description of Artificial Sequence: Synthetic oligonucleotide
  Antisense Strand to SEQ ID NO: 441229
ucaggaaacaaauuuaacg

SEQ ID NO: 441231 - RNA, 19 nt, Artificial Sequence
  Description of Artificial Sequence: Synthetic oligonucleotide
  Sense strand starting at position 827 of SEQ ID NO: 316799
guaauaauauggcuuagag

SEQ ID NO: 441232 - RNA, 19 nt, Artificial Sequence
  Description of Artificial Sequence: Synthetic oligonucleotide
  Antisense Strand to SEQ ID NO: 441231
cucuaagccauauuauuac

SEQ ID NO: 441233 - RNA, 19 nt, Artificial Sequence
  Description of Artificial Sequence: Synthetic oligonucleotide
  Sense strand starting at position 919 of SEQ ID NO: 316799
uuucuaaagugggcaauaa

SEQ ID NO: 441234 - RNA, 19 nt, Artificial Sequence
  Description of Artificial Sequence: Synthetic oligonucleotide
  Antisense Strand to SEQ ID NO: 441233
uuauugcccacuuuagaaa

SEQ ID NO: 441235 - RNA, 19 nt, Artificial Sequence
  Description of Artificial Sequence: Synthetic oligonucleotide
  Sense strand starting at position 923 of SEQ ID NO: 316799
uaaagugggcaauaaaguu

SEQ ID NO: 441236 - RNA, 19 nt, Artificial Sequence
  Description of Artificial Sequence: Synthetic oligonucleotide
  Antisense Strand to SEQ ID NO: 441235
aacuuuauugcccacuuua

SEQ ID NO: 441237 - RNA, 19 nt, Artificial Sequence
  Description of Artificial Sequence: Synthetic oligonucleotide
  Sense strand starting at position 1001 of SEQ ID NO: 316799
uuaaaucuauuugagagca

SEQ ID NO: 441238 - RNA, 19 nt, Artificial Sequence
  Description of Artificial Sequence: Synthetic oligonucleotide
  Antisense Strand to SEQ ID NO: 441237
ugcucucaaauagauuuaa

SEQ ID NO: 441239 - RNA, 19 nt, Artificial Sequence
  Description of Artificial Sequence: Synthetic oligonucleotide
  Sense strand starting at position 1050 of SEQ ID NO: 316799
ccugucugcacguuaugua

SEQ ID NO: 441240 - RNA, 19 nt, Artificial Sequence
  Description of Artificial Sequence: Synthetic oligonucleotide
  Antisense Strand to SEQ ID NO: 441239
uacauaacgugcagacagg

SEQ ID NO: 441241 - RNA, 19 nt, Artificial Sequence
  Description of Artificial Sequence: Synthetic oligonucleotide
  Sense strand starting at position 1163 of SEQ ID NO: 316799
augauugaauuggauagaa

SEQ ID NO: 441242 - RNA, 19 nt, Artificial Sequence
  Description of Artificial Sequence: Synthetic oligonucleotide
  Antisense Strand to SEQ ID NO: 441241
uucuauccaauucaaucau

SEQ ID NO: 441243 - RNA, 19 nt, Artificial Sequence
  Description of Artificial Sequence: Synthetic oligonucleotide
  Sense strand starting at position 1191 of SEQ ID NO: 316799
ugacaugucuuauauuuga

SEQ ID NO: 441244 - RNA, 19 nt, Artificial Sequence
  Description of Artificial Sequence: Synthetic oligonucleotide
  Antisense Strand to SEQ ID NO: 441243
ucaaauauaagacauguca

SEQ ID NO: 441245 - RNA, 19 nt, Artificial Sequence
  Description of Artificial Sequence: Synthetic oligonucleotide
  Sense strand starting at position 1440 of SEQ ID NO: 316799
cuauuugugucuuucugaa

SEQ ID NO: 441246 - RNA, 19 nt, Artificial Sequence
  Description of Artificial Sequence: Synthetic oligonucleotide
  Antisense Strand to SEQ ID NO: 441245
uucagaaagacacaaauag

SEQ ID NO: 441247 - RNA, 19 nt, Artificial Sequence
  Description of Artificial Sequence: Synthetic oligonucleotide
  Sense strand starting at position 1572 of SEQ ID NO: 316799
uugaacuauucugcuagaa

SEQ ID NO: 441248 - RNA, 19 nt, Artificial Sequence
  Description of Artificial Sequence: Synthetic oligonucleotide
  Antisense Strand to SEQ ID NO: 441247
uucuagcagaauaguucaa

SEQ ID NO: 441249 - RNA, 19 nt, Artificial Sequence
  Description of Artificial Sequence: Synthetic oligonucleotide
  Sense strand starting at position 1598 of SEQ ID NO: 316799
uugcuaugguaauuacaaa

SEQ ID NO: 441250 - RNA, 19 nt, Artificial Sequence
  Description of Artificial Sequence: Synthetic oligonucleotide
  Antisense Strand to SEQ ID NO: 441249
uuuguaauuaccauagcaa

SEQ ID NO: 441251 - RNA, 19 nt, Artificial Sequence
  Description of Artificial Sequence: Synthetic oligonucleotide
  Sense strand starting at position 1892 of SEQ ID NO: 316799
cuuaguaaacaguggaaga

SEQ ID NO: 441252 - RNA, 19 nt, Artificial Sequence
  Description of Artificial Sequence: Synthetic oligonucleotide
  Antisense Strand to SEQ ID NO: 441251
ucuuccacuguuuacuaag

SEQ ID NO: 441253 - RNA, 19 nt, Artificial Sequence
  Description of Artificial Sequence: Synthetic oligonucleotide
  Sense strand starting at position 1985 of SEQ ID NO: 316799
gaagcaaguuguguugaug

SEQ ID NO: 441254 - RNA, 19 nt, Artificial Sequence
  Description of Artificial Sequence: Synthetic oligonucleotide
  Antisense Strand to SEQ ID NO: 441253
caucaacacaacuugcuuc

SEQ ID NO: 441255 - RNA, 19 nt, Artificial Sequence
  Description of Artificial Sequence: Synthetic oligonucleotide
  Sense strand starting at position 1993 of SEQ ID NO: 316799
uuguguugaugaccaagau

SEQ ID NO: 441256 - RNA, 19 nt, Artificial Sequence
  Description of Artificial Sequence: Synthetic oligonucleotide
  Antisense Strand to SEQ ID NO: 441255
aucuuggucaucaacacaa

SEQ ID NO: 441257 - RNA, 19 nt, Artificial Sequence
  Description of Artificial Sequence: Synthetic oligonucleotide
  Sense strand starting at position 2025 of SEQ ID NO: 316799
uuugcuuuacgcuauuuaa

SEQ ID NO: 441258 - RNA, 19 nt, Artificial Sequence
  Description of Artificial Sequence: Synthetic oligonucleotide
  Antisense Strand to SEQ ID NO: 441257
uuaaauagcguaaagcaaa

SEQ ID NO: 441259 - RNA, 19 nt, Artificial Sequence
  Description of Artificial Sequence: Synthetic oligonucleotide
  Sense strand starting at position 2028 of SEQ ID NO: 316799
gcuuuacgcuauuuaaaug

SEQ ID NO: 441260 - RNA, 19 nt, Artificial Sequence
  Description of Artificial Sequence: Synthetic oligonucleotide
  Antisense Strand to SEQ ID NO: 441259
cauuuaaauagcguaaagc

SEQ ID NO: 441261 - RNA, 19 nt, Artificial Sequence
  Description of Artificial Sequence: Synthetic oligonucleotide
  Sense strand starting at position 2033 of SEQ ID NO: 316799
acgcuauuuaaauguggua

SEQ ID NO: 441262 - RNA, 19 nt, Artificial Sequence
  Description of Artificial Sequence: Synthetic oligonucleotide
  Antisense Strand to SEQ ID NO: 441261
uaccacauuuaaauagcgu

SEQ ID NO: 441263 - RNA, 19 nt, Artificial Sequence
  Description of Artificial Sequence: Synthetic oligonucleotide
  Sense strand starting at position 2387 of SEQ ID NO: 316799
gggucuuagaaacguucca

SEQ ID NO: 441264 - RNA, 19 nt, Artificial Sequence
  Description of Artificial Sequence: Synthetic oligonucleotide
  Antisense Strand to SEQ ID NO: 441263
uggaacguuucuaagaccc

SEQ ID NO: 441265 - RNA, 19 nt, Artificial Sequence
  Description of Artificial Sequence: Synthetic oligonucleotide
  Sense strand starting at position 2415 of SEQ ID NO: 316799
aguguaccaggccauuaaa

SEQ ID NO: 441266 - RNA, 19 nt, Artificial Sequence
  Description of Artificial Sequence: Synthetic oligonucleotide
  Antisense Strand to SEQ ID NO: 441265
uuuaauggccugguacacu

SEQ ID NO: 441267 - RNA, 19 nt, Artificial Sequence
  Description of Artificial Sequence: Synthetic oligonucleotide
  Sense strand starting at position 2490 of SEQ ID NO: 316799
gacuaucugcuuuauggau

SEQ ID NO: 441268 - RNA, 19 nt, Artificial Sequence
  Description of Artificial Sequence: Synthetic oligonucleotide
  Antisense Strand to SEQ ID NO: 441267
auccauaaagcagauaguc

SEQ ID NO: 441269 - RNA, 19 nt, Artificial Sequence
  Description of Artificial Sequence: Synthetic oligonucleotide
  Sense strand starting at position 2497 of SEQ ID NO: 316799
ugcuuuauggauuaacuua

SEQ ID NO: 441270 - RNA, 19 nt, Artificial Sequence
  Description of Artificial Sequence: Synthetic oligonucleotide
  Antisense Strand to SEQ ID NO: 441269
uaaguuaauccauaaagca

SEQ ID NO: 441271 - RNA, 19 nt, Artificial Sequence
  Description of Artificial Sequence: Synthetic oligonucleotide
  Sense strand starting at position 2620 of SEQ ID NO: 316799
uaggcauauugguugugau

SEQ ID NO: 441272 - RNA, 19 nt, Artificial Sequence
  Description of Artificial Sequence: Synthetic oligonucleotide
  Antisense Strand to SEQ ID NO: 441271
aucacaaccaauaugccua

SEQ ID NO: 441273 - RNA, 19 nt, Artificial Sequence
  Description of Artificial Sequence: Synthetic oligonucleotide
  Sense strand starting at position 2621 of SEQ ID NO: 316799
aggcauauugguugugaua

SEQ ID NO: 441274 - RNA, 19 nt, Artificial Sequence
  Description of Artificial Sequence: Synthetic oligonucleotide
  Antisense Strand to SEQ ID NO: 441273
uaucacaaccaauaugccu

SEQ ID NO: 441275 - RNA, 19 nt, Artificial Sequence
  Description of Artificial Sequence: Synthetic oligonucleotide
  Sense strand starting at position 2794 of SEQ ID NO: 316799
cccagacucuguuccuuua

SEQ ID NO: 441276 - RNA, 19 nt, Artificial Sequence
  Description of Artificial Sequence: Synthetic oligonucleotide
  Antisense Strand to SEQ ID NO: 441275
uaaaggaacagagucuggg

SEQ ID NO: 441277 - RNA, 19 nt, Artificial Sequence
  Description of Artificial Sequence: Synthetic oligonucleotide
  Sense strand starting at position 2797 of SEQ ID NO: 316799
agacucuguuccuuuaugu

SEQ ID NO: 441278 - RNA, 19 nt, Artificial Sequence
  Description of Artificial Sequence: Synthetic oligonucleotide
  Antisense Strand to SEQ ID NO: 441277
acauaaaggaacagagucu

SEQ ID NO: 441279 - RNA, 19 nt, Artificial Sequence
  Description of Artificial Sequence: Synthetic oligonucleotide
  Sense strand starting at position 3001 of SEQ ID NO: 316799
ggcauuauucuggguuaac

SEQ ID NO: 441280 - RNA, 19 nt, Artificial Sequence
  Description of Artificial Sequence: Synthetic oligonucleotide
  Antisense Strand to SEQ ID NO: 441279
guuaacccagaauaaugcc

SEQ ID NO: 441281 - RNA, 19 nt, Artificial Sequence
  Description of Artificial Sequence: Synthetic oligonucleotide
  Sense strand starting at position 3002 of SEQ ID NO: 316799
gcauuauucuggguuaaca

SEQ ID NO: 441282 - RNA, 19 nt, Artificial Sequence
  Description of Artificial Sequence: Synthetic oligonucleotide
  Antisense Strand to SEQ ID NO: 441281
uguuaacccagaauaaugc

SEQ ID NO: 441283 - RNA, 19 nt, Artificial Sequence
  Description of Artificial Sequence: Synthetic oligonucleotide
  Sense strand starting at position 3135 of SEQ ID NO: 316799
acuuacuaguguuuccuau

SEQ ID NO: 441284 - RNA, 19 nt, Artificial Sequence
  Description of Artificial Sequence: Synthetic oligonucleotide
  Antisense Strand to SEQ ID NO: 441283
auaggaaacacuaguaagu

SEQ ID NO: 441285 - RNA, 19 nt, Artificial Sequence
  Description of Artificial Sequence: Synthetic oligonucleotide
  Sense strand starting at position 3223 of SEQ ID NO: 316799
ccagaaguguacccaggaa

SEQ ID NO: 441286 - RNA, 19 nt, Artificial Sequence
  Description of Artificial Sequence: Synthetic oligonucleotide
  Antisense Strand to SEQ ID NO: 441285
uuccuggguacacuucugg

SEQ ID NO: 441287 - RNA, 19 nt, Artificial Sequence
  Description of Artificial Sequence: Synthetic oligonucleotide
  Sense strand starting at position 3438 of SEQ ID NO: 316799
gauaucaaugccuggcaga

SEQ ID NO: 441288 - RNA, 19 nt, Artificial Sequence
  Description of Artificial Sequence: Synthetic oligonucleotide
  Antisense Strand to SEQ ID NO: 441287
ucugccaggcauugauauc

SEQ ID NO: 441289 - RNA, 19 nt, Artificial Sequence
  Description of Artificial Sequence: Synthetic oligonucleotide
  Sense strand starting at position 37 of SEQ ID NO: 316800
ccuuguauucuguaauaga

SEQ ID NO: 441290 - RNA, 19 nt, Artificial Sequence
  Description of Artificial Sequence: Synthetic oligonucleotide
  Antisense Strand to SEQ ID NO: 441289
ucuauuacagaauacaagg

SEQ ID NO: 441291 - RNA, 19 nt, Artificial Sequence
  Description of Artificial Sequence: Synthetic oligonucleotide
  Sense strand starting at position 47 of SEQ ID NO: 316800
uguaauagauuccuacaga

SEQ ID NO: 441292 - RNA, 19 nt, Artificial Sequence
  Description of Artificial Sequence: Synthetic oligonucleotide
  Antisense Strand to SEQ ID NO: 441291
ucuguaggaaucuauuaca

SEQ ID NO: 441293 - RNA, 19 nt, Artificial Sequence
  Description of Artificial Sequence: Synthetic oligonucleotide
  Sense strand starting at position 132 of SEQ ID NO: 316800
aggcauuaauucuuugaua

SEQ ID NO: 441294 - RNA, 19 nt, Artificial Sequence
  Description of Artificial Sequence: Synthetic oligonucleotide
  Antisense Strand to SEQ ID NO: 441293
uaucaaagaauuaaugccu

SEQ ID NO: 441295 - RNA, 19 nt, Artificial Sequence
  Description of Artificial Sequence: Synthetic oligonucleotide
  Sense strand starting at position 133 of SEQ ID NO: 316800
ggcauuaauucuuugauaa

SEQ ID NO: 441296 - RNA, 19 nt, Artificial Sequence
  Description of Artificial Sequence: Synthetic oligonucleotide
  Antisense Strand to SEQ ID NO: 441295
uuaucaaagaauuaaugcc

SEQ ID NO: 441297 - RNA, 19 nt, Artificial Sequence
  Description of Artificial Sequence: Synthetic oligonucleotide
  Sense strand starting at position 199 of SEQ ID NO: 316800
ucuauaugagcuuguuaug

SEQ ID NO: 441298 - RNA, 19 nt, Artificial Sequence
  Description of Artificial Sequence: Synthetic oligonucleotide
  Antisense Strand to SEQ ID NO: 441297
cauaacaagcucauauaga

SEQ ID NO: 441299 - RNA, 19 nt, Artificial Sequence
  Description of Artificial Sequence: Synthetic oligonucleotide
  Sense strand starting at position 227 of SEQ ID NO: 316800
gucagaugaaugcagucaa

SEQ ID NO: 441300 - RNA, 19 nt, Artificial Sequence
  Description of Artificial Sequence: Synthetic oligonucleotide
  Antisense Strand to SEQ ID NO: 441299
uugacugcauucaucugac

SEQ ID NO: 441301 - RNA, 19 nt, Artificial Sequence
  Description of Artificial Sequence: Synthetic oligonucleotide
  Sense strand starting at position 556 of SEQ ID NO: 316800
agguaaauuuaggacuaca

SEQ ID NO: 441302 - RNA, 19 nt, Artificial Sequence
  Description of Artificial Sequence: Synthetic oligonucleotide
  Antisense Strand to SEQ ID NO: 441301
uguaguccuaaauuuaccu

SEQ ID NO: 441303 - RNA, 19 nt, Artificial Sequence
  Description of Artificial Sequence: Synthetic oligonucleotide
  Sense strand starting at position 581 of SEQ ID NO: 316800
cucgcuuauuuacuaaagu

SEQ ID NO: 441304 - RNA, 19 nt, Artificial Sequence
  Description of Artificial Sequence: Synthetic oligonucleotide
  Antisense Strand to SEQ ID NO: 441303
acuuuaguaaauaagcgag

SEQ ID NO: 441305 - RNA, 19 nt, Artificial Sequence
  Description of Artificial Sequence: Synthetic oligonucleotide
  Sense strand starting at position 591 of SEQ ID NO: 316800
uacuaaaguggcuauugua

SEQ ID NO: 441306 - RNA, 19 nt, Artificial Sequence
  Description of Artificial Sequence: Synthetic oligonucleotide
  Antisense Strand to SEQ ID NO: 441305
uacaauagccacuuuagua

SEQ ID NO: 441307 - RNA, 19 nt, Artificial Sequence
  Description of Artificial Sequence: Synthetic oligonucleotide
  Sense strand starting at position 712 of SEQ ID NO: 316800
gucaaugucugacccauag

SEQ ID NO: 441308 - RNA, 19 nt, Artificial Sequence
  Description of Artificial Sequence: Synthetic oligonucleotide
  Antisense Strand to SEQ ID NO: 441307
cuaugggucagacauugac

SEQ ID NO: 441309 - RNA, 19 nt, Artificial Sequence
  Description of Artificial Sequence: Synthetic oligonucleotide
  Sense strand starting at position 727 of SEQ ID NO: 316800
auagaaggccgucaguaua

SEQ ID NO: 441310 - RNA, 19 nt, Artificial Sequence
  Description of Artificial Sequence: Synthetic oligonucleotide
  Antisense Strand to SEQ ID NO: 441309
uauacugacggccuucuau

SEQ ID NO: 441311 - RNA, 19 nt, Artificial Sequence
  Description of Artificial Sequence: Synthetic oligonucleotide
  Sense strand starting at position 753 of SEQ ID NO: 316800
ggugaauaaguucagagua

SEQ ID NO: 441312 - RNA, 19 nt, Artificial Sequence
  Description of Artificial Sequence: Synthetic oligonucleotide
  Antisense Strand to SEQ ID NO: 441311
uacucugaacuuauucacc

SEQ ID NO: 441313 - RNA, 19 nt, Artificial Sequence
  Description of Artificial Sequence: Synthetic oligonucleotide
  Sense strand starting at position 862 of SEQ ID NO: 316800
aaaguucuagaauguugua

SEQ ID NO: 441314 - RNA, 19 nt, Artificial Sequence
  Description of Artificial Sequence: Synthetic oligonucleotide
  Antisense Strand to SEQ ID NO: 441313
uacaacauucuagaacuuu

SEQ ID NO: 441315 - RNA, 19 nt, Artificial Sequence
  Description of Artificial Sequence: Synthetic oligonucleotide
  Sense strand starting at position 876 of SEQ ID NO: 316800
uuguauuauccagauacuu

SEQ ID NO: 441316 - RNA, 19 nt, Artificial Sequence
  Description of Artificial Sequence: Synthetic oligonucleotide
  Antisense Strand to SEQ ID NO: 441315
aaguaucuggauaauacaa

SEQ ID NO: 441317 - RNA, 19 nt, Artificial Sequence
  Description of Artificial Sequence: Synthetic oligonucleotide
  Sense strand starting at position 963 of SEQ ID NO: 316800
cuuaacugccaugauguaa

SEQ ID NO: 441318 - RNA, 19 nt, Artificial Sequence
  Description of Artificial Sequence: Synthetic oligonucleotide
  Antisense Strand to SEQ ID NO: 441317
uuacaucauggcaguuaag

SEQ ID NO: 441319 - RNA, 19 nt, Artificial Sequence
  Description of Artificial Sequence: Synthetic oligonucleotide
  Sense strand starting at position 1038 of SEQ ID NO: 316800
uuaccucacugcuugaaag

SEQ ID NO: 441320 - RNA, 19 nt, Artificial Sequence
  Description of Artificial Sequence: Synthetic oligonucleotide
  Antisense Strand to SEQ ID NO: 441319
cuuucaagcagugagguaa

SEQ ID NO: 441321 - RNA, 19 nt, Artificial Sequence
  Description of Artificial Sequence: Synthetic oligonucleotide
  Sense strand starting at position 1058 of SEQ ID NO: 316800
cuuucuauggucuguggga

SEQ ID NO: 441322 - RNA, 19 nt, Artificial Sequence
  Description of Artificial Sequence: Synthetic oligonucleotide
  Antisense Strand to SEQ ID NO: 441321
ucccacagaccauagaaag

SEQ ID NO: 441323 - RNA, 19 nt, Artificial Sequence
  Description of Artificial Sequence: Synthetic oligonucleotide
  Sense strand starting at position 1059 of SEQ ID NO: 316800
uuucuauggucugugggaa

SEQ ID NO: 441324 - RNA, 19 nt, Artificial Sequence
  Description of Artificial Sequence: Synthetic oligonucleotide
  Antisense Strand to SEQ ID NO: 441323
uucccacagaccauagaaa

SEQ ID NO: 441325 - RNA, 19 nt, Artificial Sequence
  Description of Artificial Sequence: Synthetic oligonucleotide
  Sense strand starting at position 1060 of SEQ ID NO: 316800
uucuauggucugugggaaa

SEQ ID NO: 441326 - RNA, 19 nt, Artificial Sequence
  Description of Artificial Sequence: Synthetic oligonucleotide
  Antisense Strand to SEQ ID NO: 441325
uuucccacagaccauagaa

SEQ ID NO: 441327 - RNA, 19 nt, Artificial Sequence
  Description of Artificial Sequence: Synthetic oligonucleotide
  Sense strand starting at position 1172 of SEQ ID NO: 316800
agaggaugcauuggauugu

SEQ ID NO: 441328 - RNA, 19 nt, Artificial Sequence
  Description of Artificial Sequence: Synthetic oligonucleotide
  Antisense Strand to SEQ ID NO: 441327
acaauccaaugcauccucu

SEQ ID NO: 441329 - RNA, 19 nt, Artificial Sequence
  Description of Artificial Sequence: Synthetic oligonucleotide
  Sense strand starting at position 1181 of SEQ ID NO: 316800
auuggauuguuccuucuga

SEQ ID NO: 441330 - RNA, 19 nt, Artificial Sequence
  Description of Artificial Sequence: Synthetic oligonucleotide
  Antisense Strand to SEQ ID NO: 441329
ucagaaggaacaauccaau

SEQ ID NO: 441331 - RNA, 19 nt, Artificial Sequence
  Description of Artificial Sequence: Synthetic oligonucleotide
  Sense strand starting at position 1182 of SEQ ID NO: 316800
uuggauuguuccuucugaa

SEQ ID NO: 441332 - RNA, 19 nt, Artificial Sequence
  Description of Artificial Sequence: Synthetic oligonucleotide
  Antisense Strand to SEQ ID NO: 441331
uucagaaggaacaauccaa

SEQ ID NO: 441333 - RNA, 19 nt, Artificial Sequence
  Description of Artificial Sequence: Synthetic oligonucleotide
  Sense strand starting at position 1268 of SEQ ID NO: 316800
aucacuuaugcagagcuau

SEQ ID NO: 441334 - RNA, 19 nt, Artificial Sequence
  Description of Artificial Sequence: Synthetic oligonucleotide
  Antisense Strand to SEQ ID NO: 441333
auagcucugcauaagugau

SEQ ID NO: 441335 - RNA, 19 nt, Artificial Sequence
  Description of Artificial Sequence: Synthetic oligonucleotide
  Sense strand starting at position 1340 of SEQ ID NO: 316800
agguaauuacuuuaauguc

SEQ ID NO: 441336 - RNA, 19 nt, Artificial Sequence
  Description of Artificial Sequence: Synthetic oligonucleotide
  Antisense Strand to SEQ ID NO: 441335
gacauuaaaguaauuaccu

SEQ ID NO: 441337 - RNA, 19 nt, Artificial Sequence
  Description of Artificial Sequence: Synthetic oligonucleotide
  Sense strand starting at position 1522 of SEQ ID NO: 316800
cauggaugucuuuguacag

SEQ ID NO: 441338 - RNA, 19 nt, Artificial Sequence
  Description of Artificial Sequence: Synthetic oligonucleotide
  Antisense Strand to SEQ ID NO: 441337
cuguacaaagacauccaug

SEQ ID NO: 441339 - RNA, 19 nt, Artificial Sequence
  Description of Artificial Sequence: Synthetic oligonucleotide
  Sense strand starting at position 1523 of SEQ ID NO: 316800
auggaugucuuuguacaga

SEQ ID NO: 441340 - RNA, 19 nt, Artificial Sequence
  Description of Artificial Sequence: Synthetic oligonucleotide
  Antisense Strand to SEQ ID NO: 441339
ucuguacaaagacauccau

SEQ ID NO: 441341 - RNA, 19 nt, Artificial Sequence
  Description of Artificial Sequence: Synthetic oligonucleotide
  Sense strand starting at position 1613 of SEQ ID NO: 316800
uuuaucuagcuugagaauc

SEQ ID NO: 441342 - RNA, 19 nt, Artificial Sequence
  Description of Artificial Sequence: Synthetic oligonucleotide
  Antisense Strand to SEQ ID NO: 441341
gauucucaagcuagauaaa

SEQ ID NO: 441343 - RNA, 19 nt, Artificial Sequence
  Description of Artificial Sequence: Synthetic oligonucleotide
  Sense strand starting at position 1621 of SEQ ID NO: 316800
gcuugagaaucuuuggagu

SEQ ID NO: 441344 - RNA, 19 nt, Artificial Sequence
  Description of Artificial Sequence: Synthetic oligonucleotide
  Antisense Strand to SEQ ID NO: 441343
acuccaaagauucucaagc

SEQ ID NO: 441345 - RNA, 19 nt, Artificial Sequence
  Description of Artificial Sequence: Synthetic oligonucleotide
  Sense strand starting at position 1652 of SEQ ID NO: 316800
auauuauauuucguugcca

SEQ ID NO: 441346 - RNA, 19 nt, Artificial Sequence
  Description of Artificial Sequence: Synthetic oligonucleotide
  Antisense Strand to SEQ ID NO: 441345
uggcaacgaaauauaauau

SEQ ID NO: 441347 - RNA, 19 nt, Artificial Sequence
  Description of Artificial Sequence: Synthetic oligonucleotide
  Sense strand starting at position 1654 of SEQ ID NO: 316800
auuauauuucguugccauu

SEQ ID NO: 441348 - RNA, 19 nt, Artificial Sequence
  Description of Artificial Sequence: Synthetic oligonucleotide
  Antisense Strand to SEQ ID NO: 441347
aauggcaacgaaauauaau

SEQ ID NO: 441349 - RNA, 19 nt, Artificial Sequence
  Description of Artificial Sequence: Synthetic oligonucleotide
  Sense strand starting at position 1767 of SEQ ID NO: 316800
uguugagacaguggguaaa

SEQ ID NO: 441350 - RNA, 19 nt, Artificial Sequence
  Description of Artificial Sequence: Synthetic oligonucleotide
  Antisense Strand to SEQ ID NO: 441349
uuuacccacugucucaaca

SEQ ID NO: 441351 - RNA, 19 nt, Artificial Sequence
  Description of Artificial Sequence: Synthetic oligonucleotide
  Sense strand starting at position 1769 of SEQ ID NO: 316800
uugagacaguggguaaaua

SEQ ID NO: 441352 - RNA, 19 nt, Artificial Sequence
  Description of Artificial Sequence: Synthetic oligonucleotide
  Antisense Strand to SEQ ID NO: 441351
uauuuacccacugucucaa

SEQ ID NO: 441353 - RNA, 19 nt, Artificial Sequence
  Description of Artificial Sequence: Synthetic oligonucleotide
  Sense strand starting at position 1856 of SEQ ID NO: 316800
uggugauguuauucucuac

SEQ ID NO: 441354 - RNA, 19 nt, Artificial Sequence
  Description of Artificial Sequence: Synthetic oligonucleotide
  Antisense Strand to SEQ ID NO: 441353
guagagaauaacaucacca

SEQ ID NO: 441355 - RNA, 19 nt, Artificial Sequence
  Description of Artificial Sequence: Synthetic oligonucleotide
  Sense strand starting at position 1992 of SEQ ID NO: 316800
aaguccugugaauguagaa

SEQ ID NO: 441356 - RNA, 19 nt, Artificial Sequence
  Description of Artificial Sequence: Synthetic oligonucleotide
  Antisense Strand to SEQ ID NO: 441355
uucuacauucacaggacuu

SEQ ID NO: 441357 - RNA, 19 nt, Artificial Sequence
  Description of Artificial Sequence: Synthetic oligonucleotide
  Sense strand starting at position 2021 of SEQ ID NO: 316800
gguggaagauuggucaauu

SEQ ID NO: 441358 - RNA, 19 nt, Artificial Sequence
  Description of Artificial Sequence: Synthetic oligonucleotide
  Antisense Strand to SEQ ID NO: 441357
aauugaccaaucuuccacc

SEQ ID NO: 441359 - RNA, 19 nt, Artificial Sequence
  Description of Artificial Sequence: Synthetic oligonucleotide
  Sense strand starting at position 2022 of SEQ ID NO: 316800
guggaagauuggucaauug

SEQ ID NO: 441360 - RNA, 19 nt, Artificial Sequence
  Description of Artificial Sequence: Synthetic oligonucleotide
  Antisense Strand to SEQ ID NO: 441359
caauugaccaaucuuccac

SEQ ID NO: 441361 - RNA, 19 nt, Artificial Sequence
  Description of Artificial Sequence: Synthetic oligonucleotide
  Sense strand starting at position 2040 of SEQ ID NO: 316800
ggauauacuuucuuaugua

SEQ ID NO: 441362 - RNA, 19 nt, Artificial Sequence
  Description of Artificial Sequence: Synthetic oligonucleotide
  Antisense Strand to SEQ ID NO: 441361
uacauaagaaaguauaucc

SEQ ID NO: 441363 - RNA, 19 nt, Artificial Sequence
  Description of Artificial Sequence: Synthetic oligonucleotide
  Sense strand starting at position 2044 of SEQ ID NO: 316800
auacuuucuuauguaggua

SEQ ID NO: 441364 - RNA, 19 nt, Artificial Sequence
  Description of Artificial Sequence: Synthetic oligonucleotide
  Antisense Strand to SEQ ID NO: 441363
uaccuacauaagaaaguau

SEQ ID NO: 441365 - RNA, 19 nt, Artificial Sequence
  Description of Artificial Sequence: Synthetic oligonucleotide
  Sense strand starting at position 2049 of SEQ ID NO: 316800
uucuuauguagguaagguu

SEQ ID NO: 441366 - RNA, 19 nt, Artificial Sequence
  Description of Artificial Sequence: Synthetic oligonucleotide
  Antisense Strand to SEQ ID NO: 441365
aaccuuaccuacauaagaa

SEQ ID NO: 441367 - RNA, 19 nt, Artificial Sequence
  Description of Artificial Sequence: Synthetic oligonucleotide
  Sense strand starting at position 2334 of SEQ ID NO: 316800
uggaaagauuuaugcaaca

SEQ ID NO: 441368 - RNA, 19 nt, Artificial Sequence
  Description of Artificial Sequence: Synthetic oligonucleotide
  Antisense Strand to SEQ ID NO: 441367
uguugcauaaaucuuucca

SEQ ID NO: 441369 - RNA, 19 nt, Artificial Sequence
  Description of Artificial Sequence: Synthetic oligonucleotide
  Sense strand starting at position 300 of SEQ ID NO: 316801
ucuugagaaucgccaugaa

SEQ ID NO: 441370 - RNA, 19 nt, Artificial Sequence
  Description of Artificial Sequence: Synthetic oligonucleotide
  Antisense Strand to SEQ ID NO: 441369
uucauggcgauucucaaga

SEQ ID NO: 441371 - RNA, 19 nt, Artificial Sequence
  Description of Artificial Sequence: Synthetic oligonucleotide
  Sense strand starting at position 303 of SEQ ID NO: 316801
ugagaaucgccaugaacau

SEQ ID NO: 441372 - RNA, 19 nt, Artificial Sequence
  Description of Artificial Sequence: Synthetic oligonucleotide
  Antisense Strand to SEQ ID NO: 441371
auguucauggcgauucuca

SEQ ID NO: 441373 - RNA, 19 nt, Artificial Sequence
  Description of Artificial Sequence: Synthetic oligonucleotide
  Sense strand starting at position 304 of SEQ ID NO: 316801
gagaaucgccaugaacauu

SEQ ID NO: 441374 - RNA, 19 nt, Artificial Sequence
  Description of Artificial Sequence: Synthetic oligonucleotide
  Antisense Strand to SEQ ID NO: 441373
aauguucauggcgauucuc

SEQ ID NO: 441375 - RNA, 19 nt, Artificial Sequence
  Description of Artificial Sequence: Synthetic oligonucleotide
  Sense strand starting at position 312 of SEQ ID NO: 316801
ccaugaacauuugauugga

SEQ ID NO: 441376 - RNA, 19 nt, Artificial Sequence
  Description of Artificial Sequence: Synthetic oligonucleotide
  Antisense Strand to SEQ ID NO: 441375
uccaaucaaauguucaugg

SEQ ID NO: 441377 - RNA, 19 nt, Artificial Sequence
  Description of Artificial Sequence: Synthetic oligonucleotide
  Sense strand starting at position 349 of SEQ ID NO: 316801
aauauaagauuggaaggaa

SEQ ID NO: 441378 - RNA, 19 nt, Artificial Sequence
  Description of Artificial Sequence: Synthetic oligonucleotide
  Antisense Strand to SEQ ID NO: 441377
uuccuuccaaucuuauauu

SEQ ID NO: 441379 - RNA, 19 nt, Artificial Sequence
  Description of Artificial Sequence: Synthetic oligonucleotide
  Sense strand starting at position 462 of SEQ ID NO: 316801
uggacuagaaaguguauga

SEQ ID NO: 441380 - RNA, 19 nt, Artificial Sequence
  Description of Artificial Sequence: Synthetic oligonucleotide
  Antisense Strand to SEQ ID NO: 441379
ucauacacuuucuagucca

SEQ ID NO: 441381 - RNA, 19 nt, Artificial Sequence
  Description of Artificial Sequence: Synthetic oligonucleotide
  Sense strand starting at position 466 of SEQ ID NO: 316801
cuagaaaguguaugacuau

SEQ ID NO: 441382 - RNA, 19 nt, Artificial Sequence
  Description of Artificial Sequence: Synthetic oligonucleotide
  Antisense Strand to SEQ ID NO: 441381
auagucauacacuuucuag

SEQ ID NO: 441383 - RNA, 19 nt, Artificial Sequence
  Description of Artificial Sequence: Synthetic oligonucleotide
  Sense strand starting at position 469 of SEQ ID NO: 316801
gaaaguguaugacuauaca

SEQ ID NO: 441384 - RNA, 19 nt, Artificial Sequence
  Description of Artificial Sequence: Synthetic oligonucleotide
  Antisense Strand to SEQ ID NO: 441383
uguauagucauacacuuuc

SEQ ID NO: 441385 - RNA, 19 nt, Artificial Sequence
  Description of Artificial Sequence: Synthetic oligonucleotide
  Sense strand starting at position 531 of SEQ ID NO: 316801
cuguaacuuugaucaagug

SEQ ID NO: 441386 - RNA, 19 nt, Artificial Sequence
  Description of Artificial Sequence: Synthetic oligonucleotide
  Antisense Strand to SEQ ID NO: 441385
cacuugaucaaaguuacag

SEQ ID NO: 441387 - RNA, 19 nt, Artificial Sequence
  Description of Artificial Sequence: Synthetic oligonucleotide
  Sense strand starting at position 532 of SEQ ID NO: 316801
uguaacuuugaucaaguga

SEQ ID NO: 441388 - RNA, 19 nt, Artificial Sequence
  Description of Artificial Sequence: Synthetic oligonucleotide
  Antisense Strand to SEQ ID NO: 441387
ucacuugaucaaaguuaca

SEQ ID NO: 441389 - RNA, 19 nt, Artificial Sequence
  Description of Artificial Sequence: Synthetic oligonucleotide
  Sense strand starting at position 828 of SEQ ID NO: 316801
gaguauauacagugucaua

SEQ ID NO: 441390 - RNA, 19 nt, Artificial Sequence
  Description of Artificial Sequence: Synthetic oligonucleotide
  Antisense Strand to SEQ ID NO: 441389
uaugacacuguauauacuc

SEQ ID NO: 441391 - RNA, 19 nt, Artificial Sequence
  Description of Artificial Sequence: Synthetic oligonucleotide
  Sense strand starting at position 839 of SEQ ID NO: 316801
gugucauacuugcuuauuu

SEQ ID NO: 441392 - RNA, 19 nt, Artificial Sequence
  Description of Artificial Sequence: Synthetic oligonucleotide
  Antisense Strand to SEQ ID NO: 441391
aaauaagcaaguaugacac

SEQ ID NO: 441393 - RNA, 19 nt, Artificial Sequence
  Description of Artificial Sequence: Synthetic oligonucleotide
  Sense strand starting at position 1110 of SEQ ID NO: 316801
uaggaaggcugucuacuaa

SEQ ID NO: 441394 - RNA, 19 nt, Artificial Sequence
  Description of Artificial Sequence: Synthetic oligonucleotide
  Antisense Strand to SEQ ID NO: 441393
uuaguagacagccuuccua

SEQ ID NO: 441395 - RNA, 19 nt, Artificial Sequence
  Description of Artificial Sequence: Synthetic oligonucleotide
  Sense strand starting at position 1176 of SEQ ID NO: 316801
ggaacucauuuggaaucaa

SEQ ID NO: 441396 - RNA, 19 nt, Artificial Sequence
  Description of Artificial Sequence: Synthetic oligonucleotide
  Antisense Strand to SEQ ID NO: 441395
uugauuccaaaugaguucc

SEQ ID NO: 441397 - RNA, 19 nt, Artificial Sequence
  Description of Artificial Sequence: Synthetic oligonucleotide
  Sense strand starting at position 1186 of SEQ ID NO: 316801
uggaaucaauuugaacaau

SEQ ID NO: 441398 - RNA, 19 nt, Artificial Sequence
  Description of Artificial Sequence: Synthetic oligonucleotide
  Antisense Strand to SEQ ID NO: 441397
auuguucaaauugauucca

SEQ ID NO: 441399 - RNA, 19 nt, Artificial Sequence
  Description of Artificial Sequence: Synthetic oligonucleotide
  Sense strand starting at position 1220 of SEQ ID NO: 316801
uuucuuuaagugggaugaa

SEQ ID NO: 441400 - RNA, 19 nt, Artificial Sequence
  Description of Artificial Sequence: Synthetic oligonucleotide
  Antisense Strand to SEQ ID NO: 441399
uucaucccacuuaaagaaa

SEQ ID NO: 441401 - RNA, 19 nt, Artificial Sequence
  Description of Artificial Sequence: Synthetic oligonucleotide
  Sense strand starting at position 1232 of SEQ ID NO: 316801
ggaugaagcuccuuauuaa

SEQ ID NO: 441402 - RNA, 19 nt, Artificial Sequence
  Description of Artificial Sequence: Synthetic oligonucleotide
  Antisense Strand to SEQ ID NO: 441401
uuaauaaggagcuucaucc

SEQ ID NO: 441403 - RNA, 19 nt, Artificial Sequence
  Description of Artificial Sequence: Synthetic oligonucleotide
  Sense strand starting at position 1452 of SEQ ID NO: 316801
cccucaucacuugguaaga

SEQ ID NO: 441404 - RNA, 19 nt, Artificial Sequence
  Description of Artificial Sequence: Synthetic oligonucleotide
  Antisense Strand to SEQ ID NO: 441403
ucuuaccaagugaugaggg

SEQ ID NO: 441405 - RNA, 19 nt, Artificial Sequence
  Description of Artificial Sequence: Synthetic oligonucleotide
  Sense strand starting at position 1453 of SEQ ID NO: 316801
ccucaucacuugguaagaa

SEQ ID NO: 441406 - RNA, 19 nt, Artificial Sequence
  Description of Artificial Sequence: Synthetic oligonucleotide
  Antisense Strand to SEQ ID NO: 441405
uucuuaccaagugaugagg

SEQ ID NO: 441407 - RNA, 19 nt, Artificial Sequence
  Description of Artificial Sequence: Synthetic oligonucleotide
  Sense strand starting at position 1481 of SEQ ID NO: 316801
cgugaaaugguagaauuau

SEQ ID NO: 441408 - RNA, 19 nt, Artificial Sequence
  Description of Artificial Sequence: Synthetic oligonucleotide
  Antisense Strand to SEQ ID NO: 441407
auaauucuaccauuucacg

SEQ ID NO: 441409 - RNA, 19 nt, Artificial Sequence
  Description of Artificial Sequence: Synthetic oligonucleotide
  Sense strand starting at position 1630 of SEQ ID NO: 316801
caacuuccuguggaguuaa

SEQ ID NO: 441410 - RNA, 19 nt, Artificial Sequence
  Description of Artificial Sequence: Synthetic oligonucleotide
  Antisense Strand to SEQ ID NO: 441409
uuaacuccacaggaaguug

SEQ ID NO: 441411 - RNA, 19 nt, Artificial Sequence
  Description of Artificial Sequence: Synthetic oligonucleotide
  Sense strand starting at position 1662 of SEQ ID NO: 316801
ucuguaggaauacguuaaa

SEQ ID NO: 441412 - RNA, 19 nt, Artificial Sequence
  Description of Artificial Sequence: Synthetic oligonucleotide
  Antisense Strand to SEQ ID NO: 441411
uuuaacguauuccuacaga

SEQ ID NO: 441413 - RNA, 19 nt, Artificial Sequence
  Description of Artificial Sequence: Synthetic oligonucleotide
  Sense strand starting at position 1673 of SEQ ID NO: 316801
acguuaaacgccuucuugu

SEQ ID NO: 441414 - RNA, 19 nt, Artificial Sequence
  Description of Artificial Sequence: Synthetic oligonucleotide
  Antisense Strand to SEQ ID NO: 441413
acaagaaggcguuuaacgu

SEQ ID NO: 441415 - RNA, 19 nt, Artificial Sequence
  Description of Artificial Sequence: Synthetic oligonucleotide
  Sense strand starting at position 1674 of SEQ ID NO: 316801
cguuaaacgccuucuuguu

SEQ ID NO: 441416 - RNA, 19 nt, Artificial Sequence
  Description of Artificial Sequence: Synthetic oligonucleotide
  Antisense Strand to SEQ ID NO: 441415
aacaagaaggcguuuaacg

SEQ ID NO: 441417 - RNA, 19 nt, Artificial Sequence
  Description of Artificial Sequence: Synthetic oligonucleotide
  Sense strand starting at position 1709 of SEQ ID NO: 316801
ugcuaugauuuaguuggua

SEQ ID NO: 441418 - RNA, 19 nt, Artificial Sequence
  Description of Artificial Sequence: Synthetic oligonucleotide
  Antisense Strand to SEQ ID NO: 441417
uaccaacuaaaucauagca

SEQ ID NO: 441419 - RNA, 19 nt, Artificial Sequence
  Description of Artificial Sequence: Synthetic oligonucleotide
  Sense strand starting at position 1725 of SEQ ID NO: 316801
guaucagaauuugacugga

SEQ ID NO: 441420 - RNA, 19 nt, Artificial Sequence
  Description of Artificial Sequence: Synthetic oligonucleotide
  Antisense Strand to SEQ ID NO: 441419
uccagucaaauucugauac

SEQ ID NO: 441421 - RNA, 19 nt, Artificial Sequence
  Description of Artificial Sequence: Synthetic oligonucleotide
  Sense strand starting at position 1876 of SEQ ID NO: 316801
cugaaauaacuauggugau

SEQ ID NO: 441422 - RNA, 19 nt, Artificial Sequence
  Description of Artificial Sequence: Synthetic oligonucleotide
  Antisense Strand to SEQ ID NO: 441421
aucaccauaguuauuucag

SEQ ID NO: 441423 - RNA, 19 nt, Artificial Sequence
  Description of Artificial Sequence: Synthetic oligonucleotide
  Sense strand starting at position 1999 of SEQ ID NO: 316801
cugucagcuguagagaaga

SEQ ID NO: 441424 - RNA, 19 nt, Artificial Sequence
  Description of Artificial Sequence: Synthetic oligonucleotide
  Antisense Strand to SEQ ID NO: 441423
ucuucucuacagcugacag

SEQ ID NO: 441425 - RNA, 19 nt, Artificial Sequence
  Description of Artificial Sequence: Synthetic oligonucleotide
  Sense strand starting at position 2063 of SEQ ID NO: 316801
gagucacgcuauucuauuu

SEQ ID NO: 441426 - RNA, 19 nt, Artificial Sequence
  Description of Artificial Sequence: Synthetic oligonucleotide
  Antisense Strand to SEQ ID NO: 441425
aaauagaauagcgugacuc

SEQ ID NO: 441427 - RNA, 19 nt, Artificial Sequence
  Description of Artificial Sequence: Synthetic oligonucleotide
  Sense strand starting at position 2355 of SEQ ID NO: 316801
gauguagagucaucacuca

SEQ ID NO: 441428 - RNA, 19 nt, Artificial Sequence
  Description of Artificial Sequence: Synthetic oligonucleotide
  Antisense Strand to SEQ ID NO: 441427
ugagugaugacucuacauc

SEQ ID NO: 441429 - RNA, 19 nt, Artificial Sequence
  Description of Artificial Sequence: Synthetic oligonucleotide
  Sense strand starting at position 2899 of SEQ ID NO: 316801
uggagauaauuguucuguu

SEQ ID NO: 441430 - RNA, 19 nt, Artificial Sequence
  Description of Artificial Sequence: Synthetic oligonucleotide
  Antisense Strand to SEQ ID NO: 441429
aacagaacaauuaucucca

SEQ ID NO: 441431 - RNA, 19 nt, Artificial Sequence
  Description of Artificial Sequence: Synthetic oligonucleotide
  Sense strand starting at position 2900 of SEQ ID NO: 316801
ggagauaauuguucuguuu

SEQ ID NO: 441432 - RNA, 19 nt, Artificial Sequence
  Description of Artificial Sequence: Synthetic oligonucleotide
  Antisense Strand to SEQ ID NO: 441431
aaacagaacaauuaucucc

SEQ ID NO: 441433 - RNA, 19 nt, Artificial Sequence
  Description of Artificial Sequence: Synthetic oligonucleotide
  Sense strand starting at position 3429 of SEQ ID NO: 316801
ggguccgugguugaaagau

SEQ ID NO: 441434 - RNA, 19 nt, Artificial Sequence
  Description of Artificial Sequence: Synthetic oligonucleotide
  Antisense Strand to SEQ ID NO: 441433
aucuuucaaccacggaccc

SEQ ID NO: 441435 - RNA, 19 nt, Artificial Sequence
  Description of Artificial Sequence: Synthetic oligonucleotide
  Sense strand starting at position 3447 of SEQ ID NO: 316801
ucaugauccggucauuccu

SEQ ID NO: 441436 - RNA, 19 nt, Artificial Sequence
  Description of Artificial Sequence: Synthetic oligonucleotide
  Antisense Strand to SEQ ID NO: 441435
aggaaugaccggaucauga

SEQ ID NO: 441437 - RNA, 19 nt, Artificial Sequence
  Description of Artificial Sequence: Synthetic oligonucleotide
  Sense strand starting at position 3506 of SEQ ID NO: 316801
gccauuuauuuagaguaau

SEQ ID NO: 441438 - RNA, 19 nt, Artificial Sequence
  Description of Artificial Sequence: Synthetic oligonucleotide
  Antisense Strand to SEQ ID NO: 441437
auuacucuaaauaaauggc

SEQ ID NO: 441439 - RNA, 19 nt, Artificial Sequence
  Description of Artificial Sequence: Synthetic oligonucleotide
  Sense strand starting at position 3775 of SEQ ID NO: 316801
ucagguccuggacauuauu

SEQ ID NO: 441440 - RNA, 19 nt, Artificial Sequence
  Description of Artificial Sequence: Synthetic oligonucleotide
  Antisense Strand to SEQ ID NO: 441439
aauaauguccaggaccuga

SEQ ID NO: 441441 - RNA, 19 nt, Artificial Sequence
  Description of Artificial Sequence: Synthetic oligonucleotide
  Sense strand starting at position 3781 of SEQ ID NO: 316801
ccuggacauuauucuuuga

SEQ ID NO: 441442 - RNA, 19 nt, Artificial Sequence
  Description of Artificial Sequence: Synthetic oligonucleotide
  Antisense Strand to SEQ ID NO: 441441
ucaaagaauaauguccagg

SEQ ID NO: 441443 - RNA, 19 nt, Artificial Sequence
  Description of Artificial Sequence: Synthetic oligonucleotide
  Sense strand starting at position 3784 of SEQ ID NO: 316801
ggacauuauucuuugagca

SEQ ID NO: 441444 - RNA, 19 nt, Artificial Sequence
  Description of Artificial Sequence: Synthetic oligonucleotide
  Antisense Strand to SEQ ID NO: 441443
ugcucaaagaauaaugucc

SEQ ID NO: 441445 - RNA, 19 nt, Artificial Sequence
  Description of Artificial Sequence: Synthetic oligonucleotide
  Sense strand starting at position 3858 of SEQ ID NO: 316801
agguaaacaucucuguucu

SEQ ID NO: 441446 - RNA, 19 nt, Artificial Sequence
  Description of Artificial Sequence: Synthetic oligonucleotide
  Antisense Strand to SEQ ID NO: 441445
agaacagagauguuuaccu

SEQ ID NO: 441447 - RNA, 19 nt, Artificial Sequence
  Description of Artificial Sequence: Synthetic oligonucleotide
  Sense strand starting at position 3910 of SEQ ID NO: 316801
cugguaacauuggauauuu

SEQ ID NO: 441448 - RNA, 19 nt, Artificial Sequence
  Description of Artificial Sequence: Synthetic oligonucleotide
  Antisense Strand to SEQ ID NO: 441447
aaauauccaauguuaccag

SEQ ID NO: 441449 - RNA, 19 nt, Artificial Sequence
  Description of Artificial Sequence: Synthetic oligonucleotide
  Sense strand starting at position 10 of SEQ ID NO: 316802
ggaagauccuacucgcuga

SEQ ID NO: 441450 - RNA, 19 nt, Artificial Sequence
  Description of Artificial Sequence: Synthetic oligonucleotide
  Antisense Strand to SEQ ID NO: 441449
ucagcgaguaggaucuucc

SEQ ID NO: 441451 - RNA, 19 nt, Artificial Sequence
  Description of Artificial Sequence: Synthetic oligonucleotide
  Sense strand starting at position 13 of SEQ ID NO: 316802
agauccuacucgcugacau

SEQ ID NO: 441452 - RNA, 19 nt, Artificial Sequence
  Description of Artificial Sequence: Synthetic oligonucleotide
  Antisense Strand to SEQ ID NO: 441451
augucagcgaguaggaucu

SEQ ID NO: 441453 - RNA, 19 nt, Artificial Sequence
  Description of Artificial Sequence: Synthetic oligonucleotide
  Sense strand starting at position 14 of SEQ ID NO: 316802
gauccuacucgcugacauc

SEQ ID NO: 441454 - RNA, 19 nt, Artificial Sequence
  Description of Artificial Sequence: Synthetic oligonucleotide
  Antisense Strand to SEQ ID NO: 441453
gaugucagcgaguaggauc

SEQ ID NO: 441455 - RNA, 19 nt, Artificial Sequence
  Description of Artificial Sequence: Synthetic oligonucleotide
  Sense strand starting at position 205 of SEQ ID NO: 316802
agaggacgccuguauggaa

SEQ ID NO: 441456 - RNA, 19 nt, Artificial Sequence
  Description of Artificial Sequence: Synthetic oligonucleotide
  Antisense Strand to SEQ ID NO: 441455
uuccauacaggcguccucu

SEQ ID NO: 441457 - RNA, 19 nt, Artificial Sequence
  Description of Artificial Sequence: Synthetic oligonucleotide
  Sense strand starting at position 221 of SEQ ID NO: 316802
gaagcaggugcucaaagau

SEQ ID NO: 441458 - RNA, 19 nt, Artificial Sequence
  Description of Artificial Sequence: Synthetic oligonucleotide
  Antisense Strand to SEQ ID NO: 441457
aucuuugagcaccugcuuc

SEQ ID NO: 441459 - RNA, 19 nt, Artificial Sequence
  Description of Artificial Sequence: Synthetic oligonucleotide
  Sense strand starting at position 435 of SEQ ID NO: 316802
cugucauccucagcugcaa

SEQ ID NO: 441460 - RNA, 19 nt, Artificial Sequence
  Description of Artificial Sequence: Synthetic oligonucleotide
  Antisense Strand to SEQ ID NO: 441459
uugcagcugaggaugacag

SEQ ID NO: 441461 - RNA, 19 nt, Artificial Sequence
  Description of Artificial Sequence: Synthetic oligonucleotide
  Sense strand starting at position 796 of SEQ ID NO: 316802
agggaauucugucccggca

SEQ ID NO: 441462 - RNA, 19 nt, Artificial Sequence
  Description of Artificial Sequence: Synthetic oligonucleotide
  Antisense Strand to SEQ ID NO: 441461
ugccgggacagaauucccu

SEQ ID NO: 441463 - RNA, 19 nt, Artificial Sequence
  Description of Artificial Sequence: Synthetic oligonucleotide
  Sense strand starting at position 798 of SEQ ID NO: 316802
ggaauucugucccggcaau

SEQ ID NO: 441464 - RNA, 19 nt, Artificial Sequence
  Description of Artificial Sequence: Synthetic oligonucleotide
  Antisense Strand to SEQ ID NO: 441463
auugccgggacagaauucc

SEQ ID NO: 441465 - RNA, 19 nt, Artificial Sequence
  Description of Artificial Sequence: Synthetic oligonucleotide
  Sense strand starting at position 799 of SEQ ID NO: 316802
gaauucugucccggcaauc

SEQ ID NO: 441466 - RNA, 19 nt, Artificial Sequence
  Description of Artificial Sequence: Synthetic oligonucleotide
  Antisense Strand to SEQ ID NO: 441465
gauugccgggacagaauuc

SEQ ID NO: 441467 - RNA, 19 nt, Artificial Sequence
  Description of Artificial Sequence: Synthetic oligonucleotide
  Sense strand starting at position 2194 of SEQ ID NO: 316802
ugguguuccgcacguucua

SEQ ID NO: 441468 - RNA, 19 nt, Artificial Sequence
  Description of Artificial Sequence: Synthetic oligonucleotide
  Antisense Strand to SEQ ID NO: 441467
uagaacgugcggaacacca

SEQ ID NO: 441469 - RNA, 19 nt, Artificial Sequence
  Description of Artificial Sequence: Synthetic oligonucleotide
  Sense strand starting at position 2195 of SEQ ID NO: 316802
gguguuccgcacguucuaa

SEQ ID NO: 441470 - RNA, 19 nt, Artificial Sequence
  Description of Artificial Sequence: Synthetic oligonucleotide
  Antisense Strand to SEQ ID NO: 441469
uuagaacgugcggaacacc

SEQ ID NO: 441471 - RNA, 19 nt, Artificial Sequence
  Description of Artificial Sequence: Synthetic oligonucleotide
  Sense strand starting at position 2196 of SEQ ID NO: 316802
guguuccgcacguucuaaa

SEQ ID NO: 441472 - RNA, 19 nt, Artificial Sequence
  Description of Artificial Sequence: Synthetic oligonucleotide
  Antisense Strand to SEQ ID NO: 441471
uuuagaacgugcggaacac

SEQ ID NO: 441473 - RNA, 19 nt, Artificial Sequence
  Description of Artificial Sequence: Synthetic oligonucleotide
  Sense strand starting at position 2509 of SEQ ID NO: 316802
ccacccgagcccugauuua

SEQ ID NO: 441474 - RNA, 19 nt, Artificial Sequence
  Description of Artificial Sequence: Synthetic oligonucleotide
  Antisense Strand to SEQ ID NO: 441473
uaaaucagggcucgggugg

SEQ ID NO: 441475 - RNA, 19 nt, Artificial Sequence
  Description of Artificial Sequence: Synthetic oligonucleotide
  Sense strand starting at position 2692 of SEQ ID NO: 316802
agaguaggguuuguagcua

SEQ ID NO: 441476 - RNA, 19 nt, Artificial Sequence
  Description of Artificial Sequence: Synthetic oligonucleotide
  Antisense Strand to SEQ ID NO: 441475
uagcuacaaacccuacucu

SEQ ID NO: 441477 - RNA, 19 nt, Artificial Sequence
  Description of Artificial Sequence: Synthetic oligonucleotide
  Sense strand starting at position 2697 of SEQ ID NO: 316802
aggguuuguagcuaaccaa

SEQ ID NO: 441478 - RNA, 19 nt, Artificial Sequence
  Description of Artificial Sequence: Synthetic oligonucleotide
  Antisense Strand to SEQ ID NO: 441477
uugguuagcuacaaacccu

SEQ ID NO: 441479 - RNA, 19 nt, Artificial Sequence
  Description of Artificial Sequence: Synthetic oligonucleotide
  Sense strand starting at position 2949 of SEQ ID NO: 316802
cucugagcccucuggaaug

SEQ ID NO: 441480 - RNA, 19 nt, Artificial Sequence
  Description of Artificial Sequence: Synthetic oligonucleotide
  Antisense Strand to SEQ ID NO: 441479
cauuccagagggcucagag

SEQ ID NO: 441481 - RNA, 19 nt, Artificial Sequence
  Description of Artificial Sequence: Synthetic oligonucleotide
  Sense strand starting at position 2960 of SEQ ID NO: 316802
cuggaaugccgagauaguu

SEQ ID NO: 441482 - RNA, 19 nt, Artificial Sequence
  Description of Artificial Sequence: Synthetic oligonucleotide
  Antisense Strand to SEQ ID NO: 441481
aacuaucucggcauuccag

SEQ ID NO: 441483 - RNA, 19 nt, Artificial Sequence
  Description of Artificial Sequence: Synthetic oligonucleotide
  Sense strand starting at position 2966 of SEQ ID NO: 316802
ugccgagauaguugcauaa

SEQ ID NO: 441484 - RNA, 19 nt, Artificial Sequence
  Description of Artificial Sequence: Synthetic oligonucleotide
  Antisense Strand to SEQ ID NO: 441483
uuaugcaacuaucucggca

SEQ ID NO: 441485 - RNA, 19 nt, Artificial Sequence
  Description of Artificial Sequence: Synthetic oligonucleotide
  Sense strand starting at position 2968 of SEQ ID NO: 316802
ccgagauaguugcauaauu

SEQ ID NO: 441486 - RNA, 19 nt, Artificial Sequence
  Description of Artificial Sequence: Synthetic oligonucleotide
  Antisense Strand to SEQ ID NO: 441485
aauuaugcaacuaucucgg

SEQ ID NO: 441487 - RNA, 19 nt, Artificial Sequence
  Description of Artificial Sequence: Synthetic oligonucleotide
  Sense strand starting at position 100 of SEQ ID NO: 316803
agcauucuuggauaaaguc

SEQ ID NO: 441488 - RNA, 19 nt, Artificial Sequence
  Description of Artificial Sequence: Synthetic oligonucleotide
  Antisense Strand to SEQ ID NO: 441487
gacuuuauccaagaaugcu

SEQ ID NO: 441489 - RNA, 19 nt, Artificial Sequence
  Description of Artificial Sequence: Synthetic oligonucleotide
  Sense strand starting at position 400 of SEQ ID NO: 316803
ggaccaguaugagucacua

SEQ ID NO: 441490 - RNA, 19 nt, Artificial Sequence
  Description of Artificial Sequence: Synthetic oligonucleotide
  Antisense Strand to SEQ ID NO: 441489
uagugacucauacuggucc

SEQ ID NO: 441491 - RNA, 19 nt, Artificial Sequence
  Description of Artificial Sequence: Synthetic oligonucleotide
  Sense strand starting at position 559 of SEQ ID NO: 316803
augaauacguuaccaauaa

SEQ ID NO: 441492 - RNA, 19 nt, Artificial Sequence
  Description of Artificial Sequence: Synthetic oligonucleotide
  Antisense Strand to SEQ ID NO: 441491
uuauugguaacguauucau

SEQ ID NO: 441493 - RNA, 19 nt, Artificial Sequence
  Description of Artificial Sequence: Synthetic oligonucleotide
  Sense strand starting at position 563 of SEQ ID NO: 316803
auacguuaccaauaaaggu

SEQ ID NO: 441494 - RNA, 19 nt, Artificial Sequence
  Description of Artificial Sequence: Synthetic oligonucleotide
  Antisense Strand to SEQ ID NO: 441493
accuuuauugguaacguau

SEQ ID NO: 441495 - RNA, 19 nt, Artificial Sequence
  Description of Artificial Sequence: Synthetic oligonucleotide
  Sense strand starting at position 764 of SEQ ID NO: 316803
aaacguaagaguggacaga

SEQ ID NO: 441496 - RNA, 19 nt, Artificial Sequence
  Description of Artificial Sequence: Synthetic oligonucleotide
  Antisense Strand to SEQ ID NO: 441495
ucuguccacucuuacguuu

SEQ ID NO: 441497 - RNA, 19 nt, Artificial Sequence
  Description of Artificial Sequence: Synthetic oligonucleotide
  Sense strand starting at position 811 of SEQ ID NO: 316803
uggagcuuuccaggagagu

SEQ ID NO: 441498 - RNA, 19 nt, Artificial Sequence
  Description of Artificial Sequence: Synthetic oligonucleotide
  Antisense Strand to SEQ ID NO: 441497
acucuccuggaaagcucca

SEQ ID NO: 441499 - RNA, 19 nt, Artificial Sequence
  Description of Artificial Sequence: Synthetic oligonucleotide
  Sense strand starting at position 812 of SEQ ID NO: 316803
ggagcuuuccaggagaguc

SEQ ID NO: 441500 - RNA, 19 nt, Artificial Sequence
  Description of Artificial Sequence: Synthetic oligonucleotide
  Antisense Strand to SEQ ID NO: 441499
gacucuccuggaaagcucc

SEQ ID NO: 441501 - RNA, 19 nt, Artificial Sequence
  Description of Artificial Sequence: Synthetic oligonucleotide
  Sense strand starting at position 839 of SEQ ID NO: 316803
agagcacagcuaugaaauc

SEQ ID NO: 441502 - RNA, 19 nt, Artificial Sequence
  Description of Artificial Sequence: Synthetic oligonucleotide
  Antisense Strand to SEQ ID NO: 441501
gauuucauagcugugcucu

SEQ ID NO: 441503 - RNA, 19 nt, Artificial Sequence
  Description of Artificial Sequence: Synthetic oligonucleotide
  Sense strand starting at position 890 of SEQ ID NO: 316803
agauacacuuccuugagca

SEQ ID NO: 441504 - RNA, 19 nt, Artificial Sequence
  Description of Artificial Sequence: Synthetic oligonucleotide
  Antisense Strand to SEQ ID NO: 441503
ugcucaaggaaguguaucu

SEQ ID NO: 441505 - RNA, 19 nt, Artificial Sequence
  Description of Artificial Sequence: Synthetic oligonucleotide
  Sense strand starting at position 1017 of SEQ ID NO: 316803
aguaucagcuaucuagaac

SEQ ID NO: 441506 - RNA, 19 nt, Artificial Sequence
  Description of Artificial Sequence: Synthetic oligonucleotide
  Antisense Strand to SEQ ID NO: 441505
guucuagauagcugauacu

SEQ ID NO: 441507 - RNA, 19 nt, Artificial Sequence
  Description of Artificial Sequence: Synthetic oligonucleotide
  Sense strand starting at position 1272 of SEQ ID NO: 316803
uaaaguggugcguuaguuu

SEQ ID NO: 441508 - RNA, 19 nt, Artificial Sequence
  Description of Artificial Sequence: Synthetic oligonucleotide
  Antisense Strand to SEQ ID NO: 441507
aaacuaacgcaccacuuua

SEQ ID NO: 441509 - RNA, 19 nt, Artificial Sequence
  Description of Artificial Sequence: Synthetic oligonucleotide
  Sense strand starting at position 1316 of SEQ ID NO: 316803
ucuuuaaucuggcuaaaga

SEQ ID NO: 441510 - RNA, 19 nt, Artificial Sequence
  Description of Artificial Sequence: Synthetic oligonucleotide
  Antisense Strand to SEQ ID NO: 441509
ucuuuagccagauuaaaga

SEQ ID NO: 441511 - RNA, 19 nt, Artificial Sequence
  Description of Artificial Sequence: Synthetic oligonucleotide
  Sense strand starting at position 1317 of SEQ ID NO: 316803
cuuuaaucuggcuaaagac

SEQ ID NO: 441512 - RNA, 19 nt, Artificial Sequence
  Description of Artificial Sequence: Synthetic oligonucleotide
  Antisense Strand to SEQ ID NO: 441511
gucuuuagccagauuaaag

SEQ ID NO: 441513 - RNA, 19 nt, Artificial Sequence
  Description of Artificial Sequence: Synthetic oligonucleotide
  Sense strand starting at position 1524 of SEQ ID NO: 316803
uuuggacguaucuauggau

SEQ ID NO: 441514 - RNA, 19 nt, Artificial Sequence
  Description of Artificial Sequence: Synthetic oligonucleotide
  Antisense Strand to SEQ ID NO: 441513
auccauagauacguccaaa

SEQ ID NO: 441515 - RNA, 19 nt, Artificial Sequence
  Description of Artificial Sequence: Synthetic oligonucleotide
  Sense strand starting at position 1572 of SEQ ID NO: 316803
cgacaaaucucuucuggaa

SEQ ID NO: 441516 - RNA, 19 nt, Artificial Sequence
  Description of Artificial Sequence: Synthetic oligonucleotide
  Antisense Strand to SEQ ID NO: 441515
uuccagaagagauuugucg

SEQ ID NO: 441517 - RNA, 19 nt, Artificial Sequence
  Description of Artificial Sequence: Synthetic oligonucleotide
  Sense strand starting at position 2558 of SEQ ID NO: 316803
ugaagugaugugggccaau

SEQ ID NO: 441518 - RNA, 19 nt, Artificial Sequence
  Description of Artificial Sequence: Synthetic oligonucleotide
  Antisense Strand to SEQ ID NO: 441517
auuggcccacaucacuuca

SEQ ID NO: 441519 - RNA, 19 nt, Artificial Sequence
  Description of Artificial Sequence: Synthetic oligonucleotide
  Sense strand starting at position 2561 of SEQ ID NO: 316803
agugaugugggccaauaca

SEQ ID NO: 441520 - RNA, 19 nt, Artificial Sequence
  Description of Artificial Sequence: Synthetic oligonucleotide
  Antisense Strand to SEQ ID NO: 441519
uguauuggcccacaucacu

SEQ ID NO: 441521 - RNA, 19 nt, Artificial Sequence
  Description of Artificial Sequence: Synthetic oligonucleotide
  Sense strand starting at position 2593 of SEQ ID NO: 316803
ucagcagauguuuauaaau

SEQ ID NO: 441522 - RNA, 19 nt, Artificial Sequence
  Description of Artificial Sequence: Synthetic oligonucleotide
  Antisense Strand to SEQ ID NO: 441521
auuuauaaacaucugcuga

SEQ ID NO: 441523 - RNA, 19 nt, Artificial Sequence
  Description of Artificial Sequence: Synthetic oligonucleotide
  Sense strand starting at position 2688 of SEQ ID NO: 316803
ccuguuucuccguuugcaa

SEQ ID NO: 441524 - RNA, 19 nt, Artificial Sequence
  Description of Artificial Sequence: Synthetic oligonucleotide
  Antisense Strand to SEQ ID NO: 441523
uugcaaacggagaaacagg

SEQ ID NO: 441525 - RNA, 19 nt, Artificial Sequence
  Description of Artificial Sequence: Synthetic oligonucleotide
  Sense strand starting at position 2696 of SEQ ID NO: 316803
uccguuugcaaaggaagau

SEQ ID NO: 441526 - RNA, 19 nt, Artificial Sequence
  Description of Artificial Sequence: Synthetic oligonucleotide
  Antisense Strand to SEQ ID NO: 441525
aucuuccuuugcaaacgga

SEQ ID NO: 441527 - RNA, 19 nt, Artificial Sequence
  Description of Artificial Sequence: Synthetic oligonucleotide
  Sense strand starting at position 2697 of SEQ ID NO: 316803
ccguuugcaaaggaagaua

SEQ ID NO: 441528 - RNA, 19 nt, Artificial Sequence
  Description of Artificial Sequence: Synthetic oligonucleotide
  Antisense Strand to SEQ ID NO: 441527
uaucuuccuuugcaaacgg

SEQ ID NO: 441529 - RNA, 19 nt, Artificial Sequence
  Description of Artificial Sequence: Synthetic oligonucleotide
  Sense strand starting at position 2735 of SEQ ID NO: 316803
caggguuccguguaaacug

SEQ ID NO: 441530 - RNA, 19 nt, Artificial Sequence
  Description of Artificial Sequence: Synthetic oligonucleotide
  Antisense Strand to SEQ ID NO: 441529
caguuuacacggaacccug

SEQ ID NO: 441531 - RNA, 19 nt, Artificial Sequence
  Description of Artificial Sequence: Synthetic oligonucleotide
  Sense strand starting at position 2999 of SEQ ID NO: 316803
ggugcagugaguuacaaua

SEQ ID NO: 441532 - RNA, 19 nt, Artificial Sequence
  Description of Artificial Sequence: Synthetic oligonucleotide
  Antisense Strand to SEQ ID NO: 441531
uauuguaacucacugcacc

SEQ ID NO: 441533 - RNA, 19 nt, Artificial Sequence
  Description of Artificial Sequence: Synthetic oligonucleotide
  Sense strand starting at position 3052 of SEQ ID NO: 316803
uaauguuccgaguauuaag

SEQ ID NO: 441534 - RNA, 19 nt, Artificial Sequence
  Description of Artificial Sequence: Synthetic oligonucleotide
  Antisense Strand to SEQ ID NO: 441533
cuuaauacucggaacauua

SEQ ID NO: 441535 - RNA, 19 nt, Artificial Sequence
  Description of Artificial Sequence: Synthetic oligonucleotide
  Sense strand starting at position 3268 of SEQ ID NO: 316803
agaucauagucccuguuua

SEQ ID NO: 441536 - RNA, 19 nt, Artificial Sequence
  Description of Artificial Sequence: Synthetic oligonucleotide
  Antisense Strand to SEQ ID NO: 441535
uaaacagggacuaugaucu

SEQ ID NO: 441537 - RNA, 19 nt, Artificial Sequence
  Description of Artificial Sequence: Synthetic oligonucleotide
  Sense strand starting at position 3275 of SEQ ID NO: 316803
agucccuguuuauugacaa

SEQ ID NO: 441538 - RNA, 19 nt, Artificial Sequence
  Description of Artificial Sequence: Synthetic oligonucleotide
  Antisense Strand to SEQ ID NO: 441537
uugucaauaaacagggacu

SEQ ID NO: 441539 - RNA, 19 nt, Artificial Sequence
  Description of Artificial Sequence: Synthetic oligonucleotide
  Sense strand starting at position 3321 of SEQ ID NO: 316803
ggcagucaucuuuacuuua

SEQ ID NO: 441540 - RNA, 19 nt, Artificial Sequence
  Description of Artificial Sequence: Synthetic oligonucleotide
  Antisense Strand to SEQ ID NO: 441539
uaaaguaaagaugacugcc

SEQ ID NO: 441541 - RNA, 19 nt, Artificial Sequence
  Description of Artificial Sequence: Synthetic oligonucleotide
  Sense strand starting at position 3324 of SEQ ID NO: 316803
agucaucuuuacuuuagga

SEQ ID NO: 441542 - RNA, 19 nt, Artificial Sequence
  Description of Artificial Sequence: Synthetic oligonucleotide
  Antisense Strand to SEQ ID NO: 441541
uccuaaaguaaagaugacu

SEQ ID NO: 441543 - RNA, 19 nt, Artificial Sequence
  Description of Artificial Sequence: Synthetic oligonucleotide
  Sense strand starting at position 3334 of SEQ ID NO: 316803
acuuuaggauaauugguau

SEQ ID NO: 441544 - RNA, 19 nt, Artificial Sequence
  Description of Artificial Sequence: Synthetic oligonucleotide
  Antisense Strand to SEQ ID NO: 441543
auaccaauuauccuaaagu

SEQ ID NO: 441545 - RNA, 19 nt, Artificial Sequence
  Description of Artificial Sequence: Synthetic oligonucleotide
  Sense strand starting at position 3337 of SEQ ID NO: 316803
uuaggauaauugguauugu

SEQ ID NO: 441546 - RNA, 19 nt, Artificial Sequence
  Description of Artificial Sequence: Synthetic oligonucleotide
  Antisense Strand to SEQ ID NO: 441545
acaauaccaauuauccuaa

SEQ ID NO: 441547 - RNA, 19 nt, Artificial Sequence
  Description of Artificial Sequence: Synthetic oligonucleotide
  Sense strand starting at position 3385 of SEQ ID NO: 316803
aggagcucacaucaaguau

SEQ ID NO: 441548 - RNA, 19 nt, Artificial Sequence
  Description of Artificial Sequence: Synthetic oligonucleotide
  Antisense Strand to SEQ ID NO: 441547
auacuugaugugagcuccu

SEQ ID NO: 441549 - RNA, 19 nt, Artificial Sequence
  Description of Artificial Sequence: Synthetic oligonucleotide
  Sense strand starting at position 3429 of SEQ ID NO: 316803
gcauucuucuagguaauga

SEQ ID NO: 441550 - RNA, 19 nt, Artificial Sequence
  Description of Artificial Sequence: Synthetic oligonucleotide
  Antisense Strand to SEQ ID NO: 441549
ucauuaccuagaagaaugc

SEQ ID NO: 441551 - RNA, 19 nt, Artificial Sequence
  Description of Artificial Sequence: Synthetic oligonucleotide
  Sense strand starting at position 3496 of SEQ ID NO: 316803
ucccuaugggacugauauu

SEQ ID NO: 441552 - RNA, 19 nt, Artificial Sequence
  Description of Artificial Sequence: Synthetic oligonucleotide
  Antisense Strand to SEQ ID NO: 441551
aauaucagucccauaggga

SEQ ID NO: 441553 - RNA, 19 nt, Artificial Sequence
  Description of Artificial Sequence: Synthetic oligonucleotide
  Sense strand starting at position 3571 of SEQ ID NO: 316803
guucuaggucaucaggaca

SEQ ID NO: 441554 - RNA, 19 nt, Artificial Sequence
  Description of Artificial Sequence: Synthetic oligonucleotide
  Antisense Strand to SEQ ID NO: 441553
uguccugaugaccuagaac

SEQ ID NO: 441555 - RNA, 19 nt, Artificial Sequence
  Description of Artificial Sequence: Synthetic oligonucleotide
  Sense strand starting at position 3597 of SEQ ID NO: 316803
gauggaagugcauaaguga

SEQ ID NO: 441556 - RNA, 19 nt, Artificial Sequence
  Description of Artificial Sequence: Synthetic oligonucleotide
  Antisense Strand to SEQ ID NO: 441555
ucacuuaugcacuuccauc

SEQ ID NO: 441557 - RNA, 19 nt, Artificial Sequence
  Description of Artificial Sequence: Synthetic oligonucleotide
  Sense strand starting at position 3604 of SEQ ID NO: 316803
gugcauaagugacugaaga

SEQ ID NO: 441558 - RNA, 19 nt, Artificial Sequence
  Description of Artificial Sequence: Synthetic oligonucleotide
  Antisense Strand to SEQ ID NO: 441557
ucuucagucacuuaugcac

SEQ ID NO: 441559 - RNA, 19 nt, Artificial Sequence
  Description of Artificial Sequence: Synthetic oligonucleotide
  Sense strand starting at position 3852 of SEQ ID NO: 316803
gacugaagguaaucuuacu

SEQ ID NO: 441560 - RNA, 19 nt, Artificial Sequence
  Description of Artificial Sequence: Synthetic oligonucleotide
  Antisense Strand to SEQ ID NO: 441559
aguaagauuaccuucaguc

SEQ ID NO: 441561 - RNA, 19 nt, Artificial Sequence
  Description of Artificial Sequence: Synthetic oligonucleotide
  Sense strand starting at position 3967 of SEQ ID NO: 316803
gcaugaugucaguacucaa

SEQ ID NO: 441562 - RNA, 19 nt, Artificial Sequence
  Description of Artificial Sequence: Synthetic oligonucleotide
  Antisense Strand to SEQ ID NO: 441561
uugaguacugacaucaugc

SEQ ID NO: 441563 - RNA, 19 nt, Artificial Sequence
  Description of Artificial Sequence: Synthetic oligonucleotide
  Sense strand starting at position 3970 of SEQ ID NO: 316803
ugaugucaguacucaauaa

SEQ ID NO: 441564 - RNA, 19 nt, Artificial Sequence
  Description of Artificial Sequence: Synthetic oligonucleotide
  Antisense Strand to SEQ ID NO: 441563
uuauugaguacugacauca

SEQ ID NO: 441565 - RNA, 19 nt, Artificial Sequence
  Description of Artificial Sequence: Synthetic oligonucleotide
  Sense strand starting at position 3974 of SEQ ID NO: 316803
gucaguacucaauaaguuu

SEQ ID NO: 441566 - RNA, 19 nt, Artificial Sequence
  Description of Artificial Sequence: Synthetic oligonucleotide
  Antisense Strand to SEQ ID NO: 441565
aaacuuauugaguacugac

SEQ ID NO: 441567 - RNA, 19 nt, Artificial Sequence
  Description of Artificial Sequence: Synthetic oligonucleotide
  Sense strand starting at position 343 of SEQ ID NO: 316804
uagggauccgcagaacuca

SEQ ID NO: 441568 - RNA, 19 nt, Artificial Sequence
  Description of Artificial Sequence: Synthetic oligonucleotide
  Antisense Strand to SEQ ID NO: 441567
ugaguucugcggaucccua

SEQ ID NO: 441569 - RNA, 19 nt, Artificial Sequence
  Description of Artificial Sequence: Synthetic oligonucleotide
  Sense strand starting at position 376 of SEQ ID NO: 316804
uugugcuuaagagacugau

SEQ ID NO: 441570 - RNA, 19 nt, Artificial Sequence
  Description of Artificial Sequence: Synthetic oligonucleotide
  Antisense Strand to SEQ ID NO: 441569
aucagucucuuaagcacaa

SEQ ID NO: 441571 - RNA, 19 nt, Artificial Sequence
  Description of Artificial Sequence: Synthetic oligonucleotide
  Sense strand starting at position 379 of SEQ ID NO: 316804
ugcuuaagagacugaugga

SEQ ID NO: 441572 - RNA, 19 nt, Artificial Sequence
  Description of Artificial Sequence: Synthetic oligonucleotide
  Antisense Strand to SEQ ID NO: 441571
uccaucagucucuuaagca

SEQ ID NO: 441573 - RNA, 19 nt, Artificial Sequence
  Description of Artificial Sequence: Synthetic oligonucleotide
  Sense strand starting at position 408 of SEQ ID NO: 316804
auggcaauuuccucgugaa

SEQ ID NO: 441574 - RNA, 19 nt, Artificial Sequence
  Description of Artificial Sequence: Synthetic oligonucleotide
  Antisense Strand to SEQ ID NO: 441573
uucacgaggaaauugccau

SEQ ID NO: 441575 - RNA, 19 nt, Artificial Sequence
  Description of Artificial Sequence: Synthetic oligonucleotide
  Sense strand starting at position 409 of SEQ ID NO: 316804
uggcaauuuccucgugaaa

SEQ ID NO: 441576 - RNA, 19 nt, Artificial Sequence
  Description of Artificial Sequence: Synthetic oligonucleotide
  Antisense Strand to SEQ ID NO: 441575
uuucacgaggaaauugcca

SEQ ID NO: 441577 - RNA, 19 nt, Artificial Sequence
  Description of Artificial Sequence: Synthetic oligonucleotide
  Sense strand starting at position 422 of SEQ ID NO: 316804
gugaaaugucacuauguaa

SEQ ID NO: 441578 - RNA, 19 nt, Artificial Sequence
  Description of Artificial Sequence: Synthetic oligonucleotide
  Antisense Strand to SEQ ID NO: 441577
uuacauagugacauuucac

SEQ ID NO: 441579 - RNA, 19 nt, Artificial Sequence
  Description of Artificial Sequence: Synthetic oligonucleotide
  Sense strand starting at position 453 of SEQ ID NO: 316804
aguauaucuguaggauaua

SEQ ID NO: 441580 - RNA, 19 nt, Artificial Sequence
  Description of Artificial Sequence: Synthetic oligonucleotide
  Antisense Strand to SEQ ID NO: 441579
uauauccuacagauauacu

SEQ ID NO: 441581 - RNA, 19 nt, Artificial Sequence
  Description of Artificial Sequence: Synthetic oligonucleotide
  Sense strand starting at position 491 of SEQ ID NO: 316804
uggugaaauguacauauuc

SEQ ID NO: 441582 - RNA, 19 nt, Artificial Sequence
  Description of Artificial Sequence: Synthetic oligonucleotide
  Antisense Strand to SEQ ID NO: 441581
gaauauguacauuucacca

SEQ ID NO: 441583 - RNA, 19 nt, Artificial Sequence
  Description of Artificial Sequence: Synthetic oligonucleotide
  Sense strand starting at position 810 of SEQ ID NO: 316804
gcagucguucccuugagua

SEQ ID NO: 441584 - RNA, 19 nt, Artificial Sequence
  Description of Artificial Sequence: Synthetic oligonucleotide
  Antisense Strand to SEQ ID NO: 441583
uacucaagggaacgacugc

SEQ ID NO: 441585 - RNA, 19 nt, Artificial Sequence
  Description of Artificial Sequence: Synthetic oligonucleotide
  Sense strand starting at position 915 of SEQ ID NO: 316804
cuguauaaucuugagcaau

SEQ ID NO: 441586 - RNA, 19 nt, Artificial Sequence
  Description of Artificial Sequence: Synthetic oligonucleotide
  Antisense Strand to SEQ ID NO: 441585
auugcucaagauuauacag

SEQ ID NO: 441587 - RNA, 19 nt, Artificial Sequence
  Description of Artificial Sequence: Synthetic oligonucleotide
  Sense strand starting at position 917 of SEQ ID NO: 316804
guauaaucuugagcaauaa

SEQ ID NO: 441588 - RNA, 19 nt, Artificial Sequence
  Description of Artificial Sequence: Synthetic oligonucleotide
  Antisense Strand to SEQ ID NO: 441587
uuauugcucaagauuauac

SEQ ID NO: 441589 - RNA, 19 nt, Artificial Sequence
  Description of Artificial Sequence: Synthetic oligonucleotide
  Sense strand starting at position 1002 of SEQ ID NO: 316804
ugucucauuccuuauacag

SEQ ID NO: 441590 - RNA, 19 nt, Artificial Sequence
  Description of Artificial Sequence: Synthetic oligonucleotide
  Antisense Strand to SEQ ID NO: 441589
cuguauaaggaaugagaca

SEQ ID NO: 441591 - RNA, 19 nt, Artificial Sequence
  Description of Artificial Sequence: Synthetic oligonucleotide
  Sense strand starting at position 1117 of SEQ ID NO: 316804
ucagaaaguuaagugagua

SEQ ID NO: 441592 - RNA, 19 nt, Artificial Sequence
  Description of Artificial Sequence: Synthetic oligonucleotide
  Antisense Strand to SEQ ID NO: 441591
uacucacuuaacuuucuga

SEQ ID NO: 441593 - RNA, 19 nt, Artificial Sequence
  Description of Artificial Sequence: Synthetic oligonucleotide
  Sense strand starting at position 1121 of SEQ ID NO: 316804
aaaguuaagugaguaccua

SEQ ID NO: 441594 - RNA, 19 nt, Artificial Sequence
  Description of Artificial Sequence: Synthetic oligonucleotide
  Antisense Strand to SEQ ID NO: 441593
uagguacucacuuaacuuu

SEQ ID NO: 441595 - RNA, 19 nt, Artificial Sequence
  Description of Artificial Sequence: Synthetic oligonucleotide
  Sense strand starting at position 1122 of SEQ ID NO: 316804
aaguuaagugaguaccuaa

SEQ ID NO: 441596 - RNA, 19 nt, Artificial Sequence
  Description of Artificial Sequence: Synthetic oligonucleotide
  Antisense Strand to SEQ ID NO: 441595
uuagguacucacuuaacuu

SEQ ID NO: 441597 - RNA, 19 nt, Artificial Sequence
  Description of Artificial Sequence: Synthetic oligonucleotide
  Sense strand starting at position 1421 of SEQ ID NO: 316804
ugaagcacucccgagaauu

SEQ ID NO: 441598 - RNA, 19 nt, Artificial Sequence
  Description of Artificial Sequence: Synthetic oligonucleotide
  Antisense Strand to SEQ ID NO: 441597
aauucucgggagugcuuca

SEQ ID NO: 441599 - RNA, 19 nt, Artificial Sequence
  Description of Artificial Sequence: Synthetic oligonucleotide
  Sense strand starting at position 1517 of SEQ ID NO: 316804
ggauucuagcaauauccca

SEQ ID NO: 441600 - RNA, 19 nt, Artificial Sequence
  Description of Artificial Sequence: Synthetic oligonucleotide
  Antisense Strand to SEQ ID NO: 441599
ugggauauugcuagaaucc

SEQ ID NO: 441601 - RNA, 19 nt, Artificial Sequence
  Description of Artificial Sequence: Synthetic oligonucleotide
  Sense strand starting at position 1532 of SEQ ID NO: 316804
cccaaauguuugucuggga

SEQ ID NO: 441602 - RNA, 19 nt, Artificial Sequence
  Description of Artificial Sequence: Synthetic oligonucleotide
  Antisense Strand to SEQ ID NO: 441601
ucccagacaaacauuuggg

SEQ ID NO: 441603 - RNA, 19 nt, Artificial Sequence
  Description of Artificial Sequence: Synthetic oligonucleotide
  Sense strand starting at position 2995 of SEQ ID NO: 316804
aacugaugcgaguggaaac

SEQ ID NO: 441604 - RNA, 19 nt, Artificial Sequence
  Description of Artificial Sequence: Synthetic oligonucleotide
  Antisense Strand to SEQ ID NO: 441603
guuuccacucgcaucaguu

SEQ ID NO: 441605 - RNA, 19 nt, Artificial Sequence
  Description of Artificial Sequence: Synthetic oligonucleotide
  Sense strand starting at position 3048 of SEQ ID NO: 316804
gagagugcuuaucccuaaa

SEQ ID NO: 441606 - RNA, 19 nt, Artificial Sequence
  Description of Artificial Sequence: Synthetic oligonucleotide
  Antisense Strand to SEQ ID NO: 441605
uuuagggauaagcacucuc

SEQ ID NO: 441607 - RNA, 19 nt, Artificial Sequence
  Description of Artificial Sequence: Synthetic oligonucleotide
  Sense strand starting at position 3078 of SEQ ID NO: 316804
agacguucugauuaaugug

SEQ ID NO: 441608 - RNA, 19 nt, Artificial Sequence
  Description of Artificial Sequence: Synthetic oligonucleotide
  Antisense Strand to SEQ ID NO: 441607
cacauuaaucagaacgucu

SEQ ID NO: 441609 - RNA, 19 nt, Artificial Sequence
  Description of Artificial Sequence: Synthetic oligonucleotide
  Sense strand starting at position 3083 of SEQ ID NO: 316804
uucugauuaauguggagag

SEQ ID NO: 441610 - RNA, 19 nt, Artificial Sequence
  Description of Artificial Sequence: Synthetic oligonucleotide
  Antisense Strand to SEQ ID NO: 441609
cucuccacauuaaucagaa

SEQ ID NO: 441611 - RNA, 19 nt, Artificial Sequence
  Description of Artificial Sequence: Synthetic oligonucleotide
  Sense strand starting at position 3090 of SEQ ID NO: 316804
uaauguggagagugaacua

SEQ ID NO: 441612 - RNA, 19 nt, Artificial Sequence
  Description of Artificial Sequence: Synthetic oligonucleotide
  Antisense Strand to SEQ ID NO: 441611
uaguucacucuccacauua

SEQ ID NO: 441613 - RNA, 19 nt, Artificial Sequence
  Description of Artificial Sequence: Synthetic oligonucleotide
  Sense strand starting at position 3113 of SEQ ID NO: 316804
agcuauuucucgcucaaau

SEQ ID NO: 441614 - RNA, 19 nt, Artificial Sequence
  Description of Artificial Sequence: Synthetic oligonucleotide
  Antisense Strand to SEQ ID NO: 441613
auuugagcgagaaauagcu

SEQ ID NO: 441615 - RNA, 19 nt, Artificial Sequence
  Description of Artificial Sequence: Synthetic oligonucleotide
  Sense strand starting at position 3115 of SEQ ID NO: 316804
cuauuucucgcucaaaugu

SEQ ID NO: 441616 - RNA, 19 nt, Artificial Sequence
  Description of Artificial Sequence: Synthetic oligonucleotide
  Antisense Strand to SEQ ID NO: 441615
acauuugagcgagaaauag

SEQ ID NO: 441617 - RNA, 19 nt, Artificial Sequence
  Description of Artificial Sequence: Synthetic oligonucleotide
  Sense strand starting at position 3150 of SEQ ID NO: 316804
ucuugaacuuguuuaagaa

SEQ ID NO: 441618 - RNA, 19 nt, Artificial Sequence
  Description of Artificial Sequence: Synthetic oligonucleotide
  Antisense Strand to SEQ ID NO: 441617
uucuuaaacaaguucaaga

SEQ ID NO: 441619 - RNA, 19 nt, Artificial Sequence
  Description of Artificial Sequence: Synthetic oligonucleotide
  Sense strand starting at position 3195 of SEQ ID NO: 316804
acuuuaauuucuuaaggag

SEQ ID NO: 441620 - RNA, 19 nt, Artificial Sequence
  Description of Artificial Sequence: Synthetic oligonucleotide
  Antisense Strand to SEQ ID NO: 441619
cuccuuaagaaauuaaagu

SEQ ID NO: 441621 - RNA, 19 nt, Artificial Sequence
  Description of Artificial Sequence: Synthetic oligonucleotide
  Sense strand starting at position 3215 of SEQ ID NO: 316804
gcuuauuauuuaucaguuc

SEQ ID NO: 441622 - RNA, 19 nt, Artificial Sequence
  Description of Artificial Sequence: Synthetic oligonucleotide
  Antisense Strand to SEQ ID NO: 441621
gaacugauaaauaauaagc

SEQ ID NO: 441623 - RNA, 19 nt, Artificial Sequence
  Description of Artificial Sequence: Synthetic oligonucleotide
  Sense strand starting at position 3222 of SEQ ID NO: 316804
auuuaucaguuccagaaag

SEQ ID NO: 441624 - RNA, 19 nt, Artificial Sequence
  Description of Artificial Sequence: Synthetic oligonucleotide
  Antisense Strand to SEQ ID NO: 441623
cuuucuggaacugauaaau

SEQ ID NO: 441625 - RNA, 19 nt, Artificial Sequence
  Description of Artificial Sequence: Synthetic oligonucleotide
  Sense strand starting at position 3224 of SEQ ID NO: 316804
uuaucaguuccagaaaguu

SEQ ID NO: 441626 - RNA, 19 nt, Artificial Sequence
  Description of Artificial Sequence: Synthetic oligonucleotide
  Antisense Strand to SEQ ID NO: 441625
aacuuucuggaacugauaa

SEQ ID NO: 441627 - RNA, 19 nt, Artificial Sequence
  Description of Artificial Sequence: Synthetic oligonucleotide
  Sense strand starting at position 3233 of SEQ ID NO: 316804
ccagaaaguuugcucugaa

SEQ ID NO: 441628 - RNA, 19 nt, Artificial Sequence
  Description of Artificial Sequence: Synthetic oligonucleotide
  Antisense Strand to SEQ ID NO: 441627
uucagagcaaacuuucugg

SEQ ID NO: 441629 - RNA, 19 nt, Artificial Sequence
  Description of Artificial Sequence: Synthetic oligonucleotide
  Sense strand starting at position 3234 of SEQ ID NO: 316804
cagaaaguuugcucugaaa

SEQ ID NO: 441630 - RNA, 19 nt, Artificial Sequence
  Description of Artificial Sequence: Synthetic oligonucleotide
  Antisense Strand to SEQ ID NO: 441629
uuucagagcaaacuuucug

SEQ ID NO: 441631 - RNA, 19 nt, Artificial Sequence
  Description of Artificial Sequence: Synthetic oligonucleotide
  Sense strand starting at position 3236 of SEQ ID NO: 316804
gaaaguuugcucugaaauu

SEQ ID NO: 441632 - RNA, 19 nt, Artificial Sequence
  Description of Artificial Sequence: Synthetic oligonucleotide
  Antisense Strand to SEQ ID NO: 441631
aauuucagagcaaacuuuc

SEQ ID NO: 441633 - RNA, 19 nt, Artificial Sequence
  Description of Artificial Sequence: Synthetic oligonucleotide
  Sense strand starting at position 3309 of SEQ ID NO: 316804
cuauuaaguccauaggagu

SEQ ID NO: 441634 - RNA, 19 nt, Artificial Sequence
  Description of Artificial Sequence: Synthetic oligonucleotide
  Antisense Strand to SEQ ID NO: 441633
acuccuauggacuuaauag

SEQ ID NO: 441635 - RNA, 19 nt, Artificial Sequence
  Description of Artificial Sequence: Synthetic oligonucleotide
  Sense strand starting at position 3654 of SEQ ID NO: 316804
uucuuaaucgguuaauuac

SEQ ID NO: 441636 - RNA, 19 nt, Artificial Sequence
  Description of Artificial Sequence: Synthetic oligonucleotide
  Antisense Strand to SEQ ID NO: 441635
guaauuaaccgauuaagaa

SEQ ID NO: 441637 - RNA, 19 nt, Artificial Sequence
  Description of Artificial Sequence: Synthetic oligonucleotide
  Sense strand starting at position 3679 of SEQ ID NO: 316804
ucucaaucucaaggguaga

SEQ ID NO: 441638 - RNA, 19 nt, Artificial Sequence
  Description of Artificial Sequence: Synthetic oligonucleotide
  Antisense Strand to SEQ ID NO: 441637
ucuacccuugagauugaga

SEQ ID NO: 441639 - RNA, 19 nt, Artificial Sequence
  Description of Artificial Sequence: Synthetic oligonucleotide
  Sense strand starting at position 3813 of SEQ ID NO: 316804
augauucuaugaguacuau

SEQ ID NO: 441640 - RNA, 19 nt, Artificial Sequence
  Description of Artificial Sequence: Synthetic oligonucleotide
  Antisense Strand to SEQ ID NO: 441639
auaguacucauagaaucau

SEQ ID NO: 441641 - RNA, 19 nt, Artificial Sequence
  Description of Artificial Sequence: Synthetic oligonucleotide
  Sense strand starting at position 3814 of SEQ ID NO: 316804
ugauucuaugaguacuauc

SEQ ID NO: 441642 - RNA, 19 nt, Artificial Sequence
  Description of Artificial Sequence: Synthetic oligonucleotide
  Antisense Strand to SEQ ID NO: 441641
gauaguacucauagaauca

SEQ ID NO: 441643 - RNA, 19 nt, Artificial Sequence
  Description of Artificial Sequence: Synthetic oligonucleotide
  Sense strand starting at position 3823 of SEQ ID NO: 316804
gaguacuaucuguaugcaa

SEQ ID NO: 441644 - RNA, 19 nt, Artificial Sequence
  Description of Artificial Sequence: Synthetic oligonucleotide
  Antisense Strand to SEQ ID NO: 441643
uugcauacagauaguacuc

SEQ ID NO: 441645 - RNA, 19 nt, Artificial Sequence
  Description of Artificial Sequence: Synthetic oligonucleotide
  Sense strand starting at position 3978 of SEQ ID NO: 316804
ggcaauggauuccuauuau

SEQ ID NO: 441646 - RNA, 19 nt, Artificial Sequence
  Description of Artificial Sequence: Synthetic oligonucleotide
  Antisense Strand to SEQ ID NO: 441645
auaauaggaauccauugcc

SEQ ID NO: 441647 - RNA, 19 nt, Artificial Sequence
  Description of Artificial Sequence: Synthetic oligonucleotide
  Sense strand starting at position 14 of SEQ ID NO: 316805
auggcaauuuccucgugaa

SEQ ID NO: 441648 - RNA, 19 nt, Artificial Sequence
  Description of Artificial Sequence: Synthetic oligonucleotide
  Antisense Strand to SEQ ID NO: 441647
uucacgaggaaauugccau

SEQ ID NO: 441649 - RNA, 19 nt, Artificial Sequence
  Description of Artificial Sequence: Synthetic oligonucleotide
  Sense strand starting at position 15 of SEQ ID NO: 316805
uggcaauuuccucgugaaa

SEQ ID NO: 441650 - RNA, 19 nt, Artificial Sequence
  Description of Artificial Sequence: Synthetic oligonucleotide
  Antisense Strand to SEQ ID NO: 441649
uuucacgaggaaauugcca

SEQ ID NO: 441651 - RNA, 19 nt, Artificial Sequence
  Description of Artificial Sequence: Synthetic oligonucleotide
  Sense strand starting at position 28 of SEQ ID NO: 316805
gugaaaugucacuauguaa

SEQ ID NO: 441652 - RNA, 19 nt, Artificial Sequence
  Description of Artificial Sequence: Synthetic oligonucleotide
  Antisense Strand to SEQ ID NO: 441651
uuacauagugacauuucac

SEQ ID NO: 441653 - RNA, 19 nt, Artificial Sequence
  Description of Artificial Sequence: Synthetic oligonucleotide
  Sense strand starting at position 59 of SEQ ID NO: 316805
aguauaucuguaggauaua

SEQ ID NO: 441654 - RNA, 19 nt, Artificial Sequence
  Description of Artificial Sequence: Synthetic oligonucleotide
  Antisense Strand to SEQ ID NO: 441653
uauauccuacagauauacu

SEQ ID NO: 441655 - RNA, 19 nt, Artificial Sequence
  Description of Artificial Sequence: Synthetic oligonucleotide
  Sense strand starting at position 88 of SEQ ID NO: 316805
ugaaauuucuggugaaaug

SEQ ID NO: 441656 - RNA, 19 nt, Artificial Sequence
  Description of Artificial Sequence: Synthetic oligonucleotide
  Antisense Strand to SEQ ID NO: 441655
cauuucaccagaaauuuca

SEQ ID NO: 441657 - RNA, 19 nt, Artificial Sequence
  Description of Artificial Sequence: Synthetic oligonucleotide
  Sense strand starting at position 97 of SEQ ID NO: 316805
uggugaaauguacauauuc

SEQ ID NO: 441658 - RNA, 19 nt, Artificial Sequence
  Description of Artificial Sequence: Synthetic oligonucleotide
  Antisense Strand to SEQ ID NO: 441657
gaauauguacauuucacca

SEQ ID NO: 441659 - RNA, 19 nt, Artificial Sequence
  Description of Artificial Sequence: Synthetic oligonucleotide
  Sense strand starting at position 416 of SEQ ID NO: 316805
gcagucguucccuugagua

SEQ ID NO: 441660 - RNA, 19 nt, Artificial Sequence
  Description of Artificial Sequence: Synthetic oligonucleotide
  Antisense Strand to SEQ ID NO: 441659
uacucaagggaacgacugc

SEQ ID NO: 441661 - RNA, 19 nt, Artificial Sequence
  Description of Artificial Sequence: Synthetic oligonucleotide
  Sense strand starting at position 521 of SEQ ID NO: 316805
cuguauaaucuugagcaau

SEQ ID NO: 441662 - RNA, 19 nt, Artificial Sequence
  Description of Artificial Sequence: Synthetic oligonucleotide
  Antisense Strand to SEQ ID NO: 441661
auugcucaagauuauacag

SEQ ID NO: 441663 - RNA, 19 nt, Artificial Sequence
  Description of Artificial Sequence: Synthetic oligonucleotide
  Sense strand starting at position 523 of SEQ ID NO: 316805
guauaaucuugagcaauaa

SEQ ID NO: 441664 - RNA, 19 nt, Artificial Sequence
  Description of Artificial Sequence: Synthetic oligonucleotide
  Antisense Strand to SEQ ID NO: 441663
uuauugcucaagauuauac

SEQ ID NO: 441665 - RNA, 19 nt, Artificial Sequence
  Description of Artificial Sequence: Synthetic oligonucleotide
  Sense strand starting at position 608 of SEQ ID NO: 316805
ugucucauuccuuauacag

SEQ ID NO: 441666 - RNA, 19 nt, Artificial Sequence
  Description of Artificial Sequence: Synthetic oligonucleotide
  Antisense Strand to SEQ ID NO: 441665
cuguauaaggaaugagaca

SEQ ID NO: 441667 - RNA, 19 nt, Artificial Sequence
  Description of Artificial Sequence: Synthetic oligonucleotide
  Sense strand starting at position 723 of SEQ ID NO: 316805
ucagaaaguuaagugagua

SEQ ID NO: 441668 - RNA, 19 nt, Artificial Sequence
  Description of Artificial Sequence: Synthetic oligonucleotide
  Antisense Strand to SEQ ID NO: 441667
uacucacuuaacuuucuga

SEQ ID NO: 441669 - RNA, 19 nt, Artificial Sequence
  Description of Artificial Sequence: Synthetic oligonucleotide
  Sense strand starting at position 727 of SEQ ID NO: 316805
aaaguuaagugaguaccua

SEQ ID NO: 441670 - RNA, 19 nt, Artificial Sequence
  Description of Artificial Sequence: Synthetic oligonucleotide
  Antisense Strand to SEQ ID NO: 441669
uagguacucacuuaacuuu

SEQ ID NO: 441671 - RNA, 19 nt, Artificial Sequence
  Description of Artificial Sequence: Synthetic oligonucleotide
  Sense strand starting at position 728 of SEQ ID NO: 316805
aaguuaagugaguaccuaa

SEQ ID NO: 441672 - RNA, 19 nt, Artificial Sequence
  Description of Artificial Sequence: Synthetic oligonucleotide
  Antisense Strand to SEQ ID NO: 441671
uuagguacucacuuaacuu

SEQ ID NO: 441673 - RNA, 19 nt, Artificial Sequence
  Description of Artificial Sequence: Synthetic oligonucleotide
  Sense strand starting at position 1027 of SEQ ID NO: 316805
ugaagcacucccgagaauu

SEQ ID NO: 441674 - RNA, 19 nt, Artificial Sequence
  Description of Artificial Sequence: Synthetic oligonucleotide
  Antisense Strand to SEQ ID NO: 441673
aauucucgggagugcuuca

SEQ ID NO: 441675 - RNA, 19 nt, Artificial Sequence
  Description of Artificial Sequence: Synthetic oligonucleotide
  Sense strand starting at position 1123 of SEQ ID NO: 316805
ggauucuagcaauauccca

SEQ ID NO: 441676 - RNA, 19 nt, Artificial Sequence
  Description of Artificial Sequence: Synthetic oligonucleotide
  Antisense Strand to SEQ ID NO: 441675
ugggauauugcuagaaucc

SEQ ID NO: 441677 - RNA, 19 nt, Artificial Sequence
  Description of Artificial Sequence: Synthetic oligonucleotide
  Sense strand starting at position 1138 of SEQ ID NO: 316805
cccaaauguuugucuggga

SEQ ID NO: 441678 - RNA, 19 nt, Artificial Sequence
  Description of Artificial Sequence: Synthetic oligonucleotide
  Antisense Strand to SEQ ID NO: 441677
ucccagacaaacauuuggg

SEQ ID NO: 441679 - RNA, 19 nt, Artificial Sequence
  Description of Artificial Sequence: Synthetic oligonucleotide
  Sense strand starting at position 1142 of SEQ ID NO: 316805
aauguuugucugggaacuu

SEQ ID NO: 441680 - RNA, 19 nt, Artificial Sequence
  Description of Artificial Sequence: Synthetic oligonucleotide
  Antisense Strand to SEQ ID NO: 441679
aaguucccagacaaacauu

SEQ ID NO: 441681 - RNA, 19 nt, Artificial Sequence
  Description of Artificial Sequence: Synthetic oligonucleotide
  Sense strand starting at position 2601 of SEQ ID NO: 316805
aacugaugcgaguggaaac

SEQ ID NO: 441682 - RNA, 19 nt, Artificial Sequence
  Description of Artificial Sequence: Synthetic oligonucleotide
  Antisense Strand to SEQ ID NO: 441681
guuuccacucgcaucaguu

SEQ ID NO: 441683 - RNA, 19 nt, Artificial Sequence
  Description of Artificial Sequence: Synthetic oligonucleotide
  Sense strand starting at position 2654 of SEQ ID NO: 316805
gagagugcuuaucccuaaa

SEQ ID NO: 441684 - RNA, 19 nt, Artificial Sequence
  Description of Artificial Sequence: Synthetic oligonucleotide
  Antisense Strand to SEQ ID NO: 441683
uuuagggauaagcacucuc

SEQ ID NO: 441685 - RNA, 19 nt, Artificial Sequence
  Description of Artificial Sequence: Synthetic oligonucleotide
  Sense strand starting at position 2684 of SEQ ID NO: 316805
agacguucugauuaaugug

SEQ ID NO: 441686 - RNA, 19 nt, Artificial Sequence
  Description of Artificial Sequence: Synthetic oligonucleotide
  Antisense Strand to SEQ ID NO: 441685
cacauuaaucagaacgucu

SEQ ID NO: 441687 - RNA, 19 nt, Artificial Sequence
  Description of Artificial Sequence: Synthetic oligonucleotide
  Sense strand starting at position 2689 of SEQ ID NO: 316805
uucugauuaauguggagag

SEQ ID NO: 441688 - RNA, 19 nt, Artificial Sequence
  Description of Artificial Sequence: Synthetic oligonucleotide
  Antisense Strand to SEQ ID NO: 441687
cucuccacauuaaucagaa

SEQ ID NO: 441689 - RNA, 19 nt, Artificial Sequence
  Description of Artificial Sequence: Synthetic oligonucleotide
  Sense strand starting at position 2696 of SEQ ID NO: 316805
uaauguggagagugaacua

SEQ ID NO: 441690 - RNA, 19 nt, Artificial Sequence
  Description of Artificial Sequence: Synthetic oligonucleotide
  Antisense Strand to SEQ ID NO: 441689
uaguucacucuccacauua

SEQ ID NO: 441691 - RNA, 19 nt, Artificial Sequence
  Description of Artificial Sequence: Synthetic oligonucleotide
  Sense strand starting at position 2719 of SEQ ID NO: 316805
agcuauuucucgcucaaau

SEQ ID NO: 441692 - RNA, 19 nt, Artificial Sequence
  Description of Artificial Sequence: Synthetic oligonucleotide
  Antisense Strand to SEQ ID NO: 441691
auuugagcgagaaauagcu

SEQ ID NO: 441693 - RNA, 19 nt, Artificial Sequence
  Description of Artificial Sequence: Synthetic oligonucleotide
  Sense strand starting at position 2721 of SEQ ID NO: 316805
cuauuucucgcucaaaugu

SEQ ID NO: 441694 - RNA, 19 nt, Artificial Sequence
  Description of Artificial Sequence: Synthetic oligonucleotide
  Antisense Strand to SEQ ID NO: 441693
acauuugagcgagaaauag

SEQ ID NO: 441695 - RNA, 19 nt, Artificial Sequence
  Description of Artificial Sequence: Synthetic oligonucleotide
  Sense strand starting at position 2756 of SEQ ID NO: 316805
ucuugaacuuguuuaagaa

SEQ ID NO: 441696 - RNA, 19 nt, Artificial Sequence
  Description of Artificial Sequence: Synthetic oligonucleotide
  Antisense Strand to SEQ ID NO: 441695
uucuuaaacaaguucaaga

SEQ ID NO: 441697 - RNA, 19 nt, Artificial Sequence
  Description of Artificial Sequence: Synthetic oligonucleotide
  Sense strand starting at position 2801 of SEQ ID NO: 316805
acuuuaauuucuuaaggag

SEQ ID NO: 441698 - RNA, 19 nt, Artificial Sequence
  Description of Artificial Sequence: Synthetic oligonucleotide
  Antisense Strand to SEQ ID NO: 441697
cuccuuaagaaauuaaagu

SEQ ID NO: 441699 - RNA, 19 nt, Artificial Sequence
  Description of Artificial Sequence: Synthetic oligonucleotide
  Sense strand starting at position 2815 of SEQ ID NO: 316805
aggagagcuuauuauuuau

SEQ ID NO: 441700 - RNA, 19 nt, Artificial Sequence
  Description of Artificial Sequence: Synthetic oligonucleotide
  Antisense Strand to SEQ ID NO: 441699
auaaauaauaagcucuccu

SEQ ID NO: 441701 - RNA, 19 nt, Artificial Sequence
  Description of Artificial Sequence: Synthetic oligonucleotide
  Sense strand starting at position 2821 of SEQ ID NO: 316805
gcuuauuauuuaucaguuc

SEQ ID NO: 441702 - RNA, 19 nt, Artificial Sequence
  Description of Artificial Sequence: Synthetic oligonucleotide
  Antisense Strand to SEQ ID NO: 441701
gaacugauaaauaauaagc

SEQ ID NO: 441703 - RNA, 19 nt, Artificial Sequence
  Description of Artificial Sequence: Synthetic oligonucleotide
  Sense strand starting at position 2828 of SEQ ID NO: 316805
auuuaucaguuccagaaag

SEQ ID NO: 441704 - RNA, 19 nt, Artificial Sequence
  Description of Artificial Sequence: Synthetic oligonucleotide
  Antisense Strand to SEQ ID NO: 441703
cuuucuggaacugauaaau

SEQ ID NO: 441705 - RNA, 19 nt, Artificial Sequence
  Description of Artificial Sequence: Synthetic oligonucleotide
  Sense strand starting at position 2830 of SEQ ID NO: 316805
uuaucaguuccagaaaguu

SEQ ID NO: 441706 - RNA, 19 nt, Artificial Sequence
  Description of Artificial Sequence: Synthetic oligonucleotide
  Antisense Strand to SEQ ID NO: 441705
aacuuucuggaacugauaa

SEQ ID NO: 441707 - RNA, 19 nt, Artificial Sequence
  Description of Artificial Sequence: Synthetic oligonucleotide
  Sense strand starting at position 2839 of SEQ ID NO: 316805
ccagaaaguuugcucugaa

SEQ ID NO: 441708 - RNA, 19 nt, Artificial Sequence
  Description of Artificial Sequence: Synthetic oligonucleotide
  Antisense Strand to SEQ ID NO: 441707
uucagagcaaacuuucugg

SEQ ID NO: 441709 - RNA, 19 nt, Artificial Sequence
  Description of Artificial Sequence: Synthetic oligonucleotide
  Sense strand starting at position 2840 of SEQ ID NO: 316805
cagaaaguuugcucugaaa

SEQ ID NO: 441710 - RNA, 19 nt, Artificial Sequence
  Description of Artificial Sequence: Synthetic oligonucleotide
  Antisense Strand to SEQ ID NO: 441709
uuucagagcaaacuuucug

SEQ ID NO: 441711 - RNA, 19 nt, Artificial Sequence
  Description of Artificial Sequence: Synthetic oligonucleotide
  Sense strand starting at position 2842 of SEQ ID NO: 316805
gaaaguuugcucugaaauu

SEQ ID NO: 441712 - RNA, 19 nt, Artificial Sequence
  Description of Artificial Sequence: Synthetic oligonucleotide
  Antisense Strand to SEQ ID NO: 441711
aauuucagagcaaacuuuc

SEQ ID NO: 441713 - RNA, 19 nt, Artificial Sequence
  Description of Artificial Sequence: Synthetic oligonucleotide
  Sense strand starting at position 2915 of SEQ ID NO: 316805
cuauuaaguccauaggagu

SEQ ID NO: 441714 - RNA, 19 nt, Artificial Sequence
  Description of Artificial Sequence: Synthetic oligonucleotide
  Antisense Strand to SEQ ID NO: 441713
acuccuauggacuuaauag

SEQ ID NO: 441715 - RNA, 19 nt, Artificial Sequence
  Description of Artificial Sequence: Synthetic oligonucleotide
  Sense strand starting at position 3260 of SEQ ID NO: 316805
uucuuaaucgguuaauuac

SEQ ID NO: 441716 - RNA, 19 nt, Artificial Sequence
  Description of Artificial Sequence: Synthetic oligonucleotide
  Antisense Strand to SEQ ID NO: 441715
guaauuaaccgauuaagaa

SEQ ID NO: 441717 - RNA, 19 nt, Artificial Sequence
  Description of Artificial Sequence: Synthetic oligonucleotide
  Sense strand starting at position 3285 of SEQ ID NO: 316805
ucucaaucucaaggguaga

SEQ ID NO: 441718 - RNA, 19 nt, Artificial Sequence
  Description of Artificial Sequence: Synthetic oligonucleotide
  Antisense Strand to SEQ ID NO: 441717
ucuacccuugagauugaga

SEQ ID NO: 441719 - RNA, 19 nt, Artificial Sequence
  Description of Artificial Sequence: Synthetic oligonucleotide
  Sense strand starting at position 3419 of SEQ ID NO: 316805
augauucuaugaguacuau

SEQ ID NO: 441720 - RNA, 19 nt, Artificial Sequence
  Description of Artificial Sequence: Synthetic oligonucleotide
  Antisense Strand to SEQ ID NO: 441719
auaguacucauagaaucau

SEQ ID NO: 441721 - RNA, 19 nt, Artificial Sequence
  Description of Artificial Sequence: Synthetic oligonucleotide
  Sense strand starting at position 3420 of SEQ ID NO: 316805
ugauucuaugaguacuauc

SEQ ID NO: 441722 - RNA, 19 nt, Artificial Sequence
  Description of Artificial Sequence: Synthetic oligonucleotide
  Antisense Strand to SEQ ID NO: 441721
gauaguacucauagaauca

SEQ ID NO: 441723 - RNA, 19 nt, Artificial Sequence
  Description of Artificial Sequence: Synthetic oligonucleotide
  Sense strand starting at position 3429 of SEQ ID NO: 316805
gaguacuaucuguaugcaa

SEQ ID NO: 441724 - RNA, 19 nt, Artificial Sequence
  Description of Artificial Sequence: Synthetic oligonucleotide
  Antisense Strand to SEQ ID NO: 441723
uugcauacagauaguacuc

SEQ ID NO: 441725 - RNA, 19 nt, Artificial Sequence
  Description of Artificial Sequence: Synthetic oligonucleotide
  Sense strand starting at position 3584 of SEQ ID NO: 316805
ggcaauggauuccuauuau

SEQ ID NO: 441726 - RNA, 19 nt, Artificial Sequence
  Description of Artificial Sequence: Synthetic oligonucleotide
  Antisense Strand to SEQ ID NO: 441725
auaauaggaauccauugcc

SEQ ID NO: 441727 - RNA, 19 nt, Artificial Sequence
  Description of Artificial Sequence: Synthetic oligonucleotide
  Sense strand starting at position 21 of SEQ ID NO: 316806
uuugauuuaucuguauagc

SEQ ID NO: 441728 - RNA, 19 nt, Artificial Sequence
  Description of Artificial Sequence: Synthetic oligonucleotide
  Antisense Strand to SEQ ID NO: 441727
gcuauacagauaaaucaaa

SEQ ID NO: 441729 - RNA, 19 nt, Artificial Sequence
  Description of Artificial Sequence: Synthetic oligonucleotide
  Sense strand starting at position 867 of SEQ ID NO: 316806
uugucacugcaaugagaaa

SEQ ID NO: 441730 - RNA, 19 nt, Artificial Sequence
  Description of Artificial Sequence: Synthetic oligonucleotide
  Antisense Strand to SEQ ID NO: 441729
uuucucauugcagugacaa

SEQ ID NO: 441731 - RNA, 19 nt, Artificial Sequence
  Description of Artificial Sequence: Synthetic oligonucleotide
  Sense strand starting at position 908 of SEQ ID NO: 316806
cgggaaagcugauugcaca

SEQ ID NO: 441732 - RNA, 19 nt, Artificial Sequence
  Description of Artificial Sequence: Synthetic oligonucleotide
  Antisense Strand to SEQ ID NO: 441731
ugugcaaucagcuuucccg

SEQ ID NO: 441733 - RNA, 19 nt, Artificial Sequence
  Description of Artificial Sequence: Synthetic oligonucleotide
  Sense strand starting at position 909 of SEQ ID NO: 316806
gggaaagcugauugcacaa

SEQ ID NO: 441734 - RNA, 19 nt, Artificial Sequence
  Description of Artificial Sequence: Synthetic oligonucleotide
  Antisense Strand to SEQ ID NO: 441733
uugugcaaucagcuuuccc

SEQ ID NO: 441735 - RNA, 19 nt, Artificial Sequence
  Description of Artificial Sequence: Synthetic oligonucleotide
  Sense strand starting at position 1086 of SEQ ID NO: 316806
uggucuccacuguacuauu

SEQ ID NO: 441736 - RNA, 19 nt, Artificial Sequence
  Description of Artificial Sequence: Synthetic oligonucleotide
  Antisense Strand to SEQ ID NO: 441735
aauaguacaguggagacca

SEQ ID NO: 441737 - RNA, 19 nt, Artificial Sequence
  Description of Artificial Sequence: Synthetic oligonucleotide
  Sense strand starting at position 1217 of SEQ ID NO: 316806
uugggaauauccucuggca

SEQ ID NO: 441738 - RNA, 19 nt, Artificial Sequence
  Description of Artificial Sequence: Synthetic oligonucleotide
  Antisense Strand to SEQ ID NO: 441737
ugccagaggauauucccaa

SEQ ID NO: 441739 - RNA, 19 nt, Artificial Sequence
  Description of Artificial Sequence: Synthetic oligonucleotide
  Sense strand starting at position 1233 of SEQ ID NO: 316806
gcaccagagcaguaauuau

SEQ ID NO: 441740 - RNA, 19 nt, Artificial Sequence
  Description of Artificial Sequence: Synthetic oligonucleotide
  Antisense Strand to SEQ ID NO: 441739
auaauuacugcucuggugc

SEQ ID NO: 441741 - RNA, 19 nt, Artificial Sequence
  Description of Artificial Sequence: Synthetic oligonucleotide
  Sense strand starting at position 1590 of SEQ ID NO: 316806
gcgggacuuacaugacuuc

SEQ ID NO: 441742 - RNA, 19 nt, Artificial Sequence
  Description of Artificial Sequence: Synthetic oligonucleotide
  Antisense Strand to SEQ ID NO: 441741
gaagucauguaagucccgc

SEQ ID NO: 441743 - RNA, 19 nt, Artificial Sequence
  Description of Artificial Sequence: Synthetic oligonucleotide
  Sense strand starting at position 2077 of SEQ ID NO: 316806
cccggaguuccagaucgau

SEQ ID NO: 441744 - RNA, 19 nt, Artificial Sequence
  Description of Artificial Sequence: Synthetic oligonucleotide
  Antisense Strand to SEQ ID NO: 441743
aucgaucuggaacuccggg

SEQ ID NO: 441745 - RNA, 19 nt, Artificial Sequence
  Description of Artificial Sequence: Synthetic oligonucleotide
  Sense strand starting at position 2199 of SEQ ID NO: 316806
gaguaacuccuguggacuc

SEQ ID NO: 441746 - RNA, 19 nt, Artificial Sequence
  Description of Artificial Sequence: Synthetic oligonucleotide
  Antisense Strand to SEQ ID NO: 441745
gaguccacaggaguuacuc

SEQ ID NO: 441747 - RNA, 19 nt, Artificial Sequence
  Description of Artificial Sequence: Synthetic oligonucleotide
  Sense strand starting at position 2412 of SEQ ID NO: 316806
gagcguugugucucggauu

SEQ ID NO: 441748 - RNA, 19 nt, Artificial Sequence
  Description of Artificial Sequence: Synthetic oligonucleotide
  Antisense Strand to SEQ ID NO: 441747
aauccgagacacaacgcuc

SEQ ID NO: 441749 - RNA, 19 nt, Artificial Sequence
  Description of Artificial Sequence: Synthetic oligonucleotide
  Sense strand starting at position 2467 of SEQ ID NO: 316806
ggagauaggcuggagcuau

SEQ ID NO: 441750 - RNA, 19 nt, Artificial Sequence
  Description of Artificial Sequence: Synthetic oligonucleotide
  Antisense Strand to SEQ ID NO: 441749
auagcuccagccuaucucc

SEQ ID NO: 441751 - RNA, 19 nt, Artificial Sequence
  Description of Artificial Sequence: Synthetic oligonucleotide
  Sense strand starting at position 2471 of SEQ ID NO: 316806
auaggcuggagcuauauua

SEQ ID NO: 441752 - RNA, 19 nt, Artificial Sequence
  Description of Artificial Sequence: Synthetic oligonucleotide
  Antisense Strand to SEQ ID NO: 441751
uaauauagcuccagccuau

SEQ ID NO: 441753 - RNA, 19 nt, Artificial Sequence
  Description of Artificial Sequence: Synthetic oligonucleotide
  Sense strand starting at position 2565 of SEQ ID NO: 316806
aguacaguccauuauguca

SEQ ID NO: 441754 - RNA, 19 nt, Artificial Sequence
  Description of Artificial Sequence: Synthetic oligonucleotide
  Antisense Strand to SEQ ID NO: 441753
ugacauaauggacuguacu

SEQ ID NO: 441755 - RNA, 19 nt, Artificial Sequence
  Description of Artificial Sequence: Synthetic oligonucleotide
  Sense strand starting at position 2607 of SEQ ID NO: 316806
uuguuccuuguguugcaua

SEQ ID NO: 441756 - RNA, 19 nt, Artificial Sequence
  Description of Artificial Sequence: Synthetic oligonucleotide
  Antisense Strand to SEQ ID NO: 441755
uaugcaacacaaggaacaa

SEQ ID NO: 441757 - RNA, 19 nt, Artificial Sequence
  Description of Artificial Sequence: Synthetic oligonucleotide
  Sense strand starting at position 2609 of SEQ ID NO: 316806
guuccuuguguugcauauu

SEQ ID NO: 441758 - RNA, 19 nt, Artificial Sequence
  Description of Artificial Sequence: Synthetic oligonucleotide
  Antisense Strand to SEQ ID NO: 441757
aauaugcaacacaaggaac

SEQ ID NO: 441759 - RNA, 19 nt, Artificial Sequence
  Description of Artificial Sequence: Synthetic oligonucleotide
  Sense strand starting at position 2643 of SEQ ID NO: 316806
gaauaucuuguuuacguuu

SEQ ID NO: 441760 - RNA, 19 nt, Artificial Sequence
  Description of Artificial Sequence: Synthetic oligonucleotide
  Antisense Strand to SEQ ID NO: 441759
aaacguaaacaagauauuc

SEQ ID NO: 441761 - RNA, 19 nt, Artificial Sequence
  Description of Artificial Sequence: Synthetic oligonucleotide
  Sense strand starting at position 2670 of SEQ ID NO: 316806
guggcaacagauuaucagu

SEQ ID NO: 441762 - RNA, 19 nt, Artificial Sequence
  Description of Artificial Sequence: Synthetic oligonucleotide
  Antisense Strand to SEQ ID NO: 441761
acugauaaucuguugccac

SEQ ID NO: 441763 - RNA, 19 nt, Artificial Sequence
  Description of Artificial Sequence: Synthetic oligonucleotide
  Sense strand starting at position 2676 of SEQ ID NO: 316806
acagauuaucagugucaaa

SEQ ID NO: 441764 - RNA, 19 nt, Artificial Sequence
  Description of Artificial Sequence: Synthetic oligonucleotide
  Antisense Strand to SEQ ID NO: 441763
uuugacacugauaaucugu

SEQ ID NO: 441765 - RNA, 19 nt, Artificial Sequence
  Description of Artificial Sequence: Synthetic oligonucleotide
  Sense strand starting at position 2705 of SEQ ID NO: 316806
aguguuagcgucaguggaa

SEQ ID NO: 441766 - RNA, 19 nt, Artificial Sequence
  Description of Artificial Sequence: Synthetic oligonucleotide
  Antisense Strand to SEQ ID NO: 441765
uuccacugacgcuaacacu

SEQ ID NO: 441767 - RNA, 19 nt, Artificial Sequence
  Description of Artificial Sequence: Synthetic oligonucleotide
  Sense strand starting at position 2902 of SEQ ID NO: 316806
ggcucaugggcucaccauu

SEQ ID NO: 441768 - RNA, 19 nt, Artificial Sequence
  Description of Artificial Sequence: Synthetic oligonucleotide
  Antisense Strand to SEQ ID NO: 441767
aauggugagcccaugagcc

SEQ ID NO: 441769 - RNA, 19 nt, Artificial Sequence
  Description of Artificial Sequence: Synthetic oligonucleotide
  Sense strand starting at position 3007 of SEQ ID NO: 316806
caugcauucggaugaaaua

SEQ ID NO: 441770 - RNA, 19 nt, Artificial Sequence
  Description of Artificial Sequence: Synthetic oligonucleotide
  Antisense Strand to SEQ ID NO: 441769
uauuucauccgaaugcaug

SEQ ID NO: 441771 - RNA, 19 nt, Artificial Sequence
  Description of Artificial Sequence: Synthetic oligonucleotide
  Sense strand starting at position 3142 of SEQ ID NO: 316806
gucauuuaaccugguagcu

SEQ ID NO: 441772 - RNA, 19 nt, Artificial Sequence
  Description of Artificial Sequence: Synthetic oligonucleotide
  Antisense Strand to SEQ ID NO: 441771
agcuaccagguuaaaugac

SEQ ID NO: 441773 - RNA, 19 nt, Artificial Sequence
  Description of Artificial Sequence: Synthetic oligonucleotide
  Sense strand starting at position 3229 of SEQ ID NO: 316806
aagugugauucuccaagug

SEQ ID NO: 441774 - RNA, 19 nt, Artificial Sequence
  Description of Artificial Sequence: Synthetic oligonucleotide
  Antisense Strand to SEQ ID NO: 441773
cacuuggagaaucacacuu

SEQ ID NO: 441775 - RNA, 19 nt, Artificial Sequence
  Description of Artificial Sequence: Synthetic oligonucleotide
  Sense strand starting at position 3234 of SEQ ID NO: 316806
ugauucuccaagugggauu

SEQ ID NO: 441776 - RNA, 19 nt, Artificial Sequence
  Description of Artificial Sequence: Synthetic oligonucleotide
  Antisense Strand to SEQ ID NO: 441775
aaucccacuuggagaauca

SEQ ID NO: 441777 - RNA, 19 nt, Artificial Sequence
  Description of Artificial Sequence: Synthetic oligonucleotide
  Sense strand starting at position 3258 of SEQ ID NO: 316806
cucucugagacauggagua

SEQ ID NO: 441778 - RNA, 19 nt, Artificial Sequence
  Description of Artificial Sequence: Synthetic oligonucleotide
  Antisense Strand to SEQ ID NO: 441777
uacuccaugucucagagag

SEQ ID NO: 441779 - RNA, 19 nt, Artificial Sequence
  Description of Artificial Sequence: Synthetic oligonucleotide
  Sense strand starting at position 3318 of SEQ ID NO: 316806
ggcagaugucuccacaaca

SEQ ID NO: 441780 - RNA, 19 nt, Artificial Sequence
  Description of Artificial Sequence: Synthetic oligonucleotide
  Antisense Strand to SEQ ID NO: 441779
uguuguggagacaucugcc

SEQ ID NO: 441781 - RNA, 19 nt, Artificial Sequence
  Description of Artificial Sequence: Synthetic oligonucleotide
  Sense strand starting at position 3474 of SEQ ID NO: 316806
gguuaugagaaaugaguca

SEQ ID NO: 441782 - RNA, 19 nt, Artificial Sequence
  Description of Artificial Sequence: Synthetic oligonucleotide
  Antisense Strand to SEQ ID NO: 441781
ugacucauuucucauaacc

SEQ ID NO: 441783 - RNA, 19 nt, Artificial Sequence
  Description of Artificial Sequence: Synthetic oligonucleotide
  Sense strand starting at position 3600 of SEQ ID NO: 316806
ucauccugaugugaauuua

SEQ ID NO: 441784 - RNA, 19 nt, Artificial Sequence
  Description of Artificial Sequence: Synthetic oligonucleotide
  Antisense Strand to SEQ ID NO: 441783
uaaauucacaucaggauga

SEQ ID NO: 441785 - RNA, 19 nt, Artificial Sequence
  Description of Artificial Sequence: Synthetic oligonucleotide
  Sense strand starting at position 3765 of SEQ ID NO: 316806
cauauacagcaguaugagu

SEQ ID NO: 441786 - RNA, 19 nt, Artificial Sequence
  Description of Artificial Sequence: Synthetic oligonucleotide
  Antisense Strand to SEQ ID NO: 441785
acucauacugcuguauaug

SEQ ID NO: 441787 - RNA, 19 nt, Artificial Sequence
  Description of Artificial Sequence: Synthetic oligonucleotide
  Sense strand starting at position 3879 of SEQ ID NO: 316806
uggugcucucauuacagua

SEQ ID NO: 441788 - RNA, 19 nt, Artificial Sequence
  Description of Artificial Sequence: Synthetic oligonucleotide
  Antisense Strand to SEQ ID NO: 441787
uacuguaaugagagcacca

SEQ ID NO: 441789 - RNA, 19 nt, Artificial Sequence
  Description of Artificial Sequence: Synthetic oligonucleotide
  Sense strand starting at position 3887 of SEQ ID NO: 316806
ucauuacaguaaucuuagu

SEQ ID NO: 441790 - RNA, 19 nt, Artificial Sequence
  Description of Artificial Sequence: Synthetic oligonucleotide
  Antisense Strand to SEQ ID NO: 441789
acuaagauuacuguaauga

SEQ ID NO: 441791 - RNA, 19 nt, Artificial Sequence
  Description of Artificial Sequence: Synthetic oligonucleotide
  Sense strand starting at position 3894 of SEQ ID NO: 316806
aguaaucuuagucaagggu

SEQ ID NO: 441792 - RNA, 19 nt, Artificial Sequence
  Description of Artificial Sequence: Synthetic oligonucleotide
  Antisense Strand to SEQ ID NO: 441791
acccuugacuaagauuacu

SEQ ID NO: 441793 - RNA, 19 nt, Artificial Sequence
  Description of Artificial Sequence: Synthetic oligonucleotide
  Sense strand starting at position 3897 of SEQ ID NO: 316806
aaucuuagucaaggguaga

SEQ ID NO: 441794 - RNA, 19 nt, Artificial Sequence
  Description of Artificial Sequence: Synthetic oligonucleotide
  Antisense Strand to SEQ ID NO: 441793
ucuacccuugacuaagauu

SEQ ID NO: 441795 - RNA, 19 nt, Artificial Sequence
  Description of Artificial Sequence: Synthetic oligonucleotide
  Sense strand starting at position 3898 of SEQ ID NO: 316806
aucuuagucaaggguagaa

SEQ ID NO: 441796 - RNA, 19 nt, Artificial Sequence
  Description of Artificial Sequence: Synthetic oligonucleotide
  Antisense Strand to SEQ ID NO: 441795
uucuacccuugacuaagau

SEQ ID NO: 441797 - RNA, 19 nt, Artificial Sequence
  Description of Artificial Sequence: Synthetic oligonucleotide
  Sense strand starting at position 3908 of SEQ ID NO: 316806
aggguagaaaggugugcua

SEQ ID NO: 441798 - RNA, 19 nt, Artificial Sequence
  Description of Artificial Sequence: Synthetic oligonucleotide
  Antisense Strand to SEQ ID NO: 441797
uagcacaccuuucuacccu

SEQ ID NO: 441799 - RNA, 19 nt, Artificial Sequence
  Description of Artificial Sequence: Synthetic oligonucleotide
  Sense strand starting at position 3910 of SEQ ID NO: 316806
gguagaaaggugugcuaga

SEQ ID NO: 441800 - RNA, 19 nt, Artificial Sequence
  Description of Artificial Sequence: Synthetic oligonucleotide
  Antisense Strand to SEQ ID NO: 441799
ucuagcacaccuuucuacc

SEQ ID NO: 441801 - RNA, 19 nt, Artificial Sequence
  Description of Artificial Sequence: Synthetic oligonucleotide
  Sense strand starting at position 3911 of SEQ ID NO: 316806
guagaaaggugugcuagaa

SEQ ID NO: 441802 - RNA, 19 nt, Artificial Sequence
  Description of Artificial Sequence: Synthetic oligonucleotide
  Antisense Strand to SEQ ID NO: 441801
uucuagcacaccuuucuac

SEQ ID NO: 441803 - RNA, 19 nt, Artificial Sequence
  Description of Artificial Sequence: Synthetic oligonucleotide
  Sense strand starting at position 3915 of SEQ ID NO: 316806
aaaggugugcuagaauguu

SEQ ID NO: 441804 - RNA, 19 nt, Artificial Sequence
  Description of Artificial Sequence: Synthetic oligonucleotide
  Antisense Strand to SEQ ID NO: 441803
aacauucuagcacaccuuu

SEQ ID NO: 441805 - RNA, 19 nt, Artificial Sequence
  Description of Artificial Sequence: Synthetic oligonucleotide
  Sense strand starting at position 3961 of SEQ ID NO: 316806
guauauguacuccagucuu

SEQ ID NO: 441806 - RNA, 19 nt, Artificial Sequence
  Description of Artificial Sequence: Synthetic oligonucleotide
  Antisense Strand to SEQ ID NO: 441805
aagacuggaguacauauac

SEQ ID NO: 441807 - RNA, 19 nt, Artificial Sequence
  Description of Artificial Sequence: Synthetic oligonucleotide
  Sense strand starting at position 23 of SEQ ID NO: 316807
auuugagauucugagaauu

SEQ ID NO: 441808 - RNA, 19 nt, Artificial Sequence
  Description of Artificial Sequence: Synthetic oligonucleotide
  Antisense Strand to SEQ ID NO: 441807
aauucucagaaucucaaau

SEQ ID NO: 441809 - RNA, 19 nt, Artificial Sequence
  Description of Artificial Sequence: Synthetic oligonucleotide
  Sense strand starting at position 57 of SEQ ID NO: 316807
gcagaaagauuccuuagua

SEQ ID NO: 441810 - RNA, 19 nt, Artificial Sequence
  Description of Artificial Sequence: Synthetic oligonucleotide
  Antisense Strand to SEQ ID NO: 441809
uacuaaggaaucuuucugc

SEQ ID NO: 441811 - RNA, 19 nt, Artificial Sequence
  Description of Artificial Sequence: Synthetic oligonucleotide
  Sense strand starting at position 69 of SEQ ID NO: 316807
cuuaguacccuuggaagau

SEQ ID NO: 441812 - RNA, 19 nt, Artificial Sequence
  Description of Artificial Sequence: Synthetic oligonucleotide
  Antisense Strand to SEQ ID NO: 441811
aucuuccaaggguacuaag

SEQ ID NO: 441813 - RNA, 19 nt, Artificial Sequence
  Description of Artificial Sequence: Synthetic oligonucleotide
  Sense strand starting at position 146 of SEQ ID NO: 316807
cucaguagagcuuacauua

SEQ ID NO: 441814 - RNA, 19 nt, Artificial Sequence
  Description of Artificial Sequence: Synthetic oligonucleotide
  Antisense Strand to SEQ ID NO: 441813
uaauguaagcucuacugag

SEQ ID NO: 441815 - RNA, 19 nt, Artificial Sequence
  Description of Artificial Sequence: Synthetic oligonucleotide
  Sense strand starting at position 172 of SEQ ID NO: 316807
aggguagaguuauuacuga

SEQ ID NO: 441816 - RNA, 19 nt, Artificial Sequence
  Description of Artificial Sequence: Synthetic oligonucleotide
  Antisense Strand to SEQ ID NO: 441815
ucaguaauaacucuacccu

SEQ ID NO: 441817 - RNA, 19 nt, Artificial Sequence
  Description of Artificial Sequence: Synthetic oligonucleotide
  Sense strand starting at position 180 of SEQ ID NO: 316807
guuauuacugaauagcuua

SEQ ID NO: 441818 - RNA, 19 nt, Artificial Sequence
  Description of Artificial Sequence: Synthetic oligonucleotide
  Antisense Strand to SEQ ID NO: 441817
uaagcuauucaguaauaac

SEQ ID NO: 441819 - RNA, 19 nt, Artificial Sequence
  Description of Artificial Sequence: Synthetic oligonucleotide
  Sense strand starting at position 289 of SEQ ID NO: 316807
acaauuauggcuugacaua

SEQ ID NO: 441820 - RNA, 19 nt, Artificial Sequence
  Description of Artificial Sequence: Synthetic oligonucleotide
  Antisense Strand to SEQ ID NO: 441819
uaugucaagccauaauugu

SEQ ID NO: 441821 - RNA, 19 nt, Artificial Sequence
  Description of Artificial Sequence: Synthetic oligonucleotide
  Sense strand starting at position 631 of SEQ ID NO: 316807
acugguaaucaggguaacu

SEQ ID NO: 441822 - RNA, 19 nt, Artificial Sequence
  Description of Artificial Sequence: Synthetic oligonucleotide
  Antisense Strand to SEQ ID NO: 441821
aguuacccugauuaccagu

SEQ ID NO: 441823 - RNA, 19 nt, Artificial Sequence
  Description of Artificial Sequence: Synthetic oligonucleotide
  Sense strand starting at position 669 of SEQ ID NO: 316807
gauggugccucagcauuua

SEQ ID NO: 441824 - RNA, 19 nt, Artificial Sequence
  Description of Artificial Sequence: Synthetic oligonucleotide
  Antisense Strand to SEQ ID NO: 441823
uaaaugcugaggcaccauc

SEQ ID NO: 441825 - RNA, 19 nt, Artificial Sequence
  Description of Artificial Sequence: Synthetic oligonucleotide
  Sense strand starting at position 911 of SEQ ID NO: 316807
auuguagcacuguagaaau

SEQ ID NO: 441826 - RNA, 19 nt, Artificial Sequence
  Description of Artificial Sequence: Synthetic oligonucleotide
  Antisense Strand to SEQ ID NO: 441825
auuucuacagugcuacaau

SEQ ID NO: 441827 - RNA, 19 nt, Artificial Sequence
  Description of Artificial Sequence: Synthetic oligonucleotide
  Sense strand starting at position 913 of SEQ ID NO: 316807
uguagcacuguagaaauaa

SEQ ID NO: 441828 - RNA, 19 nt, Artificial Sequence
  Description of Artificial Sequence: Synthetic oligonucleotide
  Antisense Strand to SEQ ID NO: 441827
uuauuucuacagugcuaca

SEQ ID NO: 441829 - RNA, 19 nt, Artificial Sequence
  Description of Artificial Sequence: Synthetic oligonucleotide
  Sense strand starting at position 1177 of SEQ ID NO: 316807
auuggcuugcaggaauaau

SEQ ID NO: 441830 - RNA, 19 nt, Artificial Sequence
  Description of Artificial Sequence: Synthetic oligonucleotide
  Antisense Strand to SEQ ID NO: 441829
auuauuccugcaagccaau

SEQ ID NO: 441831 - RNA, 19 nt, Artificial Sequence
  Description of Artificial Sequence: Synthetic oligonucleotide
  Sense strand starting at position 1205 of SEQ ID NO: 316807
uucuaaagaccuuggauua

SEQ ID NO: 441832 - RNA, 19 nt, Artificial Sequence
  Description of Artificial Sequence: Synthetic oligonucleotide
  Antisense Strand to SEQ ID NO: 441831
uaauccaaggucuuuagaa

SEQ ID NO: 441833 - RNA, 19 nt, Artificial Sequence
  Description of Artificial Sequence: Synthetic oligonucleotide
  Sense strand starting at position 1215 of SEQ ID NO: 316807
cuuggauuaacagguugau

SEQ ID NO: 441834 - RNA, 19 nt, Artificial Sequence
  Description of Artificial Sequence: Synthetic oligonucleotide
  Antisense Strand to SEQ ID NO: 441833
aucaaccuguuaauccaag

SEQ ID NO: 441835 - RNA, 19 nt, Artificial Sequence
  Description of Artificial Sequence: Synthetic oligonucleotide
  Sense strand starting at position 1218 of SEQ ID NO: 316807
ggauuaacagguugauuac

SEQ ID NO: 441836 - RNA, 19 nt, Artificial Sequence
  Description of Artificial Sequence: Synthetic oligonucleotide
  Antisense Strand to SEQ ID NO: 441835
guaaucaaccuguuaaucc

SEQ ID NO: 441837 - RNA, 19 nt, Artificial Sequence
  Description of Artificial Sequence: Synthetic oligonucleotide
  Sense strand starting at position 1221 of SEQ ID NO: 316807
uuaacagguugauuacuaa

SEQ ID NO: 441838 - RNA, 19 nt, Artificial Sequence
  Description of Artificial Sequence: Synthetic oligonucleotide
  Antisense Strand to SEQ ID NO: 441837
uuaguaaucaaccuguuaa

SEQ ID NO: 441839 - RNA, 19 nt, Artificial Sequence
  Description of Artificial Sequence: Synthetic oligonucleotide
  Sense strand starting at position 1473 of SEQ ID NO: 316807
cagcuuguugauuauaaag

SEQ ID NO: 441840 - RNA, 19 nt, Artificial Sequence
  Description of Artificial Sequence: Synthetic oligonucleotide
  Antisense Strand to SEQ ID NO: 441839
cuuuauaaucaacaagcug

SEQ ID NO: 441841 - RNA, 19 nt, Artificial Sequence
  Description of Artificial Sequence: Synthetic oligonucleotide
  Sense strand starting at position 1526 of SEQ ID NO: 316807
agcuuaguuagguaaggaa

SEQ ID NO: 441842 - RNA, 19 nt, Artificial Sequence
  Description of Artificial Sequence: Synthetic oligonucleotide
  Antisense Strand to SEQ ID NO: 441841
uuccuuaccuaacuaagcu

SEQ ID NO: 441843 - RNA, 19 nt, Artificial Sequence
  Description of Artificial Sequence: Synthetic oligonucleotide
  Sense strand starting at position 1530 of SEQ ID NO: 316807
uaguuagguaaggaaguau

SEQ ID NO: 441844 - RNA, 19 nt, Artificial Sequence
  Description of Artificial Sequence: Synthetic oligonucleotide
  Antisense Strand to SEQ ID NO: 441843
auacuuccuuaccuaacua

SEQ ID NO: 441845 - RNA, 19 nt, Artificial Sequence
  Description of Artificial Sequence: Synthetic oligonucleotide
  Sense strand starting at position 1929 of SEQ ID NO: 316807
ucagaauaugucuaagcaa

SEQ ID NO: 441846 - RNA, 19 nt, Artificial Sequence
  Description of Artificial Sequence: Synthetic oligonucleotide
  Antisense Strand to SEQ ID NO: 441845
uugcuuagacauauucuga

SEQ ID NO: 441847 - RNA, 19 nt, Artificial Sequence
  Description of Artificial Sequence: Synthetic oligonucleotide
  Sense strand starting at position 1937 of SEQ ID NO: 316807
ugucuaagcaauugaggaa

SEQ ID NO: 441848 - RNA, 19 nt, Artificial Sequence
  Description of Artificial Sequence: Synthetic oligonucleotide
  Antisense Strand to SEQ ID NO: 441847
uuccucaauugcuuagaca

SEQ ID NO: 441849 - RNA, 19 nt, Artificial Sequence
  Description of Artificial Sequence: Synthetic oligonucleotide
  Sense strand starting at position 1974 of SEQ ID NO: 316807
gcuagugugccauauuuau

SEQ ID NO: 441850 - RNA, 19 nt, Artificial Sequence
  Description of Artificial Sequence: Synthetic oligonucleotide
  Antisense Strand to SEQ ID NO: 441849
auaaauauggcacacuagc

SEQ ID NO: 441851 - RNA, 19 nt, Artificial Sequence
  Description of Artificial Sequence: Synthetic oligonucleotide
  Sense strand starting at position 1980 of SEQ ID NO: 316807
gugccauauuuaucugcaa

SEQ ID NO: 441852 - RNA, 19 nt, Artificial Sequence
  Description of Artificial Sequence: Synthetic oligonucleotide
  Antisense Strand to SEQ ID NO: 441851
uugcagauaaauauggcac

SEQ ID NO: 441853 - RNA, 19 nt, Artificial Sequence
  Description of Artificial Sequence: Synthetic oligonucleotide
  Sense strand starting at position 2012 of SEQ ID NO: 316807
cccuaauucugauuggaua

SEQ ID NO: 441854 - RNA, 19 nt, Artificial Sequence
  Description of Artificial Sequence: Synthetic oligonucleotide
  Antisense Strand to SEQ ID NO: 441853
uauccaaucagaauuaggg

SEQ ID NO: 441855 - RNA, 19 nt, Artificial Sequence
  Description of Artificial Sequence: Synthetic oligonucleotide
  Sense strand starting at position 2013 of SEQ ID NO: 316807
ccuaauucugauuggauaa

SEQ ID NO: 441856 - RNA, 19 nt, Artificial Sequence
  Description of Artificial Sequence: Synthetic oligonucleotide
  Antisense Strand to SEQ ID NO: 441855
uuauccaaucagaauuagg

SEQ ID NO: 441857 - RNA, 19 nt, Artificial Sequence
  Description of Artificial Sequence: Synthetic oligonucleotide
  Sense strand starting at position 2157 of SEQ ID NO: 316807
guaauagugaauuagguuu

SEQ ID NO: 441858 - RNA, 19 nt, Artificial Sequence
  Description of Artificial Sequence: Synthetic oligonucleotide
  Antisense Strand to SEQ ID NO: 441857
aaaccuaauucacuauuac

SEQ ID NO: 441859 - RNA, 19 nt, Artificial Sequence
  Description of Artificial Sequence: Synthetic oligonucleotide
  Sense strand starting at position 2601 of SEQ ID NO: 316807
ugauuugugguguguuaaa

SEQ ID NO: 441860 - RNA, 19 nt, Artificial Sequence
  Description of Artificial Sequence: Synthetic oligonucleotide
  Antisense Strand to SEQ ID NO: 441859
uuuaacacaccacaaauca

SEQ ID NO: 441861 - RNA, 19 nt, Artificial Sequence
  Description of Artificial Sequence: Synthetic oligonucleotide
  Sense strand starting at position 2636 of SEQ ID NO: 316807
auagcagucccugaaugaa

SEQ ID NO: 441862 - RNA, 19 nt, Artificial Sequence
  Description of Artificial Sequence: Synthetic oligonucleotide
  Antisense Strand to SEQ ID NO: 441861
uucauucagggacugcuau

SEQ ID NO: 441863 - RNA, 19 nt, Artificial Sequence
  Description of Artificial Sequence: Synthetic oligonucleotide
  Sense strand starting at position 2672 of SEQ ID NO: 316807
ucuagaauggugugagaaa

SEQ ID NO: 441864 - RNA, 19 nt, Artificial Sequence
  Description of Artificial Sequence: Synthetic oligonucleotide
  Antisense Strand to SEQ ID NO: 441863
uuucucacaccauucuaga

SEQ ID NO: 441865 - RNA, 19 nt, Artificial Sequence
  Description of Artificial Sequence: Synthetic oligonucleotide
  Sense strand starting at position 2702 of SEQ ID NO: 316807
cuauccuaggguuauugua

SEQ ID NO: 441866 - RNA, 19 nt, Artificial Sequence
  Description of Artificial Sequence: Synthetic oligonucleotide
  Antisense Strand to SEQ ID NO: 441865
uacaauaacccuaggauag

SEQ ID NO: 441867 - RNA, 19 nt, Artificial Sequence
  Description of Artificial Sequence: Synthetic oligonucleotide
  Sense strand starting at position 2788 of SEQ ID NO: 316807
gggaaaguagcuugagaca

SEQ ID NO: 441868 - RNA, 19 nt, Artificial Sequence
  Description of Artificial Sequence: Synthetic oligonucleotide
  Antisense Strand to SEQ ID NO: 441867
ugucucaagcuacuuuccc

SEQ ID NO: 441869 - RNA, 19 nt, Artificial Sequence
  Description of Artificial Sequence: Synthetic oligonucleotide
  Sense strand starting at position 2975 of SEQ ID NO: 316807
auaguacuugacugauuau

SEQ ID NO: 441870 - RNA, 19 nt, Artificial Sequence
  Description of Artificial Sequence: Synthetic oligonucleotide
  Antisense Strand to SEQ ID NO: 441869
auaaucagucaaguacuau

SEQ ID NO: 441871 - RNA, 19 nt, Artificial Sequence
  Description of Artificial Sequence: Synthetic oligonucleotide
  Sense strand starting at position 3041 of SEQ ID NO: 316807
acauguugaaccugagagu

SEQ ID NO: 441872 - RNA, 19 nt, Artificial Sequence
  Description of Artificial Sequence: Synthetic oligonucleotide
  Antisense Strand to SEQ ID NO: 441871
acucucagguucaacaugu

SEQ ID NO: 441873 - RNA, 19 nt, Artificial Sequence
  Description of Artificial Sequence: Synthetic oligonucleotide
  Sense strand starting at position 3069 of SEQ ID NO: 316807
gcaguauccauggauauag

SEQ ID NO: 441874 - RNA, 19 nt, Artificial Sequence
  Description of Artificial Sequence: Synthetic oligonucleotide
  Antisense Strand to SEQ ID NO: 441873
cuauauccauggauacugc

SEQ ID NO: 441875 - RNA, 19 nt, Artificial Sequence
  Description of Artificial Sequence: Synthetic oligonucleotide
  Sense strand starting at position 3446 of SEQ ID NO: 316807
aauggaauuugcuagagag

SEQ ID NO: 441876 - RNA, 19 nt, Artificial Sequence
  Description of Artificial Sequence: Synthetic oligonucleotide
  Antisense Strand to SEQ ID NO: 441875
cucucuagcaaauuccauu

SEQ ID NO: 441877 - RNA, 19 nt, Artificial Sequence
  Description of Artificial Sequence: Synthetic oligonucleotide
  Sense strand starting at position 3483 of SEQ ID NO: 316807
uguucuaggaacuggaaua

SEQ ID NO: 441878 - RNA, 19 nt, Artificial Sequence
  Description of Artificial Sequence: Synthetic oligonucleotide
  Antisense Strand to SEQ ID NO: 441877
uauuccaguuccuagaaca

SEQ ID NO: 441879 - RNA, 19 nt, Artificial Sequence
  Description of Artificial Sequence: Synthetic oligonucleotide
  Sense strand starting at position 3517 of SEQ ID NO: 316807
gugaauaagucaguggaau

SEQ ID NO: 441880 - RNA, 19 nt, Artificial Sequence
  Description of Artificial Sequence: Synthetic oligonucleotide
  Antisense Strand to SEQ ID NO: 441879
auuccacugacuuauucac

SEQ ID NO: 441881 - RNA, 19 nt, Artificial Sequence
  Description of Artificial Sequence: Synthetic oligonucleotide
  Sense strand starting at position 3518 of SEQ ID NO: 316807
ugaauaagucaguggaauu

SEQ ID NO: 441882 - RNA, 19 nt, Artificial Sequence
  Description of Artificial Sequence: Synthetic oligonucleotide
  Antisense Strand to SEQ ID NO: 441881
aauuccacugacuuauuca

SEQ ID NO: 441883 - RNA, 19 nt, Artificial Sequence
  Description of Artificial Sequence: Synthetic oligonucleotide
  Sense strand starting at position 3530 of SEQ ID NO: 316807
uggaauuagcugugggaaa

SEQ ID NO: 441884 - RNA, 19 nt, Artificial Sequence
  Description of Artificial Sequence: Synthetic oligonucleotide
  Antisense Strand to SEQ ID NO: 441883
uuucccacagcuaauucca

SEQ ID NO: 441885 - RNA, 19 nt, Artificial Sequence
  Description of Artificial Sequence: Synthetic oligonucleotide
  Sense strand starting at position 3622 of SEQ ID NO: 316807
guucguucugaugagggaa

SEQ ID NO: 441886 - RNA, 19 nt, Artificial Sequence
  Description of Artificial Sequence: Synthetic oligonucleotide
  Antisense Strand to SEQ ID NO: 441885
uucccucaucagaacgaac

SEQ ID NO: 441887 - RNA, 19 nt, Artificial Sequence
  Description of Artificial Sequence: Synthetic oligonucleotide
  Sense strand starting at position 20 of SEQ ID NO: 316808
aaguguguauuugcaugaa

SEQ ID NO: 441888 - RNA, 19 nt, Artificial Sequence
  Description of Artificial Sequence: Synthetic oligonucleotide
  Antisense Strand to SEQ ID NO: 441887
uucaugcaaauacacacuu

SEQ ID NO: 441889 - RNA, 19 nt, Artificial Sequence
  Description of Artificial Sequence: Synthetic oligonucleotide
  Sense strand starting at position 87 of SEQ ID NO: 316808
agggcuugacuccaguaau

SEQ ID NO: 441890 - RNA, 19 nt, Artificial Sequence
  Description of Artificial Sequence: Synthetic oligonucleotide
  Antisense Strand to SEQ ID NO: 441889
auuacuggagucaagcccu

SEQ ID NO: 441891 - RNA, 19 nt, Artificial Sequence
  Description of Artificial Sequence: Synthetic oligonucleotide
  Sense strand starting at position 180 of SEQ ID NO: 316808
acagaaauguucucauagu

SEQ ID NO: 441892 - RNA, 19 nt, Artificial Sequence
  Description of Artificial Sequence: Synthetic oligonucleotide
  Antisense Strand to SEQ ID NO: 441891
acuaugagaacauuucugu

SEQ ID NO: 441893 - RNA, 19 nt, Artificial Sequence
  Description of Artificial Sequence: Synthetic oligonucleotide
  Sense strand starting at position 210 of SEQ ID NO: 316808
aguuguaagcaucaaaucu

SEQ ID NO: 441894 - RNA, 19 nt, Artificial Sequence
  Description of Artificial Sequence: Synthetic oligonucleotide
  Antisense Strand to SEQ ID NO: 441893
agauuugaugcuuacaacu

SEQ ID NO: 441895 - RNA, 19 nt, Artificial Sequence
  Description of Artificial Sequence: Synthetic oligonucleotide
  Sense strand starting at position 218 of SEQ ID NO: 316808
gcaucaaaucuagaagguu

SEQ ID NO: 441896 - RNA, 19 nt, Artificial Sequence
  Description of Artificial Sequence: Synthetic oligonucleotide
  Antisense Strand to SEQ ID NO: 441895
aaccuucuagauuugaugc

SEQ ID NO: 441897 - RNA, 19 nt, Artificial Sequence
  Description of Artificial Sequence: Synthetic oligonucleotide
  Sense strand starting at position 231 of SEQ ID NO: 316808
aagguucucuagccuagaa

SEQ ID NO: 441898 - RNA, 19 nt, Artificial Sequence
  Description of Artificial Sequence: Synthetic oligonucleotide
  Antisense Strand to SEQ ID NO: 441897
uucuaggcuagagaaccuu

SEQ ID NO: 441899 - RNA, 19 nt, Artificial Sequence
  Description of Artificial Sequence: Synthetic oligonucleotide
  Sense strand starting at position 233 of SEQ ID NO: 316808
gguucucuagccuagaaau

SEQ ID NO: 441900 - RNA, 19 nt, Artificial Sequence
  Description of Artificial Sequence: Synthetic oligonucleotide
  Antisense Strand to SEQ ID NO: 441899
auuucuaggcuagagaacc

SEQ ID NO: 441901 - RNA, 19 nt, Artificial Sequence
  Description of Artificial Sequence: Synthetic oligonucleotide
  Sense strand starting at position 243 of SEQ ID NO: 316808
ccuagaaaugcaugaaugu

SEQ ID NO: 441902 - RNA, 19 nt, Artificial Sequence
  Description of Artificial Sequence: Synthetic oligonucleotide
  Antisense Strand to SEQ ID NO: 441901
acauucaugcauuucuagg

SEQ ID NO: 441903 - RNA, 19 nt, Artificial Sequence
  Description of Artificial Sequence: Synthetic oligonucleotide
  Sense strand starting at position 259 of SEQ ID NO: 316808
uguauaaugcaacaaguaa

SEQ ID NO: 441904 - RNA, 19 nt, Artificial Sequence
  Description of Artificial Sequence: Synthetic oligonucleotide
  Antisense Strand to SEQ ID NO: 441903
uuacuuguugcauuauaca

SEQ ID NO: 441905 - RNA, 19 nt, Artificial Sequence
  Description of Artificial Sequence: Synthetic oligonucleotide
  Sense strand starting at position 374 of SEQ ID NO: 316808
uggaauucugauugucauu

SEQ ID NO: 441906 - RNA, 19 nt, Artificial Sequence
  Description of Artificial Sequence: Synthetic oligonucleotide
  Antisense Strand to SEQ ID NO: 441905
aaugacaaucagaauucca

SEQ ID NO: 441907 - RNA, 19 nt, Artificial Sequence
  Description of Artificial Sequence: Synthetic oligonucleotide
  Sense strand starting at position 495 of SEQ ID NO: 316808
aguuuccuacuguagaauu

SEQ ID NO: 441908 - RNA, 19 nt, Artificial Sequence
  Description of Artificial Sequence: Synthetic oligonucleotide
  Antisense Strand to SEQ ID NO: 441907
aauucuacaguaggaaacu

SEQ ID NO: 441909 - RNA, 19 nt, Artificial Sequence
  Description of Artificial Sequence: Synthetic oligonucleotide
  Sense strand starting at position 796 of SEQ ID NO: 316808
aagaucugucuuggauaaa

SEQ ID NO: 441910 - RNA, 19 nt, Artificial Sequence
  Description of Artificial Sequence: Synthetic oligonucleotide
  Antisense Strand to SEQ ID NO: 441909
uuuauccaagacagaucuu

SEQ ID NO: 441911 - RNA, 19 nt, Artificial Sequence
  Description of Artificial Sequence: Synthetic oligonucleotide
  Sense strand starting at position 837 of SEQ ID NO: 316808
uuugguaacuuacuuugau

SEQ ID NO: 441912 - RNA, 19 nt, Artificial Sequence
  Description of Artificial Sequence: Synthetic oligonucleotide
  Antisense Strand to SEQ ID NO: 441911
aucaaaguaaguuaccaaa

SEQ ID NO: 441913 - RNA, 19 nt, Artificial Sequence
  Description of Artificial Sequence: Synthetic oligonucleotide
  Sense strand starting at position 840 of SEQ ID NO: 316808
gguaacuuacuuugauuau

SEQ ID NO: 441914 - RNA, 19 nt, Artificial Sequence
  Description of Artificial Sequence: Synthetic oligonucleotide
  Antisense Strand to SEQ ID NO: 441913
auaaucaaaguaaguuacc

SEQ ID NO: 441915 - RNA, 19 nt, Artificial Sequence
  Description of Artificial Sequence: Synthetic oligonucleotide
  Sense strand starting at position 867 of SEQ ID NO: 316808
cuugcuucgauuugggauu

SEQ ID NO: 441916 - RNA, 19 nt, Artificial Sequence
  Description of Artificial Sequence: Synthetic oligonucleotide
  Antisense Strand to SEQ ID NO: 441915
aaucccaaaucgaagcaag

SEQ ID NO: 441917 - RNA, 19 nt, Artificial Sequence
  Description of Artificial Sequence: Synthetic oligonucleotide
  Sense strand starting at position 888 of SEQ ID NO: 316808
ggcaucguuguccuuuauu

SEQ ID NO: 441918 - RNA, 19 nt, Artificial Sequence
  Description of Artificial Sequence: Synthetic oligonucleotide
  Antisense Strand to SEQ ID NO: 441917
aauaaaggacaacgaugcc

SEQ ID NO: 441919 - RNA, 19 nt, Artificial Sequence
  Description of Artificial Sequence: Synthetic oligonucleotide
  Sense strand starting at position 1040 of SEQ ID NO: 316808
uuguuacuuggguacauua

SEQ ID NO: 441920 - RNA, 19 nt, Artificial Sequence
  Description of Artificial Sequence: Synthetic oligonucleotide
  Antisense Strand to SEQ ID NO: 441919
uaauguacccaaguaacaa

SEQ ID NO: 441921 - RNA, 19 nt, Artificial Sequence
  Description of Artificial Sequence: Synthetic oligonucleotide
  Sense strand starting at position 1153 of SEQ ID NO: 316808
agaucauagcauuaguuag

SEQ ID NO: 441922 - RNA, 19 nt, Artificial Sequence
  Description of Artificial Sequence: Synthetic oligonucleotide
  Antisense Strand to SEQ ID NO: 441921
cuaacuaaugcuaugaucu

SEQ ID NO: 441923 - RNA, 19 nt, Artificial Sequence
  Description of Artificial Sequence: Synthetic oligonucleotide
  Sense strand starting at position 1215 of SEQ ID NO: 316808
ggugaacgugagcagaauu

SEQ ID NO: 441924 - RNA, 19 nt, Artificial Sequence
  Description of Artificial Sequence: Synthetic oligonucleotide
  Antisense Strand to SEQ ID NO: 441923
aauucugcucacguucacc

SEQ ID NO: 441925 - RNA, 19 nt, Artificial Sequence
  Description of Artificial Sequence: Synthetic oligonucleotide
  Sense strand starting at position 1242 of SEQ ID NO: 316808
ggguaaagauaguaauuug

SEQ ID NO: 441926 - RNA, 19 nt, Artificial Sequence
  Description of Artificial Sequence: Synthetic oligonucleotide
  Antisense Strand to SEQ ID NO: 441925
caaauuacuaucuuuaccc

SEQ ID NO: 441927 - RNA, 19 nt, Artificial Sequence
  Description of Artificial Sequence: Synthetic oligonucleotide
  Sense strand starting at position 1295 of SEQ ID NO: 316808
aguuaaguaagauguugau

SEQ ID NO: 441928 - RNA, 19 nt, Artificial Sequence
  Description of Artificial Sequence: Synthetic oligonucleotide
  Antisense Strand to SEQ ID NO: 441927
aucaacaucuuacuuaacu

SEQ ID NO: 441929 - RNA, 19 nt, Artificial Sequence
  Description of Artificial Sequence: Synthetic oligonucleotide
  Sense strand starting at position 1367 of SEQ ID NO: 316808
aaguuuauuggaggugaag

SEQ ID NO: 441930 - RNA, 19 nt, Artificial Sequence
  Description of Artificial Sequence: Synthetic oligonucleotide
  Antisense Strand to SEQ ID NO: 441929
cuucaccuccaauaaacuu

SEQ ID NO: 441931 - RNA, 19 nt, Artificial Sequence
  Description of Artificial Sequence: Synthetic oligonucleotide
  Sense strand starting at position 1436 of SEQ ID NO: 316808
uuaacaugaucgcuauaua

SEQ ID NO: 441932 - RNA, 19 nt, Artificial Sequence
  Description of Artificial Sequence: Synthetic oligonucleotide
  Antisense Strand to SEQ ID NO: 441931
uauauagcgaucauguuaa

SEQ ID NO: 441933 - RNA, 19 nt, Artificial Sequence
  Description of Artificial Sequence: Synthetic oligonucleotide
  Sense strand starting at position 1605 of SEQ ID NO: 316808
aguaacuucuaaucuguga

SEQ ID NO: 441934 - RNA, 19 nt, Artificial Sequence
  Description of Artificial Sequence: Synthetic oligonucleotide
  Antisense Strand to SEQ ID NO: 441933
ucacagauuagaaguuacu

SEQ ID NO: 441935 - RNA, 19 nt, Artificial Sequence
  Description of Artificial Sequence: Synthetic oligonucleotide
  Sense strand starting at position 1609 of SEQ ID NO: 316808
acuucuaaucugugagauu

SEQ ID NO: 441936 - RNA, 19 nt, Artificial Sequence
  Description of Artificial Sequence: Synthetic oligonucleotide
  Antisense Strand to SEQ ID NO: 441935
aaucucacagauuagaagu

SEQ ID NO: 441937 - RNA, 19 nt, Artificial Sequence
  Description of Artificial Sequence: Synthetic oligonucleotide
  Sense strand starting at position 1880 of SEQ ID NO: 316808
ggaaauugauaauuggcau

SEQ ID NO: 441938 - RNA, 19 nt, Artificial Sequence
  Description of Artificial Sequence: Synthetic oligonucleotide
  Antisense Strand to SEQ ID NO: 441937
augccaauuaucaauuucc

SEQ ID NO: 441939 - RNA, 19 nt, Artificial Sequence
  Description of Artificial Sequence: Synthetic oligonucleotide
  Sense strand starting at position 2020 of SEQ ID NO: 316808
uccuauuugcaguaguguu

SEQ ID NO: 441940 - RNA, 19 nt, Artificial Sequence
  Description of Artificial Sequence: Synthetic oligonucleotide
  Antisense Strand to SEQ ID NO: 441939
aacacuacugcaaauagga

SEQ ID NO: 441941 - RNA, 19 nt, Artificial Sequence
  Description of Artificial Sequence: Synthetic oligonucleotide
  Sense strand starting at position 2032 of SEQ ID NO: 316808
uaguguugaaagugauaag

SEQ ID NO: 441942 - RNA, 19 nt, Artificial Sequence
  Description of Artificial Sequence: Synthetic oligonucleotide
  Antisense Strand to SEQ ID NO: 441941
cuuaucacuuucaacacua

SEQ ID NO: 441943 - RNA, 19 nt, Artificial Sequence
  Description of Artificial Sequence: Synthetic oligonucleotide
  Sense strand starting at position 2357 of SEQ ID NO: 316808
guaaaugagugccuaaaga

SEQ ID NO: 441944 - RNA, 19 nt, Artificial Sequence
  Description of Artificial Sequence: Synthetic oligonucleotide
  Antisense Strand to SEQ ID NO: 441943
ucuuuaggcacucauuuac

SEQ ID NO: 441945 - RNA, 19 nt, Artificial Sequence
  Description of Artificial Sequence: Synthetic oligonucleotide
  Sense strand starting at position 2381 of SEQ ID NO: 316808
cccuguguuucuguauuua

SEQ ID NO: 441946 - RNA, 19 nt, Artificial Sequence
  Description of Artificial Sequence: Synthetic oligonucleotide
  Antisense Strand to SEQ ID NO: 441945
uaaauacagaaacacaggg

SEQ ID NO: 441947 - RNA, 19 nt, Artificial Sequence
  Description of Artificial Sequence: Synthetic oligonucleotide
  Sense strand starting at position 2895 of SEQ ID NO: 316808
guggaaagcuacuuuauau

SEQ ID NO: 441948 - RNA, 19 nt, Artificial Sequence
  Description of Artificial Sequence: Synthetic oligonucleotide
  Antisense Strand to SEQ ID NO: 441947
auauaaaguagcuuuccac

SEQ ID NO: 441949 - RNA, 19 nt, Artificial Sequence
  Description of Artificial Sequence: Synthetic oligonucleotide
  Sense strand starting at position 2934 of SEQ ID NO: 316808
aguacaugaaguuguauga

SEQ ID NO: 441950 - RNA, 19 nt, Artificial Sequence
  Description of Artificial Sequence: Synthetic oligonucleotide
  Antisense Strand to SEQ ID NO: 441949
ucauacaacuucauguacu

SEQ ID NO: 441951 - RNA, 19 nt, Artificial Sequence
  Description of Artificial Sequence: Synthetic oligonucleotide
  Sense strand starting at position 3013 of SEQ ID NO: 316808
gagauucuacuuugaugua

SEQ ID NO: 441952 - RNA, 19 nt, Artificial Sequence
  Description of Artificial Sequence: Synthetic oligonucleotide
  Antisense Strand to SEQ ID NO: 441951
uacaucaaaguagaaucuc

SEQ ID NO: 441953 - RNA, 19 nt, Artificial Sequence
  Description of Artificial Sequence: Synthetic oligonucleotide
  Sense strand starting at position 3131 of SEQ ID NO: 316808
cuuucuaauggguaagcuu

SEQ ID NO: 441954 - RNA, 19 nt, Artificial Sequence
  Description of Artificial Sequence: Synthetic oligonucleotide
  Antisense Strand to SEQ ID NO: 441953
aagcuuacccauuagaaag

SEQ ID NO: 441955 - RNA, 19 nt, Artificial Sequence
  Description of Artificial Sequence: Synthetic oligonucleotide
  Sense strand starting at position 3134 of SEQ ID NO: 316808
ucuaauggguaagcuuaau

SEQ ID NO: 441956 - RNA, 19 nt, Artificial Sequence
  Description of Artificial Sequence: Synthetic oligonucleotide
  Antisense Strand to SEQ ID NO: 441955
auuaagcuuacccauuaga

SEQ ID NO: 441957 - RNA, 19 nt, Artificial Sequence
  Description of Artificial Sequence: Synthetic oligonucleotide
  Sense strand starting at position 3429 of SEQ ID NO: 316808
cuuggccuuccuuaaguaa

SEQ ID NO: 441958 - RNA, 19 nt, Artificial Sequence
  Description of Artificial Sequence: Synthetic oligonucleotide
  Antisense Strand to SEQ ID NO: 441957
uuacuuaaggaaggccaag

SEQ ID NO: 441959 - RNA, 19 nt, Artificial Sequence
  Description of Artificial Sequence: Synthetic oligonucleotide
  Sense strand starting at position 3432 of SEQ ID NO: 316808
ggccuuccuuaaguaauuu

SEQ ID NO: 441960 - RNA, 19 nt, Artificial Sequence
  Description of Artificial Sequence: Synthetic oligonucleotide
  Antisense Strand to SEQ ID NO: 441959
aaauuacuuaaggaaggcc

SEQ ID NO: 441961 - RNA, 19 nt, Artificial Sequence
  Description of Artificial Sequence: Synthetic oligonucleotide
  Sense strand starting at position 3815 of SEQ ID NO: 316808
uuugaaagucuuuacagua

SEQ ID NO: 441962 - RNA, 19 nt, Artificial Sequence
  Description of Artificial Sequence: Synthetic oligonucleotide
  Antisense Strand to SEQ ID NO: 441961
uacuguaaagacuuucaaa

SEQ ID NO: 441963 - RNA, 19 nt, Artificial Sequence
  Description of Artificial Sequence: Synthetic oligonucleotide
  Sense strand starting at position 3973 of SEQ ID NO: 316808
ucacuagaagagugaguau

SEQ ID NO: 441964 - RNA, 19 nt, Artificial Sequence
  Description of Artificial Sequence: Synthetic oligonucleotide
  Antisense Strand to SEQ ID NO: 441963
auacucacucuucuaguga

SEQ ID NO: 441965 - RNA, 19 nt, Artificial Sequence
  Description of Artificial Sequence: Synthetic oligonucleotide
  Sense strand starting at position 3976 of SEQ ID NO: 316808
cuagaagagugaguauagu

SEQ ID NO: 441966 - RNA, 19 nt, Artificial Sequence
  Description of Artificial Sequence: Synthetic oligonucleotide
  Antisense Strand to SEQ ID NO: 441965
acuauacucacucuucuag

SEQ ID NO: 441967 - RNA, 19 nt, Artificial Sequence
  Description of Artificial Sequence: Synthetic oligonucleotide
  Sense strand starting at position 221 of SEQ ID NO: 316809
cuuggagugggcugagauu

SEQ ID NO: 441968 - RNA, 19 nt, Artificial Sequence
  Description of Artificial Sequence: Synthetic oligonucleotide
  Antisense Strand to SEQ ID NO: 441967
aaucucagcccacuccaag

SEQ ID NO: 441969 - RNA, 19 nt, Artificial Sequence
  Description of Artificial Sequence: Synthetic oligonucleotide
  Sense strand starting at position 602 of SEQ ID NO: 316809
cauggaauaccauggugua

SEQ ID NO: 441970 - RNA, 19 nt, Artificial Sequence
  Description of Artificial Sequence: Synthetic oligonucleotide
  Antisense Strand to SEQ ID NO: 441969
uacaccaugguauuccaug

SEQ ID NO: 441971 - RNA, 19 nt, Artificial Sequence
  Description of Artificial Sequence: Synthetic oligonucleotide
  Sense strand starting at position 603 of SEQ ID NO: 316809
auggaauaccaugguguau

SEQ ID NO: 441972 - RNA, 19 nt, Artificial Sequence
  Description of Artificial Sequence: Synthetic oligonucleotide
  Antisense Strand to SEQ ID NO: 441971
auacaccaugguauuccau

SEQ ID NO: 441973 - RNA, 19 nt, Artificial Sequence
  Description of Artificial Sequence: Synthetic oligonucleotide
  Sense strand starting at position 825 of SEQ ID NO: 316809
aguggugagguauagcauu

SEQ ID NO: 441974 - RNA, 19 nt, Artificial Sequence
  Description of Artificial Sequence: Synthetic oligonucleotide
  Antisense Strand to SEQ ID NO: 441973
aaugcuauaccucaccacu

SEQ ID NO: 441975 - RNA, 19 nt, Artificial Sequence
  Description of Artificial Sequence: Synthetic oligonucleotide
  Sense strand starting at position 991 of SEQ ID NO: 316809
aguaauguucuggguuaaa

SEQ ID NO: 441976 - RNA, 19 nt, Artificial Sequence
  Description of Artificial Sequence: Synthetic oligonucleotide
  Antisense Strand to SEQ ID NO: 441975
uuuaacccagaacauuacu

SEQ ID NO: 441977 - RNA, 19 nt, Artificial Sequence
  Description of Artificial Sequence: Synthetic oligonucleotide
  Sense strand starting at position 994 of SEQ ID NO: 316809
aauguucuggguuaaauug

SEQ ID NO: 441978 - RNA, 19 nt, Artificial Sequence
  Description of Artificial Sequence: Synthetic oligonucleotide
  Antisense Strand to SEQ ID NO: 441977
caauuuaacccagaacauu

SEQ ID NO: 441979 - RNA, 19 nt, Artificial Sequence
  Description of Artificial Sequence: Synthetic oligonucleotide
  Sense strand starting at position 1345 of SEQ ID NO: 316809
guauguguuacugugcuau

SEQ ID NO: 441980 - RNA, 19 nt, Artificial Sequence
  Description of Artificial Sequence: Synthetic oligonucleotide
  Antisense Strand to SEQ ID NO: 441979
auagcacaguaacacauac

SEQ ID NO: 441981 - RNA, 19 nt, Artificial Sequence
  Description of Artificial Sequence: Synthetic oligonucleotide
  Sense strand starting at position 1642 of SEQ ID NO: 316809
ucgaaugagcuuuaaaguu

SEQ ID NO: 441982 - RNA, 19 nt, Artificial Sequence
  Description of Artificial Sequence: Synthetic oligonucleotide
  Antisense Strand to SEQ ID NO: 441981
aacuuuaaagcucauucga

SEQ ID NO: 441983 - RNA, 19 nt, Artificial Sequence
  Description of Artificial Sequence: Synthetic oligonucleotide
  Sense strand starting at position 1735 of SEQ ID NO: 316809
ggaaguggaucuucaaggu

SEQ ID NO: 441984 - RNA, 19 nt, Artificial Sequence
  Description of Artificial Sequence: Synthetic oligonucleotide
  Antisense Strand to SEQ ID NO: 441983
accuugaagauccacuucc

SEQ ID NO: 441985 - RNA, 19 nt, Artificial Sequence
  Description of Artificial Sequence: Synthetic oligonucleotide
  Sense strand starting at position 1761 of SEQ ID NO: 316809
ggcacagugcuccaacaau

SEQ ID NO: 441986 - RNA, 19 nt, Artificial Sequence
  Description of Artificial Sequence: Synthetic oligonucleotide
  Antisense Strand to SEQ ID NO: 441985
auuguuggagcacugugcc

SEQ ID NO: 441987 - RNA, 19 nt, Artificial Sequence
  Description of Artificial Sequence: Synthetic oligonucleotide
  Sense strand starting at position 1838 of SEQ ID NO: 316809
uccuuaguauaacuuggaa

SEQ ID NO: 441988 - RNA, 19 nt, Artificial Sequence
  Description of Artificial Sequence: Synthetic oligonucleotide
  Antisense Strand to SEQ ID NO: 441987
uuccaaguuauacuaagga

SEQ ID NO: 441989 - RNA, 19 nt, Artificial Sequence
  Description of Artificial Sequence: Synthetic oligonucleotide
  Sense strand starting at position 1853 of SEQ ID NO: 316809
ggaaacaaauuccagauga

SEQ ID NO: 441990 - RNA, 19 nt, Artificial Sequence
  Description of Artificial Sequence: Synthetic oligonucleotide
  Antisense Strand to SEQ ID NO: 441989
ucaucuggaauuuguuucc

SEQ ID NO: 441991 - RNA, 19 nt, Artificial Sequence
  Description of Artificial Sequence: Synthetic oligonucleotide
  Sense strand starting at position 1899 of SEQ ID NO: 316809
agacauuaacucuggaagu

SEQ ID NO: 441992 - RNA, 19 nt, Artificial Sequence
  Description of Artificial Sequence: Synthetic oligonucleotide
  Antisense Strand to SEQ ID NO: 441991
acuuccagaguuaaugucu

SEQ ID NO: 441993 - RNA, 19 nt, Artificial Sequence
  Description of Artificial Sequence: Synthetic oligonucleotide
  Sense strand starting at position 1930 of SEQ ID NO: 316809
ggagaauugguaggguuga

SEQ ID NO: 441994 - RNA, 19 nt, Artificial Sequence
  Description of Artificial Sequence: Synthetic oligonucleotide
  Antisense Strand to SEQ ID NO: 441993
ucaacccuaccaauucucc

SEQ ID NO: 441995 - RNA, 19 nt, Artificial Sequence
  Description of Artificial Sequence: Synthetic oligonucleotide
  Sense strand starting at position 1935 of SEQ ID NO: 316809
auugguaggguugacauau

SEQ ID NO: 441996 - RNA, 19 nt, Artificial Sequence
  Description of Artificial Sequence: Synthetic oligonucleotide
  Antisense Strand to SEQ ID NO: 441995
auaugucaacccuaccaau

SEQ ID NO: 441997 - RNA, 19 nt, Artificial Sequence
  Description of Artificial Sequence: Synthetic oligonucleotide
  Sense strand starting at position 2003 of SEQ ID NO: 316809
uuucgcucccuugaauaaa

SEQ ID NO: 441998 - RNA, 19 nt, Artificial Sequence
  Description of Artificial Sequence: Synthetic oligonucleotide
  Antisense Strand to SEQ ID NO: 441997
uuuauucaagggagcgaaa

SEQ ID NO: 441999 - RNA, 19 nt, Artificial Sequence
  Description of Artificial Sequence: Synthetic oligonucleotide
  Sense strand starting at position 2020 of SEQ ID NO: 316809
aauguaaugguccaagagu

SEQ ID NO: 442000 - RNA, 19 nt, Artificial Sequence
  Description of Artificial Sequence: Synthetic oligonucleotide
  Antisense Strand to SEQ ID NO: 441999
acucuuggaccauuacauu

SEQ ID NO: 442001 - RNA, 19 nt, Artificial Sequence
  Description of Artificial Sequence: Synthetic oligonucleotide
  Sense strand starting at position 2029 of SEQ ID NO: 316809
guccaagaguagucagaga

SEQ ID NO: 442002 - RNA, 19 nt, Artificial Sequence
  Description of Artificial Sequence: Synthetic oligonucleotide
  Antisense Strand to SEQ ID NO: 442001
ucucugacuacucuuggac

SEQ ID NO: 442003 - RNA, 19 nt, Artificial Sequence
  Description of Artificial Sequence: Synthetic oligonucleotide
  Sense strand starting at position 2036 of SEQ ID NO: 316809
aguagucagagaugauuag

SEQ ID NO: 442004 - RNA, 19 nt, Artificial Sequence
  Description of Artificial Sequence: Synthetic oligonucleotide
  Antisense Strand to SEQ ID NO: 442003
cuaaucaucucugacuacu

SEQ ID NO: 442005 - RNA, 19 nt, Artificial Sequence
  Description of Artificial Sequence: Synthetic oligonucleotide
  Sense strand starting at position 2051 of SEQ ID NO: 316809
uuagauuaaaucuguggga

SEQ ID NO: 442006 - RNA, 19 nt, Artificial Sequence
  Description of Artificial Sequence: Synthetic oligonucleotide
  Antisense Strand to SEQ ID NO: 442005
ucccacagauuuaaucuaa

SEQ ID NO: 442007 - RNA, 19 nt, Artificial Sequence
  Description of Artificial Sequence: Synthetic oligonucleotide
  Sense strand starting at position 2128 of SEQ ID NO: 316809
cccugaaaugcucagggua

SEQ ID NO: 442008 - RNA, 19 nt, Artificial Sequence
  Description of Artificial Sequence: Synthetic oligonucleotide
  Antisense Strand to SEQ ID NO: 442007
uacccugagcauuucaggg

SEQ ID NO: 442009 - RNA, 19 nt, Artificial Sequence
  Description of Artificial Sequence: Synthetic oligonucleotide
  Sense strand starting at position 2131 of SEQ ID NO: 316809
ugaaaugcucaggguaaug

SEQ ID NO: 442010 - RNA, 19 nt, Artificial Sequence
  Description of Artificial Sequence: Synthetic oligonucleotide
  Antisense Strand to SEQ ID NO: 442009
cauuacccugagcauuuca

SEQ ID NO: 442011 - RNA, 19 nt, Artificial Sequence
  Description of Artificial Sequence: Synthetic oligonucleotide
  Sense strand starting at position 2133 of SEQ ID NO: 316809
aaaugcucaggguaaugua

SEQ ID NO: 442012 - RNA, 19 nt, Artificial Sequence
  Description of Artificial Sequence: Synthetic oligonucleotide
  Antisense Strand to SEQ ID NO: 442011
uacauuacccugagcauuu

SEQ ID NO: 442013 - RNA, 19 nt, Artificial Sequence
  Description of Artificial Sequence: Synthetic oligonucleotide
  Sense strand starting at position 2157 of SEQ ID NO: 316809
gcaugugugccugcagaau

SEQ ID NO: 442014 - RNA, 19 nt, Artificial Sequence
  Description of Artificial Sequence: Synthetic oligonucleotide
  Antisense Strand to SEQ ID NO: 442013
auucugcaggcacacaugc

SEQ ID NO: 442015 - RNA, 19 nt, Artificial Sequence
  Description of Artificial Sequence: Synthetic oligonucleotide
  Sense strand starting at position 2413 of SEQ ID NO: 316809
guuggagaaagcuguacua

SEQ ID NO: 442016 - RNA, 19 nt, Artificial Sequence
  Description of Artificial Sequence: Synthetic oligonucleotide
  Antisense Strand to SEQ ID NO: 442015
uaguacagcuuucuccaac

SEQ ID NO: 442017 - RNA, 19 nt, Artificial Sequence
  Description of Artificial Sequence: Synthetic oligonucleotide
  Sense strand starting at position 2543 of SEQ ID NO: 316809
uuuacaguccuuuggaauu

SEQ ID NO: 442018 - RNA, 19 nt, Artificial Sequence
  Description of Artificial Sequence: Synthetic oligonucleotide
  Antisense Strand to SEQ ID NO: 442017
aauuccaaaggacuguaaa

SEQ ID NO: 442019 - RNA, 19 nt, Artificial Sequence
  Description of Artificial Sequence: Synthetic oligonucleotide
  Sense strand starting at position 2653 of SEQ ID NO: 316809
auuguaugccuauacacua

SEQ ID NO: 442020 - RNA, 19 nt, Artificial Sequence
  Description of Artificial Sequence: Synthetic oligonucleotide
  Antisense Strand to SEQ ID NO: 442019
uaguguauaggcauacaau

SEQ ID NO: 442021 - RNA, 19 nt, Artificial Sequence
  Description of Artificial Sequence: Synthetic oligonucleotide
  Sense strand starting at position 2866 of SEQ ID NO: 316809
cuuccugaccuuuggaaga

SEQ ID NO: 442022 - RNA, 19 nt, Artificial Sequence
  Description of Artificial Sequence: Synthetic oligonucleotide
  Antisense Strand to SEQ ID NO: 442021
ucuuccaaaggucaggaag

SEQ ID NO: 442023 - RNA, 19 nt, Artificial Sequence
  Description of Artificial Sequence: Synthetic oligonucleotide
  Sense strand starting at position 3200 of SEQ ID NO: 316809
agggcaaguguuugacuga

SEQ ID NO: 442024 - RNA, 19 nt, Artificial Sequence
  Description of Artificial Sequence: Synthetic oligonucleotide
  Antisense Strand to SEQ ID NO: 442023
ucagucaaacacuugcccu

SEQ ID NO: 442025 - RNA, 19 nt, Artificial Sequence
  Description of Artificial Sequence: Synthetic oligonucleotide
  Sense strand starting at position 3269 of SEQ ID NO: 316809
acugcucugacaugaguga

SEQ ID NO: 442026 - RNA, 19 nt, Artificial Sequence
  Description of Artificial Sequence: Synthetic oligonucleotide
  Antisense Strand to SEQ ID NO: 442025
ucacucaugucagagcagu

SEQ ID NO: 442027 - RNA, 19 nt, Artificial Sequence
  Description of Artificial Sequence: Synthetic oligonucleotide
  Sense strand starting at position 3270 of SEQ ID NO: 316809
cugcucugacaugagugau

SEQ ID NO: 442028 - RNA, 19 nt, Artificial Sequence
  Description of Artificial Sequence: Synthetic oligonucleotide
  Antisense Strand to SEQ ID NO: 442027
aucacucaugucagagcag

SEQ ID NO: 442029 - RNA, 19 nt, Artificial Sequence
  Description of Artificial Sequence: Synthetic oligonucleotide
  Sense strand starting at position 3346 of SEQ ID NO: 316809
ggccaucucucaguuggaa

SEQ ID NO: 442030 - RNA, 19 nt, Artificial Sequence
  Description of Artificial Sequence: Synthetic oligonucleotide
  Antisense Strand to SEQ ID NO: 442029
uuccaacugagagauggcc

SEQ ID NO: 442031 - RNA, 19 nt, Artificial Sequence
  Description of Artificial Sequence: Synthetic oligonucleotide
  Sense strand starting at position 3573 of SEQ ID NO: 316809
gcccuuaaauccuucugga

SEQ ID NO: 442032 - RNA, 19 nt, Artificial Sequence
  Description of Artificial Sequence: Synthetic oligonucleotide
  Antisense Strand to SEQ ID NO: 442031
uccagaaggauuuaagggc

SEQ ID NO: 442033 - RNA, 19 nt, Artificial Sequence
  Description of Artificial Sequence: Synthetic oligonucleotide
  Sense strand starting at position 3660 of SEQ ID NO: 316809
gauugcuaggcuugaggaa

SEQ ID NO: 442034 - RNA, 19 nt, Artificial Sequence
  Description of Artificial Sequence: Synthetic oligonucleotide
  Antisense Strand to SEQ ID NO: 442033
uuccucaagccuagcaauc

SEQ ID NO: 442035 - RNA, 19 nt, Artificial Sequence
  Description of Artificial Sequence: Synthetic oligonucleotide
  Sense strand starting at position 3661 of SEQ ID NO: 316809
auugcuaggcuugaggaau

SEQ ID NO: 442036 - RNA, 19 nt, Artificial Sequence
  Description of Artificial Sequence: Synthetic oligonucleotide
  Antisense Strand to SEQ ID NO: 442035
auuccucaagccuagcaau

SEQ ID NO: 442037 - RNA, 19 nt, Artificial Sequence
  Description of Artificial Sequence: Synthetic oligonucleotide
  Sense strand starting at position 3832 of SEQ ID NO: 316809
uuguuucuucucuacaagu

SEQ ID NO: 442038 - RNA, 19 nt, Artificial Sequence
  Description of Artificial Sequence: Synthetic oligonucleotide
  Antisense Strand to SEQ ID NO: 442037
acuuguagagaagaaacaa

SEQ ID NO: 442039 - RNA, 19 nt, Artificial Sequence
  Description of Artificial Sequence: Synthetic oligonucleotide
  Sense strand starting at position 3834 of SEQ ID NO: 316809
guuucuucucuacaaguuu

SEQ ID NO: 442040 - RNA, 19 nt, Artificial Sequence
  Description of Artificial Sequence: Synthetic oligonucleotide
  Antisense Strand to SEQ ID NO: 442039
aaacuuguagagaagaaac

SEQ ID NO: 442041 - RNA, 19 nt, Artificial Sequence
  Description of Artificial Sequence: Synthetic oligonucleotide
  Sense strand starting at position 3951 of SEQ ID NO: 316809
auaugucaugaaugugaca

SEQ ID NO: 442042 - RNA, 19 nt, Artificial Sequence
  Description of Artificial Sequence: Synthetic oligonucleotide
  Antisense Strand to SEQ ID NO: 442041
ugucacauucaugacauau

SEQ ID NO: 442043 - RNA, 19 nt, Artificial Sequence
  Description of Artificial Sequence: Synthetic oligonucleotide
  Sense strand starting at position 3953 of SEQ ID NO: 316809
augucaugaaugugacaag

SEQ ID NO: 442044 - RNA, 19 nt, Artificial Sequence
  Description of Artificial Sequence: Synthetic oligonucleotide
  Antisense Strand to SEQ ID NO: 442043
cuugucacauucaugacau

SEQ ID NO: 442045 - RNA, 19 nt, Artificial Sequence
  Description of Artificial Sequence: Synthetic oligonucleotide
  Sense strand starting at position 3969 of SEQ ID NO: 316809
aagugaaugcuaggauaga

SEQ ID NO: 442046 - RNA, 19 nt, Artificial Sequence
  Description of Artificial Sequence: Synthetic oligonucleotide
  Antisense Strand to SEQ ID NO: 442045
ucuauccuagcauucacuu

SEQ ID NO: 442047 - RNA, 19 nt, Artificial Sequence
  Description of Artificial Sequence: Synthetic oligonucleotide
  Sense strand starting at position 101 of SEQ ID NO: 316810
gugauaugucaucacgaag

SEQ ID NO: 442048 - RNA, 19 nt, Artificial Sequence
  Description of Artificial Sequence: Synthetic oligonucleotide
  Antisense Strand to SEQ ID NO: 442047
cuucgugaugacauaucac

SEQ ID NO: 442049 - RNA, 19 nt, Artificial Sequence
  Description of Artificial Sequence: Synthetic oligonucleotide
  Sense strand starting at position 343 of SEQ ID NO: 316810
cuaagugaugcucaaacac

SEQ ID NO: 442050 - RNA, 19 nt, Artificial Sequence
  Description of Artificial Sequence: Synthetic oligonucleotide
  Antisense Strand to SEQ ID NO: 442049
guguuugagcaucacuuag

SEQ ID NO: 442051 - RNA, 19 nt, Artificial Sequence
  Description of Artificial Sequence: Synthetic oligonucleotide
  Sense strand starting at position 514 of SEQ ID NO: 316810
cugaguaggugcucaggaa

SEQ ID NO: 442052 - RNA, 19 nt, Artificial Sequence
  Description of Artificial Sequence: Synthetic oligonucleotide
  Antisense Strand to SEQ ID NO: 442051
uuccugagcaccuacucag

SEQ ID NO: 442053 - RNA, 19 nt, Artificial Sequence
  Description of Artificial Sequence: Synthetic oligonucleotide
  Sense strand starting at position 515 of SEQ ID NO: 316810
ugaguaggugcucaggaaa

SEQ ID NO: 442054 - RNA, 19 nt, Artificial Sequence
  Description of Artificial Sequence: Synthetic oligonucleotide
  Antisense Strand to SEQ ID NO: 442053
uuuccugagcaccuacuca

SEQ ID NO: 442055 - RNA, 19 nt, Artificial Sequence
  Description of Artificial Sequence: Synthetic oligonucleotide
  Sense strand starting at position 851 of SEQ ID NO: 316810
auaauauugucucugagug

SEQ ID NO: 442056 - RNA, 19 nt, Artificial Sequence
  Description of Artificial Sequence: Synthetic oligonucleotide
  Antisense Strand to SEQ ID NO: 442055
cacucagagacaauauuau

SEQ ID NO: 442057 - RNA, 19 nt, Artificial Sequence
  Description of Artificial Sequence: Synthetic oligonucleotide
  Sense strand starting at position 852 of SEQ ID NO: 316810
uaauauugucucugaguga

SEQ ID NO: 442058 - RNA, 19 nt, Artificial Sequence
  Description of Artificial Sequence: Synthetic oligonucleotide
  Antisense Strand to SEQ ID NO: 442057
ucacucagagacaauauua

SEQ ID NO: 442059 - RNA, 19 nt, Artificial Sequence
  Description of Artificial Sequence: Synthetic oligonucleotide
  Sense strand starting at position 861 of SEQ ID NO: 316810
cucugagugacauggcuaa

SEQ ID NO: 442060 - RNA, 19 nt, Artificial Sequence
  Description of Artificial Sequence: Synthetic oligonucleotide
  Antisense Strand to SEQ ID NO: 442059
uuagccaugucacucagag

SEQ ID NO: 442061 - RNA, 19 nt, Artificial Sequence
  Description of Artificial Sequence: Synthetic oligonucleotide
  Sense strand starting at position 907 of SEQ ID NO: 316810
agugcaauauuauugugaa

SEQ ID NO: 442062 - RNA, 19 nt, Artificial Sequence
  Description of Artificial Sequence: Synthetic oligonucleotide
  Antisense Strand to SEQ ID NO: 442061
uucacaauaauauugcacu

SEQ ID NO: 442063 - RNA, 19 nt, Artificial Sequence
  Description of Artificial Sequence: Synthetic oligonucleotide
  Sense strand starting at position 981 of SEQ ID NO: 316810
gucugaaagucaguaggaa

SEQ ID NO: 442064 - RNA, 19 nt, Artificial Sequence
  Description of Artificial Sequence: Synthetic oligonucleotide
  Antisense Strand to SEQ ID NO: 442063
uuccuacugacuuucagac

SEQ ID NO: 442065 - RNA, 19 nt, Artificial Sequence
  Description of Artificial Sequence: Synthetic oligonucleotide
  Sense strand starting at position 1141 of SEQ ID NO: 316810
cugggaauauccucuggca

SEQ ID NO: 442066 - RNA, 19 nt, Artificial Sequence
  Description of Artificial Sequence: Synthetic oligonucleotide
  Antisense Strand to SEQ ID NO: 442065
ugccagaggauauucccag

SEQ ID NO: 442067 - RNA, 19 nt, Artificial Sequence
  Description of Artificial Sequence: Synthetic oligonucleotide
  Sense strand starting at position 1648 of SEQ ID NO: 316810
gaagaagagacucgcugau

SEQ ID NO: 442068 - RNA, 19 nt, Artificial Sequence
  Description of Artificial Sequence: Synthetic oligonucleotide
  Antisense Strand to SEQ ID NO: 442067
aucagcgagucucuucuuc

SEQ ID NO: 442069 - RNA, 19 nt, Artificial Sequence
  Description of Artificial Sequence: Synthetic oligonucleotide
  Sense strand starting at position 1650 of SEQ ID NO: 316810
agaagagacucgcugauug

SEQ ID NO: 442070 - RNA, 19 nt, Artificial Sequence
  Description of Artificial Sequence: Synthetic oligonucleotide
  Antisense Strand to SEQ ID NO: 442069
caaucagcgagucucuucu

SEQ ID NO: 442071 - RNA, 19 nt, Artificial Sequence
  Description of Artificial Sequence: Synthetic oligonucleotide
  Sense strand starting at position 2198 of SEQ ID NO: 316810
cgaggaggcgcuucgugaa

SEQ ID NO: 442072 - RNA, 19 nt, Artificial Sequence
  Description of Artificial Sequence: Synthetic oligonucleotide
  Antisense Strand to SEQ ID NO: 442071
uucacgaagcgccuccucg

SEQ ID NO: 442073 - RNA, 19 nt, Artificial Sequence
  Description of Artificial Sequence: Synthetic oligonucleotide
  Sense strand starting at position 2285 of SEQ ID NO: 316810
gggaguuacuucucuggaa

SEQ ID NO: 442074 - RNA, 19 nt, Artificial Sequence
  Description of Artificial Sequence: Synthetic oligonucleotide
  Antisense Strand to SEQ ID NO: 442073
uuccagagaaguaacuccc

SEQ ID NO: 442075 - RNA, 19 nt, Artificial Sequence
  Description of Artificial Sequence: Synthetic oligonucleotide
  Sense strand starting at position 2286 of SEQ ID NO: 316810
ggaguuacuucucuggaag

SEQ ID NO: 442076 - RNA, 19 nt, Artificial Sequence
  Description of Artificial Sequence: Synthetic oligonucleotide
  Antisense Strand to SEQ ID NO: 442075
cuuccagagaaguaacucc

SEQ ID NO: 442077 - RNA, 19 nt, Artificial Sequence
  Description of Artificial Sequence: Synthetic oligonucleotide
  Sense strand starting at position 2287 of SEQ ID NO: 316810
gaguuacuucucuggaaga

SEQ ID NO: 442078 - RNA, 19 nt, Artificial Sequence
  Description of Artificial Sequence: Synthetic oligonucleotide
  Antisense Strand to SEQ ID NO: 442077
ucuuccagagaaguaacuc

SEQ ID NO: 442079 - RNA, 19 nt, Artificial Sequence
  Description of Artificial Sequence: Synthetic oligonucleotide
  Sense strand starting at position 2312 of SEQ ID NO: 316810
aguuguugggauugaaagu

SEQ ID NO: 442080 - RNA, 19 nt, Artificial Sequence
  Description of Artificial Sequence: Synthetic oligonucleotide
  Antisense Strand to SEQ ID NO: 442079
acuuucaaucccaacaacu

SEQ ID NO: 442081 - RNA, 19 nt, Artificial Sequence
  Description of Artificial Sequence: Synthetic oligonucleotide
  Sense strand starting at position 2313 of SEQ ID NO: 316810
guuguugggauugaaaguu

SEQ ID NO: 442082 - RNA, 19 nt, Artificial Sequence
  Description of Artificial Sequence: Synthetic oligonucleotide
  Antisense Strand to SEQ ID NO: 442081
aacuuucaaucccaacaac

SEQ ID NO: 442083 - RNA, 19 nt, Artificial Sequence
  Description of Artificial Sequence: Synthetic oligonucleotide
  Sense strand starting at position 2656 of SEQ ID NO: 316810
cuuugaaaucuuggaacau

SEQ ID NO: 442084 - RNA, 19 nt, Artificial Sequence
  Description of Artificial Sequence: Synthetic oligonucleotide
  Antisense Strand to SEQ ID NO: 442083
auguuccaagauuucaaag

SEQ ID NO: 442085 - RNA, 19 nt, Artificial Sequence
  Description of Artificial Sequence: Synthetic oligonucleotide
  Sense strand starting at position 2882 of SEQ ID NO: 316810
agcagacaugucugauaua

SEQ ID NO: 442086 - RNA, 19 nt, Artificial Sequence
  Description of Artificial Sequence: Synthetic oligonucleotide
  Antisense Strand to SEQ ID NO: 442085
uauaucagacaugucugcu

SEQ ID NO: 442087 - RNA, 19 nt, Artificial Sequence
  Description of Artificial Sequence: Synthetic oligonucleotide
  Sense strand starting at position 2960 of SEQ ID NO: 316810
gggauugguucccucuaga

SEQ ID NO: 442088 - RNA, 19 nt, Artificial Sequence
  Description of Artificial Sequence: Synthetic oligonucleotide
  Antisense Strand to SEQ ID NO: 442087
ucuagagggaaccaauccc

SEQ ID NO: 442089 - RNA, 19 nt, Artificial Sequence
  Description of Artificial Sequence: Synthetic oligonucleotide
  Sense strand starting at position 2981 of SEQ ID NO: 316810
aacagcuaucgaggaaauu

SEQ ID NO: 442090 - RNA, 19 nt, Artificial Sequence
  Description of Artificial Sequence: Synthetic oligonucleotide
  Antisense Strand to SEQ ID NO: 442089
aauuuccucgauagcuguu

SEQ ID NO: 442091 - RNA, 19 nt, Artificial Sequence
  Description of Artificial Sequence: Synthetic oligonucleotide
  Sense strand starting at position 2999 of SEQ ID NO: 316810
uuuaguucuagaggaaugu

SEQ ID NO: 442092 - RNA, 19 nt, Artificial Sequence
  Description of Artificial Sequence: Synthetic oligonucleotide
  Antisense Strand to SEQ ID NO: 442091
acauuccucuagaacuaaa

SEQ ID NO: 442093 - RNA, 19 nt, Artificial Sequence
  Description of Artificial Sequence: Synthetic oligonucleotide
  Sense strand starting at position 3003 of SEQ ID NO: 316810
guucuagaggaaugucaau

SEQ ID NO: 442094 - RNA, 19 nt, Artificial Sequence
  Description of Artificial Sequence: Synthetic oligonucleotide
  Antisense Strand to SEQ ID NO: 442093
auugacauuccucuagaac

SEQ ID NO: 442095 - RNA, 19 nt, Artificial Sequence
  Description of Artificial Sequence: Synthetic oligonucleotide
  Sense strand starting at position 3050 of SEQ ID NO: 316810
gccuucucacuggauuacu

SEQ ID NO: 442096 - RNA, 19 nt, Artificial Sequence
  Description of Artificial Sequence: Synthetic oligonucleotide
  Antisense Strand to SEQ ID NO: 442095
aguaauccagugagaaggc

SEQ ID NO: 442097 - RNA, 19 nt, Artificial Sequence
  Description of Artificial Sequence: Synthetic oligonucleotide
  Sense strand starting at position 3139 of SEQ ID NO: 316810
uuaauucuuccugguggau

SEQ ID NO: 442098 - RNA, 19 nt, Artificial Sequence
  Description of Artificial Sequence: Synthetic oligonucleotide
  Antisense Strand to SEQ ID NO: 442097
auccaccaggaagaauuaa

SEQ ID NO: 442099 - RNA, 19 nt, Artificial Sequence
  Description of Artificial Sequence: Synthetic oligonucleotide
  Sense strand starting at position 3174 of SEQ ID NO: 316810
uggagauauucugccacug

SEQ ID NO: 442100 - RNA, 19 nt, Artificial Sequence
  Description of Artificial Sequence: Synthetic oligonucleotide
  Antisense Strand to SEQ ID NO: 442099
caguggcagaauaucucca

SEQ ID NO: 442101 - RNA, 19 nt, Artificial Sequence
  Description of Artificial Sequence: Synthetic oligonucleotide
  Sense strand starting at position 3246 of SEQ ID NO: 316810
aauagaguguucccuggau

SEQ ID NO: 442102 - RNA, 19 nt, Artificial Sequence
  Description of Artificial Sequence: Synthetic oligonucleotide
  Antisense Strand to SEQ ID NO: 442101
auccagggaacacucuauu

SEQ ID NO: 442103 - RNA, 19 nt, Artificial Sequence
  Description of Artificial Sequence: Synthetic oligonucleotide
  Sense strand starting at position 3270 of SEQ ID NO: 316810
agcuguagagaucacuuga

SEQ ID NO: 442104 - RNA, 19 nt, Artificial Sequence
  Description of Artificial Sequence: Synthetic oligonucleotide
  Antisense Strand to SEQ ID NO: 442103
ucaagugaucucuacagcu

SEQ ID NO: 442105 - RNA, 19 nt, Artificial Sequence
  Description of Artificial Sequence: Synthetic oligonucleotide
  Sense strand starting at position 3289 of SEQ ID NO: 316810
uaaggaugucagggcugaa

SEQ ID NO: 442106 - RNA, 19 nt, Artificial Sequence
  Description of Artificial Sequence: Synthetic oligonucleotide
  Antisense Strand to SEQ ID NO: 442105
uucagcccugacauccuua

SEQ ID NO: 442107 - RNA, 19 nt, Artificial Sequence
  Description of Artificial Sequence: Synthetic oligonucleotide
  Sense strand starting at position 3293 of SEQ ID NO: 316810
gaugucagggcugaaguuu

SEQ ID NO: 442108 - RNA, 19 nt, Artificial Sequence
  Description of Artificial Sequence: Synthetic oligonucleotide
  Antisense Strand to SEQ ID NO: 442107
aaacuucagcccugacauc

SEQ ID NO: 442109 - RNA, 19 nt, Artificial Sequence
  Description of Artificial Sequence: Synthetic oligonucleotide
  Sense strand starting at position 3354 of SEQ ID NO: 316810
gcuuuauuugcucauguuu

SEQ ID NO: 442110 - RNA, 19 nt, Artificial Sequence
  Description of Artificial Sequence: Synthetic oligonucleotide
  Antisense Strand to SEQ ID NO: 442109
aaacaugagcaaauaaagc

SEQ ID NO: 442111 - RNA, 19 nt, Artificial Sequence
  Description of Artificial Sequence: Synthetic oligonucleotide
  Sense strand starting at position 3413 of SEQ ID NO: 316810
gguuguuagaaguauugau

SEQ ID NO: 442112 - RNA, 19 nt, Artificial Sequence
  Description of Artificial Sequence: Synthetic oligonucleotide
  Antisense Strand to SEQ ID NO: 442111
aucaauacuucuaacaacc

SEQ ID NO: 442113 - RNA, 19 nt, Artificial Sequence
  Description of Artificial Sequence: Synthetic oligonucleotide
  Sense strand starting at position 3417 of SEQ ID NO: 316810
guuagaaguauugauuguu

SEQ ID NO: 442114 - RNA, 19 nt, Artificial Sequence
  Description of Artificial Sequence: Synthetic oligonucleotide
  Antisense Strand to SEQ ID NO: 442113
aacaaucaauacuucuaac

SEQ ID NO: 442115 - RNA, 19 nt, Artificial Sequence
  Description of Artificial Sequence: Synthetic oligonucleotide
  Sense strand starting at position 3432 of SEQ ID NO: 316810
uguuaauauguguaaacca

SEQ ID NO: 442116 - RNA, 19 nt, Artificial Sequence
  Description of Artificial Sequence: Synthetic oligonucleotide
  Antisense Strand to SEQ ID NO: 442115
ugguuuacacauauuaaca

SEQ ID NO: 442117 - RNA, 19 nt, Artificial Sequence
  Description of Artificial Sequence: Synthetic oligonucleotide
  Sense strand starting at position 3520 of SEQ ID NO: 316810
cugauauaggcuggauguu

SEQ ID NO: 442118 - RNA, 19 nt, Artificial Sequence
  Description of Artificial Sequence: Synthetic oligonucleotide
  Antisense Strand to SEQ ID NO: 442117
aacauccagccuauaucag

SEQ ID NO: 442119 - RNA, 19 nt, Artificial Sequence
  Description of Artificial Sequence: Synthetic oligonucleotide
  Sense strand starting at position 3521 of SEQ ID NO: 316810
ugauauaggcuggauguuu

SEQ ID NO: 442120 - RNA, 19 nt, Artificial Sequence
  Description of Artificial Sequence: Synthetic oligonucleotide
  Antisense Strand to SEQ ID NO: 442119
aaacauccagccuauauca

SEQ ID NO: 442121 - RNA, 19 nt, Artificial Sequence
  Description of Artificial Sequence: Synthetic oligonucleotide
  Sense strand starting at position 3613 of SEQ ID NO: 316810
aguaauuagguuuagguga

SEQ ID NO: 442122 - RNA, 19 nt, Artificial Sequence
  Description of Artificial Sequence: Synthetic oligonucleotide
  Antisense Strand to SEQ ID NO: 442121
ucaccuaaaccuaauuacu

SEQ ID NO: 442123 - RNA, 19 nt, Artificial Sequence
  Description of Artificial Sequence: Synthetic oligonucleotide
  Sense strand starting at position 3786 of SEQ ID NO: 316810
ugaaaucugccaggaucuu

SEQ ID NO: 442124 - RNA, 19 nt, Artificial Sequence
  Description of Artificial Sequence: Synthetic oligonucleotide
  Antisense Strand to SEQ ID NO: 442123
aagauccuggcagauuuca

SEQ ID NO: 442125 - RNA, 19 nt, Artificial Sequence
  Description of Artificial Sequence: Synthetic oligonucleotide
  Sense strand starting at position 3795 of SEQ ID NO: 316810
ccaggaucuuaaucuugga

SEQ ID NO: 442126 - RNA, 19 nt, Artificial Sequence
  Description of Artificial Sequence: Synthetic oligonucleotide
  Antisense Strand to SEQ ID NO: 442125
uccaagauuaagauccugg

SEQ ID NO: 442127 - RNA, 19 nt, Artificial Sequence
  Description of Artificial Sequence: Synthetic oligonucleotide
  Sense strand starting at position 143 of SEQ ID NO: 316811
gucauuuaucaagguggcu

SEQ ID NO: 442128 - RNA, 19 nt, Artificial Sequence
  Description of Artificial Sequence: Synthetic oligonucleotide
  Antisense Strand to SEQ ID NO: 442127
agccaccuugauaaaugac

SEQ ID NO: 442129 - RNA, 19 nt, Artificial Sequence
  Description of Artificial Sequence: Synthetic oligonucleotide
  Sense strand starting at position 165 of SEQ ID NO: 316811
acauuauggucucccacua

SEQ ID NO: 442130 - RNA, 19 nt, Artificial Sequence
  Description of Artificial Sequence: Synthetic oligonucleotide
  Antisense Strand to SEQ ID NO: 442129
uagugggagaccauaaugu

SEQ ID NO: 442131 - RNA, 19 nt, Artificial Sequence
  Description of Artificial Sequence: Synthetic oligonucleotide
  Sense strand starting at position 234 of SEQ ID NO: 316811
ucaggacugagcuauguuu

SEQ ID NO: 442132 - RNA, 19 nt, Artificial Sequence
  Description of Artificial Sequence: Synthetic oligonucleotide
  Antisense Strand to SEQ ID NO: 442131
aaacauagcucaguccuga

SEQ ID NO: 442133 - RNA, 19 nt, Artificial Sequence
  Description of Artificial Sequence: Synthetic oligonucleotide
  Sense strand starting at position 236 of SEQ ID NO: 316811
aggacugagcuauguuuga

SEQ ID NO: 442134 - RNA, 19 nt, Artificial Sequence
  Description of Artificial Sequence: Synthetic oligonucleotide
  Antisense Strand to SEQ ID NO: 442133
ucaaacauagcucaguccu

SEQ ID NO: 442135 - RNA, 19 nt, Artificial Sequence
  Description of Artificial Sequence: Synthetic oligonucleotide
  Sense strand starting at position 713 of SEQ ID NO: 316811
ucaacuagauucuugguuu

SEQ ID NO: 442136 - RNA, 19 nt, Artificial Sequence
  Description of Artificial Sequence: Synthetic oligonucleotide
  Antisense Strand to SEQ ID NO: 442135
aaaccaagaaucuaguuga

SEQ ID NO: 442137 - RNA, 19 nt, Artificial Sequence
  Description of Artificial Sequence: Synthetic oligonucleotide
  Sense strand starting at position 716 of SEQ ID NO: 316811
acuagauucuugguuugaa

SEQ ID NO: 442138 - RNA, 19 nt, Artificial Sequence
  Description of Artificial Sequence: Synthetic oligonucleotide
  Antisense Strand to SEQ ID NO: 442137
uucaaaccaagaaucuagu

SEQ ID NO: 442139 - RNA, 19 nt, Artificial Sequence
  Description of Artificial Sequence: Synthetic oligonucleotide
  Sense strand starting at position 717 of SEQ ID NO: 316811
cuagauucuugguuugaaa

SEQ ID NO: 442140 - RNA, 19 nt, Artificial Sequence
  Description of Artificial Sequence: Synthetic oligonucleotide
  Antisense Strand to SEQ ID NO: 442139
uuucaaaccaagaaucuag

SEQ ID NO: 442141 - RNA, 19 nt, Artificial Sequence
  Description of Artificial Sequence: Synthetic oligonucleotide
  Sense strand starting at position 744 of SEQ ID NO: 316811
acauauuggucacugauug

SEQ ID NO: 442142 - RNA, 19 nt, Artificial Sequence
  Description of Artificial Sequence: Synthetic oligonucleotide
  Antisense Strand to SEQ ID NO: 442141
caaucagugaccaauaugu

SEQ ID NO: 442143 - RNA, 19 nt, Artificial Sequence
  Description of Artificial Sequence: Synthetic oligonucleotide
  Sense strand starting at position 760 of SEQ ID NO: 316811
uugucacauuggguuagaa

SEQ ID NO: 442144 - RNA, 19 nt, Artificial Sequence
  Description of Artificial Sequence: Synthetic oligonucleotide
  Antisense Strand to SEQ ID NO: 442143
uucuaacccaaugugacaa

SEQ ID NO: 442145 - RNA, 19 nt, Artificial Sequence
  Description of Artificial Sequence: Synthetic oligonucleotide
  Sense strand starting at position 768 of SEQ ID NO: 316811
uuggguuagaaauguccau

SEQ ID NO: 442146 - RNA, 19 nt, Artificial Sequence
  Description of Artificial Sequence: Synthetic oligonucleotide
  Antisense Strand to SEQ ID NO: 442145
auggacauuucuaacccaa

SEQ ID NO: 442147 - RNA, 19 nt, Artificial Sequence
  Description of Artificial Sequence: Synthetic oligonucleotide
  Sense strand starting at position 880 of SEQ ID NO: 316811
cagggauccuagccuugaa

SEQ ID NO: 442148 - RNA, 19 nt, Artificial Sequence
  Description of Artificial Sequence: Synthetic oligonucleotide
  Antisense Strand to SEQ ID NO: 442147
uucaaggcuaggaucccug

SEQ ID NO: 442149 - RNA, 19 nt, Artificial Sequence
  Description of Artificial Sequence: Synthetic oligonucleotide
  Sense strand starting at position 892 of SEQ ID NO: 316811
ccuugaacucacugaaggu

SEQ ID NO: 442150 - RNA, 19 nt, Artificial Sequence
  Description of Artificial Sequence: Synthetic oligonucleotide
  Antisense Strand to SEQ ID NO: 442149
accuucagugaguucaagg

SEQ ID NO: 442151 - RNA, 19 nt, Artificial Sequence
  Description of Artificial Sequence: Synthetic oligonucleotide
  Sense strand starting at position 896 of SEQ ID NO: 316811
gaacucacugaagguguua

SEQ ID NO: 442152 - RNA, 19 nt, Artificial Sequence
  Description of Artificial Sequence: Synthetic oligonucleotide
  Antisense Strand to SEQ ID NO: 442151
uaacaccuucagugaguuc

SEQ ID NO: 442153 - RNA, 19 nt, Artificial Sequence
  Description of Artificial Sequence: Synthetic oligonucleotide
  Sense strand starting at position 1131 of SEQ ID NO: 316811
acugaaauauccucuggca

SEQ ID NO: 442154 - RNA, 19 nt, Artificial Sequence
  Description of Artificial Sequence: Synthetic oligonucleotide
  Antisense Strand to SEQ ID NO: 442153
ugccagaggauauuucagu

SEQ ID NO: 442155 - RNA, 19 nt, Artificial Sequence
  Description of Artificial Sequence: Synthetic oligonucleotide
  Sense strand starting at position 1146 of SEQ ID NO: 316811
ggcaccagagcagauuaau

SEQ ID NO: 442156 - RNA, 19 nt, Artificial Sequence
  Description of Artificial Sequence: Synthetic oligonucleotide
  Antisense Strand to SEQ ID NO: 442155
auuaaucugcucuggugcc

SEQ ID NO: 442157 - RNA, 19 nt, Artificial Sequence
  Description of Artificial Sequence: Synthetic oligonucleotide
  Sense strand starting at position 1173 of SEQ ID NO: 316811
uggcaacuuuaauugugaa

SEQ ID NO: 442158 - RNA, 19 nt, Artificial Sequence
  Description of Artificial Sequence: Synthetic oligonucleotide
  Antisense Strand to SEQ ID NO: 442157
uucacaauuaaaguugcca

SEQ ID NO: 442159 - RNA, 19 nt, Artificial Sequence
  Description of Artificial Sequence: Synthetic oligonucleotide
  Sense strand starting at position 1414 of SEQ ID NO: 316811
aagggaauuccgugagaca

SEQ ID NO: 442160 - RNA, 19 nt, Artificial Sequence
  Description of Artificial Sequence: Synthetic oligonucleotide
  Antisense Strand to SEQ ID NO: 442159
ugucucacggaauucccuu

SEQ ID NO: 442161 - RNA, 19 nt, Artificial Sequence
  Description of Artificial Sequence: Synthetic oligonucleotide
  Sense strand starting at position 1648 of SEQ ID NO: 316811
agaauagacucgcugauug

SEQ ID NO: 442162 - RNA, 19 nt, Artificial Sequence
  Description of Artificial Sequence: Synthetic oligonucleotide
  Antisense Strand to SEQ ID NO: 442161
caaucagcgagucuauucu

SEQ ID NO: 442163 - RNA, 19 nt, Artificial Sequence
  Description of Artificial Sequence: Synthetic oligonucleotide
  Sense strand starting at position 2297 of SEQ ID NO: 316811
gcacgacuucuuuagagga

SEQ ID NO: 442164 - RNA, 19 nt, Artificial Sequence
  Description of Artificial Sequence: Synthetic oligonucleotide
  Antisense Strand to SEQ ID NO: 442163
uccucuaaagaagucgugc

SEQ ID NO: 442165 - RNA, 19 nt, Artificial Sequence
  Description of Artificial Sequence: Synthetic oligonucleotide
  Sense strand starting at position 2444 of SEQ ID NO: 316811
ucgguuuagcguuauuuca

SEQ ID NO: 442166 - RNA, 19 nt, Artificial Sequence
  Description of Artificial Sequence: Synthetic oligonucleotide
  Antisense Strand to SEQ ID NO: 442165
ugaaauaacgcuaaaccga

SEQ ID NO: 442167 - RNA, 19 nt, Artificial Sequence
  Description of Artificial Sequence: Synthetic oligonucleotide
  Sense strand starting at position 2446 of SEQ ID NO: 316811
gguuuagcguuauuucaug

SEQ ID NO: 442168 - RNA, 19 nt, Artificial Sequence
  Description of Artificial Sequence: Synthetic oligonucleotide
  Antisense Strand to SEQ ID NO: 442167
caugaaauaacgcuaaacc

SEQ ID NO: 442169 - RNA, 19 nt, Artificial Sequence
  Description of Artificial Sequence: Synthetic oligonucleotide
  Sense strand starting at position 2513 of SEQ ID NO: 316811
uccagagaagaauguucua

SEQ ID NO: 442170 - RNA, 19 nt, Artificial Sequence
  Description of Artificial Sequence: Synthetic oligonucleotide
  Antisense Strand to SEQ ID NO: 442169
uagaacauucuucucugga

SEQ ID NO: 442171 - RNA, 19 nt, Artificial Sequence
  Description of Artificial Sequence: Synthetic oligonucleotide
  Sense strand starting at position 2516 of SEQ ID NO: 316811
agagaagaauguucuacuu

SEQ ID NO: 442172 - RNA, 19 nt, Artificial Sequence
  Description of Artificial Sequence: Synthetic oligonucleotide
  Antisense Strand to SEQ ID NO: 442171
aaguagaacauucuucucu

SEQ ID NO: 442173 - RNA, 19 nt, Artificial Sequence
  Description of Artificial Sequence: Synthetic oligonucleotide
  Sense strand starting at position 2706 of SEQ ID NO: 316811
cucugaaauguuggaacuu

SEQ ID NO: 442174 - RNA, 19 nt, Artificial Sequence
  Description of Artificial Sequence: Synthetic oligonucleotide
  Antisense Strand to SEQ ID NO: 442173
aaguuccaacauuucagag

SEQ ID NO: 442175 - RNA, 19 nt, Artificial Sequence
  Description of Artificial Sequence: Synthetic oligonucleotide
  Sense strand starting at position 2777 of SEQ ID NO: 316811
gaaauaugacacuggcugu

SEQ ID NO: 442176 - RNA, 19 nt, Artificial Sequence
  Description of Artificial Sequence: Synthetic oligonucleotide
  Antisense Strand to SEQ ID NO: 442175
acagccagugucauauuuc

SEQ ID NO: 442177 - RNA, 19 nt, Artificial Sequence
  Description of Artificial Sequence: Synthetic oligonucleotide
  Sense strand starting at position 2829 of SEQ ID NO: 316811
ggaucaugggcucaauguu

SEQ ID NO: 442178 - RNA, 19 nt, Artificial Sequence
  Description of Artificial Sequence: Synthetic oligonucleotide
  Antisense Strand to SEQ ID NO: 442177
aacauugagcccaugaucc

SEQ ID NO: 442179 - RNA, 19 nt, Artificial Sequence
  Description of Artificial Sequence: Synthetic oligonucleotide
  Sense strand starting at position 3156 of SEQ ID NO: 316811
ucuacaaguuggucucaga

SEQ ID NO: 442180 - RNA, 19 nt, Artificial Sequence
  Description of Artificial Sequence: Synthetic oligonucleotide
  Antisense Strand to SEQ ID NO: 442179
ucugagaccaacuuguaga

SEQ ID NO: 442181 - RNA, 19 nt, Artificial Sequence
  Description of Artificial Sequence: Synthetic oligonucleotide
  Sense strand starting at position 3299 of SEQ ID NO: 316811
gcaacugugcugccuguau

SEQ ID NO: 442182 - RNA, 19 nt, Artificial Sequence
  Description of Artificial Sequence: Synthetic oligonucleotide
  Antisense Strand to SEQ ID NO: 442181
auacaggcagcacaguugc

SEQ ID NO: 442183 - RNA, 19 nt, Artificial Sequence
  Description of Artificial Sequence: Synthetic oligonucleotide
  Sense strand starting at position 3310 of SEQ ID NO: 316811
gccuguauuuaguugcaga

SEQ ID NO: 442184 - RNA, 19 nt, Artificial Sequence
  Description of Artificial Sequence: Synthetic oligonucleotide
  Antisense Strand to SEQ ID NO: 442183
ucugcaacuaaauacaggc

SEQ ID NO: 442185 - RNA, 19 nt, Artificial Sequence
  Description of Artificial Sequence: Synthetic oligonucleotide
  Sense strand starting at position 3311 of SEQ ID NO: 316811
ccuguauuuaguugcagag

SEQ ID NO: 442186 - RNA, 19 nt, Artificial Sequence
  Description of Artificial Sequence: Synthetic oligonucleotide
  Antisense Strand to SEQ ID NO: 442185
cucugcaacuaaauacagg

SEQ ID NO: 442187 - RNA, 19 nt, Artificial Sequence
  Description of Artificial Sequence: Synthetic oligonucleotide
  Sense strand starting at position 3365 of SEQ ID NO: 316811
gcccaaggugguuaugaga

SEQ ID NO: 442188 - RNA, 19 nt, Artificial Sequence
  Description of Artificial Sequence: Synthetic oligonucleotide
  Antisense Strand to SEQ ID NO: 442187
ucucauaaccaccuugggc

SEQ ID NO: 442189 - RNA, 19 nt, Artificial Sequence
  Description of Artificial Sequence: Synthetic oligonucleotide
  Sense strand starting at position 3374 of SEQ ID NO: 316811
gguuaugagaaaugaguua

SEQ ID NO: 442190 - RNA, 19 nt, Artificial Sequence
  Description of Artificial Sequence: Synthetic oligonucleotide
  Antisense Strand to SEQ ID NO: 442189
uaacucauuucucauaacc

SEQ ID NO: 442191 - RNA, 19 nt, Artificial Sequence
  Description of Artificial Sequence: Synthetic oligonucleotide
  Sense strand starting at position 3388 of SEQ ID NO: 316811
aguuaacauuuguaagaga

SEQ ID NO: 442192 - RNA, 19 nt, Artificial Sequence
  Description of Artificial Sequence: Synthetic oligonucleotide
  Antisense Strand to SEQ ID NO: 442191
ucucuuacaaauguuaacu

SEQ ID NO: 442193 - RNA, 19 nt, Artificial Sequence
  Description of Artificial Sequence: Synthetic oligonucleotide
  Sense strand starting at position 3474 of SEQ ID NO: 316811
ggcuauuucuuucccgaca

SEQ ID NO: 442194 - RNA, 19 nt, Artificial Sequence
  Description of Artificial Sequence: Synthetic oligonucleotide
  Antisense Strand to SEQ ID NO: 442193
ugucgggaaagaaauagcc

SEQ ID NO: 442195 - RNA, 19 nt, Artificial Sequence
  Description of Artificial Sequence: Synthetic oligonucleotide
  Sense strand starting at position 3475 of SEQ ID NO: 316811
gcuauuucuuucccgacau

SEQ ID NO: 442196 - RNA, 19 nt, Artificial Sequence
  Description of Artificial Sequence: Synthetic oligonucleotide
  Antisense Strand to SEQ ID NO: 442195
augucgggaaagaaauagc

SEQ ID NO: 442197 - RNA, 19 nt, Artificial Sequence
  Description of Artificial Sequence: Synthetic oligonucleotide
  Sense strand starting at position 3487 of SEQ ID NO: 316811
ccgacauugccugaacaaa

SEQ ID NO: 442198 - RNA, 19 nt, Artificial Sequence
  Description of Artificial Sequence: Synthetic oligonucleotide
  Antisense Strand to SEQ ID NO: 442197
uuuguucaggcaaugucgg

SEQ ID NO: 442199 - RNA, 19 nt, Artificial Sequence
  Description of Artificial Sequence: Synthetic oligonucleotide
  Sense strand starting at position 3755 of SEQ ID NO: 316811
cugugaugucauuacaaua

SEQ ID NO: 442200 - RNA, 19 nt, Artificial Sequence
  Description of Artificial Sequence: Synthetic oligonucleotide
  Antisense Strand to SEQ ID NO: 442199
uauuguaaugacaucacag

SEQ ID NO: 442201 - RNA, 19 nt, Artificial Sequence
  Description of Artificial Sequence: Synthetic oligonucleotide
  Sense strand starting at position 3785 of SEQ ID NO: 316811
gggauagaaaggugugcua

SEQ ID NO: 442202 - RNA, 19 nt, Artificial Sequence
  Description of Artificial Sequence: Synthetic oligonucleotide
  Antisense Strand to SEQ ID NO: 442201
uagcacaccuuucuauccc

SEQ ID NO: 442203 - RNA, 19 nt, Artificial Sequence
  Description of Artificial Sequence: Synthetic oligonucleotide
  Sense strand starting at position 3787 of SEQ ID NO: 316811
gauagaaaggugugcuaga

SEQ ID NO: 442204 - RNA, 19 nt, Artificial Sequence
  Description of Artificial Sequence: Synthetic oligonucleotide
  Antisense Strand to SEQ ID NO: 442203
ucuagcacaccuuucuauc

SEQ ID NO: 442205 - RNA, 19 nt, Artificial Sequence
  Description of Artificial Sequence: Synthetic oligonucleotide
  Sense strand starting at position 3788 of SEQ ID NO: 316811
auagaaaggugugcuagaa

SEQ ID NO: 442206 - RNA, 19 nt, Artificial Sequence
  Description of Artificial Sequence: Synthetic oligonucleotide
  Antisense Strand to SEQ ID NO: 442205
uucuagcacaccuuucuau

SEQ ID NO: 442207 - RNA, 19 nt, Artificial Sequence
  Description of Artificial Sequence: Synthetic oligonucleotide
  Sense strand starting at position 10 of SEQ ID NO: 316812
gaguacaagucauuguuaa

SEQ ID NO: 442208 - RNA, 19 nt, Artificial Sequence
  Description of Artificial Sequence: Synthetic oligonucleotide
  Antisense Strand to SEQ ID NO: 442207
uuaacaaugacuuguacuc

SEQ ID NO: 442209 - RNA, 19 nt, Artificial Sequence
  Description of Artificial Sequence: Synthetic oligonucleotide
  Sense strand starting at position 537 of SEQ ID NO: 316812
aggaauauuucuuggaaau

SEQ ID NO: 442210 - RNA, 19 nt, Artificial Sequence
  Description of Artificial Sequence: Synthetic oligonucleotide
  Antisense Strand to SEQ ID NO: 442209
auuuccaagaaauauuccu

SEQ ID NO: 442211 - RNA, 19 nt, Artificial Sequence
  Description of Artificial Sequence: Synthetic oligonucleotide
  Sense strand starting at position 863 of SEQ ID NO: 316812
ugcugaagacugggaaacu

SEQ ID NO: 442212 - RNA, 19 nt, Artificial Sequence
  Description of Artificial Sequence: Synthetic oligonucleotide
  Antisense Strand to SEQ ID NO: 442211
aguuucccagucuucagca

SEQ ID NO: 442213 - RNA, 19 nt, Artificial Sequence
  Description of Artificial Sequence: Synthetic oligonucleotide
  Sense strand starting at position 890 of SEQ ID NO: 316812
cgugcucauuucucuuaau

SEQ ID NO: 442214 - RNA, 19 nt, Artificial Sequence
  Description of Artificial Sequence: Synthetic oligonucleotide
  Antisense Strand to SEQ ID NO: 442213
auuaagagaaaugagcacg

SEQ ID NO: 442215 - RNA, 19 nt, Artificial Sequence
  Description of Artificial Sequence: Synthetic oligonucleotide
  Sense strand starting at position 1107 of SEQ ID NO: 316812
cauguaagauugguauauu

SEQ ID NO: 442216 - RNA, 19 nt, Artificial Sequence
  Description of Artificial Sequence: Synthetic oligonucleotide
  Antisense Strand to SEQ ID NO: 442215
aauauaccaaucuuacaug

SEQ ID NO: 442217 - RNA, 19 nt, Artificial Sequence
  Description of Artificial Sequence: Synthetic oligonucleotide
  Sense strand starting at position 1297 of SEQ ID NO: 316812
cuggaugacuuucuuuaga

SEQ ID NO: 442218 - RNA, 19 nt, Artificial Sequence
  Description of Artificial Sequence: Synthetic oligonucleotide
  Antisense Strand to SEQ ID NO: 442217
ucuaaagaaagucauccag

SEQ ID NO: 442219 - RNA, 19 nt, Artificial Sequence
  Description of Artificial Sequence: Synthetic oligonucleotide
  Sense strand starting at position 1425 of SEQ ID NO: 316812
cgggauuucucucuugcca

SEQ ID NO: 442220 - RNA, 19 nt, Artificial Sequence
  Description of Artificial Sequence: Synthetic oligonucleotide
  Antisense Strand to SEQ ID NO: 442219
uggcaagagagaaaucccg

SEQ ID NO: 442221 - RNA, 19 nt, Artificial Sequence
  Description of Artificial Sequence: Synthetic oligonucleotide
  Sense strand starting at position 1511 of SEQ ID NO: 316812
cgaacacuugcagauuacu

SEQ ID NO: 442222 - RNA, 19 nt, Artificial Sequence
  Description of Artificial Sequence: Synthetic oligonucleotide
  Antisense Strand to SEQ ID NO: 442221
aguaaucugcaaguguucg

SEQ ID NO: 442223 - RNA, 19 nt, Artificial Sequence
  Description of Artificial Sequence: Synthetic oligonucleotide
  Sense strand starting at position 1649 of SEQ ID NO: 316812
cugggagaguucccuggaa

SEQ ID NO: 442224 - RNA, 19 nt, Artificial Sequence
  Description of Artificial Sequence: Synthetic oligonucleotide
  Antisense Strand to SEQ ID NO: 442223
uuccagggaacucucccag

SEQ ID NO: 442225 - RNA, 19 nt, Artificial Sequence
  Description of Artificial Sequence: Synthetic oligonucleotide
  Sense strand starting at position 1653 of SEQ ID NO: 316812
gagaguucccuggaacgca

SEQ ID NO: 442226 - RNA, 19 nt, Artificial Sequence
  Description of Artificial Sequence: Synthetic oligonucleotide
  Antisense Strand to SEQ ID NO: 442225
ugcguuccagggaacucuc

SEQ ID NO: 442227 - RNA, 19 nt, Artificial Sequence
  Description of Artificial Sequence: Synthetic oligonucleotide
  Sense strand starting at position 1847 of SEQ ID NO: 316812
gcucauaguggucaagaga

SEQ ID NO: 442228 - RNA, 19 nt, Artificial Sequence
  Description of Artificial Sequence: Synthetic oligonucleotide
  Antisense Strand to SEQ ID NO: 442227
ucucuugaccacuaugagc

SEQ ID NO: 442229 - RNA, 19 nt, Artificial Sequence
  Description of Artificial Sequence: Synthetic oligonucleotide
  Sense strand starting at position 2191 of SEQ ID NO: 316812
gcuagaagggaguagcuau

SEQ ID NO: 442230 - RNA, 19 nt, Artificial Sequence
  Description of Artificial Sequence: Synthetic oligonucleotide
  Antisense Strand to SEQ ID NO: 442229
auagcuacucccuucuagc

SEQ ID NO: 442231 - RNA, 19 nt, Artificial Sequence
  Description of Artificial Sequence: Synthetic oligonucleotide
  Sense strand starting at position 2422 of SEQ ID NO: 316812
uuugaauugcuauaaacug

SEQ ID NO: 442232 - RNA, 19 nt, Artificial Sequence
  Description of Artificial Sequence: Synthetic oligonucleotide
  Antisense Strand to SEQ ID NO: 442231
caguuuauagcaauucaaa

SEQ ID NO: 442233 - RNA, 19 nt, Artificial Sequence
  Description of Artificial Sequence: Synthetic oligonucleotide
  Sense strand starting at position 2473 of SEQ ID NO: 316812
auucuagguuucuugaaug

SEQ ID NO: 442234 - RNA, 19 nt, Artificial Sequence
  Description of Artificial Sequence: Synthetic oligonucleotide
  Antisense Strand to SEQ ID NO: 442233
cauucaagaaaccuagaau

SEQ ID NO: 442235 - RNA, 19 nt, Artificial Sequence
  Description of Artificial Sequence: Synthetic oligonucleotide
  Sense strand starting at position 2478 of SEQ ID NO: 316812
agguuucuugaaugacuuu

SEQ ID NO: 442236 - RNA, 19 nt, Artificial Sequence
  Description of Artificial Sequence: Synthetic oligonucleotide
  Antisense Strand to SEQ ID NO: 442235
aaagucauucaagaaaccu

SEQ ID NO: 442237 - RNA, 19 nt, Artificial Sequence
  Description of Artificial Sequence: Synthetic oligonucleotide
  Sense strand starting at position 2493 of SEQ ID NO: 316812
cuuuaugaaucucuggacu

SEQ ID NO: 442238 - RNA, 19 nt, Artificial Sequence
  Description of Artificial Sequence: Synthetic oligonucleotide
  Antisense Strand to SEQ ID NO: 442237
aguccagagauucauaaag

SEQ ID NO: 442239 - RNA, 19 nt, Artificial Sequence
  Description of Artificial Sequence: Synthetic oligonucleotide
  Sense strand starting at position 2534 of SEQ ID NO: 316812
auaacaugauaacaagaga

SEQ ID NO: 442240 - RNA, 19 nt, Artificial Sequence
  Description of Artificial Sequence: Synthetic oligonucleotide
  Antisense Strand to SEQ ID NO: 442239
ucucuuguuaucauguuau

SEQ ID NO: 442241 - RNA, 19 nt, Artificial Sequence
  Description of Artificial Sequence: Synthetic oligonucleotide
  Sense strand starting at position 2545 of SEQ ID NO: 316812
acaagagacccuugucucu

SEQ ID NO: 442242 - RNA, 19 nt, Artificial Sequence
  Description of Artificial Sequence: Synthetic oligonucleotide
  Antisense Strand to SEQ ID NO: 442241
agagacaagggucucuugu

SEQ ID NO: 442243 - RNA, 19 nt, Artificial Sequence
  Description of Artificial Sequence: Synthetic oligonucleotide
  Sense strand starting at position 2647 of SEQ ID NO: 316812
cugagaauucuguacuugu

SEQ ID NO: 442244 - RNA, 19 nt, Artificial Sequence
  Description of Artificial Sequence: Synthetic oligonucleotide
  Antisense Strand to SEQ ID NO: 442243
acaaguacagaauucucag

SEQ ID NO: 442245 - RNA, 19 nt, Artificial Sequence
  Description of Artificial Sequence: Synthetic oligonucleotide
  Sense strand starting at position 2674 of SEQ ID NO: 316812
gcaaguauacgugugucca

SEQ ID NO: 442246 - RNA, 19 nt, Artificial Sequence
  Description of Artificial Sequence: Synthetic oligonucleotide
  Antisense Strand to SEQ ID NO: 442245
uggacacacguauacuugc

SEQ ID NO: 442247 - RNA, 19 nt, Artificial Sequence
  Description of Artificial Sequence: Synthetic oligonucleotide
  Sense strand starting at position 2725 of SEQ ID NO: 316812
agcaaauugccauggaaga

SEQ ID NO: 442248 - RNA, 19 nt, Artificial Sequence
  Description of Artificial Sequence: Synthetic oligonucleotide
  Antisense Strand to SEQ ID NO: 442247
ucuuccauggcaauuugcu

SEQ ID NO: 442249 - RNA, 19 nt, Artificial Sequence
  Description of Artificial Sequence: Synthetic oligonucleotide
  Sense strand starting at position 2726 of SEQ ID NO: 316812
gcaaauugccauggaagau

SEQ ID NO: 442250 - RNA, 19 nt, Artificial Sequence
  Description of Artificial Sequence: Synthetic oligonucleotide
  Antisense Strand to SEQ ID NO: 442249
aucuuccauggcaauuugc

SEQ ID NO: 442251 - RNA, 19 nt, Artificial Sequence
  Description of Artificial Sequence: Synthetic oligonucleotide
  Sense strand starting at position 2914 of SEQ ID NO: 316812
ggaggcugaugaguuugaa

SEQ ID NO: 442252 - RNA, 19 nt, Artificial Sequence
  Description of Artificial Sequence: Synthetic oligonucleotide
  Antisense Strand to SEQ ID NO: 442251
uucaaacucaucagccucc

SEQ ID NO: 442253 - RNA, 19 nt, Artificial Sequence
  Description of Artificial Sequence: Synthetic oligonucleotide
  Sense strand starting at position 2922 of SEQ ID NO: 316812
augaguuugaagggcucau

SEQ ID NO: 442254 - RNA, 19 nt, Artificial Sequence
  Description of Artificial Sequence: Synthetic oligonucleotide
  Antisense Strand to SEQ ID NO: 442253
augagcccuucaaacucau

SEQ ID NO: 442255 - RNA, 19 nt, Artificial Sequence
  Description of Artificial Sequence: Synthetic oligonucleotide
  Sense strand starting at position 3181 of SEQ ID NO: 316812
cuguuaucuguggaggagu

SEQ ID NO: 442256 - RNA, 19 nt, Artificial Sequence
  Description of Artificial Sequence: Synthetic oligonucleotide
  Antisense Strand to SEQ ID NO: 442255
acuccuccacagauaacag

SEQ ID NO: 442257 - RNA, 19 nt, Artificial Sequence
  Description of Artificial Sequence: Synthetic oligonucleotide
  Sense strand starting at position 3184 of SEQ ID NO: 316812
uuaucuguggaggaguuaa

SEQ ID NO: 442258 - RNA, 19 nt, Artificial Sequence
  Description of Artificial Sequence: Synthetic oligonucleotide
  Antisense Strand to SEQ ID NO: 442257
uuaacuccuccacagauaa

SEQ ID NO: 442259 - RNA, 19 nt, Artificial Sequence
  Description of Artificial Sequence: Synthetic oligonucleotide
  Sense strand starting at position 3196 of SEQ ID NO: 316812
gaguuaaagcacugaaggu

SEQ ID NO: 442260 - RNA, 19 nt, Artificial Sequence
  Description of Artificial Sequence: Synthetic oligonucleotide
  Antisense Strand to SEQ ID NO: 442259
accuucagugcuuuaacuc

SEQ ID NO: 442261 - RNA, 19 nt, Artificial Sequence
  Description of Artificial Sequence: Synthetic oligonucleotide
  Sense strand starting at position 3197 of SEQ ID NO: 316812
aguuaaagcacugaagguu

SEQ ID NO: 442262 - RNA, 19 nt, Artificial Sequence
  Description of Artificial Sequence: Synthetic oligonucleotide
  Antisense Strand to SEQ ID NO: 442261
aaccuucagugcuuuaacu

SEQ ID NO: 442263 - RNA, 19 nt, Artificial Sequence
  Description of Artificial Sequence: Synthetic oligonucleotide
  Sense strand starting at position 3244 of SEQ ID NO: 316812
gcaggaauggguuauugua

SEQ ID NO: 442264 - RNA, 19 nt, Artificial Sequence
  Description of Artificial Sequence: Synthetic oligonucleotide
  Antisense Strand to SEQ ID NO: 442263
uacaauaacccauuccugc

SEQ ID NO: 442265 - RNA, 19 nt, Artificial Sequence
  Description of Artificial Sequence: Synthetic oligonucleotide
  Sense strand starting at position 3246 of SEQ ID NO: 316812
aggaauggguuauuguauu

SEQ ID NO: 442266 - RNA, 19 nt, Artificial Sequence
  Description of Artificial Sequence: Synthetic oligonucleotide
  Antisense Strand to SEQ ID NO: 442265
aauacaauaacccauuccu

SEQ ID NO: 442267 - RNA, 19 nt, Artificial Sequence
  Description of Artificial Sequence: Synthetic oligonucleotide
  Sense strand starting at position 3253 of SEQ ID NO: 316812
gguuauuguauuggaauga

SEQ ID NO: 442268 - RNA, 19 nt, Artificial Sequence
  Description of Artificial Sequence: Synthetic oligonucleotide
  Antisense Strand to SEQ ID NO: 442267
ucauuccaauacaauaacc

SEQ ID NO: 442269 - RNA, 19 nt, Artificial Sequence
  Description of Artificial Sequence: Synthetic oligonucleotide
  Sense strand starting at position 3257 of SEQ ID NO: 316812
auuguauuggaaugacaca

SEQ ID NO: 442270 - RNA, 19 nt, Artificial Sequence
  Description of Artificial Sequence: Synthetic oligonucleotide
  Antisense Strand to SEQ ID NO: 442269
ugugucauuccaauacaau

SEQ ID NO: 442271 - RNA, 19 nt, Artificial Sequence
  Description of Artificial Sequence: Synthetic oligonucleotide
  Sense strand starting at position 3350 of SEQ ID NO: 316812
cagcaaagguaaucaguaa

SEQ ID NO: 442272 - RNA, 19 nt, Artificial Sequence
  Description of Artificial Sequence: Synthetic oligonucleotide
  Antisense Strand to SEQ ID NO: 442271
uuacugauuaccuuugcug

SEQ ID NO: 442273 - RNA, 19 nt, Artificial Sequence
  Description of Artificial Sequence: Synthetic oligonucleotide
  Sense strand starting at position 3461 of SEQ ID NO: 316812
cuccauuggugagcaagaa

SEQ ID NO: 442274 - RNA, 19 nt, Artificial Sequence
  Description of Artificial Sequence: Synthetic oligonucleotide
  Antisense Strand to SEQ ID NO: 442273
uucuugcucaccaauggag

SEQ ID NO: 442275 - RNA, 19 nt, Artificial Sequence
  Description of Artificial Sequence: Synthetic oligonucleotide
  Sense strand starting at position 3563 of SEQ ID NO: 316812
ccuuacucugugggaaacu

SEQ ID NO: 442276 - RNA, 19 nt, Artificial Sequence
  Description of Artificial Sequence: Synthetic oligonucleotide
  Antisense Strand to SEQ ID NO: 442275
aguuucccacagaguaagg

SEQ ID NO: 442277 - RNA, 19 nt, Artificial Sequence
  Description of Artificial Sequence: Synthetic oligonucleotide
  Sense strand starting at position 3684 of SEQ ID NO: 316812
ccugcagauuuaguauguu

SEQ ID NO: 442278 - RNA, 19 nt, Artificial Sequence
  Description of Artificial Sequence: Synthetic oligonucleotide
  Antisense Strand to SEQ ID NO: 442277
aacauacuaaaucugcagg

SEQ ID NO: 442279 - RNA, 19 nt, Artificial Sequence
  Description of Artificial Sequence: Synthetic oligonucleotide
  Sense strand starting at position 3712 of SEQ ID NO: 316812
gagauuagaguguaucgaa

SEQ ID NO: 442280 - RNA, 19 nt, Artificial Sequence
  Description of Artificial Sequence: Synthetic oligonucleotide
  Antisense Strand to SEQ ID NO: 442279
uucgauacacucuaaucuc

SEQ ID NO: 442281 - RNA, 19 nt, Artificial Sequence
  Description of Artificial Sequence: Synthetic oligonucleotide
  Sense strand starting at position 3737 of SEQ ID NO: 316812
aaguuaagccuaggugaag

SEQ ID NO: 442282 - RNA, 19 nt, Artificial Sequence
  Description of Artificial Sequence: Synthetic oligonucleotide
  Antisense Strand to SEQ ID NO: 442281
cuucaccuaggcuuaacuu

SEQ ID NO: 442283 - RNA, 19 nt, Artificial Sequence
  Description of Artificial Sequence: Synthetic oligonucleotide
  Sense strand starting at position 3817 of SEQ ID NO: 316812
aggauaagacuuuguucuu

SEQ ID NO: 442284 - RNA, 19 nt, Artificial Sequence
  Description of Artificial Sequence: Synthetic oligonucleotide
  Antisense Strand to SEQ ID NO: 442283
aagaacaaagucuuauccu

SEQ ID NO: 442285 - RNA, 19 nt, Artificial Sequence
  Description of Artificial Sequence: Synthetic oligonucleotide
  Sense strand starting at position 3818 of SEQ ID NO: 316812
ggauaagacuuuguucuuu

SEQ ID NO: 442286 - RNA, 19 nt, Artificial Sequence
  Description of Artificial Sequence: Synthetic oligonucleotide
  Antisense Strand to SEQ ID NO: 442285
aaagaacaaagucuuaucc

SEQ ID NO: 442287 - RNA, 19 nt, Artificial Sequence
  Description of Artificial Sequence: Synthetic oligonucleotide
  Sense strand starting at position 927 of SEQ ID NO: 316813
uguuuccacuguugagaaa

SEQ ID NO: 442288 - RNA, 19 nt, Artificial Sequence
  Description of Artificial Sequence: Synthetic oligonucleotide
  Antisense Strand to SEQ ID NO: 442287
uuucucaacaguggaaaca

SEQ ID NO: 442289 - RNA, 19 nt, Artificial Sequence
  Description of Artificial Sequence: Synthetic oligonucleotide
  Sense strand starting at position 970 of SEQ ID NO: 316813
cccacacucuuguaugcua

SEQ ID NO: 442290 - RNA, 19 nt, Artificial Sequence
  Description of Artificial Sequence: Synthetic oligonucleotide
  Antisense Strand to SEQ ID NO: 442289
uagcauacaagaguguggg

SEQ ID NO: 442291 - RNA, 19 nt, Artificial Sequence
  Description of Artificial Sequence: Synthetic oligonucleotide
  Sense strand starting at position 975 of SEQ ID NO: 316813
acucuuguaugcuacauuu

SEQ ID NO: 442292 - RNA, 19 nt, Artificial Sequence
  Description of Artificial Sequence: Synthetic oligonucleotide
  Antisense Strand to SEQ ID NO: 442291
aaauguagcauacaagagu

SEQ ID NO: 442293 - RNA, 19 nt, Artificial Sequence
  Description of Artificial Sequence: Synthetic oligonucleotide
  Sense strand starting at position 1062 of SEQ ID NO: 316813
aguaaugagcucuguguaa

SEQ ID NO: 442294 - RNA, 19 nt, Artificial Sequence
  Description of Artificial Sequence: Synthetic oligonucleotide
  Antisense Strand to SEQ ID NO: 442293
uuacacagagcucauuacu

SEQ ID NO: 442295 - RNA, 19 nt, Artificial Sequence
  Description of Artificial Sequence: Synthetic oligonucleotide
  Sense strand starting at position 1064 of SEQ ID NO: 316813
uaaugagcucuguguaauu

SEQ ID NO: 442296 - RNA, 19 nt, Artificial Sequence
  Description of Artificial Sequence: Synthetic oligonucleotide
  Antisense Strand to SEQ ID NO: 442295
aauuacacagagcucauua

SEQ ID NO: 442297 - RNA, 19 nt, Artificial Sequence
  Description of Artificial Sequence: Synthetic oligonucleotide
  Sense strand starting at position 1089 of SEQ ID NO: 316813
gcauguaagauuggugaua

SEQ ID NO: 442298 - RNA, 19 nt, Artificial Sequence
  Description of Artificial Sequence: Synthetic oligonucleotide
  Antisense Strand to SEQ ID NO: 442297
uaucaccaaucuuacaugc

SEQ ID NO: 442299 - RNA, 19 nt, Artificial Sequence
  Description of Artificial Sequence: Synthetic oligonucleotide
  Sense strand starting at position 1090 of SEQ ID NO: 316813
cauguaagauuggugauaa

SEQ ID NO: 442300 - RNA, 19 nt, Artificial Sequence
  Description of Artificial Sequence: Synthetic oligonucleotide
  Antisense Strand to SEQ ID NO: 442299
uuaucaccaaucuuacaug

SEQ ID NO: 442301 - RNA, 19 nt, Artificial Sequence
  Description of Artificial Sequence: Synthetic oligonucleotide
  Sense strand starting at position 1091 of SEQ ID NO: 316813
auguaagauuggugauaaa

SEQ ID NO: 442302 - RNA, 19 nt, Artificial Sequence
  Description of Artificial Sequence: Synthetic oligonucleotide
  Antisense Strand to SEQ ID NO: 442301
uuuaucaccaaucuuacau

SEQ ID NO: 442303 - RNA, 19 nt, Artificial Sequence
  Description of Artificial Sequence: Synthetic oligonucleotide
  Sense strand starting at position 1094 of SEQ ID NO: 316813
uaagauuggugauaaaggu

SEQ ID NO: 442304 - RNA, 19 nt, Artificial Sequence
  Description of Artificial Sequence: Synthetic oligonucleotide
  Antisense Strand to SEQ ID NO: 442303
accuuuaucaccaaucuua

SEQ ID NO: 442305 - RNA, 19 nt, Artificial Sequence
  Description of Artificial Sequence: Synthetic oligonucleotide
  Sense strand starting at position 1200 of SEQ ID NO: 316813
uaaggacauugugaaguau

SEQ ID NO: 442306 - RNA, 19 nt, Artificial Sequence
  Description of Artificial Sequence: Synthetic oligonucleotide
  Antisense Strand to SEQ ID NO: 442305
auacuucacaauguccuua

SEQ ID NO: 442307 - RNA, 19 nt, Artificial Sequence
  Description of Artificial Sequence: Synthetic oligonucleotide
  Sense strand starting at position 1211 of SEQ ID NO: 316813
ugaaguauaugcuuuccau

SEQ ID NO: 442308 - RNA, 19 nt, Artificial Sequence
  Description of Artificial Sequence: Synthetic oligonucleotide
  Antisense Strand to SEQ ID NO: 442307
auggaaagcauauacuuca

SEQ ID NO: 442309 - RNA, 19 nt, Artificial Sequence
  Description of Artificial Sequence: Synthetic oligonucleotide
  Sense strand starting at position 1214 of SEQ ID NO: 316813
aguauaugcuuuccauaga

SEQ ID NO: 442310 - RNA, 19 nt, Artificial Sequence
  Description of Artificial Sequence: Synthetic oligonucleotide
  Antisense Strand to SEQ ID NO: 442309
ucuauggaaagcauauacu

SEQ ID NO: 442311 - RNA, 19 nt, Artificial Sequence
  Description of Artificial Sequence: Synthetic oligonucleotide
  Sense strand starting at position 1215 of SEQ ID NO: 316813
guauaugcuuuccauagaa

SEQ ID NO: 442312 - RNA, 19 nt, Artificial Sequence
  Description of Artificial Sequence: Synthetic oligonucleotide
  Antisense Strand to SEQ ID NO: 442311
uucuauggaaagcauauac

SEQ ID NO: 442313 - RNA, 19 nt, Artificial Sequence
  Description of Artificial Sequence: Synthetic oligonucleotide
  Sense strand starting at position 1345 of SEQ ID NO: 316813
cagggaggcucugaaguaa

SEQ ID NO: 442314 - RNA, 19 nt, Artificial Sequence
  Description of Artificial Sequence: Synthetic oligonucleotide
  Antisense Strand to SEQ ID NO: 442313
uuacuucagagccucccug

SEQ ID NO: 442315 - RNA, 19 nt, Artificial Sequence
  Description of Artificial Sequence: Synthetic oligonucleotide
  Sense strand starting at position 1412 of SEQ ID NO: 316813
ggaggacuugccuaaguca

SEQ ID NO: 442316 - RNA, 19 nt, Artificial Sequence
  Description of Artificial Sequence: Synthetic oligonucleotide
  Antisense Strand to SEQ ID NO: 442315
ugacuuaggcaaguccucc

SEQ ID NO: 442317 - RNA, 19 nt, Artificial Sequence
  Description of Artificial Sequence: Synthetic oligonucleotide
  Sense strand starting at position 1620 of SEQ ID NO: 316813
gcagguugcugggagaguu

SEQ ID NO: 442318 - RNA, 19 nt, Artificial Sequence
  Description of Artificial Sequence: Synthetic oligonucleotide
  Antisense Strand to SEQ ID NO: 442317
aacucucccagcaaccugc

SEQ ID NO: 442319 - RNA, 19 nt, Artificial Sequence
  Description of Artificial Sequence: Synthetic oligonucleotide
  Sense strand starting at position 1628 of SEQ ID NO: 316813
cugggagaguucccuggaa

SEQ ID NO: 442320 - RNA, 19 nt, Artificial Sequence
  Description of Artificial Sequence: Synthetic oligonucleotide
  Antisense Strand to SEQ ID NO: 442319
uuccagggaacucucccag

SEQ ID NO: 442321 - RNA, 19 nt, Artificial Sequence
  Description of Artificial Sequence: Synthetic oligonucleotide
  Sense strand starting at position 1630 of SEQ ID NO: 316813
gggagaguucccuggaacg

SEQ ID NO: 442322 - RNA, 19 nt, Artificial Sequence
  Description of Artificial Sequence: Synthetic oligonucleotide
  Antisense Strand to SEQ ID NO: 442321
cguuccagggaacucuccc

SEQ ID NO: 442323 - RNA, 19 nt, Artificial Sequence
  Description of Artificial Sequence: Synthetic oligonucleotide
  Sense strand starting at position 1632 of SEQ ID NO: 316813
gagaguucccuggaacgca

SEQ ID NO: 442324 - RNA, 19 nt, Artificial Sequence
  Description of Artificial Sequence: Synthetic oligonucleotide
  Antisense Strand to SEQ ID NO: 442323
ugcguuccagggaacucuc

SEQ ID NO: 442325 - RNA, 19 nt, Artificial Sequence
  Description of Artificial Sequence: Synthetic oligonucleotide
  Sense strand starting at position 2225 of SEQ ID NO: 316813
cuccaauggccaggacaau

SEQ ID NO: 442326 - RNA, 19 nt, Artificial Sequence
  Description of Artificial Sequence: Synthetic oligonucleotide
  Antisense Strand to SEQ ID NO: 442325
auuguccuggccauuggag

SEQ ID NO: 442327 - RNA, 19 nt, Artificial Sequence
  Description of Artificial Sequence: Synthetic oligonucleotide
  Sense strand starting at position 2455 of SEQ ID NO: 316813
gagacauggucucagccca

SEQ ID NO: 442328 - RNA, 19 nt, Artificial Sequence
  Description of Artificial Sequence: Synthetic oligonucleotide
  Antisense Strand to SEQ ID NO: 442327
ugggcugagaccaugucuc

SEQ ID NO: 442329 - RNA, 19 nt, Artificial Sequence
  Description of Artificial Sequence: Synthetic oligonucleotide
  Sense strand starting at position 3296 of SEQ ID NO: 316813
ugggcaaggucuucaugua

SEQ ID NO: 442330 - RNA, 19 nt, Artificial Sequence
  Description of Artificial Sequence: Synthetic oligonucleotide
  Antisense Strand to SEQ ID NO: 442329
uacaugaagaccuugccca

SEQ ID NO: 442331 - RNA, 19 nt, Artificial Sequence
  Description of Artificial Sequence: Synthetic oligonucleotide
  Sense strand starting at position 3297 of SEQ ID NO: 316813
gggcaaggucuucauguau

SEQ ID NO: 442332 - RNA, 19 nt, Artificial Sequence
  Description of Artificial Sequence: Synthetic oligonucleotide
  Antisense Strand to SEQ ID NO: 442331
auacaugaagaccuugccc

SEQ ID NO: 442333 - RNA, 19 nt, Artificial Sequence
  Description of Artificial Sequence: Synthetic oligonucleotide
  Sense strand starting at position 84 of SEQ ID NO: 316814
augagcuauguuuaauaag

SEQ ID NO: 442334 - RNA, 19 nt, Artificial Sequence
  Description of Artificial Sequence: Synthetic oligonucleotide
  Antisense Strand to SEQ ID NO: 442333
cuuauuaaacauagcucau

SEQ ID NO: 442335 - RNA, 19 nt, Artificial Sequence
  Description of Artificial Sequence: Synthetic oligonucleotide
  Sense strand starting at position 302 of SEQ ID NO: 316814
cuuucuggucaugaguaca

SEQ ID NO: 442336 - RNA, 19 nt, Artificial Sequence
  Description of Artificial Sequence: Synthetic oligonucleotide
  Antisense Strand to SEQ ID NO: 442335
uguacucaugaccagaaag

SEQ ID NO: 442337 - RNA, 19 nt, Artificial Sequence
  Description of Artificial Sequence: Synthetic oligonucleotide
  Sense strand starting at position 305 of SEQ ID NO: 316814
ucuggucaugaguacaaca

SEQ ID NO: 442338 - RNA, 19 nt, Artificial Sequence
  Description of Artificial Sequence: Synthetic oligonucleotide
  Antisense Strand to SEQ ID NO: 442337
uguuguacucaugaccaga

SEQ ID NO: 442339 - RNA, 19 nt, Artificial Sequence
  Description of Artificial Sequence: Synthetic oligonucleotide
  Sense strand starting at position 407 of SEQ ID NO: 316814
auaggcugacuuuggauua

SEQ ID NO: 442340 - RNA, 19 nt, Artificial Sequence
  Description of Artificial Sequence: Synthetic oligonucleotide
  Antisense Strand to SEQ ID NO: 442339
uaauccaaagucagccuau

SEQ ID NO: 442341 - RNA, 19 nt, Artificial Sequence
  Description of Artificial Sequence: Synthetic oligonucleotide
  Sense strand starting at position 419 of SEQ ID NO: 316814
uggauuauaugucucagga

SEQ ID NO: 442342 - RNA, 19 nt, Artificial Sequence
  Description of Artificial Sequence: Synthetic oligonucleotide
  Antisense Strand to SEQ ID NO: 442341
uccugagacauauaaucca

SEQ ID NO: 442343 - RNA, 19 nt, Artificial Sequence
  Description of Artificial Sequence: Synthetic oligonucleotide
  Sense strand starting at position 658 of SEQ ID NO: 316814
auaguaguuguggaagcua

SEQ ID NO: 442344 - RNA, 19 nt, Artificial Sequence
  Description of Artificial Sequence: Synthetic oligonucleotide
  Antisense Strand to SEQ ID NO: 442343
uagcuuccacaacuacuau

SEQ ID NO: 442345 - RNA, 19 nt, Artificial Sequence
  Description of Artificial Sequence: Synthetic oligonucleotide
  Sense strand starting at position 1044 of SEQ ID NO: 316814
uaugauuauuuggagacua

SEQ ID NO: 442346 - RNA, 19 nt, Artificial Sequence
  Description of Artificial Sequence: Synthetic oligonucleotide
  Antisense Strand to SEQ ID NO: 442345
uagucuccaaauaaucaua

SEQ ID NO: 442347 - RNA, 19 nt, Artificial Sequence
  Description of Artificial Sequence: Synthetic oligonucleotide
  Sense strand starting at position 1061 of SEQ ID NO: 316814
uauggaaggcaucauguuu

SEQ ID NO: 442348 - RNA, 19 nt, Artificial Sequence
  Description of Artificial Sequence: Synthetic oligonucleotide
  Antisense Strand to SEQ ID NO: 442347
aaacaugaugccuuccaua

SEQ ID NO: 442349 - RNA, 19 nt, Artificial Sequence
  Description of Artificial Sequence: Synthetic oligonucleotide
  Sense strand starting at position 1083 of SEQ ID NO: 316814
gugaacucauuccugaaua

SEQ ID NO: 442350 - RNA, 19 nt, Artificial Sequence
  Description of Artificial Sequence: Synthetic oligonucleotide
  Antisense Strand to SEQ ID NO: 442349
uauucaggaaugaguucac

SEQ ID NO: 442351 - RNA, 19 nt, Artificial Sequence
  Description of Artificial Sequence: Synthetic oligonucleotide
  Sense strand starting at position 1163 of SEQ ID NO: 316814
uugaacgacuuccuauaua

SEQ ID NO: 442352 - RNA, 19 nt, Artificial Sequence
  Description of Artificial Sequence: Synthetic oligonucleotide
  Antisense Strand to SEQ ID NO: 442351
uauauaggaagucguucaa

SEQ ID NO: 442353 - RNA, 19 nt, Artificial Sequence
  Description of Artificial Sequence: Synthetic oligonucleotide
  Sense strand starting at position 1229 of SEQ ID NO: 316814
uuaucuggucaauauugca

SEQ ID NO: 442354 - RNA, 19 nt, Artificial Sequence
  Description of Artificial Sequence: Synthetic oligonucleotide
  Antisense Strand to SEQ ID NO: 442353
ugcaauauugaccagauaa

SEQ ID NO: 442355 - RNA, 19 nt, Artificial Sequence
  Description of Artificial Sequence: Synthetic oligonucleotide
  Sense strand starting at position 1364 of SEQ ID NO: 316814
cuauaaucaggguaucuuu

SEQ ID NO: 442356 - RNA, 19 nt, Artificial Sequence
  Description of Artificial Sequence: Synthetic oligonucleotide
  Antisense Strand to SEQ ID NO: 442355
aaagauacccugauuauag

SEQ ID NO: 442357 - RNA, 19 nt, Artificial Sequence
  Description of Artificial Sequence: Synthetic oligonucleotide
  Sense strand starting at position 1405 of SEQ ID NO: 316814
aaaucugaggcuugucaau

SEQ ID NO: 442358 - RNA, 19 nt, Artificial Sequence
  Description of Artificial Sequence: Synthetic oligonucleotide
  Antisense Strand to SEQ ID NO: 442357
auugacaagccucagauuu

SEQ ID NO: 442359 - RNA, 19 nt, Artificial Sequence
  Description of Artificial Sequence: Synthetic oligonucleotide
  Sense strand starting at position 1407 of SEQ ID NO: 316814
aucugaggcuugucaauga

SEQ ID NO: 442360 - RNA, 19 nt, Artificial Sequence
  Description of Artificial Sequence: Synthetic oligonucleotide
  Antisense Strand to SEQ ID NO: 442359
ucauugacaagccucagau

SEQ ID NO: 442361 - RNA, 19 nt, Artificial Sequence
  Description of Artificial Sequence: Synthetic oligonucleotide
  Sense strand starting at position 1411 of SEQ ID NO: 316814
gaggcuugucaaugaaaua

SEQ ID NO: 442362 - RNA, 19 nt, Artificial Sequence
  Description of Artificial Sequence: Synthetic oligonucleotide
  Antisense Strand to SEQ ID NO: 442361
uauuucauugacaagccuc

SEQ ID NO: 442363 - RNA, 19 nt, Artificial Sequence
  Description of Artificial Sequence: Synthetic oligonucleotide
  Sense strand starting at position 1495 of SEQ ID NO: 316814
cgugguucucaauaggaca

SEQ ID NO: 442364 - RNA, 19 nt, Artificial Sequence
  Description of Artificial Sequence: Synthetic oligonucleotide
  Antisense Strand to SEQ ID NO: 442363
uguccuauugagaaccacg

SEQ ID NO: 442365 - RNA, 19 nt, Artificial Sequence
  Description of Artificial Sequence: Synthetic oligonucleotide
  Sense strand starting at position 1549 of SEQ ID NO: 316814
ugcuacaugguauaaauua

SEQ ID NO: 442366 - RNA, 19 nt, Artificial Sequence
  Description of Artificial Sequence: Synthetic oligonucleotide
  Antisense Strand to SEQ ID NO: 442365
uaauuuauaccauguagca

SEQ ID NO: 442367 - RNA, 19 nt, Artificial Sequence
  Description of Artificial Sequence: Synthetic oligonucleotide
  Sense strand starting at position 1647 of SEQ ID NO: 316814
acauuaauugacugcuaag

SEQ ID NO: 442368 - RNA, 19 nt, Artificial Sequence
  Description of Artificial Sequence: Synthetic oligonucleotide
  Antisense Strand to SEQ ID NO: 442367
cuuagcagucaauuaaugu

SEQ ID NO: 442369 - RNA, 19 nt, Artificial Sequence
  Description of Artificial Sequence: Synthetic oligonucleotide
  Sense strand starting at position 1688 of SEQ ID NO: 316814
aaaggauguuuguuaccaa

SEQ ID NO: 442370 - RNA, 19 nt, Artificial Sequence
  Description of Artificial Sequence: Synthetic oligonucleotide
  Antisense Strand to SEQ ID NO: 442369
uugguaacaaacauccuuu

SEQ ID NO: 442371 - RNA, 19 nt, Artificial Sequence
  Description of Artificial Sequence: Synthetic oligonucleotide
  Sense strand starting at position 1770 of SEQ ID NO: 316814
gaaagaugugcuuaccuuc

SEQ ID NO: 442372 - RNA, 19 nt, Artificial Sequence
  Description of Artificial Sequence: Synthetic oligonucleotide
  Antisense Strand to SEQ ID NO: 442371
gaagguaagcacaucuuuc

SEQ ID NO: 442373 - RNA, 19 nt, Artificial Sequence
  Description of Artificial Sequence: Synthetic oligonucleotide
  Sense strand starting at position 2060 of SEQ ID NO: 316814
gggcaaaccugagucauca

SEQ ID NO: 442374 - RNA, 19 nt, Artificial Sequence
  Description of Artificial Sequence: Synthetic oligonucleotide
  Antisense Strand to SEQ ID NO: 442373
ugaugacucagguuugccc

SEQ ID NO: 442375 - RNA, 19 nt, Artificial Sequence
  Description of Artificial Sequence: Synthetic oligonucleotide
  Sense strand starting at position 2184 of SEQ ID NO: 316814
uuuggugaauuaucaauug

SEQ ID NO: 442376 - RNA, 19 nt, Artificial Sequence
  Description of Artificial Sequence: Synthetic oligonucleotide
  Antisense Strand to SEQ ID NO: 442375
caauugauaauucaccaaa

SEQ ID NO: 442377 - RNA, 19 nt, Artificial Sequence
  Description of Artificial Sequence: Synthetic oligonucleotide
  Sense strand starting at position 2230 of SEQ ID NO: 316814
aucauaguaccaugugaca

SEQ ID NO: 442378 - RNA, 19 nt, Artificial Sequence
  Description of Artificial Sequence: Synthetic oligonucleotide
  Antisense Strand to SEQ ID NO: 442377
ugucacaugguacuaugau

SEQ ID NO: 442379 - RNA, 19 nt, Artificial Sequence
  Description of Artificial Sequence: Synthetic oligonucleotide
  Sense strand starting at position 2416 of SEQ ID NO: 316814
uuuagagaguuucuaggaa

SEQ ID NO: 442380 - RNA, 19 nt, Artificial Sequence
  Description of Artificial Sequence: Synthetic oligonucleotide
  Antisense Strand to SEQ ID NO: 442379
uuccuagaaacucucuaaa

SEQ ID NO: 442381 - RNA, 19 nt, Artificial Sequence
  Description of Artificial Sequence: Synthetic oligonucleotide
  Sense strand starting at position 2542 of SEQ ID NO: 316814
acaaacauuuauggaguaa

SEQ ID NO: 442382 - RNA, 19 nt, Artificial Sequence
  Description of Artificial Sequence: Synthetic oligonucleotide
  Antisense Strand to SEQ ID NO: 442381
uuacuccauaaauguuugu

SEQ ID NO: 442383 - RNA, 19 nt, Artificial Sequence
  Description of Artificial Sequence: Synthetic oligonucleotide
  Sense strand starting at position 2553 of SEQ ID NO: 316814
uggaguaacuuucugagua

SEQ ID NO: 442384 - RNA, 19 nt, Artificial Sequence
  Description of Artificial Sequence: Synthetic oligonucleotide
  Antisense Strand to SEQ ID NO: 442383
uacucagaaaguuacucca

SEQ ID NO: 442385 - RNA, 19 nt, Artificial Sequence
  Description of Artificial Sequence: Synthetic oligonucleotide
  Sense strand starting at position 2558 of SEQ ID NO: 316814
uaacuuucugaguaaugug

SEQ ID NO: 442386 - RNA, 19 nt, Artificial Sequence
  Description of Artificial Sequence: Synthetic oligonucleotide
  Antisense Strand to SEQ ID NO: 442385
cacauuacucagaaaguua

SEQ ID NO: 442387 - RNA, 19 nt, Artificial Sequence
  Description of Artificial Sequence: Synthetic oligonucleotide
  Sense strand starting at position 2590 of SEQ ID NO: 316814
uagauaagacuagguacuu

SEQ ID NO: 442388 - RNA, 19 nt, Artificial Sequence
  Description of Artificial Sequence: Synthetic oligonucleotide
  Antisense Strand to SEQ ID NO: 442387
aaguaccuagucuuaucua

SEQ ID NO: 442389 - RNA, 19 nt, Artificial Sequence
  Description of Artificial Sequence: Synthetic oligonucleotide
  Sense strand starting at position 2601 of SEQ ID NO: 316814
agguacuuguccuuaaaga

SEQ ID NO: 442390 - RNA, 19 nt, Artificial Sequence
  Description of Artificial Sequence: Synthetic oligonucleotide
  Antisense Strand to SEQ ID NO: 442389
ucuuuaaggacaaguaccu

SEQ ID NO: 442391 - RNA, 19 nt, Artificial Sequence
  Description of Artificial Sequence: Synthetic oligonucleotide
  Sense strand starting at position 2602 of SEQ ID NO: 316814
gguacuuguccuuaaagag

SEQ ID NO: 442392 - RNA, 19 nt, Artificial Sequence
  Description of Artificial Sequence: Synthetic oligonucleotide
  Antisense Strand to SEQ ID NO: 442391
cucuuuaaggacaaguacc

SEQ ID NO: 442393 - RNA, 19 nt, Artificial Sequence
  Description of Artificial Sequence: Synthetic oligonucleotide
  Sense strand starting at position 2614 of SEQ ID NO: 316814
uaaagaguuuggucuauca

SEQ ID NO: 442394 - RNA, 19 nt, Artificial Sequence
  Description of Artificial Sequence: Synthetic oligonucleotide
  Antisense Strand to SEQ ID NO: 442393
ugauagaccaaacucuuua

SEQ ID NO: 442395 - RNA, 19 nt, Artificial Sequence
  Description of Artificial Sequence: Synthetic oligonucleotide
  Sense strand starting at position 2644 of SEQ ID NO: 316814
caauguaaggacugacuau

SEQ ID NO: 442396 - RNA, 19 nt, Artificial Sequence
  Description of Artificial Sequence: Synthetic oligonucleotide
  Antisense Strand to SEQ ID NO: 442395
auagucaguccuuacauug

SEQ ID NO: 442397 - RNA, 19 nt, Artificial Sequence
  Description of Artificial Sequence: Synthetic oligonucleotide
  Sense strand starting at position 2707 of SEQ ID NO: 316814
ggcauaagagcagaaucuu

SEQ ID NO: 442398 - RNA, 19 nt, Artificial Sequence
  Description of Artificial Sequence: Synthetic oligonucleotide
  Antisense Strand to SEQ ID NO: 442397
aagauucugcucuuaugcc

SEQ ID NO: 442399 - RNA, 19 nt, Artificial Sequence
  Description of Artificial Sequence: Synthetic oligonucleotide
  Sense strand starting at position 2847 of SEQ ID NO: 316814
auguuuaugcuccagaaag

SEQ ID NO: 442400 - RNA, 19 nt, Artificial Sequence
  Description of Artificial Sequence: Synthetic oligonucleotide
  Antisense Strand to SEQ ID NO: 442399
cuuucuggagcauaaacau

SEQ ID NO: 442401 - RNA, 19 nt, Artificial Sequence
  Description of Artificial Sequence: Synthetic oligonucleotide
  Sense strand starting at position 2849 of SEQ ID NO: 316814
guuuaugcuccagaaagug

SEQ ID NO: 442402 - RNA, 19 nt, Artificial Sequence
  Description of Artificial Sequence: Synthetic oligonucleotide
  Antisense Strand to SEQ ID NO: 442401
cacuuucuggagcauaaac

SEQ ID NO: 442403 - RNA, 19 nt, Artificial Sequence
  Description of Artificial Sequence: Synthetic oligonucleotide
  Sense strand starting at position 3407 of SEQ ID NO: 316814
aaauaaugccuggguuaca

SEQ ID NO: 442404 - RNA, 19 nt, Artificial Sequence
  Description of Artificial Sequence: Synthetic oligonucleotide
  Antisense Strand to SEQ ID NO: 442403
uguaacccaggcauuauuu

SEQ ID NO: 442405 - RNA, 19 nt, Artificial Sequence
  Description of Artificial Sequence: Synthetic oligonucleotide
  Sense strand starting at position 3545 of SEQ ID NO: 316814
cuuauuguaggagauguga

SEQ ID NO: 442406 - RNA, 19 nt, Artificial Sequence
  Description of Artificial Sequence: Synthetic oligonucleotide
  Antisense Strand to SEQ ID NO: 442405
ucacaucuccuacaauaag

SEQ ID NO: 442407 - RNA, 19 nt, Artificial Sequence
  Description of Artificial Sequence: Synthetic oligonucleotide
  Sense strand starting at position 3547 of SEQ ID NO: 316814
uauuguaggagaugugaau

SEQ ID NO: 442408 - RNA, 19 nt, Artificial Sequence
  Description of Artificial Sequence: Synthetic oligonucleotide
  Antisense Strand to SEQ ID NO: 442407
auucacaucuccuacaaua

SEQ ID NO: 442409 - RNA, 19 nt, Artificial Sequence
  Description of Artificial Sequence: Synthetic oligonucleotide
  Sense strand starting at position 3553 of SEQ ID NO: 316814
aggagaugugaaugcuaug

SEQ ID NO: 442410 - RNA, 19 nt, Artificial Sequence
  Description of Artificial Sequence: Synthetic oligonucleotide
  Antisense Strand to SEQ ID NO: 442409
cauagcauucacaucuccu

SEQ ID NO: 442411 - RNA, 19 nt, Artificial Sequence
  Description of Artificial Sequence: Synthetic oligonucleotide
  Sense strand starting at position 3844 of SEQ ID NO: 316814
augaaauguaggcgaacau

SEQ ID NO: 442412 - RNA, 19 nt, Artificial Sequence
  Description of Artificial Sequence: Synthetic oligonucleotide
  Antisense Strand to SEQ ID NO: 442411
auguucgccuacauuucau

SEQ ID NO: 442413 - RNA, 19 nt, Artificial Sequence
  Description of Artificial Sequence: Synthetic oligonucleotide
  Sense strand starting at position 153 of SEQ ID NO: 316815
gagauuuacugacacgaga

SEQ ID NO: 442414 - RNA, 19 nt, Artificial Sequence
  Description of Artificial Sequence: Synthetic oligonucleotide
  Antisense Strand to SEQ ID NO: 442413
ucucgugucaguaaaucuc

SEQ ID NO: 442415 - RNA, 19 nt, Artificial Sequence
  Description of Artificial Sequence: Synthetic oligonucleotide
  Sense strand starting at position 215 of SEQ ID NO: 316815
caguguauaguauaugauu

SEQ ID NO: 442416 - RNA, 19 nt, Artificial Sequence
  Description of Artificial Sequence: Synthetic oligonucleotide
  Antisense Strand to SEQ ID NO: 442415
aaucauauacuauacacug

SEQ ID NO: 442417 - RNA, 19 nt, Artificial Sequence
  Description of Artificial Sequence: Synthetic oligonucleotide
  Sense strand starting at position 340 of SEQ ID NO: 316815
uugucacucaaggguagaa

SEQ ID NO: 442418 - RNA, 19 nt, Artificial Sequence
  Description of Artificial Sequence: Synthetic oligonucleotide
  Antisense Strand to SEQ ID NO: 442417
uucuacccuugagugacaa

SEQ ID NO: 442419 - RNA, 19 nt, Artificial Sequence
  Description of Artificial Sequence: Synthetic oligonucleotide
  Sense strand starting at position 353 of SEQ ID NO: 316815
guagaauuaugcgugauuu

SEQ ID NO: 442420 - RNA, 19 nt, Artificial Sequence
  Description of Artificial Sequence: Synthetic oligonucleotide
  Antisense Strand to SEQ ID NO: 442419
aaaucacgcauaauucuac

SEQ ID NO: 442421 - RNA, 19 nt, Artificial Sequence
  Description of Artificial Sequence: Synthetic oligonucleotide
  Sense strand starting at position 610 of SEQ ID NO: 316815
uggguuguuacuuacauga

SEQ ID NO: 442422 - RNA, 19 nt, Artificial Sequence
  Description of Artificial Sequence: Synthetic oligonucleotide
  Antisense Strand to SEQ ID NO: 442421
ucauguaaguaacaaccca

SEQ ID NO: 442423 - RNA, 19 nt, Artificial Sequence
  Description of Artificial Sequence: Synthetic oligonucleotide
  Sense strand starting at position 656 of SEQ ID NO: 316815
gggcaaauuguuuaagguc

SEQ ID NO: 442424 - RNA, 19 nt, Artificial Sequence
  Description of Artificial Sequence: Synthetic oligonucleotide
  Antisense Strand to SEQ ID NO: 442423
gaccuuaaacaauuugccc

SEQ ID NO: 442425 - RNA, 19 nt, Artificial Sequence
  Description of Artificial Sequence: Synthetic oligonucleotide
  Sense strand starting at position 678 of SEQ ID NO: 316815
caaggauuguagguggaua

SEQ ID NO: 442426 - RNA, 19 nt, Artificial Sequence
  Description of Artificial Sequence: Synthetic oligonucleotide
  Antisense Strand to SEQ ID NO: 442425
uauccaccuacaauccuug

SEQ ID NO: 442427 - RNA, 19 nt, Artificial Sequence
  Description of Artificial Sequence: Synthetic oligonucleotide
  Sense strand starting at position 821 of SEQ ID NO: 316815
gauacacuugacugaguca

SEQ ID NO: 442428 - RNA, 19 nt, Artificial Sequence
  Description of Artificial Sequence: Synthetic oligonucleotide
  Antisense Strand to SEQ ID NO: 442427
ugacucagucaaguguauc

SEQ ID NO: 442429 - RNA, 19 nt, Artificial Sequence
  Description of Artificial Sequence: Synthetic oligonucleotide
  Sense strand starting at position 824 of SEQ ID NO: 316815
acacuugacugagucauga

SEQ ID NO: 442430 - RNA, 19 nt, Artificial Sequence
  Description of Artificial Sequence: Synthetic oligonucleotide
  Antisense Strand to SEQ ID NO: 442429
ucaugacucagucaagugu

SEQ ID NO: 442431 - RNA, 19 nt, Artificial Sequence
  Description of Artificial Sequence: Synthetic oligonucleotide
  Sense strand starting at position 852 of SEQ ID NO: 316815
ucauuuaccgagugccuaa

SEQ ID NO: 442432 - RNA, 19 nt, Artificial Sequence
  Description of Artificial Sequence: Synthetic oligonucleotide
  Antisense Strand to SEQ ID NO: 442431
uuaggcacucgguaaauga

SEQ ID NO: 442433 - RNA, 19 nt, Artificial Sequence
  Description of Artificial Sequence: Synthetic oligonucleotide
  Sense strand starting at position 995 of SEQ ID NO: 316815
agaucucucugaguccaaa

SEQ ID NO: 442434 - RNA, 19 nt, Artificial Sequence
  Description of Artificial Sequence: Synthetic oligonucleotide
  Antisense Strand to SEQ ID NO: 442433
uuuggacucagagagaucu

SEQ ID NO: 442435 - RNA, 19 nt, Artificial Sequence
  Description of Artificial Sequence: Synthetic oligonucleotide
  Sense strand starting at position 1198 of SEQ ID NO: 316815
guugguguugaauagaaag

SEQ ID NO: 442436 - RNA, 19 nt, Artificial Sequence
  Description of Artificial Sequence: Synthetic oligonucleotide
  Antisense Strand to SEQ ID NO: 442435
cuuucuauucaacaccaac

SEQ ID NO: 442437 - RNA, 19 nt, Artificial Sequence
  Description of Artificial Sequence: Synthetic oligonucleotide
  Sense strand starting at position 1200 of SEQ ID NO: 316815
ugguguugaauagaaagca

SEQ ID NO: 442438 - RNA, 19 nt, Artificial Sequence
  Description of Artificial Sequence: Synthetic oligonucleotide
  Antisense Strand to SEQ ID NO: 442437
ugcuuucuauucaacacca

SEQ ID NO: 442439 - RNA, 19 nt, Artificial Sequence
  Description of Artificial Sequence: Synthetic oligonucleotide
  Sense strand starting at position 1501 of SEQ ID NO: 316815
ggacaaauucucugauuau

SEQ ID NO: 442440 - RNA, 19 nt, Artificial Sequence
  Description of Artificial Sequence: Synthetic oligonucleotide
  Antisense Strand to SEQ ID NO: 442439
auaaucagagaauuugucc

SEQ ID NO: 442441 - RNA, 19 nt, Artificial Sequence
  Description of Artificial Sequence: Synthetic oligonucleotide
  Sense strand starting at position 1523 of SEQ ID NO: 316815
uuggauccuuaauugguua

SEQ ID NO: 442442 - RNA, 19 nt, Artificial Sequence
  Description of Artificial Sequence: Synthetic oligonucleotide
  Antisense Strand to SEQ ID NO: 442441
uaaccaauuaaggauccaa

SEQ ID NO: 442443 - RNA, 19 nt, Artificial Sequence
  Description of Artificial Sequence: Synthetic oligonucleotide
  Sense strand starting at position 1534 of SEQ ID NO: 316815
auugguuagccacagauau

SEQ ID NO: 442444 - RNA, 19 nt, Artificial Sequence
  Description of Artificial Sequence: Synthetic oligonucleotide
  Antisense Strand to SEQ ID NO: 442443
auaucuguggcuaaccaau

SEQ ID NO: 442445 - RNA, 19 nt, Artificial Sequence
  Description of Artificial Sequence: Synthetic oligonucleotide
  Sense strand starting at position 1594 of SEQ ID NO: 316815
gagauagaguucucauuau

SEQ ID NO: 442446 - RNA, 19 nt, Artificial Sequence
  Description of Artificial Sequence: Synthetic oligonucleotide
  Antisense Strand to SEQ ID NO: 442445
auaaugagaacucuaucuc

SEQ ID NO: 442447 - RNA, 19 nt, Artificial Sequence
  Description of Artificial Sequence: Synthetic oligonucleotide
  Sense strand starting at position 1682 of SEQ ID NO: 316815
uuugacuuggcagaucgaa

SEQ ID NO: 442448 - RNA, 19 nt, Artificial Sequence
  Description of Artificial Sequence: Synthetic oligonucleotide
  Antisense Strand to SEQ ID NO: 442447
uucgaucugccaagucaaa

SEQ ID NO: 442449 - RNA, 19 nt, Artificial Sequence
  Description of Artificial Sequence: Synthetic oligonucleotide
  Sense strand starting at position 1691 of SEQ ID NO: 316815
gcagaucgaaguuaugaac

SEQ ID NO: 442450 - RNA, 19 nt, Artificial Sequence
  Description of Artificial Sequence: Synthetic oligonucleotide
  Antisense Strand to SEQ ID NO: 442449
guucauaacuucgaucugc

SEQ ID NO: 442451 - RNA, 19 nt, Artificial Sequence
  Description of Artificial Sequence: Synthetic oligonucleotide
  Sense strand starting at position 1712 of SEQ ID NO: 316815
uggauaacuggucauguca

SEQ ID NO: 442452 - RNA, 19 nt, Artificial Sequence
  Description of Artificial Sequence: Synthetic oligonucleotide
  Antisense Strand to SEQ ID NO: 442451
ugacaugaccaguuaucca

SEQ ID NO: 442453 - RNA, 19 nt, Artificial Sequence
  Description of Artificial Sequence: Synthetic oligonucleotide
  Sense strand starting at position 1720 of SEQ ID NO: 316815
uggucaugucacugagaag

SEQ ID NO: 442454 - RNA, 19 nt, Artificial Sequence
  Description of Artificial Sequence: Synthetic oligonucleotide
  Antisense Strand to SEQ ID NO: 442453
cuucucagugacaugacca

SEQ ID NO: 442455 - RNA, 19 nt, Artificial Sequence
  Description of Artificial Sequence: Synthetic oligonucleotide
  Sense strand starting at position 1790 of SEQ ID NO: 316815
uuaucuggcuaaucaagau

SEQ ID NO: 442456 - RNA, 19 nt, Artificial Sequence
  Description of Artificial Sequence: Synthetic oligonucleotide
  Antisense Strand to SEQ ID NO: 442455
aucuugauuagccagauaa

SEQ ID NO: 442457 - RNA, 19 nt, Artificial Sequence
  Description of Artificial Sequence: Synthetic oligonucleotide
  Sense strand starting at position 1794 of SEQ ID NO: 316815
cuggcuaaucaagauucuu

SEQ ID NO: 442458 - RNA, 19 nt, Artificial Sequence
  Description of Artificial Sequence: Synthetic oligonucleotide
  Antisense Strand to SEQ ID NO: 442457
aagaaucuugauuagccag

SEQ ID NO: 442459 - RNA, 19 nt, Artificial Sequence
  Description of Artificial Sequence: Synthetic oligonucleotide
  Sense strand starting at position 1946 of SEQ ID NO: 316815
aagucacuccuguauugga

SEQ ID NO: 442460 - RNA, 19 nt, Artificial Sequence
  Description of Artificial Sequence: Synthetic oligonucleotide
  Antisense Strand to SEQ ID NO: 442459
uccaauacaggagugacuu

SEQ ID NO: 442461 - RNA, 19 nt, Artificial Sequence
  Description of Artificial Sequence: Synthetic oligonucleotide
  Sense strand starting at position 2103 of SEQ ID NO: 316815
gggaaacccuagucucaga

SEQ ID NO: 442462 - RNA, 19 nt, Artificial Sequence
  Description of Artificial Sequence: Synthetic oligonucleotide
  Antisense Strand to SEQ ID NO: 442461
ucugagacuaggguuuccc

SEQ ID NO: 442463 - RNA, 19 nt, Artificial Sequence
  Description of Artificial Sequence: Synthetic oligonucleotide
  Sense strand starting at position 2157 of SEQ ID NO: 316815
cacauaaaugggugguuua

SEQ ID NO: 442464 - RNA, 19 nt, Artificial Sequence
  Description of Artificial Sequence: Synthetic oligonucleotide
  Antisense Strand to SEQ ID NO: 442463
uaaaccacccauuuaugug

SEQ ID NO: 442465 - RNA, 19 nt, Artificial Sequence
  Description of Artificial Sequence: Synthetic oligonucleotide
  Sense strand starting at position 2158 of SEQ ID NO: 316815
acauaaaugggugguuuau

SEQ ID NO: 442466 - RNA, 19 nt, Artificial Sequence
  Description of Artificial Sequence: Synthetic oligonucleotide
  Antisense Strand to SEQ ID NO: 442465
auaaaccacccauuuaugu

SEQ ID NO: 442467 - RNA, 19 nt, Artificial Sequence
  Description of Artificial Sequence: Synthetic oligonucleotide
  Sense strand starting at position 2235 of SEQ ID NO: 316815
cugugugaagaauagguua

SEQ ID NO: 442468 - RNA, 19 nt, Artificial Sequence
  Description of Artificial Sequence: Synthetic oligonucleotide
  Antisense Strand to SEQ ID NO: 442467
uaaccuauucuucacacag

SEQ ID NO: 442469 - RNA, 19 nt, Artificial Sequence
  Description of Artificial Sequence: Synthetic oligonucleotide
  Sense strand starting at position 2237 of SEQ ID NO: 316815
gugugaagaauagguuaua

SEQ ID NO: 442470 - RNA, 19 nt, Artificial Sequence
  Description of Artificial Sequence: Synthetic oligonucleotide
  Antisense Strand to SEQ ID NO: 442469
uauaaccuauucuucacac

SEQ ID NO: 442471 - RNA, 19 nt, Artificial Sequence
  Description of Artificial Sequence: Synthetic oligonucleotide
  Sense strand starting at position 2238 of SEQ ID NO: 316815
ugugaagaauagguuauau

SEQ ID NO: 442472 - RNA, 19 nt, Artificial Sequence
  Description of Artificial Sequence: Synthetic oligonucleotide
  Antisense Strand to SEQ ID NO: 442471
auauaaccuauucuucaca

SEQ ID NO: 442473 - RNA, 19 nt, Artificial Sequence
  Description of Artificial Sequence: Synthetic oligonucleotide
  Sense strand starting at position 2295 of SEQ ID NO: 316815
gugguuuccagaugggaaa

SEQ ID NO: 442474 - RNA, 19 nt, Artificial Sequence
  Description of Artificial Sequence: Synthetic oligonucleotide
  Antisense Strand to SEQ ID NO: 442473
uuucccaucuggaaaccac

SEQ ID NO: 442475 - RNA, 19 nt, Artificial Sequence
  Description of Artificial Sequence: Synthetic oligonucleotide
  Sense strand starting at position 2296 of SEQ ID NO: 316815
ugguuuccagaugggaaau

SEQ ID NO: 442476 - RNA, 19 nt, Artificial Sequence
  Description of Artificial Sequence: Synthetic oligonucleotide
  Antisense Strand to SEQ ID NO: 442475
auuucccaucuggaaacca

SEQ ID NO: 442477 - RNA, 19 nt, Artificial Sequence
  Description of Artificial Sequence: Synthetic oligonucleotide
  Sense strand starting at position 2376 of SEQ ID NO: 316815
uguauaauagauggcuaca

SEQ ID NO: 442478 - RNA, 19 nt, Artificial Sequence
  Description of Artificial Sequence: Synthetic oligonucleotide
  Antisense Strand to SEQ ID NO: 442477
uguagccaucuauuauaca

SEQ ID NO: 442479 - RNA, 19 nt, Artificial Sequence
  Description of Artificial Sequence: Synthetic oligonucleotide
  Sense strand starting at position 2563 of SEQ ID NO: 316815
ccaaauuaacaguggcuaa

SEQ ID NO: 442480 - RNA, 19 nt, Artificial Sequence
  Description of Artificial Sequence: Synthetic oligonucleotide
  Antisense Strand to SEQ ID NO: 442479
uuagccacuguuaauuugg

SEQ ID NO: 442481 - RNA, 19 nt, Artificial Sequence
  Description of Artificial Sequence: Synthetic oligonucleotide
  Sense strand starting at position 2968 of SEQ ID NO: 316815
uggacuuggugaucaggga

SEQ ID NO: 442482 - RNA, 19 nt, Artificial Sequence
  Description of Artificial Sequence: Synthetic oligonucleotide
  Antisense Strand to SEQ ID NO: 442481
ucccugaucaccaagucca

SEQ ID NO: 442483 - RNA, 19 nt, Artificial Sequence
  Description of Artificial Sequence: Synthetic oligonucleotide
  Sense strand starting at position 3669 of SEQ ID NO: 316815
cugagagauguagguggau

SEQ ID NO: 442484 - RNA, 19 nt, Artificial Sequence
  Description of Artificial Sequence: Synthetic oligonucleotide
  Antisense Strand to SEQ ID NO: 442483
auccaccuacaucucucag

SEQ ID NO: 442485 - RNA, 19 nt, Artificial Sequence
  Description of Artificial Sequence: Synthetic oligonucleotide
  Sense strand starting at position 3671 of SEQ ID NO: 316815
gagagauguagguggauua

SEQ ID NO: 442486 - RNA, 19 nt, Artificial Sequence
  Description of Artificial Sequence: Synthetic oligonucleotide
  Antisense Strand to SEQ ID NO: 442485
uaauccaccuacaucucuc

SEQ ID NO: 442487 - RNA, 19 nt, Artificial Sequence
  Description of Artificial Sequence: Synthetic oligonucleotide
  Sense strand starting at position 3683 of SEQ ID NO: 316815
uggauuagcacuuggauag

SEQ ID NO: 442488 - RNA, 19 nt, Artificial Sequence
  Description of Artificial Sequence: Synthetic oligonucleotide
  Antisense Strand to SEQ ID NO: 442487
cuauccaagugcuaaucca

SEQ ID NO: 442489 - RNA, 19 nt, Artificial Sequence
  Description of Artificial Sequence: Synthetic oligonucleotide
  Sense strand starting at position 3981 of SEQ ID NO: 316815
cuagcuaaagauuggagau

SEQ ID NO: 442490 - RNA, 19 nt, Artificial Sequence
  Description of Artificial Sequence: Synthetic oligonucleotide
  Antisense Strand to SEQ ID NO: 442489
aucuccaaucuuuagcuag

SEQ ID NO: 442491 - RNA, 19 nt, Artificial Sequence
  Description of Artificial Sequence: Synthetic oligonucleotide
  Sense strand starting at position 3983 of SEQ ID NO: 316815
agcuaaagauuggagauuu

SEQ ID NO: 442492 - RNA, 19 nt, Artificial Sequence
  Description of Artificial Sequence: Synthetic oligonucleotide
  Antisense Strand to SEQ ID NO: 442491
aaaucuccaaucuuuagcu

SEQ ID NO: 442493 - RNA, 19 nt, Artificial Sequence
  Description of Artificial Sequence: Synthetic oligonucleotide
  Sense strand starting at position 67 of SEQ ID NO: 316816
gucucuuccgaagacaaga

SEQ ID NO: 442494 - RNA, 19 nt, Artificial Sequence
  Description of Artificial Sequence: Synthetic oligonucleotide
  Antisense Strand to SEQ ID NO: 442493
ucuugucuucggaagagac

SEQ ID NO: 442495 - RNA, 19 nt, Artificial Sequence
  Description of Artificial Sequence: Synthetic oligonucleotide
  Sense strand starting at position 84 of SEQ ID NO: 316816
gaggaaagcaugggacuuu

SEQ ID NO: 442496 - RNA, 19 nt, Artificial Sequence
  Description of Artificial Sequence: Synthetic oligonucleotide
  Antisense Strand to SEQ ID NO: 442495
aaagucccaugcuuuccuc

SEQ ID NO: 442497 - RNA, 19 nt, Artificial Sequence
  Description of Artificial Sequence: Synthetic oligonucleotide
  Sense strand starting at position 272 of SEQ ID NO: 316816
ccauuauuaugcuuuagga

SEQ ID NO: 442498 - RNA, 19 nt, Artificial Sequence
  Description of Artificial Sequence: Synthetic oligonucleotide
  Antisense Strand to SEQ ID NO: 442497
uccuaaagcauaauaaugg

SEQ ID NO: 442499 - RNA, 19 nt, Artificial Sequence
  Description of Artificial Sequence: Synthetic oligonucleotide
  Sense strand starting at position 443 of SEQ ID NO: 316816
gcccauagauuggucuaga

SEQ ID NO: 442500 - RNA, 19 nt, Artificial Sequence
  Description of Artificial Sequence: Synthetic oligonucleotide
  Antisense Strand to SEQ ID NO: 442499
ucuagaccaaucuaugggc

SEQ ID NO: 442501 - RNA, 19 nt, Artificial Sequence
  Description of Artificial Sequence: Synthetic oligonucleotide
  Sense strand starting at position 444 of SEQ ID NO: 316816
cccauagauuggucuagaa

SEQ ID NO: 442502 - RNA, 19 nt, Artificial Sequence
  Description of Artificial Sequence: Synthetic oligonucleotide
  Antisense Strand to SEQ ID NO: 442501
uucuagaccaaucuauggg

SEQ ID NO: 442503 - RNA, 19 nt, Artificial Sequence
  Description of Artificial Sequence: Synthetic oligonucleotide
  Sense strand starting at position 448 of SEQ ID NO: 316816
uagauuggucuagaaugca

SEQ ID NO: 442504 - RNA, 19 nt, Artificial Sequence
  Description of Artificial Sequence: Synthetic oligonucleotide
  Antisense Strand to SEQ ID NO: 442503
ugcauucuagaccaaucua

SEQ ID NO: 442505 - RNA, 19 nt, Artificial Sequence
  Description of Artificial Sequence: Synthetic oligonucleotide
  Sense strand starting at position 463 of SEQ ID NO: 316816
ugcagaguucagggaauuc

SEQ ID NO: 442506 - RNA, 19 nt, Artificial Sequence
  Description of Artificial Sequence: Synthetic oligonucleotide
  Antisense Strand to SEQ ID NO: 442505
gaauucccugaacucugca

SEQ ID NO: 442507 - RNA, 19 nt, Artificial Sequence
  Description of Artificial Sequence: Synthetic oligonucleotide
  Sense strand starting at position 839 of SEQ ID NO: 316816
uuggcuaaauauucuugau

SEQ ID NO: 442508 - RNA, 19 nt, Artificial Sequence
  Description of Artificial Sequence: Synthetic oligonucleotide
  Antisense Strand to SEQ ID NO: 442507
aucaagaauauuuagccaa

SEQ ID NO: 442509 - RNA, 19 nt, Artificial Sequence
  Description of Artificial Sequence: Synthetic oligonucleotide
  Sense strand starting at position 1203 of SEQ ID NO: 316816
aggucauuauuguuuaauc

SEQ ID NO: 442510 - RNA, 19 nt, Artificial Sequence
  Description of Artificial Sequence: Synthetic oligonucleotide
  Antisense Strand to SEQ ID NO: 442509
gauuaaacaauaaugaccu

SEQ ID NO: 442511 - RNA, 19 nt, Artificial Sequence
  Description of Artificial Sequence: Synthetic oligonucleotide
  Sense strand starting at position 1204 of SEQ ID NO: 316816
ggucauuauuguuuaauca

SEQ ID NO: 442512 - RNA, 19 nt, Artificial Sequence
  Description of Artificial Sequence: Synthetic oligonucleotide
  Antisense Strand to SEQ ID NO: 442511
ugauuaaacaauaaugacc

SEQ ID NO: 442513 - RNA, 19 nt, Artificial Sequence
  Description of Artificial Sequence: Synthetic oligonucleotide
  Sense strand starting at position 1247 of SEQ ID NO: 316816
guaucuaagccacagcuau

SEQ ID NO: 442514 - RNA, 19 nt, Artificial Sequence
  Description of Artificial Sequence: Synthetic oligonucleotide
  Antisense Strand to SEQ ID NO: 442513
auagcuguggcuuagauac

SEQ ID NO: 442515 - RNA, 19 nt, Artificial Sequence
  Description of Artificial Sequence: Synthetic oligonucleotide
  Sense strand starting at position 1364 of SEQ ID NO: 316816
gccuuuaaacaaugugacu

SEQ ID NO: 442516 - RNA, 19 nt, Artificial Sequence
  Description of Artificial Sequence: Synthetic oligonucleotide
  Antisense Strand to SEQ ID NO: 442515
agucacauuguuuaaaggc

SEQ ID NO: 442517 - RNA, 19 nt, Artificial Sequence
  Description of Artificial Sequence: Synthetic oligonucleotide
  Sense strand starting at position 1399 of SEQ ID NO: 316816
guaugucuggucuaccaga

SEQ ID NO: 442518 - RNA, 19 nt, Artificial Sequence
  Description of Artificial Sequence: Synthetic oligonucleotide
  Antisense Strand to SEQ ID NO: 442517
ucugguagaccagacauac

SEQ ID NO: 442519 - RNA, 19 nt, Artificial Sequence
  Description of Artificial Sequence: Synthetic oligonucleotide
  Sense strand starting at position 1460 of SEQ ID NO: 316816
gcgggugcagacuaauuaa

SEQ ID NO: 442520 - RNA, 19 nt, Artificial Sequence
  Description of Artificial Sequence: Synthetic oligonucleotide
  Antisense Strand to SEQ ID NO: 442519
uuaauuagucugcacccgc

SEQ ID NO: 442521 - RNA, 19 nt, Artificial Sequence
  Description of Artificial Sequence: Synthetic oligonucleotide
  Sense strand starting at position 1463 of SEQ ID NO: 316816
ggugcagacuaauuaauaa

SEQ ID NO: 442522 - RNA, 19 nt, Artificial Sequence
  Description of Artificial Sequence: Synthetic oligonucleotide
  Antisense Strand to SEQ ID NO: 442521
uuauuaauuagucugcacc

SEQ ID NO: 442523 - RNA, 19 nt, Artificial Sequence
  Description of Artificial Sequence: Synthetic oligonucleotide
  Sense strand starting at position 1506 of SEQ ID NO: 316816
gcuggaguccagcauuaau

SEQ ID NO: 442524 - RNA, 19 nt, Artificial Sequence
  Description of Artificial Sequence: Synthetic oligonucleotide
  Antisense Strand to SEQ ID NO: 442523
auuaaugcuggacuccagc

SEQ ID NO: 442525 - RNA, 19 nt, Artificial Sequence
  Description of Artificial Sequence: Synthetic oligonucleotide
  Sense strand starting at position 1509 of SEQ ID NO: 316816
ggaguccagcauuaauaau

SEQ ID NO: 442526 - RNA, 19 nt, Artificial Sequence
  Description of Artificial Sequence: Synthetic oligonucleotide
  Antisense Strand to SEQ ID NO: 442525
auuauuaaugcuggacucc

SEQ ID NO: 442527 - RNA, 19 nt, Artificial Sequence
  Description of Artificial Sequence: Synthetic oligonucleotide
  Sense strand starting at position 1769 of SEQ ID NO: 316816
gguaaauaaauaugcggau

SEQ ID NO: 442528 - RNA, 19 nt, Artificial Sequence
  Description of Artificial Sequence: Synthetic oligonucleotide
  Antisense Strand to SEQ ID NO: 442527
auccgcauauuuauuuacc

SEQ ID NO: 442529 - RNA, 19 nt, Artificial Sequence
  Description of Artificial Sequence: Synthetic oligonucleotide
  Sense strand starting at position 1816 of SEQ ID NO: 316816
uuucuuguugcagagagaa

SEQ ID NO: 442530 - RNA, 19 nt, Artificial Sequence
  Description of Artificial Sequence: Synthetic oligonucleotide
  Antisense Strand to SEQ ID NO: 442529
uucucucugcaacaagaaa

SEQ ID NO: 442531 - RNA, 19 nt, Artificial Sequence
  Description of Artificial Sequence: Synthetic oligonucleotide
  Sense strand starting at position 2233 of SEQ ID NO: 316816
uacugaugauuggcugcaa

SEQ ID NO: 442532 - RNA, 19 nt, Artificial Sequence
  Description of Artificial Sequence: Synthetic oligonucleotide
  Antisense Strand to SEQ ID NO: 442531
uugcagccaaucaucagua

SEQ ID NO: 442533 - RNA, 19 nt, Artificial Sequence
  Description of Artificial Sequence: Synthetic oligonucleotide
  Sense strand starting at position 2234 of SEQ ID NO: 316816
acugaugauuggcugcaaa

SEQ ID NO: 442534 - RNA, 19 nt, Artificial Sequence
  Description of Artificial Sequence: Synthetic oligonucleotide
  Antisense Strand to SEQ ID NO: 442533
uuugcagccaaucaucagu

SEQ ID NO: 442535 - RNA, 19 nt, Artificial Sequence
  Description of Artificial Sequence: Synthetic oligonucleotide
  Sense strand starting at position 2237 of SEQ ID NO: 316816
gaugauuggcugcaaauua

SEQ ID NO: 442536 - RNA, 19 nt, Artificial Sequence
  Description of Artificial Sequence: Synthetic oligonucleotide
  Antisense Strand to SEQ ID NO: 442535
uaauuugcagccaaucauc

SEQ ID NO: 442537 - RNA, 19 nt, Artificial Sequence
  Description of Artificial Sequence: Synthetic oligonucleotide
  Sense strand starting at position 2414 of SEQ ID NO: 316816
uuugcucucggagauaauu

SEQ ID NO: 442538 - RNA, 19 nt, Artificial Sequence
  Description of Artificial Sequence: Synthetic oligonucleotide
  Antisense Strand to SEQ ID NO: 442537
aauuaucuccgagagcaaa

SEQ ID NO: 442539 - RNA, 19 nt, Artificial Sequence
  Description of Artificial Sequence: Synthetic oligonucleotide
  Sense strand starting at position 2422 of SEQ ID NO: 316816
cggagauaauuguuuggaa

SEQ ID NO: 442540 - RNA, 19 nt, Artificial Sequence
  Description of Artificial Sequence: Synthetic oligonucleotide
  Antisense Strand to SEQ ID NO: 442539
uuccaaacaauuaucuccg

SEQ ID NO: 442541 - RNA, 19 nt, Artificial Sequence
  Description of Artificial Sequence: Synthetic oligonucleotide
  Sense strand starting at position 2513 of SEQ ID NO: 316816
uaaauaaacuugucuggga

SEQ ID NO: 442542 - RNA, 19 nt, Artificial Sequence
  Description of Artificial Sequence: Synthetic oligonucleotide
  Antisense Strand to SEQ ID NO: 442541
ucccagacaaguuuauuua

SEQ ID NO: 442543 - RNA, 19 nt, Artificial Sequence
  Description of Artificial Sequence: Synthetic oligonucleotide
  Sense strand starting at position 2514 of SEQ ID NO: 316816
aaauaaacuugucugggau

SEQ ID NO: 442544 - RNA, 19 nt, Artificial Sequence
  Description of Artificial Sequence: Synthetic oligonucleotide
  Antisense Strand to SEQ ID NO: 442543
aucccagacaaguuuauuu

SEQ ID NO: 442545 - RNA, 19 nt, Artificial Sequence
  Description of Artificial Sequence: Synthetic oligonucleotide
  Sense strand starting at position 2515 of SEQ ID NO: 316816
aauaaacuugucugggauu

SEQ ID NO: 442546 - RNA, 19 nt, Artificial Sequence
  Description of Artificial Sequence: Synthetic oligonucleotide
  Antisense Strand to SEQ ID NO: 442545
aaucccagacaaguuuauu

SEQ ID NO: 442547 - RNA, 19 nt, Artificial Sequence
  Description of Artificial Sequence: Synthetic oligonucleotide
  Sense strand starting at position 2586 of SEQ ID NO: 316816
uuugaagaaugcucuuagu

SEQ ID NO: 442548 - RNA, 19 nt, Artificial Sequence
  Description of Artificial Sequence: Synthetic oligonucleotide
  Antisense Strand to SEQ ID NO: 442547
acuaagagcauucuucaaa

SEQ ID NO: 442549 - RNA, 19 nt, Artificial Sequence
  Description of Artificial Sequence: Synthetic oligonucleotide
  Sense strand starting at position 2639 of SEQ ID NO: 316816
ugguguacccaggaagacu

SEQ ID NO: 442550 - RNA, 19 nt, Artificial Sequence
  Description of Artificial Sequence: Synthetic oligonucleotide
  Antisense Strand to SEQ ID NO: 442549
agucuuccuggguacacca

SEQ ID NO: 442551 - RNA, 19 nt, Artificial Sequence
  Description of Artificial Sequence: Synthetic oligonucleotide
  Sense strand starting at position 2731 of SEQ ID NO: 316816
acuauuaugccagaaugua

SEQ ID NO: 442552 - RNA, 19 nt, Artificial Sequence
  Description of Artificial Sequence: Synthetic oligonucleotide
  Antisense Strand to SEQ ID NO: 442551
uacauucuggcauaauagu

SEQ ID NO: 442553 - RNA, 19 nt, Artificial Sequence
  Description of Artificial Sequence: Synthetic oligonucleotide
  Sense strand starting at position 2852 of SEQ ID NO: 316816
uccaucugguaguuccaaa

SEQ ID NO: 442554 - RNA, 19 nt, Artificial Sequence
  Description of Artificial Sequence: Synthetic oligonucleotide
  Antisense Strand to SEQ ID NO: 442553
uuuggaacuaccagaugga

SEQ ID NO: 442555 - RNA, 19 nt, Artificial Sequence
  Description of Artificial Sequence: Synthetic oligonucleotide
  Sense strand starting at position 3033 of SEQ ID NO: 316816
cggcacgucaaauauaaau

SEQ ID NO: 442556 - RNA, 19 nt, Artificial Sequence
  Description of Artificial Sequence: Synthetic oligonucleotide
  Antisense Strand to SEQ ID NO: 442555
auuuauauuugacgugccg

SEQ ID NO: 442557 - RNA, 19 nt, Artificial Sequence
  Description of Artificial Sequence: Synthetic oligonucleotide
  Sense strand starting at position 3273 of SEQ ID NO: 316816
gguguuaucaagcagagua

SEQ ID NO: 442558 - RNA, 19 nt, Artificial Sequence
  Description of Artificial Sequence: Synthetic oligonucleotide
  Antisense Strand to SEQ ID NO: 442557
uacucugcuugauaacacc

SEQ ID NO: 442559 - RNA, 19 nt, Artificial Sequence
  Description of Artificial Sequence: Synthetic oligonucleotide
  Sense strand starting at position 3275 of SEQ ID NO: 316816
uguuaucaagcagaguaca

SEQ ID NO: 442560 - RNA, 19 nt, Artificial Sequence
  Description of Artificial Sequence: Synthetic oligonucleotide
  Antisense Strand to SEQ ID NO: 442559
uguacucugcuugauaaca

SEQ ID NO: 442561 - RNA, 19 nt, Artificial Sequence
  Description of Artificial Sequence: Synthetic oligonucleotide
  Sense strand starting at position 3313 of SEQ ID NO: 316816
guguuuauucuagaguaau

SEQ ID NO: 442562 - RNA, 19 nt, Artificial Sequence
  Description of Artificial Sequence: Synthetic oligonucleotide
  Antisense Strand to SEQ ID NO: 442561
auuacucuagaauaaacac

SEQ ID NO: 442563 - RNA, 19 nt, Artificial Sequence
  Description of Artificial Sequence: Synthetic oligonucleotide
  Sense strand starting at position 3316 of SEQ ID NO: 316816
uuuauucuagaguaaugca

SEQ ID NO: 442564 - RNA, 19 nt, Artificial Sequence
  Description of Artificial Sequence: Synthetic oligonucleotide
  Antisense Strand to SEQ ID NO: 442563
ugcauuacucuagaauaaa

SEQ ID NO: 442565 - RNA, 19 nt, Artificial Sequence
  Description of Artificial Sequence: Synthetic oligonucleotide
  Sense strand starting at position 3543 of SEQ ID NO: 316816
ucaagagugggcuacuauu

SEQ ID NO: 442566 - RNA, 19 nt, Artificial Sequence
  Description of Artificial Sequence: Synthetic oligonucleotide
  Antisense Strand to SEQ ID NO: 442565
aauaguagcccacucuuga

SEQ ID NO: 442567 - RNA, 19 nt, Artificial Sequence
  Description of Artificial Sequence: Synthetic oligonucleotide
  Sense strand starting at position 3585 of SEQ ID NO: 316816
gugacucauugauuaauau

SEQ ID NO: 442568 - RNA, 19 nt, Artificial Sequence
  Description of Artificial Sequence: Synthetic oligonucleotide
  Antisense Strand to SEQ ID NO: 442567
auauuaaucaaugagucac

SEQ ID NO: 442569 - RNA, 19 nt, Artificial Sequence
  Description of Artificial Sequence: Synthetic oligonucleotide
  Sense strand starting at position 3887 of SEQ ID NO: 316816
auaucaguccaauguuaga

SEQ ID NO: 442570 - RNA, 19 nt, Artificial Sequence
  Description of Artificial Sequence: Synthetic oligonucleotide
  Antisense Strand to SEQ ID NO: 442569
ucuaacauuggacugauau

SEQ ID NO: 442571 - RNA, 19 nt, Artificial Sequence
  Description of Artificial Sequence: Synthetic oligonucleotide
  Sense strand starting at position 3892 of SEQ ID NO: 316816
aguccaauguuagaaauuu

SEQ ID NO: 442572 - RNA, 19 nt, Artificial Sequence
  Description of Artificial Sequence: Synthetic oligonucleotide
  Antisense Strand to SEQ ID NO: 442571
aaauuucuaacauuggacu

SEQ ID NO: 442573 - RNA, 19 nt, Artificial Sequence
  Description of Artificial Sequence: Synthetic oligonucleotide
  Sense strand starting at position 47 of SEQ ID NO: 316817
ggauaaagaucauaauacu

SEQ ID NO: 442574 - RNA, 19 nt, Artificial Sequence
  Description of Artificial Sequence: Synthetic oligonucleotide
  Antisense Strand to SEQ ID NO: 442573
aguauuaugaucuuuaucc

SEQ ID NO: 442575 - RNA, 19 nt, Artificial Sequence
  Description of Artificial Sequence: Synthetic oligonucleotide
  Sense strand starting at position 343 of SEQ ID NO: 316817
cugagacuuucugucccua

SEQ ID NO: 442576 - RNA, 19 nt, Artificial Sequence
  Description of Artificial Sequence: Synthetic oligonucleotide
  Antisense Strand to SEQ ID NO: 442575
uagggacagaaagucucag

SEQ ID NO: 442577 - RNA, 19 nt, Artificial Sequence
  Description of Artificial Sequence: Synthetic oligonucleotide
  Sense strand starting at position 345 of SEQ ID NO: 316817
gagacuuucugucccuaug

SEQ ID NO: 442578 - RNA, 19 nt, Artificial Sequence
  Description of Artificial Sequence: Synthetic oligonucleotide
  Antisense Strand to SEQ ID NO: 442577
cauagggacagaaagucuc

SEQ ID NO: 442579 - RNA, 19 nt, Artificial Sequence
  Description of Artificial Sequence: Synthetic oligonucleotide
  Sense strand starting at position 556 of SEQ ID NO: 316817
augacucuguccuccuaga

SEQ ID NO: 442580 - RNA, 19 nt, Artificial Sequence
  Description of Artificial Sequence: Synthetic oligonucleotide
  Antisense Strand to SEQ ID NO: 442579
ucuaggaggacagagucau

SEQ ID NO: 442581 - RNA, 19 nt, Artificial Sequence
  Description of Artificial Sequence: Synthetic oligonucleotide
  Sense strand starting at position 574 of SEQ ID NO: 316817
augucagaacaguggugaa

SEQ ID NO: 442582 - RNA, 19 nt, Artificial Sequence
  Description of Artificial Sequence: Synthetic oligonucleotide
  Antisense Strand to SEQ ID NO: 442581
uucaccacuguucugacau

SEQ ID NO: 442583 - RNA, 19 nt, Artificial Sequence
  Description of Artificial Sequence: Synthetic oligonucleotide
  Sense strand starting at position 611 of SEQ ID NO: 316817
aggucauaaaguuauguag

SEQ ID NO: 442584 - RNA, 19 nt, Artificial Sequence
  Description of Artificial Sequence: Synthetic oligonucleotide
  Antisense Strand to SEQ ID NO: 442583
cuacauaacuuuaugaccu

SEQ ID NO: 442585 - RNA, 19 nt, Artificial Sequence
  Description of Artificial Sequence: Synthetic oligonucleotide
  Sense strand starting at position 619 of SEQ ID NO: 316817
aaguuauguagcgucaguu

SEQ ID NO: 442586 - RNA, 19 nt, Artificial Sequence
  Description of Artificial Sequence: Synthetic oligonucleotide
  Antisense Strand to SEQ ID NO: 442585
aacugacgcuacauaacuu

SEQ ID NO: 442587 - RNA, 19 nt, Artificial Sequence
  Description of Artificial Sequence: Synthetic oligonucleotide
  Sense strand starting at position 620 of SEQ ID NO: 316817
aguuauguagcgucaguuu

SEQ ID NO: 442588 - RNA, 19 nt, Artificial Sequence
  Description of Artificial Sequence: Synthetic oligonucleotide
  Antisense Strand to SEQ ID NO: 442587
aaacugacgcuacauaacu

SEQ ID NO: 442589 - RNA, 19 nt, Artificial Sequence
  Description of Artificial Sequence: Synthetic oligonucleotide
  Sense strand starting at position 755 of SEQ ID NO: 316817
cugacugaugcguaggagu

SEQ ID NO: 442590 - RNA, 19 nt, Artificial Sequence
  Description of Artificial Sequence: Synthetic oligonucleotide
  Antisense Strand to SEQ ID NO: 442589
acuccuacgcaucagucag

SEQ ID NO: 442591 - RNA, 19 nt, Artificial Sequence
  Description of Artificial Sequence: Synthetic oligonucleotide
  Sense strand starting at position 833 of SEQ ID NO: 316817
acagguuagauuggacauu

SEQ ID NO: 442592 - RNA, 19 nt, Artificial Sequence
  Description of Artificial Sequence: Synthetic oligonucleotide
  Antisense Strand to SEQ ID NO: 442591
aauguccaaucuaaccugu

SEQ ID NO: 442593 - RNA, 19 nt, Artificial Sequence
  Description of Artificial Sequence: Synthetic oligonucleotide
  Sense strand starting at position 834 of SEQ ID NO: 316817
cagguuagauuggacauuu

SEQ ID NO: 442594 - RNA, 19 nt, Artificial Sequence
  Description of Artificial Sequence: Synthetic oligonucleotide
  Antisense Strand to SEQ ID NO: 442593
aaauguccaaucuaaccug

SEQ ID NO: 442595 - RNA, 19 nt, Artificial Sequence
  Description of Artificial Sequence: Synthetic oligonucleotide
  Sense strand starting at position 851 of SEQ ID NO: 316817
uuuauugcagcagauaaca

SEQ ID NO: 442596 - RNA, 19 nt, Artificial Sequence
  Description of Artificial Sequence: Synthetic oligonucleotide
  Antisense Strand to SEQ ID NO: 442595
uguuaucugcugcaauaaa

SEQ ID NO: 442597 - RNA, 19 nt, Artificial Sequence
  Description of Artificial Sequence: Synthetic oligonucleotide
  Sense strand starting at position 942 of SEQ ID NO: 316817
gagauuugguaauaggcuu

SEQ ID NO: 442598 - RNA, 19 nt, Artificial Sequence
  Description of Artificial Sequence: Synthetic oligonucleotide
  Antisense Strand to SEQ ID NO: 442597
aagccuauuaccaaaucuc

SEQ ID NO: 442599 - RNA, 19 nt, Artificial Sequence
  Description of Artificial Sequence: Synthetic oligonucleotide
  Sense strand starting at position 1173 of SEQ ID NO: 316817
ccucaaucuccggaugacu

SEQ ID NO: 442600 - RNA, 19 nt, Artificial Sequence
  Description of Artificial Sequence: Synthetic oligonucleotide
  Antisense Strand to SEQ ID NO: 442599
agucauccggagauugagg

SEQ ID NO: 442601 - RNA, 19 nt, Artificial Sequence
  Description of Artificial Sequence: Synthetic oligonucleotide
  Sense strand starting at position 1175 of SEQ ID NO: 316817
ucaaucuccggaugacuuu

SEQ ID NO: 442602 - RNA, 19 nt, Artificial Sequence
  Description of Artificial Sequence: Synthetic oligonucleotide
  Antisense Strand to SEQ ID NO: 442601
aaagucauccggagauuga

SEQ ID NO: 442603 - RNA, 19 nt, Artificial Sequence
  Description of Artificial Sequence: Synthetic oligonucleotide
  Sense strand starting at position 1197 of SEQ ID NO: 316817
acuuaugaucuuggaguau

SEQ ID NO: 442604 - RNA, 19 nt, Artificial Sequence
  Description of Artificial Sequence: Synthetic oligonucleotide
  Antisense Strand to SEQ ID NO: 442603
auacuccaagaucauaagu

SEQ ID NO: 442605 - RNA, 19 nt, Artificial Sequence
  Description of Artificial Sequence: Synthetic oligonucleotide
  Sense strand starting at position 1203 of SEQ ID NO: 316817
gaucuuggaguaugagcaa

SEQ ID NO: 442606 - RNA, 19 nt, Artificial Sequence
  Description of Artificial Sequence: Synthetic oligonucleotide
  Antisense Strand to SEQ ID NO: 442605
uugcucauacuccaagauc

SEQ ID NO: 442607 - RNA, 19 nt, Artificial Sequence
  Description of Artificial Sequence: Synthetic oligonucleotide
  Sense strand starting at position 2222 of SEQ ID NO: 316817
ggugacugucccugaaacu

SEQ ID NO: 442608 - RNA, 19 nt, Artificial Sequence
  Description of Artificial Sequence: Synthetic oligonucleotide
  Antisense Strand to SEQ ID NO: 442607
aguuucagggacagucacc

SEQ ID NO: 442609 - RNA, 19 nt, Artificial Sequence
  Description of Artificial Sequence: Synthetic oligonucleotide
  Sense strand starting at position 2223 of SEQ ID NO: 316817
gugacugucccugaaacug

SEQ ID NO: 442610 - RNA, 19 nt, Artificial Sequence
  Description of Artificial Sequence: Synthetic oligonucleotide
  Antisense Strand to SEQ ID NO: 442609
caguuucagggacagucac

SEQ ID NO: 442611 - RNA, 19 nt, Artificial Sequence
  Description of Artificial Sequence: Synthetic oligonucleotide
  Sense strand starting at position 2290 of SEQ ID NO: 316817
ugugucauucguuugucau

SEQ ID NO: 442612 - RNA, 19 nt, Artificial Sequence
  Description of Artificial Sequence: Synthetic oligonucleotide
  Antisense Strand to SEQ ID NO: 442611
augacaaacgaaugacaca

SEQ ID NO: 442613 - RNA, 19 nt, Artificial Sequence
  Description of Artificial Sequence: Synthetic oligonucleotide
  Sense strand starting at position 2332 of SEQ ID NO: 316817
aacacaaacgcaugguuau

SEQ ID NO: 442614 - RNA, 19 nt, Artificial Sequence
  Description of Artificial Sequence: Synthetic oligonucleotide
  Antisense Strand to SEQ ID NO: 442613
auaaccaugcguuuguguu

SEQ ID NO: 442615 - RNA, 19 nt, Artificial Sequence
  Description of Artificial Sequence: Synthetic oligonucleotide
  Sense strand starting at position 2343 of SEQ ID NO: 316817
augguuaugaagugcauaa

SEQ ID NO: 442616 - RNA, 19 nt, Artificial Sequence
  Description of Artificial Sequence: Synthetic oligonucleotide
  Antisense Strand to SEQ ID NO: 442615
uuaugcacuucauaaccau

SEQ ID NO: 442617 - RNA, 19 nt, Artificial Sequence
  Description of Artificial Sequence: Synthetic oligonucleotide
  Sense strand starting at position 2365 of SEQ ID NO: 316817
guguuaggaucuguacuga

SEQ ID NO: 442618 - RNA, 19 nt, Artificial Sequence
  Description of Artificial Sequence: Synthetic oligonucleotide
  Antisense Strand to SEQ ID NO: 442617
ucaguacagauccuaacac

SEQ ID NO: 442619 - RNA, 19 nt, Artificial Sequence
  Description of Artificial Sequence: Synthetic oligonucleotide
  Sense strand starting at position 2375 of SEQ ID NO: 316817
cuguacugagugugggaaa

SEQ ID NO: 442620 - RNA, 19 nt, Artificial Sequence
  Description of Artificial Sequence: Synthetic oligonucleotide
  Antisense Strand to SEQ ID NO: 442619
uuucccacacucaguacag

SEQ ID NO: 442621 - RNA, 19 nt, Artificial Sequence
  Description of Artificial Sequence: Synthetic oligonucleotide
  Sense strand starting at position 2435 of SEQ ID NO: 316817
ugcccugagcugggagaau

SEQ ID NO: 442622 - RNA, 19 nt, Artificial Sequence
  Description of Artificial Sequence: Synthetic oligonucleotide
  Antisense Strand to SEQ ID NO: 442621
auucucccagcucagggca

SEQ ID NO: 442623 - RNA, 19 nt, Artificial Sequence
  Description of Artificial Sequence: Synthetic oligonucleotide
  Sense strand starting at position 2721 of SEQ ID NO: 316817
gcgaaagcuguguccauuc

SEQ ID NO: 442624 - RNA, 19 nt, Artificial Sequence
  Description of Artificial Sequence: Synthetic oligonucleotide
  Antisense Strand to SEQ ID NO: 442623
gaauggacacagcuuucgc

SEQ ID NO: 442625 - RNA, 19 nt, Artificial Sequence
  Description of Artificial Sequence: Synthetic oligonucleotide
  Sense strand starting at position 2797 of SEQ ID NO: 316817
gaauuugcuugguggauuu

SEQ ID NO: 442626 - RNA, 19 nt, Artificial Sequence
  Description of Artificial Sequence: Synthetic oligonucleotide
  Antisense Strand to SEQ ID NO: 442625
aaauccaccaagcaaauuc

SEQ ID NO: 442627 - RNA, 19 nt, Artificial Sequence
  Description of Artificial Sequence: Synthetic oligonucleotide
  Sense strand starting at position 2895 of SEQ ID NO: 316817
aaaggcugagguugaaaua

SEQ ID NO: 442628 - RNA, 19 nt, Artificial Sequence
  Description of Artificial Sequence: Synthetic oligonucleotide
  Antisense Strand to SEQ ID NO: 442627
uauuucaaccucagccuuu

SEQ ID NO: 442629 - RNA, 19 nt, Artificial Sequence
  Description of Artificial Sequence: Synthetic oligonucleotide
  Sense strand starting at position 3038 of SEQ ID NO: 316817
ucaaguuggauugagcaua

SEQ ID NO: 442630 - RNA, 19 nt, Artificial Sequence
  Description of Artificial Sequence: Synthetic oligonucleotide
  Antisense Strand to SEQ ID NO: 442629
uaugcucaauccaacuuga

SEQ ID NO: 442631 - RNA, 19 nt, Artificial Sequence
  Description of Artificial Sequence: Synthetic oligonucleotide
  Sense strand starting at position 3051 of SEQ ID NO: 316817
agcauagaauugucuguac

SEQ ID NO: 442632 - RNA, 19 nt, Artificial Sequence
  Description of Artificial Sequence: Synthetic oligonucleotide
  Antisense Strand to SEQ ID NO: 442631
guacagacaauucuaugcu

SEQ ID NO: 442633 - RNA, 19 nt, Artificial Sequence
  Description of Artificial Sequence: Synthetic oligonucleotide
  Sense strand starting at position 3053 of SEQ ID NO: 316817
cauagaauugucuguacug

SEQ ID NO: 442634 - RNA, 19 nt, Artificial Sequence
  Description of Artificial Sequence: Synthetic oligonucleotide
  Antisense Strand to SEQ ID NO: 442633
caguacagacaauucuaug

SEQ ID NO: 442635 - RNA, 19 nt, Artificial Sequence
  Description of Artificial Sequence: Synthetic oligonucleotide
  Sense strand starting at position 3208 of SEQ ID NO: 316817
aagugaugccaguaggaua

SEQ ID NO: 442636 - RNA, 19 nt, Artificial Sequence
  Description of Artificial Sequence: Synthetic oligonucleotide
  Antisense Strand to SEQ ID NO: 442635
uauccuacuggcaucacuu

SEQ ID NO: 442637 - RNA, 19 nt, Artificial Sequence
  Description of Artificial Sequence: Synthetic oligonucleotide
  Sense strand starting at position 3213 of SEQ ID NO: 316817
augccaguaggauauguua

SEQ ID NO: 442638 - RNA, 19 nt, Artificial Sequence
  Description of Artificial Sequence: Synthetic oligonucleotide
  Antisense Strand to SEQ ID NO: 442637
uaacauauccuacuggcau

SEQ ID NO: 442639 - RNA, 19 nt, Artificial Sequence
  Description of Artificial Sequence: Synthetic oligonucleotide
  Sense strand starting at position 3215 of SEQ ID NO: 316817
gccaguaggauauguuaaa

SEQ ID NO: 442640 - RNA, 19 nt, Artificial Sequence
  Description of Artificial Sequence: Synthetic oligonucleotide
  Antisense Strand to SEQ ID NO: 442639
uuuaacauauccuacuggc

SEQ ID NO: 442641 - RNA, 19 nt, Artificial Sequence
  Description of Artificial Sequence: Synthetic oligonucleotide
  Sense strand starting at position 3216 of SEQ ID NO: 316817
ccaguaggauauguuaaau

SEQ ID NO: 442642 - RNA, 19 nt, Artificial Sequence
  Description of Artificial Sequence: Synthetic oligonucleotide
  Antisense Strand to SEQ ID NO: 442641
auuuaacauauccuacugg

SEQ ID NO: 442643 - RNA, 19 nt, Artificial Sequence
  Description of Artificial Sequence: Synthetic oligonucleotide
  Sense strand starting at position 3681 of SEQ ID NO: 316817
uaggaaaucugggcugaau

SEQ ID NO: 442644 - RNA, 19 nt, Artificial Sequence
  Description of Artificial Sequence: Synthetic oligonucleotide
  Antisense Strand to SEQ ID NO: 442643
auucagcccagauuuccua

SEQ ID NO: 442645 - RNA, 19 nt, Artificial Sequence
  Description of Artificial Sequence: Synthetic oligonucleotide
  Sense strand starting at position 3683 of SEQ ID NO: 316817
ggaaaucugggcugaauuc

SEQ ID NO: 442646 - RNA, 19 nt, Artificial Sequence
  Description of Artificial Sequence: Synthetic oligonucleotide
  Antisense Strand to SEQ ID NO: 442645
gaauucagcccagauuucc

SEQ ID NO: 442647 - RNA, 19 nt, Artificial Sequence
  Description of Artificial Sequence: Synthetic oligonucleotide
  Sense strand starting at position 3754 of SEQ ID NO: 316817
aagacuguauuuggagaaa

SEQ ID NO: 442648 - RNA, 19 nt, Artificial Sequence
  Description of Artificial Sequence: Synthetic oligonucleotide
  Antisense Strand to SEQ ID NO: 442647
uuucuccaaauacagucuu

SEQ ID NO: 442649 - RNA, 19 nt, Artificial Sequence
  Description of Artificial Sequence: Synthetic oligonucleotide
  Sense strand starting at position 3818 of SEQ ID NO: 316817
ggcucuuaccaauaugacu

SEQ ID NO: 442650 - RNA, 19 nt, Artificial Sequence
  Description of Artificial Sequence: Synthetic oligonucleotide
  Antisense Strand to SEQ ID NO: 442649
agucauauugguaagagcc

SEQ ID NO: 442651 - RNA, 19 nt, Artificial Sequence
  Description of Artificial Sequence: Synthetic oligonucleotide
  Sense strand starting at position 3837 of SEQ ID NO: 316817
ggugucugaagaggagaua

SEQ ID NO: 442652 - RNA, 19 nt, Artificial Sequence
  Description of Artificial Sequence: Synthetic oligonucleotide
  Antisense Strand to SEQ ID NO: 442651
uaucuccucuucagacacc

SEQ ID NO: 442653 - RNA, 19 nt, Artificial Sequence
  Description of Artificial Sequence: Synthetic oligonucleotide
  Sense strand starting at position 14 of SEQ ID NO: 316818
ggauauaguguuggaaauu

SEQ ID NO: 442654 - RNA, 19 nt, Artificial Sequence
  Description of Artificial Sequence: Synthetic oligonucleotide
  Antisense Strand to SEQ ID NO: 442653
aauuuccaacacuauaucc

SEQ ID NO: 442655 - RNA, 19 nt, Artificial Sequence
  Description of Artificial Sequence: Synthetic oligonucleotide
  Sense strand starting at position 359 of SEQ ID NO: 316818
agaauuaacugagaugauu

SEQ ID NO: 442656 - RNA, 19 nt, Artificial Sequence
  Description of Artificial Sequence: Synthetic oligonucleotide
  Antisense Strand to SEQ ID NO: 442655
aaucaucucaguuaauucu

SEQ ID NO: 442657 - RNA, 19 nt, Artificial Sequence
  Description of Artificial Sequence: Synthetic oligonucleotide
  Sense strand starting at position 405 of SEQ ID NO: 316818
uuggauuacuuguuacauc

SEQ ID NO: 442658 - RNA, 19 nt, Artificial Sequence
  Description of Artificial Sequence: Synthetic oligonucleotide
  Antisense Strand to SEQ ID NO: 442657
gauguaacaaguaauccaa

SEQ ID NO: 442659 - RNA, 19 nt, Artificial Sequence
  Description of Artificial Sequence: Synthetic oligonucleotide
  Sense strand starting at position 413 of SEQ ID NO: 316818
cuuguuacaucagucauga

SEQ ID NO: 442660 - RNA, 19 nt, Artificial Sequence
  Description of Artificial Sequence: Synthetic oligonucleotide
  Antisense Strand to SEQ ID NO: 442659
ucaugacugauguaacaag

SEQ ID NO: 442661 - RNA, 19 nt, Artificial Sequence
  Description of Artificial Sequence: Synthetic oligonucleotide
  Sense strand starting at position 493 of SEQ ID NO: 316818
gguaaacacucuuccauga

SEQ ID NO: 442662 - RNA, 19 nt, Artificial Sequence
  Description of Artificial Sequence: Synthetic oligonucleotide
  Antisense Strand to SEQ ID NO: 442661
ucauggaagaguguuuacc

SEQ ID NO: 442663 - RNA, 19 nt, Artificial Sequence
  Description of Artificial Sequence: Synthetic oligonucleotide
  Sense strand starting at position 519 of SEQ ID NO: 316818
ucuugugaaguugaaauua

SEQ ID NO: 442664 - RNA, 19 nt, Artificial Sequence
  Description of Artificial Sequence: Synthetic oligonucleotide
  Antisense Strand to SEQ ID NO: 442663
uaauuucaacuucacaaga

SEQ ID NO: 442665 - RNA, 19 nt, Artificial Sequence
  Description of Artificial Sequence: Synthetic oligonucleotide
  Sense strand starting at position 592 of SEQ ID NO: 316818
uuuggaguuaguuaaugcu

SEQ ID NO: 442666 - RNA, 19 nt, Artificial Sequence
  Description of Artificial Sequence: Synthetic oligonucleotide
  Antisense Strand to SEQ ID NO: 442665
agcauuaacuaacuccaaa

SEQ ID NO: 442667 - RNA, 19 nt, Artificial Sequence
  Description of Artificial Sequence: Synthetic oligonucleotide
  Sense strand starting at position 690 of SEQ ID NO: 316818
uugggcaaaucuucucauu

SEQ ID NO: 442668 - RNA, 19 nt, Artificial Sequence
  Description of Artificial Sequence: Synthetic oligonucleotide
  Antisense Strand to SEQ ID NO: 442667
aaugagaagauuugcccaa

SEQ ID NO: 442669 - RNA, 19 nt, Artificial Sequence
  Description of Artificial Sequence: Synthetic oligonucleotide
  Sense strand starting at position 754 of SEQ ID NO: 316818
ucgaguucgcccucccuga

SEQ ID NO: 442670 - RNA, 19 nt, Artificial Sequence
  Description of Artificial Sequence: Synthetic oligonucleotide
  Antisense Strand to SEQ ID NO: 442669
ucagggagggcgaacucga

SEQ ID NO: 442671 - RNA, 19 nt, Artificial Sequence
  Description of Artificial Sequence: Synthetic oligonucleotide
  Sense strand starting at position 769 of SEQ ID NO: 316818
cugacagggaguuguaaau

SEQ ID NO: 442672 - RNA, 19 nt, Artificial Sequence
  Description of Artificial Sequence: Synthetic oligonucleotide
  Antisense Strand to SEQ ID NO: 442671
auuuacaacucccugucag

SEQ ID NO: 442673 - RNA, 19 nt, Artificial Sequence
  Description of Artificial Sequence: Synthetic oligonucleotide
  Sense strand starting at position 780 of SEQ ID NO: 316818
uuguaaauaccagguacuu

SEQ ID NO: 442674 - RNA, 19 nt, Artificial Sequence
  Description of Artificial Sequence: Synthetic oligonucleotide
  Antisense Strand to SEQ ID NO: 442673
aaguaccugguauuuacaa

SEQ ID NO: 442675 - RNA, 19 nt, Artificial Sequence
  Description of Artificial Sequence: Synthetic oligonucleotide
  Sense strand starting at position 935 of SEQ ID NO: 316818
ggcccugccgucucuuaau

SEQ ID NO: 442676 - RNA, 19 nt, Artificial Sequence
  Description of Artificial Sequence: Synthetic oligonucleotide
  Antisense Strand to SEQ ID NO: 442675
auuaagagacggcagggcc

SEQ ID NO: 442677 - RNA, 19 nt, Artificial Sequence
  Description of Artificial Sequence: Synthetic oligonucleotide
  Sense strand starting at position 970 of SEQ ID NO: 316818
ccuuuaaagggcuaaagua

SEQ ID NO: 442678 - RNA, 19 nt, Artificial Sequence
  Description of Artificial Sequence: Synthetic oligonucleotide
  Antisense Strand to SEQ ID NO: 442677
uacuuuagcccuuuaaagg

SEQ ID NO: 442679 - RNA, 19 nt, Artificial Sequence
  Description of Artificial Sequence: Synthetic oligonucleotide
  Sense strand starting at position 1023 of SEQ ID NO: 316818
ucuugugaugccgggagga

SEQ ID NO: 442680 - RNA, 19 nt, Artificial Sequence
  Description of Artificial Sequence: Synthetic oligonucleotide
  Antisense Strand to SEQ ID NO: 442679
uccucccggcaucacaaga

SEQ ID NO: 442681 - RNA, 19 nt, Artificial Sequence
  Description of Artificial Sequence: Synthetic oligonucleotide
  Sense strand starting at position 1036 of SEQ ID NO: 316818
ggaggaagcguccagugaa

SEQ ID NO: 442682 - RNA, 19 nt, Artificial Sequence
  Description of Artificial Sequence: Synthetic oligonucleotide
  Antisense Strand to SEQ ID NO: 442681
uucacuggacgcuuccucc

SEQ ID NO: 442683 - RNA, 19 nt, Artificial Sequence
  Description of Artificial Sequence: Synthetic oligonucleotide
  Sense strand starting at position 1050 of SEQ ID NO: 316818
gugaaucucuagucucuua

SEQ ID NO: 442684 - RNA, 19 nt, Artificial Sequence
  Description of Artificial Sequence: Synthetic oligonucleotide
  Antisense Strand to SEQ ID NO: 442683
uaagagacuagagauucac

SEQ ID NO: 442685 - RNA, 19 nt, Artificial Sequence
  Description of Artificial Sequence: Synthetic oligonucleotide
  Sense strand starting at position 1109 of SEQ ID NO: 316818
uaagguguuggccaguuua

SEQ ID NO: 442686 - RNA, 19 nt, Artificial Sequence
  Description of Artificial Sequence: Synthetic oligonucleotide
  Antisense Strand to SEQ ID NO: 442685
uaaacuggccaacaccuua

SEQ ID NO: 442687 - RNA, 19 nt, Artificial Sequence
  Description of Artificial Sequence: Synthetic oligonucleotide
  Sense strand starting at position 1145 of SEQ ID NO: 316818
cagggagcuucuguuccua

SEQ ID NO: 442688 - RNA, 19 nt, Artificial Sequence
  Description of Artificial Sequence: Synthetic oligonucleotide
  Antisense Strand to SEQ ID NO: 442687
uaggaacagaagcucccug

SEQ ID NO: 442689 - RNA, 19 nt, Artificial Sequence
  Description of Artificial Sequence: Synthetic oligonucleotide
  Sense strand starting at position 1147 of SEQ ID NO: 316818
gggagcuucuguuccuaag

SEQ ID NO: 442690 - RNA, 19 nt, Artificial Sequence
  Description of Artificial Sequence: Synthetic oligonucleotide
  Antisense Strand to SEQ ID NO: 442689
cuuaggaacagaagcuccc

SEQ ID NO: 442691 - RNA, 19 nt, Artificial Sequence
  Description of Artificial Sequence: Synthetic oligonucleotide
  Sense strand starting at position 2300 of SEQ ID NO: 316818
cuguaauccagggaggcuu

SEQ ID NO: 442692 - RNA, 19 nt, Artificial Sequence
  Description of Artificial Sequence: Synthetic oligonucleotide
  Antisense Strand to SEQ ID NO: 442691
aagccucccuggauuacag

SEQ ID NO: 442693 - RNA, 19 nt, Artificial Sequence
  Description of Artificial Sequence: Synthetic oligonucleotide
  Sense strand starting at position 2380 of SEQ ID NO: 316818
agcucaaugaggugguuau

SEQ ID NO: 442694 - RNA, 19 nt, Artificial Sequence
  Description of Artificial Sequence: Synthetic oligonucleotide
  Antisense Strand to SEQ ID NO: 442693
auaaccaccucauugagcu

SEQ ID NO: 442695 - RNA, 19 nt, Artificial Sequence
  Description of Artificial Sequence: Synthetic oligonucleotide
  Sense strand starting at position 2391 of SEQ ID NO: 316818
gugguuaugagccagguau

SEQ ID NO: 442696 - RNA, 19 nt, Artificial Sequence
  Description of Artificial Sequence: Synthetic oligonucleotide
  Antisense Strand to SEQ ID NO: 442695
auaccuggcucauaaccac

SEQ ID NO: 442697 - RNA, 19 nt, Artificial Sequence
  Description of Artificial Sequence: Synthetic oligonucleotide
  Sense strand starting at position 2393 of SEQ ID NO: 316818
gguuaugagccagguauuu

SEQ ID NO: 442698 - RNA, 19 nt, Artificial Sequence
  Description of Artificial Sequence: Synthetic oligonucleotide
  Antisense Strand to SEQ ID NO: 442697
aaauaccuggcucauaacc

SEQ ID NO: 442699 - RNA, 19 nt, Artificial Sequence
  Description of Artificial Sequence: Synthetic oligonucleotide
  Sense strand starting at position 2758 of SEQ ID NO: 316818
acuaaagugccaggaagau

SEQ ID NO: 442700 - RNA, 19 nt, Artificial Sequence
  Description of Artificial Sequence: Synthetic oligonucleotide
  Antisense Strand to SEQ ID NO: 442699
aucuuccuggcacuuuagu

SEQ ID NO: 442701 - RNA, 19 nt, Artificial Sequence
  Description of Artificial Sequence: Synthetic oligonucleotide
  Sense strand starting at position 2871 of SEQ ID NO: 316818
gccucuuuagugcagagaa

SEQ ID NO: 442702 - RNA, 19 nt, Artificial Sequence
  Description of Artificial Sequence: Synthetic oligonucleotide
  Antisense Strand to SEQ ID NO: 442701
uucucugcacuaaagaggc

SEQ ID NO: 442703 - RNA, 19 nt, Artificial Sequence
  Description of Artificial Sequence: Synthetic oligonucleotide
  Sense strand starting at position 3038 of SEQ ID NO: 316818
ccacuaaugucugcaagua

SEQ ID NO: 442704 - RNA, 19 nt, Artificial Sequence
  Description of Artificial Sequence: Synthetic oligonucleotide
  Antisense Strand to SEQ ID NO: 442703
uacuugcagacauuagugg

SEQ ID NO: 442705 - RNA, 19 nt, Artificial Sequence
  Description of Artificial Sequence: Synthetic oligonucleotide
  Sense strand starting at position 3069 of SEQ ID NO: 316818
agcucuauggagugggaau

SEQ ID NO: 442706 - RNA, 19 nt, Artificial Sequence
  Description of Artificial Sequence: Synthetic oligonucleotide
  Antisense Strand to SEQ ID NO: 442705
auucccacuccauagagcu

SEQ ID NO: 442707 - RNA, 19 nt, Artificial Sequence
  Description of Artificial Sequence: Synthetic oligonucleotide
  Sense strand starting at position 3222 of SEQ ID NO: 316818
gguugaggcugagcuauaa

SEQ ID NO: 442708 - RNA, 19 nt, Artificial Sequence
  Description of Artificial Sequence: Synthetic oligonucleotide
  Antisense Strand to SEQ ID NO: 442707
uuauagcucagccucaacc

SEQ ID NO: 442709 - RNA, 19 nt, Artificial Sequence
  Description of Artificial Sequence: Synthetic oligonucleotide
  Sense strand starting at position 3392 of SEQ ID NO: 316818
cucagcgucaggcaaauuu

SEQ ID NO: 442710 - RNA, 19 nt, Artificial Sequence
  Description of Artificial Sequence: Synthetic oligonucleotide
  Antisense Strand to SEQ ID NO: 442709
aaauuugccugacgcugag

SEQ ID NO: 442711 - RNA, 19 nt, Artificial Sequence
  Description of Artificial Sequence: Synthetic oligonucleotide
  Sense strand starting at position 3422 of SEQ ID NO: 316818
acaugugcucuugaaucua

SEQ ID NO: 442712 - RNA, 19 nt, Artificial Sequence
  Description of Artificial Sequence: Synthetic oligonucleotide
  Antisense Strand to SEQ ID NO: 442711
uagauucaagagcacaugu

SEQ ID NO: 442713 - RNA, 19 nt, Artificial Sequence
  Description of Artificial Sequence: Synthetic oligonucleotide
  Sense strand starting at position 3455 of SEQ ID NO: 316818
aaggguuugucuguaucag

SEQ ID NO: 442714 - RNA, 19 nt, Artificial Sequence
  Description of Artificial Sequence: Synthetic oligonucleotide
  Antisense Strand to SEQ ID NO: 442713
cugauacagacaaacccuu

SEQ ID NO: 442715 - RNA, 19 nt, Artificial Sequence
  Description of Artificial Sequence: Synthetic oligonucleotide
  Sense strand starting at position 3477 of SEQ ID NO: 316818
cugcuaaccucuguggaua

SEQ ID NO: 442716 - RNA, 19 nt, Artificial Sequence
  Description of Artificial Sequence: Synthetic oligonucleotide
  Antisense Strand to SEQ ID NO: 442715
uauccacagagguuagcag

SEQ ID NO: 442717 - RNA, 19 nt, Artificial Sequence
  Description of Artificial Sequence: Synthetic oligonucleotide
  Sense strand starting at position 3478 of SEQ ID NO: 316818
ugcuaaccucuguggauaa

SEQ ID NO: 442718 - RNA, 19 nt, Artificial Sequence
  Description of Artificial Sequence: Synthetic oligonucleotide
  Antisense Strand to SEQ ID NO: 442717
uuauccacagagguuagca

SEQ ID NO: 442719 - RNA, 19 nt, Artificial Sequence
  Description of Artificial Sequence: Synthetic oligonucleotide
  Sense strand starting at position 3542 of SEQ ID NO: 316818
gggagauugcucugggcag

SEQ ID NO: 442720 - RNA, 19 nt, Artificial Sequence
  Description of Artificial Sequence: Synthetic oligonucleotide
  Antisense Strand to SEQ ID NO: 442719
cugcccagagcaaucuccc

SEQ ID NO: 442721 - RNA, 19 nt, Artificial Sequence
  Description of Artificial Sequence: Synthetic oligonucleotide
  Sense strand starting at position 3759 of SEQ ID NO: 316818
gaaggcaaucuguggguaa

SEQ ID NO: 442722 - RNA, 19 nt, Artificial Sequence
  Description of Artificial Sequence: Synthetic oligonucleotide
  Antisense Strand to SEQ ID NO: 442721
uuacccacagauugccuuc

SEQ ID NO: 442723 - RNA, 19 nt, Artificial Sequence
  Description of Artificial Sequence: Synthetic oligonucleotide
  Sense strand starting at position 3761 of SEQ ID NO: 316818
aggcaaucuguggguaaag

SEQ ID NO: 442724 - RNA, 19 nt, Artificial Sequence
  Description of Artificial Sequence: Synthetic oligonucleotide
  Antisense Strand to SEQ ID NO: 442723
cuuuacccacagauugccu

SEQ ID NO: 442725 - RNA, 19 nt, Artificial Sequence
  Description of Artificial Sequence: Synthetic oligonucleotide
  Sense strand starting at position 3762 of SEQ ID NO: 316818
ggcaaucuguggguaaaga

SEQ ID NO: 442726 - RNA, 19 nt, Artificial Sequence
  Description of Artificial Sequence: Synthetic oligonucleotide
  Antisense Strand to SEQ ID NO: 442725
ucuuuacccacagauugcc

SEQ ID NO: 442727 - RNA, 19 nt, Artificial Sequence
  Description of Artificial Sequence: Synthetic oligonucleotide
  Sense strand starting at position 3763 of SEQ ID NO: 316818
gcaaucuguggguaaagaa

SEQ ID NO: 442728 - RNA, 19 nt, Artificial Sequence
  Description of Artificial Sequence: Synthetic oligonucleotide
  Antisense Strand to SEQ ID NO: 442727
uucuuuacccacagauugc

SEQ ID NO: 442729 - RNA, 19 nt, Artificial Sequence
  Description of Artificial Sequence: Synthetic oligonucleotide
  Sense strand starting at position 3829 of SEQ ID NO: 316818
cuuucuuuguuaccagaua

SEQ ID NO: 442730 - RNA, 19 nt, Artificial Sequence
  Description of Artificial Sequence: Synthetic oligonucleotide
  Antisense Strand to SEQ ID NO: 442729
uaucugguaacaaagaaag

SEQ ID NO: 442731 - RNA, 19 nt, Artificial Sequence
  Description of Artificial Sequence: Synthetic oligonucleotide
  Sense strand starting at position 3913 of SEQ ID NO: 316818
gcaagaaauccuuggcaag

SEQ ID NO: 442732 - RNA, 19 nt, Artificial Sequence
  Description of Artificial Sequence: Synthetic oligonucleotide
  Antisense Strand to SEQ ID NO: 442731
cuugccaaggauuucuugc

SEQ ID NO: 442733 - RNA, 19 nt, Artificial Sequence
  Description of Artificial Sequence: Synthetic oligonucleotide
  Sense strand starting at position 5 of SEQ ID NO: 316819
guccuauaacuguaauaua

SEQ ID NO: 442734 - RNA, 19 nt, Artificial Sequence
  Description of Artificial Sequence: Synthetic oligonucleotide
  Antisense Strand to SEQ ID NO: 442733
uauauuacaguuauaggac

SEQ ID NO: 442735 - RNA, 19 nt, Artificial Sequence
  Description of Artificial Sequence: Synthetic oligonucleotide
  Sense strand starting at position 199 of SEQ ID NO: 316819
guuguauaacugcauguaa

SEQ ID NO: 442736 - RNA, 19 nt, Artificial Sequence
  Description of Artificial Sequence: Synthetic oligonucleotide
  Antisense Strand to SEQ ID NO: 442735
uuacaugcaguuauacaac

SEQ ID NO: 442737 - RNA, 19 nt, Artificial Sequence
  Description of Artificial Sequence: Synthetic oligonucleotide
  Sense strand starting at position 236 of SEQ ID NO: 316819
cuuacauaaguacgauaua

SEQ ID NO: 442738 - RNA, 19 nt, Artificial Sequence
  Description of Artificial Sequence: Synthetic oligonucleotide
  Antisense Strand to SEQ ID NO: 442737
uauaucguacuuauguaag

SEQ ID NO: 442739 - RNA, 19 nt, Artificial Sequence
  Description of Artificial Sequence: Synthetic oligonucleotide
  Sense strand starting at position 239 of SEQ ID NO: 316819
acauaaguacgauauaugu

SEQ ID NO: 442740 - RNA, 19 nt, Artificial Sequence
  Description of Artificial Sequence: Synthetic oligonucleotide
  Antisense Strand to SEQ ID NO: 442739
acauauaucguacuuaugu

SEQ ID NO: 442741 - RNA, 19 nt, Artificial Sequence
  Description of Artificial Sequence: Synthetic oligonucleotide
  Sense strand starting at position 265 of SEQ ID NO: 316819
ccuauuguucuauaggcau

SEQ ID NO: 442742 - RNA, 19 nt, Artificial Sequence
  Description of Artificial Sequence: Synthetic oligonucleotide
  Antisense Strand to SEQ ID NO: 442741
augccuauagaacaauagg

SEQ ID NO: 442743 - RNA, 19 nt, Artificial Sequence
  Description of Artificial Sequence: Synthetic oligonucleotide
  Sense strand starting at position 276 of SEQ ID NO: 316819
auaggcauucuauagcuaa

SEQ ID NO: 442744 - RNA, 19 nt, Artificial Sequence
  Description of Artificial Sequence: Synthetic oligonucleotide
  Antisense Strand to SEQ ID NO: 442743
uuagcuauagaaugccuau

SEQ ID NO: 442745 - RNA, 19 nt, Artificial Sequence
  Description of Artificial Sequence: Synthetic oligonucleotide
  Sense strand starting at position 279 of SEQ ID NO: 316819
ggcauucuauagcuaauau

SEQ ID NO: 442746 - RNA, 19 nt, Artificial Sequence
  Description of Artificial Sequence: Synthetic oligonucleotide
  Antisense Strand to SEQ ID NO: 442745
auauuagcuauagaaugcc

SEQ ID NO: 442747 - RNA, 19 nt, Artificial Sequence
  Description of Artificial Sequence: Synthetic oligonucleotide
  Sense strand starting at position 323 of SEQ ID NO: 316819
guaauaucgaagugcauaa

SEQ ID NO: 442748 - RNA, 19 nt, Artificial Sequence
  Description of Artificial Sequence: Synthetic oligonucleotide
  Antisense Strand to SEQ ID NO: 442747
uuaugcacuucgauauuac

SEQ ID NO: 442749 - RNA, 19 nt, Artificial Sequence
  Description of Artificial Sequence: Synthetic oligonucleotide
  Sense strand starting at position 461 of SEQ ID NO: 316819
ucaguccucaguugugaaa

SEQ ID NO: 442750 - RNA, 19 nt, Artificial Sequence
  Description of Artificial Sequence: Synthetic oligonucleotide
  Antisense Strand to SEQ ID NO: 442749
uuucacaacugaggacuga

SEQ ID NO: 442751 - RNA, 19 nt, Artificial Sequence
  Description of Artificial Sequence: Synthetic oligonucleotide
  Sense strand starting at position 479 of SEQ ID NO: 316819
auuagagauuuagaaugca

SEQ ID NO: 442752 - RNA, 19 nt, Artificial Sequence
  Description of Artificial Sequence: Synthetic oligonucleotide
  Antisense Strand to SEQ ID NO: 442751
ugcauucuaaaucucuaau

SEQ ID NO: 442753 - RNA, 19 nt, Artificial Sequence
  Description of Artificial Sequence: Synthetic oligonucleotide
  Sense strand starting at position 578 of SEQ ID NO: 316819
gaugauugcugucuauauu

SEQ ID NO: 442754 - RNA, 19 nt, Artificial Sequence
  Description of Artificial Sequence: Synthetic oligonucleotide
  Antisense Strand to SEQ ID NO: 442753
aauauagacagcaaucauc

SEQ ID NO: 442755 - RNA, 19 nt, Artificial Sequence
  Description of Artificial Sequence: Synthetic oligonucleotide
  Sense strand starting at position 579 of SEQ ID NO: 316819
augauugcugucuauauuc

SEQ ID NO: 442756 - RNA, 19 nt, Artificial Sequence
  Description of Artificial Sequence: Synthetic oligonucleotide
  Antisense Strand to SEQ ID NO: 442755
gaauauagacagcaaucau

SEQ ID NO: 442757 - RNA, 19 nt, Artificial Sequence
  Description of Artificial Sequence: Synthetic oligonucleotide
  Sense strand starting at position 581 of SEQ ID NO: 316819
gauugcugucuauauucga

SEQ ID NO: 442758 - RNA, 19 nt, Artificial Sequence
  Description of Artificial Sequence: Synthetic oligonucleotide
  Antisense Strand to SEQ ID NO: 442757
ucgaauauagacagcaauc

SEQ ID NO: 442759 - RNA, 19 nt, Artificial Sequence
  Description of Artificial Sequence: Synthetic oligonucleotide
  Sense strand starting at position 588 of SEQ ID NO: 316819
gucuauauucgauaacaag

SEQ ID NO: 442760 - RNA, 19 nt, Artificial Sequence
  Description of Artificial Sequence: Synthetic oligonucleotide
  Antisense Strand to SEQ ID NO: 442759
cuuguuaucgaauauagac

SEQ ID NO: 442761 - RNA, 19 nt, Artificial Sequence
  Description of Artificial Sequence: Synthetic oligonucleotide
  Sense strand starting at position 604 of SEQ ID NO: 316819
aagaaacuuguggguaaau

SEQ ID NO: 442762 - RNA, 19 nt, Artificial Sequence
  Description of Artificial Sequence: Synthetic oligonucleotide
  Antisense Strand to SEQ ID NO: 442761
auuuacccacaaguuucuu

SEQ ID NO: 442763 - RNA, 19 nt, Artificial Sequence
  Description of Artificial Sequence: Synthetic oligonucleotide
  Sense strand starting at position 605 of SEQ ID NO: 316819
agaaacuuguggguaaauu

SEQ ID NO: 442764 - RNA, 19 nt, Artificial Sequence
  Description of Artificial Sequence: Synthetic oligonucleotide
  Antisense Strand to SEQ ID NO: 442763
aauuuacccacaaguuucu

SEQ ID NO: 442765 - RNA, 19 nt, Artificial Sequence
  Description of Artificial Sequence: Synthetic oligonucleotide
  Sense strand starting at position 617 of SEQ ID NO: 316819
guaaauuguggugaaacug

SEQ ID NO: 442766 - RNA, 19 nt, Artificial Sequence
  Description of Artificial Sequence: Synthetic oligonucleotide
  Antisense Strand to SEQ ID NO: 442765
caguuucaccacaauuuac

SEQ ID NO: 442767 - RNA, 19 nt, Artificial Sequence
  Description of Artificial Sequence: Synthetic oligonucleotide
  Sense strand starting at position 788 of SEQ ID NO: 316819
gcugaaauaugauccucca

SEQ ID NO: 442768 - RNA, 19 nt, Artificial Sequence
  Description of Artificial Sequence: Synthetic oligonucleotide
  Antisense Strand to SEQ ID NO: 442767
uggaggaucauauuucagc

SEQ ID NO: 442769 - RNA, 19 nt, Artificial Sequence
  Description of Artificial Sequence: Synthetic oligonucleotide
  Sense strand starting at position 882 of SEQ ID NO: 316819
ccaacuguucuacaaagua

SEQ ID NO: 442770 - RNA, 19 nt, Artificial Sequence
  Description of Artificial Sequence: Synthetic oligonucleotide
  Antisense Strand to SEQ ID NO: 442769
uacuuuguagaacaguugg

SEQ ID NO: 442771 - RNA, 19 nt, Artificial Sequence
  Description of Artificial Sequence: Synthetic oligonucleotide
  Sense strand starting at position 962 of SEQ ID NO: 316819
gaagguguuagcuaggcuu

SEQ ID NO: 442772 - RNA, 19 nt, Artificial Sequence
  Description of Artificial Sequence: Synthetic oligonucleotide
  Antisense Strand to SEQ ID NO: 442771
aagccuagcuaacaccuuc

SEQ ID NO: 442773 - RNA, 19 nt, Artificial Sequence
  Description of Artificial Sequence: Synthetic oligonucleotide
  Sense strand starting at position 1016 of SEQ ID NO: 316819
guuugaagcauuugcaagu

SEQ ID NO: 442774 - RNA, 19 nt, Artificial Sequence
  Description of Artificial Sequence: Synthetic oligonucleotide
  Antisense Strand to SEQ ID NO: 442773
acuugcaaaugcuucaaac

SEQ ID NO: 442775 - RNA, 19 nt, Artificial Sequence
  Description of Artificial Sequence: Synthetic oligonucleotide
  Sense strand starting at position 1181 of SEQ ID NO: 316819
gaagaucgugcucacauca

SEQ ID NO: 442776 - RNA, 19 nt, Artificial Sequence
  Description of Artificial Sequence: Synthetic oligonucleotide
  Antisense Strand to SEQ ID NO: 442775
ugaugugagcacgaucuuc

SEQ ID NO: 442777 - RNA, 19 nt, Artificial Sequence
  Description of Artificial Sequence: Synthetic oligonucleotide
  Sense strand starting at position 1201 of SEQ ID NO: 316819
cuggcaucuguugaguacu

SEQ ID NO: 442778 - RNA, 19 nt, Artificial Sequence
  Description of Artificial Sequence: Synthetic oligonucleotide
  Antisense Strand to SEQ ID NO: 442777
aguacucaacagaugccag

SEQ ID NO: 442779 - RNA, 19 nt, Artificial Sequence
  Description of Artificial Sequence: Synthetic oligonucleotide
  Sense strand starting at position 1340 of SEQ ID NO: 316819
ggcagaggcugagaaauuu

SEQ ID NO: 442780 - RNA, 19 nt, Artificial Sequence
  Description of Artificial Sequence: Synthetic oligonucleotide
  Antisense Strand to SEQ ID NO: 442779
aaauuucucagccucugcc

SEQ ID NO: 442781 - RNA, 19 nt, Artificial Sequence
  Description of Artificial Sequence: Synthetic oligonucleotide
  Sense strand starting at position 1754 of SEQ ID NO: 316819
cguguaaaggcaaggguuu

SEQ ID NO: 442782 - RNA, 19 nt, Artificial Sequence
  Description of Artificial Sequence: Synthetic oligonucleotide
  Antisense Strand to SEQ ID NO: 442781
aaacccuugccuuuacacg

SEQ ID NO: 442783 - RNA, 19 nt, Artificial Sequence
  Description of Artificial Sequence: Synthetic oligonucleotide
  Sense strand starting at position 1755 of SEQ ID NO: 316819
guguaaaggcaaggguuua

SEQ ID NO: 442784 - RNA, 19 nt, Artificial Sequence
  Description of Artificial Sequence: Synthetic oligonucleotide
  Antisense Strand to SEQ ID NO: 442783
uaaacccuugccuuuacac

SEQ ID NO: 442785 - RNA, 19 nt, Artificial Sequence
  Description of Artificial Sequence: Synthetic oligonucleotide
  Sense strand starting at position 1767 of SEQ ID NO: 316819
ggguuuaagaacugggucu

SEQ ID NO: 442786 - RNA, 19 nt, Artificial Sequence
  Description of Artificial Sequence: Synthetic oligonucleotide
  Antisense Strand to SEQ ID NO: 442785
agacccaguucuuaaaccc

SEQ ID NO: 442787 - RNA, 19 nt, Artificial Sequence
  Description of Artificial Sequence: Synthetic oligonucleotide
  Sense strand starting at position 1858 of SEQ ID NO: 316819
gggugaucuccuggcucag

SEQ ID NO: 442788 - RNA, 19 nt, Artificial Sequence
  Description of Artificial Sequence: Synthetic oligonucleotide
  Antisense Strand to SEQ ID NO: 442787
cugagccaggagaucaccc

SEQ ID NO: 442789 - RNA, 19 nt, Artificial Sequence
  Description of Artificial Sequence: Synthetic oligonucleotide
  Sense strand starting at position 2497 of SEQ ID NO: 316819
cgguguccucguccaucaa

SEQ ID NO: 442790 - RNA, 19 nt, Artificial Sequence
  Description of Artificial Sequence: Synthetic oligonucleotide
  Antisense Strand to SEQ ID NO: 442789
uugauggacgaggacaccg

SEQ ID NO: 442791 - RNA, 19 nt, Artificial Sequence
  Description of Artificial Sequence: Synthetic oligonucleotide
  Sense strand starting at position 2850 of SEQ ID NO: 316819
aucuccuuaucugugagau

SEQ ID NO: 442792 - RNA, 19 nt, Artificial Sequence
  Description of Artificial Sequence: Synthetic oligonucleotide
  Antisense Strand to SEQ ID NO: 442791
aucucacagauaaggagau

SEQ ID NO: 442793 - RNA, 19 nt, Artificial Sequence
  Description of Artificial Sequence: Synthetic oligonucleotide
  Sense strand starting at position 2876 of SEQ ID NO: 316819
gugagaguggcucacucaa

SEQ ID NO: 442794 - RNA, 19 nt, Artificial Sequence
  Description of Artificial Sequence: Synthetic oligonucleotide
  Antisense Strand to SEQ ID NO: 442793
uugagugagccacucucac

SEQ ID NO: 442795 - RNA, 19 nt, Artificial Sequence
  Description of Artificial Sequence: Synthetic oligonucleotide
  Sense strand starting at position 2916 of SEQ ID NO: 316819
caggauauagcaugacuga

SEQ ID NO: 442796 - RNA, 19 nt, Artificial Sequence
  Description of Artificial Sequence: Synthetic oligonucleotide
  Antisense Strand to SEQ ID NO: 442795
ucagucaugcuauauccug

SEQ ID NO: 442797 - RNA, 19 nt, Artificial Sequence
  Description of Artificial Sequence: Synthetic oligonucleotide
  Sense strand starting at position 2960 of SEQ ID NO: 316819
guguuuccaagugaucgga

SEQ ID NO: 442798 - RNA, 19 nt, Artificial Sequence
  Description of Artificial Sequence: Synthetic oligonucleotide
  Antisense Strand to SEQ ID NO: 442797
uccgaucacuuggaaacac

SEQ ID NO: 442799 - RNA, 19 nt, Artificial Sequence
  Description of Artificial Sequence: Synthetic oligonucleotide
  Sense strand starting at position 2964 of SEQ ID NO: 316819
uuccaagugaucggagcua

SEQ ID NO: 442800 - RNA, 19 nt, Artificial Sequence
  Description of Artificial Sequence: Synthetic oligonucleotide
  Antisense Strand to SEQ ID NO: 442799
uagcuccgaucacuuggaa

SEQ ID NO: 442801 - RNA, 19 nt, Artificial Sequence
  Description of Artificial Sequence: Synthetic oligonucleotide
  Sense strand starting at position 2996 of SEQ ID NO: 316819
uguuaaauccagcaauugu

SEQ ID NO: 442802 - RNA, 19 nt, Artificial Sequence
  Description of Artificial Sequence: Synthetic oligonucleotide
  Antisense Strand to SEQ ID NO: 442801
acaauugcuggauuuaaca

SEQ ID NO: 442803 - RNA, 19 nt, Artificial Sequence
  Description of Artificial Sequence: Synthetic oligonucleotide
  Sense strand starting at position 3453 of SEQ ID NO: 316819
uggagcuaugucuggacuu

SEQ ID NO: 442804 - RNA, 19 nt, Artificial Sequence
  Description of Artificial Sequence: Synthetic oligonucleotide
  Antisense Strand to SEQ ID NO: 442803
aaguccagacauagcucca

SEQ ID NO: 442805 - RNA, 19 nt, Artificial Sequence
  Description of Artificial Sequence: Synthetic oligonucleotide
  Sense strand starting at position 3455 of SEQ ID NO: 316819
gagcuaugucuggacuuuc

SEQ ID NO: 442806 - RNA, 19 nt, Artificial Sequence
  Description of Artificial Sequence: Synthetic oligonucleotide
  Antisense Strand to SEQ ID NO: 442805
gaaaguccagacauagcuc

SEQ ID NO: 442807 - RNA, 19 nt, Artificial Sequence
  Description of Artificial Sequence: Synthetic oligonucleotide
  Sense strand starting at position 3696 of SEQ ID NO: 316819
uccauucccugucuguaaa

SEQ ID NO: 442808 - RNA, 19 nt, Artificial Sequence
  Description of Artificial Sequence: Synthetic oligonucleotide
  Antisense Strand to SEQ ID NO: 442807
uuuacagacagggaaugga

SEQ ID NO: 442809 - RNA, 19 nt, Artificial Sequence
  Description of Artificial Sequence: Synthetic oligonucleotide
  Sense strand starting at position 3836 of SEQ ID NO: 316819
gugagaauguguucucuaa

SEQ ID NO: 442810 - RNA, 19 nt, Artificial Sequence
  Description of Artificial Sequence: Synthetic oligonucleotide
  Antisense Strand to SEQ ID NO: 442809
uuagagaacacauucucac

SEQ ID NO: 442811 - RNA, 19 nt, Artificial Sequence
  Description of Artificial Sequence: Synthetic oligonucleotide
  Sense strand starting at position 3838 of SEQ ID NO: 316819
gagaauguguucucuaaac

SEQ ID NO: 442812 - RNA, 19 nt, Artificial Sequence
  Description of Artificial Sequence: Synthetic oligonucleotide
  Antisense Strand to SEQ ID NO: 442811
guuuagagaacacauucuc

SEQ ID NO: 442813 - RNA, 19 nt, Artificial Sequence
  Description of Artificial Sequence: Synthetic oligonucleotide
  Sense strand starting at position 38 of SEQ ID NO: 316820
gcagguugcccauugcuau

SEQ ID NO: 442814 - RNA, 19 nt, Artificial Sequence
  Description of Artificial Sequence: Synthetic oligonucleotide
  Antisense Strand to SEQ ID NO: 442813
auagcaaugggcaaccugc

SEQ ID NO: 442815 - RNA, 19 nt, Artificial Sequence
  Description of Artificial Sequence: Synthetic oligonucleotide
  Sense strand starting at position 44 of SEQ ID NO: 316820
ugcccauugcuauagaaau

SEQ ID NO: 442816 - RNA, 19 nt, Artificial Sequence
  Description of Artificial Sequence: Synthetic oligonucleotide
  Antisense Strand to SEQ ID NO: 442815
auuucuauagcaaugggca

SEQ ID NO: 442817 - RNA, 19 nt, Artificial Sequence
  Description of Artificial Sequence: Synthetic oligonucleotide
  Sense strand starting at position 88 of SEQ ID NO: 316820
cgccuucugaaauagggaa

SEQ ID NO: 442818 - RNA, 19 nt, Artificial Sequence
  Description of Artificial Sequence: Synthetic oligonucleotide
  Antisense Strand to SEQ ID NO: 442817
uucccuauuucagaaggcg

SEQ ID NO: 442819 - RNA, 19 nt, Artificial Sequence
  Description of Artificial Sequence: Synthetic oligonucleotide
  Sense strand starting at position 105 of SEQ ID NO: 316820
aaaucuggccaugaaugua

SEQ ID NO: 442820 - RNA, 19 nt, Artificial Sequence
  Description of Artificial Sequence: Synthetic oligonucleotide
  Antisense Strand to SEQ ID NO: 442819
uacauucauggccagauuu

SEQ ID NO: 442821 - RNA, 19 nt, Artificial Sequence
  Description of Artificial Sequence: Synthetic oligonucleotide
  Sense strand starting at position 176 of SEQ ID NO: 316820
auucuuugcacauggagga

SEQ ID NO: 442822 - RNA, 19 nt, Artificial Sequence
  Description of Artificial Sequence: Synthetic oligonucleotide
  Antisense Strand to SEQ ID NO: 442821
uccuccaugugcaaagaau

SEQ ID NO: 442823 - RNA, 19 nt, Artificial Sequence
  Description of Artificial Sequence: Synthetic oligonucleotide
  Sense strand starting at position 659 of SEQ ID NO: 316820
gccaaaugaaaguagaguu

SEQ ID NO: 442824 - RNA, 19 nt, Artificial Sequence
  Description of Artificial Sequence: Synthetic oligonucleotide
  Antisense Strand to SEQ ID NO: 442823
aacucuacuuucauuuggc

SEQ ID NO: 442825 - RNA, 19 nt, Artificial Sequence
  Description of Artificial Sequence: Synthetic oligonucleotide
  Sense strand starting at position 951 of SEQ ID NO: 316820
auuggauugcuaugaagag

SEQ ID NO: 442826 - RNA, 19 nt, Artificial Sequence
  Description of Artificial Sequence: Synthetic oligonucleotide
  Antisense Strand to SEQ ID NO: 442825
cucuucauagcaauccaau

SEQ ID NO: 442827 - RNA, 19 nt, Artificial Sequence
  Description of Artificial Sequence: Synthetic oligonucleotide
  Sense strand starting at position 969 of SEQ ID NO: 316820
guuagagcuauuuguccag

SEQ ID NO: 442828 - RNA, 19 nt, Artificial Sequence
  Description of Artificial Sequence: Synthetic oligonucleotide
  Antisense Strand to SEQ ID NO: 442827
cuggacaaauagcucuaac

SEQ ID NO: 442829 - RNA, 19 nt, Artificial Sequence
  Description of Artificial Sequence: Synthetic oligonucleotide
  Sense strand starting at position 972 of SEQ ID NO: 316820
agagcuauuuguccaggca

SEQ ID NO: 442830 - RNA, 19 nt, Artificial Sequence
  Description of Artificial Sequence: Synthetic oligonucleotide
  Antisense Strand to SEQ ID NO: 442829
ugccuggacaaauagcucu

SEQ ID NO: 442831 - RNA, 19 nt, Artificial Sequence
  Description of Artificial Sequence: Synthetic oligonucleotide
  Sense strand starting at position 975 of SEQ ID NO: 316820
gcuauuuguccaggcagaa

SEQ ID NO: 442832 - RNA, 19 nt, Artificial Sequence
  Description of Artificial Sequence: Synthetic oligonucleotide
  Antisense Strand to SEQ ID NO: 442831
uucugccuggacaaauagc

SEQ ID NO: 442833 - RNA, 19 nt, Artificial Sequence
  Description of Artificial Sequence: Synthetic oligonucleotide
  Sense strand starting at position 1119 of SEQ ID NO: 316820
uaaauacccggaugaguug

SEQ ID NO: 442834 - RNA, 19 nt, Artificial Sequence
  Description of Artificial Sequence: Synthetic oligonucleotide
  Antisense Strand to SEQ ID NO: 442833
caacucauccggguauuua

SEQ ID NO: 442835 - RNA, 19 nt, Artificial Sequence
  Description of Artificial Sequence: Synthetic oligonucleotide
  Sense strand starting at position 1236 of SEQ ID NO: 316820
uacugaaaggcucaaaguu

SEQ ID NO: 442836 - RNA, 19 nt, Artificial Sequence
  Description of Artificial Sequence: Synthetic oligonucleotide
  Antisense Strand to SEQ ID NO: 442835
aacuuugagccuuucagua

SEQ ID NO: 442837 - RNA, 19 nt, Artificial Sequence
  Description of Artificial Sequence: Synthetic oligonucleotide
  Sense strand starting at position 1254 of SEQ ID NO: 316820
uggcucucuggacauacau

SEQ ID NO: 442838 - RNA, 19 nt, Artificial Sequence
  Description of Artificial Sequence: Synthetic oligonucleotide
  Antisense Strand to SEQ ID NO: 442837
auguauguccagagagcca

SEQ ID NO: 442839 - RNA, 19 nt, Artificial Sequence
  Description of Artificial Sequence: Synthetic oligonucleotide
  Sense strand starting at position 1436 of SEQ ID NO: 316820
gggucagugcuagaaacuc

SEQ ID NO: 442840 - RNA, 19 nt, Artificial Sequence
  Description of Artificial Sequence: Synthetic oligonucleotide
  Antisense Strand to SEQ ID NO: 442839
gaguuucuagcacugaccc

SEQ ID NO: 442841 - RNA, 19 nt, Artificial Sequence
  Description of Artificial Sequence: Synthetic oligonucleotide
  Sense strand starting at position 1750 of SEQ ID NO: 316820
gugggagugcggagucaau

SEQ ID NO: 442842 - RNA, 19 nt, Artificial Sequence
  Description of Artificial Sequence: Synthetic oligonucleotide
  Antisense Strand to SEQ ID NO: 442841
auugacuccgcacucccac

SEQ ID NO: 442843 - RNA, 19 nt, Artificial Sequence
  Description of Artificial Sequence: Synthetic oligonucleotide
  Sense strand starting at position 1774 of SEQ ID NO: 316820
cccacuagguacuuugaaa

SEQ ID NO: 442844 - RNA, 19 nt, Artificial Sequence
  Description of Artificial Sequence: Synthetic oligonucleotide
  Antisense Strand to SEQ ID NO: 442843
uuucaaaguaccuaguggg

SEQ ID NO: 442845 - RNA, 19 nt, Artificial Sequence
  Description of Artificial Sequence: Synthetic oligonucleotide
  Sense strand starting at position 1987 of SEQ ID NO: 316820
gccugcuauggcucugagu

SEQ ID NO: 442846 - RNA, 19 nt, Artificial Sequence
  Description of Artificial Sequence: Synthetic oligonucleotide
  Antisense Strand to SEQ ID NO: 442845
acucagagccauagcaggc

SEQ ID NO: 442847 - RNA, 19 nt, Artificial Sequence
  Description of Artificial Sequence: Synthetic oligonucleotide
  Sense strand starting at position 2017 of SEQ ID NO: 316820
ggaagugaaacuugguuac

SEQ ID NO: 442848 - RNA, 19 nt, Artificial Sequence
  Description of Artificial Sequence: Synthetic oligonucleotide
  Antisense Strand to SEQ ID NO: 442847
guaaccaaguuucacuucc

SEQ ID NO: 442849 - RNA, 19 nt, Artificial Sequence
  Description of Artificial Sequence: Synthetic oligonucleotide
  Sense strand starting at position 2019 of SEQ ID NO: 316820
aagugaaacuugguuacuu

SEQ ID NO: 442850 - RNA, 19 nt, Artificial Sequence
  Description of Artificial Sequence: Synthetic oligonucleotide
  Antisense Strand to SEQ ID NO: 442849
aaguaaccaaguuucacuu

SEQ ID NO: 442851 - RNA, 19 nt, Artificial Sequence
  Description of Artificial Sequence: Synthetic oligonucleotide
  Sense strand starting at position 2020 of SEQ ID NO: 316820
agugaaacuugguuacuua

SEQ ID NO: 442852 - RNA, 19 nt, Artificial Sequence
  Description of Artificial Sequence: Synthetic oligonucleotide
  Antisense Strand to SEQ ID NO: 442851
uaaguaaccaaguuucacu

SEQ ID NO: 442853 - RNA, 19 nt, Artificial Sequence
  Description of Artificial Sequence: Synthetic oligonucleotide
  Sense strand starting at position 2021 of SEQ ID NO: 316820
gugaaacuugguuacuuac

SEQ ID NO: 442854 - RNA, 19 nt, Artificial Sequence
  Description of Artificial Sequence: Synthetic oligonucleotide
  Antisense Strand to SEQ ID NO: 442853
guaaguaaccaaguuucac

SEQ ID NO: 442855 - RNA, 19 nt, Artificial Sequence
  Description of Artificial Sequence: Synthetic oligonucleotide
  Sense strand starting at position 2089 of SEQ ID NO: 316820
ucugucagucaggaaguau

SEQ ID NO: 442856 - RNA, 19 nt, Artificial Sequence
  Description of Artificial Sequence: Synthetic oligonucleotide
  Antisense Strand to SEQ ID NO: 442855
auacuuccugacugacaga

SEQ ID NO: 442857 - RNA, 19 nt, Artificial Sequence
  Description of Artificial Sequence: Synthetic oligonucleotide
  Sense strand starting at position 2162 of SEQ ID NO: 316820
guugcuaucaaaggaaaug

SEQ ID NO: 442858 - RNA, 19 nt, Artificial Sequence
  Description of Artificial Sequence: Synthetic oligonucleotide
  Antisense Strand to SEQ ID NO: 442857
cauuuccuuugauagcaac

SEQ ID NO: 442859 - RNA, 19 nt, Artificial Sequence
  Description of Artificial Sequence: Synthetic oligonucleotide
  Sense strand starting at position 2345 of SEQ ID NO: 316820
ugaggaagcuucucuauca

SEQ ID NO: 442860 - RNA, 19 nt, Artificial Sequence
  Description of Artificial Sequence: Synthetic oligonucleotide
  Antisense Strand to SEQ ID NO: 442859
ugauagagaagcuuccuca

SEQ ID NO: 442861 - RNA, 19 nt, Artificial Sequence
  Description of Artificial Sequence: Synthetic oligonucleotide
  Sense strand starting at position 2346 of SEQ ID NO: 316820
gaggaagcuucucuaucag

SEQ ID NO: 442862 - RNA, 19 nt, Artificial Sequence
  Description of Artificial Sequence: Synthetic oligonucleotide
  Antisense Strand to SEQ ID NO: 442861
cugauagagaagcuuccuc

SEQ ID NO: 442863 - RNA, 19 nt, Artificial Sequence
  Description of Artificial Sequence: Synthetic oligonucleotide
  Sense strand starting at position 2406 of SEQ ID NO: 316820
aaauucgacccugaaguuu

SEQ ID NO: 442864 - RNA, 19 nt, Artificial Sequence
  Description of Artificial Sequence: Synthetic oligonucleotide
  Antisense Strand to SEQ ID NO: 442863
aaacuucagggucgaauuu

SEQ ID NO: 442865 - RNA, 19 nt, Artificial Sequence
  Description of Artificial Sequence: Synthetic oligonucleotide
  Sense strand starting at position 2484 of SEQ ID NO: 316820
caaugcuccgaauagggau

SEQ ID NO: 442866 - RNA, 19 nt, Artificial Sequence
  Description of Artificial Sequence: Synthetic oligonucleotide
  Antisense Strand to SEQ ID NO: 442865
aucccuauucggagcauug

SEQ ID NO: 442867 - RNA, 19 nt, Artificial Sequence
  Description of Artificial Sequence: Synthetic oligonucleotide
  Sense strand starting at position 2606 of SEQ ID NO: 316820
auuagaacuccuggagucu

SEQ ID NO: 442868 - RNA, 19 nt, Artificial Sequence
  Description of Artificial Sequence: Synthetic oligonucleotide
  Antisense Strand to SEQ ID NO: 442867
agacuccaggaguucuaau

SEQ ID NO: 442869 - RNA, 19 nt, Artificial Sequence
  Description of Artificial Sequence: Synthetic oligonucleotide
  Sense strand starting at position 2607 of SEQ ID NO: 316820
uuagaacuccuggagucuu

SEQ ID NO: 442870 - RNA, 19 nt, Artificial Sequence
  Description of Artificial Sequence: Synthetic oligonucleotide
  Antisense Strand to SEQ ID NO: 442869
aagacuccaggaguucuaa

SEQ ID NO: 442871 - RNA, 19 nt, Artificial Sequence
  Description of Artificial Sequence: Synthetic oligonucleotide
  Sense strand starting at position 2674 of SEQ ID NO: 316820
guguaauggcaugaccuga

SEQ ID NO: 442872 - RNA, 19 nt, Artificial Sequence
  Description of Artificial Sequence: Synthetic oligonucleotide
  Antisense Strand to SEQ ID NO: 442871
ucaggucaugccauuacac

SEQ ID NO: 442873 - RNA, 19 nt, Artificial Sequence
  Description of Artificial Sequence: Synthetic oligonucleotide
  Sense strand starting at position 2813 of SEQ ID NO: 316820
ggguuucacccucagguga

SEQ ID NO: 442874 - RNA, 19 nt, Artificial Sequence
  Description of Artificial Sequence: Synthetic oligonucleotide
  Antisense Strand to SEQ ID NO: 442873
ucaccugagggugaaaccc

SEQ ID NO: 442875 - RNA, 19 nt, Artificial Sequence
  Description of Artificial Sequence: Synthetic oligonucleotide
  Sense strand starting at position 2890 of SEQ ID NO: 316820
ccugaacuccuagagucuu

SEQ ID NO: 442876 - RNA, 19 nt, Artificial Sequence
  Description of Artificial Sequence: Synthetic oligonucleotide
  Antisense Strand to SEQ ID NO: 442875
aagacucuaggaguucagg

SEQ ID NO: 442877 - RNA, 19 nt, Artificial Sequence
  Description of Artificial Sequence: Synthetic oligonucleotide
  Sense strand starting at position 2964 of SEQ ID NO: 316820
ucauauguagagcaggauu

SEQ ID NO: 442878 - RNA, 19 nt, Artificial Sequence
  Description of Artificial Sequence: Synthetic oligonucleotide
  Antisense Strand to SEQ ID NO: 442877
aauccugcucuacauauga

SEQ ID NO: 442879 - RNA, 19 nt, Artificial Sequence
  Description of Artificial Sequence: Synthetic oligonucleotide
  Sense strand starting at position 2967 of SEQ ID NO: 316820
uauguagagcaggauucua

SEQ ID NO: 442880 - RNA, 19 nt, Artificial Sequence
  Description of Artificial Sequence: Synthetic oligonucleotide
  Antisense Strand to SEQ ID NO: 442879
uagaauccugcucuacaua

SEQ ID NO: 442881 - RNA, 19 nt, Artificial Sequence
  Description of Artificial Sequence: Synthetic oligonucleotide
  Sense strand starting at position 2992 of SEQ ID NO: 316820
uggaaugcuaaagguaaau

SEQ ID NO: 442882 - RNA, 19 nt, Artificial Sequence
  Description of Artificial Sequence: Synthetic oligonucleotide
  Antisense Strand to SEQ ID NO: 442881
auuuaccuuuagcauucca

SEQ ID NO: 442883 - RNA, 19 nt, Artificial Sequence
  Description of Artificial Sequence: Synthetic oligonucleotide
  Sense strand starting at position 3005 of SEQ ID NO: 316820
guaaauugcagugacugaa

SEQ ID NO: 442884 - RNA, 19 nt, Artificial Sequence
  Description of Artificial Sequence: Synthetic oligonucleotide
  Antisense Strand to SEQ ID NO: 442883
uucagucacugcaauuuac

SEQ ID NO: 442885 - RNA, 19 nt, Artificial Sequence
  Description of Artificial Sequence: Synthetic oligonucleotide
  Sense strand starting at position 3015 of SEQ ID NO: 316820
gugacugaauccuugggaa

SEQ ID NO: 442886 - RNA, 19 nt, Artificial Sequence
  Description of Artificial Sequence: Synthetic oligonucleotide
  Antisense Strand to SEQ ID NO: 442885
uucccaaggauucagucac

SEQ ID NO: 442887 - RNA, 19 nt, Artificial Sequence
  Description of Artificial Sequence: Synthetic oligonucleotide
  Sense strand starting at position 3017 of SEQ ID NO: 316820
gacugaauccuugggaagu

SEQ ID NO: 442888 - RNA, 19 nt, Artificial Sequence
  Description of Artificial Sequence: Synthetic oligonucleotide
  Antisense Strand to SEQ ID NO: 442887
acuucccaaggauucaguc

SEQ ID NO: 442889 - RNA, 19 nt, Artificial Sequence
  Description of Artificial Sequence: Synthetic oligonucleotide
  Sense strand starting at position 3417 of SEQ ID NO: 316820
cugacuaaaugagcacuua

SEQ ID NO: 442890 - RNA, 19 nt, Artificial Sequence
  Description of Artificial Sequence: Synthetic oligonucleotide
  Antisense Strand to SEQ ID NO: 442889
uaagugcucauuuagucag

SEQ ID NO: 442891 - RNA, 19 nt, Artificial Sequence
  Description of Artificial Sequence: Synthetic oligonucleotide
  Sense strand starting at position 3774 of SEQ ID NO: 316820
ugucccacuuugucauuua

SEQ ID NO: 442892 - RNA, 19 nt, Artificial Sequence
  Description of Artificial Sequence: Synthetic oligonucleotide
  Antisense Strand to SEQ ID NO: 442891
uaaaugacaaagugggaca

SEQ ID NO: 442893 - RNA, 19 nt, Artificial Sequence
  Description of Artificial Sequence: Synthetic oligonucleotide
  Sense strand starting at position 353 of SEQ ID NO: 316821
gcagcugaauaucuacaaa

SEQ ID NO: 442894 - RNA, 19 nt, Artificial Sequence
  Description of Artificial Sequence: Synthetic oligonucleotide
  Antisense Strand to SEQ ID NO: 442893
uuuguagauauucagcugc

SEQ ID NO: 442895 - RNA, 19 nt, Artificial Sequence
  Description of Artificial Sequence: Synthetic oligonucleotide
  Sense strand starting at position 394 of SEQ ID NO: 316821
auggauaagguauggcaua

SEQ ID NO: 442896 - RNA, 19 nt, Artificial Sequence
  Description of Artificial Sequence: Synthetic oligonucleotide
  Antisense Strand to SEQ ID NO: 442895
uaugccauaccuuauccau

SEQ ID NO: 442897 - RNA, 19 nt, Artificial Sequence
  Description of Artificial Sequence: Synthetic oligonucleotide
  Sense strand starting at position 399 of SEQ ID NO: 316821
uaagguauggcauauuaau

SEQ ID NO: 442898 - RNA, 19 nt, Artificial Sequence
  Description of Artificial Sequence: Synthetic oligonucleotide
  Antisense Strand to SEQ ID NO: 442897
auuaauaugccauaccuua

SEQ ID NO: 442899 - RNA, 19 nt, Artificial Sequence
  Description of Artificial Sequence: Synthetic oligonucleotide
  Sense strand starting at position 450 of SEQ ID NO: 316821
guaguuuccucaucuuaaa

SEQ ID NO: 442900 - RNA, 19 nt, Artificial Sequence
  Description of Artificial Sequence: Synthetic oligonucleotide
  Antisense Strand to SEQ ID NO: 442899
uuuaagaugaggaaacuac

SEQ ID NO: 442901 - RNA, 19 nt, Artificial Sequence
  Description of Artificial Sequence: Synthetic oligonucleotide
  Sense strand starting at position 477 of SEQ ID NO: 316821
aaaguuauccuacaggguu

SEQ ID NO: 442902 - RNA, 19 nt, Artificial Sequence
  Description of Artificial Sequence: Synthetic oligonucleotide
  Antisense Strand to SEQ ID NO: 442901
aacccuguaggauaacuuu

SEQ ID NO: 442903 - RNA, 19 nt, Artificial Sequence
  Description of Artificial Sequence: Synthetic oligonucleotide
  Sense strand starting at position 490 of SEQ ID NO: 316821
aggguuugugagcaguaaa

SEQ ID NO: 442904 - RNA, 19 nt, Artificial Sequence
  Description of Artificial Sequence: Synthetic oligonucleotide
  Antisense Strand to SEQ ID NO: 442903
uuuacugcucacaaacccu

SEQ ID NO: 442905 - RNA, 19 nt, Artificial Sequence
  Description of Artificial Sequence: Synthetic oligonucleotide
  Sense strand starting at position 493 of SEQ ID NO: 316821
guuugugagcaguaaacga

SEQ ID NO: 442906 - RNA, 19 nt, Artificial Sequence
  Description of Artificial Sequence: Synthetic oligonucleotide
  Antisense Strand to SEQ ID NO: 442905
ucguuuacugcucacaaac

SEQ ID NO: 442907 - RNA, 19 nt, Artificial Sequence
  Description of Artificial Sequence: Synthetic oligonucleotide
  Sense strand starting at position 511 of SEQ ID NO: 316821
aaguaaagugcuuagcaug

SEQ ID NO: 442908 - RNA, 19 nt, Artificial Sequence
  Description of Artificial Sequence: Synthetic oligonucleotide
  Antisense Strand to SEQ ID NO: 442907
caugcuaagcacuuuacuu

SEQ ID NO: 442909 - RNA, 19 nt, Artificial Sequence
  Description of Artificial Sequence: Synthetic oligonucleotide
  Sense strand starting at position 528 of SEQ ID NO: 316821
uggugucuggcacauaaua

SEQ ID NO: 442910 - RNA, 19 nt, Artificial Sequence
  Description of Artificial Sequence: Synthetic oligonucleotide
  Antisense Strand to SEQ ID NO: 442909
uauuaugugccagacacca

SEQ ID NO: 442911 - RNA, 19 nt, Artificial Sequence
  Description of Artificial Sequence: Synthetic oligonucleotide
  Sense strand starting at position 550 of SEQ ID NO: 316821
guuaauuaagugcaaguua

SEQ ID NO: 442912 - RNA, 19 nt, Artificial Sequence
  Description of Artificial Sequence: Synthetic oligonucleotide
  Antisense Strand to SEQ ID NO: 442911
uaacuugcacuuaauuaac

SEQ ID NO: 442913 - RNA, 19 nt, Artificial Sequence
  Description of Artificial Sequence: Synthetic oligonucleotide
  Sense strand starting at position 728 of SEQ ID NO: 316821
uauagaaagcugcauggua

SEQ ID NO: 442914 - RNA, 19 nt, Artificial Sequence
  Description of Artificial Sequence: Synthetic oligonucleotide
  Antisense Strand to SEQ ID NO: 442913
uaccaugcagcuuucuaua

SEQ ID NO: 442915 - RNA, 19 nt, Artificial Sequence
  Description of Artificial Sequence: Synthetic oligonucleotide
  Sense strand starting at position 730 of SEQ ID NO: 316821
uagaaagcugcaugguaaa

SEQ ID NO: 442916 - RNA, 19 nt, Artificial Sequence
  Description of Artificial Sequence: Synthetic oligonucleotide
  Antisense Strand to SEQ ID NO: 442915
uuuaccaugcagcuuucua

SEQ ID NO: 442917 - RNA, 19 nt, Artificial Sequence
  Description of Artificial Sequence: Synthetic oligonucleotide
  Sense strand starting at position 858 of SEQ ID NO: 316821
agguuacugagguguagga

SEQ ID NO: 442918 - RNA, 19 nt, Artificial Sequence
  Description of Artificial Sequence: Synthetic oligonucleotide
  Antisense Strand to SEQ ID NO: 442917
uccuacaccucaguaaccu

SEQ ID NO: 442919 - RNA, 19 nt, Artificial Sequence
  Description of Artificial Sequence: Synthetic oligonucleotide
  Sense strand starting at position 860 of SEQ ID NO: 316821
guuacugagguguaggaga

SEQ ID NO: 442920 - RNA, 19 nt, Artificial Sequence
  Description of Artificial Sequence: Synthetic oligonucleotide
  Antisense Strand to SEQ ID NO: 442919
ucuccuacaccucaguaac

SEQ ID NO: 442921 - RNA, 19 nt, Artificial Sequence
  Description of Artificial Sequence: Synthetic oligonucleotide
  Sense strand starting at position 999 of SEQ ID NO: 316821
uggucagaugauugaauau

SEQ ID NO: 442922 - RNA, 19 nt, Artificial Sequence
  Description of Artificial Sequence: Synthetic oligonucleotide
  Antisense Strand to SEQ ID NO: 442921
auauucaaucaucugacca

SEQ ID NO: 442923 - RNA, 19 nt, Artificial Sequence
  Description of Artificial Sequence: Synthetic oligonucleotide
  Sense strand starting at position 1127 of SEQ ID NO: 316821
ugucuugguaugcagauaa

SEQ ID NO: 442924 - RNA, 19 nt, Artificial Sequence
  Description of Artificial Sequence: Synthetic oligonucleotide
  Antisense Strand to SEQ ID NO: 442923
uuaucugcauaccaagaca

SEQ ID NO: 442925 - RNA, 19 nt, Artificial Sequence
  Description of Artificial Sequence: Synthetic oligonucleotide
  Sense strand starting at position 1131 of SEQ ID NO: 316821
uugguaugcagauaagauc

SEQ ID NO: 442926 - RNA, 19 nt, Artificial Sequence
  Description of Artificial Sequence: Synthetic oligonucleotide
  Antisense Strand to SEQ ID NO: 442925
gaucuuaucugcauaccaa

SEQ ID NO: 442927 - RNA, 19 nt, Artificial Sequence
  Description of Artificial Sequence: Synthetic oligonucleotide
  Sense strand starting at position 1139 of SEQ ID NO: 316821
cagauaagaucucccaggu

SEQ ID NO: 442928 - RNA, 19 nt, Artificial Sequence
  Description of Artificial Sequence: Synthetic oligonucleotide
  Antisense Strand to SEQ ID NO: 442927
accugggagaucuuaucug

SEQ ID NO: 442929 - RNA, 19 nt, Artificial Sequence
  Description of Artificial Sequence: Synthetic oligonucleotide
  Sense strand starting at position 1308 of SEQ ID NO: 316821
acucuagaaguauauugua

SEQ ID NO: 442930 - RNA, 19 nt, Artificial Sequence
  Description of Artificial Sequence: Synthetic oligonucleotide
  Antisense Strand to SEQ ID NO: 442929
uacaauauacuucuagagu

SEQ ID NO: 442931 - RNA, 19 nt, Artificial Sequence
  Description of Artificial Sequence: Synthetic oligonucleotide
  Sense strand starting at position 1318 of SEQ ID NO: 316821
uauauuguaggguggcaua

SEQ ID NO: 442932 - RNA, 19 nt, Artificial Sequence
  Description of Artificial Sequence: Synthetic oligonucleotide
  Antisense Strand to SEQ ID NO: 442931
uaugccacccuacaauaua

SEQ ID NO: 442933 - RNA, 19 nt, Artificial Sequence
  Description of Artificial Sequence: Synthetic oligonucleotide
  Sense strand starting at position 1384 of SEQ ID NO: 316821
aacagaaguucugucugau

SEQ ID NO: 442934 - RNA, 19 nt, Artificial Sequence
  Description of Artificial Sequence: Synthetic oligonucleotide
  Antisense Strand to SEQ ID NO: 442933
aucagacagaacuucuguu

SEQ ID NO: 442935 - RNA, 19 nt, Artificial Sequence
  Description of Artificial Sequence: Synthetic oligonucleotide
  Sense strand starting at position 1720 of SEQ ID NO: 316821
cgucgucucccuucucaga

SEQ ID NO: 442936 - RNA, 19 nt, Artificial Sequence
  Description of Artificial Sequence: Synthetic oligonucleotide
  Antisense Strand to SEQ ID NO: 442935
ucugagaagggagacgacg

SEQ ID NO: 442937 - RNA, 19 nt, Artificial Sequence
  Description of Artificial Sequence: Synthetic oligonucleotide
  Sense strand starting at position 1864 of SEQ ID NO: 316821
guucucacucuuggaggau

SEQ ID NO: 442938 - RNA, 19 nt, Artificial Sequence
  Description of Artificial Sequence: Synthetic oligonucleotide
  Antisense Strand to SEQ ID NO: 442937
auccuccaagagugagaac

SEQ ID NO: 442939 - RNA, 19 nt, Artificial Sequence
  Description of Artificial Sequence: Synthetic oligonucleotide
  Sense strand starting at position 2561 of SEQ ID NO: 316821
ggaucugagguucggagaa

SEQ ID NO: 442940 - RNA, 19 nt, Artificial Sequence
  Description of Artificial Sequence: Synthetic oligonucleotide
  Antisense Strand to SEQ ID NO: 442939
uucuccgaaccucagaucc

SEQ ID NO: 442941 - RNA, 19 nt, Artificial Sequence
  Description of Artificial Sequence: Synthetic oligonucleotide
  Sense strand starting at position 2573 of SEQ ID NO: 316821
cggagaagucagggacuua

SEQ ID NO: 442942 - RNA, 19 nt, Artificial Sequence
  Description of Artificial Sequence: Synthetic oligonucleotide
  Antisense Strand to SEQ ID NO: 442941
uaagucccugacuucuccg

SEQ ID NO: 442943 - RNA, 19 nt, Artificial Sequence
  Description of Artificial Sequence: Synthetic oligonucleotide
  Sense strand starting at position 2758 of SEQ ID NO: 316821
gcgaucagacaucaaauau

SEQ ID NO: 442944 - RNA, 19 nt, Artificial Sequence
  Description of Artificial Sequence: Synthetic oligonucleotide
  Antisense Strand to SEQ ID NO: 442943
auauuugaugucugaucgc

SEQ ID NO: 442945 - RNA, 19 nt, Artificial Sequence
  Description of Artificial Sequence: Synthetic oligonucleotide
  Sense strand starting at position 2856 of SEQ ID NO: 316821
ugauucuacccuuguccua

SEQ ID NO: 442946 - RNA, 19 nt, Artificial Sequence
  Description of Artificial Sequence: Synthetic oligonucleotide
  Antisense Strand to SEQ ID NO: 442945
uaggacaaggguagaauca

SEQ ID NO: 442947 - RNA, 19 nt, Artificial Sequence
  Description of Artificial Sequence: Synthetic oligonucleotide
  Sense strand starting at position 2922 of SEQ ID NO: 316821
uggccauucuuauuuaugu

SEQ ID NO: 442948 - RNA, 19 nt, Artificial Sequence
  Description of Artificial Sequence: Synthetic oligonucleotide
  Antisense Strand to SEQ ID NO: 442947
acauaaauaagaauggcca

SEQ ID NO: 442949 - RNA, 19 nt, Artificial Sequence
  Description of Artificial Sequence: Synthetic oligonucleotide
  Sense strand starting at position 2923 of SEQ ID NO: 316821
ggccauucuuauuuaugua

SEQ ID NO: 442950 - RNA, 19 nt, Artificial Sequence
  Description of Artificial Sequence: Synthetic oligonucleotide
  Antisense Strand to SEQ ID NO: 442949
uacauaaauaagaauggcc

SEQ ID NO: 442951 - RNA, 19 nt, Artificial Sequence
  Description of Artificial Sequence: Synthetic oligonucleotide
  Sense strand starting at position 3063 of SEQ ID NO: 316821
gagauaggaugugcaaguu

SEQ ID NO: 442952 - RNA, 19 nt, Artificial Sequence
  Description of Artificial Sequence: Synthetic oligonucleotide
  Antisense Strand to SEQ ID NO: 442951
aacuugcacauccuaucuc

SEQ ID NO: 442953 - RNA, 19 nt, Artificial Sequence
  Description of Artificial Sequence: Synthetic oligonucleotide
  Sense strand starting at position 3069 of SEQ ID NO: 316821
ggaugugcaaguuaucuca

SEQ ID NO: 442954 - RNA, 19 nt, Artificial Sequence
  Description of Artificial Sequence: Synthetic oligonucleotide
  Antisense Strand to SEQ ID NO: 442953
ugagauaacuugcacaucc

SEQ ID NO: 442955 - RNA, 19 nt, Artificial Sequence
  Description of Artificial Sequence: Synthetic oligonucleotide
  Sense strand starting at position 3089 of SEQ ID NO: 316821
aaagaaacugcuggugaua

SEQ ID NO: 442956 - RNA, 19 nt, Artificial Sequence
  Description of Artificial Sequence: Synthetic oligonucleotide
  Antisense Strand to SEQ ID NO: 442955
uaucaccagcaguuucuuu

SEQ ID NO: 442957 - RNA, 19 nt, Artificial Sequence
  Description of Artificial Sequence: Synthetic oligonucleotide
  Sense strand starting at position 3156 of SEQ ID NO: 316821
guugaagaagcguauuugu

SEQ ID NO: 442958 - RNA, 19 nt, Artificial Sequence
  Description of Artificial Sequence: Synthetic oligonucleotide
  Antisense Strand to SEQ ID NO: 442957
acaaauacgcuucuucaac

SEQ ID NO: 442959 - RNA, 19 nt, Artificial Sequence
  Description of Artificial Sequence: Synthetic oligonucleotide
  Sense strand starting at position 3184 of SEQ ID NO: 316821
guacuaaaggcuuauugag

SEQ ID NO: 442960 - RNA, 19 nt, Artificial Sequence
  Description of Artificial Sequence: Synthetic oligonucleotide
  Antisense Strand to SEQ ID NO: 442959
cucaauaagccuuuaguac

SEQ ID NO: 442961 - RNA, 19 nt, Artificial Sequence
  Description of Artificial Sequence: Synthetic oligonucleotide
  Sense strand starting at position 3271 of SEQ ID NO: 316821
ccauuauagccuggagaga

SEQ ID NO: 442962 - RNA, 19 nt, Artificial Sequence
  Description of Artificial Sequence: Synthetic oligonucleotide
  Antisense Strand to SEQ ID NO: 442961
ucucuccaggcuauaaugg

SEQ ID NO: 442963 - RNA, 19 nt, Artificial Sequence
  Description of Artificial Sequence: Synthetic oligonucleotide
  Sense strand starting at position 3396 of SEQ ID NO: 316821
uagggugauguugggaaua

SEQ ID NO: 442964 - RNA, 19 nt, Artificial Sequence
  Description of Artificial Sequence: Synthetic oligonucleotide
  Antisense Strand to SEQ ID NO: 442963
uauucccaacaucacccua

SEQ ID NO: 442965 - RNA, 19 nt, Artificial Sequence
  Description of Artificial Sequence: Synthetic oligonucleotide
  Sense strand starting at position 3459 of SEQ ID NO: 316821
ucagauggaugauaagaca

SEQ ID NO: 442966 - RNA, 19 nt, Artificial Sequence
  Description of Artificial Sequence: Synthetic oligonucleotide
  Antisense Strand to SEQ ID NO: 442965
ugucuuaucauccaucuga

SEQ ID NO: 442967 - RNA, 19 nt, Artificial Sequence
  Description of Artificial Sequence: Synthetic oligonucleotide
  Sense strand starting at position 3778 of SEQ ID NO: 316821
ccugaaugagucuaccuuu

SEQ ID NO: 442968 - RNA, 19 nt, Artificial Sequence
  Description of Artificial Sequence: Synthetic oligonucleotide
  Antisense Strand to SEQ ID NO: 442967
aaagguagacucauucagg

SEQ ID NO: 442969 - RNA, 19 nt, Artificial Sequence
  Description of Artificial Sequence: Synthetic oligonucleotide
  Sense strand starting at position 3835 of SEQ ID NO: 316821
ggacuuuaacuccagcauu

SEQ ID NO: 442970 - RNA, 19 nt, Artificial Sequence
  Description of Artificial Sequence: Synthetic oligonucleotide
  Antisense Strand to SEQ ID NO: 442969
aaugcuggaguuaaagucc

SEQ ID NO: 442971 - RNA, 19 nt, Artificial Sequence
  Description of Artificial Sequence: Synthetic oligonucleotide
  Sense strand starting at position 3937 of SEQ ID NO: 316821
cuauguaacuuagcaaaga

SEQ ID NO: 442972 - RNA, 19 nt, Artificial Sequence
  Description of Artificial Sequence: Synthetic oligonucleotide
  Antisense Strand to SEQ ID NO: 442971
ucuuugcuaaguuacauag

SEQ ID NO: 442973 - RNA, 19 nt, Artificial Sequence
  Description of Artificial Sequence: Synthetic oligonucleotide
  Sense strand starting at position 2006 of SEQ ID NO: 316822
gcggaaguguugcuacuuu

SEQ ID NO: 442974 - RNA, 19 nt, Artificial Sequence
  Description of Artificial Sequence: Synthetic oligonucleotide
  Antisense Strand to SEQ ID NO: 442973
aaaguagcaacacuuccgc

SEQ ID NO: 442975 - RNA, 19 nt, Artificial Sequence
  Description of Artificial Sequence: Synthetic oligonucleotide
  Sense strand starting at position 2030 of SEQ ID NO: 316822
cucucuauucuaggaggaa

SEQ ID NO: 442976 - RNA, 19 nt, Artificial Sequence
  Description of Artificial Sequence: Synthetic oligonucleotide
  Antisense Strand to SEQ ID NO: 442975
uuccuccuagaauagagag

SEQ ID NO: 442977 - RNA, 19 nt, Artificial Sequence
  Description of Artificial Sequence: Synthetic oligonucleotide
  Sense strand starting at position 2031 of SEQ ID NO: 316822
ucucuauucuaggaggaag

SEQ ID NO: 442978 - RNA, 19 nt, Artificial Sequence
  Description of Artificial Sequence: Synthetic oligonucleotide
  Antisense Strand to SEQ ID NO: 442977
cuuccuccuagaauagaga

SEQ ID NO: 442979 - RNA, 19 nt, Artificial Sequence
  Description of Artificial Sequence: Synthetic oligonucleotide
  Sense strand starting at position 2043 of SEQ ID NO: 316822
gaggaaguccauuguuaca

SEQ ID NO: 442980 - RNA, 19 nt, Artificial Sequence
  Description of Artificial Sequence: Synthetic oligonucleotide
  Antisense Strand to SEQ ID NO: 442979
uguaacaauggacuuccuc

SEQ ID NO: 442981 - RNA, 19 nt, Artificial Sequence
  Description of Artificial Sequence: Synthetic oligonucleotide
  Sense strand starting at position 2045 of SEQ ID NO: 316822
ggaaguccauuguuacaga

SEQ ID NO: 442982 - RNA, 19 nt, Artificial Sequence
  Description of Artificial Sequence: Synthetic oligonucleotide
  Antisense Strand to SEQ ID NO: 442981
ucuguaacaauggacuucc

SEQ ID NO: 442983 - RNA, 19 nt, Artificial Sequence
  Description of Artificial Sequence: Synthetic oligonucleotide
  Sense strand starting at position 2046 of SEQ ID NO: 316822
gaaguccauuguuacagau

SEQ ID NO: 442984 - RNA, 19 nt, Artificial Sequence
  Description of Artificial Sequence: Synthetic oligonucleotide
  Antisense Strand to SEQ ID NO: 442983
aucuguaacaauggacuuc

SEQ ID NO: 442985 - RNA, 19 nt, Artificial Sequence
  Description of Artificial Sequence: Synthetic oligonucleotide
  Sense strand starting at position 2048 of SEQ ID NO: 316822
aguccauuguuacagaugu

SEQ ID NO: 442986 - RNA, 19 nt, Artificial Sequence
  Description of Artificial Sequence: Synthetic oligonucleotide
  Antisense Strand to SEQ ID NO: 442985
acaucuguaacaauggacu

SEQ ID NO: 442987 - RNA, 19 nt, Artificial Sequence
  Description of Artificial Sequence: Synthetic oligonucleotide
  Sense strand starting at position 2050 of SEQ ID NO: 316822
uccauuguuacagaugugu

SEQ ID NO: 442988 - RNA, 19 nt, Artificial Sequence
  Description of Artificial Sequence: Synthetic oligonucleotide
  Antisense Strand to SEQ ID NO: 442987
acacaucuguaacaaugga

SEQ ID NO: 442989 - RNA, 19 nt, Artificial Sequence
  Description of Artificial Sequence: Synthetic oligonucleotide
  Sense strand starting at position 2054 of SEQ ID NO: 316822
uuguuacagauguguauua

SEQ ID NO: 442990 - RNA, 19 nt, Artificial Sequence
  Description of Artificial Sequence: Synthetic oligonucleotide
  Antisense Strand to SEQ ID NO: 442989
uaauacacaucuguaacaa

SEQ ID NO: 442991 - RNA, 19 nt, Artificial Sequence
  Description of Artificial Sequence: Synthetic oligonucleotide
  Sense strand starting at position 2056 of SEQ ID NO: 316822
guuacagauguguauuaca

SEQ ID NO: 442992 - RNA, 19 nt, Artificial Sequence
  Description of Artificial Sequence: Synthetic oligonucleotide
  Antisense Strand to SEQ ID NO: 442991
uguaauacacaucuguaac

SEQ ID NO: 442993 - RNA, 19 nt, Artificial Sequence
  Description of Artificial Sequence: Synthetic oligonucleotide
  Sense strand starting at position 2061 of SEQ ID NO: 316822
agauguguauuacaaaucu

SEQ ID NO: 442994 - RNA, 19 nt, Artificial Sequence
  Description of Artificial Sequence: Synthetic oligonucleotide
  Antisense Strand to SEQ ID NO: 442993
agauuuguaauacacaucu

SEQ ID NO: 442995 - RNA, 19 nt, Artificial Sequence
  Description of Artificial Sequence: Synthetic oligonucleotide
  Sense strand starting at position 2089 of SEQ ID NO: 316822
cucuguggguugucguauu

SEQ ID NO: 442996 - RNA, 19 nt, Artificial Sequence
  Description of Artificial Sequence: Synthetic oligonucleotide
  Antisense Strand to SEQ ID NO: 442995
aauacgacaacccacagag

SEQ ID NO: 442997 - RNA, 19 nt, Artificial Sequence
  Description of Artificial Sequence: Synthetic oligonucleotide
  Sense strand starting at position 2102 of SEQ ID NO: 316822
cguauucucucaguggugu

SEQ ID NO: 442998 - RNA, 19 nt, Artificial Sequence
  Description of Artificial Sequence: Synthetic oligonucleotide
  Antisense Strand to SEQ ID NO: 442997
acaccacugagagaauacg

SEQ ID NO: 442999 - RNA, 19 nt, Artificial Sequence
  Description of Artificial Sequence: Synthetic oligonucleotide
  Sense strand starting at position 2128 of SEQ ID NO: 316822
aaaggaaguucuugauguu

SEQ ID NO: 443000 - RNA, 19 nt, Artificial Sequence
  Description of Artificial Sequence: Synthetic oligonucleotide
  Antisense Strand to SEQ ID NO: 442999
aacaucaagaacuuccuuu

SEQ ID NO: 443001 - RNA, 19 nt, Artificial Sequence
  Description of Artificial Sequence: Synthetic oligonucleotide
  Sense strand starting at position 2338 of SEQ ID NO: 316822
cccugcuuugccgaugcua

SEQ ID NO: 443002 - RNA, 19 nt, Artificial Sequence
  Description of Artificial Sequence: Synthetic oligonucleotide
  Antisense Strand to SEQ ID NO: 443001
uagcaucggcaaagcaggg

SEQ ID NO: 443003 - RNA, 19 nt, Artificial Sequence
  Description of Artificial Sequence: Synthetic oligonucleotide
  Sense strand starting at position 2340 of SEQ ID NO: 316822
cugcuuugccgaugcuagu

SEQ ID NO: 443004 - RNA, 19 nt, Artificial Sequence
  Description of Artificial Sequence: Synthetic oligonucleotide
  Antisense Strand to SEQ ID NO: 443003
acuagcaucggcaaagcag

SEQ ID NO: 443005 - RNA, 19 nt, Artificial Sequence
  Description of Artificial Sequence: Synthetic oligonucleotide
  Sense strand starting at position 2346 of SEQ ID NO: 316822
ugccgaugcuagucuggaa

SEQ ID NO: 443006 - RNA, 19 nt, Artificial Sequence
  Description of Artificial Sequence: Synthetic oligonucleotide
  Antisense Strand to SEQ ID NO: 443005
uuccagacuagcaucggca

SEQ ID NO: 443007 - RNA, 19 nt, Artificial Sequence
  Description of Artificial Sequence: Synthetic oligonucleotide
  Sense strand starting at position 3213 of SEQ ID NO: 316822
cuaggagucuuggagggaa

SEQ ID NO: 443008 - RNA, 19 nt, Artificial Sequence
  Description of Artificial Sequence: Synthetic oligonucleotide
  Antisense Strand to SEQ ID NO: 443007
uucccuccaagacuccuag

SEQ ID NO: 443009 - RNA, 19 nt, Artificial Sequence
  Description of Artificial Sequence: Synthetic oligonucleotide
  Sense strand starting at position 3382 of SEQ ID NO: 316822
ugguuagugucuuucaugu

SEQ ID NO: 443010 - RNA, 19 nt, Artificial Sequence
  Description of Artificial Sequence: Synthetic oligonucleotide
  Antisense Strand to SEQ ID NO: 443009
acaugaaagacacuaacca

SEQ ID NO: 443011 - RNA, 19 nt, Artificial Sequence
  Description of Artificial Sequence: Synthetic oligonucleotide
  Sense strand starting at position 3406 of SEQ ID NO: 316822
ucaggacauuaguaccuau

SEQ ID NO: 443012 - RNA, 19 nt, Artificial Sequence
  Description of Artificial Sequence: Synthetic oligonucleotide
  Antisense Strand to SEQ ID NO: 443011
auagguacuaauguccuga

SEQ ID NO: 443013 - RNA, 19 nt, Artificial Sequence
  Description of Artificial Sequence: Synthetic oligonucleotide
  Sense strand starting at position 3409 of SEQ ID NO: 316822
ggacauuaguaccuauuac

SEQ ID NO: 443014 - RNA, 19 nt, Artificial Sequence
  Description of Artificial Sequence: Synthetic oligonucleotide
  Antisense Strand to SEQ ID NO: 443013
guaauagguacuaaugucc

SEQ ID NO: 443015 - RNA, 19 nt, Artificial Sequence
  Description of Artificial Sequence: Synthetic oligonucleotide
  Sense strand starting at position 3413 of SEQ ID NO: 316822
auuaguaccuauuacauga

SEQ ID NO: 443016 - RNA, 19 nt, Artificial Sequence
  Description of Artificial Sequence: Synthetic oligonucleotide
  Antisense Strand to SEQ ID NO: 443015
ucauguaauagguacuaau

SEQ ID NO: 443017 - RNA, 19 nt, Artificial Sequence
  Description of Artificial Sequence: Synthetic oligonucleotide
  Sense strand starting at position 3420 of SEQ ID NO: 316822
ccuauuacaugauacuagu

SEQ ID NO: 443018 - RNA, 19 nt, Artificial Sequence
  Description of Artificial Sequence: Synthetic oligonucleotide
  Antisense Strand to SEQ ID NO: 443017
acuaguaucauguaauagg

SEQ ID NO: 443019 - RNA, 19 nt, Artificial Sequence
  Description of Artificial Sequence: Synthetic oligonucleotide
  Sense strand starting at position 3426 of SEQ ID NO: 316822
acaugauacuaguaaaguu

SEQ ID NO: 443020 - RNA, 19 nt, Artificial Sequence
  Description of Artificial Sequence: Synthetic oligonucleotide
  Antisense Strand to SEQ ID NO: 443019
aacuuuacuaguaucaugu

SEQ ID NO: 443021 - RNA, 19 nt, Artificial Sequence
  Description of Artificial Sequence: Synthetic oligonucleotide
  Sense strand starting at position 3487 of SEQ ID NO: 316822
cuggauguuuccuuugcca

SEQ ID NO: 443022 - RNA, 19 nt, Artificial Sequence
  Description of Artificial Sequence: Synthetic oligonucleotide
  Antisense Strand to SEQ ID NO: 443021
uggcaaaggaaacauccag

SEQ ID NO: 443023 - RNA, 19 nt, Artificial Sequence
  Description of Artificial Sequence: Synthetic oligonucleotide
  Sense strand starting at position 3489 of SEQ ID NO: 316822
ggauguuuccuuugccaca

SEQ ID NO: 443024 - RNA, 19 nt, Artificial Sequence
  Description of Artificial Sequence: Synthetic oligonucleotide
  Antisense Strand to SEQ ID NO: 443023
uguggcaaaggaaacaucc

SEQ ID NO: 443025 - RNA, 19 nt, Artificial Sequence
  Description of Artificial Sequence: Synthetic oligonucleotide
  Sense strand starting at position 3581 of SEQ ID NO: 316822
agagaaauccggugauauc

SEQ ID NO: 443026 - RNA, 19 nt, Artificial Sequence
  Description of Artificial Sequence: Synthetic oligonucleotide
  Antisense Strand to SEQ ID NO: 443025
gauaucaccggauuucucu

SEQ ID NO: 443027 - RNA, 19 nt, Artificial Sequence
  Description of Artificial Sequence: Synthetic oligonucleotide
  Sense strand starting at position 3588 of SEQ ID NO: 316822
uccggugauaucuggacua

SEQ ID NO: 443028 - RNA, 19 nt, Artificial Sequence
  Description of Artificial Sequence: Synthetic oligonucleotide
  Antisense Strand to SEQ ID NO: 443027
uaguccagauaucaccgga

SEQ ID NO: 443029 - RNA, 19 nt, Artificial Sequence
  Description of Artificial Sequence: Synthetic oligonucleotide
  Sense strand starting at position 3590 of SEQ ID NO: 316822
cggugauaucuggacuaug

SEQ ID NO: 443030 - RNA, 19 nt, Artificial Sequence
  Description of Artificial Sequence: Synthetic oligonucleotide
  Antisense Strand to SEQ ID NO: 443029
cauaguccagauaucaccg

SEQ ID NO: 443031 - RNA, 19 nt, Artificial Sequence
  Description of Artificial Sequence: Synthetic oligonucleotide
  Sense strand starting at position 3602 of SEQ ID NO: 316822
gacuauggauccugucgga

SEQ ID NO: 443032 - RNA, 19 nt, Artificial Sequence
  Description of Artificial Sequence: Synthetic oligonucleotide
  Antisense Strand to SEQ ID NO: 443031
uccgacaggauccauaguc

SEQ ID NO: 443033 - RNA, 19 nt, Artificial Sequence
  Description of Artificial Sequence: Synthetic oligonucleotide
  Sense strand starting at position 3605 of SEQ ID NO: 316822
uauggauccugucggaauc

SEQ ID NO: 443034 - RNA, 19 nt, Artificial Sequence
  Description of Artificial Sequence: Synthetic oligonucleotide
  Antisense Strand to SEQ ID NO: 443033
gauuccgacaggauccaua

SEQ ID NO: 443035 - RNA, 19 nt, Artificial Sequence
  Description of Artificial Sequence: Synthetic oligonucleotide
  Sense strand starting at position 3607 of SEQ ID NO: 316822
uggauccugucggaaucua

SEQ ID NO: 443036 - RNA, 19 nt, Artificial Sequence
  Description of Artificial Sequence: Synthetic oligonucleotide
  Antisense Strand to SEQ ID NO: 443035
uagauuccgacaggaucca

SEQ ID NO: 443037 - RNA, 19 nt, Artificial Sequence
  Description of Artificial Sequence: Synthetic oligonucleotide
  Sense strand starting at position 3672 of SEQ ID NO: 316822
acacacuugccauggaaca

SEQ ID NO: 443038 - RNA, 19 nt, Artificial Sequence
  Description of Artificial Sequence: Synthetic oligonucleotide
  Antisense Strand to SEQ ID NO: 443037
uguuccauggcaagugugu

SEQ ID NO: 443039 - RNA, 19 nt, Artificial Sequence
  Description of Artificial Sequence: Synthetic oligonucleotide
  Sense strand starting at position 3707 of SEQ ID NO: 316822
auuucuauguaucagaaga

SEQ ID NO: 443040 - RNA, 19 nt, Artificial Sequence
  Description of Artificial Sequence: Synthetic oligonucleotide
  Antisense Strand to SEQ ID NO: 443039
ucuucugauacauagaaau

SEQ ID NO: 443041 - RNA, 19 nt, Artificial Sequence
  Description of Artificial Sequence: Synthetic oligonucleotide
  Sense strand starting at position 3709 of SEQ ID NO: 316822
uucuauguaucagaagaau

SEQ ID NO: 443042 - RNA, 19 nt, Artificial Sequence
  Description of Artificial Sequence: Synthetic oligonucleotide
  Antisense Strand to SEQ ID NO: 443041
auucuucugauacauagaa

SEQ ID NO: 443043 - RNA, 19 nt, Artificial Sequence
  Description of Artificial Sequence: Synthetic oligonucleotide
  Sense strand starting at position 3715 of SEQ ID NO: 316822
guaucagaagaauguguuu

SEQ ID NO: 443044 - RNA, 19 nt, Artificial Sequence
  Description of Artificial Sequence: Synthetic oligonucleotide
  Antisense Strand to SEQ ID NO: 443043
aaacacauucuucugauac

SEQ ID NO: 443045 - RNA, 19 nt, Artificial Sequence
  Description of Artificial Sequence: Synthetic oligonucleotide
  Sense strand starting at position 3746 of SEQ ID NO: 316822
auggaagucagcugacaga

SEQ ID NO: 443046 - RNA, 19 nt, Artificial Sequence
  Description of Artificial Sequence: Synthetic oligonucleotide
  Antisense Strand to SEQ ID NO: 443045
ucugucagcugacuuccau

SEQ ID NO: 443047 - RNA, 19 nt, Artificial Sequence
  Description of Artificial Sequence: Synthetic oligonucleotide
  Sense strand starting at position 3774 of SEQ ID NO: 316822
cuugcaaagggcuaucaaa

SEQ ID NO: 443048 - RNA, 19 nt, Artificial Sequence
  Description of Artificial Sequence: Synthetic oligonucleotide
  Antisense Strand to SEQ ID NO: 443047
uuugauagcccuuugcaag

SEQ ID NO: 443049 - RNA, 19 nt, Artificial Sequence
  Description of Artificial Sequence: Synthetic oligonucleotide
  Sense strand starting at position 3802 of SEQ ID NO: 316822
acugcuugauacugaguua

SEQ ID NO: 443050 - RNA, 19 nt, Artificial Sequence
  Description of Artificial Sequence: Synthetic oligonucleotide
  Antisense Strand to SEQ ID NO: 443049
uaacucaguaucaagcagu

SEQ ID NO: 443051 - RNA, 19 nt, Artificial Sequence
  Description of Artificial Sequence: Synthetic oligonucleotide
  Sense strand starting at position 3805 of SEQ ID NO: 316822
gcuugauacugaguuauca

SEQ ID NO: 443052 - RNA, 19 nt, Artificial Sequence
  Description of Artificial Sequence: Synthetic oligonucleotide
  Antisense Strand to SEQ ID NO: 443051
ugauaacucaguaucaagc

SEQ ID NO: 443053 - RNA, 19 nt, Artificial Sequence
  Description of Artificial Sequence: Synthetic oligonucleotide
  Sense strand starting at position 15 of SEQ ID NO: 316823
aagagaggugguuggucau

SEQ ID NO: 443054 - RNA, 19 nt, Artificial Sequence
  Description of Artificial Sequence: Synthetic oligonucleotide
  Antisense Strand to SEQ ID NO: 443053
augaccaaccaccucucuu

SEQ ID NO: 443055 - RNA, 19 nt, Artificial Sequence
  Description of Artificial Sequence: Synthetic oligonucleotide
  Sense strand starting at position 21 of SEQ ID NO: 316823
ggugguuggucauugaggu

SEQ ID NO: 443056 - RNA, 19 nt, Artificial Sequence
  Description of Artificial Sequence: Synthetic oligonucleotide
  Antisense Strand to SEQ ID NO: 443055
accucaaugaccaaccacc

SEQ ID NO: 443057 - RNA, 19 nt, Artificial Sequence
  Description of Artificial Sequence: Synthetic oligonucleotide
  Sense strand starting at position 363 of SEQ ID NO: 316823
acgccucccucugugagaa

SEQ ID NO: 443058 - RNA, 19 nt, Artificial Sequence
  Description of Artificial Sequence: Synthetic oligonucleotide
  Antisense Strand to SEQ ID NO: 443057
uucucacagagggaggcgu

SEQ ID NO: 443059 - RNA, 19 nt, Artificial Sequence
  Description of Artificial Sequence: Synthetic oligonucleotide
  Sense strand starting at position 364 of SEQ ID NO: 316823
cgccucccucugugagaaa

SEQ ID NO: 443060 - RNA, 19 nt, Artificial Sequence
  Description of Artificial Sequence: Synthetic oligonucleotide
  Antisense Strand to SEQ ID NO: 443059
uuucucacagagggaggcg

SEQ ID NO: 443061 - RNA, 19 nt, Artificial Sequence
  Description of Artificial Sequence: Synthetic oligonucleotide
  Sense strand starting at position 376 of SEQ ID NO: 316823
ugagaaagagcacgugaau

SEQ ID NO: 443062 - RNA, 19 nt, Artificial Sequence
  Description of Artificial Sequence: Synthetic oligonucleotide
  Antisense Strand to SEQ ID NO: 443061
auucacgugcucuuucuca

SEQ ID NO: 443063 - RNA, 19 nt, Artificial Sequence
  Description of Artificial Sequence: Synthetic oligonucleotide
  Sense strand starting at position 388 of SEQ ID NO: 316823
cgugaauugcuggccgguu

SEQ ID NO: 443064 - RNA, 19 nt, Artificial Sequence
  Description of Artificial Sequence: Synthetic oligonucleotide
  Antisense Strand to SEQ ID NO: 443063
aaccggccagcaauucacg

SEQ ID NO: 443065 - RNA, 19 nt, Artificial Sequence
  Description of Artificial Sequence: Synthetic oligonucleotide
  Sense strand starting at position 751 of SEQ ID NO: 316823
gcggguugucguucucauc

SEQ ID NO: 443066 - RNA, 19 nt, Artificial Sequence
  Description of Artificial Sequence: Synthetic oligonucleotide
  Antisense Strand to SEQ ID NO: 443065
gaugagaacgacaacccgc

SEQ ID NO: 443067 - RNA, 19 nt, Artificial Sequence
  Description of Artificial Sequence: Synthetic oligonucleotide
  Sense strand starting at position 1307 of SEQ ID NO: 316823
aucggaguccuccgacaga

SEQ ID NO: 443068 - RNA, 19 nt, Artificial Sequence
  Description of Artificial Sequence: Synthetic oligonucleotide
  Antisense Strand to SEQ ID NO: 443067
ucugucggaggacuccgau

SEQ ID NO: 443069 - RNA, 19 nt, Artificial Sequence
  Description of Artificial Sequence: Synthetic oligonucleotide
  Sense strand starting at position 1710 of SEQ ID NO: 316823
cagugucugagccagagaa

SEQ ID NO: 443070 - RNA, 19 nt, Artificial Sequence
  Description of Artificial Sequence: Synthetic oligonucleotide
  Antisense Strand to SEQ ID NO: 443069
uucucuggcucagacacug

SEQ ID NO: 443071 - RNA, 19 nt, Artificial Sequence
  Description of Artificial Sequence: Synthetic oligonucleotide
  Sense strand starting at position 1712 of SEQ ID NO: 316823
gugucugagccagagaaga

SEQ ID NO: 443072 - RNA, 19 nt, Artificial Sequence
  Description of Artificial Sequence: Synthetic oligonucleotide
  Antisense Strand to SEQ ID NO: 443071
ucuucucuggcucagacac

SEQ ID NO: 443073 - RNA, 19 nt, Artificial Sequence
  Description of Artificial Sequence: Synthetic oligonucleotide
  Sense strand starting at position 1733 of SEQ ID NO: 316823
agacuuuguuuggcaaaca

SEQ ID NO: 443074 - RNA, 19 nt, Artificial Sequence
  Description of Artificial Sequence: Synthetic oligonucleotide
  Antisense Strand to SEQ ID NO: 443073
uguuugccaaacaaagucu

SEQ ID NO: 443075 - RNA, 19 nt, Artificial Sequence
  Description of Artificial Sequence: Synthetic oligonucleotide
  Sense strand starting at position 1762 of SEQ ID NO: 316823
ccaggaauucccgagguua

SEQ ID NO: 443076 - RNA, 19 nt, Artificial Sequence
  Description of Artificial Sequence: Synthetic oligonucleotide
  Antisense Strand to SEQ ID NO: 443075
uaaccucgggaauuccugg

SEQ ID NO: 443077 - RNA, 19 nt, Artificial Sequence
  Description of Artificial Sequence: Synthetic oligonucleotide
  Sense strand starting at position 1764 of SEQ ID NO: 316823
aggaauucccgagguuaca

SEQ ID NO: 443078 - RNA, 19 nt, Artificial Sequence
  Description of Artificial Sequence: Synthetic oligonucleotide
  Antisense Strand to SEQ ID NO: 443077
uguaaccucgggaauuccu

SEQ ID NO: 443079 - RNA, 19 nt, Artificial Sequence
  Description of Artificial Sequence: Synthetic oligonucleotide
  Sense strand starting at position 1773 of SEQ ID NO: 316823
cgagguuacaucugcaacu

SEQ ID NO: 443080 - RNA, 19 nt, Artificial Sequence
  Description of Artificial Sequence: Synthetic oligonucleotide
  Antisense Strand to SEQ ID NO: 443079
aguugcagauguaaccucg

SEQ ID NO: 443081 - RNA, 19 nt, Artificial Sequence
  Description of Artificial Sequence: Synthetic oligonucleotide
  Sense strand starting at position 1931 of SEQ ID NO: 316823
acaucuguuccuuguucua

SEQ ID NO: 443082 - RNA, 19 nt, Artificial Sequence
  Description of Artificial Sequence: Synthetic oligonucleotide
  Antisense Strand to SEQ ID NO: 443081
uagaacaaggaacagaugu

SEQ ID NO: 443083 - RNA, 19 nt, Artificial Sequence
  Description of Artificial Sequence: Synthetic oligonucleotide
  Sense strand starting at position 1971 of SEQ ID NO: 316823
gguaaagucaggugcauua

SEQ ID NO: 443084 - RNA, 19 nt, Artificial Sequence
  Description of Artificial Sequence: Synthetic oligonucleotide
  Antisense Strand to SEQ ID NO: 443083
uaaugcaccugacuuuacc

SEQ ID NO: 443085 - RNA, 19 nt, Artificial Sequence
  Description of Artificial Sequence: Synthetic oligonucleotide
  Sense strand starting at position 1973 of SEQ ID NO: 316823
uaaagucaggugcauuauu

SEQ ID NO: 443086 - RNA, 19 nt, Artificial Sequence
  Description of Artificial Sequence: Synthetic oligonucleotide
  Antisense Strand to SEQ ID NO: 443085
aauaaugcaccugacuuua

SEQ ID NO: 443087 - RNA, 19 nt, Artificial Sequence
  Description of Artificial Sequence: Synthetic oligonucleotide
  Sense strand starting at position 2408 of SEQ ID NO: 316823
ccaagugccaagugaugau

SEQ ID NO: 443088 - RNA, 19 nt, Artificial Sequence
  Description of Artificial Sequence: Synthetic oligonucleotide
  Antisense Strand to SEQ ID NO: 443087
aucaucacuuggcacuugg

SEQ ID NO: 443089 - RNA, 19 nt, Artificial Sequence
  Description of Artificial Sequence: Synthetic oligonucleotide
  Sense strand starting at position 2556 of SEQ ID NO: 316823
ccaaacuuguguucuccau

SEQ ID NO: 443090 - RNA, 19 nt, Artificial Sequence
  Description of Artificial Sequence: Synthetic oligonucleotide
  Antisense Strand to SEQ ID NO: 443089
auggagaacacaaguuugg

SEQ ID NO: 443091 - RNA, 19 nt, Artificial Sequence
  Description of Artificial Sequence: Synthetic oligonucleotide
  Sense strand starting at position 2615 of SEQ ID NO: 316823
gagucaaaggccgaugcau

SEQ ID NO: 443092 - RNA, 19 nt, Artificial Sequence
  Description of Artificial Sequence: Synthetic oligonucleotide
  Antisense Strand to SEQ ID NO: 443091
augcaucggccuuugacuc

SEQ ID NO: 443093 - RNA, 19 nt, Artificial Sequence
  Description of Artificial Sequence: Synthetic oligonucleotide
  Sense strand starting at position 2639 of SEQ ID NO: 316823
gggccaggauggcuuuaaa

SEQ ID NO: 443094 - RNA, 19 nt, Artificial Sequence
  Description of Artificial Sequence: Synthetic oligonucleotide
  Antisense Strand to SEQ ID NO: 443093
uuuaaagccauccuggccc

SEQ ID NO: 443095 - RNA, 19 nt, Artificial Sequence
  Description of Artificial Sequence: Synthetic oligonucleotide
  Sense strand starting at position 2696 of SEQ ID NO: 316823
ccgagaaaucuguggcaca

SEQ ID NO: 443096 - RNA, 19 nt, Artificial Sequence
  Description of Artificial Sequence: Synthetic oligonucleotide
  Antisense Strand to SEQ ID NO: 443095
ugugccacagauuucucgg

SEQ ID NO: 443097 - RNA, 19 nt, Artificial Sequence
  Description of Artificial Sequence: Synthetic oligonucleotide
  Sense strand starting at position 2758 of SEQ ID NO: 316823
acgugugagccucuuguca

SEQ ID NO: 443098 - RNA, 19 nt, Artificial Sequence
  Description of Artificial Sequence: Synthetic oligonucleotide
  Antisense Strand to SEQ ID NO: 443097
ugacaagaggcucacacgu

SEQ ID NO: 443099 - RNA, 19 nt, Artificial Sequence
  Description of Artificial Sequence: Synthetic oligonucleotide
  Sense strand starting at position 2805 of SEQ ID NO: 316823
auauauccgcccugagaac

SEQ ID NO: 443100 - RNA, 19 nt, Artificial Sequence
  Description of Artificial Sequence: Synthetic oligonucleotide
  Antisense Strand to SEQ ID NO: 443099
guucucagggcggauauau

SEQ ID NO: 443101 - RNA, 19 nt, Artificial Sequence
  Description of Artificial Sequence: Synthetic oligonucleotide
  Sense strand starting at position 2867 of SEQ ID NO: 316823
ugacgaugcugacugauga

SEQ ID NO: 443102 - RNA, 19 nt, Artificial Sequence
  Description of Artificial Sequence: Synthetic oligonucleotide
  Antisense Strand to SEQ ID NO: 443101
ucaucagucagcaucguca

SEQ ID NO: 443103 - RNA, 19 nt, Artificial Sequence
  Description of Artificial Sequence: Synthetic oligonucleotide
  Sense strand starting at position 2961 of SEQ ID NO: 316823
gcgggauaacucuacggau

SEQ ID NO: 443104 - RNA, 19 nt, Artificial Sequence
  Description of Artificial Sequence: Synthetic oligonucleotide
  Antisense Strand to SEQ ID NO: 443103
auccguagaguuaucccgc

SEQ ID NO: 443105 - RNA, 19 nt, Artificial Sequence
  Description of Artificial Sequence: Synthetic oligonucleotide
  Sense strand starting at position 2963 of SEQ ID NO: 316823
gggauaacucuacggauac

SEQ ID NO: 443106 - RNA, 19 nt, Artificial Sequence
  Description of Artificial Sequence: Synthetic oligonucleotide
  Antisense Strand to SEQ ID NO: 443105
guauccguagaguuauccc

SEQ ID NO: 443107 - RNA, 19 nt, Artificial Sequence
  Description of Artificial Sequence: Synthetic oligonucleotide
  Sense strand starting at position 3021 of SEQ ID NO: 316823
gccaauaaauagccauagu

SEQ ID NO: 443108 - RNA, 19 nt, Artificial Sequence
  Description of Artificial Sequence: Synthetic oligonucleotide
  Antisense Strand to SEQ ID NO: 443107
acuauggcuauuuauuggc

SEQ ID NO: 443109 - RNA, 19 nt, Artificial Sequence
  Description of Artificial Sequence: Synthetic oligonucleotide
  Sense strand starting at position 3061 of SEQ ID NO: 316823
cuauaauaaucgguagaaa

SEQ ID NO: 443110 - RNA, 19 nt, Artificial Sequence
  Description of Artificial Sequence: Synthetic oligonucleotide
  Antisense Strand to SEQ ID NO: 443109
uuucuaccgauuauuauag

SEQ ID NO: 443111 - RNA, 19 nt, Artificial Sequence
  Description of Artificial Sequence: Synthetic oligonucleotide
  Sense strand starting at position 3069 of SEQ ID NO: 316823
aucgguagaaacugaucaa

SEQ ID NO: 443112 - RNA, 19 nt, Artificial Sequence
  Description of Artificial Sequence: Synthetic oligonucleotide
  Antisense Strand to SEQ ID NO: 443111
uugaucaguuucuaccgau

SEQ ID NO: 443113 - RNA, 19 nt, Artificial Sequence
  Description of Artificial Sequence: Synthetic oligonucleotide
  Sense strand starting at position 3079 of SEQ ID NO: 316823
acugaucaauggccucuaa

SEQ ID NO: 443114 - RNA, 19 nt, Artificial Sequence
  Description of Artificial Sequence: Synthetic oligonucleotide
  Antisense Strand to SEQ ID NO: 443113
uuagaggccauugaucagu

SEQ ID NO: 443115 - RNA, 19 nt, Artificial Sequence
  Description of Artificial Sequence: Synthetic oligonucleotide
  Sense strand starting at position 3293 of SEQ ID NO: 316823
aacggagguguauguaauu

SEQ ID NO: 443116 - RNA, 19 nt, Artificial Sequence
  Description of Artificial Sequence: Synthetic oligonucleotide
  Antisense Strand to SEQ ID NO: 443115
aauuacauacaccuccguu

SEQ ID NO: 443117 - RNA, 19 nt, Artificial Sequence
  Description of Artificial Sequence: Synthetic oligonucleotide
  Sense strand starting at position 3298 of SEQ ID NO: 316823
agguguauguaauugcuaa

SEQ ID NO: 443118 - RNA, 19 nt, Artificial Sequence
  Description of Artificial Sequence: Synthetic oligonucleotide
  Antisense Strand to SEQ ID NO: 443117
uuagcaauuacauacaccu

SEQ ID NO: 443119 - RNA, 19 nt, Artificial Sequence
  Description of Artificial Sequence: Synthetic oligonucleotide
  Sense strand starting at position 3363 of SEQ ID NO: 316823
auaauugacuuuguagcau

SEQ ID NO: 443120 - RNA, 19 nt, Artificial Sequence
  Description of Artificial Sequence: Synthetic oligonucleotide
  Antisense Strand to SEQ ID NO: 443119
augcuacaaagucaauuau

SEQ ID NO: 443121 - RNA, 19 nt, Artificial Sequence
  Description of Artificial Sequence: Synthetic oligonucleotide
  Sense strand starting at position 3460 of SEQ ID NO: 316823
gagauuuguuaugagucuu

SEQ ID NO: 443122 - RNA, 19 nt, Artificial Sequence
  Description of Artificial Sequence: Synthetic oligonucleotide
  Antisense Strand to SEQ ID NO: 443121
aagacucauaacaaaucuc

SEQ ID NO: 443123 - RNA, 19 nt, Artificial Sequence
  Description of Artificial Sequence: Synthetic oligonucleotide
  Sense strand starting at position 3466 of SEQ ID NO: 316823
uguuaugagucuuuagagu

SEQ ID NO: 443124 - RNA, 19 nt, Artificial Sequence
  Description of Artificial Sequence: Synthetic oligonucleotide
  Antisense Strand to SEQ ID NO: 443123
acucuaaagacucauaaca

SEQ ID NO: 443125 - RNA, 19 nt, Artificial Sequence
  Description of Artificial Sequence: Synthetic oligonucleotide
  Sense strand starting at position 3899 of SEQ ID NO: 316823
gcaaccagccuauaaguaa

SEQ ID NO: 443126 - RNA, 19 nt, Artificial Sequence
  Description of Artificial Sequence: Synthetic oligonucleotide
  Antisense Strand to SEQ ID NO: 443125
uuacuuauaggcugguugc

SEQ ID NO: 443127 - RNA, 19 nt, Artificial Sequence
  Description of Artificial Sequence: Synthetic oligonucleotide
  Sense strand starting at position 3906 of SEQ ID NO: 316823
gccuauaaguaauucuuga

SEQ ID NO: 443128 - RNA, 19 nt, Artificial Sequence
  Description of Artificial Sequence: Synthetic oligonucleotide
  Antisense Strand to SEQ ID NO: 443127
ucaagaauuacuuauaggc

SEQ ID NO: 443129 - RNA, 19 nt, Artificial Sequence
  Description of Artificial Sequence: Synthetic oligonucleotide
  Sense strand starting at position 3914 of SEQ ID NO: 316823
guaauucuugaacaagcau

SEQ ID NO: 443130 - RNA, 19 nt, Artificial Sequence
  Description of Artificial Sequence: Synthetic oligonucleotide
  Antisense Strand to SEQ ID NO: 443129
augcuuguucaagaauuac

SEQ ID NO: 443131 - RNA, 19 nt, Artificial Sequence
  Description of Artificial Sequence: Synthetic oligonucleotide
  Sense strand starting at position 3927 of SEQ ID NO: 316823
aagcaucuggauuaauguu

SEQ ID NO: 443132 - RNA, 19 nt, Artificial Sequence
  Description of Artificial Sequence: Synthetic oligonucleotide
  Antisense Strand to SEQ ID NO: 443131
aacauuaauccagaugcuu

SEQ ID NO: 443133 - RNA, 19 nt, Artificial Sequence
  Description of Artificial Sequence: Synthetic oligonucleotide
  Sense strand starting at position 383 of SEQ ID NO: 316824
aggauccaguaauucuuua

SEQ ID NO: 443134 - RNA, 19 nt, Artificial Sequence
  Description of Artificial Sequence: Synthetic oligonucleotide
  Antisense Strand to SEQ ID NO: 443133
uaaagaauuacuggauccu

SEQ ID NO: 443135 - RNA, 19 nt, Artificial Sequence
  Description of Artificial Sequence: Synthetic oligonucleotide
  Sense strand starting at position 388 of SEQ ID NO: 316824
ccaguaauucuuuaaucga

SEQ ID NO: 443136 - RNA, 19 nt, Artificial Sequence
  Description of Artificial Sequence: Synthetic oligonucleotide
  Antisense Strand to SEQ ID NO: 443135
ucgauuaaagaauuacugg

SEQ ID NO: 443137 - RNA, 19 nt, Artificial Sequence
  Description of Artificial Sequence: Synthetic oligonucleotide
  Sense strand starting at position 391 of SEQ ID NO: 316824
guaauucuuuaaucgagau

SEQ ID NO: 443138 - RNA, 19 nt, Artificial Sequence
  Description of Artificial Sequence: Synthetic oligonucleotide
  Antisense Strand to SEQ ID NO: 443137
aucucgauuaaagaauuac

SEQ ID NO: 443139 - RNA, 19 nt, Artificial Sequence
  Description of Artificial Sequence: Synthetic oligonucleotide
  Sense strand starting at position 395 of SEQ ID NO: 316824
uucuuuaaucgagauccuu

SEQ ID NO: 443140 - RNA, 19 nt, Artificial Sequence
  Description of Artificial Sequence: Synthetic oligonucleotide
  Antisense Strand to SEQ ID NO: 443139
aaggaucucgauuaaagaa

SEQ ID NO: 443141 - RNA, 19 nt, Artificial Sequence
  Description of Artificial Sequence: Synthetic oligonucleotide
  Sense strand starting at position 510 of SEQ ID NO: 316824
gcuaaaguugaaggaaguu

SEQ ID NO: 443142 - RNA, 19 nt, Artificial Sequence
  Description of Artificial Sequence: Synthetic oligonucleotide
  Antisense Strand to SEQ ID NO: 443141
aacuuccuucaacuuuagc

SEQ ID NO: 443143 - RNA, 19 nt, Artificial Sequence
  Description of Artificial Sequence: Synthetic oligonucleotide
  Sense strand starting at position 516 of SEQ ID NO: 316824
guugaaggaaguuaaaguu

SEQ ID NO: 443144 - RNA, 19 nt, Artificial Sequence
  Description of Artificial Sequence: Synthetic oligonucleotide
  Antisense Strand to SEQ ID NO: 443143
aacuuuaacuuccuucaac

SEQ ID NO: 443145 - RNA, 19 nt, Artificial Sequence
  Description of Artificial Sequence: Synthetic oligonucleotide
  Sense strand starting at position 538 of SEQ ID NO: 316824
ggaauagagugucugcaca

SEQ ID NO: 443146 - RNA, 19 nt, Artificial Sequence
  Description of Artificial Sequence: Synthetic oligonucleotide
  Antisense Strand to SEQ ID NO: 443145
ugugcagacacucuauucc

SEQ ID NO: 443147 - RNA, 19 nt, Artificial Sequence
  Description of Artificial Sequence: Synthetic oligonucleotide
  Sense strand starting at position 1147 of SEQ ID NO: 316824
guaaguaacuggcugacua

SEQ ID NO: 443148 - RNA, 19 nt, Artificial Sequence
  Description of Artificial Sequence: Synthetic oligonucleotide
  Antisense Strand to SEQ ID NO: 443147
uagucagccaguuacuuac

SEQ ID NO: 443149 - RNA, 19 nt, Artificial Sequence
  Description of Artificial Sequence: Synthetic oligonucleotide
  Sense strand starting at position 1372 of SEQ ID NO: 316824
uuaacaguguuaguaacaa

SEQ ID NO: 443150 - RNA, 19 nt, Artificial Sequence
  Description of Artificial Sequence: Synthetic oligonucleotide
  Antisense Strand to SEQ ID NO: 443149
uuguuacuaacacuguuaa

SEQ ID NO: 443151 - RNA, 19 nt, Artificial Sequence
  Description of Artificial Sequence: Synthetic oligonucleotide
  Sense strand starting at position 1380 of SEQ ID NO: 316824
guuaguaacaagugaaguu

SEQ ID NO: 443152 - RNA, 19 nt, Artificial Sequence
  Description of Artificial Sequence: Synthetic oligonucleotide
  Antisense Strand to SEQ ID NO: 443151
aacuucacuuguuacuaac

SEQ ID NO: 443153 - RNA, 19 nt, Artificial Sequence
  Description of Artificial Sequence: Synthetic oligonucleotide
  Sense strand starting at position 1413 of SEQ ID NO: 316824
ucauaugaucauugucaug

SEQ ID NO: 443154 - RNA, 19 nt, Artificial Sequence
  Description of Artificial Sequence: Synthetic oligonucleotide
  Antisense Strand to SEQ ID NO: 443153
caugacaaugaucauauga

SEQ ID NO: 443155 - RNA, 19 nt, Artificial Sequence
  Description of Artificial Sequence: Synthetic oligonucleotide
  Sense strand starting at position 1415 of SEQ ID NO: 316824
auaugaucauugucaugua

SEQ ID NO: 443156 - RNA, 19 nt, Artificial Sequence
  Description of Artificial Sequence: Synthetic oligonucleotide
  Antisense Strand to SEQ ID NO: 443155
uacaugacaaugaucauau

SEQ ID NO: 443157 - RNA, 19 nt, Artificial Sequence
  Description of Artificial Sequence: Synthetic oligonucleotide
  Sense strand starting at position 1540 of SEQ ID NO: 316824
agcaauccaugaccgaaua

SEQ ID NO: 443158 - RNA, 19 nt, Artificial Sequence
  Description of Artificial Sequence: Synthetic oligonucleotide
  Antisense Strand to SEQ ID NO: 443157
uauucggucauggauugcu

SEQ ID NO: 443159 - RNA, 19 nt, Artificial Sequence
  Description of Artificial Sequence: Synthetic oligonucleotide
  Sense strand starting at position 1541 of SEQ ID NO: 316824
gcaauccaugaccgaauau

SEQ ID NO: 443160 - RNA, 19 nt, Artificial Sequence
  Description of Artificial Sequence: Synthetic oligonucleotide
  Antisense Strand to SEQ ID NO: 443159
auauucggucauggauugc

SEQ ID NO: 443161 - RNA, 19 nt, Artificial Sequence
  Description of Artificial Sequence: Synthetic oligonucleotide
  Sense strand starting at position 1571 of SEQ ID NO: 316824
ucuuacagguaucuggaaa

SEQ ID NO: 443162 - RNA, 19 nt, Artificial Sequence
  Description of Artificial Sequence: Synthetic oligonucleotide
  Antisense Strand to SEQ ID NO: 443161
uuuccagauaccuguaaga

SEQ ID NO: 443163 - RNA, 19 nt, Artificial Sequence
  Description of Artificial Sequence: Synthetic oligonucleotide
  Sense strand starting at position 1720 of SEQ ID NO: 316824
agaggauccuagcuaagua

SEQ ID NO: 443164 - RNA, 19 nt, Artificial Sequence
  Description of Artificial Sequence: Synthetic oligonucleotide
  Antisense Strand to SEQ ID NO: 443163
uacuuagcuaggauccucu

SEQ ID NO: 443165 - RNA, 19 nt, Artificial Sequence
  Description of Artificial Sequence: Synthetic oligonucleotide
  Sense strand starting at position 1750 of SEQ ID NO: 316824
gcuuuauuucccugaagcu

SEQ ID NO: 443166 - RNA, 19 nt, Artificial Sequence
  Description of Artificial Sequence: Synthetic oligonucleotide
  Antisense Strand to SEQ ID NO: 443165
agcuucagggaaauaaagc

SEQ ID NO: 443167 - RNA, 19 nt, Artificial Sequence
  Description of Artificial Sequence: Synthetic oligonucleotide
  Sense strand starting at position 1771 of SEQ ID NO: 316824
gaaguaaauucuuuggcca

SEQ ID NO: 443168 - RNA, 19 nt, Artificial Sequence
  Description of Artificial Sequence: Synthetic oligonucleotide
  Antisense Strand to SEQ ID NO: 443167
uggccaaagaauuuacuuc

SEQ ID NO: 443169 - RNA, 19 nt, Artificial Sequence
  Description of Artificial Sequence: Synthetic oligonucleotide
  Sense strand starting at position 1858 of SEQ ID NO: 316824
uguucuuaccucugagauu

SEQ ID NO: 443170 - RNA, 19 nt, Artificial Sequence
  Description of Artificial Sequence: Synthetic oligonucleotide
  Antisense Strand to SEQ ID NO: 443169
aaucucagagguaagaaca

SEQ ID NO: 443171 - RNA, 19 nt, Artificial Sequence
  Description of Artificial Sequence: Synthetic oligonucleotide
  Sense strand starting at position 1930 of SEQ ID NO: 316824
ucaaacugcugaguaaaca

SEQ ID NO: 443172 - RNA, 19 nt, Artificial Sequence
  Description of Artificial Sequence: Synthetic oligonucleotide
  Antisense Strand to SEQ ID NO: 443171
uguuuacucagcaguuuga

SEQ ID NO: 443173 - RNA, 19 nt, Artificial Sequence
  Description of Artificial Sequence: Synthetic oligonucleotide
  Sense strand starting at position 1973 of SEQ ID NO: 316824
cugauuucguuaucucauc

SEQ ID NO: 443174 - RNA, 19 nt, Artificial Sequence
  Description of Artificial Sequence: Synthetic oligonucleotide
  Antisense Strand to SEQ ID NO: 443173
gaugagauaacgaaaucag

SEQ ID NO: 443175 - RNA, 19 nt, Artificial Sequence
  Description of Artificial Sequence: Synthetic oligonucleotide
  Sense strand starting at position 2105 of SEQ ID NO: 316824
ccacuugcagcauaaagaa

SEQ ID NO: 443176 - RNA, 19 nt, Artificial Sequence
  Description of Artificial Sequence: Synthetic oligonucleotide
  Antisense Strand to SEQ ID NO: 443175
uucuuuaugcugcaagugg

SEQ ID NO: 443177 - RNA, 19 nt, Artificial Sequence
  Description of Artificial Sequence: Synthetic oligonucleotide
  Sense strand starting at position 2418 of SEQ ID NO: 316824
guguguucccagcagagga

SEQ ID NO: 443178 - RNA, 19 nt, Artificial Sequence
  Description of Artificial Sequence: Synthetic oligonucleotide
  Antisense Strand to SEQ ID NO: 443177
uccucugcugggaacacac

SEQ ID NO: 443179 - RNA, 19 nt, Artificial Sequence
  Description of Artificial Sequence: Synthetic oligonucleotide
  Sense strand starting at position 2471 of SEQ ID NO: 316824
guacuccaucaaugugaac

SEQ ID NO: 443180 - RNA, 19 nt, Artificial Sequence
  Description of Artificial Sequence: Synthetic oligonucleotide
  Antisense Strand to SEQ ID NO: 443179
guucacauugauggaguac

SEQ ID NO: 443181 - RNA, 19 nt, Artificial Sequence
  Description of Artificial Sequence: Synthetic oligonucleotide
  Sense strand starting at position 2608 of SEQ ID NO: 316824
auguuaguauucccagaga

SEQ ID NO: 443182 - RNA, 19 nt, Artificial Sequence
  Description of Artificial Sequence: Synthetic oligonucleotide
  Antisense Strand to SEQ ID NO: 443181
ucucugggaauacuaacau

SEQ ID NO: 443183 - RNA, 19 nt, Artificial Sequence
  Description of Artificial Sequence: Synthetic oligonucleotide
  Sense strand starting at position 2860 of SEQ ID NO: 316824
uugaaaugcccaugaaguc

SEQ ID NO: 443184 - RNA, 19 nt, Artificial Sequence
  Description of Artificial Sequence: Synthetic oligonucleotide
  Antisense Strand to SEQ ID NO: 443183
gacuucaugggcauuucaa

SEQ ID NO: 443185 - RNA, 19 nt, Artificial Sequence
  Description of Artificial Sequence: Synthetic oligonucleotide
  Sense strand starting at position 2884 of SEQ ID NO: 316824
aggagagcugguuguugau

SEQ ID NO: 443186 - RNA, 19 nt, Artificial Sequence
  Description of Artificial Sequence: Synthetic oligonucleotide
  Antisense Strand to SEQ ID NO: 443185
aucaacaaccagcucuccu

SEQ ID NO: 443187 - RNA, 19 nt, Artificial Sequence
  Description of Artificial Sequence: Synthetic oligonucleotide
  Sense strand starting at position 2886 of SEQ ID NO: 316824
gagagcugguuguugauuu

SEQ ID NO: 443188 - RNA, 19 nt, Artificial Sequence
  Description of Artificial Sequence: Synthetic oligonucleotide
  Antisense Strand to SEQ ID NO: 443187
aaaucaacaaccagcucuc

SEQ ID NO: 443189 - RNA, 19 nt, Artificial Sequence
  Description of Artificial Sequence: Synthetic oligonucleotide
  Sense strand starting at position 2992 of SEQ ID NO: 316824
uguaccuucccauauaugu

SEQ ID NO: 443190 - RNA, 19 nt, Artificial Sequence
  Description of Artificial Sequence: Synthetic oligonucleotide
  Antisense Strand to SEQ ID NO: 443189
acauauaugggaagguaca

SEQ ID NO: 443191 - RNA, 19 nt, Artificial Sequence
  Description of Artificial Sequence: Synthetic oligonucleotide
  Sense strand starting at position 3190 of SEQ ID NO: 316824
aaccuuaagggcugugauu

SEQ ID NO: 443192 - RNA, 19 nt, Artificial Sequence
  Description of Artificial Sequence: Synthetic oligonucleotide
  Antisense Strand to SEQ ID NO: 443191
aaucacagcccuuaagguu

SEQ ID NO: 443193 - RNA, 19 nt, Artificial Sequence
  Description of Artificial Sequence: Synthetic oligonucleotide
  Sense strand starting at position 3365 of SEQ ID NO: 316824
uagaucuaacuauggaagu

SEQ ID NO: 443194 - RNA, 19 nt, Artificial Sequence
  Description of Artificial Sequence: Synthetic oligonucleotide
  Antisense Strand to SEQ ID NO: 443193
acuuccauaguuagaucua

SEQ ID NO: 443195 - RNA, 19 nt, Artificial Sequence
  Description of Artificial Sequence: Synthetic oligonucleotide
  Sense strand starting at position 3466 of SEQ ID NO: 316824
gggacuucuuauuacauuu

SEQ ID NO: 443196 - RNA, 19 nt, Artificial Sequence
  Description of Artificial Sequence: Synthetic oligonucleotide
  Antisense Strand to SEQ ID NO: 443195
aaauguaauaagaaguccc

SEQ ID NO: 443197 - RNA, 19 nt, Artificial Sequence
  Description of Artificial Sequence: Synthetic oligonucleotide
  Sense strand starting at position 3531 of SEQ ID NO: 316824
cuuagugucagggaaaguc

SEQ ID NO: 443198 - RNA, 19 nt, Artificial Sequence
  Description of Artificial Sequence: Synthetic oligonucleotide
  Antisense Strand to SEQ ID NO: 443197
gacuuucccugacacuaag

SEQ ID NO: 443199 - RNA, 19 nt, Artificial Sequence
  Description of Artificial Sequence: Synthetic oligonucleotide
  Sense strand starting at position 3558 of SEQ ID NO: 316824
uucucuugaucaguuagga

SEQ ID NO: 443200 - RNA, 19 nt, Artificial Sequence
  Description of Artificial Sequence: Synthetic oligonucleotide
  Antisense Strand to SEQ ID NO: 443199
uccuaacugaucaagagaa

SEQ ID NO: 443201 - RNA, 19 nt, Artificial Sequence
  Description of Artificial Sequence: Synthetic oligonucleotide
  Sense strand starting at position 3571 of SEQ ID NO: 316824
uuaggaauguuucuaacuu

SEQ ID NO: 443202 - RNA, 19 nt, Artificial Sequence
  Description of Artificial Sequence: Synthetic oligonucleotide
  Antisense Strand to SEQ ID NO: 443201
aaguuagaaacauuccuaa

SEQ ID NO: 443203 - RNA, 19 nt, Artificial Sequence
  Description of Artificial Sequence: Synthetic oligonucleotide
  Sense strand starting at position 3591 of SEQ ID NO: 316824
gggacuguuugagucuuau

SEQ ID NO: 443204 - RNA, 19 nt, Artificial Sequence
  Description of Artificial Sequence: Synthetic oligonucleotide
  Antisense Strand to SEQ ID NO: 443203
auaagacucaaacaguccc

SEQ ID NO: 443205 - RNA, 19 nt, Artificial Sequence
  Description of Artificial Sequence: Synthetic oligonucleotide
  Sense strand starting at position 3735 of SEQ ID NO: 316824
ucaucuuacugaguuauug

SEQ ID NO: 443206 - RNA, 19 nt, Artificial Sequence
  Description of Artificial Sequence: Synthetic oligonucleotide
  Antisense Strand to SEQ ID NO: 443205
caauaacucaguaagauga

SEQ ID NO: 443207 - RNA, 19 nt, Artificial Sequence
  Description of Artificial Sequence: Synthetic oligonucleotide
  Sense strand starting at position 3759 of SEQ ID NO: 316824
uuguuaguagcucauauua

SEQ ID NO: 443208 - RNA, 19 nt, Artificial Sequence
  Description of Artificial Sequence: Synthetic oligonucleotide
  Antisense Strand to SEQ ID NO: 443207
uaauaugagcuacuaacaa

SEQ ID NO: 443209 - RNA, 19 nt, Artificial Sequence
  Description of Artificial Sequence: Synthetic oligonucleotide
  Sense strand starting at position 3848 of SEQ ID NO: 316824
agcauacagcuauaugauu

SEQ ID NO: 443210 - RNA, 19 nt, Artificial Sequence
  Description of Artificial Sequence: Synthetic oligonucleotide
  Antisense Strand to SEQ ID NO: 443209
aaucauauagcuguaugcu

SEQ ID NO: 443211 - RNA, 19 nt, Artificial Sequence
  Description of Artificial Sequence: Synthetic oligonucleotide
  Sense strand starting at position 3883 of SEQ ID NO: 316824
auuuaaaccuaggaaaugu

SEQ ID NO: 443212 - RNA, 19 nt, Artificial Sequence
  Description of Artificial Sequence: Synthetic oligonucleotide
  Antisense Strand to SEQ ID NO: 443211
acauuuccuagguuuaaau

SEQ ID NO: 443213 - RNA, 19 nt, Artificial Sequence
  Description of Artificial Sequence: Synthetic oligonucleotide
  Sense strand starting at position 38 of SEQ ID NO: 316825
gaucuuugggcucaagcaa

SEQ ID NO: 443214 - RNA, 19 nt, Artificial Sequence
  Description of Artificial Sequence: Synthetic oligonucleotide
  Antisense Strand to SEQ ID NO: 443213
uugcuugagcccaaagauc

SEQ ID NO: 443215 - RNA, 19 nt, Artificial Sequence
  Description of Artificial Sequence: Synthetic oligonucleotide
  Sense strand starting at position 128 of SEQ ID NO: 316825
ggagaugaguucucacuau

SEQ ID NO: 443216 - RNA, 19 nt, Artificial Sequence
  Description of Artificial Sequence: Synthetic oligonucleotide
  Antisense Strand to SEQ ID NO: 443215
auagugagaacucaucucc

SEQ ID NO: 443217 - RNA, 19 nt, Artificial Sequence
  Description of Artificial Sequence: Synthetic oligonucleotide
  Sense strand starting at position 319 of SEQ ID NO: 316825
gcagcugucagagauucca

SEQ ID NO: 443218 - RNA, 19 nt, Artificial Sequence
  Description of Artificial Sequence: Synthetic oligonucleotide
  Antisense Strand to SEQ ID NO: 443217
uggaaucucugacagcugc

SEQ ID NO: 443219 - RNA, 19 nt, Artificial Sequence
  Description of Artificial Sequence: Synthetic oligonucleotide
  Sense strand starting at position 382 of SEQ ID NO: 316825
aucauauggucuuucuacu

SEQ ID NO: 443220 - RNA, 19 nt, Artificial Sequence
  Description of Artificial Sequence: Synthetic oligonucleotide
  Antisense Strand to SEQ ID NO: 443219
aguagaaagaccauaugau

SEQ ID NO: 443221 - RNA, 19 nt, Artificial Sequence
  Description of Artificial Sequence: Synthetic oligonucleotide
  Sense strand starting at position 404 of SEQ ID NO: 316825
gcuuuaauucuggagcaau

SEQ ID NO: 443222 - RNA, 19 nt, Artificial Sequence
  Description of Artificial Sequence: Synthetic oligonucleotide
  Antisense Strand to SEQ ID NO: 443221
auugcuccagaauuaaagc

SEQ ID NO: 443223 - RNA, 19 nt, Artificial Sequence
  Description of Artificial Sequence: Synthetic oligonucleotide
  Sense strand starting at position 429 of SEQ ID NO: 316825
agaaguccucuuugagaau

SEQ ID NO: 443224 - RNA, 19 nt, Artificial Sequence
  Description of Artificial Sequence: Synthetic oligonucleotide
  Antisense Strand to SEQ ID NO: 443223
auucucaaagaggacuucu

SEQ ID NO: 443225 - RNA, 19 nt, Artificial Sequence
  Description of Artificial Sequence: Synthetic oligonucleotide
  Sense strand starting at position 541 of SEQ ID NO: 316825
aaauuugcuguaugcauga

SEQ ID NO: 443226 - RNA, 19 nt, Artificial Sequence
  Description of Artificial Sequence: Synthetic oligonucleotide
  Antisense Strand to SEQ ID NO: 443225
ucaugcauacagcaaauuu

SEQ ID NO: 443227 - RNA, 19 nt, Artificial Sequence
  Description of Artificial Sequence: Synthetic oligonucleotide
  Sense strand starting at position 633 of SEQ ID NO: 316825
uuuccugugguuggagaua

SEQ ID NO: 443228 - RNA, 19 nt, Artificial Sequence
  Description of Artificial Sequence: Synthetic oligonucleotide
  Antisense Strand to SEQ ID NO: 443227
uaucuccaaccacaggaaa

SEQ ID NO: 443229 - RNA, 19 nt, Artificial Sequence
  Description of Artificial Sequence: Synthetic oligonucleotide
  Sense strand starting at position 753 of SEQ ID NO: 316825
auccaauguuuacuuggau

SEQ ID NO: 443230 - RNA, 19 nt, Artificial Sequence
  Description of Artificial Sequence: Synthetic oligonucleotide
  Antisense Strand to SEQ ID NO: 443229
auccaaguaaacauuggau

SEQ ID NO: 443231 - RNA, 19 nt, Artificial Sequence
  Description of Artificial Sequence: Synthetic oligonucleotide
  Sense strand starting at position 785 of SEQ ID NO: 316825
ugaggaacuccaugcuauu

SEQ ID NO: 443232 - RNA, 19 nt, Artificial Sequence
  Description of Artificial Sequence: Synthetic oligonucleotide
  Antisense Strand to SEQ ID NO: 443231
aauagcauggaguuccuca

SEQ ID NO: 443233 - RNA, 19 nt, Artificial Sequence
  Description of Artificial Sequence: Synthetic oligonucleotide
  Sense strand starting at position 1060 of SEQ ID NO: 316825
ggcgauauagccuaugauu

SEQ ID NO: 443234 - RNA, 19 nt, Artificial Sequence
  Description of Artificial Sequence: Synthetic oligonucleotide
  Antisense Strand to SEQ ID NO: 443233
aaucauaggcuauaucgcc

SEQ ID NO: 443235 - RNA, 19 nt, Artificial Sequence
  Description of Artificial Sequence: Synthetic oligonucleotide
  Sense strand starting at position 1105 of SEQ ID NO: 316825
caacacuugcagggauaga

SEQ ID NO: 443236 - RNA, 19 nt, Artificial Sequence
  Description of Artificial Sequence: Synthetic oligonucleotide
  Antisense Strand to SEQ ID NO: 443235
ucuaucccugcaaguguug

SEQ ID NO: 443237 - RNA, 19 nt, Artificial Sequence
  Description of Artificial Sequence: Synthetic oligonucleotide
  Sense strand starting at position 1218 of SEQ ID NO: 316825
uaucucgaucauggugaua

SEQ ID NO: 443238 - RNA, 19 nt, Artificial Sequence
  Description of Artificial Sequence: Synthetic oligonucleotide
  Antisense Strand to SEQ ID NO: 443237
uaucaccaugaucgagaua

SEQ ID NO: 443239 - RNA, 19 nt, Artificial Sequence
  Description of Artificial Sequence: Synthetic oligonucleotide
  Sense strand starting at position 1241 of SEQ ID NO: 316825
aaggcauaauguuugucaa

SEQ ID NO: 443240 - RNA, 19 nt, Artificial Sequence
  Description of Artificial Sequence: Synthetic oligonucleotide
  Antisense Strand to SEQ ID NO: 443239
uugacaaacauuaugccuu

SEQ ID NO: 443241 - RNA, 19 nt, Artificial Sequence
  Description of Artificial Sequence: Synthetic oligonucleotide
  Sense strand starting at position 1346 of SEQ ID NO: 316825
gcgaguucccaacaaagag

SEQ ID NO: 443242 - RNA, 19 nt, Artificial Sequence
  Description of Artificial Sequence: Synthetic oligonucleotide
  Antisense Strand to SEQ ID NO: 443241
cucuuuguugggaacucgc

SEQ ID NO: 443243 - RNA, 19 nt, Artificial Sequence
  Description of Artificial Sequence: Synthetic oligonucleotide
  Sense strand starting at position 1464 of SEQ ID NO: 316825
ggaugcucugggugggaaa

SEQ ID NO: 443244 - RNA, 19 nt, Artificial Sequence
  Description of Artificial Sequence: Synthetic oligonucleotide
  Antisense Strand to SEQ ID NO: 443243
uuucccacccagagcaucc

SEQ ID NO: 443245 - RNA, 19 nt, Artificial Sequence
  Description of Artificial Sequence: Synthetic oligonucleotide
  Sense strand starting at position 2323 of SEQ ID NO: 316825
ggcuucucagccuagagga

SEQ ID NO: 443246 - RNA, 19 nt, Artificial Sequence
  Description of Artificial Sequence: Synthetic oligonucleotide
  Antisense Strand to SEQ ID NO: 443245
uccucuaggcugagaagcc

SEQ ID NO: 443247 - RNA, 19 nt, Artificial Sequence
  Description of Artificial Sequence: Synthetic oligonucleotide
  Sense strand starting at position 2434 of SEQ ID NO: 316825
agucuagugccagaaauac

SEQ ID NO: 443248 - RNA, 19 nt, Artificial Sequence
  Description of Artificial Sequence: Synthetic oligonucleotide
  Antisense Strand to SEQ ID NO: 443247
guauuucuggcacuagacu

SEQ ID NO: 443249 - RNA, 19 nt, Artificial Sequence
  Description of Artificial Sequence: Synthetic oligonucleotide
  Sense strand starting at position 2444 of SEQ ID NO: 316825
cagaaauaccgucauuagc

SEQ ID NO: 443250 - RNA, 19 nt, Artificial Sequence
  Description of Artificial Sequence: Synthetic oligonucleotide
  Antisense Strand to SEQ ID NO: 443249
gcuaaugacgguauuucug

SEQ ID NO: 443251 - RNA, 19 nt, Artificial Sequence
  Description of Artificial Sequence: Synthetic oligonucleotide
  Sense strand starting at position 2514 of SEQ ID NO: 316825
ugucaaagucaguaaguga

SEQ ID NO: 443252 - RNA, 19 nt, Artificial Sequence
  Description of Artificial Sequence: Synthetic oligonucleotide
  Antisense Strand to SEQ ID NO: 443251
ucacuuacugacuuugaca

SEQ ID NO: 443253 - RNA, 19 nt, Artificial Sequence
  Description of Artificial Sequence: Synthetic oligonucleotide
  Sense strand starting at position 2620 of SEQ ID NO: 316825
acgaccaugcuguauagaa

SEQ ID NO: 443254 - RNA, 19 nt, Artificial Sequence
  Description of Artificial Sequence: Synthetic oligonucleotide
  Antisense Strand to SEQ ID NO: 443253
uucuauacagcauggucgu

SEQ ID NO: 443255 - RNA, 19 nt, Artificial Sequence
  Description of Artificial Sequence: Synthetic oligonucleotide
  Sense strand starting at position 2622 of SEQ ID NO: 316825
gaccaugcuguauagaagu

SEQ ID NO: 443256 - RNA, 19 nt, Artificial Sequence
  Description of Artificial Sequence: Synthetic oligonucleotide
  Antisense Strand to SEQ ID NO: 443255
acuucuauacagcaugguc

SEQ ID NO: 443257 - RNA, 19 nt, Artificial Sequence
  Description of Artificial Sequence: Synthetic oligonucleotide
  Sense strand starting at position 2713 of SEQ ID NO: 316825
aaauguacuguauguugaa

SEQ ID NO: 443258 - RNA, 19 nt, Artificial Sequence
  Description of Artificial Sequence: Synthetic oligonucleotide
  Antisense Strand to SEQ ID NO: 443257
uucaacauacaguacauuu

SEQ ID NO: 443259 - RNA, 19 nt, Artificial Sequence
  Description of Artificial Sequence: Synthetic oligonucleotide
  Sense strand starting at position 2714 of SEQ ID NO: 316825
aauguacuguauguugaau

SEQ ID NO: 443260 - RNA, 19 nt, Artificial Sequence
  Description of Artificial Sequence: Synthetic oligonucleotide
  Antisense Strand to SEQ ID NO: 443259
auucaacauacaguacauu

SEQ ID NO: 443261 - RNA, 19 nt, Artificial Sequence
  Description of Artificial Sequence: Synthetic oligonucleotide
  Sense strand starting at position 2757 of SEQ ID NO: 316825
uguacucugcuagaauacu

SEQ ID NO: 443262 - RNA, 19 nt, Artificial Sequence
  Description of Artificial Sequence: Synthetic oligonucleotide
  Antisense Strand to SEQ ID NO: 443261
aguauucuagcagaguaca

SEQ ID NO: 443263 - RNA, 19 nt, Artificial Sequence
  Description of Artificial Sequence: Synthetic oligonucleotide
  Sense strand starting at position 2786 of SEQ ID NO: 316825
ggacaaaugcaguguagga

SEQ ID NO: 443264 - RNA, 19 nt, Artificial Sequence
  Description of Artificial Sequence: Synthetic oligonucleotide
  Antisense Strand to SEQ ID NO: 443263
uccuacacugcauuugucc

SEQ ID NO: 443265 - RNA, 19 nt, Artificial Sequence
  Description of Artificial Sequence: Synthetic oligonucleotide
  Sense strand starting at position 2812 of SEQ ID NO: 316825
cagcuagaugagugcauuu

SEQ ID NO: 443266 - RNA, 19 nt, Artificial Sequence
  Description of Artificial Sequence: Synthetic oligonucleotide
  Antisense Strand to SEQ ID NO: 443265
aaaugcacucaucuagcug

SEQ ID NO: 443267 - RNA, 19 nt, Artificial Sequence
  Description of Artificial Sequence: Synthetic oligonucleotide
  Sense strand starting at position 3336 of SEQ ID NO: 316825
uuacccagucuggaaguua

SEQ ID NO: 443268 - RNA, 19 nt, Artificial Sequence
  Description of Artificial Sequence: Synthetic oligonucleotide
  Antisense Strand to SEQ ID NO: 443267
uaacuuccagacuggguaa

SEQ ID NO: 443269 - RNA, 19 nt, Artificial Sequence
  Description of Artificial Sequence: Synthetic oligonucleotide
  Sense strand starting at position 3345 of SEQ ID NO: 316825
cuggaaguuaucuggucca

SEQ ID NO: 443270 - RNA, 19 nt, Artificial Sequence
  Description of Artificial Sequence: Synthetic oligonucleotide
  Antisense Strand to SEQ ID NO: 443269
uggaccagauaacuuccag

SEQ ID NO: 443271 - RNA, 19 nt, Artificial Sequence
  Description of Artificial Sequence: Synthetic oligonucleotide
  Sense strand starting at position 3348 of SEQ ID NO: 316825
gaaguuaucugguccaaau

SEQ ID NO: 443272 - RNA, 19 nt, Artificial Sequence
  Description of Artificial Sequence: Synthetic oligonucleotide
  Antisense Strand to SEQ ID NO: 443271
auuuggaccagauaacuuc

SEQ ID NO: 443273 - RNA, 19 nt, Artificial Sequence
  Description of Artificial Sequence: Synthetic oligonucleotide
  Sense strand starting at position 3358 of SEQ ID NO: 316825
gguccaaauugucuacaga

SEQ ID NO: 443274 - RNA, 19 nt, Artificial Sequence
  Description of Artificial Sequence: Synthetic oligonucleotide
  Antisense Strand to SEQ ID NO: 443273
ucuguagacaauuuggacc

SEQ ID NO: 443275 - RNA, 19 nt, Artificial Sequence
  Description of Artificial Sequence: Synthetic oligonucleotide
  Sense strand starting at position 3359 of SEQ ID NO: 316825
guccaaauugucuacagaa

SEQ ID NO: 443276 - RNA, 19 nt, Artificial Sequence
  Description of Artificial Sequence: Synthetic oligonucleotide
  Antisense Strand to SEQ ID NO: 443275
uucuguagacaauuuggac

SEQ ID NO: 443277 - RNA, 19 nt, Artificial Sequence
  Description of Artificial Sequence: Synthetic oligonucleotide
  Sense strand starting at position 3435 of SEQ ID NO: 316825
cuaaauguguagccagaag

SEQ ID NO: 443278 - RNA, 19 nt, Artificial Sequence
  Description of Artificial Sequence: Synthetic oligonucleotide
  Antisense Strand to SEQ ID NO: 443277
cuucuggcuacacauuuag

SEQ ID NO: 443279 - RNA, 19 nt, Artificial Sequence
  Description of Artificial Sequence: Synthetic oligonucleotide
  Sense strand starting at position 3463 of SEQ ID NO: 316825
gugacuccauccucagaaa

SEQ ID NO: 443280 - RNA, 19 nt, Artificial Sequence
  Description of Artificial Sequence: Synthetic oligonucleotide
  Antisense Strand to SEQ ID NO: 443279
uuucugaggauggagucac

SEQ ID NO: 443281 - RNA, 19 nt, Artificial Sequence
  Description of Artificial Sequence: Synthetic oligonucleotide
  Sense strand starting at position 3604 of SEQ ID NO: 316825
uuuacuuaucccuauagug

SEQ ID NO: 443282 - RNA, 19 nt, Artificial Sequence
  Description of Artificial Sequence: Synthetic oligonucleotide
  Antisense Strand to SEQ ID NO: 443281
cacuauagggauaaguaaa

SEQ ID NO: 443283 - RNA, 19 nt, Artificial Sequence
  Description of Artificial Sequence: Synthetic oligonucleotide
  Sense strand starting at position 3612 of SEQ ID NO: 316825
ucccuauagugauuaauag

SEQ ID NO: 443284 - RNA, 19 nt, Artificial Sequence
  Description of Artificial Sequence: Synthetic oligonucleotide
  Antisense Strand to SEQ ID NO: 443283
cuauuaaucacuauaggga

SEQ ID NO: 443285 - RNA, 19 nt, Artificial Sequence
  Description of Artificial Sequence: Synthetic oligonucleotide
  Sense strand starting at position 3658 of SEQ ID NO: 316825
aagaguugucaucagguau

SEQ ID NO: 443286 - RNA, 19 nt, Artificial Sequence
  Description of Artificial Sequence: Synthetic oligonucleotide
  Antisense Strand to SEQ ID NO: 443285
auaccugaugacaacucuu

SEQ ID NO: 443287 - RNA, 19 nt, Artificial Sequence
  Description of Artificial Sequence: Synthetic oligonucleotide
  Sense strand starting at position 3670 of SEQ ID NO: 316825
cagguauagcaaggaaguu

SEQ ID NO: 443288 - RNA, 19 nt, Artificial Sequence
  Description of Artificial Sequence: Synthetic oligonucleotide
  Antisense Strand to SEQ ID NO: 443287
aacuuccuugcuauaccug

SEQ ID NO: 443289 - RNA, 19 nt, Artificial Sequence
  Description of Artificial Sequence: Synthetic oligonucleotide
  Sense strand starting at position 3790 of SEQ ID NO: 316825
gaaggcaagucucuugaga

SEQ ID NO: 443290 - RNA, 19 nt, Artificial Sequence
  Description of Artificial Sequence: Synthetic oligonucleotide
  Antisense Strand to SEQ ID NO: 443289
ucucaagagacuugccuuc

SEQ ID NO: 443291 - RNA, 19 nt, Artificial Sequence
  Description of Artificial Sequence: Synthetic oligonucleotide
  Sense strand starting at position 3870 of SEQ ID NO: 316825
aguagaaaucuccaagugu

SEQ ID NO: 443292 - RNA, 19 nt, Artificial Sequence
  Description of Artificial Sequence: Synthetic oligonucleotide
  Antisense Strand to SEQ ID NO: 443291
acacuuggagauuucuacu

SEQ ID NO: 443293 - RNA, 19 nt, Artificial Sequence
  Description of Artificial Sequence: Synthetic oligonucleotide
  Sense strand starting at position 105 of SEQ ID NO: 316826
acccuuuagcacggugauu

SEQ ID NO: 443294 - RNA, 19 nt, Artificial Sequence
  Description of Artificial Sequence: Synthetic oligonucleotide
  Antisense Strand to SEQ ID NO: 443293
aaucaccgugcuaaagggu

SEQ ID NO: 443295 - RNA, 19 nt, Artificial Sequence
  Description of Artificial Sequence: Synthetic oligonucleotide
  Sense strand starting at position 235 of SEQ ID NO: 316826
ggaucagggucccauauuu

SEQ ID NO: 443296 - RNA, 19 nt, Artificial Sequence
  Description of Artificial Sequence: Synthetic oligonucleotide
  Antisense Strand to SEQ ID NO: 443295
aaauaugggacccugaucc

SEQ ID NO: 443297 - RNA, 19 nt, Artificial Sequence
  Description of Artificial Sequence: Synthetic oligonucleotide
  Sense strand starting at position 263 of SEQ ID NO: 316826
cccagugugauccaagaug

SEQ ID NO: 443298 - RNA, 19 nt, Artificial Sequence
  Description of Artificial Sequence: Synthetic oligonucleotide
  Antisense Strand to SEQ ID NO: 443297
caucuuggaucacacuggg

SEQ ID NO: 443299 - RNA, 19 nt, Artificial Sequence
  Description of Artificial Sequence: Synthetic oligonucleotide
  Sense strand starting at position 463 of SEQ ID NO: 316826
uccaacagagcuuauuagu

SEQ ID NO: 443300 - RNA, 19 nt, Artificial Sequence
  Description of Artificial Sequence: Synthetic oligonucleotide
  Antisense Strand to SEQ ID NO: 443299
acuaauaagcucuguugga

SEQ ID NO: 443301 - RNA, 19 nt, Artificial Sequence
  Description of Artificial Sequence: Synthetic oligonucleotide
  Sense strand starting at position 578 of SEQ ID NO: 316826
ccuaaauuggccugaccau

SEQ ID NO: 443302 - RNA, 19 nt, Artificial Sequence
  Description of Artificial Sequence: Synthetic oligonucleotide
  Antisense Strand to SEQ ID NO: 443301
auggucaggccaauuuagg

SEQ ID NO: 443303 - RNA, 19 nt, Artificial Sequence
  Description of Artificial Sequence: Synthetic oligonucleotide
  Sense strand starting at position 636 of SEQ ID NO: 316826
gaaggaaagucagugugua

SEQ ID NO: 443304 - RNA, 19 nt, Artificial Sequence
  Description of Artificial Sequence: Synthetic oligonucleotide
  Antisense Strand to SEQ ID NO: 443303
uacacacugacuuuccuuc

SEQ ID NO: 443305 - RNA, 19 nt, Artificial Sequence
  Description of Artificial Sequence: Synthetic oligonucleotide
  Sense strand starting at position 637 of SEQ ID NO: 316826
aaggaaagucaguguguau

SEQ ID NO: 443306 - RNA, 19 nt, Artificial Sequence
  Description of Artificial Sequence: Synthetic oligonucleotide
  Antisense Strand to SEQ ID NO: 443305
auacacacugacuuuccuu

SEQ ID NO: 443307 - RNA, 19 nt, Artificial Sequence
  Description of Artificial Sequence: Synthetic oligonucleotide
  Sense strand starting at position 2254 of SEQ ID NO: 316826
gccaaacuaccgcagaaau

SEQ ID NO: 443308 - RNA, 19 nt, Artificial Sequence
  Description of Artificial Sequence: Synthetic oligonucleotide
  Antisense Strand to SEQ ID NO: 443307
auuucugcgguaguuuggc

SEQ ID NO: 443309 - RNA, 19 nt, Artificial Sequence
  Description of Artificial Sequence: Synthetic oligonucleotide
  Sense strand starting at position 2374 of SEQ ID NO: 316826
auugcagauucgcuaauau

SEQ ID NO: 443310 - RNA, 19 nt, Artificial Sequence
  Description of Artificial Sequence: Synthetic oligonucleotide
  Antisense Strand to SEQ ID NO: 443309
auauuagcgaaucugcaau

SEQ ID NO: 443311 - RNA, 19 nt, Artificial Sequence
  Description of Artificial Sequence: Synthetic oligonucleotide
  Sense strand starting at position 2409 of SEQ ID NO: 316826
uugaaugaaugaugagaag

SEQ ID NO: 443312 - RNA, 19 nt, Artificial Sequence
  Description of Artificial Sequence: Synthetic oligonucleotide
  Antisense Strand to SEQ ID NO: 443311
cuucucaucauucauucaa

SEQ ID NO: 443313 - RNA, 19 nt, Artificial Sequence
  Description of Artificial Sequence: Synthetic oligonucleotide
  Sense strand starting at position 2424 of SEQ ID NO: 316826
gaaguuauugggugguaga

SEQ ID NO: 443314 - RNA, 19 nt, Artificial Sequence
  Description of Artificial Sequence: Synthetic oligonucleotide
  Antisense Strand to SEQ ID NO: 443313
ucuaccacccaauaacuuc

SEQ ID NO: 443315 - RNA, 19 nt, Artificial Sequence
  Description of Artificial Sequence: Synthetic oligonucleotide
  Sense strand starting at position 2425 of SEQ ID NO: 316826
aaguuauugggugguagag

SEQ ID NO: 443316 - RNA, 19 nt, Artificial Sequence
  Description of Artificial Sequence: Synthetic oligonucleotide
  Antisense Strand to SEQ ID NO: 443315
cucuaccacccaauaacuu

SEQ ID NO: 443317 - RNA, 19 nt, Artificial Sequence
  Description of Artificial Sequence: Synthetic oligonucleotide
  Sense strand starting at position 2445 of SEQ ID NO: 316826
ggguuauguaaucaacgaa

SEQ ID NO: 443318 - RNA, 19 nt, Artificial Sequence
  Description of Artificial Sequence: Synthetic oligonucleotide
  Antisense Strand to SEQ ID NO: 443317
uucguugauuacauaaccc

SEQ ID NO: 443319 - RNA, 19 nt, Artificial Sequence
  Description of Artificial Sequence: Synthetic oligonucleotide
  Sense strand starting at position 2591 of SEQ ID NO: 316826
accuaagaggccuaucauu

SEQ ID NO: 443320 - RNA, 19 nt, Artificial Sequence
  Description of Artificial Sequence: Synthetic oligonucleotide
  Antisense Strand to SEQ ID NO: 443319
aaugauaggccucuuaggu

SEQ ID NO: 443321 - RNA, 19 nt, Artificial Sequence
  Description of Artificial Sequence: Synthetic oligonucleotide
  Sense strand starting at position 2599 of SEQ ID NO: 316826
ggccuaucauuugugagca

SEQ ID NO: 443322 - RNA, 19 nt, Artificial Sequence
  Description of Artificial Sequence: Synthetic oligonucleotide
  Antisense Strand to SEQ ID NO: 443321
ugcucacaaaugauaggcc

SEQ ID NO: 443323 - RNA, 19 nt, Artificial Sequence
  Description of Artificial Sequence: Synthetic oligonucleotide
  Sense strand starting at position 2687 of SEQ ID NO: 316826
gagaaauacuaguuacuug

SEQ ID NO: 443324 - RNA, 19 nt, Artificial Sequence
  Description of Artificial Sequence: Synthetic oligonucleotide
  Antisense Strand to SEQ ID NO: 443323
caaguaacuaguauuucuc

SEQ ID NO: 443325 - RNA, 19 nt, Artificial Sequence
  Description of Artificial Sequence: Synthetic oligonucleotide
  Sense strand starting at position 2913 of SEQ ID NO: 316826
ggucuagcaucugugaagu

SEQ ID NO: 443326 - RNA, 19 nt, Artificial Sequence
  Description of Artificial Sequence: Synthetic oligonucleotide
  Antisense Strand to SEQ ID NO: 443325
acuucacagaugcuagacc

SEQ ID NO: 443327 - RNA, 19 nt, Artificial Sequence
  Description of Artificial Sequence: Synthetic oligonucleotide
  Sense strand starting at position 3208 of SEQ ID NO: 316826
gggcuucuccaacaguauu

SEQ ID NO: 443328 - RNA, 19 nt, Artificial Sequence
  Description of Artificial Sequence: Synthetic oligonucleotide
  Antisense Strand to SEQ ID NO: 443327
aauacuguuggagaagccc

SEQ ID NO: 443329 - RNA, 19 nt, Artificial Sequence
  Description of Artificial Sequence: Synthetic oligonucleotide
  Sense strand starting at position 3244 of SEQ ID NO: 316826
aagguauauccagaguuuc

SEQ ID NO: 443330 - RNA, 19 nt, Artificial Sequence
  Description of Artificial Sequence: Synthetic oligonucleotide
  Antisense Strand to SEQ ID NO: 443329
gaaacucuggauauaccuu

SEQ ID NO: 443331 - RNA, 19 nt, Artificial Sequence
  Description of Artificial Sequence: Synthetic oligonucleotide
  Sense strand starting at position 3272 of SEQ ID NO: 316826
gcuguaacaccaggaauca

SEQ ID NO: 443332 - RNA, 19 nt, Artificial Sequence
  Description of Artificial Sequence: Synthetic oligonucleotide
  Antisense Strand to SEQ ID NO: 443331
ugauuccugguguuacagc

SEQ ID NO: 443333 - RNA, 19 nt, Artificial Sequence
  Description of Artificial Sequence: Synthetic oligonucleotide
  Sense strand starting at position 3356 of SEQ ID NO: 316826
gcagauugcuauucuguag

SEQ ID NO: 443334 - RNA, 19 nt, Artificial Sequence
  Description of Artificial Sequence: Synthetic oligonucleotide
  Antisense Strand to SEQ ID NO: 443333
cuacagaauagcaaucugc

SEQ ID NO: 443335 - RNA, 19 nt, Artificial Sequence
  Description of Artificial Sequence: Synthetic oligonucleotide
  Sense strand starting at position 3444 of SEQ ID NO: 316826
guacaagacuuugagaaac

SEQ ID NO: 443336 - RNA, 19 nt, Artificial Sequence
  Description of Artificial Sequence: Synthetic oligonucleotide
  Antisense Strand to SEQ ID NO: 443335
guuucucaaagucuuguac

SEQ ID NO: 443337 - RNA, 19 nt, Artificial Sequence
  Description of Artificial Sequence: Synthetic oligonucleotide
  Sense strand starting at position 3446 of SEQ ID NO: 316826
acaagacuuugagaaacaa

SEQ ID NO: 443338 - RNA, 19 nt, Artificial Sequence
  Description of Artificial Sequence: Synthetic oligonucleotide
  Antisense Strand to SEQ ID NO: 443337
uuguuucucaaagucuugu

SEQ ID NO: 443339 - RNA, 19 nt, Artificial Sequence
  Description of Artificial Sequence: Synthetic oligonucleotide
  Sense strand starting at position 3486 of SEQ ID NO: 316826
ugagauaaguuuccaucua

SEQ ID NO: 443340 - RNA, 19 nt, Artificial Sequence
  Description of Artificial Sequence: Synthetic oligonucleotide
  Antisense Strand to SEQ ID NO: 443339
uagauggaaacuuaucuca

SEQ ID NO: 443341 - RNA, 19 nt, Artificial Sequence
  Description of Artificial Sequence: Synthetic oligonucleotide
  Sense strand starting at position 3529 of SEQ ID NO: 316826
aucaacuugccuuaagaug

SEQ ID NO: 443342 - RNA, 19 nt, Artificial Sequence
  Description of Artificial Sequence: Synthetic oligonucleotide
  Antisense Strand to SEQ ID NO: 443341
caucuuaaggcaaguugau

SEQ ID NO: 443343 - RNA, 19 nt, Artificial Sequence
  Description of Artificial Sequence: Synthetic oligonucleotide
  Sense strand starting at position 3537 of SEQ ID NO: 316826
gccuuaagauggccauguu

SEQ ID NO: 443344 - RNA, 19 nt, Artificial Sequence
  Description of Artificial Sequence: Synthetic oligonucleotide
  Antisense Strand to SEQ ID NO: 443343
aacauggccaucuuaaggc

SEQ ID NO: 443345 - RNA, 19 nt, Artificial Sequence
  Description of Artificial Sequence: Synthetic oligonucleotide
  Sense strand starting at position 3598 of SEQ ID NO: 316826
uguaaacuauugcuguaga

SEQ ID NO: 443346 - RNA, 19 nt, Artificial Sequence
  Description of Artificial Sequence: Synthetic oligonucleotide
  Antisense Strand to SEQ ID NO: 443345
ucuacagcaauaguuuaca

SEQ ID NO: 443347 - RNA, 19 nt, Artificial Sequence
  Description of Artificial Sequence: Synthetic oligonucleotide
  Sense strand starting at position 3603 of SEQ ID NO: 316826
acuauugcuguagaaacaa

SEQ ID NO: 443348 - RNA, 19 nt, Artificial Sequence
  Description of Artificial Sequence: Synthetic oligonucleotide
  Antisense Strand to SEQ ID NO: 443347
uuguuucuacagcaauagu

SEQ ID NO: 443349 - RNA, 19 nt, Artificial Sequence
  Description of Artificial Sequence: Synthetic oligonucleotide
  Sense strand starting at position 3693 of SEQ ID NO: 316826
gggagcaguuuaccucaaa

SEQ ID NO: 443350 - RNA, 19 nt, Artificial Sequence
  Description of Artificial Sequence: Synthetic oligonucleotide
  Antisense Strand to SEQ ID NO: 443349
uuugagguaaacugcuccc

SEQ ID NO: 443351 - RNA, 19 nt, Artificial Sequence
  Description of Artificial Sequence: Synthetic oligonucleotide
  Sense strand starting at position 3694 of SEQ ID NO: 316826
ggagcaguuuaccucaaag

SEQ ID NO: 443352 - RNA, 19 nt, Artificial Sequence
  Description of Artificial Sequence: Synthetic oligonucleotide
  Antisense Strand to SEQ ID NO: 443351
cuuugagguaaacugcucc

SEQ ID NO: 443353 - RNA, 19 nt, Artificial Sequence
  Description of Artificial Sequence: Synthetic oligonucleotide
  Sense strand starting at position 3704 of SEQ ID NO: 316826
accucaaagccucauguga

SEQ ID NO: 443354 - RNA, 19 nt, Artificial Sequence
  Description of Artificial Sequence: Synthetic oligonucleotide
  Antisense Strand to SEQ ID NO: 443353
ucacaugaggcuuugaggu

SEQ ID NO: 443355 - RNA, 19 nt, Artificial Sequence
  Description of Artificial Sequence: Synthetic oligonucleotide
  Sense strand starting at position 3721 of SEQ ID NO: 316826
gauugcugucaagauguug

SEQ ID NO: 443356 - RNA, 19 nt, Artificial Sequence
  Description of Artificial Sequence: Synthetic oligonucleotide
  Antisense Strand to SEQ ID NO: 443355
caacaucuugacagcaauc

SEQ ID NO: 443357 - RNA, 19 nt, Artificial Sequence
  Description of Artificial Sequence: Synthetic oligonucleotide
  Sense strand starting at position 3761 of SEQ ID NO: 316826
aggcuugacugggucaaga

SEQ ID NO: 443358 - RNA, 19 nt, Artificial Sequence
  Description of Artificial Sequence: Synthetic oligonucleotide
  Antisense Strand to SEQ ID NO: 443357
ucuugacccagucaagccu

SEQ ID NO: 443359 - RNA, 19 nt, Artificial Sequence
  Description of Artificial Sequence: Synthetic oligonucleotide
  Sense strand starting at position 3763 of SEQ ID NO: 316826
gcuugacugggucaagaag

SEQ ID NO: 443360 - RNA, 19 nt, Artificial Sequence
  Description of Artificial Sequence: Synthetic oligonucleotide
  Antisense Strand to SEQ ID NO: 443359
cuucuugacccagucaagc

SEQ ID NO: 443361 - RNA, 19 nt, Artificial Sequence
  Description of Artificial Sequence: Synthetic oligonucleotide
  Sense strand starting at position 3832 of SEQ ID NO: 316826
ccuugucaugaguaccuuu

SEQ ID NO: 443362 - RNA, 19 nt, Artificial Sequence
  Description of Artificial Sequence: Synthetic oligonucleotide
  Antisense Strand to SEQ ID NO: 443361
aaagguacucaugacaagg

SEQ ID NO: 443363 - RNA, 19 nt, Artificial Sequence
  Description of Artificial Sequence: Synthetic oligonucleotide
  Sense strand starting at position 3842 of SEQ ID NO: 316826
aguaccuuuccauagaguu

SEQ ID NO: 443364 - RNA, 19 nt, Artificial Sequence
  Description of Artificial Sequence: Synthetic oligonucleotide
  Antisense Strand to SEQ ID NO: 443363
aacucuauggaaagguacu

SEQ ID NO: 443365 - RNA, 19 nt, Artificial Sequence
  Description of Artificial Sequence: Synthetic oligonucleotide
  Sense strand starting at position 3850 of SEQ ID NO: 316826
uccauagaguugcuuaagu

SEQ ID NO: 443366 - RNA, 19 nt, Artificial Sequence
  Description of Artificial Sequence: Synthetic oligonucleotide
  Antisense Strand to SEQ ID NO: 443365
acuuaagcaacucuaugga

SEQ ID NO: 443367 - RNA, 19 nt, Artificial Sequence
  Description of Artificial Sequence: Synthetic oligonucleotide
  Sense strand starting at position 3852 of SEQ ID NO: 316826
cauagaguugcuuaagugu

SEQ ID NO: 443368 - RNA, 19 nt, Artificial Sequence
  Description of Artificial Sequence: Synthetic oligonucleotide
  Antisense Strand to SEQ ID NO: 443367
acacuuaagcaacucuaug

SEQ ID NO: 443369 - RNA, 19 nt, Artificial Sequence
  Description of Artificial Sequence: Synthetic oligonucleotide
  Sense strand starting at position 3861 of SEQ ID NO: 316826
gcuuaagugucaccaugac

SEQ ID NO: 443370 - RNA, 19 nt, Artificial Sequence
  Description of Artificial Sequence: Synthetic oligonucleotide
  Antisense Strand to SEQ ID NO: 443369
gucauggugacacuuaagc

SEQ ID NO: 443371 - RNA, 19 nt, Artificial Sequence
  Description of Artificial Sequence: Synthetic oligonucleotide
  Sense strand starting at position 3981 of SEQ ID NO: 316826
cauuaaugauggcugauga

SEQ ID NO: 443372 - RNA, 19 nt, Artificial Sequence
  Description of Artificial Sequence: Synthetic oligonucleotide
  Antisense Strand to SEQ ID NO: 443371
ucaucagccaucauuaaug

SEQ ID NO: 443373 - RNA, 19 nt, Artificial Sequence
  Description of Artificial Sequence: Synthetic oligonucleotide
  Sense strand starting at position 3 of SEQ ID NO: 316827
cuucucugugcugauaaga

SEQ ID NO: 443374 - RNA, 19 nt, Artificial Sequence
  Description of Artificial Sequence: Synthetic oligonucleotide
  Antisense Strand to SEQ ID NO: 443373
ucuuaucagcacagagaag

SEQ ID NO: 443375 - RNA, 19 nt, Artificial Sequence
  Description of Artificial Sequence: Synthetic oligonucleotide
  Sense strand starting at position 52 of SEQ ID NO: 316827
ccaaauagucgucccguuu

SEQ ID NO: 443376 - RNA, 19 nt, Artificial Sequence
  Description of Artificial Sequence: Synthetic oligonucleotide
  Antisense Strand to SEQ ID NO: 443375
aaacgggacgacuauuugg

SEQ ID NO: 443377 - RNA, 19 nt, Artificial Sequence
  Description of Artificial Sequence: Synthetic oligonucleotide
  Sense strand starting at position 65 of SEQ ID NO: 316827
ccguuucuugcaggaaacu

SEQ ID NO: 443378 - RNA, 19 nt, Artificial Sequence
  Description of Artificial Sequence: Synthetic oligonucleotide
  Antisense Strand to SEQ ID NO: 443377
aguuuccugcaagaaacgg

SEQ ID NO: 443379 - RNA, 19 nt, Artificial Sequence
  Description of Artificial Sequence: Synthetic oligonucleotide
  Sense strand starting at position 66 of SEQ ID NO: 316827
cguuucuugcaggaaacuu

SEQ ID NO: 443380 - RNA, 19 nt, Artificial Sequence
  Description of Artificial Sequence: Synthetic oligonucleotide
  Antisense Strand to SEQ ID NO: 443379
aaguuuccugcaagaaacg

SEQ ID NO: 443381 - RNA, 19 nt, Artificial Sequence
  Description of Artificial Sequence: Synthetic oligonucleotide
  Sense strand starting at position 85 of SEQ ID NO: 316827
cacucauguugggucuaga

SEQ ID NO: 443382 - RNA, 19 nt, Artificial Sequence
  Description of Artificial Sequence: Synthetic oligonucleotide
  Antisense Strand to SEQ ID NO: 443381
ucuagacccaacaugagug

SEQ ID NO: 443383 - RNA, 19 nt, Artificial Sequence
  Description of Artificial Sequence: Synthetic oligonucleotide
  Sense strand starting at position 88 of SEQ ID NO: 316827
ucauguugggucuagaaga

SEQ ID NO: 443384 - RNA, 19 nt, Artificial Sequence
  Description of Artificial Sequence: Synthetic oligonucleotide
  Antisense Strand to SEQ ID NO: 443383
ucuucuagacccaacauga

SEQ ID NO: 443385 - RNA, 19 nt, Artificial Sequence
  Description of Artificial Sequence: Synthetic oligonucleotide
  Sense strand starting at position 494 of SEQ ID NO: 316827
guuuauacacaucauguca

SEQ ID NO: 443386 - RNA, 19 nt, Artificial Sequence
  Description of Artificial Sequence: Synthetic oligonucleotide
  Antisense Strand to SEQ ID NO: 443385
ugacaugauguguauaaac

SEQ ID NO: 443387 - RNA, 19 nt, Artificial Sequence
  Description of Artificial Sequence: Synthetic oligonucleotide
  Sense strand starting at position 567 of SEQ ID NO: 316827
cagagaacuuagguaacuu

SEQ ID NO: 443388 - RNA, 19 nt, Artificial Sequence
  Description of Artificial Sequence: Synthetic oligonucleotide
  Antisense Strand to SEQ ID NO: 443387
aaguuaccuaaguucucug

SEQ ID NO: 443389 - RNA, 19 nt, Artificial Sequence
  Description of Artificial Sequence: Synthetic oligonucleotide
  Sense strand starting at position 716 of SEQ ID NO: 316827
aguuaucaacuccgaguaa

SEQ ID NO: 443390 - RNA, 19 nt, Artificial Sequence
  Description of Artificial Sequence: Synthetic oligonucleotide
  Antisense Strand to SEQ ID NO: 443389
uuacucggaguugauaacu

SEQ ID NO: 443391 - RNA, 19 nt, Artificial Sequence
  Description of Artificial Sequence: Synthetic oligonucleotide
  Sense strand starting at position 730 of SEQ ID NO: 316827
aguaaugaauuacaugaga

SEQ ID NO: 443392 - RNA, 19 nt, Artificial Sequence
  Description of Artificial Sequence: Synthetic oligonucleotide
  Antisense Strand to SEQ ID NO: 443391
ucucauguaauucauuacu

SEQ ID NO: 443393 - RNA, 19 nt, Artificial Sequence
  Description of Artificial Sequence: Synthetic oligonucleotide
  Sense strand starting at position 735 of SEQ ID NO: 316827
ugaauuacaugagaagaaa

SEQ ID NO: 443394 - RNA, 19 nt, Artificial Sequence
  Description of Artificial Sequence: Synthetic oligonucleotide
  Antisense Strand to SEQ ID NO: 443393
uuucuucucauguaauuca

SEQ ID NO: 443395 - RNA, 19 nt, Artificial Sequence
  Description of Artificial Sequence: Synthetic oligonucleotide
  Sense strand starting at position 933 of SEQ ID NO: 316827
gguggguaccacggagaaa

SEQ ID NO: 443396 - RNA, 19 nt, Artificial Sequence
  Description of Artificial Sequence: Synthetic oligonucleotide
  Antisense Strand to SEQ ID NO: 443395
uuucuccgugguacccacc

SEQ ID NO: 443397 - RNA, 19 nt, Artificial Sequence
  Description of Artificial Sequence: Synthetic oligonucleotide
  Sense strand starting at position 934 of SEQ ID NO: 316827
guggguaccacggagaaau

SEQ ID NO: 443398 - RNA, 19 nt, Artificial Sequence
  Description of Artificial Sequence: Synthetic oligonucleotide
  Antisense Strand to SEQ ID NO: 443397
auuucuccgugguacccac

SEQ ID NO: 443399 - RNA, 19 nt, Artificial Sequence
  Description of Artificial Sequence: Synthetic oligonucleotide
  Sense strand starting at position 964 of SEQ ID NO: 316827
cgaggaauguggucuaaag

SEQ ID NO: 443400 - RNA, 19 nt, Artificial Sequence
  Description of Artificial Sequence: Synthetic oligonucleotide
  Antisense Strand to SEQ ID NO: 443399
cuuuagaccacauuccucg

SEQ ID NO: 443401 - RNA, 19 nt, Artificial Sequence
  Description of Artificial Sequence: Synthetic oligonucleotide
  Sense strand starting at position 1238 of SEQ ID NO: 316827
agaaguaccuacuaaauag

SEQ ID NO: 443402 - RNA, 19 nt, Artificial Sequence
  Description of Artificial Sequence: Synthetic oligonucleotide
  Antisense Strand to SEQ ID NO: 443401
cuauuuaguagguacuucu

SEQ ID NO: 443403 - RNA, 19 nt, Artificial Sequence
  Description of Artificial Sequence: Synthetic oligonucleotide
  Sense strand starting at position 2297 of SEQ ID NO: 316827
uccaucaacugcuuagaga

SEQ ID NO: 443404 - RNA, 19 nt, Artificial Sequence
  Description of Artificial Sequence: Synthetic oligonucleotide
  Antisense Strand to SEQ ID NO: 443403
ucucuaagcaguugaugga

SEQ ID NO: 443405 - RNA, 19 nt, Artificial Sequence
  Description of Artificial Sequence: Synthetic oligonucleotide
  Sense strand starting at position 2319 of SEQ ID NO: 316827
ggcuauggagauugugauu

SEQ ID NO: 443406 - RNA, 19 nt, Artificial Sequence
  Description of Artificial Sequence: Synthetic oligonucleotide
  Antisense Strand to SEQ ID NO: 443405
aaucacaaucuccauagcc

SEQ ID NO: 443407 - RNA, 19 nt, Artificial Sequence
  Description of Artificial Sequence: Synthetic oligonucleotide
  Sense strand starting at position 2322 of SEQ ID NO: 316827
uauggagauugugauuaaa

SEQ ID NO: 443408 - RNA, 19 nt, Artificial Sequence
  Description of Artificial Sequence: Synthetic oligonucleotide
  Antisense Strand to SEQ ID NO: 443407
uuuaaucacaaucuccaua

SEQ ID NO: 443409 - RNA, 19 nt, Artificial Sequence
  Description of Artificial Sequence: Synthetic oligonucleotide
  Sense strand starting at position 2354 of SEQ ID NO: 316827
aaucuagugccgugaaacu

SEQ ID NO: 443410 - RNA, 19 nt, Artificial Sequence
  Description of Artificial Sequence: Synthetic oligonucleotide
  Antisense Strand to SEQ ID NO: 443409
aguuucacggcacuagauu

SEQ ID NO: 443411 - RNA, 19 nt, Artificial Sequence
  Description of Artificial Sequence: Synthetic oligonucleotide
  Sense strand starting at position 2534 of SEQ ID NO: 316827
gugccucgaagcuagauuu

SEQ ID NO: 443412 - RNA, 19 nt, Artificial Sequence
  Description of Artificial Sequence: Synthetic oligonucleotide
  Antisense Strand to SEQ ID NO: 443411
aaaucuagcuucgaggcac

SEQ ID NO: 443413 - RNA, 19 nt, Artificial Sequence
  Description of Artificial Sequence: Synthetic oligonucleotide
  Sense strand starting at position 2578 of SEQ ID NO: 316827
ucaguuucugcucaaauug

SEQ ID NO: 443414 - RNA, 19 nt, Artificial Sequence
  Description of Artificial Sequence: Synthetic oligonucleotide
  Antisense Strand to SEQ ID NO: 443413
caauuugagcagaaacuga

SEQ ID NO: 443415 - RNA, 19 nt, Artificial Sequence
  Description of Artificial Sequence: Synthetic oligonucleotide
  Sense strand starting at position 2675 of SEQ ID NO: 316827
auguuaccuccugguaaug

SEQ ID NO: 443416 - RNA, 19 nt, Artificial Sequence
  Description of Artificial Sequence: Synthetic oligonucleotide
  Antisense Strand to SEQ ID NO: 443415
cauuaccaggagguaacau

SEQ ID NO: 443417 - RNA, 19 nt, Artificial Sequence
  Description of Artificial Sequence: Synthetic oligonucleotide
  Sense strand starting at position 2859 of SEQ ID NO: 316827
gugguucuagcacagagaa

SEQ ID NO: 443418 - RNA, 19 nt, Artificial Sequence
  Description of Artificial Sequence: Synthetic oligonucleotide
  Antisense Strand to SEQ ID NO: 443417
uucucugugcuagaaccac

SEQ ID NO: 443419 - RNA, 19 nt, Artificial Sequence
  Description of Artificial Sequence: Synthetic oligonucleotide
  Sense strand starting at position 2950 of SEQ ID NO: 316827
cuguaauaaucgccaguuc

SEQ ID NO: 443420 - RNA, 19 nt, Artificial Sequence
  Description of Artificial Sequence: Synthetic oligonucleotide
  Antisense Strand to SEQ ID NO: 443419
gaacuggcgauuauuacag

SEQ ID NO: 443421 - RNA, 19 nt, Artificial Sequence
  Description of Artificial Sequence: Synthetic oligonucleotide
  Sense strand starting at position 2951 of SEQ ID NO: 316827
uguaauaaucgccaguucu

SEQ ID NO: 443422 - RNA, 19 nt, Artificial Sequence
  Description of Artificial Sequence: Synthetic oligonucleotide
  Antisense Strand to SEQ ID NO: 443421
agaacuggcgauuauuaca

SEQ ID NO: 443423 - RNA, 19 nt, Artificial Sequence
  Description of Artificial Sequence: Synthetic oligonucleotide
  Sense strand starting at position 3041 of SEQ ID NO: 316827
gaggaagaaugaugagagu

SEQ ID NO: 443424 - RNA, 19 nt, Artificial Sequence
  Description of Artificial Sequence: Synthetic oligonucleotide
  Antisense Strand to SEQ ID NO: 443423
acucucaucauucuuccuc

SEQ ID NO: 443425 - RNA, 19 nt, Artificial Sequence
  Description of Artificial Sequence: Synthetic oligonucleotide
  Sense strand starting at position 3044 of SEQ ID NO: 316827
gaagaaugaugagaguaaa

SEQ ID NO: 443426 - RNA, 19 nt, Artificial Sequence
  Description of Artificial Sequence: Synthetic oligonucleotide
  Antisense Strand to SEQ ID NO: 443425
uuuacucucaucauucuuc

SEQ ID NO: 443427 - RNA, 19 nt, Artificial Sequence
  Description of Artificial Sequence: Synthetic oligonucleotide
  Sense strand starting at position 3055 of SEQ ID NO: 316827
agaguaaacaguugguucu

SEQ ID NO: 443428 - RNA, 19 nt, Artificial Sequence
  Description of Artificial Sequence: Synthetic oligonucleotide
  Antisense Strand to SEQ ID NO: 443427
agaaccaacuguuuacucu

SEQ ID NO: 443429 - RNA, 19 nt, Artificial Sequence
  Description of Artificial Sequence: Synthetic oligonucleotide
  Sense strand starting at position 3056 of SEQ ID NO: 316827
gaguaaacaguugguucua

SEQ ID NO: 443430 - RNA, 19 nt, Artificial Sequence
  Description of Artificial Sequence: Synthetic oligonucleotide
  Antisense Strand to SEQ ID NO: 443429
uagaaccaacuguuuacuc

SEQ ID NO: 443431 - RNA, 19 nt, Artificial Sequence
  Description of Artificial Sequence: Synthetic oligonucleotide
  Sense strand starting at position 3057 of SEQ ID NO: 316827
aguaaacaguugguucuau

SEQ ID NO: 443432 - RNA, 19 nt, Artificial Sequence
  Description of Artificial Sequence: Synthetic oligonucleotide
  Antisense Strand to SEQ ID NO: 443431
auagaaccaacuguuuacu

SEQ ID NO: 443433 - RNA, 19 nt, Artificial Sequence
  Description of Artificial Sequence: Synthetic oligonucleotide
  Sense strand starting at position 3114 of SEQ ID NO: 316827
caugguccagcuuguagau

SEQ ID NO: 443434 - RNA, 19 nt, Artificial Sequence
  Description of Artificial Sequence: Synthetic oligonucleotide
  Antisense Strand to SEQ ID NO: 443433
aucuacaagcuggaccaug

SEQ ID NO: 443435 - RNA, 19 nt, Artificial Sequence
  Description of Artificial Sequence: Synthetic oligonucleotide
  Sense strand starting at position 3508 of SEQ ID NO: 316827
uuccucugcucgguaaaga

SEQ ID NO: 443436 - RNA, 19 nt, Artificial Sequence
  Description of Artificial Sequence: Synthetic oligonucleotide
  Antisense Strand to SEQ ID NO: 443435
ucuuuaccgagcagaggaa

SEQ ID NO: 443437 - RNA, 19 nt, Artificial Sequence
  Description of Artificial Sequence: Synthetic oligonucleotide
  Sense strand starting at position 3516 of SEQ ID NO: 316827
cucgguaaagacugucaua

SEQ ID NO: 443438 - RNA, 19 nt, Artificial Sequence
  Description of Artificial Sequence: Synthetic oligonucleotide
  Antisense Strand to SEQ ID NO: 443437
uaugacagucuuuaccgag

SEQ ID NO: 443439 - RNA, 19 nt, Artificial Sequence
  Description of Artificial Sequence: Synthetic oligonucleotide
  Sense strand starting at position 3777 of SEQ ID NO: 316827
agaaauauauuccuuggua

SEQ ID NO: 443440 - RNA, 19 nt, Artificial Sequence
  Description of Artificial Sequence: Synthetic oligonucleotide
  Antisense Strand to SEQ ID NO: 443439
uaccaaggaauauauuucu

SEQ ID NO: 443441 - RNA, 19 nt, Artificial Sequence
  Description of Artificial Sequence: Synthetic oligonucleotide
  Sense strand starting at position 3789 of SEQ ID NO: 316827
cuugguaugucuuucucau

SEQ ID NO: 443442 - RNA, 19 nt, Artificial Sequence
  Description of Artificial Sequence: Synthetic oligonucleotide
  Antisense Strand to SEQ ID NO: 443441
augagaaagacauaccaag

SEQ ID NO: 443443 - RNA, 19 nt, Artificial Sequence
  Description of Artificial Sequence: Synthetic oligonucleotide
  Sense strand starting at position 3827 of SEQ ID NO: 316827
gugugacuguagguguuaa

SEQ ID NO: 443444 - RNA, 19 nt, Artificial Sequence
  Description of Artificial Sequence: Synthetic oligonucleotide
  Antisense Strand to SEQ ID NO: 443443
uuaacaccuacagucacac

SEQ ID NO: 443445 - RNA, 19 nt, Artificial Sequence
  Description of Artificial Sequence: Synthetic oligonucleotide
  Sense strand starting at position 3828 of SEQ ID NO: 316827
ugugacuguagguguuaaa

SEQ ID NO: 443446 - RNA, 19 nt, Artificial Sequence
  Description of Artificial Sequence: Synthetic oligonucleotide
  Antisense Strand to SEQ ID NO: 443445
uuuaacaccuacagucaca

SEQ ID NO: 443447 - RNA, 19 nt, Artificial Sequence
  Description of Artificial Sequence: Synthetic oligonucleotide
  Sense strand starting at position 3862 of SEQ ID NO: 316827
ccuuguauuugggcuuaua

SEQ ID NO: 443448 - RNA, 19 nt, Artificial Sequence
  Description of Artificial Sequence: Synthetic oligonucleotide
  Antisense Strand to SEQ ID NO: 443447
uauaagcccaaauacaagg

SEQ ID NO: 443449 - RNA, 19 nt, Artificial Sequence
  Description of Artificial Sequence: Synthetic oligonucleotide
  Sense strand starting at position 3871 of SEQ ID NO: 316827
ugggcuuauaauugaggau

SEQ ID NO: 443450 - RNA, 19 nt, Artificial Sequence
  Description of Artificial Sequence: Synthetic oligonucleotide
  Antisense Strand to SEQ ID NO: 443449
auccucaauuauaagccca

SEQ ID NO: 443451 - RNA, 19 nt, Artificial Sequence
  Description of Artificial Sequence: Synthetic oligonucleotide
  Sense strand starting at position 3914 of SEQ ID NO: 316827
gagguuagguauguguuca

SEQ ID NO: 443452 - RNA, 19 nt, Artificial Sequence
  Description of Artificial Sequence: Synthetic oligonucleotide
  Antisense Strand to SEQ ID NO: 443451
ugaacacauaccuaaccuc

SEQ ID NO: 443453 - RNA, 19 nt, Artificial Sequence
  Description of Artificial Sequence: Synthetic oligonucleotide
  Sense strand starting at position 357 of SEQ ID NO: 316828
cggccaucccucuaaggaa

SEQ ID NO: 443454 - RNA, 19 nt, Artificial Sequence
  Description of Artificial Sequence: Synthetic oligonucleotide
  Antisense Strand to SEQ ID NO: 443453
uuccuuagagggauggccg

SEQ ID NO: 443455 - RNA, 19 nt, Artificial Sequence
  Description of Artificial Sequence: Synthetic oligonucleotide
  Sense strand starting at position 427 of SEQ ID NO: 316828
ugcgucacagacuaucaaa

SEQ ID NO: 443456 - RNA, 19 nt, Artificial Sequence
  Description of Artificial Sequence: Synthetic oligonucleotide
  Antisense Strand to SEQ ID NO: 443455
uuugauagucugugacgca

SEQ ID NO: 443457 - RNA, 19 nt, Artificial Sequence
  Description of Artificial Sequence: Synthetic oligonucleotide
  Sense strand starting at position 802 of SEQ ID NO: 316828
cgaaucuggacgugacagu

SEQ ID NO: 443458 - RNA, 19 nt, Artificial Sequence
  Description of Artificial Sequence: Synthetic oligonucleotide
  Antisense Strand to SEQ ID NO: 443457
acugucacguccagauucg

SEQ ID NO: 443459 - RNA, 19 nt, Artificial Sequence
  Description of Artificial Sequence: Synthetic oligonucleotide
  Sense strand starting at position 1094 of SEQ ID NO: 316828
ccucgcuuucccguuacau

SEQ ID NO: 443460 - RNA, 19 nt, Artificial Sequence
  Description of Artificial Sequence: Synthetic oligonucleotide
  Antisense Strand to SEQ ID NO: 443459
auguaacgggaaagcgagg

SEQ ID NO: 443461 - RNA, 19 nt, Artificial Sequence
  Description of Artificial Sequence: Synthetic oligonucleotide
  Sense strand starting at position 1095 of SEQ ID NO: 316828
cucgcuuucccguuacauc

SEQ ID NO: 443462 - RNA, 19 nt, Artificial Sequence
  Description of Artificial Sequence: Synthetic oligonucleotide
  Antisense Strand to SEQ ID NO: 443461
gauguaacgggaaagcgag

SEQ ID NO: 443463 - RNA, 19 nt, Artificial Sequence
  Description of Artificial Sequence: Synthetic oligonucleotide
  Sense strand starting at position 1096 of SEQ ID NO: 316828
ucgcuuucccguuacauca

SEQ ID NO: 443464 - RNA, 19 nt, Artificial Sequence
  Description of Artificial Sequence: Synthetic oligonucleotide
  Antisense Strand to SEQ ID NO: 443463
ugauguaacgggaaagcga

SEQ ID NO: 443465 - RNA, 19 nt, Artificial Sequence
  Description of Artificial Sequence: Synthetic oligonucleotide
  Sense strand starting at position 2238 of SEQ ID NO: 316828
cgcgaaguguuucccaaag

SEQ ID NO: 443466 - RNA, 19 nt, Artificial Sequence
  Description of Artificial Sequence: Synthetic oligonucleotide
  Antisense Strand to SEQ ID NO: 443465
cuuugggaaacacuucgcg

SEQ ID NO: 443467 - RNA, 19 nt, Artificial Sequence
  Description of Artificial Sequence: Synthetic oligonucleotide
  Sense strand starting at position 2359 of SEQ ID NO: 316828
ccacuugucccacgacacu

SEQ ID NO: 443468 - RNA, 19 nt, Artificial Sequence
  Description of Artificial Sequence: Synthetic oligonucleotide
  Antisense Strand to SEQ ID NO: 443467
agugucgugggacaagugg

SEQ ID NO: 443469 - RNA, 19 nt, Artificial Sequence
  Description of Artificial Sequence: Synthetic oligonucleotide
  Sense strand starting at position 2368 of SEQ ID NO: 316828
ccacgacacuuguccaguu

SEQ ID NO: 443470 - RNA, 19 nt, Artificial Sequence
  Description of Artificial Sequence: Synthetic oligonucleotide
  Antisense Strand to SEQ ID NO: 443469
aacuggacaagugucgugg

SEQ ID NO: 443471 - RNA, 19 nt, Artificial Sequence
  Description of Artificial Sequence: Synthetic oligonucleotide
  Sense strand starting at position 2446 of SEQ ID NO: 316828
uuaagaauugccgcgucuu

SEQ ID NO: 443472 - RNA, 19 nt, Artificial Sequence
  Description of Artificial Sequence: Synthetic oligonucleotide
  Antisense Strand to SEQ ID NO: 443471
aagacgcggcaauucuuaa

SEQ ID NO: 443473 - RNA, 19 nt, Artificial Sequence
  Description of Artificial Sequence: Synthetic oligonucleotide
  Sense strand starting at position 2449 of SEQ ID NO: 316828
agaauugccgcgucuuaau

SEQ ID NO: 443474 - RNA, 19 nt, Artificial Sequence
  Description of Artificial Sequence: Synthetic oligonucleotide
  Antisense Strand to SEQ ID NO: 443473
auuaagacgcggcaauucu

SEQ ID NO: 443475 - RNA, 19 nt, Artificial Sequence
  Description of Artificial Sequence: Synthetic oligonucleotide
  Sense strand starting at position 2458 of SEQ ID NO: 316828
gcgucuuaauuuccagcaa

SEQ ID NO: 443476 - RNA, 19 nt, Artificial Sequence
  Description of Artificial Sequence: Synthetic oligonucleotide
  Antisense Strand to SEQ ID NO: 443475
uugcuggaaauuaagacgc

SEQ ID NO: 443477 - RNA, 19 nt, Artificial Sequence
  Description of Artificial Sequence: Synthetic oligonucleotide
  Sense strand starting at position 2459 of SEQ ID NO: 316828
cgucuuaauuuccagcaaa

SEQ ID NO: 443478 - RNA, 19 nt, Artificial Sequence
  Description of Artificial Sequence: Synthetic oligonucleotide
  Antisense Strand to SEQ ID NO: 443477
uuugcuggaaauuaagacg

SEQ ID NO: 443479 - RNA, 19 nt, Artificial Sequence
  Description of Artificial Sequence: Synthetic oligonucleotide
  Sense strand starting at position 2498 of SEQ ID NO: 316828
uuccauuucuccuacgaag

SEQ ID NO: 443480 - RNA, 19 nt, Artificial Sequence
  Description of Artificial Sequence: Synthetic oligonucleotide
  Antisense Strand to SEQ ID NO: 443479
cuucguaggagaaauggaa

SEQ ID NO: 443481 - RNA, 19 nt, Artificial Sequence
  Description of Artificial Sequence: Synthetic oligonucleotide
  Sense strand starting at position 2562 of SEQ ID NO: 316828
cgcauacuuguuucgcaga

SEQ ID NO: 443482 - RNA, 19 nt, Artificial Sequence
  Description of Artificial Sequence: Synthetic oligonucleotide
  Antisense Strand to SEQ ID NO: 443481
ucugcgaaacaaguaugcg

SEQ ID NO: 443483 - RNA, 19 nt, Artificial Sequence
  Description of Artificial Sequence: Synthetic oligonucleotide
  Sense strand starting at position 2564 of SEQ ID NO: 316828
cauacuuguuucgcagagu

SEQ ID NO: 443484 - RNA, 19 nt, Artificial Sequence
  Description of Artificial Sequence: Synthetic oligonucleotide
  Antisense Strand to SEQ ID NO: 443483
acucugcgaaacaaguaug

SEQ ID NO: 443485 - RNA, 19 nt, Artificial Sequence
  Description of Artificial Sequence: Synthetic oligonucleotide
  Sense strand starting at position 2602 of SEQ ID NO: 316828
agucacuaaugucuguuaa

SEQ ID NO: 443486 - RNA, 19 nt, Artificial Sequence
  Description of Artificial Sequence: Synthetic oligonucleotide
  Antisense Strand to SEQ ID NO: 443485
uuaacagacauuagugacu

SEQ ID NO: 443487 - RNA, 19 nt, Artificial Sequence
  Description of Artificial Sequence: Synthetic oligonucleotide
  Sense strand starting at position 2603 of SEQ ID NO: 316828
gucacuaaugucuguuaaa

SEQ ID NO: 443488 - RNA, 19 nt, Artificial Sequence
  Description of Artificial Sequence: Synthetic oligonucleotide
  Antisense Strand to SEQ ID NO: 443487
uuuaacagacauuagugac

SEQ ID NO: 443489 - RNA, 19 nt, Artificial Sequence
  Description of Artificial Sequence: Synthetic oligonucleotide
  Sense strand starting at position 2604 of SEQ ID NO: 316828
ucacuaaugucuguuaaag

SEQ ID NO: 443490 - RNA, 19 nt, Artificial Sequence
  Description of Artificial Sequence: Synthetic oligonucleotide
  Antisense Strand to SEQ ID NO: 443489
cuuuaacagacauuaguga

SEQ ID NO: 443491 - RNA, 19 nt, Artificial Sequence
  Description of Artificial Sequence: Synthetic oligonucleotide
  Sense strand starting at position 2626 of SEQ ID NO: 316828
cuucgaaugccacgagcau

SEQ ID NO: 443492 - RNA, 19 nt, Artificial Sequence
  Description of Artificial Sequence: Synthetic oligonucleotide
  Antisense Strand to SEQ ID NO: 443491
augcucguggcauucgaag

SEQ ID NO: 443493 - RNA, 19 nt, Artificial Sequence
  Description of Artificial Sequence: Synthetic oligonucleotide
  Sense strand starting at position 2627 of SEQ ID NO: 316828
uucgaaugccacgagcauu

SEQ ID NO: 443494 - RNA, 19 nt, Artificial Sequence
  Description of Artificial Sequence: Synthetic oligonucleotide
  Antisense Strand to SEQ ID NO: 443493
aaugcucguggcauucgaa

SEQ ID NO: 443495 - RNA, 19 nt, Artificial Sequence
  Description of Artificial Sequence: Synthetic oligonucleotide
  Sense strand starting at position 2819 of SEQ ID NO: 316828
aauugaaacuggcuguuau

SEQ ID NO: 443496 - RNA, 19 nt, Artificial Sequence
  Description of Artificial Sequence: Synthetic oligonucleotide
  Antisense Strand to SEQ ID NO: 443495
auaacagccaguuucaauu

SEQ ID NO: 443497 - RNA, 19 nt, Artificial Sequence
  Description of Artificial Sequence: Synthetic oligonucleotide
  Sense strand starting at position 2820 of SEQ ID NO: 316828
auugaaacuggcuguuauu

SEQ ID NO: 443498 - RNA, 19 nt, Artificial Sequence
  Description of Artificial Sequence: Synthetic oligonucleotide
  Antisense Strand to SEQ ID NO: 443497
aauaacagccaguuucaau

SEQ ID NO: 443499 - RNA, 19 nt, Artificial Sequence
  Description of Artificial Sequence: Synthetic oligonucleotide
  Sense strand starting at position 2827 of SEQ ID NO: 316828
cuggcuguuauuuggcaga

SEQ ID NO: 443500 - RNA, 19 nt, Artificial Sequence
  Description of Artificial Sequence: Synthetic oligonucleotide
  Antisense Strand to SEQ ID NO: 443499
ucugccaaauaacagccag

SEQ ID NO: 443501 - RNA, 19 nt, Artificial Sequence
  Description of Artificial Sequence: Synthetic oligonucleotide
  Sense strand starting at position 2840 of SEQ ID NO: 316828
ggcagagggagacguuaau

SEQ ID NO: 443502 - RNA, 19 nt, Artificial Sequence
  Description of Artificial Sequence: Synthetic oligonucleotide
  Antisense Strand to SEQ ID NO: 443501
auuaacgucucccucugcc

SEQ ID NO: 443503 - RNA, 19 nt, Artificial Sequence
  Description of Artificial Sequence: Synthetic oligonucleotide
  Sense strand starting at position 2882 of SEQ ID NO: 316828
agucaagaauucgcaccau

SEQ ID NO: 443504 - RNA, 19 nt, Artificial Sequence
  Description of Artificial Sequence: Synthetic oligonucleotide
  Antisense Strand to SEQ ID NO: 443503
auggugcgaauucuugacu

SEQ ID NO: 443505 - RNA, 19 nt, Artificial Sequence
  Description of Artificial Sequence: Synthetic oligonucleotide
  Sense strand starting at position 2953 of SEQ ID NO: 316828
gcauuaugguaacagaaca

SEQ ID NO: 443506 - RNA, 19 nt, Artificial Sequence
  Description of Artificial Sequence: Synthetic oligonucleotide
  Antisense Strand to SEQ ID NO: 443505
uguucuguuaccauaaugc

SEQ ID NO: 443507 - RNA, 19 nt, Artificial Sequence
  Description of Artificial Sequence: Synthetic oligonucleotide
  Sense strand starting at position 2966 of SEQ ID NO: 316828
agaacaauauuucgagaua

SEQ ID NO: 443508 - RNA, 19 nt, Artificial Sequence
  Description of Artificial Sequence: Synthetic oligonucleotide
  Antisense Strand to SEQ ID NO: 443507
uaucucgaaauauuguucu

SEQ ID NO: 443509 - RNA, 19 nt, Artificial Sequence
  Description of Artificial Sequence: Synthetic oligonucleotide
  Sense strand starting at position 2978 of SEQ ID NO: 316828
cgagauauuaacggaggau

SEQ ID NO: 443510 - RNA, 19 nt, Artificial Sequence
  Description of Artificial Sequence: Synthetic oligonucleotide
  Antisense Strand to SEQ ID NO: 443509
auccuccguuaauaucucg

SEQ ID NO: 443511 - RNA, 19 nt, Artificial Sequence
  Description of Artificial Sequence: Synthetic oligonucleotide
  Sense strand starting at position 3203 of SEQ ID NO: 316828
guuuccaggcucugaaauu

SEQ ID NO: 443512 - RNA, 19 nt, Artificial Sequence
  Description of Artificial Sequence: Synthetic oligonucleotide
  Antisense Strand to SEQ ID NO: 443511
aauuucagagccuggaaac

SEQ ID NO: 443513 - RNA, 19 nt, Artificial Sequence
  Description of Artificial Sequence: Synthetic oligonucleotide
  Sense strand starting at position 3292 of SEQ ID NO: 316828
acagcacucccaugguaaa

SEQ ID NO: 443514 - RNA, 19 nt, Artificial Sequence
  Description of Artificial Sequence: Synthetic oligonucleotide
  Antisense Strand to SEQ ID NO: 443513
uuuaccaugggagugcugu

SEQ ID NO: 443515 - RNA, 19 nt, Artificial Sequence
  Description of Artificial Sequence: Synthetic oligonucleotide
  Sense strand starting at position 3421 of SEQ ID NO: 316828
ucagaacuguaccugaagu

SEQ ID NO: 443516 - RNA, 19 nt, Artificial Sequence
  Description of Artificial Sequence: Synthetic oligonucleotide
  Antisense Strand to SEQ ID NO: 443515
acuucagguacaguucuga

SEQ ID NO: 443517 - RNA, 19 nt, Artificial Sequence
  Description of Artificial Sequence: Synthetic oligonucleotide
  Sense strand starting at position 3459 of SEQ ID NO: 316828
guucuuucgcaagacaaga

SEQ ID NO: 443518 - RNA, 19 nt, Artificial Sequence
  Description of Artificial Sequence: Synthetic oligonucleotide
  Antisense Strand to SEQ ID NO: 443517
ucuugucuugcgaaagaac

SEQ ID NO: 443519 - RNA, 19 nt, Artificial Sequence
  Description of Artificial Sequence: Synthetic oligonucleotide
  Sense strand starting at position 3554 of SEQ ID NO: 316828
accucuggacucugagaua

SEQ ID NO: 443520 - RNA, 19 nt, Artificial Sequence
  Description of Artificial Sequence: Synthetic oligonucleotide
  Antisense Strand to SEQ ID NO: 443519
uaucucagaguccagaggu

SEQ ID NO: 443521 - RNA, 19 nt, Artificial Sequence
  Description of Artificial Sequence: Synthetic oligonucleotide
  Sense strand starting at position 3601 of SEQ ID NO: 316828
guaagaauauccgcccuua

SEQ ID NO: 443522 - RNA, 19 nt, Artificial Sequence
  Description of Artificial Sequence: Synthetic oligonucleotide
  Antisense Strand to SEQ ID NO: 443521
uaagggcggauauucuuac

SEQ ID NO: 443523 - RNA, 19 nt, Artificial Sequence
  Description of Artificial Sequence: Synthetic oligonucleotide
  Sense strand starting at position 3813 of SEQ ID NO: 316828
aagggcuuccuucgugaca

SEQ ID NO: 443524 - RNA, 19 nt, Artificial Sequence
  Description of Artificial Sequence: Synthetic oligonucleotide
  Antisense Strand to SEQ ID NO: 443523
ugucacgaaggaagcccuu

SEQ ID NO: 443525 - RNA, 19 nt, Artificial Sequence
  Description of Artificial Sequence: Synthetic oligonucleotide
  Sense strand starting at position 3824 of SEQ ID NO: 316828
ucgugacaccucuaaauua

SEQ ID NO: 443526 - RNA, 19 nt, Artificial Sequence
  Description of Artificial Sequence: Synthetic oligonucleotide
  Antisense Strand to SEQ ID NO: 443525
uaauuuagaggugucacga

SEQ ID NO: 443527 - RNA, 19 nt, Artificial Sequence
  Description of Artificial Sequence: Synthetic oligonucleotide
  Sense strand starting at position 3866 of SEQ ID NO: 316828
gcuagucauuugcucuauu

SEQ ID NO: 443528 - RNA, 19 nt, Artificial Sequence
  Description of Artificial Sequence: Synthetic oligonucleotide
  Antisense Strand to SEQ ID NO: 443527
aauagagcaaaugacuagc

SEQ ID NO: 443529 - RNA, 19 nt, Artificial Sequence
  Description of Artificial Sequence: Synthetic oligonucleotide
  Sense strand starting at position 3867 of SEQ ID NO: 316828
cuagucauuugcucuauua

SEQ ID NO: 443530 - RNA, 19 nt, Artificial Sequence
  Description of Artificial Sequence: Synthetic oligonucleotide
  Antisense Strand to SEQ ID NO: 443529
uaauagagcaaaugacuag

SEQ ID NO: 443531 - RNA, 19 nt, Artificial Sequence
  Description of Artificial Sequence: Synthetic oligonucleotide
  Sense strand starting at position 3914 of SEQ ID NO: 316828
guguauaagaguuaagcua

SEQ ID NO: 443532 - RNA, 19 nt, Artificial Sequence
  Description of Artificial Sequence: Synthetic oligonucleotide
  Antisense Strand to SEQ ID NO: 443531
uagcuuaacucuuauacac

SEQ ID NO: 443533 - RNA, 19 nt, Artificial Sequence
  Description of Artificial Sequence: Synthetic oligonucleotide
  Sense strand starting at position 2 of SEQ ID NO: 316829
uggugaaggaugugacguu

SEQ ID NO: 443534 - RNA, 19 nt, Artificial Sequence
  Description of Artificial Sequence: Synthetic oligonucleotide
  Antisense Strand to SEQ ID NO: 443533
aacgucacauccuucacca

SEQ ID NO: 443535 - RNA, 19 nt, Artificial Sequence
  Description of Artificial Sequence: Synthetic oligonucleotide
  Sense strand starting at position 21 of SEQ ID NO: 316829
uagggagucuacuuaugga

SEQ ID NO: 443536 - RNA, 19 nt, Artificial Sequence
  Description of Artificial Sequence: Synthetic oligonucleotide
  Antisense Strand to SEQ ID NO: 443535
uccauaaguagacucccua

SEQ ID NO: 443537 - RNA, 19 nt, Artificial Sequence
  Description of Artificial Sequence: Synthetic oligonucleotide
  Sense strand starting at position 39 of SEQ ID NO: 316829
agaggaagguuucuaguau

SEQ ID NO: 443538 - RNA, 19 nt, Artificial Sequence
  Description of Artificial Sequence: Synthetic oligonucleotide
  Antisense Strand to SEQ ID NO: 443537
auacuagaaaccuuccucu

SEQ ID NO: 443539 - RNA, 19 nt, Artificial Sequence
  Description of Artificial Sequence: Synthetic oligonucleotide
  Sense strand starting at position 114 of SEQ ID NO: 316829
gucuuaugguucuccacuu

SEQ ID NO: 443540 - RNA, 19 nt, Artificial Sequence
  Description of Artificial Sequence: Synthetic oligonucleotide
  Antisense Strand to SEQ ID NO: 443539
aaguggagaaccauaagac

SEQ ID NO: 443541 - RNA, 19 nt, Artificial Sequence
  Description of Artificial Sequence: Synthetic oligonucleotide
  Sense strand starting at position 161 of SEQ ID NO: 316829
uuuccaagcuucuucgaaa

SEQ ID NO: 443542 - RNA, 19 nt, Artificial Sequence
  Description of Artificial Sequence: Synthetic oligonucleotide
  Antisense Strand to SEQ ID NO: 443541
uuucgaagaagcuuggaaa

SEQ ID NO: 443543 - RNA, 19 nt, Artificial Sequence
  Description of Artificial Sequence: Synthetic oligonucleotide
  Sense strand starting at position 307 of SEQ ID NO: 316829
uuauauuaucguuacaagg

SEQ ID NO: 443544 - RNA, 19 nt, Artificial Sequence
  Description of Artificial Sequence: Synthetic oligonucleotide
  Antisense Strand to SEQ ID NO: 443543
ccuuguaacgauaauauaa

SEQ ID NO: 443545 - RNA, 19 nt, Artificial Sequence
  Description of Artificial Sequence: Synthetic oligonucleotide
  Sense strand starting at position 336 of SEQ ID NO: 316829
ccuccacuguguucucaua

SEQ ID NO: 443546 - RNA, 19 nt, Artificial Sequence
  Description of Artificial Sequence: Synthetic oligonucleotide
  Antisense Strand to SEQ ID NO: 443545
uaugagaacacaguggagg

SEQ ID NO: 443547 - RNA, 19 nt, Artificial Sequence
  Description of Artificial Sequence: Synthetic oligonucleotide
  Sense strand starting at position 338 of SEQ ID NO: 316829
uccacuguguucucauauu

SEQ ID NO: 443548 - RNA, 19 nt, Artificial Sequence
  Description of Artificial Sequence: Synthetic oligonucleotide
  Antisense Strand to SEQ ID NO: 443547
aauaugagaacacagugga

SEQ ID NO: 443549 - RNA, 19 nt, Artificial Sequence
  Description of Artificial Sequence: Synthetic oligonucleotide
  Sense strand starting at position 344 of SEQ ID NO: 316829
guguucucauauuuaugca

SEQ ID NO: 443550 - RNA, 19 nt, Artificial Sequence
  Description of Artificial Sequence: Synthetic oligonucleotide
  Antisense Strand to SEQ ID NO: 443549
ugcauaaauaugagaacac

SEQ ID NO: 443551 - RNA, 19 nt, Artificial Sequence
  Description of Artificial Sequence: Synthetic oligonucleotide
  Sense strand starting at position 420 of SEQ ID NO: 316829
ucuaaaggcugcuuuacau

SEQ ID NO: 443552 - RNA, 19 nt, Artificial Sequence
  Description of Artificial Sequence: Synthetic oligonucleotide
  Antisense Strand to SEQ ID NO: 443551
auguaaagcagccuuuaga

SEQ ID NO: 443553 - RNA, 19 nt, Artificial Sequence
  Description of Artificial Sequence: Synthetic oligonucleotide
  Sense strand starting at position 936 of SEQ ID NO: 316829
cggccaucccucuaaggaa

SEQ ID NO: 443554 - RNA, 19 nt, Artificial Sequence
  Description of Artificial Sequence: Synthetic oligonucleotide
  Antisense Strand to SEQ ID NO: 443553
uuccuuagagggauggccg

SEQ ID NO: 443555 - RNA, 19 nt, Artificial Sequence
  Description of Artificial Sequence: Synthetic oligonucleotide
  Sense strand starting at position 1006 of SEQ ID NO: 316829
ugcgucacagacuaucaaa

SEQ ID NO: 443556 - RNA, 19 nt, Artificial Sequence
  Description of Artificial Sequence: Synthetic oligonucleotide
  Antisense Strand to SEQ ID NO: 443555
uuugauagucugugacgca

SEQ ID NO: 443557 - RNA, 19 nt, Artificial Sequence
  Description of Artificial Sequence: Synthetic oligonucleotide
  Sense strand starting at position 1381 of SEQ ID NO: 316829
cgaaucuggacgugacagu

SEQ ID NO: 443558 - RNA, 19 nt, Artificial Sequence
  Description of Artificial Sequence: Synthetic oligonucleotide
  Antisense Strand to SEQ ID NO: 443557
acugucacguccagauucg

SEQ ID NO: 443559 - RNA, 19 nt, Artificial Sequence
  Description of Artificial Sequence: Synthetic oligonucleotide
  Sense strand starting at position 1673 of SEQ ID NO: 316829
ccucgcuuucccguuacau

SEQ ID NO: 443560 - RNA, 19 nt, Artificial Sequence
  Description of Artificial Sequence: Synthetic oligonucleotide
  Antisense Strand to SEQ ID NO: 443559
auguaacgggaaagcgagg

SEQ ID NO: 443561 - RNA, 19 nt, Artificial Sequence
  Description of Artificial Sequence: Synthetic oligonucleotide
  Sense strand starting at position 1674 of SEQ ID NO: 316829
cucgcuuucccguuacauc

SEQ ID NO: 443562 - RNA, 19 nt, Artificial Sequence
  Description of Artificial Sequence: Synthetic oligonucleotide
  Antisense Strand to SEQ ID NO: 443561
gauguaacgggaaagcgag

SEQ ID NO: 443563 - RNA, 19 nt, Artificial Sequence
  Description of Artificial Sequence: Synthetic oligonucleotide
  Sense strand starting at position 1675 of SEQ ID NO: 316829
ucgcuuucccguuacauca

SEQ ID NO: 443564 - RNA, 19 nt, Artificial Sequence
  Description of Artificial Sequence: Synthetic oligonucleotide
  Antisense Strand to SEQ ID NO: 443563
ugauguaacgggaaagcga

SEQ ID NO: 443565 - RNA, 19 nt, Artificial Sequence
  Description of Artificial Sequence: Synthetic oligonucleotide
  Sense strand starting at position 2817 of SEQ ID NO: 316829
cgcgaaguguuucccaaag

SEQ ID NO: 443566 - RNA, 19 nt, Artificial Sequence
  Description of Artificial Sequence: Synthetic oligonucleotide
  Antisense Strand to SEQ ID NO: 443565
cuuugggaaacacuucgcg

SEQ ID NO: 443567 - RNA, 19 nt, Artificial Sequence
  Description of Artificial Sequence: Synthetic oligonucleotide
  Sense strand starting at position 2938 of SEQ ID NO: 316829
ccacuugucccacgacacu

SEQ ID NO: 443568 - RNA, 19 nt, Artificial Sequence
  Description of Artificial Sequence: Synthetic oligonucleotide
  Antisense Strand to SEQ ID NO: 443567
agugucgugggacaagugg

SEQ ID NO: 443569 - RNA, 19 nt, Artificial Sequence
  Description of Artificial Sequence: Synthetic oligonucleotide
  Sense strand starting at position 2947 of SEQ ID NO: 316829
ccacgacacuuguccaguu

SEQ ID NO: 443570 - RNA, 19 nt, Artificial Sequence
  Description of Artificial Sequence: Synthetic oligonucleotide
  Antisense Strand to SEQ ID NO: 443569
aacuggacaagugucgugg

SEQ ID NO: 443571 - RNA, 19 nt, Artificial Sequence
  Description of Artificial Sequence: Synthetic oligonucleotide
  Sense strand starting at position 3025 of SEQ ID NO: 316829
uuaagaauugccgcgucuu

SEQ ID NO: 443572 - RNA, 19 nt, Artificial Sequence
  Description of Artificial Sequence: Synthetic oligonucleotide
  Antisense Strand to SEQ ID NO: 443571
aagacgcggcaauucuuaa

SEQ ID NO: 443573 - RNA, 19 nt, Artificial Sequence
  Description of Artificial Sequence: Synthetic oligonucleotide
  Sense strand starting at position 3028 of SEQ ID NO: 316829
agaauugccgcgucuuaau

SEQ ID NO: 443574 - RNA, 19 nt, Artificial Sequence
  Description of Artificial Sequence: Synthetic oligonucleotide
  Antisense Strand to SEQ ID NO: 443573
auuaagacgcggcaauucu

SEQ ID NO: 443575 - RNA, 19 nt, Artificial Sequence
  Description of Artificial Sequence: Synthetic oligonucleotide
  Sense strand starting at position 3037 of SEQ ID NO: 316829
gcgucuuaauuuccagcaa

SEQ ID NO: 443576 - RNA, 19 nt, Artificial Sequence
  Description of Artificial Sequence: Synthetic oligonucleotide
  Antisense Strand to SEQ ID NO: 443575
uugcuggaaauuaagacgc

SEQ ID NO: 443577 - RNA, 19 nt, Artificial Sequence
  Description of Artificial Sequence: Synthetic oligonucleotide
  Sense strand starting at position 3038 of SEQ ID NO: 316829
cgucuuaauuuccagcaaa

SEQ ID NO: 443578 - RNA, 19 nt, Artificial Sequence
  Description of Artificial Sequence: Synthetic oligonucleotide
  Antisense Strand to SEQ ID NO: 443577
uuugcuggaaauuaagacg
